United States Patent Application Publication US 2026/0191920 A1 - sequence listing, part 13

SEQ ID NO: 59693 - protein, 377 aa, Pseudomonas lini
  REGION 1..377: note = tr|A0A0J6HH24|A0A0J6HH24_9PSED Queuine tRNA-ribosyltransferase OS=Pseudomonas lini OX=163011; GN = tgt PE=3 SV=1
MSRQSRMSFELLATDGKARRGRLTFPRGTVETPAFMPVGTYGTVKGMLPRDITATGAEIILGNTFHLWLRPGTEVIKKHGDLHDFMQWKGPILTDSGGFQVFSLGAMRKIKEEGVTFASPVDGAKVFMGPEESMQVQRDLGSDIVMIFDECTPYPADEDVARVSMELSLRWAQRSKNAHGDNTAALFGIVQGGMHQDLRMRSLEGLDKIGFDGLAIGGLSVGEPKHEMIKVLDYLPGQMPADKPRYLMGVGKPEDLVEGVRRGVDMFDCVMPTRNARNGHLFIDTGVLKIRNAFHRHDDSPLDPTCDCYTCQNFSRAYLHHLDKCGEMLGSMLNTIHNLRHYQVLMAGLREAIQQGTLAAFVDAFYAKRGLPVPPLD

SEQ ID NO: 59694 - protein, 377 aa, Pseudomonas lini
  REGION 1..377: note = tr|A0A423IUQ0|A0A423IUQ0_9PSED Queuine tRNA-ribosyltransferase OS=Pseudomonas lini OX=163011; GN = tgt PE=3 SV=1
MSRTSRMSFELLATDGKARRGRLTFPRGTVETPAFMPVGTYGTVKGMLPRDIVATGAEIILGNTFHLWLRPGTEVIKKHGDLHDFMQWKGPILTDSGGFQVFSLGAMRKIKEEGVTFASPVDGAKVFMGPEESMQVQRDLGSDIVMIFDECTPYPADEDVARVSMELSLRWAKRSKEAHGDNTAALFGIVQGGMHQDLRMRSLEGLDKIGFDGLAIGGLSVGEPKHEMIKVLDYLPGQMPADKPRYLMGVGKPEDLVEGVRRGVDMFDCVMPTRNARNGHLFIDTGVLKIRNAFHRHDDSPLDPTCDCYTCQNFSRAYLHHLDKCGEMLGSMLNTIHNLRHYQVLMAGLRESIQQGTLAAFVDAFYAKRGLPVPPLD

SEQ ID NO: 59695 - protein, 374 aa, unidentified
  source 1..374: note = Pseudomonas linyingensis
  REGION 1..374: note = tr|A0A1H6S064|A0A1H6S064_9PSED Queuine tRNA-ribosyltransferase OS=Pseudomonas linyingensis; OX = 915471 GN=tgt PE=3 SV=1
MSHMSFELLATDGKARRGRLTFPRGVVETPAFMPVGTYGTVKGMLPRDIEEIGAQIILGNTFHLWLRPGTEVIKKHGDLHDFMQWQGPILTDSGGFQVFSLGAMRKIKEEGVYFASPVDGAKVFMGPEESMQVQRDLGSDIVMIFDECTPYPADFDTARRSMELSQRWAKRSKVAHEGNPAALFGIVQGGMHEELRLRSLEGLLEIGFDGLAIGGLSVGEPKEDMIRILDFLPPHLPADKPRYLMGVGKPEDLVEGVRRGIDMFDCVMPTRNARNGHLFTDTGVIKIRNAVHKHDDSPLDPTCDCYTCRNFSRAYLHHLDKCGEMLGSMLNTIHNLRHYQRLMAGLRDAIGQGTLPAFVADFYARRGLPVPPLS

SEQ ID NO: 59696 - protein, 375 aa, Pseudomonas litoralis
  REGION 1..375: note = tr|A0A1H1UKJ5|A0A1H1UKJ5_9PSED Queuine tRNA-ribosyltransferase OS=Pseudomonas litoralis OX=797277; GN = tgt PE=3 SV=1
MSHMNFELLATDGKARRGRLTFPRGVVETPAFMPVGTYGTVKGMLPRDVEDIGAQIILGNTFHLWLRPGTEVIRKHGDLHDFMQWQGPILTDSGGFQVFSLGAMRKIKEEGVYFSSPVDGAKVFMGPEESMQVQRDLGSDIVMIFDECTPYPADLDTARRSMELSLRWAQRSKAAHEGNPSALFGIVQGGMHEELRARSLDGLCEIGFDGLAIGGLSVGEPKEDMIRILDYLPPLMPPEKPRYLMGVGKPEDLVEGVRRGVDMFDCVMPTRNARNGHLFTDTGVVKIRNAVHRHDDSPLDPGCDCYTCRHFTRSYLHHLDKCGEMLGSMLNTIHNLRHYQRVMHGLRGAIQQGTLTAFVDNFYARLGQPVPPLEA

SEQ ID NO: 59697 - protein, 371 aa, Pseudomonas lundensis
  REGION 1..371: note = tr|A0A266NC00|A0A266NC00_9PSED Queuine tRNA-ribosyltransferase OS=Pseudomonas lundensis OX=86185; GN = tgt PE=3 SV=1
MSFELLATDGKARRGRLTFPRGVVETPAFMPVGTYGTVKGMLPRDIEAIGAQMILGNTFHLWLRPGTEVIKKHGDLHDFMKWQGPILTDSGGFQVFSLGAMRKIKEEGVTFASPVDGAKVFMGPEESMQVQRDLGSDVVMIFDECTPYPADEDVARVSMELSLRWAQRSKNAHGDNTAALFGIVQGGMHQNLRERSLEGLNKIGFDGLAIGGLSVGEPKHEMIKVLDYLPAMMPADKPRYLMGVGKPEDLVEGVRRGVDMFDCVMPTRNARNGHLFIDTGVLKIRNAFHRHDDSPLDPTCDCYTCQNFSRAYLHHLDKCGEMLGSMLNTIHNLRHYQVLMAGLREAIQQGTLAAFVDAFYAKRGLPVPPLD

SEQ ID NO: 59698 - protein, 376 aa, Pseudomonas lundensis
  REGION 1..376: note = tr|A0A1D9IJD9|A0A1D9IJD9_9PSED Queuine tRNA-ribosyltransferase OS=Pseudomonas lundensis OX=86185; GN = tgt PE=3 SV=1
MSNCRMSFELLATDGKARRGRLTFPRGVVETPAFMPVGTYGTVKGMLPRDIEAIGAQMILGNTFHLWLRPGTEVIKKHGDLHDFMKWQGPILTDSGGFQVFSLGAMRKIKEEGVTFASPVDGAKVFMGPEESMQVQRDLGSDVVMIFDECTPYPADEDVARVSMELSLRWAQRSKNAHGDNTAALFGIVQGGMHQNLRERSLEGLNKIGFDGLAIGGLSVGEPKHEMIKVLDYLPAMMPADKPRYLMGVGKPEDLVEGVRRGVDMFDCVMPTRNARNGHLFIDTGVLKIRNAFHRHDDSPLDPTCDCYTCQNFSRAYLHHLDKCGEMLGSMLNTIHNLRHYQVLMAGLREAIQQGTLAAFVDAFYAKRGLPVPPLD

SEQ ID NO: 59699 - protein, 374 aa, Pseudomonas lurida; identical to SEQ ID NO: 59578
  REGION 1..374: note = tr|A0A2A9DHT6|A0A2A9DHT6_9PSED Queuine tRNA-ribosyltransferase OS=Pseudomonas lurida OX=244566; GN = tgt PE=3 SV=1

SEQ ID NO: 59700 - protein, 371 aa, Pseudomonas lutea
  REGION 1..371: note = tr|A0A098T2V3|A0A098T2V3_9PSED Queuine tRNA-ribosyltransferase OS=Pseudomonas lutea OX=243924; GN = tgt PE=3 SV=1
MSFELLATDGKARRGRLTFPRGVVETPAFMPVGTYGTVKGMLPRDIEATGAQMILGNTFHLWLRPGTEVIKGHGDLHDFMQWKGPILTDSGGFQVFSLGAMRKIKEEGVTFASPVDGAKVFMGPEESMQVQRDLGSDIVMIFDECTPYPADEDVARTSMELSLRWAKRSKVAHGESTAALFGIVQGGMHENLRMRSLEGLSELDFDGLAIGGLSVGEPKDEMIKVLDYLPGRMPADKPRYLMGVGKPEDLVEGVRRGVDMFDCVMPTRNARNGHLFIDTGVLKIRNAFHRYDESPLDPTCDCYTCKNFSRAYLHHLDKCGEMLGSMLNTIHNLRHYQLLMAGLREAIQQGTLAAFVDTFYAKRGLATPLLD

SEQ ID NO: 59701 - protein, 375 aa, Pseudomonas luteola
  REGION 1..375: note = tr|A0A2X2CAF7|A0A2X2CAF7_PSELU Queuine tRNA-ribosyltransferase OS=Pseudomonas luteola OX=47886; GN = tgt PE=3 SV=1
MSFMKFELLATEGRARRGRLSFPRGVVETPAFMPVGTYGTVKGMLPRDIEAIGAHIILGNTFHLWLRPGVEVIGRHGDLHDFMQWKGPILTDSGGFQVFSLGALRKIKEEGVYFASPVDGAKVFMGPEESMAVQRALGSDIVMIFDECTPYPADFDTAKRSMELSLRWAKRSRIAHGDSPSALFGIVQGGMHEELRLRSLEGLENIGFDGYAIGGLSVGEPKEEMIRVLDFLPPHLPADKPRYLMGVGKPEDLVEGVRRGVDMFDCVMPTRNARNGHLFIDTGVLKIRNAVHRHDDSPLDPTCDCYTCRNFSRAYLHHLDKCGEMLGSMLNTIHNLRHYQRLMSGLRDAIQQGKLADFVDSFYARRGLPTPPLAD

SEQ ID NO: 59702 - protein, 372 aa, Pseudomonas luteola
  REGION 1..372: note = tr|A0A3R8XSI4|A0A3R8XSI4_PSELU Queuine tRNA-ribosyltransferase OS=Pseudomonas luteola OX=47886; GN = tgt PE=3 SV=1
MKFELLATEGRARRGRLSFPRGVVETPAFMPVGTYGTVKGMLPRDIEAIGAHIILGNTFHLWLRPGVEVIGRHGDLHDFMQWKGPILTDSGGFQVFSLGALRKIKEEGVYFASPVDGAKVFMGPEESMAVQRALGSDIVMIFDECTPYPADFDTAKRSMELSLRWAKRSRIAHGDSPSALFGIVQGGMHEELRLRSLEGLENIGFDGYAIGGLSVGEPKEEMIRVLDFLPPHLPADKPRYLMGVGKPEDLVEGVRRGVDMFDCVMPTRNARNGHLFIDTGVLKIRNAVHRHDDSSLDPTCDCYTCRNFSRAYLHHLDKCGEMLGSMLNTIHNLRHYQRLMSGLRDAIQQGKLADFVDSFYARRGLPTPPLAD

SEQ ID NO: 59703 - protein, 374 aa, Pseudomonas mandelii
  REGION 1..374: note = tr|A0A4V3FYK5|A0A4V3FYK5_9PSED Queuine tRNA-ribosyltransferase OS=Pseudomonas mandelii OX=75612; GN = tgt PE=3 SV=1
MSRMSFELLATDGKARRGRLTFPRGTVETPAFMPVGTYGTVKGMLPRDITATGAEIILGNTFHLWLRPGTEVIKKHGDLHDFMQWKGPILTDSGGFQVFSLGAMRKIKEEGVTFASPVDGAKVFMGPEESMQVQRDLGSDIVMIFDECTPYPADEDVARISMELSLRWAKRSKEAHGDNTAALFGIVQGGMHQDLRMRSLEGLDKIGFDGLAIGGLSVGEPKHEMIKVLDYLPGLMPADKPRYLMGVGKPEDLVEGVRRGVDMFDCVMPTRNARNGHLFIDTGVLKIRNAFHRHDDSPLDPTCDCYTCQNFSRAYLHHLDKCGEMLGSMLNTIHNLRHYQVLMAGLREAIQQGTLAAFVDAFYAKRGLPVPPLD

SEQ ID NO: 59704 - protein, 377 aa, Pseudomonas mandelii
  REGION 1..377: note = tr|A0A255WUG5|A0A255WUG5_9PSED Queuine tRNA-ribosyltransferase OS=Pseudomonas mandelii OX=75612; GN = tgt PE=3 SV=1
MSRQSRMSFELLATDGKARRGRLTFPRGTVETPAFMPVGTYGTVKGMLPRDITATGAEIILGNTFHLWLRPGTEVIKKHGDLHDFMKWQGPILTDSGGFQVFSLGAMRKIKEEGVTFASPVDGSKVFMGPEESMQVQRDLGSDIVMIFDECTPYPADEDVARISMELSLRWAQRSKEAHGDNTAALFGIVQGGMHQDLRMRSLEGLDQIGFDGLAIGGLSVGEPKHEMIKVLDYLPGLMPADKPRYLMGVGKPEDLVEGVRRGVDMFDCVMPTRNARNGHLFIDTGVLKIRNAFHRHDDSPLDPTCDCYTCQNFSRAYLHHLDKCGEMLGSMLNTIHNLRHYQVLMAGLREAIQQGTLAAFVDAFYAKRGLPVPPLD

SEQ ID NO: 59705 - protein, 374 aa, Pseudomonas marginalis; identical to SEQ ID NO: 59578
  REGION 1..374: note = tr|A0A3M3WKM5|A0A3M3WKM5_PSEMA Queuine tRNA-ribosyltransferase OS=Pseudomonas marginalis pv. marginalis OX=97473 GN=tgt PE=3 SV=1

SEQ ID NO: 59706 - protein, 377 aa, Pseudomonas marginalis
  REGION 1..377: note = tr|A0A0W0LSX1|A0A0W0LSX1_PSEMA Queuine tRNA-ribosyltransferase OS=Pseudomonas marginalis ICMP 11289 OX=1198318 GN=tgt PE=3 SV=1
MSRTCRMSFELLATDGKARRGRLTFPRGVVETPAFMPVGTYGTVKGMLPRDIEATGAQIILGNTFHLWLRPGTEVIKGHGDLHDFMQWQGPILTDSGGFQVFSLGAMRKIKEEGVTFASPVDGAKVFMGPEESMQVQRDLGSDIVMIFDECTPYPADEDVARISMELSLRWAKRSKIAHGENTAALFGIVQGGMHENLRMRSLEGLDQIGFDGLAIGGLSVGEPKHEMIKVLDYLPGQMPADKPRYLMGVGKPEDLVEGVRRGVDMFDCVMPTRNARNGHLFIDTGVLKIRNAFHRHDNSPLDPTCDCYTCKNFSRAYLHHLDKCNEMLGSMLNTIHNLRHYQLLMAGLREAIQQGTLAAFVDAFYAKRGIPTPPLG

SEQ ID NO: 59707 - protein, 380 aa, Pseudomonas marincola; identical to SEQ ID NO: 59559
  REGION 1..380: note = tr|A0A1I7DCF9|A0A1I7DCF9_9PSED Queuine tRNA-ribosyltransferase OS=Pseudomonas marincola OX=437900; GN = tgt PE=3 SV=1

SEQ ID NO: 59708 - protein, 377 aa, Pseudomonas mediterranea
  REGION 1..377: note = tr|A0A0A4GLL8|A0A0A4GLL8_9PSED Queuine tRNA-ribosyltransferase OS=Pseudomonas mediterranea CFBP 5447 OX=1348058 GN=tgt PE=3 SV=1
MSRTCRMSFELLATDGKARRGRLTFPRGTVETPAFMPVGTYGTVKGMLPRDIEAIGAEIILGNTFHLWLRPGMEVIKAHGDLHDFMQWKGPILTDSGGFQVFSLGAMRKIKEEGVTFASPVDGSKVFMGPEESMQVQRDLGSDIVMIFDECTPYPADEDVARVSMELSLRWAQRSKNAHGDNTAALFGIVQGGMHQDLRMRSLEGLDKIGFDGLAIGGLSVGEPKHEMIKVLDYLPGQMPADKPRYLMGVGKPEDLVEGVRRGVDMFDCVMPTRNARNGHLFIDTGVLKIRNAFHRHDDSPLDPTCDCYTCKNFSRAYLHHLDKCGEMLGSMLNTIHNLRHYQVLMAGLREAIQQGTLAAFVEAFYAKRGLPVPPLD

SEQ ID NO: 59709 - protein, 377 aa, unidentified
  source 1..377: note = Pseudomonas meliae
  REGION 1..377: note = tr|A0A0P9UGL8|A0A0P9UGL8_9PSED Queuine tRNA-ribosyltransferase OS=Pseudomonas meliae OX=86176; GN = tgt PE=3 SV=1
MSRTCRMSFELLATDGKARRGRLTFPRGVVETPAFMPVGTYGTVKGMLPRDIEATGAQMILGNTFHLWLRPGTEVIKGHGDLHDFMQWKGPILTDSGGFQVFSLGAMRKIKEEGVTFASPVDGAKVFMGPEESMQVQRDLGSDVVMIFDECTPYPADEDVARVSMELSLRWAKRSKVAHGENTAALFGIVQGGMHENLRKRSLEGLDEIGFDGLAIGGLSVGEPKHEMIKVLDYLPGLMPADKPRYLMGVGKPEDLVEGVRRGVDMFDCVMPTRNARNGHLFTDTGVLKIRNAFHRHDNSPLDPTCDCYTCKNFSRAYLHHLDKCGEMLGSMLNTIHNLRHYQLLMAGLREAIQQGTLTAFVDAFYAKRGLPTPPLG

SEQ ID NO: 59710 - protein, 377 aa, Pseudomonas mendocina
  REGION 1..377: note = tr|A4XY52|A4XY52_PSEMY Queuine tRNA-ribosyltransferase OS=Pseudomonas mendocina (strain ymp) OX=399739 GN=tgt PE=3 SV=1
MSRTCRMSFELLATDGKARRGRLTFPRGVVETPAFMPVGTYGTVKGMLPRDVEDIGAQIILGNTFHLWLRPGMEVIKKHGDLHDFMQWQGPILTDSGGFQVFSLGAMRKIKEEGVYFASPVDGAKVFMGPEESMQVQRDLGSDIVMIFDECTPYPAEFDVAKRSMELSLRWAKRSKTAHGESTAALFGIVQGGMHEELRMRSLEGLCEIGFDGLAIGGLSVGEPKEEMIRVLDFLPPHMPADKPRYLMGVGKPEDLVEGVRRGVDMFDCVMPTRNARNGHLFVDTGVVKIRNAVHKHDDSPLDPTCDCYTCKHFSRAYLHHLDKCGEMLGSMLNTIHNLRHYQRVMAGLREAIGQGTLAAFVETFYAKRGLPVPPLD

SEQ ID NO: 59711 - protein, 371 aa, Pseudomonas mendocina
  REGION 1..371: note = tr|A0A291KCQ1|A0A291KCQ1_PSEME Queuine tRNA-ribosyltransferase OS=Pseudomonas mendocina OX=300; GN = tgt PE=3 SV=1
MSFELLATDGKARRGRLTFPRGVVETPAFMPVGTYGTVKGMLPRDVEDIGAQIILGNTFHLWLRPGMEVIKKHGDLHDFMQWQGPILTDSGGFQVFSLGAMRKIKEEGVYFASPVDGAKVFMGPEESMQVQRDLGSDIVMIFDECTPYPAEFDVAKRSMELSLRWAKRSKTAHGESTAALFGIVQGGMHEELRMRSLEGLCEIGFDGLAIGGLSVGEPKEEMIRVLDFLPPHMPADKPRYLMGVGKPEDLVEGVRRGVDMFDCVMPTRNARNGHLFVDTGVVKIRNAVHKHDDSPLDPTCDCYTCKHFSRAYLHHLDKCGEMLGSMLNTIHNLRHYQRVMAGLREAIGQGTLAAFVETFYAKRGLPVPPLD

SEQ ID NO: 59712 - protein, 398 aa, unidentified
  source 1..398: note = [Pseudomonas] mesoacidophila
  REGION 1..398: note = tr|A0A2A4F9C5|A0A2A4F9C5_9BURK Queuine tRNA-ribosyltransferase OS=[Pseudomonas] mesoacidophila; OX = 265293 GN=tgt PE=3 SV=1
MTEGPSHDHDMHAGHAHARPDNGLKFDLLTTDGHARRGRVTLNHGVVETPIFMPVGTYGTVKAIQPRELHEIKAQIILGNTFHLWLRPGLDTIDAHGGLHGFMGWNKPILTDSGGFQVFSLGDLRKITEDGVTFASPINGDKLFLSPEVSMQIQKVLNSDIVMQFDECTPYATNGVPTTHKEAADSMRMSLRWAKRSLDEFNRLGNPNALFGIVQGGMFEDLRDESLAGLAELDFHGLAIGGLSVGEPKEDMMRVLRHVGPKLPAHKPHYLMGVGTPEDLVDGVANGIDMFDCVMPTRNARNGWLFTRFGDVKIRNATHKNSLKPLDPSCACYTCQNFSRGYLHHLHRVGEILGAQLNTIHNLHYYLQLMSEIREAIETHTFDAFRQRFAEDRARGVD

SEQ ID NO: 59713 - protein, 377 aa, Pseudomonas migulae
  REGION 1..377: note = tr|A0A1H5G356|A0A1H5G356_9PSED Queuine tRNA-ribosyltransferase OS=Pseudomonas migulae OX=78543; GN = tgt PE=3 SV=1
MSRQSRMSFELLATDGKARRGRLTFPRGTVETPAFMPVGTYGTVKGMLPRDIVATGAEIILGNTFHLWLRPGTEVIKKHGDLHDFMQWKGPILTDSGGFQVFSLGAMRKIKEEGVTFASPVDGAKVFMGPEESMQVQRDLGSDIVMIFDECTPYPADEDVARVSMELSLRWAKRSKEAHGDNTAALFGIVQGGMHQDLRMRSLEGLDQIGFDGLAIGGLSVGEPKHEMIKVLDYLPGQMPADKPRYLMGVGKPEDLVEGVRRGVDMFDCVMPTRNARNGHLFIDTGVLKIRNAFHRHDDSPLDPTCDCYTCQNFSRAYLHHLDKCGEMLGSMLNTIHNLRHYQVLMAGLREAIQQGTLAAFVDAFYAKRGLPVPPLD

SEQ ID NO: 59714 - protein, 377 aa, Pseudomonas mohnii
  REGION 1..377: note = tr|A0A1H4Y4L7|A0A1H4Y4L7_9PSED Queuine tRNA-ribosyltransferase OS=Pseudomonas mohnii OX=395600; GN = tgt PE=3 SV=1
MSRTCRMSFELLATDGKARRGRLTFPRGTVETPAFMPVGTYGTVKGMLPRDIEAIGAEIILGNTFHLWLRPGTEVIKKHGDLHDFMQWKGPILTDSGGFQVFSLGAMRKIKEEGVTFASPVDGAKVFMGPEESMQVQRDLGSDIVMIFDECTPYPADEDVARISMELSLRWAKRSKEAHGDNTAALFGIVQGGMHQDLRMRSLEGLDKIGFDGLAIGGLSVGEPKHEMIKVLDYLPGMMPADKPRYLMGVGKPEDLVEGVRRGVDMFDCVMPTRNARNGHLFIDTGVLKIRNAFHRHDDSPLDPTCDCYTCQNFSRAYLHHLDKCGEMLGSMLNTIHNLRHYQVLMAGLREAIQQGTLAAFVDAFYAKRGLPVPPLD

SEQ ID NO: 59715 - protein, 371 aa, Pseudomonas monteilii
  REGION 1..371: note = tr|V9UWD3|V9UWD3_9PSED Queuine tRNA-ribosyltransferase OS=Pseudomonas monteilii SB3101; OX = 1435058 GN=tgt PE=3 SV=1
MSFELLATDGKARRGRITFPRGTVETPAFMPVGTYGTVKGMLPRDIEAIGAEMILGNTFHLWLRPGTEVIKKHNGLHDFMQWKGPILTDSGGFQVFSLGAMRKIKEEGVTFASPVDGAKVFMGPEESMQVQRDLGSDVVMIFDECTPYPAEHDVARASMELSLRWAQRSKNAHADNTAALFGIVQGGMYQDMRMRSLEGLENIGFDGLAIGGLSVGEPKHEMIKVLDYLPGQMPADKPRYLMGVGKPEDLVEGVRRGVDMFDCVMPTRNARNGHLFVDTGVIKIRNAFHRHDDSPLDPTCDCYTCTNFSRAYLHHLDKCGEMLSSMLNTIHNLRHYQRLMAGLREAIQQGKLAAFVDAFYAKRGLPVPPLD

SEQ ID NO: 59716 - protein, 377 aa, Pseudomonas monteilii
  REGION 1..377: note = tr|A0A0X8BU88|A0A0X8BU88_9PSED Queuine tRNA-ribosyltransferase OS=Pseudomonas monteilii OX=76759; GN = tgt PE=3 SV=1
MSRTCRMSFELLATDGKARRGRLTFPRGTVETPAFMPVGTYGTVKGMLPRDIEAIGAEIILGNTFHLWLRPGTEVIKKHGGLHDFMQWKGPILTDSGGFQVFSLGAMRKIKEEGVTFASPVDGSKVFMGPEESMQVQRDLDSDIVMIFDECTPYPAEPDVARTSMELSLRWAQRSKNAHGDNTAALFGIVQGGMHEDLRMRSLEGLDKIGFDGLAIGGLSVGEPKHEMIKVLDYLPGQMPADKPRYLMGVGKPEDLVEGVRRGVDMFDCVMPTRNARNGHLFIDTGVIKIRNAFHRHDDSPLDPTCDCYTCTHFSRAYLHHLDKCGEMLSSMLNTIHNLRHYQRLMAGLREAIQQGKLAAFVDAFYAKRGLPVPPLA

SEQ ID NO: 59717 - protein, 377 aa, Pseudomonas moorei; identical to SEQ ID NO: 59714
  REGION 1..377: note = tr|A0A4Q7H6C6|A0A4Q7H6C6_9PSED Queuine tRNA-ribosyltransferase OS=Pseudomonas moorei OX=395599; GN = tgt PE=3 SV=1

SEQ ID NO: 59718 - protein, 377 aa, Pseudomonas moorei
  REGION 1..377: note = tr|A0A1H0Y3J8|A0A1H0Y3J8_9PSED Queuine tRNA-ribosyltransferase OS=Pseudomonas moorei OX=395599; GN = tgt PE=3 SV=1
MSRTCRMSFELLATDGKARRGRLTFPRGTVETPAFMPVGTYGTVKGMLPRDIEAIGAEIILGNTFHLWLRPGTEVIKKHGDLHDFMQWKGPILTDSGGFQVFSLGAMRKIKEEGVTFASPVDGAKVFMGPEESMQVQRDLGSDIVMIFDECTPYPADEDVARVSMELSLRWAKRSKEAHGDNTAALFGIVQGGMHQDLRMRSLEGLDKIGFDGLAIGGLSVGEPKHEMIKVLDYLPGMMPADKPRYLMGVGKPEDLVEGVRRGVDMFDCVMPTRNARNGHLFIDTGVLKIRNAFHRHDDSPLDPTCDCYTCQNFSRAYLHHLDKCGEMLGSMLNTIHNLRHYQVLMAGLREAIQQGTLAAFVDAFYAKRGLPVPPLD

SEQ ID NO: 59719 - protein, 377 aa, Pseudomonas moraviensis
  REGION 1..377: note = tr|V8R211|V8R211_9PSED Queuine tRNA-ribosyltransferase OS=Pseudomonas moraviensis R28-S; OX = 1395516 GN=tgt PE=3 SV=1
MSRECRMSFELLATDGKARRGRLTFPRGTVETPAFMPVGTYGTVKGMLPRDIVATGAEIILGNTFHLWLRPGTQVIKEHGDLHDFMQWKGPILTDSGGFQVFSLGAMRKIKEEGVTFASPVDGAKVFMGPEESMQVQRDLGSDIVMIFDECTPYPADEDVARVSMELSLRWAQRSKNAHGDNTAALFGIVQGGMHENLRMRSLEGLDKIGFDGLAIGGLSVGEPKHEMIKVLDYLPGQMPADKPRYLMGVGKPEDLVEGVRRGVDMFDCVMPTRNARNGHLFIDTGVLKIRNAFHRHDESPLDPTCDCYTCQNFSRAYLHHLDKCGEMLGSMLNTIHNLRHYQVLMAGLREAIQQGTLAAFVDAFYAKRGLPVPPLD

SEQ ID NO: 59720 - protein, 377 aa, Pseudomonas moraviensis; identical to SEQ ID NO: 59719
  REGION 1..377: note = tr|A0A1H2JSH7|A0A1H2JSH7_9PSED Queuine tRNA-ribosyltransferase OS=Pseudomonas moraviensis; OX = 321662 GN=tgt PE=3 SV=1

SEQ ID NO: 59721 - protein, 377 aa, Pseudomonas mosselii
  REGION 1..377: note = tr|A0A1X1NZL5|A0A1X1NZL5_9PSED Queuine tRNA-ribosyltransferase OS=Pseudomonas mosselii OX=78327; GN = tgt PE=3 SV=1
MSRTCRMSFELLATDGKARRGRLTFPRGTVETPAFMPVGTYGTVKGMLPRDIEAIGAEIILGNTFHLWLRPGTEVIKKHNGLHDFMQWKGPILTDSGGFQVFSLGAMRKIKEEGVTFASPVDGSKVFMGPEESMQVQRDLGSDIVMIFDECTPYPAEHDVARTSMELSLRWAQRSKNAHGDNTAALFGIVQGGMYQDLRMRSLEALVNLDFDGLAIGGLSVGEPKHEMIKVLDYLPAQMPADKPRYLMGVGKPEDLVEGVRRGVDMFDCVMPTRNARNGHLFVDTGVIKIRNAFHRHDESPLDPTCDCYTCTNFSRAYLHHLDKCGEMLSSMLNTIHNLRHYQRLMAGLREAIQQGKLAAFVDAFYAKRGLPVPPLD

SEQ ID NO: 59722 - protein, 377 aa, Pseudomonas mosselii
  REGION 1..377: note = tr|A0A290GZC0|A0A290GZC0_9PSED Queuine tRNA-ribosyltransferase OS=Pseudomonas mosselii OX=78327; GN = tgt PE=3 SV=1
MSRTCRMSFELLATDGKARRGRLTFPRGTVETPAFMPVGTYGTVKGMLPRDIEAIGAEIILGNTFHLWLRPGTEVIKKHNGLHDFMQWKGPILTDSGGFQVFSLGAMRKIKEEGVTFASPVDGSKVFMGPEESMQVQRDLGSDIVMIFDECTPYPAEHDVARTSMELSLRWAQRSKNAHGDNTAALFGIVQGGMYQDLRMRSLEALVNIDFDGLAIGGLSVGEPKHEMIKVLDYLPAQMPADKPRYLMGVGKPEDLVEGVRRGVDMFDCVMPTRNARNGHLFVDTGVIKIRNAFHRHDESPLDPTCDCYTCTNFSRAYLHHLDKCGEMLSSMLNTIHNLRHYQRLMAGLREAIQQGKLAAFVDAFYAKRGLPVPPLD

SEQ ID NO: 59723 - protein, 374 aa, Pseudomonas mucidolens
  REGION 1..374: note = tr|A0A1H2NEN8|A0A1H2NEN8_9PSED Queuine tRNA-ribosyltransferase OS=Pseudomonas mucidolens OX=46679; GN = tgt PE=3 SV=1
MSRMSFELLATDGKARRGRLTFPRGTVETPAFMPVGTYGTVKGMLPRDIVATGAEMILGNTFHLWLRPGTEVIKKHGDLHDFMKWQGPILTDSGGFQVFSLGAMRKIKEEGVTFASPVDGSKVFMGPEESMQVQRDLGSDIVMIFDECTPYPADEEVARVSMELSLRWAQRSKNAHGDNTAALFGIVQGGMHENLRKRSLEGLDKIGFDGLAIGGLSVGEPKHEMIKVLDYLPGLMPADKPRYLMGVGKPEDLVEGVRRGVDMFDCVMPTRNARNGHLFIDTGVLKIRNAFHRHDDSPLDPTCDCYTCQNFSRAYLHHLDKCGEMLGSMLNTIHNLRHYQVLMAGLREAIQQGTLAAFVDAFYAKRGLPVPPLD

SEQ ID NO: 59724 - protein, 374 aa, unidentified; identical to SEQ ID NO: 59578
  source 1..374: note = Pseudomonas nabeulensis
  REGION 1..374: note = tr|A0A4Z0AW70|A0A4Z0AW70_9PSED Queuine tRNA-ribosyltransferase OS=Pseudomonas nabeulensis; OX = 2293833 GN=tgt PE=3 SV=1

SEQ ID NO: 59725 - protein, 375 aa, Pseudomonas nitroreducens
  REGION 1..375: note = tr|A0A239C6K5|A0A239C6K5_9PSED Queuine tRNA-ribosyltransferase OS=Pseudomonas nitroreducens; OX = 46680 GN=tgt PE=3 SV=1
MSFMKFELLATEGKARRGRLTFPRGVVETPAFMPVGTYGTVKGMLPHDIEGIGAQIILGNTFHLWLRPGTEVIQKHGDLHDFMQWKGPILTDSGGFQVFSLGALRKIKEEGVYFASPVDGAKVFMGPEESMAVQRALGSDIVMIFDECTPYPAEFDVAKRSMELSLRWAKRSKAAHGDSPSALFGIVQGGMHEELRMRSLEGLQEIGFDGLAIGGLSVGEPKEEMIRVLDFLPRHMPADKPRYLMGVGKPEDLVEGVRRGVDMFDCVMPTRNARNGHLFVDTGVIKIRNAVHKHDESPLDPTCDCYTCKHFSRAYLYHLDKCGEMLGSMLNTIHNLRHYQRLMAGLREAIQQGTLANFVDAFYAKRGLPVPPLAD

SEQ ID NO: 59726 - protein, 372 aa, Pseudomonas nitroreducens
  REGION 1..372: note = tr|A0A2D0ADJ8|A0A2D0ADJ8_9PSED Queuine tRNA-ribosyltransferase OS=Pseudomonas nitroreducens; OX = 46680 GN=tgt PE=3 SV=1
MTFELLATEGRARRGRLTFPRGVVETPAFMPVGTYGTVKGMLPHDIEGIGAQIILGNTFHLWLRPGTEVIQKHGDLHDFMQWKGPILTDSGGFQVFSLGALRKIKEEGVYFASPVDGAKVFMGPEESMAVQRALGSDIVMIFDECTPYPAEFDVAKRSMELSLRWAKRSKIAHGDSPSALFGIVQGGMHEELRMRSLEGLQEIGFDGLAIGGLSVGEPKEEMIRVLDFLPQQMPADKPRYLMGVGKPEDLVEGVRRGVDMFDCVMPTRNARNGHLFVDTGVIKIRNAVHKHDESPLDPTCDCYTCKHFSRAYLYHLDKCGEMLGSMLNTIHNLRHYQRLMAGLREAIQQGTLANFVDAFYAKRGLPVPPLAD

SEQ ID NO: 59727 - protein, 376 aa, unidentified
  source 1..376: note = Pseudomonas oceani
  REGION 1..376: note = tr|A0A2P4ETF4|A0A2P4ETF4_9PSED Queuine tRNA-ribosyltransferase OS=Pseudomonas oceani OX=1708783; GN = tgt PE=3 SV=1
MSHMFFELLATDGKARRGRLTFPRGVVETPAFMPVGTYGTVKGMLPRDIEAIGAQIILGNTFHLWLRPGTEVISKHGDLHDFMQWQGPILTDSGGFQVFSLGAMRKIKEEGVYFSSPVDGAKVFMGPEESMQVQRALGSDIVMIFDECTPYPADLDTARRSMELSLRWAKRSKQAHGDNPAALFGIIQGGMHEELRLRSLEGLSEIGFDGLAIGGLSVGEPKEEMIRVLDFLPGHMPPEKPRYLMGVGKPEDLVEGVRRGVDMFDCVMPSRNARNGHLFTETGVIKIRNAVHRHDESPLDPACDCYTCQHFSRAYLHHLDKCGEMLGSMLNTIHNLRHYQRLMAGLRGAIQQGTLTAFVENFYAKLDRPVPPLEAS

SEQ ID NO: 59728 - protein, 377 aa, Pseudomonas oleovorans
  REGION 1..377: note = tr|A0A379JWD4|A0A379JWD4_PSEOL Queuine tRNA-ribosyltransferase OS=Pseudomonas oleovorans OX=301; GN = tgt PE=3 SV=1
MSRTCRMSFELLATDGKARRGRLTFPRGVVETPAFMPVGTYGTVKGMLPRDIEAIGAQIILGNTFHLWLRPGMEVIKKHGDLHDFMQWQGPILTDSGGFQVFSLGAMRKIKEEGVYFASPVDGTKVFMGPEESMQVQRDLGSDIVMIFDECTPYPAEFDVAKRSMELSLRWAKRSKTAHGESSAALFGIVQGGMHEELRMRSLEGLCEIGFDGLAIGGLSVGEPKEEMIRVLDFLPPHMPADKPRYLMGVGKPEDLVEGVRRGVDMFDCVMPTRNARNGHLFVDTGVVKIRNAVHKHDDSPLDPTCDCYTCKHFSRAYLHHLDKCGEMLGSMLNTIHNLRHYQRVMAGLREAIGQGTLAAFVETFYAKRGLPVPPLD

SEQ ID NO: 59729 - protein, 371 aa, Pseudomonas oleovorans
  REGION 1..371: note = tr|A0A2W5X9R7|A0A2W5X9R7_PSEOL Queuine tRNA-ribosyltransferase OS=Pseudomonas oleovorans OX=301; GN = tgt PE=3 SV=1
MSFELLATDGKARRGRLTFPRGVVETPAFMPVGTYGTVKGMLPRDIEAIGAQIILGNTFHLWLRPGMEVIKKHGDLHDFMQWQGPILTDSGGFQVFSLGAMRKIKEEGVYFASPVDGAKVFMGPEESMQVQRDLGSDIVMIFDECTPYPAEFDVAKRSMELSLRWAKRSKTAHGESSAALFGIVQGGMHEELRIRSLEGLCEIGFDGLAIGGLSVGEPKEEMIRVLDFLPPHMPADKPRYLMGVGKPEDLVEGVRRGVDMFDCVMPTRNARNGHLFVDTGVVKIRNAVHKHDDSPLDPSCDCYTCKHFSRAYLHHLDKCGEMLGSMLNTIHNLRHYQRVMAGLREAIGQGTLAAFVETFYAKRGLPVPPLD

SEQ ID NO: 59730 - protein, 374 aa, Pseudomonas orientalis; identical to SEQ ID NO: 59608
  REGION 1..374: note = tr|A0A3G7WPM0|A0A3G7WPM0_9PSED Queuine tRNA-ribosyltransferase OS=Pseudomonas orientalis OX=76758; GN = tgt PE=3 SV=1

SEQ ID NO: 59731 - protein, 374 aa, Pseudomonas orientalis; identical to SEQ ID NO: 59645
  REGION 1..374: note = tr|A0A2L0S182|A0A2L0S182_9PSED Queuine tRNA-ribosyltransferase OS=Pseudomonas orientalis OX=76758; GN = tgt PE=3 SV=1

SEQ ID NO: 59732 - protein, 374 aa, unidentified
  source 1..374: note = Pseudomonas oryzae
  REGION 1..374: note = tr|A0A1H1L788|A0A1H1L788_9PSED Queuine tRNA-ribosyltransferase OS=Pseudomonas oryzae OX=1392877; GN = tgt PE=3 SV=1
MSHMSFELLVTDGKARRGRLTFPRGVVETPAFMPVGTYGTVKGMLPRDVEAIGAQIILGNTFHLWLRPGTEVIKKHGDLHDFMQWHGPILTDSGGFQVFSLGAMRKIKEEGVYFSSPVDGAKVFMGPEESMQVQRDLGSDIVMIFDECTPYPADVDTARRSMELSLRWAKRSKIAHEGNPAALFGIVQGGMHEDLRLRSLEGLLEIGFDGLAIGGLSVGEPKEDMIRILDFLPPQLPADKPRYLMGVGKPEDLVEGVRRGVDMFDCVMPTRNARNGHLFTETGVIKIRNAVHKHDDAPLDPACDCYTCRNFSRAYLHHLDKCGEMLGSMLNTIHNLRHYQRLMAGLRGAIAQGTLAAFVADFYARRGLPVPPLD

SEQ ID NO: 59733 - protein, 372 aa, Pseudomonas oryzihabitans
  REGION 1..372: note = tr|A0A0U4VUH6|A0A0U4VUH6_9PSED Queuine tRNA-ribosyltransferase OS=Pseudomonas oryzihabitans; OX = 47885 GN=tgt PE=3 SV=1
MKFELLATEGKARRGRLTFPRGVVETPAFMPVGTYGTVKGMFPDSVADIGAQIILGNTFHLWLRPGTEVIQRHGDLHDFMQWQGPILTDSGGFQVFSLGALRKIKEEGVYFASPVDGAKVFMGPEESMAVQRALGSDIVMIFDECTPYPADFDTARRSMELSLRWAKRSREAHGDNPSALFGIVQGGMHEELRLRSLDGLEQIGFDGYAIGGLSVGEPKEEMIRVLDFLPPHLPADKPRYLMGVGKPEDLVEGVRRGVDMFDCVMPTRNARNGHLFIDTGVLKLRNAVHRHDETSLDPACDCYTCKHFSRAYLHHLDKCGEMLGSMLNTIHNLRYYQRVMAGLRQAIQEGKLADFVDAFYARRGLPTPPLDS

SEQ ID NO: 59734 - protein, 372 aa, Pseudomonas oryzihabitans
  REGION 1..372: note = tr|A0A178LFH0|A0A178LFH0_9PSED Queuine tRNA-ribosyltransferase OS=Pseudomonas oryzihabitans; OX = 47885 GN=tgt PE=3 SV=1
MNFELLATEGKARRGRLTFPRGVVETPAFMPVGTYGTVKGMLPDSVADIGAQIILGNTFHLWLRPGTEVIQRHGDLHDFMQWQGPILTDSGGFQVFSLGALRKIKEEGVYFASPVDGAKVFMGPEESMAVQRALGSDIVMIFDECTPYPADFDTARRSMELSLRWAKRSREAHGDNPSALFGIVQGGMHEELRLRSLEGLEGIGFDGYAIGGLSVGEPKEEMIRVLDFLPPHLPADKPRYLMGVGKPEDLVEGVRRGVDMFDCVMPTRNARNGHLFIDTGVLKLRNAVHRHDETPLDPTCDCYTCKHFSRAYLHHLDKCGEMLGSMLNTIHNLRYYQRVMAGLRQAIQEGKLADFVDAFYARRGLPTPPLDR

SEQ ID NO: 59735 - protein, 377 aa, Pseudomonas otitidis
  REGION 1..377: note = tr|A0A1I0UG76|A0A1I0UG76_9PSED Queuine tRNA-ribosyltransferase OS=Pseudomonas otitidis OX=319939; GN = tgt PE=3 SV=1
MTRTCRMSFELLATEGKARRGRLTFPRGVVETPAFMPVGTYGTVKGMLPRDIEGIGAQIILGNTFHLWLRPGTEVIKRHGDLHDFMQWQGPILTDSGGFQVFSLGAMRKIKEEGVTFASPVDGAKVFMGPEESMQVQRDLGSDIVMIFDECTPYPADFDTAKRSMELSLRWAKRSKAAHGENTAALFGIVQGGMHEELRLRSLEGLLEIGFDGLAIGGLSVGEPKEEMIRVLDFLPPHLPADKPRYLMGVGKPEDLVEGVRRGVDMFDCVMPTRNARNGHLFIDTGVLKIRNAVHRHDDSPLEPGCDCYTCKHFSRAYLHHLDKCGEMLGSMLNTIHNLRHYQRLMAGLREAIQQGKLADFVDAFYARRGLPTPPLD

SEQ ID NO: 59736 - protein, 375 aa, Pseudomonas pachastrellae; identical to SEQ ID NO: 59563
  REGION 1..375: note = tr|A0A1S8DG82|A0A1S8DG82_9PSED Queuine tRNA-ribosyltransferase OS=Pseudomonas pachastrellae; OX = 254161 GN=tgt PE=3 SV=1

SEQ ID NO: 59737 - protein, 374 aa, Pseudomonas palleroniana
  REGION 1..374: note = tr|A0A2L1JAU6|A0A2L1JAU6_9PSED Queuine tRNA-ribosyltransferase OS=Pseudomonas palleroniana; OX = 191390 GN=tgt PE=3 SV=1
MSRMSFELLATDGKARRGRLTFPRGTVETPAFMPVGTYGTVKGMLPRDIVATGAEIILGNTFHLWLRPGTEVIKKHGDLHDFMKWQGPILTDSGGFQVFSLGAMRKIKEEGVTFASPVDGSKVFMGPEESMQVQRDLGSDIVMIFDECTPYPADEDVARVSMELSLRWAQRSKNAHGDNTAALFGIVQGGMHENLRKRSLEGLDKIGFDGLAIGGLSVGEPKHEMIKVLDYLPGLMPADKPRYLMGVGKPEDLVEGVRRGVDMFDCVMPTRNARNGHLFIDTGVLKIRNAFHRHDDSPLDPTCDCYTCQNFSRAYLHHLDKCGEMLGSMLNTIHNLRHYQVLMAGLREAIQQGTLAAFVDAFYAKRGLPVPPLD

SEQ ID NO: 59738 - protein, 374 aa, Pseudomonas palleroniana
  REGION 1..374: note = tr|A0A1H5M4L2|A0A1H5M4L2_9PSED Queuine tRNA-ribosyltransferase OS=Pseudomonas palleroniana; OX = 191390 GN=tgt PE=3 SV=1
MSRMSFELLATDGKARRGRLTFPLGTVETPAFMPVGTYGTVKGMLPRDIVATGAEIILGNTFHLWLRPGTEVIKKHGDLHDFMKWQGPILTDSGGFQVFSLGAMRKIKEEGVTFASPVDGSKVFMGPEESMQVQRDLGSDIVMIFDECTPYPADEDVARVSMELSLRWAQRSKNAHGDNTAALFGIVQGGMHENLRKRSLEGLDKIGFDGLAIGGLSVGEPKHEMIKVLDYLPGLMPTDKPRYLMGVGKPEDLVEGVRRGVDMFDCVMPTRNARNGHLFIDTGVLKIRNAFHRHDDSPLDPTCDCYTCQNFSRAYLHHLDKCGEMLGSMLNTIHNLRHYQVLMAGLREAIQQGTLAAFVDAFYAKRGLPVPPLD

SEQ ID NO: 59739 - protein, 374 aa, Pseudomonas panacis; identical to SEQ ID NO: 59637
  REGION 1..374: note = tr|A0A1H4IKX7|A0A1H4IKX7_PSEPA Queuine tRNA-ribosyltransferase OS=Pseudomonas panacis OX=307251; GN = tgt PE=3 SV=1

SEQ ID NO: 59740 - protein, 375 aa, Pseudomonas panipatensis
  REGION 1..375: note = tr|A0A1G8DVW2|A0A1G8DVW2_9PSED Queuine tRNA-ribosyltransferase OS=Pseudomonas panipatensis; OX = 428992 GN=tgt PE=3 SV=1
MSFMKFELLATDGKARRGRLSFPRGVVETPAFMPVGTYGTVKGMLPRDIEGIGAQIILGNTFHLWLRPGTEVIQKHGDLHDFMQWKGPILTDSGGFQVFSLGALRKIKEEGVYFASPVDGAKVFMGPEESMAVQRALGSDIVMIFDECTPYPAEFDVAKRSMELSLRWAKRSKIAHGDSPSALFGIVQGGMHEELRLRSLEGLQEIGFDGLAIGGLSVGEPKEEMIRVLDFLPPHMPADKPRYLMGVGKPEDLVEGVRRGVDMFDCVMPTRNARNGHLFVDSGVIKIRNAVHKHDESPLDPTCDCYTCKNFSRAYLYHLDKCGEMLGSMLNTIHNLRHYQRLMAGLREAIQQGTLAAFVDAFYARRGLPTPPLGD

SEQ ID NO: 59741 - protein, 377 aa, Pseudomonas parafulva
  REGION 1..377: note = tr|A0A497UEV5|A0A497UEV5_9PSED Queuine tRNA-ribosyltransferase OS=Pseudomonas parafulva OX=157782; GN = tgt PE=3 SV=1
MSRECRMSFELLAIDGKARRGRLTFPRGTVETPAFMPVGTYGTVKGMLPRDIVATGAEIILGNTFHLWLRPGTEVIKEHGDLHDFMQWKGPILTDSGGFQVFSLGAMRKIKEEGVTFASPVDGSKVFMGPEESMQVQRDLGSDIVMIFDECTPYPADEDVARVSMELSLRWAQRSKNAHGDNTAALFGIVQGGMHQDLRMRSLEGLDKIGFDGLAIGGLSVGEPKHEMIKVLDYLPGMMPADKPRYLMGVGKPEDLVEGVRRGVDMFDCVMPTRNARNGHLFIDTGVLKIRNAFHRHDDSPLDPTCDCYTCQNFSRAYLHHLDKCGEMLGSMLNTIHNLRHYQVLMAGLREAIQQGTLAAFVDAFYAKRGLPVPPLD

SEQ ID NO: 59742 - protein, 377 aa, Pseudomonas parafulva
  REGION 1..377: note = tr|A0A0A7JL59|A0A0A7JL59_9PSED Queuine tRNA-ribosyltransferase OS=Pseudomonas parafulva OX=157782; GN = tgt PE=3 SV=1
MSRTCRMSFELLATDGKARRGRLTFPRGTVETPAFMPVGTYGTVKGMLPRDIEAIGAEIILGNTFHLWLRPGTEVIKKHNGLHDFMQWKGPILTDSGGFQVFSLGAMRKIKEEGVTFASPVDGSKVFMGPEESMQVQRDLGSDIVMIFDECTPYPAEHDVARTSMELSLRWAQRSKNAHGDNTAALFGIVQGGMYQDLRMRSLEALVNIDFDGLAIGGLSVGEPKHEMIKVLDYLPAQMPADKPRYLMGVGKPEDLVEGVRRGVDMFDCVMPTRNARNGHLFVDTGVIKIRNAFHRHDDSPLDPTCDCYTCSNFSRAYLHHLDKCGEMLSSMLNTIHNLRHYQRLMAGLREAIQQGKLAAFVDAFYAKRGLPVPPLD

SEQ ID NO: 59743 - protein, 374 aa, unidentified; identical to SEQ ID NO: 59587
  source 1..374: note = Pseudomonas paralactis
  REGION 1..374: note = tr|A0A0R3AHH9|A0A0R3AHH9_9PSED Queuine tRNA-ribosyltransferase OS=Pseudomonas paralactis; OX = 1615673 GN=tgt PE=3 SV=1

SEQ ID NO: 59744 - protein, 372 aa, Pseudomonas pelagia
  REGION 1..372: note = tr|A0A2A4AZ14|A0A2A4AZ14_9PSED Queuine tRNA-ribosyltransferase OS=Pseudomonas pelagia OX=553151; GN = tgt PE=3 SV=1
MSFELLATDGKARRGRLTFPRGVVETPAFMPVGTYGTVKGMLPRDVEAIGAQIVLGNTFHLWLRPGTEVIKAHGDLHDFMQWQGPILTDSGGFQVFSLGAMRKIKEEGVYFSSPVDGAKVFMGPEESMQVQRDLGSDIVMIFDECTPYPADEDTARKSMELSLRWAKRSKDAHGDNPSALFGIVQGGMHENLRLRSLEGLNEIGFDGLAIGGLSVGEPKEEMIKVLDYLPGHMPADKPRYLMGVGKPQDLVEGVRRGVDMFDCVMPTRNARNGYLFVDSGVIKIRNAVHRHDTSTLDPTCDCYTCLNFSRAYLHHLDKCDEMLGSMLNTIHNLRYYQRVMAGLRGAIQTGTLSAFVDDFYARIGLPVPELEV

SEQ ID NO: 59745 - protein, 377 aa, Pseudomonas peli
  REGION 1..377: note = tr|A0A1G4Q168|A0A1G4Q168_9PSED Queuine tRNA-ribosyltransferase OS=Pseudomonas peli OX=592361; GN = tgt PE=3 SV=1
MTRTCRMSFELLATEGKARRGRLTFPRGVVETPAFMPVGTYGTVKGMLPRDIEAIGAQIILGNTFHLWLRPGTEVIKKHGDLHDFMQWQGPILTDSGGFQVFSLGAMRKIKEEGVYFASPVDGAKVFMGPEESMQVQRDLGSDIVMIFDECTPYPAAFDVAKRSMELSLRWAKRSKEAHGDSTSALFGIVQGGMHEELRKVSLDGLEQIGFDGYAIGGLSVGEPKDEMIKVLDYLPPQLPADKPRYLMGVGKPEDLVEGVRRGVDMFDCVMPTRNARNGHLFVDTGVLKIRNAFHKHDDSPLDPTCDCYTCKHFSRAYLHHLDKCGEMLGSMLNTIHNLRHYQVLMAGLREAIQQGTLAAFVDAFYAKRGLPTPPLD

SEQ ID NO: 59746 - protein, 371 aa, Pseudomonas plecoglossicida
  REGION 1..371: note = tr|A0A0B5KIV1|A0A0B5KIV1_9PSED Queuine tRNA-ribosyltransferase OS=Pseudomonas plecoglossicida; OX = 70775 GN=tgt PE=3 SV=1
MSFELLATDGKARRGRITFPRGTVETPAFMPVGTYGTVKGMLPRDIEAIGAEMILGNTFHLWLRPGTEVIKKHNGLHDFMQWKGPILTDSGGFQVFSLGAMRKIKEEGVTFASPVDGAKVFMGPEESMQVQRDLGSDVVMIFDECTPYPAEHDVARASMELSLRWAQRSKNAHADNTAALFGIVQGGMYQDLRMRSLEGLENIGFDGLAIGGLSVGEPKHEMIKVLDYLPGQMPADKPRYLMGVGKPEDLVEGVRRGVDMFDCVMPTRNARNGHLFVDTGVIKIRNAFHRHDDSPLDPTCDCYTCTNFSRAYLHHLDKCGEMLSSMLNTIHNLRHYQRLMAGLREAIQQGKLAAFVDAFYAKRGLPVPPLD

SEQ ID NO: 59747 - protein, 377 aa, Pseudomonas plecoglossicida
  REGION 1..377: note = tr|A0A2A3MA74|A0A2A3MA74_9PSED Queuine tRNA-ribosyltransferase OS=Pseudomonas plecoglossicida; OX = 70775 GN=tgt PE=3 SV=1
MSRTCRMSFELLATDGKARRGRITFPRGTVETPAFMPVGTYGTVKGMLPRDIEAIGAEMILGNTFHLWLRPGTEVIKKHNGLHDFMQWKGPILTDSGGFQVFSLGAMRKIKEEGVTFASPVDGAKVFMGPEESMQVQRDLGSDVVMIFDECTPYPAEHDVARASMELSLRWAQRSKNAHADNTAALFGIVQGGMYQDLRMRSLEGLENIGFDGLAIGGLSVGEPKHEMIKVLDYLPGQMPADKPRYLMGVGKPEDLVEGVRRGVDMFDCVMPTRNARNGHLFVDTGVIKIRNAFHRHDDSPLDPTCDCYTCTNFSRAYLHHLDKCGEMLSSMLNTIHNLRHYQRLMAGLREAIQQGKLAAFVDAFYAKRGLPVPPLD

SEQ ID NO: 59748 - protein, 374 aa, Pseudomonas poae; identical to SEQ ID NO: 59645
  REGION 1..374: note = tr|A0A3S9JTH2|A0A3S9JTH2_9PSED Queuine tRNA-ribosyltransferase OS=Pseudomonas poae OX=200451; GN = tgt PE=3 SV=1

SEQ ID NO: 59749 - protein, 374 aa, Pseudomonas poae; identical to SEQ ID NO: 59578
  REGION 1..374: note = tr|A0A2A9H378|A0A2A9H378_9PSED Queuine tRNA-ribosyltransferase OS=Pseudomonas poae OX=200451; GN = tgt PE=3 SV=1

SEQ ID NO: 59750 - protein, 374 aa, Pseudomonas pohangensis
  REGION 1..374: note = tr|A0A1H2GMP5|A0A1H2GMP5_9PSED Queuine tRNA-ribosyltransferase OS=Pseudomonas pohangensis; OX = 364197 GN=tgt PE=3 SV=1
MSFMNFELLATDGKARRGRLSFPRGVVETPAFMPVGTYGTVKGMLPRDIEAIGAQIILGNTFHLWLRPGTEVIRQHGDLHDFMQWKGPILTDSGGFQVFSLGAMRKIKEAGVTFASPVDGAKVFMGPEESMAVQRALGSDIVMIFDECTPYPADLETARRSMELSLRWARRSKIAHGDNPSALFGIVQGGMHEELRLRSLEGLNEIGFDGLAIGGLSVGEPKEEMIKVLDYLPGHLPADKPRYLMGVGKPEDLVEGVRRGIDMFDCVMPTRNARNGHLFVESGVLKIRNAAHKKDESPLDSGCDCYTCQNFSRAYLHHLDKCGEMLGSMLNTIHNLRHYQRLMAGLREAIQQGTLASFVDAFYAKRGLPTPPIQ

SEQ ID NO: 59751 - protein, 377 aa, unidentified
  source 1..377: note = Pseudomonas prosekii
  REGION 1..377: note = tr|A0A1H1ZGS0|A0A1H1ZGS0_9PSED Queuine tRNA-ribosyltransferase OS=Pseudomonas prosekii OX=1148509; GN = tgt PE=3 SV=1
MSRQSRMSFELLATDGKARRGRLTFPRGTVETPAFMPVGTYGTVKGMLPRDITATGAEIILGNTFHLWLRPGTEVIKKHGDLHDFMQWKGPILTDSGGFQVFSLGAMRKIKEEGVTFASPVDGAKVFMGPEESMQVQRDLGSDIVMIFDECTPYPADEDVARISMELSLRWAQRSKNAHGDNTAALFGIVQGGMHQDLRMRSLEGLDKIGFDGLAIGGLSVGEPKHEMIKVLDYLPGQMPADKPRYLMGVGKPEDLVEGVRRGVDMFDCVMPTRNARNGHLFIDTGVLKIRNAFHRHDDSPLDPTCDCYTCQNFSRAYLHHLDKCGEMLGSMLNTIHNLRHYQVLMAGLREAIQQGTLAAFVDAFYAKRGLPVPPLD

SEQ ID NO: 59752 - protein, 377 aa, unidentified
  source 1..377: note = Pseudomonas protegens
  REGION 1..377: note = tr|A0A2C9ET93|A0A2C9ET93_PSEPH Queuine tRNA-ribosyltransferase OS=Pseudomonas protegens (strain DSM 19095 / LMG 27888 / CHA0) OX=1124983 GN=tgt PE=3 SV=1
MSRTCRMSFELLATDGKARRGRLTFPRGTVETPAFMPVGTYGTVKGMLPRDIVATGAEIILGNTFHLWLRPGTEVIKAHGDLHDFMQWKGPILTDSGGFQVFSLGAMRKIKEEGVTFASPVDGAKVFMGPEESMQVQRDLGSDIVMIFDECTPYPADEDVARISMELSLRWAQRSKNAHGDNTAALFGIVQGGMHQDLRMRSLEGLDKIGFDGLAIGGLSVGEPKHEMIKVLDYLPGQMPADKPRYLMGVGKPEDLVEGVRRGVDMFDCVMPTRNARNGHLFIDTGVLKIRNAFHRHDDSPLDPTCDCYTCQNFSRAYLHHLDKCGEMLGSMLNTIHNLRHYQRLMAGLREAIQQGTLAAFVDSFYAKRGLPVPPLE

SEQ ID NO: 59753 - protein, 377 aa, unidentified; identical to SEQ ID NO: 59752
  source 1..377: note = Pseudomonas protegens
  REGION 1..377: note = tr|A0A2T6GIE2|A0A2T6GIE2_9PSED Queuine tRNA-ribosyltransferase OS=Pseudomonas protegens OX=380021; GN = tgt PE=3 SV=1

SEQ ID NO: 59754 - protein, 377 aa, Pseudomonas pseudoalcaligenes
  REGION 1..377: note = tr|W6R0R5|W6R0R5_PSEP5 Queuine tRNA-ribosyltransferase OS=Pseudomonas pseudoalcaligenes (strain CECT 5344) OX=1182590 GN=tgt PE=3 SV=1
MSRTCRMSFELLATDGKARRGRLTFPRGVVETPAFMPVGTYGTVKGMLPRDIEAIGAQIILGNTFHLWLRPGMEVIKKHGDLHDFMQWQGPILTDSGGFQVFSLGAMRKIKEEGVYFASPVDGTKVFMGPEESMQVQRDLGSDIVMIFDECTPYPAEFDVAKRSMELSLRWAKRSKTAHGESSAALFGIVQGGMHEELRMRSLEGLCEIGFDGLAIGGLSVGEPKEEMIRVLDFLPPHMPADKPRYLMGVGKPEDLVEGVRRGVDMFDCVMPTRNARNGHLFVDTGVVKIRNAVHKHDDSSLDPTCDCYTCKHFSRAYLHHLDKCGEMLGSMLNTIHNLRHYQRVMAGLREAIGQGTLAAFVETFYAKRGLPVPPLD

SEQ ID NO: 59755 - protein, 376 aa, Pseudomonas psychrophila
  REGION 1..376: note = tr|A0A3N1ZLQ3|A0A3N1ZLQ3_9PSED Queuine tRNA-ribosyltransferase OS=Pseudomonas psychrophila; OX = 122355 GN=tgt PE=3 SV=1
MSNCRMSFELLATDGKARRGRLTFPRGVVETPAFMPVGTYGTVKGMLPRDIEAIGAQMILGNTFHLWLRPGTEVIKKHGDLHDFMKWQGPILTDSGGFQVFSLGAMRKIKEEGVTFASPVDGAKVFMGPEESMQVQRDLGSDVVMIFDECTPYPADEDVARVSMELSLRWAQRSKNAHGDNTAALFGIVQGGMHQNLRERSLEGLNKIGFDGLAIGGLSVGEPKHEMIKVLDYLPAMMPADKPRYLMGVGKPEDLVEGVRRGVDMFDCVMPTRNARNGHLFIDTGVLKIRNAFHRHDDSPLDPTCDCYTCQNFSRAYLHHLDKCGEMLGSMLNTIHNLRHYQVLMAGLREAIQQGTLATFVDAFYAKRGLPVPPLD

SEQ ID NO: 59756 - protein, 371 aa, Pseudomonas psychrophila
  REGION 1..371: note = tr|S6I4H2|S6I4H2_9PSED Queuine tRNA-ribosyltransferase OS=Pseudomonas psychrophila; OX = 122355 GN=tgt PE=3 SV=1
MSFELLATDGKARRGRLTFPRGVVETPAFMPVGTYGTVKGMLPRDIVDTGAQMILGNTFHLWLRPGTEVIKKHGDLHDFMKWQGPILTDSGGFQVFSLGAMRKIKEEGVTFASPVDGAKVFMGPEESMQVQRDLGSDVVMIFDECTPYPADEEVARVSMELSLRWAQRSKNAHGDNTAALFGIVQGGMHQNLRERSLEGLNKIGFDGLAIGGLSVGEPKHEMIKVLDYLPAMMPADKPRYLMGVGKPEDLVEGVRRGVDMFDCVMPTRNARNGHLFIDTGVIKIRNAFHRHDDSSLDPTCDCYTCQNFSRAYLHHLDKCGEMLGSMLNTIHNLRHYQVLMAGLREAIQQGTLATFVDAFYAKRGLPVPPLD

SEQ ID NO: 59757 - protein, 375 aa, Pseudomonas psychrotolerans
  REGION 1..375: note = tr|A0A1G5N6G7|A0A1G5N6G7_9PSED Queuine tRNA-ribosyltransferase OS=Pseudomonas psychrotolerans; OX = 237610 GN=tgt PE=3 SV=1
MSFMNFELLATEGKARRGRLTFPRGVVETPAFMPVGTYGTVKGMLPDSVADIGAQIILGNTFHLWLRPGTEVIQRHGDLHDFMQWQGPILTDSGGFQVFSLGALRKIKEEGVYFASPVDGAKVFMGPEESMAVQRALGSDIVMIFDECTPYPADFDTARRSMELSLRWAKRSREAHGDNPSALFGIVQGGMHEELRLRSLEGLEGIGFDGYAIGGLSVGEPKEEMIRVLDFLPPHLPADKPRYLMGVGKPEDLVEGVRRGVDMFDCVMPTRNARNGHLFIDTGVLKLRNAVHRHDETPLDPTCDCYTCKHFSRAYLHHLDKCGEMLGSMLNTIHNLRYYQRVMAGLRQAIQEGKLADFVDAFYARRGLPTPPLDS

SEQ ID NO: 59758 - protein, 372 aa, Pseudomonas psychrotolerans
  REGION 1..372: note = tr|A0A147GY05|A0A147GY05_9PSED Queuine tRNA-ribosyltransferase OS=Pseudomonas psychrotolerans; OX = 237610 GN=tgt PE=3 SV=1
MNFELLATEGKARRGRLTFPRGVVETPAFMPVGTYGTVKGMLPDSVADIGAQIILGNTFHLWLRPGTEVIQRHGDLHDFMQWQGPILTDSGGFQVFSLGALRKIKEEGVYFASPVDGAKVFMGPEESMAVQRALGSDIVMIFDECTPYPADFDTARRSMELSLRWAKRSREAHGDNPSALFGIVQGGMHEELRLRSLEGLEGIGFDGYAIGGLSVGEPKEEMIRVLDFLPPHLPADKPRYLMGVGKPEDLVEGVRRGVDMFDCVMPTRNARNGHLFIDTGVLKIRNAVHRHDESPLDPTCDCYTCKHFSRAYLHHLDKCGEMLGSMLNTIHNLRYYQRVMAGLRQAIQEGKLADFVDAFYARRGLPTPPLGS

SEQ ID NO: 59759 - protein, 377 aa, unidentified
  source 1..377: note = Pseudomonas punonensis
  REGION 1..377: note = tr|A0A1M6WX21|A0A1M6WX21_9PSED Queuine tRNA-ribosyltransferase OS=Pseudomonas punonensis; OX = 1220495 GN=tgt PE=3 SV=1
MTRSCRMSFELLATDGKARRGRLTFPRGVVETPAFMPVGTYGTVKGMLPRDIEAIGAQIILGNTFHLWLRPGTEVIKRHGDLHDFMQWQGPILTDSGGFQVFSLGAMRKIKEEGVTFASPVDGSKVFMGPEESMQVQRDLGSDIVMIFDECTPYPAEFDVAKTSMELSLRWAKRSKVAHGESTAALFGIVQGGMHESLRMRSLEGLNELEFDGLAIGGLSVGEPKEEMIKVLDYLPGQMPSDKPRYLMGVGKPEDLVEGVRRGVDMFDCVMPTRNARNGHLFIDTGVLKIRNAFHRHDDSPLDPTCDCYTCKHFSRAYLHHLDKCGEMLGSMLNTIHNLRHYQRLMAGLREAIQQGTLASFVDAFYARRGLPTPPLD

SEQ ID NO: 59760 - protein, 371 aa, Pseudomonas putida
  REGION 1..371: note = sp|Q88PL7|TGT_PSEPK Queuine tRNA-ribosyltransferase; OS = Pseudomonas putida (strain ATCC 47054 / DSM 6125 / NCIMB 11950 / KT2440) OX=160488 GN=tgt PE=3 SV=1
MSFELLATDGKARRGRITFPRGTVETPAFMPVGTYGTVKGMLPRDIEAIGAEMILGNTFHLWLRPGTEVIKKHNGLHDFMQWKGPILTDSGGFQVFSLGAMRKIKEEGVTFASPVDGSKVFMGPEESMQVQRDLGSDVVMIFDECTPYPAEHDVARTSMELSLRWAQRSKNAHADNTAALFGIVQGGMYQDLRMRSLEGLENIGFDGLAIGGLSVGEPKHEMIKVLDYLPDQMPADKPRYLMGVGKPEDLVEGVRRGVDMFDCVMPTRNARNGHLFVDTGVIKIRNAFHRHDESPLDPTCDCYTCTNFSRAYLHHLDKCGEMLSSMLNTIHNLRHYQRLMAGLREAIQQGKLAAFVDAFYAKRGLPVPPLD

SEQ ID NO: 59761 - protein, 377 aa, Pseudomonas putida
  REGION 1..377: note = tr|A0A0P7C819|A0A0P7C819_PSEPU Queuine tRNA-ribosyltransferase OS=Pseudomonas putida OX=303; GN = tgt PE=3 SV=1
MSRTCRMSFELLATDGKARRGRITFPRGTVETPAFMPVGTYGTVKGMLPRDIEAIGAEMILGNTFHLWLRPGTEVIKKHNGLHDFMQWKGPILTDSGGFQVFSLGAMRKIKEEGVTFASPVDGSKVFMGPEESMQVQRDLGSDVVMIFDECTPYPAEHDVARTSMELSLRWAQRSKNAHADNTAALFGIVQGGMYQDLRMRSLEGLENIGFDGLAIGGLSVGEPKHEMIKVLDYLPGQMPADKPRYLMGVGKPEDLVEGVRRGVDMFDCVMPTRNARNGHLFVDTGVIKIRNAFHRHDESPLDPTCDCYTCTNFSRAYLHHLDKCGEMLSSMLNTIHNLRHYQRLMAGLREAIQQGKLAAFVDAFYAKRGLPVPPLD

SEQ ID NO: 59762 - protein, 377 aa, unidentified
  source 1..377: note = Pseudomonas reidholzensis
  REGION 1..377: note = tr|A0A383S1J9|A0A383S1J9_9PSED Queuine tRNA-ribosyltransferase OS=Pseudomonas reidholzensis; OX = 1785162 GN=tgt PE=3 SV=1
MSRTCRMSFELLATDGKARRGRLTFPRGTVETPAFMPVGTYGTVKGMLPRDIEATGAEIILGNTFHLWLRPGTEVIKKHNGLHDFMQWKGPILTDSGGFQVFSLGAMRKIKEEGVTFASPVDGSKVFMGPEESMQVQRDLGSDIVMIFDECTPYPAEHDVARTSMELSLRWAQRSKNAHGDNTAALFGIVQGGMYQDLRQRSLEALVNIDFDGLAIGGLSVGEPKHEMIKVLDYLPDMMPADKPRYLMGVGKPEDLVEGVRRGVDMFDCVMPTRNARNGHLFIDTGVIKIRNAFHRHDDSPLDPTCDCYTCTNFSRAYLHHLDKCGEMLSSMLNTIHNLRHYQRLMAGLREAIQQGKLAAFVDAFYAKRGLPVPPLD

SEQ ID NO: 59763 - protein, 377 aa, Pseudomonas reinekei; identical to SEQ ID NO: 59690
  REGION 1..377: note = tr|A0A1H0LNI0|A0A1H0LNI0_9PSED Queuine tRNA-ribosyltransferase OS=Pseudomonas reinekei OX=395598; GN = tgt PE=3 SV=1

SEQ ID NO: 59764 - protein, 377 aa, Pseudomonas resinovorans
  REGION 1..377: note = tr|S6AD03|S6AD03_PSERE Queuine tRNA-ribosyltransferase OS=Pseudomonas resinovorans NBRC 106553 OX=1245471 GN=tgt PE=3 SV=1
MTRTCRMNFELLATDGKARRGRLTFPRGVVETPAFMPVGTYGTVKGMLPRDIEAIGAQIILGNTFHLWLRPGMEVIKRHGDLHDFMQWQGPILTDSGGFQVFSLGAMRKIKEEGVTFASPVDGAKVFMGPEESMQVQRDLGSDIVMIFDECTPYPADVDTAKRSMELSLRWAKRSKVAHGESSAALFGIVQGGMHEDLRMRSLEGLSEIGFDGLAIGGLSVGEPKEEMIRVLDYLPGQMPADKPRYLMGVGKPEDLVEGVRRGVDMFDCVMPTRNARNGHLFIETGVLKIRNAVHRHDDSPLDASCDCYTCKHFSRAYLHHLDKCGEMLGSMLNTIHNLRHYQRLMAGLREAIQQGKLAVFVDAFYAKRGLPTPPLG

SEQ ID NO: 59765 - protein, 377 aa, Pseudomonas rhizosphaerae
  REGION 1..377: note = tr|A0A089YLS2|A0A089YLS2_9PSED Queuine tRNA-ribosyltransferase OS=Pseudomonas rhizosphaerae; OX = 216142 GN=tgt PE=3 SV=1
MSRTCRMSFELLATDGKARRGRLTFPRGVVETPAFMPVGTYGTVKGMLPRDIEAIGAQMILGNTFHLWLRPGTEVIKAHGDLHDFMQWKGPILTDSGGFQVFSLGAMRKIKEEGVYFASPVDGSKVFMGPEESMQVQRDLGSDVVMIFDECTPYPADEQTARTSMELSLRWAQRSKDAHAESTAALFGIVQGGMHENLRMRSLEGLDKIGFDGLAIGGLSVGEPKHEMIKVLDYLPGQMPADKPRYLMGVGKPEDLVEGVRRGVDMFDCVMPTRNARNGHLFIDTGVLKIRNAFHRHDDSPLDPTCDCYTCRNFSRAYLHHLDKCGEMLGSMLNTIHNLRHYQLLMAGLREAIQQGTLAAFVDAFYAKRGLPVPPLD

SEQ ID NO: 59766 - protein, 374 aa, Pseudomonas rhodesiae; identical to SEQ ID NO: 59637
  REGION 1..374: note = tr|A0A5C5NTN3|A0A5C5NTN3_9PSED Queuine tRNA-ribosyltransferase OS=Pseudomonas rhodesiae OX=76760; GN = tgt PE=3 SV=1

SEQ ID NO: 59767 - protein, 375 aa, Pseudomonas sabulinigri
  REGION 1..375: note = tr|A0A1H1RCD1|A0A1H1RCD1_9PSED Queuine tRNA-ribosyltransferase OS=Pseudomonas sabulinigri; OX = 472181 GN=tgt PE=3 SV=1
MSHMSFELLATDGKARRGRLSFPRGVVETPAFMPVGTYGTVKGMLPRDVEAIGAQIILGNTFHLWLRPGTKVIQQHGDLHDFMQWKGPILTDSGGFQVFSLGAMRKIKEEGVYFSSPVDGAKVFMGPEESMQVQRELGSDIVMIFDECTPYPADEDTARRSMELSLRWAKRSKAAHEGNPSALFGIVQGGMHENLRLRSLEGLCEIGFDGLAIGGLSVGEPKDEMMRVLDFLPGHMPPEKPRYLMGVGKPEDLVEGVRRGVDMFDCVMPTRNARNGHLFTEAGVIKIRNAVHRHDQSPLDPACDCYTCQNFSRAYLHHLDKCGEMLGSMLNTIHNLRHYQRLMAGLRSAIQQGTLTDFVDDFYAKLGLPVPPLQA

SEQ ID NO: 59768 - protein, 374 aa, unidentified
  source 1..374: note = Pseudomonas sagittaria
  REGION 1..374: note = tr|A0A1I5NZT4|A0A1I5NZT4_9PSED Queuine tRNA-ribosyltransferase OS=Pseudomonas sagittaria; OX = 1135990 GN=tgt PE=3 SV=1
MSHMSFELLATDGKARRGRLTFPRGVVETPAFMPVGTYGTVKGMLPRDIEAIGAQIILGNTFHLWLRPGTEVIKRHGDLHDFMQWQGPILTDSGGFQVFSLGAMRKIKEEGVYFASPVDGAKVFMGPEESMQVQRDLGSDIVMIFDECTPYPADFDTAKRSMELSQRWAKRSKVAHEGNPAALFGIVQGGMHEELRLRSLEGLLEIGFDGLAIGGLSVGEPKEDMIRILDFLPPHLPADKPRYLMGVGKPEDLVEGVRRGIDMFDCVMPTRNARNGHLFTDSGVIKIRNAVHKHDDSSLDPTCDCYTCRNFSRAYLHHLDKCGEMLGSMLNTIHNLRHYQRLMAGLRDAIGQGTLPAFVADFYARRGLPVPPLN

SEQ ID NO: 59769 - protein, 375 aa, unidentified
  source 1..375: note = Pseudomonas salegens
  REGION 1..375: note = tr|A0A1H2GVR6|A0A1H2GVR6_9PSED Queuine tRNA-ribosyltransferase OS=Pseudomonas salegens OX=1434072; GN = tgt PE=3 SV=1
MSDMQFELLATDGKARRGRLTFPRGTVETPAFMPVGTYGTVKGMLPRDVAAIGADIILGNTFHLWLRPGTQVIQEHGDLHDFMQWQGPILTDSGGFQVFSLGAMRKIKEEGVYFSSPVDGAKVFMGPEESMQVQRELGSDIVMIFDECTPYPAEHDVAARSMELSLRWAQRSKNAHEGNPSALFGIVQGGMYQDLRLRSLEGLDKIGFDGLAIGGLSVGEPKEEMIKVLDYLPGQMPADKPRYLMGVGKPQDLVEGVRRGVDMFDCVMPTRNARNGHLFIDSGVIKIRNAVHRHDQNPLDAACDCYTCQHFSRAYLHHLDKCGEMLGSMLNTIHNLRHYQRLMAGLRGAIQQGTLSDFVDDFYARLGLPVPPLAT

SEQ ID NO: 59770 - protein, 374 aa, Pseudomonas salomonii
  REGION 1..374: note = tr|A0A3M4Q7T1|A0A3M4Q7T1_9PSED Queuine tRNA-ribosyltransferase OS=Pseudomonas salomonii OX=191391; GN = tgt PE=3 SV=1
MSRMSFELLATDGKARRGRLTFPRGTVETPAFMPVGTYGTVKGMLPRDIVATGAEIILGNTFHLWLRPGTEVIKKHGDLHDFMKWQGPILTDSGGFQVFSLGAMRKIKEEGVTFASPVDGSKVFMGPEESMQVQRDLGSDIVMIFDECTPYPADEDVARISMELSLRWAQRSKNAHGDNTAALFGIVQGGMHESLRKRSLEGLDKIGFDGLAIGGLSVGEPKHEMIKVLDYLPGLMPADKPRYLMGVGKPEDLVEGVRRGVDMFDCVMPTRNARNGHLFIDTGVLKIRNAFHRHDDSSLDPTCDCYTCQNFSRAYLHHLDKCGEMLGSMLNTIHNLRHYQVLMAGLREAIQQGTLAAFVDAFYAKRGLPVPPLD

SEQ ID NO: 59771 - protein, 374 aa, Pseudomonas salomonii; identical to SEQ ID NO: 59578
  REGION 1..374: note = tr|A0A1H3T988|A0A1H3T988_9PSED Queuine tRNA-ribosyltransferase OS=Pseudomonas salomonii OX=191391; GN = tgt PE=3 SV=1

SEQ ID NO: 59772 - protein, 377 aa, Pseudomonas saponiphila; identical to SEQ ID NO: 59752
  REGION 1..377: note = tr|A0A1H4K6K7|A0A1H4K6K7_9PSED Queuine tRNA-ribosyltransferase OS=Pseudomonas saponiphila; OX = 556534 GN=tgt PE=3 SV=1

SEQ ID NO: 59773 - protein, 375 aa, unidentified
  source 1..375: note = Pseudomonas saudimassiliensis
  REGION 1..375: note = tr|A0A078MED5|A0A078MED5_9PSED Queuine tRNA-ribosyltransferase OS=Pseudomonas saudimassiliensis; OX = 1461581 GN=tgt PE=3 SV=1
MSHMQFEISATDGKARRGRLTFPRGVVETPAFMPVGTYGTVKGMLPRDVKDIGAQIILGNTFHLWLRPGTEVIRKHGDLHDFMQWQGPILTDSGGFQVFSLGAMRKIKEEGVYFSSPVDGAKVFMGPEESMQVQRDLGSDIVMIFDECTPYPADLDTARRSMELSLRWAKRSKVAHEGNPSALFGIVQGGMHEDLRARSLEGLCEIGFDGLAIGGLSVGEPKEDMIRILDYLPPLMPPEKPRYLMGVGKPEDLVEGVRRGVDMFDCVMPTRNARNGHLFTDTGVVKIRNAVHRHDDSPLDPGCDCYTCQHFTRSYLHHLDKCGEMLGSMLNTIHNLRHYQRVMHGLRGAIQQGTLTAFVDNFYARLGQPVPPLEA

SEQ ID NO: 59774 - protein, 377 aa, unidentified
  source 1..377: note = Pseudomonas saudiphocaensis
  REGION 1..377: note = tr|A0A078LUN3|A0A078LUN3_9PSED Queuine tRNA-ribosyltransferase OS=Pseudomonas saudiphocaensis; OX = 1499686 GN=tgt PE=3 SV=1
MSRTCHMSFELLATDGRARRGRLTFPRGTVETPAFMPVGTYGTVKGMLPRDVEEIGAEIILGNTFHLWLRPGTEVIKAHGDLHDFMQWKGPILTDSGGFQVFSLGAMRKIKEEGVYFASPVDGAKVFMGPEESMQVQRDLGSDIVMIFDECTPYPADEDVARRSMELSLRWAKRSKEAHGDSSAALFGIVQGGMHESLRMRSLEGLCEIGFDGLAIGGLSVGEPKEEMIRVLDFLPERMPADKPRYLMGVGKPEDLVEGVRRGVDMFDCVMPTRNARNGHLFTDAGVVKIRNAVHRHDDSPLEAGCDCYTCKHFSRGYLHHLDKCGEMLGSMLNTIHNLRHYQRLMAGLRQAIQQGTLATFVDAFYAKRGLPTPPLA

SEQ ID NO: 59775 - protein, 377 aa, Pseudomonas savastanoi; identical to SEQ ID NO: 59609
  REGION 1..377: note = tr|A0A0N8SX62|A0A0N8SX62_PSESS Queuine tRNA-ribosyltransferase OS=Pseudomonas savastanoi pv. savastanoi OX=360920 GN=tgt PE=3 SV=1

SEQ ID NO: 59776 - protein, 377 aa, Pseudomonas savastanoi
  REGION 1..377: note = tr|A0A3M4RHR5|A0A3M4RHR5_PSESG Queuine tRNA-ribosyltransferase OS=Pseudomonas savastanoi pv. glycinea OX=318 GN=tgt PE=3 SV=1
MSRTSRMSFELLATDGKARRGRLTFPRGVVETPAFMPVGTYGTVKGMLPRDIEATGAQIILGNTFHLWLRPGTEVIKAHGDLHDFMQWKGPILTDSGGFQVFSLGAMRKIKEEGVTFASPVDGAKVFMGPEESMQVQRDLGSDIVMIFDECTPYPADEDVARVSMELSLRWAKRSKVAHGESTAALFGIVQGGMHESLRKRSLEGLDQIGFDGLAIGGLSVGEPKHEMIKVLDYLPGLMPPEKPRYLMGVGKPEDLVEGVRRGIDMFDCVMPTRNARNGHLFIDIGVLKIRNAFHRHDDSPLDPTCDCYTCQNFSRAYLHHLDKCGEMLGSMLNTIHNLRHYQRLMAGLREAIQQGTLAAFVDAFYAKRGIPTPPMD

SEQ ID NO: 59777 - protein, 377 aa, Pseudomonas segetis
  REGION 1..377: note = tr|A0A238ZFZ8|A0A238ZFZ8_9PSED Queuine tRNA-ribosyltransferase OS=Pseudomonas segetis OX=298908; GN = tgt PE=3 SV=1
MTRTCRMSFELLATDGKARRGRLTFPRGVVETPAFMPVGTYGTVKGMLPRDIEAIGAQMILGNTFHLWLRPGTEVIKEHGDLHDFMQWKGPILTDSGGFQVFSLGAMRKIKEEGVTFASPVDGAKVFMGPEESMQVQRDLGSDVVMIFDECTPYPAEFDVAKTSMELSLRWAKRSKAAHGDNTAALFGIVQGGMYQELRQRSLEGLNEIGFDGLAIGGLSVGEPKEEMIKVLDYLPGLMPAEKPRYLMGVGKPEDLVEGVRRGVDMFDCVMPTRNARNGHLFVDTGVLKIRNAAHRHDDSPLDANCDCYTCQNFSRAYLHHLDKCGEMLGSMLNTIHNLRHYQRLMAGLRGAIQQGTLAAFVDSFYSQRGLPTPPLD

SEQ ID NO: 59778 - protein, 377 aa, Pseudomonas seleniipraecipitans
  REGION 1..377: note = tr|A0A1G7JA34|A0A1G7JA34_9PSED Queuine tRNA-ribosyltransferase OS=Pseudomonas seleniipraecipitans; OX = 640205 GN=tgt PE=3 SV=1
MTRSCRMSFELLATDGKARRGRLTFPRGVVETPAFMPVGTYGTVKGMLPRDIEAIGAQIILGNTFHLWLRPGTEVIKRHGDLHDFMQWQGPILTDSGGFQVFSLGAMRKIKEEGVTFASPVDGSKVFMGPEESMQVQRDLGSDIVMIFDECTPYPAEFDVAKTSMELSLRWAKRSKVAHGESTAALFGIVQGGMHESLRMRSLEGLSELEFDGLAIGGLSVGEPKEEMIKVLDYLPEQMPSEKPRYLMGVGKPEDLVEGVRRGVDMFDCVMPTRNARNGHLFIDTGVLKIRNAFHRHDDSPLDPTCDCYTCKHFSRAYLHHLDKCGEMLGSMLNTIHNLRHYQRLMAGLREAIQQGTLAAFVDAFYARRGLPTPPLN

SEQ ID NO: 59779 - protein, 377 aa, unidentified
  source 1..377: note = Pseudomonas sihuiensis
  REGION 1..377: note = tr|A0A1H2M3M7|A0A1H2M3M7_9PSED Queuine tRNA-ribosyltransferase OS=Pseudomonas sihuiensis; OX = 1274359 GN=tgt PE=3 SV=1
MSRTCRMSFELLATDGKARRGRLTFPRGVVETPAFMPVGTYGTVKGMLPRDIEAIGAQIILGNTFHLWLRPGMEVIKKHGDLHDFMQWQGPILTDSGGFQVFSLGAMRKIKEEGVYFASPVDGAKVFMGPEESMQVQRDLGSDIVMIFDECTPYPAEFDVAKRSMELSLRWAKRSKTAHGESTAALFGIVQGGMHEELRMRSLEGLCEIGFDGLAIGGLSVGEPKEEMIRVLDFLPPHMPADKPRYLMGVGKPEDLVEGVRRGVDMFDCVMPTRNARNGHLFVDTGVVKIRNAVHKHDDSSLDPTCDCYTCKHFSRAYLHHLDKCGEMLGSMLNTIHNLRHYQRVMAGLREAIGQGTLAAFVETFYAKRGLPVPPLD

SEQ ID NO: 59780 - protein, 374 aa, unidentified
  source 1..374: note = Pseudomonas silesiensis
  REGION 1..374: note = tr|A0A191YYZ4|A0A191YYZ4_9PSED Queuine tRNA-ribosyltransferase OS=Pseudomonas silesiensis; OX = 1853130 GN=tgt PE=3 SV=1
MSRMSFELLATDGKARRGRLTFPRGTVETPAFMPVGTYGTVKGMLPRDITATGAEIILGNTFHLWLRPGTEVIKKHGDLHDFMQWKGPILTDSGGFQVFSLGAMRKIKEEGVTFASPVDGAKVFMGPEESMQVQRDLGSDIVMIFDECTPYPADEDVARVSMELSLRWAKRSKEAHGDNTAALFGIVQGGMHQDLRMRSLEGLDQIGFDGLAIGGLSVGEPKHEMIKVLDYLPGQMPADKPRYLMGVGKPEDLVEGVRRGVDMFDCVMPTRNARNGHLFIDTGVLKIRNAFHRHDDSPLDPTCDCYTCQNFSRAYLHHLDKCGEMLGSMLNTIHNLRHYQVLMAGLREAIQQGTLAAFVDAFYAKRGLPVPPLD

SEQ ID NO: 59781 - protein, 374 aa, Pseudomonas simiae; identical to SEQ ID NO: 59578
  REGION 1..374: note = tr|A0A1N7UKM4|A0A1N7UKM4_9PSED Queuine tRNA-ribosyltransferase OS=Pseudomonas simiae OX=321846; GN = tgt PE=3 SV=1

SEQ ID NO: 59782 - protein, 377 aa, unidentified; identical to SEQ ID NO: 59722
  source 1..377: note = Pseudomonas soli
  REGION 1..377: note = tr|A0A1H9NHX0|A0A1H9NHX0_9PSED Queuine tRNA-ribosyltransferase OS=Pseudomonas soli OX=1306993; GN = tgt PE=3 SV=1

SEQ ID NO: 59783 - protein, 371 aa, unidentified
  source 1..371: note = Pseudomonas songnenensis
  REGION 1..371: note = tr|A0A482U809|A0A482U809_9PSED Queuine tRNA-ribosyltransferase OS=Pseudomonas songnenensis; OX = 1176259 GN=tgt PE=3 SV=1
MSFELLATDGKARRGRLTFPRGTVETPAFMPVGTYGTVKGMLPRDIEAIGAQIILGNTFHLWLRPGTEVIKRHGDLHDFMQWQGPILTDSGGFQVFSLGAMRKIKEEGVYFASPVDGAKVFMGPEESMQVQRDLGSDIVMIFDECTPYPADEDVARRSMELSLRWAKRSKIAHGDSSAALFGIVQGGMHESLRLRSLEGLCEIGFDGLAIGGLSVGEPKEEMIRVLDFLPPHMPAEKPRYLMGVGKPVDLVEGVRRGVDMFDCVMPTRNARNGHLFTDTGVIKIRNAVHKHDDSPLDPSCDCYTCKHFSRAYLHHLDKCGEMLGSMLNTIHNLRHYQRVMAGLRDAIQQGTLAAFVDAFYAKRGLPTPPLA

SEQ ID NO: 59784 - protein, 375 aa, Pseudomonas sp.
  REGION 1..375: note = tr|A0A1S1GEX9|A0A1S1GEX9_9PSED Queuine tRNA-ribosyltransferase OS=Pseudomonas sp. HMSC75E02; OX = 1608908 GN=tgt PE=3 SV=1
MSFMKFELLATDGKARRGRLSFPRGVVETPAFMPVGTYGTVKGMLPRDIEGIGAQIILGNTFHLWLRPGTEVIRKHGDLHDFMQWQGPILTDSGGFQVFSLGALRKIKEEGVYFASPVDGAKVFMGPEESMAVQRALGSDIVMIFDECTPYPAEFDVAKRSMELSLRWAKRSKIAHGDSPSALFGIVQGGMHEELRMRSLEGLQEIGFDGLAIGGLSVGEPKEEMIRVLDFLPPRMPADKPRYLMGVGKPEDLVEGVRRGVDMFDCVMPTRNARNGHLFVDTGVIKIRNAVHKHDESPLDSTCDCYTCKHFSRAYLYHLDKCGEMLGSMLNTIHNLRHYQRLMAGLREAIQQGTLAAFVDAFYAKRGLPTPPLGD

SEQ ID NO: 59785 - protein, 371 aa, Pseudomonas sp.
  REGION 1..371: note = tr|S2FVU1|S2FVU1_9PSED Queuine tRNA-ribosyltransferase OS=Pseudomonas sp. G5(2012); OX = 1268068 GN=tgt PE=3 SV=1
MSFELLATDGKARRGRLTFPRGTVETPAFMPVGTYGTVKGMLPRDIEATGAEIILGNTFHLWLRPGMEVIKKHGDLHDFMQWKGPILTDSGGFQVFSLGAMRKIKEEGVTFASPVDGAKVFMGPEESMQVQRDLGSDIVMIFDECTPYPADEDVARVSMELSLRWAQRSKNAHADNTAALFGIVQGGMHQDLRMRSLEGLDKIGFDGLAIGGLSVGEPKHEMIKVLDYLPGQMPADKPRYLMGVGKPEDLVEGVRRGVDMFDCVMPTRNARNGHLFIDTGVIKIRNAFHRHDDSPLDPTCDCYTCQNFSRAYLHHLDKCGEMLGSMLNTIHNLRHYQVLMAGLREAIQQGTLAAFVDAFYAKRGLPVPPLD

SEQ ID NO: 59786 - protein, 377 aa, Pseudomonas straminea
  REGION 1..377: note = tr|A0A1I1VB44|A0A1I1VB44_PSEOC Queuine tRNA-ribosyltransferase OS=Pseudomonas straminea OX=47882; GN = tgt PE=3 SV=1
MTRSCRMSFELLATDGKARRGRLTFPRGVVETPAFMPVGTYGTVKGMLPRDIEAIGAQIILGNTFHLWLRPGTEVIKRHGDLHDFMQWQGPILTDSGGFQVFSLGAMRKIKEEGVTFASPVDGSKVFMGPEESMQVQRDLGSDIVMIFDECTPYPAEFDVAKTSMELSLRWAKRSKIAHGESTAALFGIVQGGMHESLRMRSLEGLSELEFDGLAIGGLSVGEPKEEMIKVLDYLPGQMPGDKPRYLMGVGKPEDLVEGVRRGVDMFDCVMPTRNARNGHLFVDTGVLKIRNAFHRHDDSPLDPTCDCYTCKHFSRAYLHHLDKCGEMLGSMLNTIHNLRHYQRLMAGLREAIQQGTLAAFVDAFYARRGLPTPPLD

SEQ ID NO: 59787 - protein, 371 aa, Pseudomonas stutzeri
  REGION 1..371: note = tr|I4JLV7|I4JLV7_PSEST Queuine tRNA-ribosyltransferase OS=Pseudomonas stutzeri TS44; OX = 477228 GN=tgt PE=3 SV=1
MSFELLATDGKARRGRLTFPRGTVETPAFMPVGTYGTVKGMLPRDIEGIGAQIILGNTFHLWLRPGTEVIRQHGDLHDFMQWQGPILTDSGGFQVFSLGAMRKIKEEGVYFASPVDGAKVFMGPEESMQVQRELGSDIVMIFDECTPYPADEETARRSMELSLRWAKRSKTAHGDSSAALFGIVQGGMHEALRMRSLEGLCEIGFDGLAIGGLSVGEPKEEMIRVLDFLPPRMPADKPRYLMGVGKPEDLVEGVRRGVDMFDCVMPTRNARNGHLFTDTGVIKIRNAIHRHDNSPLDAGCDCYTCQHFSRAYLHHLDKCGEMLGSMLNTIHNLRHYQRLMAGLRDAIQQGTLAAFVDAFYARRGMPTPPVA

SEQ ID NO: 59788 - protein, 371 aa, Pseudomonas stutzeri
  REGION 1..371: note = tr|M2VQS1|M2VQS1_PSEST Queuine tRNA-ribosyltransferase OS=Pseudomonas stutzeri NF13; OX = 1212548 GN=tgt PE=3 SV=1
MSFELLATDGKARRGRLTFPRGTVETPAFMPVGTYGTVKGMLPRDIEAIGAQIILGNTFHLWLRPGMEVIKRHGDLHDFMQWQGPILTDSGGFQVFSLGAMRKIKEEGVYFASPVDGAKVFMGPEESMQVQRDLGSDIVMIFDECTPYPADEDVARRSMELSLRWAKRSKVAHGDSPAALFGIVQGGMHESLRMRSLEGLCEIGFDGLAIGGLSVGEPKEEMIRVLDFLPPQMPADKPRYLMGVGKPEDLVEGVRRGVDMFDCVMPTRNARNGHLFVDSGVIKIRNAVHKHDDSPLDPSCDCYTCKHFSRAYLHHLDKCGEMLGSMLNTIHNLRHYQRVMAGLRDAIQQGTLAAFVDAFYAKRGLPTPPLA

SEQ ID NO: 59789 - protein, 374 aa, Pseudomonas synxantha; identical to SEQ ID NO: 59587
  REGION 1..374: note = tr|I4L9D1|I4L9D1_9PSED Queuine tRNA-ribosyltransferase OS=Pseudomonas synxantha BG33R; OX = 96901 GN=tgt PE=3 SV=1

SEQ ID NO: 59790 - protein, 374 aa, Pseudomonas synxantha; identical to SEQ ID NO: 59587
  REGION 1..374: note = tr|A0A3F3J8A8|A0A3F3J8A8_9PSED Queuine tRNA-ribosyltransferase OS=Pseudomonas synxantha OX=47883; GN = tgt PE=3 SV=1

SEQ ID NO: 59791 - protein, 371 aa, Pseudomonas syringae
  REGION 1..371: note = sp|Q887B0|TGT_PSESM Queuine tRNA-ribosyltransferase; OS = Pseudomonas syringae pv. tomato (strain ATCC BAA-871 / DC3000) OX=223283 GN=tgt PE=3 SV=1
MSFELLATDGKARRGRLTFPRGVVETPAFMPVGTYGTVKGMLPRDIEATGAQMILGNTFHLWLRPGTEVIKGHGDLHDFMQWKGPILTDSGGFQVFSLGAMRKIKEEGVTFASPVDGAKVFMGPEESMQVQRDLGSDVVMIFDECTPYPADEDVARVSMELSLRWAKRSKVAHGENTAALFGIVQGGMHENLRKRSLEGLDEIGFDGLAIGGLSVGEPKHEMIKVLDYLPGLMPADKPRYLMGVGKPEDLVEGVRRGVDMFDCVMPTRNARNGHLFIDTGVLKIRNAFHRHDNTPLDPTCDCYTCKNFSRAYLHHLDKCGEMLGSMLNTIHNLRHYQLLMAGLREAIQQGTLAAFVDAFYAKRGLPTPPLG

SEQ ID NO: 59792 - protein, 377 aa, Pseudomonas syringae
  REGION 1..377: note = tr|A0A0Q0C540|A0A0Q0C540_PSEAP Queuine tRNA-ribosyltransferase OS=Pseudomonas syringae pv. aptata; OX = 83167 GN=tgt PE=3 SV=1
MSRTCRMSFELLATDGKARRGRLTFPRGVVETPAFMPVGTYGTVKGMLPRDIEATGAQMILGNTFHLWLRPGTEVIKGHGDLHDFMQWKGPILTDSGGFQVFSLGAMRKIKEEGVTFASPVDGAKVFMGPEESMQVQRDLGSDVVMIFDECTPYPADEDVARVSMELSLRWAKRSKIAHGENTAALFGIVQGGMHENLRKRSLEGLDEIGFDGLAIGGLSVGEPKHEMIKVLDYLPGLMPADKPRYLMGVGKPEDLVEGVRRGVDMFDCVMPTRNARNGHLFTDTGVLKIRNAFHRHDNSPLDPTCDCYTCQNFSRAYLHHLDKCGEMLGSMLNTIHNLRHYQLLMAGLREAIQQGTLAAFVDAFYAKRGLPTPPLG

SEQ ID NO: 59793 - protein, 377 aa, Pseudomonas taeanensis
  REGION 1..377: note = tr|A0A0A1YIM3|A0A0A1YIM3_9PSED Queuine tRNA-ribosyltransferase OS=Pseudomonas taeanensis MS-3; OX = 1395571 GN=tgt PE=3 SV=1
MTRTCRMSFELLATDGKARRGRLTFPRGVVETPAFMPVGTYGTVKGMLPRDIEAIGAQMILGNTFHLWLRPGTEVIKRHGDLHDFMQWQGPILTDSGGFQVFSLGAMRKIKEEGVTFASPVDGSKVFMGPEESMQVQRDLGSDIVMIFDECTPYPAEFDVAKRSMELSLRWAKRSKDAHGENTAALFGIVQGGMHEELRMRSLEGLNEIGFDGLAIGGLSVGEPKEEMLRVLGYLPELMPADKPRYLMGVGKPEDLVEGVRRGVDMFDCVMPTRNARNGHLFVETGVLKIRNSVHKHDNSTLDPECDCYTCKHFSRAYLHHLDKCGEMLGSMLNTIHNLRHYQRLMAGLREAIQQSTLAAFVDAFYARRGLPTPPLD

SEQ ID NO: 59794 - protein, 371 aa, Pseudomonas taetrolens
  REGION 1..371: note = tr|A0A0J6JSI0|A0A0J6JSI0_PSETA Queuine tRNA-ribosyltransferase OS=Pseudomonas taetrolens OX=47884; GN = tgt PE=3 SV=1
MSFELLATDGKARRGRLTFPRGVVETPAFMPVGTYGTVKGMLPRDIEAIGAQMILGNTFHLWLRPGTEVIKKHGDLHDFMKWQGPILTDSGGFQVFSLGAMRKIKEEGVTFASPVDGAKVFMGPEESMQVQRDLGSDVVMIFDECTPYPADEDVARVSMELSLRWAQRSKNAHGDNTAALFGIVQGGMHQNLRERSLEGLNKIGFDGLAIGGLSVGEPKHEMIKVLDYLPGMMPADKPRYLMGVGKPEDLVEGVRRGVDMFDCVMPTRNARNGHLFIDTGVLKIRNAFHRHDDSPLDPTCDCYTCQNFSRAYLHHLDKCGEMLGSMLNTIHNLRHYQVLMAGLRESIQQGTLATFVDAFYAKRGLPVPPLD

SEQ ID NO: 59795 - protein, 371 aa, Pseudomonas taiwanensis; identical to SEQ ID NO: 59746
  REGION 1..371: note = tr|V7D6L5|V7D6L5_9PSED Queuine tRNA-ribosyltransferase OS=Pseudomonas taiwanensis SJ9; OX = 1388762 GN=tgt PE=3 SV=1

SEQ ID NO: 59796 - protein, 377 aa, Pseudomonas thivervalensis
  REGION 1..377: note = tr|A0A176NJJ7|A0A176NJJ7_9PSED Queuine tRNA-ribosyltransferase OS=Pseudomonas thivervalensis; OX = 86265 GN=tgt PE=3 SV=1
MSRTCRMSFELLATDGKARRGRLTFPRGTVETPAFMPVGTYGTVKGMLPRDIEAIGAEIILGNTFHLWLRPGMEVIKAHGDLHDFMQWKGPILTDSGGFQVFSLGAMRKIKEEGVTFASPVDGSKVFMGPEESMQVQRDLGSDIVMIFDECTPYPADEDVARVSMELSLRWAQRSKNAHGENTAALFGIVQGGMHRDLRMRSLEGLDKIGFDGLAIGGLSVGEPKHEMIKVLDYLPGEMPADKPRYLMGVGKPEDLVEGVRRGVDMFDCVMPTRNARNGHLFIDTGVLKIRNAFHRHDDSPLDPTCDCYTCQNFSRAYLHHLDKCGEMLGSMLNTIHNLRHYQVLMAGLREAIQQGTLAAFVEAFYAKRGLPVPPLD

SEQ ID NO: 59797 - protein, 374 aa, Pseudomonas tolaasii; identical to SEQ ID NO: 59578
  REGION 1..374: note = tr|A0A2N0E0B9|A0A2N0E0B9_PSETO Queuine tRNA-ribosyltransferase OS=Pseudomonas tolaasii NCPPB 2192; OX = 564423 GN=tgt PE=3 SV=1

SEQ ID NO: 59798 - protein, 377 aa, Pseudomonas toyotomiensis; identical to SEQ ID NO: 59610
  REGION 1..377: note = tr|A0A1I5XBG9|A0A1I5XBG9_9PSED Queuine tRNA-ribosyltransferase OS=Pseudomonas toyotomiensis; OX = 554344 GN=tgt PE=3 SV=1

SEQ ID NO: 59799 - protein, 371 aa, Pseudomonas toyotomiensis
  REGION 1..371: note = tr|A0A2G5FKR7|A0A2G5FKR7_9PSED Queuine tRNA-ribosyltransferase OS=Pseudomonas toyotomiensis; OX = 554344 GN=tgt PE=3 SV=1
MSFELLATDGKARRGRLTFPRGVVETPAFMPVGTYGTVKGMLPRDVEDIGAQIILGNTFHLWLRPGMEVIKKHGDLHDFMQWQGPILTDSGGFQVFSLGAMRKIKEEGVYFASPVDGAKVFMGPEESMQVQRDLGSDIVMIFDECTPYPAEFDVAKRSMELSLRWAKRSKTAHGESSAALFGIVQGGMHEELRMRSLEGLCEIGFDGLAIGGLSVGEPKEEMIRVLDFLPPHMPADKPRYLMGVGKPEDLVEGVRRGVDMFDCVMPTRNARNGHLFVDTGVVKIRNAVHKHDDSPLDPTCDCYTCKHFSRAYLHHLDKCGEMLGSMLNTIHNLRHYQRVMAGLREAIGQGTLAAFVETFYAKRGLPVPPLD

SEQ ID NO: 59800 - protein, 377 aa, Pseudomonas tremae
  REGION 1..377: note = tr|A0A0Q0D5G1|A0A0Q0D5G1_9PSED Queuine tRNA-ribosyltransferase OS=Pseudomonas tremae OX=200454; GN = tgt PE=3 SV=1
MSRTCRMSFELLATDGKARRGRLTFPRGVVETPAFMPVGTYGTVKGMLPRDIEATGAQMILGNTFHLWLRPGTEVIKGHGDLHDFMQWQGPILTDSGGFQVFSLGAMRKIKEEGVTFASPVDGAKVFMGPEESMQVQRDLGSDIVMIFDECTPYPADEDVARISMELSLRWAKRSKVAHGENTAALFGIVQGGMHENLRMRSLEGLDEIGFDGLAIGGLSVGEPKHEMIKVLDYLPGQMPADKPRYLMGVGKPEDLVEGVRRGVDMFDCVMPTRNARNGHLFIDTGVLKIRNAFHRHDNSPLDPSCDCYTCKNFSRAYLHHLDKCGEMLGSMLNTIHNLRHYQLLMAGLREAIQQGTLAAFVDAFYAKRGLPTPPLG

SEQ ID NO: 59801 - protein, 371 aa, Pseudomonas trivialis
  REGION 1..371: note = tr|A0A0H5B012|A0A0H5B012_9PSED Queuine tRNA-ribosyltransferase OS=Pseudomonas trivialis OX=200450; GN = tgt PE=3 SV=1
MSFELLATDGKARRGRLTFPRGTVETPAFMPVGTYGTVKGMMPRDIVATGAEIILGNTFHLWLRPGTEVIKKHGDLHDFMKWQGPILTDSGGFQVFSLGAMRKIKEEGVTFASPVDGSKVFMGPEESMQVQRDLGSDIVMIFDECTPYPADEDVARISMELSLRWAQRSKNAHGDNTAALFGIVQGGMHESLRKRSLEGLDKIGFDGLAIGGLSVGEPKHEMIKVLDYLPGLMPADKPRYLMGVGKPEDLVEGVRRGVDMFDCVMPTRNARNGHLFIDTGVLKIRNAFHRHDDSPLDPTCDCYTCQNFSRAYLHHLDKCGEMLGSMLNTIHNLRHYQVLMAGLREAIQQGTLAAFVDAFYAKRGLPVPPLD

SEQ ID NO: 59802 - protein, 371 aa, Pseudomonas trivialis
  REGION 1..371: note = tr|A0A0R2ZTU0|A0A0R2ZTU0_9PSED Queuine tRNA-ribosyltransferase OS=Pseudomonas trivialis OX=200450; GN = tgt PE=3 SV=1
MSFELLATDGKARRGRLTFPRGTVETPAFMPVGTYGTVKGMLPRDIVATGAEIILGNTFHLWLRPGTEVIKKHGDLHDFMKWQGPILTDSGGFQVFSLGAMRKIKEEGVTFASPVDGAKVFMGPEESMQVQRDLGSDIVMIFDECTPYPADEDVARISMELSLRWAQRSKNAHGDNTAALFGIVQGGMHESLRKRSLEGLDKIGFDGLAIGGLSVGEPKHEMIKVLDYLPGLMPAEKPRYLMGVGKPEDLVEGVRRGVDMFDCVMPTRNARNGHLFIDTGVLKIRNAFHRHDESPLDPTCDCYTCQNFSRAYLHHLDKCGEMLGSMLNTIHNLRHYQVLMAGLREAIQQGTLAAFVDAFYAKRGLPVPPLD

SEQ ID NO: 59803 - protein, 377 aa, Pseudomonas umsongensis
  REGION 1..377: note = tr|A0A1H1PW34|A0A1H1PW34_9PSED Queuine tRNA-ribosyltransferase OS=Pseudomonas umsongensis; OX = 198618 GN=tgt PE=3 SV=1
MSRQCRMSFELLATDGKARRGRLTFPRGTVETPAFMPVGTYGTVKGMLPRDIEATGAEIILGNTFHLWLRPGMEVIKKHGDLHDFMQWKGPILTDSGGFQVFSLGAMRKIKEEGVTFASPVDGAKVFMGPEESMQVQRDLGSDIVMIFDECTPYPADEDVARVSMELSLRWAQRSKNAHADNTAALFGIVQGGMHQDLRMRSLEGLDKIGFDGLAIGGLSVGEPKHEMIKVLDYLPGQMPADKPRYLMGVGKPEDLVEGVRRGVDMFDCVMPTRNARNGHLFIDTGVIKIRNAFHRHDDSPLDPTCDCYTCQNFSRAYLHHLDKCGEMLGSMLNTIHNLRHYQVLMAGLREAIQQGTLAAFVDAFYAKRGLPVPPLD

SEQ ID NO: 59804 - protein, 377 aa, Pseudomonas vancouverensis
  REGION 1..377: note = tr|A0A1H2P861|A0A1H2P861_9PSED Queuine tRNA-ribosyltransferase OS=Pseudomonas vancouverensis; OX = 95300 GN=tgt PE=3 SV=1
MSRQCRMSFELLATDGKARRGRLTFPRGTVETPAFMPVGTYGTVKGMLPRDIEATGAEIILGNTFHLWLRPGTEVIKKHGDLHDFMQWKGPILTDSGGFQVFSLGAMRKIKEEGVTFASPVDGAKVFMGPEESMQVQRDLGSDIVMIFDECTPYPADEDVARISMELSLRWAQRSKNAHGDNTAALFGIVQGGMHQDLRMRSLEGLDKIGFDGLAIGGLSVGEPKHEMIKVLDYLPGMMPADKPRYLMGVGKPEDLVEGVRRGVDMFDCVMPTRNARNGHLFIDTGVLKIRNAFHRHDDSPLDPTCDCYTCQNFSRAYLHHLDKCGEMLGSMLNTIHNLRHYQVLMAGLREAIQQGTLAAFVDAFYAKRGLPVPPLD

SEQ ID NO: 59805 - protein, 374 aa, Pseudomonas veronii; identical to SEQ ID NO: 59637
  REGION 1..374: note = tr|A0A1D3K380|A0A1D3K380_9PSED Queuine tRNA-ribosyltransferase OS=Pseudomonas veronii 1YdBTEX2; OX = 1295141 GN=tgt PE=3 SV=1

SEQ ID NO: 59806 - protein, 374 aa, Pseudomonas veronii; identical to SEQ ID NO: 59637
  REGION 1..374: note = tr|A0A3S0P557|A0A3S0P557_9PSED Queuine tRNA-ribosyltransferase OS=Pseudomonas veronii OX=76761; GN = tgt PE=3 SV=1

SEQ ID NO: 59807 - protein, 371 aa, unidentified
  source 1..371: note = Pseudomonas versuta
  REGION 1..371: note = tr|A0A0M4QK82|A0A0M4QK82_9PSED Queuine tRNA-ribosyltransferase OS=Pseudomonas versuta OX=1788301; GN = tgt PE=3 SV=1
MSFELLATDGKARRGRLTFPRGVVETPAFMPVGTYGTVKGMLPRDIVDTGAQMILGNTFHLWLRPGTEVIKKHGDLHDFMKWQGPILTDSGGFQVFSLGAMRKIKEEGVTFASPVDGAKVFMGPEESMQVQRDLGSDVVMIFDECTPYPADEDVARVSMELSLRWAQRSKNAHGDNTAALFGIVQGGMHQNLRERSLEGLNKIGFDGLAIGGLSVGEPKHEMIKVLDYLPAMMPADKPRYLMGVGKPEDLVEGVRRGVDMFDCVMPTRNARNGHLFIDTGVIKIRNAFHRHDDSPLDPTCDCYTCQNFSRAYLHHLDKCGEMLGSMLNTIHNLRHYQVLMAGLRESIQQGTLATFVDAFYAKRGLPVPPLD

SEQ ID NO: 59808 - protein, 376 aa, unidentified
  source 1..376: note = Pseudomonas versuta
  REGION 1..376: note = tr|A0A1Q4KQE6|A0A1Q4KQE6_9PSED Queuine tRNA-ribosyltransferase OS=Pseudomonas versuta OX=1788301; GN = tgt PE=3 SV=1
MSNCRMSFELLATDGKARRGRLTFPRGVVETPAFMPVGTYGTVKGMLPRDIVDTGAQMILGNTFHLWLRPGTEVIKKHGDLHDFMKWQGPILTDSGGFQVFSLGAMRKIKEEGVTFASPVDGAKVFMGPEESMQVQRDLGSDVVMIFDECTPYPADEDVARVSMELSLRWAQRSKNAHGDNTAALFGIVQGGMHQNLRERSLEGLNKIGFDGLAIGGLSVGEPKHEMIKVLDYLPAMMPADKPRYLMGVGKPEDLVEGVRRGVDMFDCVMPTRNARNGHLFIDTGVIKIRNAFHRHDDSPLDPTCDCYTCQNFSRAYLHHLDKCGEMLGSMLNTIHNLRHYQVLMAGLRESIQQGTLATFVDAFYAKRGLPVPPLD

SEQ ID NO: 59809 - protein, 377 aa, Pseudomonas viridiflava
  REGION 1..377: note = tr|A0A3M5P9E6|A0A3M5P9E6_PSEVI Queuine tRNA-ribosyltransferase OS=Pseudomonas viridiflava; OX = 33069 GN=tgt PE=3 SV=1
MSRTCRMSFELLATDGKARRGRLTFPRGVVETPAFMPVGTYGTVKGMLPRDIEATGAQIILGNTFHLWLRPGTEVIKGHGDLHDFMQWQGPILTDSGGFQVFSLGAMRKIKEEGVTFASPVDGAKVFMGPEESMQVQRDLGSDIVMIFDECTPYPADEDVARISMELSLRWAKRSKIAHGENTAALFGIVQGGMHESLRMRSLEGLDQIGFDGLAIGGLSVGEPKHEMIKVLDYLPGQMPADKPRYLMGVGKPEDLVEGVRRGVDMFDCVMPTRNARNGHLFIDTGVLKIRNAFHRHDNSPLDPTCDCYTCKNFSRAYLHHLDKCNEMLGSMLNTIHNLRHYQVLMAGLREAIQQGTLAAFVDAFYAKRGLPTPPLG

SEQ ID NO: 59810 - protein, 377 aa, Pseudomonas viridiflava
  REGION 1..377: note = tr|Q3T863|Q3T863_PSEVI Queuine tRNA-ribosyltransferase OS=Pseudomonas viridiflava; OX = 33069 GN=tgt PE=3 SV=1
MSRTCRMSFELLATDGKARRGRLTFPRGVVETPAFMPVGTYGTVKGMLPRDIEATGAQIILGNTFHLWLRPGTEVIKGHGDLHDFMQWQGPILTDSGGFQVFSLGAMRKIKEEGVTFASPVDGAKVFMGPEESMQVQRDLGSDIVMIFDECTPYPADEDVARISMELSLRWAKRSKIAHGENTAALFGIVQGGMHESLRMRSLEGLDQIGFDGLAIGGLSVGEPKHEMIKVLDYLPGQMPADKPRYLMGVGKPEDLVEGVRRGVDMFDCVMPTRNARNGHLFIDTGVLKIRNAFHRHDNSPLDPTCDCYTCKNFSRAYLHHLDKCNEMLGSMLNTIHNLRHYQLLMAGLREAIQQGTLAAFVDAFYAKRGIPTPPLG

SEQ ID NO: 59811 - protein, 377 aa, Pseudomonas vranovensis
  REGION 1..377: note = tr|A0A423E0C2|A0A423E0C2_9PSED Queuine tRNA-ribosyltransferase OS=Pseudomonas vranovensis; OX = 321661 GN=tgt PE=3 SV=1
MIRTCRMSFELLATDGKARRGRLTFPRGVVETPAFMPVGTYGTVKGMLPRDIEAIGAHMILGNTFHLWLRPGTEVIKAHGDLHDFMKWQGPILTDSGGFQVFSLGAMRKIREEGVTFASPVDGSKVFMGPEESMQVQRDLGSDVVMIFDECTPYPADEDVARVSMELSLRWAQRSKNAHGDSTAALFGIVQGGMHENLRMRSLEGLEKIGFDGLAIGGLSVGEPKHEMIKVLDYLPGRMPADKPRYLMGVGKPEDLVEGVRRGVDMFDCVMPTRNARNGHLFVDTGVLKIRNAFHRHDDSPLDATCDCYTCQNFSRAYLHHLDKCGEMLGSMLNTIHNLRHYQRLMAGLREAIQQGTLAAFVDAFYAKRGLPVPPLD

SEQ ID NO: 59812 - protein, 377 aa, unidentified
  source 1..377: note = Pseudomonas wadenswilerensis
  REGION 1..377: note = tr|A0A380T6L3|A0A380T6L3_9PSED Queuine tRNA-ribosyltransferase OS=Pseudomonas wadenswilerensis; OX = 1785161 GN=tgt PE=3 SV=1
MSRTCRMSFELLATDGKARRGRLTFPRGVVETPAFMPVGTYGTVKGMLPRDIEAIGAHMILGNTFHLWLRPGTEVIKAHGDLHDFMKWQGPILTDSGGFQVFSLGAMRKIREEGVTFASPVDGSKVFMGPEESMQVQRDLGSDVVMIFDECTPYPADEDVARVSMELSLRWAQRSKNAHGDSTAALFGIVQGGMHENLRMRSLEGLEKIGFDGLAIGGLSVGEPKHEMIKVLDYLPGRMPADKPRYLMGVGKPEDLVEGVRRGVDMFDCVMPTRNARNGHLFVDTGVLKIRNAFHRHDDSPLDATCDCYTCQNFSRAYLHHLDKCGEMLGSMLNTIHNLRHYQRLMAGLREAIQQGTLAAFVDAFYAKRGLPVPPLD

SEQ ID NO: 59813 - protein, 376 aa, unidentified
  source 1..376: note = Pseudomonas weihenstephanensis
  REGION 1..376: note = tr|A0A0J6ITR2|A0A0J6ITR2_9PSED Queuine tRNA-ribosyltransferase OS=Pseudomonas weihenstephanensis; OX = 1608994 GN=tgt PE=3 SV=1
MSNCRMSFELLATDGKARRGRLTFPRGVVETPAFMPVGTYGTVKGMLPRDIVDTGAQMILGNTFHLWLRPGTEVIKKHGDLHDFMKWQGPILTDSGGFQVFSLGAMRKIKEEGVTFASPVDGAKVFMGPEESMQVQRDLGSDVVMIFDECTPYPADEDVARVSMELSLRWAQRSKNAHGDNTAALFGIVQGGMHQNLRERSLEGLNKIGFDGLAIGGLSVGEPKHEMIKVLDYLPAMMPADKPRYLMGVGKPEDLVEGVRRGVDMFDCVMPTRNARNGHLFIDTGVIKIRNAFHRHDDSPLDPTCDCYTCQNFSRAYLHHLDKCGEMLGSMLNTIHNLRHYQVLMAGLREAIQQGTLAAFVDAFYAKRGLPVPPLD

SEQ ID NO: 59814 - protein, 377 aa, Pseudomonas xanthomarina
  REGION 1..377: note = tr|A0A1C2DQL2|A0A1C2DQL2_9PSED Queuine tRNA-ribosyltransferase OS=Pseudomonas xanthomarina; OX = 271420 GN=tgt PE=3 SV=1
MSRTCHMSFELLATDGRARRGRLTFPRGTVETPAFMPVGTYGTVKGMLPRDVEEIGAEIILGNTFHLWLRPGTEVIKAHGDLHDFMQWKGPILTDSGGFQVFSLGAMRKIKEEGVYFASPVDGAKVFMGPEESMQVQRDLGSDIVMIFDECTPYPADEEVARRSMELSLRWAKRSKEAHGDSVAALFGIVQGGMHESLRMRSLEGLCEIDFDGLAIGGLSVGEPKEEMIRVLDFLPSRMPADKPRYLMGVGKPEDLVEGVRRGVDMFDCVMPTRNARNGHLFTDAGVVKIRNAVHRHDDSPLEPGCDCYTCKHFSRAYLHHLDKCGEMLGSMLNTIHNLRHYQRLMAGLRQAIQQGTLAAFVDAFYAKRGLPTPPLA

SEQ ID NO: 59815 - protein, 371 aa, Pseudomonas xanthomarina; identical to SEQ ID NO: 59611
  REGION 1..371: note = tr|A0A3R8VC50|A0A3R8VC50_9PSED Queuine tRNA-ribosyltransferase OS=Pseudomonas xanthomarina; OX = 271420 GN=tgt PE=3 SV=1

SEQ ID NO: 59816 - protein, 375 aa, Pseudomonas xinjiangensis
  REGION 1..375: note = tr|A0A1H1LIR5|A0A1H1LIR5_9PSED Queuine tRNA-ribosyltransferase OS=Pseudomonas xinjiangensis; OX = 487184 GN=tgt PE=3 SV=1
MSHMQFELLATDGRARRGRLTFPRGVVETPAFMPVGTYGTVKGMLPRDVEAIGAQIILGNTFHLWLRPGTEVIRAHGDLHDFMQWKGPILTDSGGFQVFSLGKLRKIKEEGVTFASPVDGAKVFMGPEESMQVQRDLGSDIVMIFDECTPYPADVDTARRSMELSLRWAKRSKIAHGGNPSALFGIVQGGMHEDLRLRSLEGLNEIGFDGLAIGGLSVGEPKEEMLRVLDFLPPHMPADKPRYLMGVGKPEDLVEGVRRGVDMFDCVMPTRNARNGHLFTDSGVVKIRNATHRHDTSPLDANCDCYTCQNFSRAYLHHLDKCGEMLGSMLNTIHNLRHYQRLMAGLRGAIQQGTLSAFVEDFYARLGLPVPPLEA

SEQ ID NO: 59817 - protein, 374 aa, unidentified
  source 1..374: note = Pseudomonas yamanorum
  REGION 1..374: note = tr|A0A143GNF6|A0A143GNF6_9PSED Queuine tRNA-ribosyltransferase OS=Pseudomonas yamanorum OX=515393; GN = tgt PE=3 SV=1
MSRMSFELLATDGKARRGRLTFPRGTVETPAFMPVGTYGTVKGMLPRDIVATGAEIILGNTFHLWLRPGTEVIKKHGDLHDFMKWQGPILTDSGGFQVFSLGAMRKIKEEGVTFASPVDGAKVFMGPEESMQVQRDLGSDIVMIFDECTPYPADEDVARISMELSLRWAQRSKNAHGDNTAALFGIVQGGMHESLRKRSLEGLDKIGFDGLAIGGLSVGEPKHEMIKVLDYLPGLMPADKPRYLMGVGKPEDLVEGVRRGVDMFDCVMPTRNARNGHLFIDTGVLKIRNAFHRHDESPLDPTCDCYTCQNFSRAYLHHLDKCGEMLGSMLNTIHNLRHYQVLMAGLREAIQQGTLAAFVDAFYAKRGLPVPPLD

SEQ ID NO: 59818 - protein, 375 aa, unidentified
  source 1..375: note = Pseudomonas yangmingensis
  REGION 1..375: note = tr|A0A1I4R7M5|A0A1I4R7M5_9PSED Queuine tRNA-ribosyltransferase OS=Pseudomonas yangmingensis; OX = 1720063 GN=tgt PE=3 SV=1
MSHMHFELLATDGKARRGRLTFPRGVVETPAFMPVGTYGTVKGMLPRDIEAIGAQIILGNTFHLWLRPGTEVIRQHGDLHDFMQWQGPILTDSGGFQVFSLGAMRKIKEEGVYFSSPVNGAKVFMGPEESMQVQRELGSDIVMIFDECTPYPADHDTARRSMELSLRWAQRSKNAHEGNPSALFGIVQGGMYEDLRLRSLEGLEQIGFDGLAIGGLSVGEPKEEMIRVLDFLPPQMPADKPRYLMGVGKPEDLVEGVRRGVDMFDCVMPTRNARNGHLFVDSGVLKIRNAVHRHDQSPLDAGCDCYTCQHFSRAYLHHLDKCGEMLGSMLNTIHNLRHYQRLMAGLREAVHQGKLDHFVEAFYARLGRPVPPLET

SEQ ID NO: 59819 - protein, 375 aa, unidentified; identical to SEQ ID NO: 59701
  source 1..375: note = Pseudomonas zeshuii
  REGION 1..375: note = tr|A0A1M6ASM4|A0A1M6ASM4_9PSED Queuine tRNA-ribosyltransferase OS=Pseudomonas zeshuii OX=1076620; GN = tgt PE=3 SV=1

SEQ ID NO: 59820 - protein, 377 aa, unidentified
  source 1..377: note = Pseudomonas zhaodongensis
  REGION 1..377: note = tr|A0A3M2HS04|A0A3M2HS04_9PSED Queuine tRNA-ribosyltransferase OS=Pseudomonas zhaodongensis; OX = 1176257 GN=tgt PE=3 SV=1
MSRTCRMSFELLATEGRARRGRLTFPRGTVETPAFMPVGTYGTVKGMLPRDIEAIGAQIILGNTFHLWLRPGTEVIKAHGDLHDFMQWQGPILTDSGGFQVFSLGAMRKIKEEGVYFASPVDGAKVFMGPEESMQVQRDLGSDIVMIFDECTPYPADEDVARRSMELSLRWAKRSKNAHGDSSAALFGIVQGGMHESLRMRSLEGLCEIGFDGLAIGGLSVGEPKEEMIRVLDFLPLQMPADKPRYLMGVGKPEDLVEGVRRGVDMFDCVMPTRNARNGHLFTDTGVIKIRNAIHRHDNSPLDAACDCYTCKHFSRGYLHHLDKCGEMLGSMLNTIHNLRHYQRLMAGLRDAIQQGTLAAFVDAFYAKRGLPTPPLA

SEQ ID NO: 59821 - protein, 377 aa, unidentified; identical to SEQ ID NO: 59558
  source 1..377: note = Pseudomonas zhaodongensis
  REGION 1..377: note = tr|A0A365PZX3|A0A365PZX3_9PSED Queuine tRNA-ribosyltransferase OS=Pseudomonas zhaodongensis; OX = 1176257 GN=tgt PE=3 SV=1

SEQ ID NO: 59822 - protein, 376 aa, unidentified
  source 1..376: note = Pseudooceanicola antarcticus
  REGION 1..376: note = tr|A0A285J2I9|A0A285J2I9_9RHOB Queuine tRNA-ribosyltransferase OS=Pseudooceanicola antarcticus; OX = 1247613 GN=tgt PE=3 SV=1
MSTRFSFSLAATDGCARTGTISTPRGEIRTPAFMPVGTAATVKAMMPESVAATGADILLGNTYHLMLRPTAERVARLGGLHKFMNWDKPILTDSGGFQVMSLAELRKLTEEGVSFRSHIDGSKHMLTPERSMEIQKLLGSDIVMCFDECPALPADHDRIAQSMRLSMRWAQRSRDAFGDRPGHALFGIQQGGDIEELRGESAEALKGIEFDGYAIGGLAVGEGQEIMFQVLDYAPGMLPEDKPRYLMGVGKPDDIVGAVKRGVDMMDCVLPSRSGRTGQAWTRRGQVNIKNARHADDPRPLDEHCTCPACRSYSRAYLHHVYRAGEMISGMLLTWHNLHYFQELMAGMRAAIAEQRFDAWEAEFHATRALGDIEPL

SEQ ID NO: 59823 - protein, 376 aa, unidentified
  source 1..376: note = Pseudooceanicola atlanticus
  REGION 1..376: note = tr|A0A0A0EBS6|A0A0A0EBS6_9RHOB Queuine tRNA-ribosyltransferase OS=Pseudooceanicola atlanticus; OX = 1461694 GN=tgt PE=3 SV=1
MTTRFAFEKLAQDGKARLGRITTPRGDIRTPAFMPVGTAATVKAMMPESVAQTGADILLGNTYHLMLRPTAERIDRLGGLHTFMNWSKPILTDSGGFQVMSLAGLRKLTEDGVRFKSHIDGSEHMLSPERSMEIQRLLGSDIVMCFDECPALPADRARIEESMRLSMRWAARSREAFGDRPGYALFGIQQGGLEEDLRGESAAALREIGFEGYAIGGLAVGEGQEAMFGCLDFAPDQLPEDKPRYLMGVGKPDDIVGAVKRGVDMMDCVLPSRSGRTGQAFTRHGVVNIKNARHADDPRPLDENCTCPACRNYSRAYLHHVFRSQEMISGMLLTWHNLQYFQDIMAGMRDAIGNGAFAAWEADFHAGRAEGDIPPL

SEQ ID NO: 59824 - protein, 426 aa, unidentified
  source 1..426: note = Pseudooceanicola batsensis
  REGION 1..426: note = tr|A3U2R6|A3U2R6_PSEBH Queuine tRNA-ribosyltransferase OS=Pseudooceanicola batsensis (strain ATCC BAA-863 / DSM 15984 / KCTC 12145 / HTCC2597); OX = 252305 GN=tgt PE=3SV=1
MGKAEGGGRRGDIATMASACDETVSPARRRGSLHKPAQLRHKAPLAQGDVMTTRFAFEKLGQDGKARLGRISTPRGEIRTPAFMPVGTAATVKAMMPESVAATGADILLGNTYHLMLRPSAERIDRLGGLHRFMNWERPILTDSGGFQVMSLASLRKLTEEGVRFKSHIDGSDHMLTPERSMEIQRLLGSDIVMCFDECPALPADRGRIEESMRLSMRWAARSREAFGDRPGHALFGIQQGGLEEDLRAESARALRDIGFEGYAIGGLAVGEGQEAMFACLDHAPDQLPEDRPRYLMGVGKPDDIVGAVKRGVDMMDCVLPSRSGRTGQAFTRHGVVNIKNARHADDPRPLDEGCSCPACRSYSRAYLHHVFRSQEMISGMLLTWHNLQYYQDLMAGMRAAIAAGTFADWEAGFHAARAAGDIPPL

SEQ ID NO: 59825 - protein, 375 aa, unidentified
  source 1..375: note = Pseudooceanicola flagellatus
  REGION 1..375: note = tr|A0A1W2BMS2|A0A1W2BMS2_9RHOB Queuine tRNA-ribosyltransferase OS=Pseudooceanicola flagellatus; OX = 1387277 GN=tgt PE=3 SV=1
MTRFSFSLTATDGAARTGVISTPRGDIRTPAFMPVGTAATVKAMMPDSVRATGADILLGNTYHLMLRPGAERIARLGGLHKFMNWDRPILTDSGGFQVMSLAELRKLTEKGVTFRSHIDGSKHELTPERSMEIQKLLGSDIVMCFDECPALPADDKRVAESMRLSMRWAQRSRDAFGDRPGHALFGIMQGGVTEHLRAESAEALTVIGFDGYAVGGLAVGEGQEAMFGVLDYAPAMLPTDKPRYLMGVGKPDDIVGAVKRGIDMMDCVLPSRSGRTGQAWTRRGQVNIKNARHADDPRPLDEDCSCPTCQGYSRAYLHHVFRAQEMISGMLLTWHNLHYYQEIMQGMRDAIAQGRFADWEVDFHRQREMGDIEKL

SEQ ID NO: 59826 - protein, 377 aa, unidentified
  source 1..377: note = Pseudooceanicola lipolyticus
  REGION 1..377: note = tr|A0A2M8IY36|A0A2M8IY36_9RHOB Queuine tRNA-ribosyltransferase OS=Pseudooceanicola lipolyticus; OX = 2029104 GN=tgt PE=3 SV=1
MSARFSFQLAATDGAARTGVISTPRGEIRTPAFMPVGTAATVKAMLPESVAATGADILLGNTYHLMLRPTAERIDRLGGLHRFMNWDKPILTDSGGFQVMSLAALRKLTEEGVSFKSHIDGSKHMLTPERSMEIQRLLGSDIVMCFDECPALPATQDRVAESMRLSMRWAARSKDAFGDRPGHALFGIQQGGVTQELRAESAEKLREIGFDGYAVGGLAVGEGQEAMFGVLDYAPDMLPADRPRYLMGVGKPDDIVGAVKRGIDMMDCVLPSRSGRTGQVFTRRGVLNIKNARHQDDPRPLDEDCSCPACRSYSRAYLHHVFRSQEIISSMLLTWHNLHYYQELMAGMRAAIAEGRFAAWEADFHAGRAEGDLPQLS

SEQ ID NO: 59827 - protein, 376 aa, unidentified
  source 1..376: note = Pseudooceanicola marinus
  REGION 1..376: note = tr|A0A1X6ZCT2|A0A1X6ZCT2_9RHOB Queuine tRNA-ribosyltransferase OS=Pseudooceanicola marinus; OX = 396013 GN=tgt PE=3 SV=1
MSTRFSFSLQATDGRARSGVISTPRGEIRTPAFMPVGTAATVKAMMPESVAATGADILLGNTYHLMLRPTAERIARLGGLHQFMNWQKPILTDSGGFQVMSLAELRKLTEEGVTFRSHVDGSKHKLTPERSMEIQKLLGSDIVMCFDECPALPADHTRIAESMRLSMRWAQRSRDAFGDRQGHALFGIQQGGDVEELRAESAEALKGIEFDGYAIGGLAVGEGQEIMFQVLDYAPGQLPVDKPRYLMGVGKPDDIVGAVKRGVDMMDCVLPSRSGRTGQAWTRRGQVNLKNARHADDPRPLDEQCTCPTCRHYSRAYLHHVYRAGEMISGMLLTWHNLHYFQELMQGMRDAIAAGRFDAWEEDFHATRDQGDIERL

SEQ ID NO: 59828 - protein, 391 aa, unidentified
  source 1..391: note = Pseudooceanicola nitratireducens
  REGION 1..391: note = tr|A0A1I1MB65|A0A1I1MB65_9RHOB Queuine tRNA-ribosyltransferase OS=Pseudooceanicola nitratireducens OX=517719 GN=tgt PE=3 SV=1
MTRPLSSASGSDYEHPMTRFSFSLNATDGKARTGVISTPRGEIRTPAFMPVGTAATVKAMMPESVAATGADILLGNTYHLMLRPTAERIDALGGLHRFMNWDKPILTDSGGFQVMSLASLRKLTEDGVTFKSHIDGSKHMLSPERSMEIQRLLGSDIVMCFDECPALPADRRRIEESMRLSMRWAQRSRDAFGDRPGYALFGIQQGGLEEDLRAESAAELTKIGFEGYAIGGLAVGEGQEAMFGCLDYAPDQLPQDKPRYLMGVGKPDDIVGAVKRGVDMMDCVLPSRSGRTGQAFTRHGVVNIKNARHADDPRPLDEDCTCPACRNYSRAYLHHVYRAQEMISGMLLTWHNLHYYQEIMASMRGAIAEGRFDAWEAEFHAGRAEGDIPPL

SEQ ID NO: 59829 - protein, 375 aa, unidentified
  source 1..375: note = Pseudooceanicola sp.
  REGION 1..375: note = tr|A0A2E2PBT7|A0A2E2PBT7_9RHOB Queuine tRNA-ribosyltransferase OS=Pseudooceanicola sp. OX=1914328; GN = tgt PE=3 SV=1
MTGFSFSLSATDGKARTGAITTPRGTIRTPAFMPVGTAATVKAMLPESVAATGADILLGNTYHLMLRPGAERVDRLGGLHEFMNWSKPILTDSGGFQVMSLAGLRKLTEEGVAFKSHIDGSRHMLTPERSMEIQRLLGSDIVMCFDECPALPAEEKAVAESMRLSMRWAQRSRDAFGDRAGHALFGIQQGGVTRDLRAESAEALQEIDFDGYAVGGLAVGEGQEIMFDVLDFAPDMLPVDKPRYLMGVGKPDDIVGAVKRGIDMMDCVLPSRSGRTGQVFTRRGVVNIKNARHADDPRPLDEGCSCPACRGYSRAYLHHVFRAQEMISGMLLTWHNLQYYQDLMAGMREAIAAGTFCDWENQFHADRALGDIEPV

SEQ ID NO: 59830 - protein, 376 aa, unidentified
  source 1..376: note = Pseudooctadecabacter jejudonensis
  REGION 1..376: note = tr|A0A1Y5R8F6|A0A1Y5R8F6_9RHOB Queuine tRNA-ribosyltransferase OS=Pseudooctadecabacter jejudonensis OX=1391910 GN=tgt PE=3 SV=1
MKNTFSFELQKTDGAARTGVIRTPRGEVRTPAFMPVGTAATVKAMMPESVAETGADILLGNTYHLMLRPTAERIDRLGGLHRFMNWDRPILTDSGGFQVMSLSGLRKLTEDGVTFKSHIDGSKHVLSPETSMEIQRLLGSDIVMCFDECPALPADKSRIADSMRLSMRWADRSRAAFGDRPGHALFGIQQGGLEEDLRAESAEALQQIGFEGYAVGGLAVGEGQEAMFGCLDFAPGQLPVDKPRYLMGVGKPDDIVGAVKRGIDMMDCVLPSRSGRTGQVFTRHGVVNIKNARHADDPRPLDDTCRCPACRNYSRAYLHHVFRSQEMISGMLLTWHNLTYFQDIMQGMRAAIAAGTFDAWEADFHAGRAAGDIEPL

SEQ ID NO: 59831 - protein, 376 aa, unidentified
  source 1..376: note = Pseudopedobacter saltans
  REGION 1..376: note = tr|F0S8R6|F0S8R6_PSESL Queuine tRNA-ribosyltransferase OS=Pseudopedobacter saltans (strain ATCC 51119 / DSM 12145 / JCM 21818 / LMG 10337 / NBRC 100064 / NCIMB 13643 ) OX=762903 GN=tgt PE=3 SV=1
MKFKLSAQDKFSKARAGEIETDHGTIQTPIFMPVGTAGTVKAVHQRELRDDIKAQIILGNTYHLYLRPGLDVIKKAGGLHKFNGWEKPILTDSGGYQVYSLTEVRKIKEEGVTFKSHIDGSKHLFTPENVMDIQRTIGADIIMAFDECTPYPCDYNYARKSLDMTHRWLKRCIDRFDSTKPKYGYSQTLFPIVQGSVYKYLRKKSAEFIAEQNREGNAIGGLSVGEPAEEMYAMTEVVCEILPTEKPRYLMGVGTPINILENIALGIDMFDCVMPTRNARNGMLFTRNGIINIKNEKWKDDFSPIDPDSDLYSDLVYSKAYLRHLIHSKEILGAQIASLHNLHFYLWLVKEAREKIISGEFYEWKNKMVKVLGQRL

SEQ ID NO: 59832 - protein, 379 aa, unidentified
  source 1..379: note = Pseudopedobacter saltans
  REGION 1..379: note = tr|A0A2W5F2C4|A0A2W5F2C4_9SPHI Queuine tRNA-ribosyltransferase OS=Pseudopedobacter saltans; OX = 151895 GN=tgt PE=3 SV=1
MASLTFELKGTDNKSKARAGIITTDHGQIETPIFMPVGTVGSVKGVSQQQLKNNVQAQIILGNTYHLYLRPGTEVLEAAGGLHKFNGWDRPILTDSGGYQVFSLAGTRKIKEEGVTFQSHIDGSRHLFSPEKVMDIQRSIGADIIMAFDECTPFGSDYNYTRKSMEMTHRWLDRCIKRLDETQPIYGHTQNLFPIVQGSVFPDLRKISCEYIASKNAVGNAIGGLSVGEPEDKMYEFTGLCCEILPLDKPRYLMGVGTPWNILEGIALGVDMFDCVMPTRNGRNGMLFTSEGVINIKNKKWEKDFSPIDAGFESEVSNFYTKAYLRHLFHAQELLGLEIASIHNLSFYLWLVKEARKHILEGDFESWKSQMVVKLRQRL

SEQ ID NO: 59833 - protein, 376 aa, unidentified
  source 1..376: note = Pseudopelagicola gijangensis
  REGION 1..376: note = tr|A0A1M6N9F4|A0A1M6N9F4_9RHOB Queuine tRNA-ribosyltransferase OS=Pseudopelagicola gijangensis; OX = 1470563 GN=tgt PE=3 SV=1
MTSQFSFELQATDGKARKGVIKTPRGEIRTPAFMPVGTAATVKAMMPESVRATGADILLGNTYHLMLRPTAERIDRLGGLHKFMNWDRPILTDSGGFQVMSLAELRKLTEEGVAFKSHIDGSKHMLTPERSMEIQRLLGSDIVMCFDECPALPADRKRINESMQLSMRWAKRSREAFGDRPGHALFGIQQGGLEQDMRAESAEALKAIGFEGYAVGGLAVGEGQEAMFGVLDYAPDMLPMDRPRYLMGVGKPDDIVGAVARGIDMMDCVLPSRSGRTGQVFTRHGVVNIKNARHADDPRPLDEHCTCPACSNYSRAYLHHVFRANEMISGMLLTWHNLHYFQEIMQGMRDAIEGGTFEAWQVAFHEGRAQGDIEPF

SEQ ID NO: 59834 - protein, 401 aa, unidentified
  source 1..401: note = Pseudopropionibacterium propionicum
  REGION 1..401: note = tr|A0A3S5AI65|A0A3S5AI65_9ACTN Queuine tRNA-ribosyltransferase OS=Pseudopropionibacterium propionicum OX=1750 GN=tgt PE=3 SV=1
MAVRSGGRARTGTIHTPHGDIRTPAFIPVGTKASVKAVLPEAMADLGAQALLANAYHLYLQPGSDLVDEAGGLGRFMNWPGPTFTDSGGFQVMSLGAGFKKVLAMDTKGIVGDDVIAEGKTRRAHVDEDGVTFFSHLNGSRLRFTPEVSMTIQHQLGADIMFAFDELTTLMNTRDYQEASVARTHRWAVRCLRAHATLTEERVGKPYQALFGVIQGAQYEDLRRRAAADLAALEVDGFRFDGFGLGGALEKENLGRIIGWMVDELPEDRPRHLLGISEPEDLFEAVAFGADTFDCVNPSRVARNAAIYTADGRYNVNTARNRRAFEPLEAGCDCYTCTHYTRAYLHHLFKAKEMLASTLATIHNERFTVRLVDEIRASLESGEFDLFRNEFMGRYNARKTQ

SEQ ID NO: 59835 - protein, 407 aa, unidentified
  source 1..407: note = Pseudopropionibacterium propionicum
  REGION 1..407: note = tr|A0A4V1GCE3|A0A4V1GCE3_9ACTN Queuine tRNA-ribosyltransferase OS=Pseudopropionibacterium propionicum OX=1750 GN=tgt PE=3 SV=1
MSFGFEVAVRSGGRARTGTIHTPHGDIRTPAFIPVGTKASVKAVLPEAMADLGAQALLANAYHLYLQPGSDLVDEAGGLGRFMNWPGPTFTDSGGFQVMSLGAGFKKVLAMDTKGLVGDDVIAEGKTRRAHVDEDGVTFFSHLNGSRLRFTPEVSMTIQHQLGADIMFAFDELTTLMNTRDYQEASVARTHRWAVRCLRAHATLTEERVGKPYQALFGVIQGAQYEDLRRRAAADLAALEVDGFRFDGFGLGGALEKENLGRIIGWMVDELPEDRPRHLLGISEPEDLFEAVAFGADTFDCVNPSRVARNAAIYTADGRYNVNTARNRRAFEPLEAGCDCYTCTHYTRAYLHHLFKAKEMLASTLATIHNERFTVRLVDEIRASLESGEFDLFRNEFMGRYNARKTQ

SEQ ID NO: 59836 - protein, 376 aa, unidentified
  source 1..376: note = Pseudopuniceibacterium sediminis
  REGION 1..376: note = tr|A0A399J2V2|A0A399J2V2_9RHOB Queuine tRNA-ribosyltransferase OS=Pseudopuniceibacterium sediminis OX=2211117 GN=tgt PE=3 SV=1
MSTPFSFTLAATDGRARTGTIDTPRGQIRTPAFMPVGTAATVKAMMPESVAATGADILLGNTYHLMLRPTAERIDRLGGLHSFMNWDKPILTDSGGFQVMSLASLRKLTEEGVTFSSHVDGSKHMISPERSMEIQKLLGSDIVMCFDECPALPAEDSVVAASMRMSMRWAQRSRDAFGDRPGHALFGIQQGGVNQDLRGESAEALTRIGFDGYAVGGLAVGEGQEAMFGVLDYAPDMLPTDKPRYLMGVGKPDDIVGAVARGIDMMDCVLPSRSGRTGQVFTRHGVVNIKNARHADDPRPLDEDCTCPACRNYSRAYLHHVFRSQEMISGMLLTWHNLHYYQDLMQGMREAIAAARFDDFVTVFHALRAEGDIERL

SEQ ID NO: 59837 - protein, 383 aa, Pseudoramibacter alactolyticus
  REGION 1..383: note = tr|E6ME01|E6ME01_9FIRM Queuine tRNA-ribosyltransferase OS=Pseudoramibacter alactolyticus ATCC 23263 OX=887929 GN=tgt PE=3 SV=1
MFRYELIKKDKYTGARLGRIITDHGEIETPIFMPVGTQATVKSMNNRELEDIGAQIILGNTYHLYLRPGEDIMAKAGGLHRFMHWDKPILTDSGGFQVFSLGPMRKITEEGVHFVSHLDGSRHFMTPEKSIHMQNVIGADIIMCFDECAPADADYAYTKKSTAMTTRWAARCQAAHKRPDAQALFGIVQGGMFDDLRAKSAADLVAMDFPGYAIGGLSVGESHDKMYHMLDVTTPLLPENKPRYLMGVGSVDALIEGVIRGIDMFDCVLQTRIARNGTAMTSEGKKVIRNAVYQADFSPLDPACDCYVCRNHTRAYLRHLIKCKEILGARLLTYHNLYFTLKLMEKIREAIRNDAVLELRDSVFCQYGIEKIGVYENAGKSIG

SEQ ID NO: 59838 - protein, 376 aa, unidentified
  source 1..376: note = Pseudorhizobium pelagicum
  REGION 1..376: note = tr|A0A081MI85|A0A081MI85_9RHIZ Queuine tRNA-ribosyltransferase OS=Pseudorhizobium pelagicum; OX = 1509405 GN=tgt PE=3 SV=1
MTETFQFNLKATDGGARLGEVTMPRGTIRTPAFMPVGTVGTVKAMYLDQVRETGADIILGNTYHLMLRPGAERVARLGGLHELIRWKHPILTDSGGFQVMSLSGLRKLDEQGVTFKSHVDGSLHHMSPERSIEIQGLLGSDIQMQLDECVALPAEPKEIERAMELSLRWAERCRVAFGDQPGKAMFGIVQGGDQPDLRVRSAEGLKQLDLKGYAVGGLAVGEPQDVMLRMLETTLPVLPSEKPRYLMGVGTPDDMLKSVARGIDMFDCVMPTRSGRHGLAFTRRGKVNIRNARHAEDMRPLDEESSCPAARDYSRAYLHHLVRSDEALGGMLLSWNNLSYYQDLMKGIRLAIAEGRFADFYAETQETWARGDLAPL

SEQ ID NO: 59839 - protein, 410 aa, unidentified
  source 1..410: note = Pseudorhodobacter antarcticus
  REGION 1..410: note = tr|A0A1H8D558|A0A1H8D558_9RHOB Queuine tRNA-ribosyltransferase OS=Pseudorhodobacter antarcticus; OX = 1077947 GN=tgt PE=3 SV=1
MRLVAHLYREAGRAGQEGLAFAGFLPKRRKKGRRMTTKFSFDVLARDGRARKGVISTPRGDIRTPAFMPVGTAATVKAMLPDSVRATGADILLGNTYHLMLRPTAERIAGLGGLHKFMNWDRPILTDSGGFQVMSLASLRKLTEEGVRFSSHIDGSKHMLSPERSMEIQKLLGSDIVMCFDECPALPATDAQVAASMALSMRWAQRSRDAFGDRPGHALFGIQQGGVTQHLREESAAALRAIGFDGYAVGGLAVGEGQEAMFGVLDYAPGMLPEDKPRYLMGVGKPDDIVGAVERGIDMMDCVLPSRSGRTGQGWTRHGQVNMRNARHKDDPRPLDAACTCPACRNYSRAYLHHVIKADEIIGSMLLTWHNLHYYQDLMEGMRVAIGAGALAAFVANFHAARAEGDIEPL

SEQ ID NO: 59840 - protein, 376 aa, Pseudorhodobacter sp.
  REGION 1..376: note = tr|A0A4P8EDZ2|A0A4P8EDZ2_9RHOB Queuine tRNA-ribosyltransferase OS=Pseudorhodobacter sp. S12M18; OX = 2500533 GN=tgt PE=3 SV=1
MTQRFSFEVEARDGRARKGVISTPRGEIRTPAFMPVGTAATVKAMMPESVCATGADILLGNTYHLMLRPTAERIAGLGGLHKFMNWDRPILTDSGGFQVMSLASLRKLTEEGVRFASHIDGSKHMLSPERSMEIQKLLGSDIVMCFDECPALPATDAEVAKSMALSMRWAQRSRDAFGDRPGHALFGIQQGGVTKDLRAESAEALRAIEFDGYAVGGLAVGEGQEAMFGVLDYAPDMLPEDKPRYLMGVGKPDDIVGAVERGIDMMDCVLPSRSGRTGQGWTRHGQVNMRNARHKDDPRPLDEACGCPACRNYSRAYLHHVIKADEIIGSMLLTWHNLHYYQDLMAGLRDAISTGALAGFVADFHAKRAGGDIEQL

SEQ ID NO: 59841 - protein, 376 aa, Pseudorhodobacter sp.
  REGION 1..376: note = tr|A0A2M8MV92|A0A2M8MV92_9RHOB Queuine tRNA-ribosyltransferase OS=Pseudorhodobacter sp. MZDSW-24AT OX=2052957 GN=tgt PE=3 SV=1
MAQRFGFSLTATDKGARTGVIHTPRGEIRTPAFMPVGTAATVKAMLPESVRATGADILLGNTYHLMLRPTAERIAHLGGLHRFMNWERPILTDSGGFQVMSLASLRKLTEEGVRFSSHIDGSKHMLSPERSMEIQKLLGSDIVMCFDECPALPATEAEVAKSMALSMRWAQRSRDAFGDRPGHALFGIMQGGVTRDLREESAKALVDIGFDGYAVGGLAVGEGQEAMFGVLDYAPGFLPADKPRYLMGVGKPDDIVGAVERGIDMMDCVLPSRSGRTGQAWTRRGQVNIKNARHMDDPRPLDENCTCPACQNYSRAYLHHVFKAQEMISGMLLTWHNLHYYQELMQGLRAAIAAGQLSAFVADFHAQRAAGDIEPV

SEQ ID NO: 59842 - protein, 387 aa, Pseudorhodoferax soli
  REGION 1..387: note = tr|A0A368XU62|A0A368XU62_9BURK Queuine tRNA-ribosyltransferase OS=Pseudorhodoferax soli OX=545864; GN = tgt PE=3 SV=1
MLQFDLLNTDPDSHARRGTLTLNHGVVQTPIFMPVGTYGTVKGVMPRSLEEMGAQIILGNTFHLWMRPGLDVVRHFGGLHRFEVWNKPILTDSGGFQVWSLGAMRKISEEGVKFASPVNGDKLFLTPEISMEIQTILNSDIVMQFDECTPYDTKGHITTEAEARTSMELSVRWARRCQAEFARLQNPNALFGIVQGGMFEHLREESLAQLVEMDFPGYAIGGVSVGEPKPEMLRIMAHTPHRLPAHKPRYLMGVGTPEDLVEGVAQGVDMFDCVMPTRNARNGTIFTRYGDLKIRNAKHRSDERPLDETCTCHACAGTSGVAKGAGGFSRAYLHHLDRCGEMLGPMLTTIHNLHYYLSLMAEIRAALEAGTFTEFRAQFARDRARGV

SEQ ID NO: 59843 - protein, 387 aa, Pseudorhodoferax sp.
  REGION 1..387: note = tr|A0A0Q4Y1M5|A0A0Q4Y1M5_9BURK Queuine tRNA-ribosyltransferase OS=Pseudorhodoferax sp. Leaf267; OX = 1736316 GN=tgt PE=3 SV=1
MLDFNLLATDPTSHARRGTLTLNHGVVQTPIFMPVGTYGTVKGVMPRSLEEMGAQIILGNTFHLWMRPGLDVIRQFGGLHRFEVWDKPILTDSGGFQVWSLGAMRKISEEGVKFASPVNGDKLFLTPEVSMQIQTDLNSDIVMQFDECTPYDTKGHITTEAEARSSMELSLRWAERCRAEFARLQNPNALFGIVQGGMFEHLRQESLDQLVAMDFPGYAIGGVSVGEPKDEMLRIMAHTPHRLPAHKPRYLMGVGTPEDLVEGVAQGVDMFDCVMPTRNARNGTIFTRYGDLKIRNAKHRSDERPLDTTCTCHACAGTSGVAMGSGGFSRAYLHHLDRCGEMLGPMLTSIHNLHYYLNLMREVREALDAGDFAGFRKRFAADRARGV

SEQ ID NO: 59844 - protein, 390 aa, Pseudorhodoferax sp.
  REGION 1..390: note = tr|A0A0S9NWV7|A0A0S9NWV7_9BURK Queuine tRNA-ribosyltransferase OS=Pseudorhodoferax sp. Leaf274; OX = 1736318 GN=tgt PE=3 SV=1
MLDFQLLATDPASHARRGTLTLNHGVVQTPIFMPVGTYGTVKGVMPRSLEEMGAQIILGNTFHLWMRPGLDVVRQFGGLHRFEAWNKPILTDSGGFQVWSLGAMRKISEEGVKFASPVNGDKLFLTPEVSMQVQTVLNSDIVMQFDECTPYDTKGHITTEAEARTSMELSVRWAKRCQAEFARLQNPNALFGIVQGGMFEHLREESLNALVEMDFPGYAIGGVSVGEPKPEMLRIMAHTPHRLPAHKPRYLMGVGTPEDLVEGVAQGVDMFDCVMPTRNARNGTIFTRYGDLKIRNAKHRSDERPLDETCTCHACAGTSGVASGAGGTGGFSRAYLHHLDRCGEMLGPMLTTIHNLHYYLNLMTEIRAALDAGRFTQFRAQFAQDRARGV

SEQ ID NO: 59845 - protein, 377 aa, unidentified
  source 1..377: note = Pseudorhodoplanes sinuspersici
  REGION 1..377: note = tr|A0A1W6ZW41|A0A1W6ZW41_9RHIZ Queuine tRNA-ribosyltransferase OS=Pseudorhodoplanes sinuspersici; OX = 1235591 GN=tgt PE=3 SV=1
MSNPFSFHLIASDGTARAGEIETAHGRIATPAFMPVGTQATVKAMMPDDVARTGADILLGNTYHLMLRPGPERIAALGGLHQFMNWHKPILTDSGGFQVMSLSQLRKIDEKAVTFRSHLDGAMYELSPERAVEIQRLLGADISMQLDECIRLPAKRDEIDRAMQLSLRWAERCKRAFEGAKPGHALFGIVQGGDDPALRIASAKALVDMDFQGYAIGGLAVGEPQAVMLSMIDIVAPVLPADRPRYLMGVGTPDDLIEAIWRGIDMFDCVMPTRNGRHGVAFTRYGQINLKNARHADDPRPLDERSPYAPTRTYSRAYLHHLVKANETLGAMLLSQVNLAYYQALMLGAREAIAAGTFNDYRVSVKAGWEEGDIPPR

SEQ ID NO: 59846 - protein, 374 aa, unidentified
  source 1..374: note = Pseudoroseicyclus aestuarii
  REGION 1..374: note = tr|A0A318SZN3|A0A318SZN3_9RHOB Queuine tRNA-ribosyltransferase OS=Pseudoroseicyclus aestuarii; OX = 1795041 GN=tgt PE=3 SV=1
MRFSFTLDATDGAARTGRIDTPRGAIRTPAFMPVGTAATVKAMLPEQVAETGADILLGNTYHLMLRPGAERVARLGGLHRFMNWDRPILTDSGGFQVMSLADLRKLTEEGVTFRSHVDGSKHVLTPERSMEIQRLLGSDIVMCFDECPALPATEERVAEAMRLSMRWAERSREAFGDRPGHALFGIQQGGVTRALREESAEALKSIGFEGYAIGGLAVGEGQEAMFGVLDYAPAMLPEDRPRYLMGVGKPDDILGAVKRGVDMMDCVLPTRSGRTGQAWTRRGQVNLRNARHAEDPRPLDEGCTCPACRGYSRAYLHHVVRAGEMIAGMLLTAHNLQYYQDLMAGMRGAIAEGRFAAFEADFHALRAEGDIERL

SEQ ID NO: 59847 - protein, 375 aa, Pseudoruegeria aquimaris
  REGION 1..375: note = tr|A0A1Y5RQR7|A0A1Y5RQR7_9RHOB Queuine tRNA-ribosyltransferase OS=Pseudoruegeria aquimaris; OX = 393663 GN=tgt PE=3 SV=1
MTKFSFALHKTDGAARTGVISTPRGEIRTPAFMPVGTAATVKAMMPESVRATGADILLGNTYHLMLRPTAERIDRLGGLHRFMNWERPILTDSGGFQVMSLSDLRKLTEEGVTFRSHIDGSKHFLSPERSMEIQRLLGSDIVMCFDECPALPADRKRIAESMRLSMRWAQRSRDAFGDRPGHALFGIQQGGLERDLREESAEALKSIGFDGYAIGGLAVGEGQEAMFATLDFAPSQLPEDKPRYLMGVGKPDDIVGAVKRGVDMMDCVLPSRSGRTGQAWTRRGQVNIKNVRHQDDPRPLDADCSCPTCRNYSRAYLHHVYRAKEMISGMLLTWHNLHYFQELMQGMRDAIAAGEFARFEADFHALRAEGDIEPL

SEQ ID NO: 59848 - protein, 376 aa, unidentified
  source 1..376: note = Pseudoruegeria haliotis
  REGION 1..376: note = tr|A0A2T0RZC0|A0A2T0RZC0_9RHOB Queuine tRNA-ribosyltransferase OS=Pseudoruegeria haliotis; OX = 1280846 GN=tgt PE=3 SV=1
MDKTFSFSLNATDGKARTGVISTPRGEIRTPAFMPVGTAATVKAMLPENVRATGADILLGNTYHLMLRPTAERIDRLGGLHDFMNWERPILTDSGGFQVMSLTALRKITEQGVRFKSHIDGSVHELSPERSMEIQRLLGSDIVMCFDECPALPADRDRIAESMRMSMRWAQRSRDAFGDRPGHALFGIQQGGLEEDLRGESAEALRGIGFDGYAIGGLAVGEGQKAMFETLDYAPDMLPTDKPRYLMGVGKPDDIVGAVKRGVDMMDCVLPSRSGRTGQVFTRRGVLNIKNARHQDDPRPIDEHCNCPACANYSRAYLHHVFRAQEIISSMLLTWHNLHYYQEIMQGMRDAIAAGRFAAWEADFHAERAAGDIEPV

SEQ ID NO: 59849 - protein, 376 aa, Pseudoruegeria lutimaris
  REGION 1..376: note = tr|A0A1G8U0I3|A0A1G8U0I3_9RHOB Queuine tRNA-ribosyltransferase OS=Pseudoruegeria lutimaris; OX = 571298 GN=tgt PE=3 SV=1
MTQRFTFELQATDDRARTGVIRTPRGDIRTPAFMPVGTAATVKAMLPESVRATGADILLGNTYHLMLRPTAERIDRLGGLHRFMNWERPILTDSGGFQVMSLTDLRKLTEKGVEFRSHIDGSKHMLTPERSMEIQRLLGSDIVMCFDECPALPADRARIEESMRLSMRWAERSRDAFGDRPGHALFGIQQGGLEQDLRAESAEALRTIGFDGYAIGGLAVGEGQEAMFGVLDFAPEMLPRDKPRYLMGVGKPDDIVGAVKRGIDMMDCVLPSRSGRTGQVFTRRGVVNIKNARHQDDPRPLNEYCTCPACQKYSRAYLHHVFRAHEIISSMLMTWHNLHYYQELMQGMREAISAGRFADWEAGFHAERAQGDIEPL

SEQ ID NO: 59850 - protein, 376 aa, Pseudoruegeria sp.
  REGION 1..376: note = tr|A0A1X4J104|A0A1X4J104_9RHOB Queuine tRNA-ribosyltransferase OS=Pseudoruegeria sp. SK021; OX = 1933035 GN=tgt PE=3 SV=1
MTRNINFQLHATEGRARTGTLRTPRGDIRTPAFMPVGTAATVKAMLPGSVRATGADILLGNTYHLMLRPTAERINALGGLHRFMNWDRPILTDSGGFQVMSLADLRKLTEEGVTFRSHIDGSKHMLSPETSMQIQKLLGSDIVMCFDECPALPADRDRIAESMRLSMRWAQRSRDAFGDRPGHALFGIQQGGDIEDLRGESAEALRAIDFDGYAVGGLAVGEGQEIMFKVLDYAPGMLPEDKPRYLMGVGKPDDIVGAVARGIDMFDCVLPSRSGRTGQLFTRRGVVNIKNARHQNDPRPIDDQCTCPACTGYSRAYLHHVFRAQEIISSMLLTWHNLHYYQELMSDIRAAIAAGTFTEFQREFNALRAQGDLEPL

SEQ ID NO: 59851 - protein, 467 aa, unidentified
  source 1..467: note = Pseudoscardovia radai
  REGION 1..467: note = tr|A0A261EWK2|A0A261EWK2_9BIFI Queuine tRNA-ribosyltransferase OS=Pseudoscardovia radai OX=987066; GN = tgt PE=3 SV=1
MSTAENNEPTTASTAANTAANTDSTAAQSSVFAHFRTPLGAEPGKPGDRGAFGFDIHTRIPDRHGRTGVIHTPHGDINTPAFVPVATQATMKGVLPEQMRELGAQCLLANAFHLFERPGEDVLDEAGGLARFMNWDGPTYTDSGGFQVLSLGAGFKKTLAMDVQGMKSDDVIAKGKERLAFVDEDGVTFKSPLNGAKKRFSAEISMSIQHKIGADIMFAFDELTTLMNTRKYQEKSVERTFRWAKRCVAEHERLTQARPGKPYQALFGVVQGANYEDLRHLAAREIASLDFDGFGIGGAIEKRILGDTCRWICDELPENKPRHVLGIAAIDDIFAAVENGGDTFDCVAPAREARNGAIYTRTGRWNIKRAALKHDFRPLDPTCDCYTCTHYTRAYLNHLVHTREMTASTLATIHNERFFVKLLGDIRDAIDGGYFPEFRDETLARFYGGADRVAPGTHANSGAADSR

SEQ ID NO: 59852 - protein, 450 aa, unidentified
  source 1..450: note = Pseudoscardovia suis
  REGION 1..450: note = tr|A0A261EXV9|A0A261EXV9_9BIFI Queuine tRNA-ribosyltransferase OS=Pseudoscardovia suis OX=987063; GN = tgt PE=3 SV=1
MTDAIAGAAIAATAATWPATPLGAHPDKPGDRAAFGFTIGTRIPGRHGRTGVIHTPHGDIATPAFVPVATQATMKGVLPEQMRDLGAQCLLANAFHLFERPGEDVLDEAGGLGRFMNWGGPTYTDSGGFQVLSLGAGFKKTLAMDVQGMKSDDVIAKGKERLAFVDEDGVTFKSPLNGAKKRFSAEISMGIQHKIGADIMFAFDELTTLMNTRQYQEKSVERTFRWAKRCVAEHERLTQTRLGKPYQALFGVVQGANYEDLRHLAAREIASLDFDGFGIGGAIEKRILGDTCRWICDELPENKPRHVLGIAAIDDIFAAVENGGDTFDCVAPAREARNGAIYTRTGRWNIKRAALKHDFRPLDPTCDCYTCTHYTRAYLNHLVHTREMTASTLATIHNERFFVKLLGDIRDAIDGGYFPEFRDETLARFYGGSDRVAPGTHANSGAADSQ

SEQ ID NO: 59853 - protein, 376 aa, Pseudosphingobacterium domesticum
  REGION 1..376: note = tr|A0A1H7WZE3|A0A1H7WZE3_9SPHI Queuine tRNA-ribosyltransferase OS=Pseudosphingobacterium domesticum OX=407022 GN=tgt PE=3 SV=1
MKFTLQSTDNLSKARAGEIETAHGTIQTPIFMPVGTAGSVKGVHQHELKKDIEAQIILGNTYHLYLRPGLDVIHAAGGLHKFNGWDKPILTDSGGYQVYSLTDVRKIKEEGVTFRSHIDGSKHLFTAENVMDTQRIIGADIIMAFDECTPYPCDYKYAKESLDMTHRWLKRCCERFDSTPSLYGYEQSLFPIVQGSVYKDLREKSAETIASFDRDGNAIGGLSVGEPAEEMYAMTEVVTNILPKNKPRYLMGVGTPINILENIALGIDMFDCVMPTRNGRNGMLFTRNGIINIKNKKWEADFSPIDADSDLHTDLFYTKAYLRHLIHSKELLGAQIATLHNLHFYLWLVKEARNKIIEGSFYEWKNKMVKQLGERL

SEQ ID NO: 59854 - protein, 375 aa, Pseudospirillum japonicum
  REGION 1..375: note = tr|A0A1H6SUM9|A0A1H6SUM9_9GAMM Queuine tRNA-ribosyltransferase OS=Pseudospirillum japonicum; OX = 64971 GN=tgt PE=3 SV=1
MSSSFMRFECLTTEGKARRGRLHFPRGVVETPAFMPVGTYGTVKGVLPRDLHELGADIILGNTFHLMLRPGTEVIQAHGDLHDFMQWDKPILTDSGGFQVFSLGAMRKITEQGVTFRSPINGAKVFMGPEESMQVQRALGSDIVMIFDECTPYPATYEQARTSMELSLRWAARSKQAHADNPSALFGIIQGGMYEDLRYRSLEGLLNIGFDGLAIGGLSVGEPKTEMLKVLDYLPAAMPADKPRYLMGVGKPEDLVEGVRRGVDMFDCVMPTRNARNGHYFVTDGVIKIRNARYKTETAPLDEHCDCYTCQNFSRAYLHHLDKCGEMLGATLASIHNLRYYQRLMAGLRAALEAGTLSAFIEDFYARRGLAVPEC

SEQ ID NO: 59855 - protein, 396 aa, unidentified
  source 1..396: note = Pseudothermotoga hypogea
  REGION 1..396: note = tr|A0A0X1KNX5|A0A0X1KNX5_9THEM Queuine tRNA-ribosyltransferase OS=Pseudothermotoga hypogea DSM 11164 = NBRC 106472 OX=1123384 GN=tgt PE=3 SV=1
MSDRPPSNARPSNFEIVCRTGCARLGRLKTLHGTFETPIFMPVGTNANVKLMRSDDLKRVGASIILSNAYHVAVRPGLEVIELHGGLHNFMAWDGGILTDSGGFQMFSLKNFRKVSDEGVTFVSPYDGSKLFLTPELSMDIQRTLGSDIVMVLDHCPPIDVGYTEALDATRRTHEWAERCLKRGVKEGQLLFAIAQGGAFEDLRRASARYLSEKDFDGFAVGGLSLGEPFEMTLRLAHATVSELPDDRPRYFMGGGSPRTIIELVAIGIDMFDSVYPTRLARHGAALTSEGRLNIKASRYRKDLSPIDHRCDCLVCRNYTRSYIHHLLNRGETLAGMLLTYHNLYYMFRFMERVRESILNGTLEEMRREVAEIYEERRGSPVDVLALDYNGARRHS

SEQ ID NO: 59856 - protein, 393 aa, unidentified
  source 1..393: note = Pseudothermotoga lettingae
  REGION 1..393: note = tr|A8F4C9|A8F4C9_PSELT Queuine tRNA-ribosyltransferase OS=Pseudothermotoga lettingae (strain ATCC BAA-301 / DSM 14385 / NBRC 107922 / TMO); OX = 416591 GN=tgt PE=3 SV=1
MLQKEQRSCFEIVSKFGEARVGKLHTNHGDYETPVFMPVGTNANVKLTDTMRLKEIGAGIILGNSYHLAVRPGLDVIRLHGGLHQFMGWKGGILTDSGGFQVFSLRKLRDIGDDGVLITSPVDGSKMLLTPELSMEIQSTLNSDIVMVLDHCPGPEDSYTESMVSAKRTYNWAMRCLKHGVNEHQLLFAIAQGGVYEDLRKLSAEQLSQLPFDGFAIGGLSLGEPFEKTLYLTQITVSALPSENPRYFMGGGSPALIIQLVEMGVDMFDSVFPTRLARHGAALTWKGRLNIKSARFKRDLQPIEENCDCFVCQNYSKSYLHHLFDRKEVLGGILLTYHNLHFMMKFMNKIRNSIEDGTFKTLKREVLDVYGKGKKADLYVDAAISDNNNGRYN

SEQ ID NO: 59857 - protein, 396 aa, unidentified
  source 1..396: note = Pseudothermotoga sp.
  REGION 1..396: note = tr|A0A3D3V2Z0|A0A3D3V2Z0_9THEM Queuine tRNA-ribosyltransferase OS=Pseudothermotoga sp. OX=2033661; GN = tgt PE=3 SV=1
MSDRLPSNARPSNFEIVCRTGCARLGRLKTLHGTFETPIFMPVGTNANVKLMRSDDLKRVGASIILSNAYHVAVRPGLEVIELHGGLHNFMAWDGGILTDSGGFQMFSLKNFREVSDEGVTFVSPYDGSKLFLTPELSMDIQRTLGSDIVMVLDHCPPIDADYAEALDATRRTNEWAERCLKRGVKEGQLLFAISQGGAFEDLRRASARHLSEKDFDGFAVGGLSLGEPFEMTLQLAHATVSELPDDRPRYFMGGGSPRTIIELVAIGIDMFDSVYPTRLARHGAALTSEGRLNIKASRYRRDLSPIDHRCDCLVCRNYTRSYIHHLLNRRETLAGMLLTYHNLYYMFRFMERVRESILNGTLEEMRREVAEIYEERRGNPVDVLALDYDGARRHS

SEQ ID NO: 59858 - protein, 386 aa, unidentified
  source 1..386: note = Pseudothermotoga thermarum
  REGION 1..386: note = tr|F7YY94|F7YY94_9THEM Queuine tRNA-ribosyltransferase OS=Pseudothermotoga thermarum DSM 5069 OX=688269 GN=tgt PE=3 SV=1
MESLGFEIVKECGSARVGKLKTAHGVYETPIFMPVGTNANVKLMRSEDLKEIGVGILLGNSYHLAVRPGLEVIELHGGLHQFMNWDGAILTDSGGFQVFSLKKLIKISDEGVLITSPVDGSKIFLTPELSMKIQRTLNSDIVMVLDHCPSPADGYKEVLEATKRTYRWALKCLKEGVQKHQLLFAIAQGGTYEDLRIESAKSLSELPFDGFAIGGLSLGEEYEKTLYMSEVSVSCLPKHKPRYFMGGGSPALIVRLVEIGVDMFDSVFPTRLARHGTALTWEGRLNVKASRYKMDKRPIDEKCSCKVCRNYTRSYIHHLIDREETLGGILLTYHNLYFMMDFMKRLRESILQGTFGSFKEEVLKAYEKDNVVCSDFADNVVDFGKS

SEQ ID NO: 59859 - protein, 393 aa, unidentified
  source 1..393: note = Pseudovibrio axinellae
  REGION 1..393: note = tr|A0A165YPQ3|A0A165YPQ3_9RHOB Queuine tRNA-ribosyltransferase OS=Pseudovibrio axinellae; OX = 989403 GN=tgt PE=3 SV=1
MSEKTTEQAATTKPFSFKLLKTEGMARRGEITTPHGKVRTPAFMPVGTQATVKAMYPQQVRDLGADVVLGNTYHLMLRPTAERIAKLGGLHKFMGWDHTILTDSGGFQVMSLSGLRKMTEEGVTFSSHHDGSKHFMSPERSVEIQGLLGSDIQMQLDECIALPAERSEVERAMQLSLRWAERSRNQFESMGGPQKGQGLYGIVQGGDVPDLRIESAQRLGELPMEGYSVGGLAVGEPQAVMLKMLEITTPAMPNDKPRYLMGVGTPEDILESVARGIDQFDCVMPTRAGRHGLAYTRFGKVNLKNARHSEDPRPLDEESQCEAASKYSRAYLHHLVRVNEGLGAMLLTWNNLAYYQYLMQGIRDAIDEGRFEEFRQQTKEDWARGDLEPYVWS

SEQ ID NO: 59860 - protein, 393 aa, Pseudovibrio denitrificans
  REGION 1..393: note = tr|A0A1I6XD63|A0A1I6XD63_9RHOB Queuine tRNA-ribosyltransferase OS=Pseudovibrio denitrificans; OX = 258256 GN=tgt PE=3 SV=1
MTETTIDTQQDAKPFSFKLLKTDGMARRGEITTPHGKVRTPAFMPVGTQATVKAMYPQQVRDLGADVVLGNTYHLMLRPTAERIAKLGGLHKFMGWDHTILTDSGGFQVMSLSGLRKMTEEGVTFSSHHDGSKHFMSPERSVEIQGLLGSDIQMQLDECIALPAERDEVERAMQLSLRWAERSRAQFEKMGGPQKGQGLYGIVQGGDVPDLRIKSAQALGELPMEGYSVGGLAVGEPQAVMLKMLEITTPAMPKDKPRYLMGVGTPEDILESVARGIDQFDCVMPTRAGRHGLAYTRFGKVNLKNARHSEDPRPLDELSNCEATSKYSRAYLHHLVRVNEGLAAMLLTWNNLAYYQYLMQGIRDAIDEGRFEEFRQKTKEDWARGDIEPYVWS

SEQ ID NO: 59861 - protein, 754 aa, Pseudovibrio sp.
  REGION 1..754: note = tr|G8PH34|G8PH34_PSEUV Multifunctional fusion protein OS=Pseudovibrio sp. (strain FO-BEG1) OX=911045; GN = tgt PE=3 SV=1
MLVDDFDFDLPPENIALRPAVPRDSSRLLVVRPDGEQLLTDDQVLSLPDLLEPGDALVFNDTKVIPAQLLGFRTRDGVTAKVGVTLHQRASAKEWRAFVRPAKKLKVGDTVRFAFDEESKDAAELSAVVTEKSESGDILFEFDRSAGDLDAAIAQVGHIPLPPYIAAKRAEDDQDRKDYQTIYAKHEGAVAAPTAGLHFTDRLFAALEERGVEKHFVTLHVGAGTFLPVKADKTEDHKMHFEYGEISEETVAALNAVRARGNKIVSVGTTSLRILESAVTDEGIINPISQSTDIFITPGYQFKAIDALMTNFHLPRSTLFMLVSALSGMEEMRAAYEHAISSGYRFYSYGDSSLLFKKALKMTETTIDTQQDAKPFSFKLLKTDGMARRGEITTPHGKVRTPAFMPVGTQATVKAMYPQQVRDLGADVVLGNTYHLMLRPTAERIAKLGGLHKFMGWDHTILTDSGGFQVMSLSGLRKMTEEGVTFSSHHDGSKHFMSPERSVEVQGLLGSDIQMQLDECIALPAERDEVERAMQLSLRWAERSRAQFEKMGGPQKGQGLYGIVQGGDVPDLRIESAQRLGELPMEGYSVGGLAVGEPQAVMLKMLEITTPAMPKDKPRYLMGVGTPEDILESVARGIDQFDCVMPTRAGRHGLAYTRFGKVNLKNARHAEDPRPLDELSNCEATSKYSRAYLHHLVRVNEGLAAMLLTWNNLAYYQYLMQGIRDAIDEGRFEEFRQKTKEDWARGDIEPYVWS

SEQ ID NO: 59862 - protein, 393 aa, Pseudovibrio sp.
  REGION 1..393: note = tr|A0A165U510|A0A165U510_9RHOB Queuine tRNA-ribosyltransferase OS=Pseudovibrio sp. Ad26 OX=989410; GN = tgt PE=3 SV=1
MTETSRETQQDTKPFSFKLLKTDGMARRGEITTPHGKVRTPAFMPVGTQATVKAMYPQQVRDLGADVVLGNTYHLMLRPTAERIAKLGGLHKFMGWDHTILTDSGGFQVMSLSGLRKMTEEGVTFSSHHDGSKHFMSPERSVEIQGLLGSDIQMQLDECIALPAERAEVERAMQLSLRWAERSRAQFEKMGGPEKGQGLYGIVQGGDVPDLRVESAQRLGELPMEGYSVGGLAVGEPQAVMLKMLEITTPAMPKDKPRYLMGVGTPEDILESVARGIDQFDCVMPTRAGRHGLAYTRFGKVNLKNARHSEDPRPLDEQSNCEATSKYSRAYLHHLVRVNEGLAAMLLTWNNLAYYQYLMQGIRDAIDEGRFEEFRQQTKEDWARGDLEPYVWS

SEQ ID NO: 59863 - protein, 374 aa, Pseudoxanthobacter soli
  REGION 1..374: note = tr|A0A1M7ZLJ9|A0A1M7ZLJ9_9RHIZ Queuine tRNA-ribosyltransferase OS=Pseudoxanthobacter soli DSM 19599 OX=1123029 GN=tgt PE=3 SV=1
MTPFRYEPLGQDDAARRGRLHTAHGTVETPAFMPVGTQATVKAMFPEDVAATGAEVVLGNTYHLMLRPTAERVSGLGGLHTFMRWNRTILTDSGGFQIMSLSGLRKLEEHGVAFQSHIDGSRHLLTPERSVEIQGLLGSDIQMQLDECVRLPAERKEVERGMRLSLRWAERSRAAFEAMDGPAKGQALFGIVQGGDDAGLRVESAAALSAMPFEGYSIGGLAVGEPQDVMLAMLDETLPVLPAEKPRYLMGVGTPHDIIEAVARGIDMFDCVMPTRAGRHGVAYTRFGKLNLKNARHADDPAPLDPESDCPAARDYSRAYLHHLVRCGEGLGAMLLTWNNIAYYQHLMKTLRTAIEQGRFAEVRAELGRLWAKG

SEQ ID NO: 59864 - protein, 375 aa, unidentified
  source 1..375: note = Pseudoxanthomonas composti
  REGION 1..375: note = tr|A0A4Q1JYQ3|A0A4Q1JYQ3_9GAMM Queuine tRNA-ribosyltransferase OS=Pseudoxanthomonas composti; OX = 2137479 GN=tgt PE=3 SV=1
MSRMSFALHRTDGHARRGQLTFPRGSIQTPAFMPVGTYGSVKGILPEHIEELGAEIILGNTFHLYLRPGLEVIQAHGGLHGFARWNRPILTDSGGFQVFSLAHRRKISEQGVTFASPTDGARVFLGPEESMKIQHVLDSDIVMIFDECTPYPATEGVARASMELSLRWAKRSLEAHQALGNDAALFGIVQGGVHHDLRSRSADGLQALGFDGYAIGGLAVGEPEHERNAMLEHLHPQLPADRPRYLMGVGRPEDLVEAVARGVDMFDCVMPTRNARNGHYFTSFGTVRIRNARYERDLEVIEPGCGCYACRNGFTRSYLRHLDRCNEMLGPMLGTLHNLWYYQSLMAQIRQAIEEGRFSEFRASFHAARGSRPSA

SEQ ID NO: 59865 - protein, 391 aa, Pseudoxanthomonas dokdonensis
  REGION 1..391: note = tr|A0A0R0CGZ6|A0A0R0CGZ6_9GAMM Queuine tRNA-ribosyltransferase OS=Pseudoxanthomonas dokdonensis; OX = 344882 GN=tgt PE=3 SV=1
MSRMNFQLLGNDGVARRGRLTFPRGTVETPAFMPVGTYGSVKGILPEHIEALGAEIILGNTFHLYLRPGLEVIEKHQGLHRFARWDKPILTDSGGFQVFSLAHSRKITEQGVTFASPVDGSKVFLGPEESMHIQKVLDSDIVMIFDECTPYPATEEVAGKSMELSLRWAERSKRAHEGNDAALFGIVQGGVHERLRERSAARLREIGFDGYAIGGLAVGEPEAERNRMLDHVHPLLPDDQPRYLMGVGRPEDLVEAVARGVDMFDCVMPTRNARNGHYFTSFGTVRIRNARYEQDLDPIEPGCGCYACSHGYTRAYLRHLDRCNEMLAPMLGTLHNLWYYQKLMADMRSAIEQGGFASFREHFYAARGAALPGQGMPVAPSAGTKPAPRGL

SEQ ID NO: 59866 - protein, 375 aa, Pseudoxanthomonas indica
  REGION 1..375: note = tr|A0A1T5JA67|A0A1T5JA67_9GAMM Queuine tRNA-ribosyltransferase OS=Pseudoxanthomonas indica; OX = 428993 GN=tgt PE=3 SV=1
MSRLQFHLQTTDGQARRGRLEFPRGTVQTPAFMPVGTYGSVKGIFPDQVEALGAEIILGNTFHLYLRPGLEVIEQHGGLHGFARWNKPILTDSGGFQVFSLAHRRKLTEQGVTFASPVDGSKVFLGPEESMRIQKVLDSDIVMQLDECTPYPASEDVARKSMELSLRWAERSKRAHEGNDAALFGIVQGGVHEGLRARSAQGLQALGFDGYAIGGLAVGEPEAERNHTLDVTAPLLPADRPRYLMGVGRPEDLVEAVARGVDMFDCVMPTRNARNGHYFTSFGTVRIRNAKYEKDLQPIEPGCGCYACRNEFTRSYLRHLDRCNEMLAPMLGTMHNLWYYEKLMADIRQAIEQGDFKDFRAGFYAARGADAPALA

SEQ ID NO: 59867 - protein, 380 aa, Pseudoxanthomonas sp.
  REGION 1..380: note = tr|A0A4Q8L8F1|A0A4Q8L8F1_9GAMM Queuine tRNA-ribosyltransferase OS=Pseudoxanthomonas sp. NML171200; OX = 2480816 GN=tgt PE=3 SV=1
MSRMDFALKATDGNARRGQLSFPRGTVQTPAFMPVGTYGSVKGVFPEHIRDLGAEIILGNTFHLYLRPGLEVIGQHGGLHGFARWDRPILTDSGGFQVFSLAHRRKITEAGVTFASPTDGAKVFLGPEESMKIQRVLDSDIVMIFDECPPVNVDGKPVDKRVVHKSMELSLRWARRSREAHDALGNDAALFGIVQGGVHGDLRSQSAQGLQDIGFDGYAIGGLAVGETEDERNAMLDHLHPQLPGDKPRYLMGVGRPEDLVEGVARGVDMFDCVMPTRNARNGHYFTRFGTVRIRNSRYEHDLDVIEPGCGCYACRNGFTRSYLRHLDRCNEMLGPMLGTLHNLWYYQWLMAQMRQAIEQGRFQAFRADFYAQRGVAVPA

SEQ ID NO: 59868 - protein, 380 aa, Pseudoxanthomonas sp.
  REGION 1..380: note = tr|A0A4Q8LAL1|A0A4Q8LAL1_9GAMM Queuine tRNA-ribosyltransferase OS=Pseudoxanthomonas sp. NML171202; OX = 2480817 GN=tgt PE=3 SV=1
MSRMDFTLKATDGNARRGQLSFPRGTVQTPAFMPVGTYGSVKGVFPEHIKDLGAEIILGNTFHLYLRPGLEVIGQHGGLHGFARWDRPILTDSGGFQVFSLAHRRKITEAGVTFASPTDGAKVFLGPEESMKIQRVLDSDIVMIFDECPPVNVDGKPVDKRVVHKSMELSLRWARRSREAHDGLGNDAALFGIVQGGVHGDLRSQSAQGLQDIGFDGYAIGGLAVGETEDERNAMLDHLHPQLPGDKPRYLMGVGRPEDLVEGVARGVDMFDCVMPTRNARNGHYFTRFGTVRIRNSKYEHDLDVIEPGCGCYACRNGFTRSYLRHLDRCNEMLGPMLGTLHNLWYYQWLMARMRQAIEQGRFQAFRAAFYAERGMAVPG

SEQ ID NO: 59869 - protein, 377 aa, Pseudoxanthomonas spadix
  REGION 1..377: note = tr|G7URQ5|G7URQ5_PSEUP Queuine tRNA-ribosyltransferase OS=Pseudoxanthomonas spadix (strain BD-a59) OX=1045855 GN=tgt PE=3 SV=1
MTFALARADGRARRGQLHFPRGTIQTPAFMPVGTYGSVKGILPEHIAELGAEIILGNTFHLYLRPGLEVIRAHGGLHGFARWNKPILTDSGGFQVFSLAHRRKITEAGVTFASPTDGARVFLGPEESMQIQKTLDSDIVMIFDECPPVNVDGQPVDKDVVHKSMALSLRWAQRSRDAHDGLGNDAALFGIVQGGVHPDLRTQSSDGLQAIGFDGYAIGGLAVGETEAQRNAMLEHLDPQLPADRPRYLMGVGRPEDLVEGVARGVDMFDCVMPTRNARNGHFFTSTGTVRIRNARYEKDLDPIEPGCGCHACRNGFTRSYLRHLDRCNEMLAPMLGTLHNLWYYQQLMAGMRAAIEQGRFQAFRAEFYEARGMPVPA

SEQ ID NO: 59870 - protein, 380 aa, Pseudoxanthomonas spadix
  REGION 1..380: note = tr|A0A3M6Q1K0|A0A3M6Q1K0_9GAMM Queuine tRNA-ribosyltransferase OS=Pseudoxanthomonas spadix; OX = 415229 GN=tgt PE=3 SV=1
MSRMTFALARADGRARRGQLHFPRGTIQTPAFMPVGTYGSVKGILPEHIAELGAEIILGNTFHLYLRPGLEVIQAHGGLHGFARWSKPILTDSGGFQVFSLAHRRKITEAGVTFASPTDGARVFLGPEESMQIQKTLDSDIVMIFDECPPVNVDGQPVDKDVVHKSMALSLRWAQRSRDAHDGLGNDAALFGIVQGGVHPDLRTQSSDGLQAIGFDGYAIGGLAVGETEAQRNAMLEHLDPQLPADRPRYLMGVGRPEDLVEGVARGVDMFDCVMPTRNARNGHFFTSTGTVRIRNARYEKDLDPIEPGCGCHACRNGFTRSYLRHLDRCNEMLAPMLGTLHNLWYYQQLMAGMRAAIEQGRFQAFRAEFYEARGMPVPA

SEQ ID NO: 59871 - protein, 372 aa, Pseudoxanthomonas suwonensis
  REGION 1..372: note = tr|E6WUL1|E6WUL1_PSEUU Queuine tRNA-ribosyltransferase OS=Pseudoxanthomonas suwonensis (strain 11-1) OX=743721 GN=tgt PE=3 SV=1
MSRLQFQLQTTDGAARRGRLAFPRGTVETPAFMPVGTYGSVKGILPDQVKALGAQIILGNTFHLYLRPGLDVIGDHGGLHGFARWDGPILTDSGGFQVFSLAHRRKITEQGVTFASPTDGARVFLGPEESMKIQKVLDSDIVMIFDECTPYPATEDVARRSMELSLRWARRSRDAHDGLGNDAALFGIVQGSVYHDLRSRSLDGLQQIGFDGYAIGGLAVGEPEHERNAMLEHLHPRLPADRPRYLMGVGRPEDLVEGVARGVDMFDCVMPTRNARNGHYFTSFGTVRIRNARYERDMDPIEPGCGCVACSGGYTRSYLRHLDRCNEMLGPMLGTLHNLWYYQKLMADMRAAIEQGRFEAFRREFYAARGAG

SEQ ID NO: 59872 - protein, 372 aa, Pseudoxanthomonas suwonensis
  REGION 1..372: note = tr|A0A2W4Y7I1|A0A2W4Y7I1_9GAMM Queuine tRNA-ribosyltransferase OS=Pseudoxanthomonas suwonensis; OX = 314722 GN=tgt PE=3 SV=1
MSRMTFDLLATDGAARRGRIAFPRGSVETPTFMPVGTYGSVKGVLPGQLRELGAQMILGNTFHLYLRPGLEVIADHGGLHRFTGWSGPILTDSGGFQVFSLAHRRKITEDGVTFAAPTDGSKVFLGPEESMRIQKVLDSDVVMIFDECTPYPADHDTARKSMELSLRWAERSKRAHAGNDAALFGIVQGGVHRDLRSASADGLQRIGFDGYAIGGLAVGEPEAERNAMLEHTCPQLPADRPRYLMGVGRPEDLVEAVARGVDMFDCVMPTRNARNGHYFTRSGTVRIRNARYERDLDPIEPGCGCYTCRNGYSRAYLRHLDRCNEMLAPMLGTLHNLWHYQRLMAEMRQAIETGTFARFRESFYAARLSPAA

SEQ ID NO: 59873 - protein, 372 aa, Pseudoxanthomonas taiwanensis
  REGION 1..372: note = tr|A0A562E4D8|A0A562E4D8_9GAMM Queuine tRNA-ribosyltransferase OS=Pseudoxanthomonas taiwanensis J19 OX=935569 GN=tgt PE=3 SV=1
MSRLQFQLQTTDGAARRGRLTFPRGTVETPAFMPVGTYGSVKGVLPGQIRDLGAQIILGNTFHLYLRPGLDVIADHGGLHGFARWDGPILTDSGGFQVFSLAHRRKITEQGVTFASPTDGARVFLGPEESMKIQKVLDSDIVMIFDECTPYPASEDVARRSMELSLRWARRSRDAHDGLGNDAALFGIVQGSVYHDLRSRSLDGLQAIGFDGYAIGGLAVGEPEAERNAMLEHLHPRLPADRPRYLMGVGRPEDLVEGVARGVDMFDCVMPTRNARNGHYFTSFGTVRIRNARYERDMDPIEPGCGCVACSGGYSRAYLRHLDRCNEMLGPILGTLHNLWYYQKLMADMRAAIEQGRFEAFRRDFYAARAGG

SEQ ID NO: 59874 - protein, 370 aa, unidentified
  source 1..370: note = Pseudoxanthomonas wuyuanensis
  REGION 1..370: note = tr|A0A286D717|A0A286D717_9GAMM Queuine tRNA-ribosyltransferase OS=Pseudoxanthomonas wuyuanensis; OX = 1073196 GN=tgt PE=3 SV=1
MSRLQFQLHGTDGVARRGRLTFPRGTIETPAFMPVGTYGSVKGILPEHIKELGAEIILGNTFHLYLRPGLEVIEKHGGLHGFARWDKPILTDSGGFQVFSLAHRRKIGEQGVTFASPVDGSKVFLGPEESMHIQRVLDSDIVMIFDECTPYPATEEVARKSMELSLRWAERSKRAHEGNDAALFGIVQGGVHESLRERSAARLREIGFDGYAIGGLAVGEPEAERNRMLEHVHPLLPHDQPRYLMGVGRPEDLVEAVARGVDMFDCVMPTRNARNGHYFTSTGTVRIRNAKYELDLDPIEPGCGCYACRNGYSRAYLRHLDRCNEMLAPMLGTLHNLWYYQKLMADMRAAIEQRRFGQFRTAFYAARNSV

SEQ ID NO: 59875 - protein, 376 aa, Pseudozobellia sp.
  REGION 1..376: note = tr|A0A2E5BL97|A0A2E5BL97_9FLAO Queuine tRNA-ribosyltransferase OS=Pseudozobellia sp. OX=2024854; GN = tgt PE=3 SV=1
MKFTLHHKDPQSKARAGTMVTDHGAIETPIFMPVGTVASVKSVHQRELKDDINPDIILGNNYHLFLRPKIDILKKAGGLHKFMGWDRNILTDSGGYQVYSLSGNRKIKEEGVKFKSHIDGSVHLFTPERVMEIQRVIGADIIMAFDECTPYPCDYKYAERSMHMTHRWLERCITHLKKTPFEYDYAQTFFPIVQGSTYLDLRKRSAEYIAGVEAEGNAIGGLSVGEPAEEMYAMTDVVCSILPEDKPRYLMGVGTPINILENIALGVDMFDCVMPTRNARNGMLFTAYGTINIKNKKWEDDFSPIDEMGITFVDKEYTKAYLRHLFAANEYLGKQIATIHNLGFYMWLVREARKHIIEGDFLDWKNRMVKQMDNRL

SEQ ID NO: 59876 - protein, 376 aa, Pseudozobellia sp.
  REGION 1..376: note = tr|A0A3B0C468|A0A3B0C468_9FLAO Queuine tRNA-ribosyltransferase OS=Pseudozobellia sp. CCMM003; OX = 2419782 GN=tgt PE=3 SV=1
MKFTLHDTDSQSKARAGTITTFHGVIETPIFMPVGTVASVKGVHQRELKQDIDPDIILGNTYHLFLRPKTHILREAGGLHKFMGWDRNILTDSGGYQVYSLSANRKIKEEGVKFKSHIDGSMHFFTPENVMEIQRTIGADIIMAFDECTPYPCEYTYAERSMKMTHRWLDRCLAHLEKTPVEYGFDQAFFPIVQGSTFKDLRKRSAEYIANVDAEGNAIGGLSVGEPAEEMYEMTEVVCAILPQDKPRYLMGVGTPINILENIALGIDMFDCVMPTRNARNGMLFTAHGTINIKNKKWENDFSPVDGMGITFVDLEYSKAYLRHLFAANEYLGKQIATIHNLGFYLWLVREARKHILKGDFMEWKNKMVKQMDKRL

SEQ ID NO: 59877 - protein, 386 aa, Pseudozobellia thermophila
  REGION 1..386: note = tr|A0A1M6I8B2|A0A1M6I8B2_9FLAO Queuine tRNA-ribosyltransferase OS=Pseudozobellia thermophila; OX = 192903 GN=tgt PE=3 SV=1
MIIFAGIIFSLKFTLHHTDPKSKARAGTMVTDHGAIETPIFMPVGTVASVKSVHQRELKEDINPDIILGNTYHLFLRPKTDILKKAGGLHKFMGWDRNILTDSGGYQVYSLSGTRKIKEEGVKFKSHIDGSTHLFTPERVMEIQRVIGADIIMAFDECTPYPCEYKYAERSMHMTHRWLDRCIAHLEKTPYEYDYTQSFFPIVQGSTYTDLRKRSAEYIAGVGAEGNAIGGLSVGEPAEEMYAMTEVVCDILPEDKPRYLMGVGTPINILENIALGIDMFDCVMPTRNARNGMLFTAHGTINIKNKKWEDDFSPIDEMGITYVDVEYSKAYLRHLFVANEYLGKQIATIHNLGFYMWLVREARKHILAGDFVEWKDRMVKQMDKRL

SEQ ID NO: 59878 - protein, 387 aa, Psychrilyobacter sp.
  REGION 1..387: note = tr|A0A369XSW7|A0A369XSW7_9FUSO Queuine tRNA-ribosyltransferase OS=Psychrilyobacter sp. S5; OX = 2283384 GN=tgt PE=3 SV=1
MNKLPVNYELSHRDGKARAGVITTPHGDIKTPVFMPVGTQATVKTMNPEEVRELGADIILGNTYHLFLRPGDDVVAKFGGLHKFMNWSHPILTDSGGFQVFSLGAIRKIKEEGVYFRSHIDGSKRFISPEKSIDIQNNLGADIVMLFDECPPGQSSREYLIPSIERTTRWAKRCVTAHKRPDDQGLFAIVQGGIYEDLRDKSMNELMEMDESFSGYAIGGLAVGEPREDMYRILDYITPKLPEHKPRYLMGVGEPLDMLEAVEHGVDMMDCVQPSRIGRHGTTFTKYGRLVIKNAKYSLDPRPLDEDCDCYVCKNYTRGYIRHLFKANEMLGQKLATYHNLYFLIKMMNGARDAIIDKRFIAFKEEFIGNYTQGKDSEWIIPQRIED

SEQ ID NO: 59879 - protein, 379 aa, Psychrobacillus insolitus
  REGION 1..379: note = tr|A0A2W7MIV5|A0A2W7MIV5_9BACI Queuine tRNA-ribosyltransferase OS=Psychrobacillus insolitus; OX = 1461 GN=tgt PE=3 SV=1
MTAIKYELIKKDKQTGARLGVVHTPHGSFDTPAFMPVGTQATVKTMAPEEVKEMGAGIILSNTYHLWLRPGNDIIREAGGLHKFMNWDRAILTDSGGFQVFSLSDMRKIEEEGVHFRNHLNGDKLFLSPEKSMQIQNDLGSDIMMAFDECPPFPATYEYMKASVERTSRWAERCLTAHTNTDKQGLFGIIQGGEFEELRKQSAKDLISLDFPGYAIGGLSVGEPKDVMNRVLEFTAPLMPDNKPRYLMGVGSPDSLIDGAIRGIDMFDCVLPTRIARNGTFFTSKGRLVIKGAANARDFGPIDDKCDCYTCKNYSRAYIRHLFKAEETFGMRLASYHNLHFLMKLMEKIRQAIREDRLLDFKEEFFEEYGYNKPNAKNF

SEQ ID NO: 59880 - protein, 379 aa, unidentified
  source 1..379: note = Psychrobacillus lasiicapitis
  REGION 1..379: note = tr|A0A544T8K3|A0A544T8K3_9BACI Queuine tRNA-ribosyltransferase OS=Psychrobacillus lasiicapitis; OX = 1636719 GN=tgt PE=3 SV=1
MSAITYELIKKDKQTGARLGIVHTPHGSFETPTFMPVGTQATVKTMAPEEIKEMKAGIILSNTYHLWLRPGHDIIREAGGLHKFMNWDRAILTDSGGFQVFSLSDMRKIEEEGVHFRNHLNGDKLFLSPEKSMEIQNALGSDIMMAFDECPPYPASFEYMKASVERTSRWAERCLTAHTNTDKQGLFGIIQGGEYEELRRQSAQDVISMDFPGYAIGGLSVGEPKDVMNRVLDFTTPLMPDNKPRYLMGVGSPDSLIDGSIRGVDMFDCVLPTRIARNGTFMTSKGRLVIKGAAFARDFGPIDEKCDCYTCKNYSRAYIRHLFKADETFGLRLASYHNLHFLMKLMENVRQAIREDRLLDFKEEFFEEYGYNKPNAKNF

SEQ ID NO: 59881 - protein, 379 aa, Psychrobacillus psychrodurans; identical to SEQ ID NO: 58571
  REGION 1..379: note = tr|A0A1I4WXH7|A0A1I4WXH7_9BACI Queuine tRNA-ribosyltransferase OS=Psychrobacillus psychrodurans; OX = 126157 GN=tgt PE=3 SV=1

SEQ ID NO: 59882 - protein, 379 aa, Psychrobacillus psychrotolerans
  REGION 1..379: note = tr|A0A1I5YXH6|A0A1I5YXH6_9BACI Queuine tRNA-ribosyltransferase OS=Psychrobacillus psychrotolerans; OX = 126156 GN=tgt PE=3 SV=1
MTAVTYELIKKDKQTGARLGVVHTPHGSFETPAFMPVGTQATVKTMAPEEIKEMNAGIILSNTYHLWLRPGNEIIREAGGLHKFMNWDRAILTDSGGFQVFSLSDMRKIEEEGVHFRNHLNGDKLFLSPEKSMEIQNDLGSDIMMAFDECPPFPASFEYMKASVERTSRWAERCLTAHTNTDKQGLFGIIQGGEFEELRRQSAKDLVSLDFPGYAIGGLSVGEPKDVMNRVLEFTTPMMPENKPRYLMGVGSPDSLIDGSIHGVDMFDCVLPTRIARNGTFFTHQGRLVIKGAKFARDFGPIDEKCDCYTCKNYSRAYIRHLFKADETFGLRLASYHNLHFLMKLMENVRQAIREDRLLDFKEEFFEEYGYNKPNAKNF

SEQ ID NO: 59883 - protein, 379 aa, unidentified
  source 1..379: note = Psychrobacillus soli
  REGION 1..379: note = tr|A0A544TBG4|A0A544TBG4_9BACI Queuine tRNA-ribosyltransferase OS=Psychrobacillus soli OX=1543965; GN = tgt PE=3 SV=1
MTAVTYELIKKDKQTGARLGIVHTPHGSFETPTFMPVGTQATVKTMAPEEIKEMDAGIILSNTYHLWLRPGHDIIREAGGLHKFMNWDRAILTDSGGFQVFSLSDMRKIEEEGVHFRNHLNGDKLFLSPEKSMEIQNALGSDIMMAFDECPPYPASFEYMKASVERTSRWAERCLTAHTNTDKQGLFGIIQGGEYEELRRQSAKDLISMDFPGYAIGGLSVGEPKDVMNRVLDFTTPLMPDNKPRYLMGVGSPDSLIDGSIRGVDMFDCVLPTRIARNGTFMTSKGRLVIKGAAFARDFGPIDEKCDCYTCKNYSRAYIRHLFKADETFGLRLASYHNLHFLMKLMENVRQAIREDRLLDFKEEFFEEYGYNKPNAKNF

SEQ ID NO: 59884 - protein, 379 aa, Psychrobacillus sp.
  REGION 1..379: note = tr|A0A1H9SJ76|A0A1H9SJ76_9BACI Queuine tRNA-ribosyltransferase OS=Psychrobacillus sp. OK032; OX = 1884358 GN=tgt PE=3 SV=1
MSAITYELIKKDKQTGARLGIVHTPHGSFETPTFMPVGTQATVKTMAPEEIKEMDAGIILSNTYHLWLRPGHDIIREAGGLHKFMNWDRAILTDSGGFQVFSLSDMRKIEEEGVHFRNHLNGDKLFLSPEKSMEIQNALGSDIMMAFDECPPYPASFEYMKASVERTSRWAERCLTAHTNTDKQGLFGIIQGGEYEELRRQSAKDLISMDFPGYAIGGLSVGEPKDVMNRVLDYTTPLMPDNKPRYLMGVGSPDSLIDGAIRGVDMFDCVLPTRIARNGTFMTSKGRLVIKGAAFARDFGPIDEKCDCYTCKNYSRAYIRHLFKADETFGLRLASYHNLHFLMKLMENVRQAIREDRLLDFKEEFFEEYGYNKPNAKNF

SEQ ID NO: 59885 - protein, 379 aa, Psychrobacillus sp.
  REGION 1..379: note = tr|A0A544TP34|A0A544TP34_9BACI Queuine tRNA-ribosyltransferase OS=Psychrobacillus sp. Z8; OX = 2325572 GN=tgt PE=3 SV=1
MAAITYELIKKDKQTGARLGIVHTPHGSFETPTFMPVGTQATVKTMAPEDLKAMEAGIILSNTYHLWLRPGHDIIREAGGLHKFMNWDRAILTDSGGFQVFSLSDMRKIEEEGVHFRNHLNGDKLFLSPEKSMEIQNALGSDIMMAFDECPPYPASFEYMKASVERTSRWAERCLEAHTNTEKQGLFGIIQGGEYEELRRQSAKDLISLDFPGYAVGGLSVGEPKDVMNRVLDFTAPLMPENKPRYLMGVGSPDSLIDGSIRGIDMFDCVLPTRIARNGTFFTSKGRLVIKGAAFARDFGPIDEKCDCYTCKNYSRAYLRHLFKADETFGLRLASYHNLHFLMNLMKDVRQAIREDRLLDFKEEFFEEYGYNKPNAKNF

SEQ ID NO: 59886 - protein, 383 aa, Psychrobacter alimentarius
  REGION 1..383: note = tr|A0A144NQT5|A0A144NQT5_9GAMM Queuine tRNA-ribosyltransferase OS=Psychrobacter alimentarius; OX = 261164 GN=tgt PE=3 SV=1
MQFVLHKTASGDTRARRGTVHLNHGDVQTPAFMPVGTYGTVKGMLPRDIEAIGADIILGNTFHLWLRPGTEVIDKFGGLHKFMHWDKPILTDSGGFQVFSLGAMRKITEEGVNFKSPIDGAKVFLSPEKSMQIQYSLNSDIVMQFDECTPYPATHDEAKKSLELSLRWGQRCIDEHKRLGSTNALFGIVQGSMYPDLRQQSLEGLLDIGFDGYAIGGLSVGEPKEEMIDVLDYLPDDMPADKPRYLMGVGKPEDLVEGVRRGVDMFDCVMPTRNARNGHYFVTGDTDNAGVVRIRNSQYRNDEGPLDPECDCYTCQNFSRAYLYHLNKCKEMLGAQLATIHNLRYYQRLMQGIRDAIEQDNFDAFVSEFYSKRGQTVPELNLR

SEQ ID NO: 59887 - protein, 383 aa, Psychrobacter aquaticus
  REGION 1..383: note = tr|U4T8Q1|U4T8Q1_9GAMM Queuine tRNA-ribosyltransferase OS=Psychrobacter aquaticus CMS 56; OX = 1354303 GN=tgt PE=3 SV=1
MQFVLHKTASGETRARRGTVHLNHGDVQTPAFMPVGTYGTVKGMLPRDIEAIGADIILGNTFHLWLRPGTEVIDKFGGLHKFMHWDKPILTDSGGFQVFSLGAMRKITEEGVDFKSPIDGAKVFLSPEKSMQIQYSLNSDIVMQFDECTPYPATHDEAKASLELSLRWGQRCVDEHNRLGSTNALFGIIQGSMYADLRKQSLDGLLKIGFDGYAIGGLSVGEPKDEMMDVLDYMPHAMPADKPRYLMGVGKPEDIVEAVRRGVDMFDCVMPTRNARNGHYFVTGDTDNAGVVRIRNSQYRNDDGPLDPECDCYTCQNFSRAYLYHLNKCKEMLGAQLATIHNLRYYQRLMQGIRDAIEQDNFDEFVNEFYSKRGQTTPELKLR

SEQ ID NO: 59888 - protein, 383 aa, Psychrobacter arcticus
  REGION 1..383: note = sp|Q4FRI6|TGT_PSYA2 Queuine tRNA-ribosyltransferase; OS = Psychrobacter arcticus (strain DSM 17307 / 273-4); OX = 259536 GN=tgt PE=3 SV=1
MQFVLHKTASGVTRARRGTVHLNHGDVQTPAFMPVGTYGTVKGMLPRDIEAIGADIILGNTFHLWLRPGTDIIDKFGGLHKFMHWDKPILTDSGGFQVFSLGAMRKITEEGVTFKSPIDGAKVFLSPEKSMQIQYSLNSDIVMQFDECTPYPATHDEAKKSLELSLRWGQRCVDEHKKLGSTNALFGIIQGSMYADLRKQSLEGLLEIGFDGYAIGGLSVGEPKEEMIDVLDYIANDMPADKPRYLMGVGKPEDLVEGVRRGVDMFDCVMPTRNARNGHYFVTGDVDNAGVVRIRNSQYRTDEGPLDPECDCYTCQNFSRAYLSHLNKCKEMLGAQLATIHNLRYYQRLMQGIRDAIEQDKFDEFVTEFYSKRGQTVPELNLR

SEQ ID NO: 59889 - protein, 383 aa, Psychrobacter cryohalolentis
  REGION 1..383: note = sp|Q1QA23|TGT_PSYCK Queuine tRNA-ribosyltransferase; OS = Psychrobacter cryohalolentis (strain K5) OX=335284; GN = tgt PE=3 SV=1
MQFVLHKTASGVTRARRGTVHLNHGDVQTPAFMPVGTYGTVKGMLPRDIEAIGADIILGNTFHLWLRPGTDIIDKFGGLHKFMHWDKPILTDSGGFQVFSLGAMRKITEEGVTFKSPIDGAKVFLSPEKSMQIQYSLNSDIVMQFDECTPYPATHDEAKKSLELSLRWGQRCVDEHKNLGSTNALFGIIQGSMYADLRKQSLEGLLEIGFDGYAIGGLSVGEPKEEMIDVLDYIADDMPADKPRYLMGVGKPEDLVEGVRRGVDMFDCVMPTRNARNGHYFVTGDADNAGVVRIRNSQYRTDEGPLDPECDCYTCQNFSRAYLSHLNKCKEMLGAQLATIHNLRYYQRLMQNIRDAIEQDKFDEFVNEFYSKRGQTVPELNLR

SEQ ID NO: 59890 - protein, 383 aa, Psychrobacter fozii
  REGION 1..383: note = tr|A0A2V4V2A2|A0A2V4V2A2_9GAMM Queuine tRNA-ribosyltransferase OS=Psychrobacter fozii OX=198480; GN = tgt PE=3 SV=1
MQFVLHKTASGNTRARRGTVHLNHGDVQTPAFMPVGTYGTVKGMLPRDIEAIGADIILGNTFHLWLRPGTEVIDKFGGLHKFMHWDKPILTDSGGFQVFSLGAMRKITEEGVDFKSPIDGAKVFLSPEKSMQIQYSLNSDIVMQFDECTPYPATHDEAKKSLELSLRWGQRCVDEHNRLGSTNALFGIVQGSMYPDLRQQSLEGLLNIGFDGYAIGGLSVGEPKDEMMDVLDYLPDDMPADKPRYLMGVGKPEDLVEGVRRGVDMFDCVMPTRNARNGHYFVTGDTDNAGVVRIRNSQYRNDEGSLDPECDCYTCQNFSRAYLYHLNKCKEMLGAQLATIHNLRYYQRLMQGIRDAIEQDKFDEFVIEFYTKRGQTVPELNLR

SEQ ID NO: 59891 - protein, 383 aa, Psychrobacter frigidicola
  REGION 1..383: note = tr|A0A5C7A502|A0A5C7A502_9GAMM Queuine tRNA-ribosyltransferase OS=Psychrobacter frigidicola; OX = 45611 GN=tgt PE=3 SV=1
MQFTLHKTASGETRARRGTVHLNHGEVQTPAFMPVGTYGTVKGMLPRDIEAIGADIILGNTFHLWLRPGTEVIDKFGGLHKFMHWNKPILTDSGGFQVFSLGAMRKITEEGVHFKSPIDGAKVFLSPEKSMQIQYSLNSDIVMQFDECTPYPATHDEAKKSLELSLRWGKRCLDEHKNLGSTNALFGIIQGSMYEDLRRQSLEGLLGIGFDGYAIGGLSVGEPKDEMMAVLDYIPDIMPTDKPRYLMGVGKPEDIVEAVRRGVDMFDCVMPTRNARNGHYFVTGDLDNAGVVRIRNSQYRHDERPLDPECDCYTCQNFSRAYLYHLNKCKEMLGAQLATIHNLRYYQRLMIGIREAIEQDNFDAFVTEFYSKRGQTVPELHLR

SEQ ID NO: 59892 - protein, 383 aa, Psychrobacter immobilis
  REGION 1..383: note = tr|A0A2V2A4S9|A0A2V2A4S9_PSYIM Queuine tRNA-ribosyltransferase OS=Psychrobacter immobilis OX=498; GN = tgt PE=3 SV=1
MQFVLHKTASGDTRARRGTVHLNHGDVQTPAFMPVGTYGTVKGMLPRDIEAIGADIILGNTFHLWLRPGTEVIDKFGGLHKFMHWDKPILTDSGGFQVFSLGAMRKITEEGVDFKSPIDGAKVFLSPEKSMQIQYSLNSDIVMQFDECTPYPATHDEAKKSLELSLRWGQRCVDEHKRLGSTNALFGIIQGSMYPDLRQQSLEVLLDIGFDGYAIGGLSVGEPKDEMIDVLDYLPDDMPADKPRYLMGVGKPEDLVEGVRRGVDMFDCVMPTRNARNGHYFVTGDADNAGVVRIRNSQYRSDEGPLDPECDCYTCQNFSRAYLYHLNKCKEMLGAQLATIHNLRYYQRLMQGIRDAIEQDKFDEFVSEFYNKRGQTVPELNLR

SEQ ID NO: 59893 - protein, 383 aa, Psychrobacter pacificensis
  REGION 1..383: note = tr|A0A1G6VW83|A0A1G6VW83_9GAMM Queuine tRNA-ribosyltransferase OS=Psychrobacter pacificensis; OX = 112002 GN=tgt PE=3 SV=1
MQFVLHKTASGATRARRGTVHLNHGDVQTPAFMPVGTYGTVKGMLPRDIEAIGADIILGNTFHLWLRPGTEVIDKFGGLHKFMHWDKPILTDSGGFQVFSLGAMRKITEEGVNFKSPIDGAKVFLSPEKSMQIQYSLNSDIVMQFDECTPYPATHDEAKKSLELSLRWGQRCVDEHNRLGSTNALFGIVQGSMYPDLRQQSLEGLLDIGFDGYAIGGLSVGEPKEEMIDVLDYLPDDMPADKPRYLMGVGKPEDLVEGVRRGVDMFDCVMPTRNARNGHYFVTGDADNAGVVRIRNSQYRNDEGPLDPECDCYTCQNFSRAYLYHLNKCKEMLGAQLATIHNLRYYQRLMQGIRDAIEQDQFDEFVSEFYNKRGQTIPELNLR

SEQ ID NO: 59894 - protein, 383 aa, unidentified
  source 1..383: note = Psychrobacter pasteurii
  REGION 1..383: note = tr|A0A1R4EDQ0|A0A1R4EDQ0_9GAMM Queuine tRNA-ribosyltransferase OS=Psychrobacter pasteurii; OX = 1945520 GN=tgt PE=3 SV=1
MQFTLHKTAAGESRARRGTVTLAHGEIRTPAFMPVGTYGTVKGMLPRDIEDIGADIILGNTFHLWLRPGTEVIDKFGGLHQFMNWNKPILTDSGGFQVFSLGAMRKITEEGVAFKSPIDGAKVFLSPEKSMQIQYSLNSDIVMQFDECTPYPATYSEAQKSLELSLRWGQRCVDEHNKLGNTNALFGIVQGSMYEDLRRQSMEGLLDIGFDGYAIGGLSVGEPKEEMISVLNYMPELMPADKPRYLMGVGKPEDILEAVRRGVDMFDCVMPTRNARNGHYFVTGNEENQGIVRIRNSQYREDMGPLDPECDCYCCQNFTRAYLYHLNKCKEMLGAQLATIHNLRYYQRLMQGIRDAIDNDTFDEFVADFYQKRGQDVPPLELK

SEQ ID NO: 59895 - protein, 383 aa, Psychrobacter phenylpyruvicus
  REGION 1..383: note = tr|A0A379LJG7|A0A379LJG7_9GAMM Queuine tRNA-ribosyltransferase OS=Psychrobacter phenylpyruvicus; OX = 29432 GN=tgt PE=3 SV=1
MQFTLHKTAVGESRARRGTVKLTHGEIRTPAFMPVGTYGTVKGMLPRDIENIGADIILGNTFHLWLRPGTEVIDKFGGLHQFMNWNKPILTDSGGFQVFSLGAMRKITEEGVAFKSPIDGAKVFLSPEKSMQIQYSLNSDIVMQFDECTPYPATYSEAQKSLELSLRWGQRCVDEHNKLGNTNALFGIVQGSMYEDLRRQSMEGLLQIGFDGYAIGGLSVGEPKEEMISVLNYMPELMPADKPRYLMGVGKPEDILEAVRRGVDMFDCVMPTRNARNGHYFVTGNEENQGIVRIRNSQYREDMGPLDPECDCYCCQNFSRAYLYHLNKCKEMLGAQLATIHNLRYYQRLMQGIRDAIDNDTFDEFVADFYHKRGQDVPSLELE

SEQ ID NO: 59896 - protein, 383 aa, unidentified
  source 1..383: note = Psychrobacter piechaudii
  REGION 1..383: note = tr|A0A1R4G972|A0A1R4G972_9GAMM Queuine tRNA-ribosyltransferase OS=Psychrobacter piechaudii; OX = 1945521 GN=tgt PE=3 SV=1
MQFTLHKTAAGESRARRGTVKLTHGEIRTPAFMPVGTYGTVKGMLPRDIENIGADIILGNTFHLWLRPGTEVIDKFGGLHQFMNWNKPILTDSGGFQVFSLGAMRKITEEGVAFKSPIDGAKVFLSPEKSMQIQYSLNSDIVMQFDECTPYPATYSEAQKSLELSLRWGQRCVDEHNKLGNTNALFGIVQGSMYEDLRRQSMEGLLEIGFDGYAIGGLSVGEPKEEMISVLNYMPELMPADKPRYLMGVGKPEDILEAVRRGVDMFDCVMPTRNARNGHYFVTGNEENQGIVRIRNSQYREDMGPLDPECDCYCCQNFTRAYLYHLNKCKEMLGAQLATIHNLRYYQRLMQGIRDAIDNDTFDEFVADFYHKRGQEVPALELS

SEQ ID NO: 59897 - protein, 383 aa, Psychrobacter piscatorii; identical to SEQ ID NO: 59893
  REGION 1..383: note = tr|A0A0T6DUD1|A0A0T6DUD1_9GAMM Queuine tRNA-ribosyltransferase OS=Psychrobacter piscatorii; OX = 554343 GN=tgt PE=3 SV=1

SEQ ID NO: 59898 - protein, 383 aa, Psychrobacter sp.
  REGION 1..383: note = sp|A5WGS6|TGT_PSYWF Queuine tRNA-ribosyltransferase; OS = Psychrobacter sp. (strain PRwf-1) OX=349106 GN=tgt PE=3; SV = 1
MQFTLHKTAAGESRARRGTVTVNHGEIRTPAFMPVGTYGTVKGMLPRDIEDIGADIILGNTFHLWLRPGTEVIDKFGGLHQFMNWNKPILTDSGGFQVFSLGAMRKITEEGVAFKSPIDGAKVFLSPEKSMQIQYSLNSDIVMQFDECTPYPATYSEAQKSLELSLRWGQRCVDEHKKLGNTNALFGIVQGSMYEDLRRQSMDGLLEIGFDGYAIGGLSVGEPKEEMISVLNYMPELMPADKPRYLMGVGKPEDILEAVRRGVDMFDCVMPTRNARNGHYFVTGNEDNQGIVRIRNSQYREDQGPLDPECDCYCCQNFSRAYLYHLNKCKEMLGAQLATIHNLRYYQRLMQGIRDAIDEDRFDEFVADFYHRRGQDVPPLELK

SEQ ID NO: 59899 - protein, 253 aa, Psychrobacter sp.
  REGION 1..253: note = tr|X0QV02|X0QV02_9GAMM Queuine tRNA-ribosyltransferase OS=Psychrobacter sp. JCM 18903; OX = 1298610 GN=JCM18903_486 PE=3 SV=1
MQIQYSLNSDIVMQFDECTPYPATHDEAKTSLELSLRWGQRCVDEHNRLGSTNALFGIIQGSMYPDLRQQSLEGLLDIGFDGYAIGGLSVGEPKDEMIDVLDYLPDDMPADKPRYLMGVGKPEDLVEGVRRGVDMFDCVMPTRNARNGHYFVTGDADNAGVVRIRNSQYRNDEGPLDPECDCYTCQNFSRAYLYHLNKCKEMLGAQLATIHNLRYYQRLMQGIRDAIEQDKFDEFVSEFYNKRGQTVPELNLR

SEQ ID NO: 59900 - protein, 383 aa, Psychrobacter urativorans
  REGION 1..383: note = tr|A0A0M4TW98|A0A0M4TW98_9GAMM Queuine tRNA-ribosyltransferase OS=Psychrobacter urativorans; OX = 45610 GN=tgt PE=3 SV=1
MQFTLHKTASGETRARRGTVHLNHGDVQTPAFMPVGTYGTVKGMLPRDIEAIGADIILGNTFHLWLRPGTEVIDKFGGLHKFMHWDKPILTDSGGFQVFSLGAMRKITEEGVHFKSPIDGAKVFLSPEKSMQIQYSLNSDIVMQFDECTPYPATHDEAKKSLELSLRWGQRCLDEHKNLGSTNALFGIIQGSMYKDLRQQSLEGLLEIGFDGYAIGGLSVGEPKEEMIDVLDYIADDMPADKPRYLMGVGKPEDLVEGVRRGVDMFDCVMPTRNARNGHYFVTGDLDNAGVVRIRNSQYRHDERPLDPECDCYTCQNFSRAYLYHLNKCKEMLGAQLATIHNLRYYQRLMLGIREAIEQDNFDAFVTEFYSKRGQTVPELHLR

SEQ ID NO: 59901 - protein, 376 aa, Psychroflexus gondwanensis
  REGION 1..376: note = tr|N1WYD1|N1WYD1_9FLAO Queuine tRNA-ribosyltransferase OS=Psychroflexus gondwanensis ACAM 44 OX=1189619 GN=tgt PE=3 SV=1
MTFELLSKDPNSKARAGKLTTDHGVIETPIFMPVGTIGTVKGVHQRELKEEINPDIILGNTYHLYLRPGTEILKKAGGLHKFMNWDRNILTDSGGYQVYSLSANRKIKEIGVKFKSHIDGSTHLFTPESAVDIQREIGADIIMAFDECTPYPCDYKYAQRSMHMTHRWLDRCMTHMKSTSPLYGHQQTLFPIVQGSTYKDLRQQSAEYIANVGAEGNAIGGLSVGEPDDEMYAMTEVVNAILPEDKPRYLMGVGTPSNLLENIALGVDMFDCVMPTRNARNGMLFTSEGTINIKNKKWEDDFSPLDPAGYTWVDTEYSKAYLKHLFSVKELLGKQIATIHNLGFYLWLVREARRQIQAGTFRTWKDIMVKKLSIRL

SEQ ID NO: 59902 - protein, 376 aa, unidentified
  source 1..376: note = Psychroflexus halocasei
  REGION 1..376: note = tr|A0A1H4C7H0|A0A1H4C7H0_9FLAO Queuine tRNA-ribosyltransferase OS=Psychroflexus halocasei; OX = 908615 GN=tgt PE=3 SV=1
MTFEKLAVDPNSKARAGKITTDHGTIETPIFMPVGTRATVKGVHQRELKEEINPDIILGNTYHLYLRPGTDILEKAGGLHKFMNWDRNILTDSGGFQVYSLSANRKIKENGVKFKSHIDGSTHLFTPEGVMDIQRKIGADIIMAFDECTPYPCDYRYAKRSMHMTHRWLDRCVKRINETDPLYGHNQTLFPIVQGSTYKDLREQSAEYIANVGAEGNAIGGLSVGEPDDEMYAMTEHVNSILPEDKPRYLMGVGTPVNLLENIALGVDMFDCVMPTRNARNGMLFTANGFINIKNKKWEDNFSAIDENAYTWVDTAYSKAYLRHLFSVKELLGLQIASIHNLGFYLWLMREARQKIIDGTFRTWKEQMVKNMNTRL

SEQ ID NO: 59903 - protein, 376 aa, unidentified
  source 1..376: note = Psychroflexus salarius
  REGION 1..376: note = tr|A0A1M4WYY1|A0A1M4WYY1_9FLAO Queuine tRNA-ribosyltransferase OS=Psychroflexus salarius; OX = 1155689 GN=tgt PE=3 SV=1
MKFEKLKVDPLSKARAGTITTDHGTIETPIFMPVGTRATVKGIHQKELREAINPDIILGNTYHLFLRPGTEILKKAGGLHQFMNWDRNILTDSGGYQVYSLSANRKIKEEGVKFKSHIDGSMHWFTPENVMDIQREIGADIIMAFDECTPYPCDYKYAKRSMHMTHRWLERCIKRINETEPLYGHQQTLFPIVQGSTYKDLRQQSAEYIAGVGAEGNAIGGLSVGEPDDEMYAMTEVVNNILPEDKPRYLMGVGTPINLLENIALGVDMFDCVMPTRNARNGMLFTADGFINIKNKKWEDDFSPIDANGYTWVDTEYSKAYLRHLFSVKELLGLQIASIHNLGFYLWLVREARQQIIDGTFKPWKEKMVKNMATRL

SEQ ID NO: 59904 - protein, 378 aa, Psychroflexus sediminis
  REGION 1..378: note = tr|A0A1G7WGF9|A0A1G7WGF9_9FLAO Queuine tRNA-ribosyltransferase OS=Psychroflexus sediminis; OX = 470826 GN=tgt PE=3 SV=1
MHMKFELLSKDPNSKARAGKITTDHGVIETPIFMPVGTIATVKGVHQRELKEEINPDVILGNTYHLYLRPGTDILKKAGGLHKFMNWDRNILTDSGGYQVYSLSANRKINEQGVKFKSHIDGSTHLFTPESAVDVQREIGADIIMAFDECTPYPCDYNYAKRSMHMTHRWLDRCMTHMKKTSPLYGHDQTLFPIVQGSTYKDLRKQSAEYIANVGAEGNAIGGLSVGEPNDEMYAMTEVVTEILPEDKPRYLMGVGTPSNLLENIALGVDMFDCVMPTRNARNGMLFTAEGTINIKNKKWEDDFSVLDPAGYTWVDTEYSKAYLKHLFSVKELLGKQIATIHNLGFYLWLVREARRQIQAGTFRAWKDIMVKKLSVRL

SEQ ID NO: 59905 - protein, 376 aa, Psychroflexus sp.
  REGION 1..376: note = tr|A0A2I0D620|A0A2I0D620_9FLAO Queuine tRNA-ribosyltransferase OS=Psychroflexus sp. MES1-P1E; OX = 2058320 GN=tgt PE=3 SV=1
MTFELLSKDPNSKARAGRLTTDHGVIETPIFMPVGTIGTVKGVHQRELKEEINPDIILGNTYHLYLRPGTGILKKAGGLHKFMNWDRNILTDSGGYQVYSLSANRKIKEEGVKFKSHIDGSTHLFTPESAVNIQREIGADIIMAFDECTPYPCDYKYAQRSMHMTHRWLDRCMSHMKNTSPLYGHKQTLFPIVQGSTYKDLRQQSAEYIANVGAEGNAIGGLSVGEPDDEMYAMTEVVNAILPEDKPRYLMGVGTPSNLLENIALGVDMFDCVMPTRNGRNGMLFTSEGTINIKNKKWEEDFSPLDPAAYTWVDTEYSKAYLKHLFSVKELLGKQIATIHNLGFYLWLVREARRQIQAGTFRTWKDTMVKKLSIRL

SEQ ID NO: 59906 - protein, 376 aa, Psychroflexus sp.
  REGION 1..376: note = tr|A0A4U5TQH8|A0A4U5TQH8_9FLAO Queuine tRNA-ribosyltransferase OS=Psychroflexus sp. WDS2C27; OX = 1883405 GN=tgt PE=3 SV=1
MTFNIHSTDDNSKARTGVITTDHGEIKTPIFMPVGTIATVKSVHQRELLNDIKADIILGNTYHLYLRPETDILQKAGGLHQFMNWSKNILTDSGGYQVYSLSERRKISEDGVKFKSHIDGSMHWFSPENVMDTQRLIGADIMMAFDECTPYPCDYNYAKRSMHMTHRWLERCITRFNATDDLYGHQQHLFPIVQGSTYKDLRKESAQYIADKDLPGNAIGGLSVGEPNDEMYEMTDVVTDVLPKDKPRYLMGVGTPIDLLENIALGIDMFDCVMPTRNARNGMIFTSQGSINIKNLKWKTDFSPLDSDGTTWVDHDYSRAYVRHLFTVNELLAKQICSIHNLGFYLKLVRQAAQHIQDGDFMSWKTMMVNQMQNRL

SEQ ID NO: 59907 - protein, 383 aa, Psychroflexus torquis
  REGION 1..383: note = tr|K4IFP8|K4IFP8_PSYTT Queuine tRNA-ribosyltransferase OS=Psychroflexus torquis (strain ATCC 700755 / ACAM 623) OX=313595 GN=tgt PE=3 SV=1
MQAIEIYMTFELLSKDPNSKARAGKLTTDHGVIETPIFMPVGTIGTVKGVHQRELKEEINPDIILGNTYHLYLRPGTGILKKAGGLHKFMNWDRNILTDSGGYQVYSLSANRKIKEEGVKFKSHIDGSTHLFTPESAINIQREIGADIIMAFDECTPYPCDYKYAQRSMHMTHRWLDRCMNHMKNTSPLYGHEQTLFPIVQGSTYKDLRQQSAEYIANVGAEGNAIGGLSVGEPDDEMYAMTEVVNAILPEDKPRYLMGVGTPSNLLENIALGVDMFDCVMPTRNGRNGMLFTSEGTINIKNKKWEEDFSPLDPAAYTWVDTEYSKAYLKHLFSVKELLGKQIATIHNLGFYLWLVREARRQIQAGTFRTWKDTMVKKLSIRL

SEQ ID NO: 59908 - protein, 422 aa, unidentified
  source 1..422: note = Psychromicrobium lacuslunae
  REGION 1..422: note = tr|A0A0D4C3L1|A0A0D4C3L1_9MICC Queuine tRNA-ribosyltransferase OS=Psychromicrobium lacuslunae; OX = 1618207 GN=tgt PE=3 SV=1
MGENRQVSSPDFSFTTQTRLSDTVPAAGEFLGRTGTINTPHGEIQTPAFIAVGTKATVKAVQPESMAELGAQALLANAYHLYLQPGPDIVDEAGGLGSFMNWAGPTFTDSGGFQVMSLGSGFKKVINMDAVDNAGADDRVAAGRERLAHIDDDGVWFKSHLDGSRHRFTPEVSMQVQHQLGADIMFAFDELTTLHNSRGYQENALERTRLWAERCLAEHRRLTEERHSKPYQALFGVIQGAQYEDLRRKACRDLGNMEIAETQFDGFGLGGALEKENLGTIVRWCCEELPENKPKHLLGISEPDDIFVAIENGADTFDCVSPTRVARNSAFYTPYGRKNLSNAKYKRDFGPLMEGCDCYTCGSYSRAYIHHLYKAKEMLSHTLISIHNERFVVKMVDDARLAIEDGSFFDFKAETLGNYYSS

SEQ ID NO: 59909 - protein, 374 aa, Psychromonas ingrahamii
  REGION 1..374: note = sp|A1SWU0|TGT_PSYIN Queuine tRNA-ribosyltransferase; OS = Psychromonas ingrahamii (strain 37) OX=357804 GN=tgt; PE = 3 SV=1
MEYKLINTDGRARRGRLTFDRGSVETPAFMPVGTYGTVKGMTPEEVDATGAEILLGNTFHLWLRPGQKVIKAHGDLHDFMNWKGPILTDSGGFQVFSLGKMRKIKEEGVYFRSPINGSEVFLSPEISMDIQYDLGSDIVMIFDECTPYPATEEETDVSMQLSLRWAQRSRDRFDEQQNPNALFGIIQGGCFEQFRDISLDGLTNIGFDGYAIGGLAVGEPKEDMYRILEYIAPKIPEDKPRYLMGVGKPEDLVEGVRRGIDMFDCVMPTRNARNGHLFTTDGVIKIRNAKHREDATTLDSECDCYTCKNYTRAYLYHLDKCGEILGARLNTIHNLSYYQRLMKGLREAIEQGKLEDFVDTFYQRIGKEKPMLDV

SEQ ID NO: 59910 - protein, 374 aa, Psychromonas sp.
  REGION 1..374: note = tr|A0A4Y8A031|A0A4Y8A031_9GAMM Queuine tRNA-ribosyltransferase OS=Psychromonas sp. RZ22; OX = 2555643 GN=tgt PE=3 SV=1
MKYELIKTDGRARRGRLTFDRGTVETPAFMPVGTYGTVKGMTPEEVDATGAEILLGNTFHLWLRPGQKVIRQHGDLHDFMNWKGPILTDSGGFQVFSLGKMRKIKEEGVYFRSPVNGDEVFLSPEVSMDIQHDLGSDIVMIFDECTAYPATEEEADVSMQLSLRWAKRSRQRFDEQKNPNALFGIIQGGCYEHLRDVSLDGLSKIGFDGYAIGGLAVGEPKEDMHRILEHIAPKIPEDKPRYLMGVGKPEDLVEGVRRGVDMFDCVMPTRNARNGHLFTTDGVVKIRNAKHREDTSPLDSECDCYTCKNYTRAYLYHLDKCGEILGARLNTIHNLRYYQRLMKGLRDAIAEGTLEAFVESFYKRIGKEMPVLNN

SEQ ID NO: 59911 - protein, 374 aa, Psychromonas sp.
  REGION 1..374: note = tr|A0A366WEQ2|A0A366WEQ2_9GAMM Queuine tRNA-ribosyltransferase OS=Psychromonas sp. B3M02; OX = 2267226 GN=tgt PE=3 SV=1
MKYELIKTDGRARRGRLTFDRGTVETPAFMPVGTYGTVKGMTPEEVDATGAEILLGNTFHLWLRPGQEVIRQHGDLHDFMNWKGPILTDSGGFQVFSLGKMRKIKEEGVYFRSPVNGDQVFLSPEVSMDIQYDLGSDIVMIFDECTAYPATEQEADVSMKLSLRWAERSRKRFDEQKNPNALFGIIQGGCYEHLRDVSLEGLAKIGFDGYAIGGLAVGEPKEDMHRILEYIAPKIPEDKPRYLMGVGKPEDLVEGVRRGVDMFDCVMPTRNARNGHLFTTDGVVKIRNAKHREDQSPLDAECDCYTCKNYSRAYLYHLDKCGEILGARLNTIHNLRYYQRLMKGLRDAISEGTLDEFVDIFYKRIGKEKPVLNN

SEQ ID NO: 59912 - protein, 376 aa, Psychroserpens burtonensis
  REGION 1..376: note = tr|A0A5C7B8U9|A0A5C7B8U9_9FLAO Queuine tRNA-ribosyltransferase OS=Psychroserpens burtonensis; OX = 49278 GN=tgt PE=3 SV=1
MKFELKASDPQSKARAGLITTDHGQIETPIFMPVGTVASVKGVHQRELKNDINPDVILANTYHLFLRPQTPILEKAGGLHKFMNWDRNILTDSGGYQVYSLSDNRKIKEEGVKFKSHIDGSYHVFTPENVMEVQRSIGADIIMAFDECTPYPCDYNYAKRSMHMTHRWLERCLTHLDKTPFKYGYEQTFFPIVQGSCYKDLRQQSAEYIANAGAQGNAIGGLSVGEPAEEMYAMTDVVCEILPWDKPRYLMGVGTPINILENIALGVDMFDCVMPTRNARNGMLFTAHGSINIKNLKWADDFSPVDEMGITFVDTEYSKAYLRHLFTVNELLGKQIATIHNLGFYLWLTREARKHIIAGDFRAWKDKMVKQMDKRL

SEQ ID NO: 59913 - protein, 376 aa, Psychroserpens sp.
  REGION 1..376: note = tr|A0A4P7WS98|A0A4P7WS98_9FLAO Queuine tRNA-ribosyltransferase OS=Psychroserpens sp. NJDZ02; OX = 2570561 GN=tgt PE=3 SV=1
MTFDLKAKDTQSNARAGVITTDHGVIETPIFMPVGTVGSVKGVHQRELKDDINPDIILGNTYHLYLKPQIDVLEKAGGLHKFMNWDRNILTDSGGYQVYSLSGNNKIKEEGVKFKSHIDGSYHMFAPENVMEIQRSIGADIIMAFDECTPYPCDYNYARRSMHMTHRWLERCITHLEKTPLKYDYSQSFFPIVQGSTYKDLRKQSAEYIAGVGAEGNAIGGLSVGEPADEMYAMTEVVTDILPWDKPRYLMGVGTPINILENIALGVDMFDCVMPTRNARNGMLFTAHGSINIKNLKWREDFSPIDEMGITYVDTEYSKAYLRHLFNVNELLGKQIATIHNLGFYLWLTREARKHIIAGDFRAWKDKMVKQMDNRL

SEQ ID NO: 59914 - protein, 377 aa, Psychrosphaera saromensis
  REGION 1..377: note = tr|A0A2S7URV9|A0A2S7URV9_9GAMM Queuine tRNA-ribosyltransferase OS=Psychrosphaera saromensis; OX = 716813 GN=tgt PE=3 SV=1
MKFELLNTDGKARRGRITFDRGVIETPAFMPVGTYGTVKGMTPDEVKETGAHICLGNTFHLMLRPGTEIIRKHGDLHDFMGWDKPILTDSGGFQVFSLGDLRKISEAGVEFRSPINGEKIMLTPERSIEVQRELGSDIVMIFDECTPYPATFEEAKTSMELSLRWAERCKKEHGDSESALFGIVQGGMYPDLRESSLEGLEGIGFDGYAIGGLSVGEPKEDMMNILDTTAYKLPENKPRYLMGVGKPEDLVESVRRGIDMFDCVMPTRNARNGHLFVTNGVVKIRNARHKDDPSTLDAECDCYTCKNYSRAYLHHLDKCNEILGARLNTIHNLRFYQRVMEGLRGAIETNTLEEFVADFYAKRELPVPSLSDEGLAK

SEQ ID NO: 59915 - protein, 379 aa, unidentified
  source 1..379: note = Pueribacillus theae
  REGION 1..379: note = tr|A0A2U1K191|A0A2U1K191_9BACI Queuine tRNA-ribosyltransferase OS=Pueribacillus theae OX=2171751; GN = tgt PE=3 SV=1
MTAIQYELIKTCKQSGARLGRLHTPHGTIETPIFMPVGTLATVKTMSPEELEEIGAQIILSNTYHLWLRPGHDIVQEAGGLHQFMNWDHPILTDSGGFQVFSLSDLREIEEEGVRFRNHLSGEKLFLSPERAVEIQTALGADIIMAFDECPPYPATYEYMKTSVERTSRWAERCLAAHKNVERQGLFGIVQGGEFKELRKQSAEELVSLDFPGYAIGGLSVGEPKPTMNRILEFTTPLLPENKPRYLMGVGSPDSLIDGAIRGIDMFDCVLPTRIARNGTCMTSTGRLTVRNAEYARDFRPLDEECDCHVCKTYTRAYIRHLIKTNETFGFRLTTYHNLHFLLKLMENVRRAIAQDCLLDFKEEFFERYGFYKPDAKNF

SEQ ID NO: 59916 - protein, 374 aa, unidentified
  source 1..374: note = Puniceibacterium antarcticum
  REGION 1..374: note = tr|A0A2G8RFJ6|A0A2G8RFJ6_9RHOB Queuine tRNA-ribosyltransferase OS=Puniceibacterium antarcticum; OX = 1206336 GN=tgt PE=3 SV=1
MSTSFTLAASDGMARTGVISTPRGDIRTPAFMPVGTAATVKAMMPESVRATGADILLGNTYHLMLRPTAERVNRLGGLHKFMNWDRPILTDSGGFQVMSLAALRKLTERGVTFKSHIDGSKHEITPERSMEIQRLLGSDIVMSFDECTPYPCTQEQALESMRLSMRWAQRSRDAFGDRPGHMLFGIQQGSVFADQREESAEALKNIGFDGYAVGGLAVGEGQEMMLQTLDFATDMLPKDKPRYLMGVGKPDDIVGAVKRGIDMMDCVLPSRSGRTAQAWTRRGQLNMKNARHQDDPRPLDEHCTCPTCRNYSRAYLHHVFRAQEMISGMLLTWHNLHYYQELMQGMRDAISTGTFAAFETEFHAQRAEGDIDPL

SEQ ID NO: 59917 - protein, 374 aa, unidentified
  source 1..374: note = Puniceibacterium sediminis
  REGION 1..374: note = tr|A0A238V4L9|A0A238V4L9_9RHOB Queuine tRNA-ribosyltransferase OS=Puniceibacterium sediminis; OX = 1608407 GN=tgt PE=3 SV=1
MSTSFTLNATDGMARTGVISTPRGDIRTPAFMPVGTAATVKAMMPESVRATGADILLGNTYHLMLRPTAERINRLGGLHKFMNWARPILTDSGGFQVMSLAALRKLTENGVTFKSHIDGSKHEITPERSMEIQRLLGSDIVMAFDECTPYPCTEAQALESMRLSMRWAQRSRDAFGDRPGHMLFGIQQGSVFPDQREESAEALKKIGFDGYAVGGLAVGEGQEMMLQTLDFATDMLPSDKPRYLMGVGKPDDIVGAVKRGIDMMDCVLPSRSGRTAQAWTRRGQLNMKNARHQDDPRPLDEHCTCPTCRNYSRAYLHHVFRAQEMISGMLLTWHNLHYYQELMQGMRDAIAAGDFAGFEAQFHAQRAEGDIEPL

SEQ ID NO: 59918 - protein, 376 aa, unidentified; identical to SEQ ID NO: 59836
  source 1..376: note = Puniceibacterium sp.
  REGION 1..376: note = tr|A0A5B3BWT3|A0A5B3BWT3_9RHOB Queuine tRNA-ribosyltransferase OS=Puniceibacterium sp. HSS470; OX = 2541729 GN=tgt PE=3 SV=1

SEQ ID NO: 59919 - protein, 374 aa, unidentified
  source 1..374: note = Puniceibacterium sp.
  REGION 1..374: note = tr|A0A0J5QE71|A0A0J5QE71_9RHOB Queuine tRNA-ribosyltransferase OS=Puniceibacterium sp. IMCC21224; OX = 1618204 GN=tgt PE=3 SV=1
MSTSFTVSARDGRARTGAISTPRGEIRTPAFMPVGTAATVKAMMPESVRATGADILLGNTYHLMLRPTAERIHALGGLHKFMNWDRPILTDSGGFQVMSLADLRKLTERGVTFKSHIDGSKHEITPERSMEIQRLLGSDIVMAFDECTPYPCTEAQALDSMRLSMRWAQRSRDAFGDRSGHMLFGIQQGSVFPDQRQESAEALKRIGFDGYAVGGLAVGEGQEMMFQTLDFAVDMLPDDKPRYLMGVGKPDDILGAVKRGIDMMDCVLPSRSGRTGQAWTRRGQLNIKNARHQDDPRPLDEDCTCPACRNYSRAYLHHVFRAQEMISGMLLTWHNLHYYQDLMQGIRESISAGRFAEFEGEFHAMRAAGDIEAL

SEQ ID NO: 59920 - protein, 384 aa, unidentified
  source 1..384: note = Puniceicoccaceae bacterium
  REGION 1..384: note = tr|A0A2E6TPP3|A0A2E6TPP3_9BACT Queuine tRNA-ribosyltransferase OS=Puniceicoccaceae bacterium; OX = 2026784 GN=tgt PE=3 SV=1
MSKNPKSSFVLEHGNADGPRSGTLSLPGGVVPTPVFMPVGTQATIKGVLPRDLYETVRCPIILGNTYHLNLRPGVEVVEAAGGLSKFMNWSGPVLTDSGGFQVFSLSSLRKMTDEGVCFRSHLDGREIFLGPKQAVQIQEGLKSDIAMCLDECPPADATREQMKKAVSRTTLWAKMCREEWNLGQGKVEGRNLFGIVQGGRFEDLRIQSADELIEMNFPGYAIGGVSVGETEEEMLQQVSWTAKVLPWEKPRYVMGVGTPPQLLKMIGMGADMFDCVMPSRAARHGMAFTSRGTMNLKNQKYQDDYSPLDEETDCFASQQFSKSYLRHLIQAKESLAGVILTLHNLRFFVSLMEQARLKIEQDQFQDWSRAWIAQYESGQKKAE

SEQ ID NO: 59921 - protein, 372 aa, unidentified
  source 1..372: note = Puniceicoccaceae bacterium
  REGION 1..372: note = tr|A0A2D6WN80|A0A2D6WN80_9BACT Queuine tRNA-ribosyltransferase OS=Puniceicoccaceae bacterium; OX = 2026784 GN=tgt PE=3 SV=1
MFKLTAKSNNARRGELTTLHGVIQTPIFMPVGTQATVKAVTSRQLDEINTQIILGNTYHLNLRPGSQLIEKLGGLHAFMNWQKPILTDSGGFQVFSLSDLRKITDEGIHFKSHLDGQKLFLSPQSCFQIQAELGTDIAMVLDECPPFPCDKVDCATAVDRTIRWAKEFLGHAEHSGFLERGGQVFGIVQGSTYSDLRVACAQALADLPFSGYAIGGVSVGEPENEMLKQVSYSMPHLPEDKARYVMGVGTPVQLLKMIGMGADMFDCVMPTRLARHANVFTPSGLMNLKNERFKTDERPIMEADNYTCQNYSRSYLRHLLMANEMLGATLLSIHNLHFFLDLMAQARAHIEEDDFDPWSAQWINRYQSGVSG

SEQ ID NO: 59922 - protein, 377 aa, unidentified
  source 1..377: note = Puniceispirillum marinum
  REGION 1..377: note = tr|D5BNK5|D5BNK5_PUNMI Queuine tRNA-ribosyltransferase OS=Puniceispirillum marinum (strain IMCC1322) OX=488538 GN=tgt PE=3 SV=1
MTAFSYDLLSTDGTARRGRLHTAWGVVETPVFMPVGTAATVKGMMPESVKSTGASIILANTYHLMLRPGAERVGRLGGVRKMMGWDGPLLTDSGGFQVMSLGPLRKLDEDGVTFKSHLDGSKHRLTPERSTEIQHLLDATITMAFDECTPFPAEKTVAADSMRLSMRWAKRSRDAFVPREGYGQFGIVQGSVFADLRAESVAALGDIGFEGYAIGGLAVGEGQEAMFEALEFTTPLMQTDKPRYLMGVGKPSDLVGGVARGVDMFDCVLPTRSGRTGQGFTRRGPINIKNARHAEDNRPIDEACSCPACSRFSRAYLHHLFKADEVQGLMLLSWHNIQYYQDLMADMRAAIEAGTFAQFEKNFHAMQSLGDIDPLDP

SEQ ID NO: 59923 - protein, 378 aa, Pusillimonas ginsengisoli
  REGION 1..378: note = tr|A0A4U5LM85|A0A4U5LM85_9BURK Queuine tRNA-ribosyltransferase OS=Pusillimonas ginsengisoli; OX = 453575 GN=tgt PE=3 SV=1
MTGLQFQLLAQDGAARRGQITLNHGVVQTPIFMPVGTYGSVKAMLPHELDDIGAQIILGNTFHLWLRPGNEVMQKHNGLHGFMQWHKPILTDSGGFQVFSLSGMRKITEEGVKFASPIDGSRLFLTPEESMRIQHALNSDISMVFDECTPYEIEGRPATEEEAAQSMRMSLRWARRSRTEFQHLENPNALFGIVQGGMYENLRDESLAGLVDIGFEGYAIGGLSVGEPKEEMMRVLAHVAPRMPENAPRYLMGVGTPEDLVEGVSRGIDMFDCVMPTRNARNGWLFTRYGDIKIRNARYRDDTRPLDSSCKCHTCANFSRAYLHHLQRANEITGSRLNTMHNLHFYLAIMHEMREAIAAGRFEAWREIFHRDRARGIE

SEQ ID NO: 59924 - protein, 378 aa, Pusillimonas noertemannii
  REGION 1..378: note = tr|A0A2U1CR73|A0A2U1CR73_9BURK Queuine tRNA-ribosyltransferase OS=Pusillimonas noertemannii; OX = 305977 GN=tgt PE=3 SV=1
MTGLQFELLATDGAARRGRLTLNHGVVQTPIFMPVGTYGSVKAMLPHELDEIGAQIVLGNTFHLWLRPGTGVLEKHGGLHGFMQWQKPILTDSGGFQVFSLDGLRKITEEGVKFASPIDGSRLFLTPEESMRIQRSLNSDIVMVFDECTPYAIDGRPATSEEAARSMRMSLRWARRSREAFDKLENPNALFGIVQGGMYENLRDESLAGLVDIGFHGYAIGGLSVGEPKEDMQRVLAHVAPRLPANAPRYLMGVGTPEDLVEGVSRGVDMFDCVMPTRNARNGWLFTRYGDIKIRNARYRDDTRPLDPSCSCHTCSHFSRAYLHHLQRANEITGSRLNTLHNLHFYLTIMDEMRQAIAEGSFEAWKKQFAENRARGIE

SEQ ID NO: 59925 - protein, 378 aa, Pusillimonas sp.
  REGION 1..378: note = tr|A0A368WYU9|A0A368WYU9_9BURK Queuine tRNA-ribosyltransferase OS=Pusillimonas sp. EA3 OX=2183983; GN = tgt PE=3 SV=1
MTGLNFKLLKTDGSARRGQVTLNHGVVETPIFMPVGTYGSVKAMLPHELDDIGAQIILGNTFHLWLRPGTEVIEKHQGLHGFMQWSRPILTDSGGFQVFSLDGLRKITEEGVRFASPIDGSRLFLTPEESMRIQRALNSDIVMVFDECTPYKIDGRPATHEEAAQSMRMSLRWAQRSKNAFNELENPNALFGIVQGGMYEDLRDESLAGLTQIGFHGYAIGGLSVGEPKEEMMRVLRHVAPKLPDNAPRYLMGVGTPEDLVEGVSHGVDMFDCVMPTRNARNGWLFTRYGDIKIRNARYKDDTQPLDPDCHCHTCRHFSRAYLHHLQRANEITGARLNTLHNLYFYLKIMAEMREAIENGSFQQWKAEFTENRSRGIQ

SEQ ID NO: 59926 - protein, 378 aa, Pusillimonas sp.
  REGION 1..378: note = tr|A0A423S4R7|A0A423S4R7_9BURK Queuine tRNA-ribosyltransferase OS=Pusillimonas sp. NJUB218; OX = 2023230 GN=tgt PE=3 SV=1
MTGLNFKLLHTDGQARRGQITLNHGVVQTPIFMPVGTYGSVKAMLPHELDDIGAQIVLGNTFHLWLRPGTEIMEKHGGLHGFMQWPKPILTDSGGFQVFSLNGLRKITEEGVKFASPIDGARLFLTPEESMRIQRSLNSDIAMVFDECTPYTIDGRPATAEEAARSMRMSLRWAKRSRDAFNQLENPNALFGIVQGGMFESLRDESLAGLVDIGFHGYAIGGLSVGEPKEDMMRILAHVAPRLPENAPRYLMGVGTPEDLVEGVSQGVDMFDCVMPTRNARNGWLFTRYGDIKIRNARYRDDTRPLDPSCDCHTCTHFSRAYLHHLQKANEITGSRLNTLHNLHFYLKIMAEMRAAIEAGTFAQWKAKFHEDRARGIS

SEQ ID NO: 59927 - protein, 376 aa, unidentified
  source 1..376: note = Pustulibacterium marinum
  REGION 1..376: note = tr|A0A1I7FQ31|A0A1I7FQ31_9FLAO Queuine tRNA-ribosyltransferase OS=Pustulibacterium marinum; OX = 1224947 GN=tgt PE=3 SV=1
MIFELNAKDAQTKARAGKITTDHGVIETPIFMPVGTVGTVKGVHQRELKEEINPDIILGNTYHLYLRPQLDILEKAGGLHKFMNWDRNILTDSGGYQVYSLSANRKIKEEGVKFKSHIDGSYHFFTPENVMDIQRTIGADIIMAFDECTPYPCDYGYAKRSMHMTHRWLDRCINRLSETEPKYGYEQELFPIVQGSTYKDLRKQSAEYIANAGAFGNAIGGLSVGEPAEEMYAMTEVVCDILPEEKPRYLMGVGTPINILENIALGVDMFDCVMPTRNARNGMLFTAHGTINIKNKKWEDDFSPIDEMGITFVDTYYTKAYLRHLFAANEFLGKQIASIHNLGFYLWLVREARKHIIAGDFATWKNMMVQQMNKRL

SEQ ID NO: 59928 - protein, 366 aa, unidentified
  source 1..366: note = Unknown
  REGION 1..366: note = tr|A0A1E4ZHI7|A0A1E4ZHI7_9BACT Queuine tRNA-ribosyltransferase OS=PVC group bacterium (ex Bugula neritina AB1) OX=1868283 GN=tgt PE=3 SV=1
MWKQLYQDENARVGVMSLSHGEVETPVFMPVGTQATVKGMSPDNLKQIGFQIILANTYHLNLRPGMEIIGESGGLHSFMNWDRNILTDSGGFQVFSLAALRKISEDGVSFRSHIDGSLHMLTPENVIDKQKIMGVDIAMTLDECPPYPSSKSYIQKSMDLTIRWAKKSRQYHPVGSDGPKLFGIVQGGMFHDLRQECANKMIPLDFDGYAFGGLSVGEEKNKMYDIMSAVHEVLPTNKPRYIMGIGTPEDLLEAIDCGVDMFDCVLPSRNARNGTLYTWDGKISIKNRKWQLFQDPIDTKCPCYACQNFSAAYLHHLFKAQEILSLQLNTYHNLCFFYELIQAAKKEIYAKNFKTFKSSLLKKWNK

SEQ ID NO: 59929 - protein, 375 aa, Pyramidobacter piscolens
  REGION 1..375: note = tr|D1Y6J1|D1Y6J1_9BACT Queuine tRNA-ribosyltransferase OS=Pyramidobacter piscolens W5455; OX = 352165 GN=tgt PE=3 SV=1
MFEYRLIAQDPETGARAGEFTTPHGVIPTPVFMPVGTQATVKAMSPDELKQIGAKIILSNTYHLFLRPGPDLIAKAGGLHGFMNWDRPILTDSGGFQVFSLAGISKVMDDGVEFQSHLDGTRYLMTPELATQIQEKLGSDIAMCFDQCVKLPCTREQAQAAVERTLRWAARCKAAHSRADQAQFGIVQGALLDDLRAACADELVRMDFPGYAIGGLSVGESHAEMYRCLDALMPRLPAHKPRYLMGVGHPANLIEGIARGVDMFDCVLPTRNGRTGTAFTCEGKMNVKNRRYAEDFSPIDPECGCYACRNFTRAYVRHLYKAGEILAVRLLSWHNIHFLVQLAAGARQAIVEGRFGAYRREFMTRYEGGAYLEKI

SEQ ID NO: 59930 - protein, 375 aa, Pyramidobacter sp.
  REGION 1..375: note = tr|A0A3A9HQF2|A0A3A9HQF2_9BACT Queuine tRNA-ribosyltransferase OS=Pyramidobacter sp. CG50-2; OX = 2382160 GN=tgt PE=3 SV=1
MFEYRLIAQDPETGARAGEFVTPHGVIPTPVFMPVGTQATVKAMSPDELKRIGAKIILSNTYHLFLRPGPDLIAKAGGLHGFMNWDRPILTDSGGFQVFSLAGISKVMDDGVEFQSHLDGTRYLMTPELATQVQEKLGADIAMCFDQCVKLPCSREQAQAAVQRTLRWAARCKAAHTRAGQAQFGIVQGALFDDLRAACAEELARMDFPGYAIGGLSVGESHAEMYRCLDALMPRLPECKPRYLMGVGHPANLIEGIARGVDMFDCVLPTRNGRTGTVFTHEGKMNVKNRRYAEDFSPIDPECDCYACRNFTRAYVRHLYRAGEILAVRLLSWHNIHFLVRLAAGARQAIVEGRFGAYRREFMTRYEGGAYLENV

SEQ ID NO: 59931 - protein, 375 aa, Pyramidobacter sp.
  REGION 1..375: note = tr|A0A1V4AJV5|A0A1V4AJV5_9BACT Queuine tRNA-ribosyltransferase OS=Pyramidobacter sp. C12-8; OX = 1943580 GN=tgt PE=3 SV=1
MFEYRLIAQDPETGARAGEFVTPHGVIPTPVFMPVGTQATVKAMSPDELKRIGAKIILSNTYHLFLRPGPDLIAKAGGLHGFMNWDRPILTDSGGFQVFSLAGINKIMDDGVEFQSHLDGTRYLMTPELATQVQEKLGADIAMCFDQCVKLPCSREQAQAAVQRTLRWAARCKASHTRAGQAQFGIVQGALFDDLRAACAEELARMDFPGYAIGGLSVGESHAEMYRCLDALMPRLPERKPRYLMGVGHPANLIEGIARGVDMFDCVLPTRNGRTGTAFTCEGKMNVKNRRYAEDFSPIDPECGCYACRNFTRAYVRHLYRAGEILAVRLLSWHNIHFLVQLAAGARQAIVEGRFGAYRREFMTRYEGGAYLENV

SEQ ID NO: 59932 - protein, 392 aa, unidentified
  source 1..392: note = Pyrinomonas methylaliphatogenes
  REGION 1..392: note = tr|A0A0B6X147|A0A0B6X147_9BACT Queuine tRNA-ribosyltransferase OS=Pyrinomonas methylaliphatogenes; OX = 454194 GN=tgt PE=3 SV=1
MSAQPIIWQTLAQDEGARAGILRTRRATIETPVFMPVGTLGSVKGVRFEALETELDARIILANTYHLYLRPGVELIRACGGLHRFIGWERAMLTDSGGFQVWSLSGLRRVTEEGVEFRSHIDGSQCFLSPEIAMEAQAALGAEIVMAFDECPPGKSSLEEARRSMELTLRWAQRSRRRFLELQREGADAGRTQEQDLLSGAQAQFGIVQGAIHLDLRRESLARTVEIGFEGYALGGLSVGEEKGAMYEVLAEIAPLMPADRPRYLMGVGTPEDLLEAVAHGIDMFDCVLPTRTARNGLAWTSRGRLNVKNARWARDTKPLDEECACAVCRRHSRAYLRHLYLAGEMLAAILLTHHNLFFFLDTMRRVRQSIRSGCFSRFRQEFLERFNAGLD

SEQ ID NO: 59933 - protein, 379 aa, unidentified
  source 1..379: note = Quasibacillus thermotolerans
  REGION 1..379: note = tr|A0A0F5HMN3|A0A0F5HMN3_9BACI Queuine tRNA-ribosyltransferase OS=Quasibacillus thermotolerans; OX = 1221996 GN=tgt PE=3 SV=1
MPAIKYELIKTCKQTGARLGRVHTPHGSFETPVFMPVGTLATVKTMTPEELKELGAQIILSNTYHLWLRPGHELIKEAGGLHKFMNWDRSILTDSGGFQVFSLSEFRKIEEEGVHFRNHLNGDKLFLSPEKAMEIQNALGPDIMMAFDECPPYPAEHEYMKKSVERTSRWAERCLEAHARPEDQGLFGIVQGGEYEDLRRQSARDLVSLDFPGYAIGGLSVGEPKDVMNRVLDFTTPLLPADKPRYLMGVGSPDSLIDGSIRGVDMFDCVLPTRIARNGTLMTSEGRLVVKNAKYARDFGPLDENCGCYACRNYSRAYIRHLIRTNETLGIRLTTYHNLYFLVELMSKVREAIREDRLGDFREEFFETYGFNRPDAKNF

SEQ ID NO: 59934 - protein, 376 aa, unidentified
  source 1..376: note = Quisquiliibacterium sp.
  REGION 1..376: note = tr|A0A5C8P4X9|A0A5C8P4X9_9BURK Queuine tRNA-ribosyltransferase OS=Quisquiliibacterium sp. CC-CFT501 OX=2498847 GN=tgt PE=3 SV=1
MLKYELLATDGLARRGRITLNHGVVETPIFMPVGTYGAVKAMSPRELDEVGAQIILGNTFHLWLRPGLEVFAKFGGLHRFNGWQKPILTDSGGFQVWSLGELRKISEEGVRFASPVNGDRLMLTPEESMRIQRALDSDIAMIFDECTPYETAGVPTGHDEAAASMRLSLRWARRSRDAFDRLENPNALFGIVQGGMYETLRDESLAGLVDIGFHGYAIGGLSVGEPKEEMLRILSHTAPRLPAGKPRYLMGVGTPEDLVAGVAAGIDMFDCVMPTRNARNGWLFTRFGDLRLRNARHRDDTRPIDETCGCHACADFSRAYVHHLQKVNEILGARLATIHNLHYYLTLMREMREAIAAGRFEAWRAAFHRDRARGVG

SEQ ID NO: 59935 - protein, 374 aa, Rahnella aquatilis
  REGION 1..374: note = tr|H2IZL8|H2IZL8_RAHAC Queuine tRNA-ribosyltransferase OS=Rahnella aquatilis (strain ATCC 33071 / DSM 4594 / JCM 1683 / NBRC 105701 / NCIMB 13365 / CIP 78.65) OX=745 277 GN=tgt PE=3 SV=1
MKYELSTTDGRARRGRLVFERGVVETPAFMPVGTYGTVKGMTPEEVKETGAQILLGNTFHLWLRPGQEIMKLHGDLHDFMNWHGPILTDSGGFQVFSLGAMRKIKEEGVHFRNPINGDPVFLSPEKSMEIQNDLGSDIVMIFDECTPYPADWDYAKRSMEMSLRWAKRSRDRFNELNNKNALFGIIQGSVYEDLRDVSLKGLVDIGFDGYAVGGLAVGEPKEDMHRILEHVCPQIPEDKPRYLMGVGKPEDLVEGVRRGIDMFDCVMPTRNARNGHLFVTDGIVKIRNAKHKDDTSTLDEHCDCYTCRNYSRAYLHHLDRCNEILGARLNTIHNLRYYQRLMAGLRQAIEEGKLEAFVTDFYERKGKPVPPLNF

SEQ ID NO: 59936 - protein, 374 aa, Rahnella aquatilis
  REGION 1..374: note = tr|H8NYN9|H8NYN9_RAHAQ Queuine tRNA-ribosyltransferase OS=Rahnella aquatilis HX2; OX = 1151116 GN=tgt PE=3 SV=1
MKYELSTTDGRARRGRLIFERGVVETPAFMPVGTYGTVKGMTPEEVKDTGAQILLGNTFHLWLRPGQEIMKLHGDLHDFMNWHGPILTDSGGFQVFSLGAMRKIKEEGVHFRNPINGDPVFLSPEKSMEIQNDLGSDIVMIFDECTPYPADWDYAKRSMEMSLRWAKRSRDRFNELNNKNALFGIIQGSVYEDLRDVSLKGLVDIGFDGYAVGGLAVGEPKEDMHRILEHVCPQIPEDKPRYLMGVGKPEDLVEGVRRGIDMFDCVMPTRNARNGHLFVTDGIVKIRNAKHKDDTSTLDEHCDCYTCRNYSRAYLHHLDRCNEILGARLNTIHNLRYYQRLMAGLRQAIEEGKLEAFVTDFYERKGKPVPPLNF

SEQ ID NO: 59937 - protein, 374 aa, unidentified
  source 1..374: note = Rahnella inusitata
  REGION 1..374: note = tr|A0A419MCR6|A0A419MCR6_9GAMM Queuine tRNA-ribosyltransferase OS=Rahnella inusitata OX=58169; GN = tgt PE=3 SV=1
MKYELSTTDGRARRGRLVFERGVVETPAFMPVGTYGTVKGMTPEEVKETGAQILLGNTFHLWLRPGQEIMKLHGDLHDFMNWHGPILTDSGGFQVFSLGAMRKIKEEGVHFRNPINGDPVFLSPEKSMEIQNDLGSDIVMIFDECTPYPADWDYAKRSMEMSLRWAQRSRDRHNELNNKNALFGIIQGSVYEDLRDVSLKGLVDIGFDGYAVGGLAVGEPKEDMHRILEHVCPQIPQDKPRYLMGVGKPEDLVEGVRRGIDMFDCVMPTRNARNGHLFVTDGIVKIRNAKHKDDTSTLDEHCDCYTCRNYSRAYLHHLDRCNEILGARLNTIHNLRYYQRLMAGLRQAIEEGKLELFVTDFYESKGKPVPPLNF

SEQ ID NO: 59938 - protein, 374 aa, Rahnella sp.; identical to SEQ ID NO: 59936
  REGION 1..374: note = tr|A0A0H3FG14|A0A0H3FG14_RAHSY Queuine tRNA-ribosyltransferase OS=Rahnella sp. (strain Y9602); OX = 741091 GN=tgt PE=3 SV=1

SEQ ID NO: 59939 - protein, 374 aa, Rahnella sp.
  REGION 1..374: note = tr|A0A2N0W8A4|A0A2N0W8A4_9GAMM Queuine tRNA-ribosyltransferase OS=Rahnella sp. AA OX=2057180; GN = tgt PE=3 SV=1
MKYELSTTDGRARRGRLVFERGVVETPAFMPVGTYGTVKGMTPEEVKETGAQILLGNTFHLWLRPGQEIMKLHGDLHDFMNWHGPILTDSGGFQVFSLGAMRKIKEEGVHFRNPINGDPVFLSPEKSMEIQNDLGSDIVMIFDECTPYPADWDYAKRSMEMSLRWAKRSRDRFNELNNKNALFGIIQGSVYEDLRDVSLKGLVDIGFDGYAVGGLAVGEPKEDMHRILEHVCPQIPEDKPRYLMGVGKPEDLVEGVRRGIDMFDCVMPTRNARNGHLFVTDGIVKIRNAKHKDDTSTLDEHCDCYTCRNYSRAYLHHLDRCNEILGARLNTIHNLRYYQRLMAGLRQAIEEGKLETFVTDFYERKGKPVPPLNF

SEQ ID NO: 59940 - protein, 374 aa, unidentified
  source 1..374: note = Rahnella woolbedingensis
  REGION 1..374: note = tr|A0A419N6Y9|A0A419N6Y9_9GAMM Queuine tRNA-ribosyltransferase OS=Rahnella woolbedingensis; OX = 1510574 GN=tgt PE=3 SV=1
MKYELSTTDGRARRGRLVFERGVVETPAFMPVGTYGTVKGMTPEEVKETGAQILLGNTFHLWLRPGQEIMKLHGDLHDFMNWHGPILTDSGGFQVFSLGAMRKIKEEGVHFRNPINGDPVFLSPEKSMEIQNDLGSDIVMIFDECTPYPADWDYAKRSMEMSLRWAQRSRDRFNELNNKNALFGIIQGSVYEDLRDVSLKGLVDIGFDGYAVGGLAVGEPKEDMHRILEHVCPQIPEDKPRYLMGVGKPEDLVEGVRRGIDMFDCVMPTRNARNGHLFVTDGIVKIRNAKHKDDTSTLDEHCDCYTCRNYSRAYLHHLDRCNEILGARLNTIHNLRYYQRLMAGLRQAIEEGKLETFVTEFYERKGKPVPPLNF

SEQ ID NO: 59941 - protein, 376 aa, unidentified
  source 1..376: note = Raineya orbicola
  REGION 1..376: note = tr|A0A2N3IK22|A0A2N3IK22_9BACT Queuine tRNA-ribosyltransferase OS=Raineya orbicola OX=2016530; GN = tgt PE=3 SV=1
MTFELLHTDSSCKARLGRIYTDHGTIETPIFMPVGTAGTVKAVHFRELHKDIQAEIILGNTYHLYLRPGLEILQNAGGLHKFGGWNKPILTDSGGYQVYSLAENRKITDEGVKFKSHIDGSYHFFTPENVMDIQRVIGADIIMAFDECPPYPCEYSYAKKSLMLTHKWLKRCCERVDNTTGLYGYSQALFPIVQGGVFKDLRQESAEFIASLKREGNAIGGLAVGEPAEKMYEITEFVCDILPADKPRYLMGVGTPANILESIALGVDMFDCVMPTRNARNGMLFTTQGIINIRNEKWKNDFSPIDEVLGGEVSGFYTKAYLRHLMISKEILASQIASIQNLRFYLWLVREARKHIAENNFLQWKNKIIPQIMQKL

SEQ ID NO: 59942 - protein, 427 aa, unidentified
  source 1..427: note = Raineyella antarctica
  REGION 1..427: note = tr|A0A1G6GXE0|A0A1G6GXE0_9ACTN Queuine tRNA-ribosyltransferase OS=Raineyella antarctica; OX = 1577474 GN=tgt PE=3 SV=1
MSLVEDATVSTDGADGPAAADPSFGFAARTVLENGLGRTGTIRTPHGQIRTPAFVAVGTKATVKAVTPSHVEDLGAQAVLANAYHLYLQPGSDIVDEAGGLGRFMNWPGPTFTDSGGFQVMSLGAGFKKVLAMDTAGLQSDDVIAEGKTRRAFVDEDGVTFYSHLNGDELRFTPEVSMRIQHQLGADIMFAFDELTTLMNTRDYQVESVERTRRWAERCLAEHGRLTTERVGKPYQALFGVVQGAQYEDLRRTAARGLAEMQVEGRGFDGFGIGGALEKANLGTIVGWVSEELPDDKPRHLLGISEPDDFFTAIENGADTFDCVQPSRVARNAALYTRDGRFNITRAENKRDFGPIEADCDCYTCQNFSRAYLHHLFKAKEMLASTLATIHNERFTVRLVDEIRTSIDDDRFAELREETLGRFYAQR

SEQ ID NO: 59943 - protein, 383 aa, Ralstonia insidiosa
  REGION 1..383: note = tr|A0A191ZZV7|A0A191ZZV7_9RALS Queuine tRNA-ribosyltransferase OS=Ralstonia insidiosa OX=190721; GN = tgt PE=3 SV=1
MLKYELLTTDGLARRGRMTLNHGVVETPIFMPVGTYGAVKAMSPAELKDIGAQIILGNTFHLWLRPGLEVMDAHKGLHGFNGWDKPILTDSGGFQVFSLGDLRKITEEGVTFASPINGDKLFLSPEISMQIQRRLNSDIVMQFDECTPYKIGDRPATEAEAAASMRMSLRWAQRSRNEFERENNPNALFAIVQGGMFENLRDESLAGLQAIDADAGGEGFGGYAIGGLSVGEPKEDMMRVLQHVAPRLPANKPHYLMGVGTPEDLVAGVAAGVDMFDCVMPTRNARNGWLFTRFGDIKIKNAVHRNDPRPLDETCGCYTCRNFSRAYLHHLQRVGEILGARLNTIHNLYYYLELMAEMRTAIESHGFAAFQARFAADRARGAL

SEQ ID NO: 59944 - protein, 383 aa, Ralstonia mannitolilytica
  REGION 1..383: note = tr|A0A2N5LD63|A0A2N5LD63_9RALS Queuine tRNA-ribosyltransferase OS=Ralstonia mannitolilytica; OX = 105219 GN=tgt PE=3 SV=1
MLKYELLTTDGLARRGRMTLNHGVVETPIFMPVGTYGAVKAMSPAELEDIGAQIILGNTFHLWLRPGLDVMDAHKGLHGFNGWDKPILTDSGGFQVFSLGDLRKITEEGVTFASPINGDRLFLSPEISMQIQRRLNSDIVMQFDECTPYKIGDRPATEAEAAASMRMSLRWAQRSRNEFEREGNPNALFGIVQGGMFEHLRDESLAGLQAIDADAGGQGFGGYAIGGLSVGEPKEDMMRVLQHVAPRLPANKPHYLMGVGTPEDLVAGVAAGVDMFDCVMPTRNARNGWLFTRFGDIKIKNAVHRNDPRPLDETCGCYTCSNFSRAYLHHLQRVGEILGARLNTIHNLYYYLELMAEMRAAIESHGFAAFQARFAADRARGAL

SEQ ID NO: 59945 - protein, 383 aa, Ralstonia mannitolilytica
  REGION 1..383: note = tr|A0A160BRQ5|A0A160BRQ5_9RALS Queuine tRNA-ribosyltransferase OS=Ralstonia mannitolilytica; OX = 105219 GN=tgt PE=3 SV=1
MLKYELLTTDGLARRGRMTLNHGVVETPIFMPVGTYGAVKAMSPAELKDIGAQIILGNTFHLWLRPGLDVMDAHKGLHGFNGWDKPILTDSGGFQVFSLGDLRKITEEGVTFASPINGDRLFLSPEISMQIQRRLNSDIVMQFDECTPYKIGDRPATEAEAAASMRMSLRWAQRSRNEFEREGNPNALFGIVQGGMFEHLRDESLAGLQAIDADAGGQGFGGYAIGGLSVGEPKEDMMRVLQHVAPRLPADKPHYLMGVGTPEDLVAGVAAGVDMFDCVMPTRNARNGWLFTRFGDIKIKNAVHRNDPRPLDETCGCYTCRNFSRAYLHHLQRVGEILGARLNTIHNLYYYLELMAEMRAAIESHGFAAFQARFAADRARGAL

SEQ ID NO: 59946 - protein, 383 aa, Ralstonia pickettii
  REGION 1..383: note = tr|R0CHR3|R0CHR3_RALPI Queuine tRNA-ribosyltransferase OS=Ralstonia pickettii OR214; OX = 1264675 GN=tgt PE=3 SV=1
MLKYELLTTDGLARRGRMTLNHGVVETPIFMPVGTYGAVKAMSPAELKDIGAQIILGNTFHLWLRPGLEVMDAHKGLHGFNGWDKPILTDSGGFQVFSLGDLRKITEDGVTFASPINGDKLFLSPEISMQIQRRLNSDIVMQFDECTPYKIGDRPATEAEAAASMRMSLRWAQRSRNEFEREKNPNALFAIVQGGMFENLRDESLAGLQAIDADAGGEGFGGYAIGGLSVGEPKEDMMRVLQHVAPRLPANKPHYLMGVGTPEDLVAGVAAGVDMFDCVMPTRNARNGWLFTRFGDIKIKNAVHRNDPRPLDETCGCYTCSNFSRAYLHHLQRVGEILGARLNTIHNLYYYLELMAEMRTAIESHGFAAFQARFAADRARGAL

SEQ ID NO: 59947 - protein, 383 aa, Ralstonia pickettii
  REGION 1..383: note = sp|B2UC75|TGT_RALPJ Queuine tRNA-ribosyltransferase; OS = Ralstonia pickettii (strain 12J) OX=402626 GN=tgt PE=3; SV = 1
MLKYELLTTDGLARRGRMTLNHGVVETPIFMPVGTYGAVKAMSPAELKDIGAQIILGNTFHLWLRPGLEVMDAHKGLHGFNGWDKPILTDSGGFQVFSLGDLRKITEDGVTFASPINGDKLFLSPEISMQIQRRLNSDIVMQFDECTPYKIGDRPATEAEAAASMRMSLRWAQRSRNEFEREKNPNALFAIVQGGMFENLRDESLAGLQAIDADAGGEGFGGYAIGGLSVGEPKEDMMRVLQHVAPRLPADKPHYLMGVGTPEDLVAGVAAGVDMFDCVMPTRNARNGWLFTRFGDIKIKNAVHRNDPRPLDETCGCYTCSNFSRAYLHHLQRVGEILGARLNTIHNLYYYLELMAEMRTAIESHGFAAFQARFAADRARGAL

SEQ ID NO: 59948 - protein, 383 aa, unidentified
  source 1..383: note = Ralstonia pseudosolanacearum
  REGION 1..383: note = tr|A0A223GQ76|A0A223GQ76_9RALS Queuine tRNA-ribosyltransferase OS=Ralstonia pseudosolanacearum; OX = 1310165 GN=tgt PE=3 SV=1
MLNFDLLTTDGLARRGRMTLNHGVVETPIFMPVGTYGAVKAMSPVELKDIGAQIILGNTFHLWLRPALEVIDAHKGLHGFVGWDKPMLTDSGGFQVFSLGDLRKITEEGVHFASPINGDRLFLSPEISMQIQRRLNSDIVMQFDECTPYQIDGRPATEAEAAASMRMSLRWAQRSRNEFERERNPNALFGIVQGGMFEPLRDESLAGLQAIDADAGGQGFGGYAIGGLSVGEPKEDMIRVLQHVAPRLPANKPHYLMGVGTPEDLVAGVAAGIDMFDCVMPTRNARNGWLFTRFGDIKIKNAVHRNDPRPLDETCGCYTCRNFSRAYLHHLQRVGEILGARLNTIHNLHYYLELMADMRTAIESHSFAVFRARFAADRARGAL

SEQ ID NO: 59949 - protein, 383 aa, unidentified
  source 1..383: note = Ralstonia pseudosolanacearum
  REGION 1..383: note = tr|A0A454TMF7|A0A454TMF7_9RALS Queuine tRNA-ribosyltransferase OS=Ralstonia pseudosolanacearum; OX = 1310165 GN=tgt PE=3 SV=1
MLNFDLLTTDGLARRGRMTLNHGVVETPIFMPVGTYGAVKAMSPVELKDIGAQIILGNTFHLWLRPALEVIDAHKGLHGFVGWDKPMLTDSGGFQVFSLGDLRKITEEGVHFASPINGDRLFLSPEISMQIQRRLNSDIVMQFDECTPYQIDGRPATEAEAAASMRMSLRWAQRSRNEFERERNPNALFGIVQGGMFEPLRDESLAGLQAIDADAGGQGFGGYAIGGLSVGEPKEDMMRVLQHVAPRLPANKPHYLMGVGTPEDLVAGVAAGIDMFDCVMPTRNARNGWLFTRFGDIKIKNAVHRNDPRPLDETCGCYTCRNFSRAYLHHLQRVGEILGARLNTIHNLHYYLELMADMRTAIESHSFAAFRARFAADRARGAL

SEQ ID NO: 59950 - protein, 383 aa, Ralstonia solanacearum; identical to SEQ ID NO: 59948
  REGION 1..383: note = sp|Q8XVW4|TGT_RALSO Queuine tRNA-ribosyltransferase; OS = Ralstonia solanacearum (strain GMI1000) OX=267608; GN = tgt PE=3 SV=1

SEQ ID NO: 59951 - protein, 383 aa, Ralstonia solanacearum
  REGION 1..383: note = tr|A0A399W534|A0A399W534_RALSL Queuine tRNA-ribosyltransferase OS=Ralstonia solanacearum OX=305; GN = tgt PE=3 SV=1
MLKFDLLTTDGLARRGRMTLNHGVVETPIFMPVGTYGAVKAMSPVELKDIGAQIILGNTFHLWLRPALEVIDAHKGLHGFVGWDKPMLTDSGGFQVFSLGDLRKITEEGVHFASPINGDRLFLSPEISMQIQRRLNSDIVMQFDECTPYQIDGRPATEAEAAASMRMSLRWAQRSRNEFERENNPNALFAIVQGGMFEPLRDESLAGLQAIDTDAGGQGFGGYAIGGLSVGEPKEDMMRVLQHVAPRLPANKPHYLMGVGTPEDLVAGVAAGIDMFDCVMPTRNARNGWLFTRFGDIKIKNAVHRNDPRPLDETCGCYACRNFSRAYLHHLQRVGEILGARLNTIHNLHYYLELMADMRAAIESHSFAAFRARFAADRSRGAL

SEQ ID NO: 59952 - protein, 376 aa, Ralstonia sp.
  REGION 1..376: note = tr|A0A1H0TMG3|A0A1H0TMG3_9RALS Queuine tRNA-ribosyltransferase OS=Ralstonia sp. 25mfcol4.1; OX = 1761899 GN=tgt PE=3 SV=1
MLNFELLTTDGNARRGHVTLNHGVVETPIFMPVGTYGSVKAMSPLELNEIGAQIILGNTFHLWLRPGLDVVDTHEGLHKFIGWDKPILTDSGGFQVFSLGELRKITEEGVTFASPVNGDKLFLSPEISMQIQRTLNSDIVMQFDECTPYEIDGRPATHDEAARSMRMSLRWAKRSRDEFDRLANPNALFGIVQGGMFEDLRDESLAGLSELDFHGYAIGGLSVGEPKEDMMRVLEHVGPRLPAHKPHYLMGVGTPEDLVAGVAHGVDMFDCVMPTRNARNGWLFTRFGDVKIRNAAHRNDPRPLDEQCGCYTCRNFSRAYLHHLHRVGEILGARLNTIHNLYYYLELMREMRTAIEEHRFQAFRRQFAENRARGTK

SEQ ID NO: 59953 - protein, 383 aa, Ralstonia sp.; identical to SEQ ID NO: 59943
  REGION 1..383: note = tr|A0A100HQR6|A0A100HQR6_9RALS Queuine tRNA-ribosyltransferase OS=Ralstonia sp. NT80 OX=1218247; GN = tgt PE=3 SV=1

SEQ ID NO: 59954 - protein, 383 aa, Ralstonia syzygii; identical to SEQ ID NO: 52661
  REGION 1..383: note = tr|G2ZYT5|G2ZYT5_9RALS Queuine tRNA-ribosyltransferase OS=Ralstonia syzygii R24 OX=907261; GN = tgt PE=3 SV=1

SEQ ID NO: 59955 - protein, 386 aa, Ramlibacter henchirensis
  REGION 1..386: note = tr|A0A4Z0CA02|A0A4Z0CA02_9BURK Queuine tRNA-ribosyltransferase OS=Ramlibacter henchirensis; OX = 204072 GN=tgt PE=3 SV=1
MLRFDLLATEGLARRGRLTLNHGVVQTPIFMPVGTYGTVKGVTPRSLEEMGAQIILGNTFHLWMRPGLDVLAQFGGLHRFERWERPILTDSGGFQVWSLGEMRKISEEGVKFASPVNGDRLFLTPEVSMQVQTALNSDIVMQFDECTPYETKGHVTTEAEARFSMELSLRWAARCKTEFARLENPNALFGIVQGGMFEHLREASLAALVDMDFPGYAIGGVSVGEPKEDMLRIMAHTPHRLPAHKPRYLMGVGTPEDLVDGVAQGVDLFDCVMPTRNARNGHLFTRFGDLKIRNARHRSDERPLDETCTCYACKGETRPDGTVSGGFSRAYLHHLERCGEMLAPMLASIHNLHFYLNLMREIREALEAGRFAELARQFRADRARGI

SEQ ID NO: 59956 - protein, 386 aa, unidentified
  source 1..386: note = Ramlibacter rhizophilus
  REGION 1..386: note = tr|A0A4Z0BEU7|A0A4Z0BEU7_9BURK Queuine tRNA-ribosyltransferase OS=Ramlibacter rhizophilus; OX = 1781167 GN=tgt PE=3 SV=1
MLQFELLATEGLARRGRLTLNHGVVQTPIFMPVGTYGTVKGVTPRSLEEMGAQIILGNTFHLWMRPGLDVLQQFGGLHRFEQWNKPILTDSGGFQVWSLGEMRRISEEGVKFASPVNGDRLFLTPEISMQIQRILNSDIVMQFDECTPYETKGHRTTEAEARFSMELSRRWALRCQAEFQRLENPNALFGIVQGGMFEHLRQESLEALVEMDFPGYAIGGVSVGEPKEDMLRIMAHTPQRLPAHKPRYLMGVGTPEDLVEGVAQGVDLFDCVMPTRNARNGHLFTRFGDLKIRNARHRGDERPLDETCGCYTCRGVTNADGTVSGGFSRAYLHHLERCGEMLAPMLASIHNLHFYLDTMRQIREALDAGRFTAWAQAFREDRRRGV

SEQ ID NO: 59957 - protein, 386 aa, Ramlibacter sp.
  REGION 1..386: note = tr|A0A4Y7BGI7|A0A4Y7BGI7_9BURK Queuine tRNA-ribosyltransferase OS=Ramlibacter sp. WS9 OX=1882741; GN = tgt PE=3 SV=1
MLSFELLKTDGHARRGRLTLNHGVVQTPIFMPVGTYGTVKGVTPRSLEEMGAQIILGNTFHLWMRPGLDVLKQFGGLHRFESWNKPILTDSGGFQVWSLGEMRKISEEGVKFASPVNGDKLFLTPEISMQIQTLLNSDIVMQFDECTPYDTKGHITTDAEARVSMELSRRWADRCKTEFARLQNPNALFGIVQGGMFEHLREESLDALVEMDFPGYAVGGVSVGEPKEEMLRIMAHTPHRLPANKPRYLMGVGTPEDLVEGVANGVDMFDCVMPTRNARNGHLFTRFGDLKLRNAKHRTDERPLDETCTCYACKGSTAADGTVSGGFSRAYLHHLERCGEMLAPMLASIHNLHYYLNLMREIREALDAGTFAAFVQRFKQDRARGV

SEQ ID NO: 59958 - protein, 386 aa, Ramlibacter sp.
  REGION 1..386: note = tr|A0A4Z0BUX0|A0A4Z0BUX0_9BURK Queuine tRNA-ribosyltransferase OS=Ramlibacter sp. 18x22-1; OX = 2530451 GN=tgt PE=3 SV=1
MLKFELLATEGLARRGRLTLNHGVVQTPIFMPVGTYGTVKGVTPRSLDDMGAQIILGNTFHLWMRPGLDVLAQFGGLHRFEQWHRPILTDSGGFQVWSLGEMRKITEEGVKFASPVNGDRLFLTPEISMQIQTALNSDIVMQFDECTPYETKGHLTTEAEARFSMELSLRWAQRCKTEFARLNNPNALFGIVQGGMFEHLREESLATLVEMDFPGYAVGGVSVGEPKEDMLRITAHTPHRLPENKPRYLMGVGTPEDLVEGVAQGVDMFDCVMPTRNARNGHLFTRFGDLKLRNSRHRTDERPLDESCTCYACKGHTAPDGTVSGGFSRAYLHHLERCGEMLAPMLASIHNLHYYLNLMREIRESLEAGRFAQFRTVFREDRARGV

SEQ ID NO: 59959 - protein, 386 aa, Ramlibacter tataouinensis
  REGION 1..386: note = tr|A0A127JSS5|A0A127JSS5_9BURK Queuine tRNA-ribosyltransferase OS=Ramlibacter tataouinensis; OX = 94132 GN=tgt PE=3 SV=1
MLNFEVTHTEGLARRGRLTLNHGVVQTPIFMPVGTYGTVKGITPRSLDEMDAQIILGNTFHLWMRPGLDVVKQFGGLHRFEQWDKPILTDSGGFQVWSLGEMRKISEEGVKFASPVNGDRLFLTPEISMQIQTVLNSDIVMQFDECTPYETKGHRTTEAEARFSMELSRRWAQRCQAEFARLENPNALFGIVQGGMFEHLREESLAALVEMDFPGYAVGGVSVGEPKEDMLRIMAHTPQRLPAHKPRYLMGVGTPEDLVAGVAQGVDMFDCVMPTRNARNGHLFTRYGDLKIRNSRHRSDERPLDESCTCYTCQGYTRAGGSVSGGFSRAYLHHLERCGEMLAPMLATIHNLHYYLNLMREIRQALEAGGFAAFAQRFRSERQRGI

SEQ ID NO: 59960 - protein, 386 aa, Ramlibacter tataouinensis
  REGION 1..386: note = tr|F5Y1G2|F5Y1G2_RAMTT Queuine tRNA-ribosyltransferase OS=Ramlibacter tataouinensis (strain ATCC BAA-407 / DSM 14655 / LMG 21543 / TTB310); OX = 365046 GN=tgt PE=3 SV=1
MLHFELLATEGLARRGRLTLRHGVVETPIFMPVGTYGTVKGVTPRSLEEMGAQIILGNTFHLWMRPGLDVLAQFGGLHRFERWDRPILTDSGGFQVWSLGEMRKISEEGVRFASPVNGDKLFLTPETSMQIQAALNSDIVMQFDECTPYETKGHVTTEAEARFSMELSRRWAVRCKAEFARLENPNALFGIVQGGMFEHLREESLAALVEMDFPGYAVGGVSVGEPKEDMLRIMAHTPRLLPADKPRYLMGVGTPEDLVAGVAQGVDLFDCVMPTRNARNGHLFTRFGDLKIRNARHRGDERPLDESCTCYACRGHTRPDGSVSGGFSRAYLHHLERCGEMLAPMLASIHNLHYYLNLMREVREALDAGRFADFARQFRQDRARGV

SEQ ID NO: 59961 - protein, 375 aa, unidentified
  source 1..375: note = Raoultella electrica
  REGION 1..375: note = tr|A0A514EVT5|A0A514EVT5_9ENTR Queuine tRNA-ribosyltransferase OS=Raoultella electrica OX=1259973; GN = tgt PE=3 SV=1
MKFELDTTDGRARRGRLVFDRGVVETPAFMPVGTYGTVKGMTPEEVEATGAQIILGNTFHLWLRPGQEIMKLHGDLHDFMQWKGPILTDSGGFQVFSLGDIRKITEQGVHFRNPINGDPIFLDPEKSMEIQYDLGSDIVMIFDECTPYPADWDYAKRSMEMSLRWAKRSRDRFDGLGNKNALFGIIQGSVYEDLRDISVKGLVDIGFDGYAVGGLAVGEPKEDMHRILEHVCPQIPADKPRYLMGVGKPEDLVEGVRRGIDMFDCVMPTRNARNGHLFVTDGVVKIRNAKHKSDTAPLDAECDCYTCRNYSRAYLHHLDRCNEILGARLNTIHNLRYYQRLMAGLRKAIEEGKLESFVTDFYQRQGRPVPPLNVD

SEQ ID NO: 59962 - protein, 375 aa, Raoultella ornithinolytica
  REGION 1..375: note = tr|A0A1Y6GSW0|A0A1Y6GSW0_RAOOR Queuine tRNA-ribosyltransferase OS=Raoultella ornithinolytica; OX = 54291 GN=tgt PE=3 SV=1
MKFELDTTDGRARRGRLVFDRGVVETPAFMPVGTYGTVKGMTPEEVEATGAQIILGNTFHLWLRPGQEIMKLHGDLHDFMQWKGPILTDSGGFQVFSLGDIRKITEQGVHFRNPINGDPIFLDPEKSMEIQYDLGSDIVMIFDECTPYPADWDYAKRSMEMSLRWAQRSRDRFDSLGNKNALFGIIQGSVYEDLRDISVKGLVDIGFDGYAVGGLAVGEPKEDMHRILEHVCPQIPADKPRYLMGVGKPEDLVEGVRRGIDMFDCVMPTRNARNGHLFVTDGVVKIRNAKHKSDTAPLDAECDCYTCRNYSRAYLHHLDRCNEILGARLNTIHNLRYYQRLMAGLRKAIEEGKLEGFVADFYQRQGRPVPPLDVD

SEQ ID NO: 59963 - protein, 375 aa, Raoultella ornithinolytica
  REGION 1..375: note = tr|A0A4V2TJ00|A0A4V2TJ00_RAOOR Queuine tRNA-ribosyltransferase OS=Raoultella ornithinolytica; OX = 54291 GN=tgt PE=3 SV=1
MKFELDTTDGRARRGRLVFERGVVETPAFMPVGTYGTVKGMTPEEVEATGAQIILGNTFHLWLRPGQEIMKLHGDLHDFMQWKGPILTDSGGFQVFSLGDIRKITEQGVHFRNPINGDPIFLDPEKSMEIQFDLGSDIVMIFDECTPYPADWDYAKRSMEMSLRWAQRSRDRFDGLGNKNALFGIIQGSVYEDLRDISVKGLVDIGFDGYAVGGLAVGEPKEDMHRILEHVCPQIPADKPRYLMGVGKPEDLVEGVRRGIDMFDCVMPTRNARNGHLFVTDGVVKIRNAKHKSDTATLDAECDCYTCRNYSRAYLHHLDRCNEILGARLNTIHNLRYYQRLMAGLRKAIEEGKLESFVADFYQRQGRTVPPLNVD

SEQ ID NO: 59964 - protein, 375 aa, Raoultella planticola; identical to SEQ ID NO: 56356
  REGION 1..375: note = tr|A0A2X2G5S5|A0A2X2G5S5_RAOPL Queuine tRNA-ribosyltransferase OS=Raoultella planticola OX=575; GN = tgt PE=3 SV=1

SEQ ID NO: 59965 - protein, 375 aa, Raoultella planticola
  REGION 1..375: note = tr|A0A377TBB0|A0A377TBB0_RAOPL Queuine tRNA-ribosyltransferase OS=Raoultella planticola OX=575; GN = tgt PE=3 SV=1
MKFELDTTDGRARRGRLVFDRGVVETPAFMPVGTYGTVKGMTPEEVEATGAQIILGNTFHLWLRPGQEIMKLHGDLHDFMQWKGPILTDSGGFQVFSLGDIRKITEQGVHFRNPINGDPIFLDPEKSMEIQYDLGSDIVMIFDECTPYPADWDYAKRSMEMSLRWAQRSRDRFDSLGNKNALFGIIQGSVYEDLRDISVKGLVDIGFDGYAVGGLAVGEPKEDMHRILEHVCPQIPADKPRYLMGVGKPEDLVEGVRRGIDMFDCVMPTRNARNGHLFVTDGVVKIRNAKHKSDTAPLDAECDCYTCRNYSRAYLHHLDRCNEILGARLNTIHNLRYYQRLMAGLRKAIEEGKLESFVADFYQRQGRPVPPLDVD

SEQ ID NO: 59966 - protein, 375 aa, Raoultella sp.; identical to SEQ ID NO: 59963
  REGION 1..375: note = tr|A0A509CR36|A0A509CR36_9ENTR Queuine tRNA-ribosyltransferase OS=Raoultella sp. NCTC 9189; OX = 2583577 GN=tgt PE=3 SV=1

SEQ ID NO: 59967 - protein, 375 aa, Raoultella sp.
  REGION 1..375: note = tr|A0A4R3ZKD7|A0A4R3ZKD7_9ENTR Queuine tRNA-ribosyltransferase OS=Raoultella sp. BIGb0138; OX = 2485115 GN=tgt PE=3 SV=1
MKFELDTTDGRARRGRLVFDRGVVETPAFMPVGTYGTVKGMTPEEVEATGAQIILGNTFHLWLRPGQEIMKLHGDLHDFMQWKGPILTDSGGFQVFSLGDIRKITEQGVHFRNPINGDPIFLDPEKSMEIQYDLGSDIVMIFDECTPYPADWDYAKRSMEMSLRWAQRSRDRFDGLGNKNALFGIIQGSVYEDLRDISVKGLVDIGFDGYAVGGLAVGEPKEDMHRILEHVCPQIPADKPRYLMGVGKPEDLVEGVRRGIDMFDCVMPTRNARNGHLFVTDGVVKIRNAKHKSDTAPLDAECDCYTCRNYSRAYLHHLDRCNEILGARLNTIHNLRYYQRLMAGLRKAIEEGKLESFVTDFYQRQGRPVPPLNVD

SEQ ID NO: 59968 - protein, 287 aa, Raoultella terrigena
  REGION 1..287: note = tr|A0A3P8M495|A0A3P8M495_RAOTE Queuine tRNA-ribosyltransferase OS=Raoultella terrigena OX=577; GN = tgt_2 PE=3 SV=1
MKFELDTTDGRARRGRLVFERGVVETPAFMPVGTYGTVKGMTPEEVEATGAQIILGNTFHLWLRPGQEIMKLHGDLHDFMQWKGPILTDSGGFQVFSLGDIRKITEQGVHFRNPINGDPIFLDPEKSMEIQFDLGSDIVMIFDECTPYPADWDYAKRSMEMSLRWAQRSRDRFDGLGNKNALFGIIQGSVYEDLRDISVKGLVDIGFDGYAVGGLAVGEPKEDMHRILEHVCPQIPADKPRYLMGVGKPEDLVEGVRRGIDMFDCVMATRNAAQRSPVRHRWRRKNP

SEQ ID NO: 59969 - protein, 104 aa, Raoultella terrigena
  REGION 1..104: note = tr|A0A4U9DEJ2|A0A4U9DEJ2_RAOTE Queuine tRNA-ribosyltransferase OS=Raoultella terrigena OX=577; GN = tgt_1 PE=4 SV=1
MKLHGDLHDFMQWKGPILTDSGGFQVFSLGDIRKITEQGVHFRNPINGDPIFLDPEKSMEIQFDLGSDIVMIFDECTPYPADWDYAKRSMEMSLRWAQRKPRPL

SEQ ID NO: 59970 - protein, 345 aa, unidentified
  source 1..345: note = Raphidiopsis brookii
  REGION 1..345: note = tr|D4TRS5|D4TRS5_9CYAN Queuine tRNA-ribosyltransferase OS=Raphidiopsis brookii D9; OX = 533247 GN=tgt PE=3 SV=1
METPRFMPVGTLANVKTVTPAQLEDTGAQMILSNTYHLHLQPGEKIVAGGGGLHKFMAWNGPMLTDSGGFQVFSLSEMRKITEEGVVFRSPHDGQMIKLTPEKSIEIQNILGADVIMAFDECPPYPATYQEVTAATDRTYRWLERCIMSHQRLDQALFPIVQGGVYLDMRIRAATDLAKLDMPGYAIGGVSVGEPPELMAQIVRTTAPLLPRNKPRYLMGVGTYREMVIAIAAGVDLFDCVIPTRWARHGTAMVQGERWNLKNSKFREDFIPIDETCHCYTCSNFSRAYVSHLVRSQEILAYTLLSIHNITELIRFTQAIRESILQNRFLTDFGHWMNDPEKDLE

SEQ ID NO: 59971 - protein, 373 aa, unidentified
  source 1..373: note = Raphidiopsis curvata
  REGION 1..373: note = tr|A0A1Z4VBV0|A0A1Z4VBV0_9CYAN Queuine tRNA-ribosyltransferase OS=Raphidiopsis curvata NIES-932; OX = 1973482 GN=tgt PE=3 SV=1
MSNFSFRLVANCSQTQARAGVFSTPHGIVETPRFMPVGTLANVKTVTPAQLADTGAQMILSNTYHLHLQPGEKIVAGGGGLHKFMAWDGPMLTDSGGFQVFSLSEMRKITEEGVVFRSPHDGQMIKLTPEKSIEIQNILGADVIMAFDECPPYPATYQEVTAATDRTYRWLERCIKSHQRLDQALFPIVQGGVYLDLRTRAATDLAKLDMPGYAIGGVSVGEPPELMAQIVRTTAPLLPRNKPRYLMGVGTYREMVIAIAAGVDLFDCVIPTRWARHGTAMVQGERWNLKNTKFREDFAPIDETCHCYTCSNFSRAYVSHLVRSQEILAYTLLSIHNITELIRFTQAIRESILQNRFLTDFGHWMNDPEKDLE

SEQ ID NO: 59972 - protein, 376 aa, Reichenbachiella agariperforans
  REGION 1..376: note = tr|A0A1M6U995|A0A1M6U995_9BACT Queuine tRNA-ribosyltransferase OS=Reichenbachiella agariperforans; OX = 156994 GN=tgt PE=3 SV=1
MDFKLEVTDAKSKARAGVITTDHGQIETPIFMPVGTAGTVKTVHQRELNEDVKAQIILGNTYHLYLRPGLDVIEAAGGLHKFNGFEKPMLTDSGGYQVYSLKHRRKITEEGVKFQSHIDGSRHNFTPEVVMDIQRTIGADIIMAFDECTPYPCDRKYARESMEMTHRWLKRCCDRFDQTESKYGYSQTLFPIVQGSTYHDLREKSAETIASFGREGNAIGGLSVGEPAEMMYESTDLVCSILPADKPRYLMGVGTPENILECIALGVDMFDCVMPTRNARHGLIYTSEGIINIKNKKWEKDFSPLDPNLGGYVDTAYSKAYVRHLVHSSEALGAQIASIHNLAFYLWLVGEARAHIKAGDFSTWKNLILPKISSRL

SEQ ID NO: 59973 - protein, 376 aa, Reichenbachiella faecimaris
  REGION 1..376: note = tr|A0A1W2G6L9|A0A1W2G6L9_9BACT Queuine tRNA-ribosyltransferase OS=Reichenbachiella faecimaris; OX = 692418 GN=tgt PE=3 SV=1
MNFELLQKDPKSKARAGKITTDHGEIETPIFMPVGTAGTVKALHQRELKEDVKAEIILGNTYHLYLRPGLDVIEAAGGLHQFNGWDRPMLTDSGGYQVYSLKDRRKITEEGVKFQSHIDGSRHNFTPESVMDIQRTIGADIIMAFDECTPYPCDEKYAKNSMEMTHRWLKRCCDRFDETEPKYGYDQTLFPIVQGSTYHDLRTKSAETIASFGREGNAIGGLSVGEPAEMMYESTDLVCSILPEDKPRYLMGVGTPSNLIECIALGVDMFDCVLPTRNARHGVLYTSEGIINIKNEKWEKDFSPVDPNLAGHVDMNYSKAYLRHLIRTGEMLGAQIASIHNLSFFLWLVKEARAHILQGDFASWKNAILPKLSNRL

SEQ ID NO: 59974 - protein, 376 aa, Reichenbachiella sp.
  REGION 1..376: note = tr|A0A2G5L4R7|A0A2G5L4R7_9BACT Queuine tRNA-ribosyltransferase OS=Reichenbachiella sp. 5M10; OX = 1889772 GN=tgt PE=3 SV=1
MDFKLEATDGKSNARAGVITTDHGQIETPIFMPVGTAGTVKAVHQRELKEDIKGEIILGNTYHLYLRPGLEVIEAAGGLHMFNGFDRPMLTDSGGYQVYSLKHRRKITEEGVKFQSHIDGSRHHFTPEYVMDIQRTIGADIIMAFDECTPYPCDRKYARESMEMTHRWLKRCCDRFDETQPKYGYSQTLFPIVQGSTYHDLREKSAETIASFGREGNAIGGLSVGEPAEMMYETTDLVCGILPKDKPRYLMGVGTPENILECISLGVDMFDCVMPTRNARHGLIYTSEGIINIKNKKWERDFSPLDPNLGGYVDSAYTKAYVRHLIHSSEALGAQITSVHNLTFYLWLVKEARKHIKSGSFSAWKNAILPKISTRL

SEQ ID NO: 59975 - protein, 372 aa, Reinekea blandensis
  REGION 1..372: note = tr|A4BG47|A4BG47_9GAMM Queuine tRNA-ribosyltransferase OS=Reinekea blandensis MED297; OX = 314283 GN=tgt PE=3 SV=1
MTFKLHNTDGKARRGTLTFPRGTVETPAFMPVGTYGTVKGMTPKDVEAIGAEIILGNTFHLMLRPGTQVISEHGDLHDFAQWEKPILTDSGGFQVFSLGKLRKITEEGVTFQSPVDGAKVKMTPESSMEVQRALGSDIVMIFDECTPYPATEAEAKQSMEMSLRWAKRSKDAHGDSPSALFGIIQGGMYQNLREVSLKGLTDIEFDGYAIGGLSVGEPKDEMMKVLDYLPAMMPEDKPRYLMGVGKPEDLVEGVRRGVDMFDCVMPTRNARNGHLFVTDGVVKIRNAKHRHDTTALDPECDCYTCQNFSKAYLYHLDKCGEILGAQLNTIHNLRYYQRLMAGLRDAIDANQLDAFVDDFYARRGLETPPLAP

SEQ ID NO: 59976 - protein, 378 aa, unidentified
  source 1..378: note = Reinekea forsetii
  REGION 1..378: note = tr|A0A2K8KUZ8|A0A2K8KUZ8_9GAMM Queuine tRNA-ribosyltransferase OS=Reinekea forsetii OX=1336806; GN = tgt PE=3 SV=1
MSHSSFMSFTLHNTDGKARRGTLSFPRGDVQTPAFMPVGTYGTVKGMTPRDLEDIGAEIILGNTFHLMLRPGTEVISDHGDLHDFANWSKPILTDSGGFQVFSLGKMRKITEDGVTFQSPVNGDKVHMTPESSMAVQKALGSDIVMIFDECTPFPATHAEVKKSMELSLRWAKRSKDAHGDSPSALFGIIQGGMLRDLREVSLAGLTEIGFDGYAIGGLSVGEPKEEMMQVLDYLPALMPADKPRYLMGVGKPEDLVEGVRRGVDMFDCVMPTRNARNGHLFVTDGVVKIRNAKYRHDTSSLDADCDCYTCRNFTKAYLYHLDKCGEMLGAQLNTIHNLRYYQRLMAQLRGAIEENRLDAYVEGFYQLRGLETPALTP

SEQ ID NO: 59977 - protein, 378 aa, Reinekea marinisedimentorum
  REGION 1..378: note = tr|A0A4R3IEB3|A0A4R3IEB3_9GAMM Queuine tRNA-ribosyltransferase OS=Reinekea marinisedimentorum; OX = 230495 GN=tgt PE=3 SV=1
MTRSCFMEFKLHNTDGKARRGTLSFPRGEVQTPAFMPVGTYGTVKGMTPKDVKEIGADIILGNTFHLMLRPGTEVISAHGDLHDFAQWDKPILTDSGGFQVFSLGKLRKITEDGVTFQSPVNGSKVHMTPESSMEVQRALGSDIVMIFDECTPYPATEAEAKNSMELSLRWAKRSKDAHGDSPSALFGIIQGGMYQNLREVSLKGLTDIDFDGYAIGGLSVGEPKDEMMQVLDYLPAMMPEDKPRYLMGVGKPEDLVEGVRRGVDMFDCVMPTRNARNGHLFVTDGVVKIRNAKHRHDTTTLDPECDCYTCKNFSKAYLYHLDKCGEMLGAQLNTIHNLRYYQRLMAELREAIEENRLEAYVDEFYTRRGLQTPPLAP

SEQ ID NO: 59978 - protein, 378 aa, Reinekea sp.
  REGION 1..378: note = tr|A0A5C8Z1Q1|A0A5C8Z1Q1_9GAMM Queuine tRNA-ribosyltransferase OS=Reinekea sp. SSH23 OX=2593301; GN = tgt PE=3 SV=1
MSRSCFMEFTLHNTDGKARRGTLKFPRGEVQTPAFMPVGTYGTVKGMTPKEVEEIGADIILGNTFHLMLRPGTEVISAHGDLHDFAQWHKPILTDSGGFQVFSLGKLRKITEDGVTFQSPVNGSKVHMTPESSMEVQRALGSDIVMIFDECTPYPATEAEAKKSMELSLRWAKRSKDAHGDSPSALFGIIQGGMYQNLRQTSLQGLTEIDFDGYAIGGLSVGEPKDEMMQVLDYLPAMMPEDKPRYLMGVGKPEDLVEGVRRGVDMFDCVMPTRNARNGHLFVTDGVVKIRNAKHRHDTGPLDPQCDCYTCKNFSKAYLYHLDKCGEMLGAQLNTIHNLRYYQRLMADLRAAIEDNRLDQYVDEFYSLRGLQTPPLAP

SEQ ID NO: 59979 - protein, 446 aa, Renibacterium salmoninarum
  REGION 1..446: note = tr|A9WVJ0|A9WVJ0_RENSM Queuine tRNA-ribosyltransferase OS=Renibacterium salmoninarum (strain ATCC 33209 / DSM 20767 / JCM 11484 / NBRC 15589 / NCIMB 2235) OX=288705GN=tgt PE=3 SV=1
MRMFCLTQMRLAIRNGLGCENRQVPQSDFSFTIGSKLSETSPTKSAEKPDGGEFLGRTGTISTPHGEIQTPAFIAVGTKATVKAVLPESMKELGAQALLANAYHLYLQPGPEIVDQAGGLGSFMNWSGPTFTDSGGFQVMSLGSGFKKVIDMVNIDQSGADDRVAPGKERLAHIDDDGVWFKSHLDGSKHRFTPEVSLQIQHQLGADVMFAFDELTTLHNSRGYQEEALERTRLWAERCISEHQRLIVERETKPYQALFGVIQGAQYEDLRRKASRDLGGMDIDGMQFDGFGLGGALEKENLGTIVRWCCEELPENKPKHLLGISEPDDIFVAIENGADTFDCVSPTRVARNSAFYTPFGRKNLSNAKYKRDFGPLMDGCDCYTCINYSRAYIHHLYKSKEMISATLISIHNERFVVKMVDDARLAIEDGSFFEFKDETLTNYYSA

SEQ ID NO: 59980 - protein, 374 aa, unidentified
  source 1..374: note = Reyranella soli
  REGION 1..374: note = tr|A0A512ND20|A0A512ND20_9PROT Queuine tRNA-ribosyltransferase OS=Reyranella soli OX=1230389; GN = tgt PE=3 SV=1
MSLSFELLGTDGAARRGRIGTAHGTVETPAFMPLGTGGTVKAMLPQSVAETGAEIVLGNTFHLMLRPGAERVAAQGGLHKFMNWPRPILTDSGGFQVMSLKDLRKLDPDGVTFRSPFDGSQHRLTPERSIKIQHLLDTNITMSFDECTSWPVAEDAAAFSMRLSMKWAERGRRAFVDRPGYGLFGIVQGSVFPDLRAESVKALIDIGFDGYAVGGLAVGEGQQAMFGVLDVTTPMLPDDRPRYLMGVGRPADIVGAVKRGIDMFDCVLPTRGGRTAQAFTRRGELNLRNARHRDDHRPIDEQCACPACRHHSRAYLHHLIRVEEILGAMLLTWHNLQYYQDIMRGLRDAIEGGSLDSWAAAFEEEQGRGDIPPL

SEQ ID NO: 59981 - protein, 374 aa, Reyranella sp.
  REGION 1..374: note = tr|A0A521R5P4|A0A521R5P4_9PROT Queuine tRNA-ribosyltransferase OS=Reyranella sp. OX=1929291; GN = tgt PE=3 SV=1
MSLSYKLLGTDGEARRGQITTAHGTIETPAFMPVGTAGTVKAMMPQSVAGTGAEIVLGNTFHLMLRPGAERVASLGGLHKFMNWPGPILTDSGGFQVMSLKELRKLDPDGVTFRSPADGSQHRLTPERSIEIQRLLDADITMSFDECTSWPVEEPAAAFSMRLSMKWAERGKRAFTERPGYGLFGIVQGSVFPALREESAKALTSIGFDGYAVGGLAVGEGQETMFRVLDQTVPLLPADRPRYLMGVGRPADIVGAVKRGIDMFDCVMPTRSGRTAQAFTRRGELNLRNARHRDDPRPIDEHCACPACKHHSRAYLHHLIRSEEILGAMLLTWHNLHYYQDVMRGLRGAIESNSLGHWIAAFESDQSLGDIPPL

SEQ ID NO: 59982 - protein, 251 aa, Reyranella sp.
  REGION 1..251: note = tr|A0A521LM79|A0A521LM79_9PROT Queuine tRNA-ribosyltransferase (Fragment) OS=Reyranella sp.; OX = 1929291 GN=tgt PE=3 SV=1
MSLSFELKGQDGAARRGRIATAHGTIETPAFMPVGTAGTVKAMLPQSVAETGAEIVLGNTFHLMLRPGAERVAALGGLHKFMNWPGPILTDSGGFQVMSLKELRKLDNDGVTFRSPVDGTQHRLTPARSIEIQRLLDADITMSFDECTSWPVEEPAAAFSMRLSMKWAELGKKAFTERPGYGLFGIVQGSIFPALREESTKALTAIGFDGYAVGGLAVGEGQELMFKTLDTTVPMLPQDRPRYLMGVGRPG

SEQ ID NO: 59983 - protein, 380 aa, Rheinheimera nanhaiensis
  REGION 1..380: note = tr|I1DSN1|I1DSN1_9GAMM Queuine tRNA-ribosyltransferase OS=Rheinheimera nanhaiensis E407-8; OX = 562729 GN=tgt PE=3 SV=1
MKFELDTTDGKARRGRLIFDRGVVETPAFMPVGTYGTVKGMTPEELEATGAQICLGNTFHLMLRPGTEIIKKHGDLHDFMHWHKPILTDSGGFQVFSLGELRKITEEGVKFRSPLNGERIMLTPERSMEVQRDLGSDIVMIFDECTPYPATEMQAKKSMEMSLRWAKRSKDAHGDNSAALFGIIQGGMYPHLRDVSLNGLEEIGFDGYAIGGLSVGEPKEDMIRILDHTTDKMPAHKPRYLMGVGKPEDIVEAVRRGIDMFDCVMPTRNARNGHLFVSTGVVKIRNAKYKDDIGPLDAECDCYTCKNYSRAYLHHLDRCNEIQGARLNTIHNLHHYQKLMQGLRGAIAAGTLEQFVAQFYAKRGMAVPELAAPAQNNEQH

SEQ ID NO: 59984 - protein, 380 aa, Rheinheimera pacifica
  REGION 1..380: note = tr|A0A1H6J906|A0A1H6J906_9GAMM Queuine tRNA-ribosyltransferase OS=Rheinheimera pacifica OX=173990; GN = tgt PE=3 SV=1
MKFELDTTDGKARRGRLIFERGVVETPAFMPVGTYGTVKGMTPEELDATGAQICLGNTFHLMLRPGTEIIKKHGDLHDFMHWHKPILTDSGGFQVFSLGELRKITEEGVKFRSPLNGERIMLTPERSMEVQRDLGSDIVMIFDECTPYPATEQEAKKSMEMSLRWAKRSKDAHGDNPAALFGIIQGGMYPNLRDVSLNGLEDIGFDGYAIGGLSVGEPKADMIRILNHTTDKMPAHKPRYLMGVGKPEDIVEAVRRGIDMFDCVMPTRNARNGHLFVSTGVVKIRNAKYKDDIGPLDAECDCYTCKNYSRAYLHHLDRCNEIQGARLNTMHNLHHYQKLMQGLRTAIAAGNLEQFVEQFYTKRGLPVPALQAIDTNTEQH

SEQ ID NO: 59985 - protein, 380 aa, unidentified
  source 1..380: note = Rheinheimera salexigens
  REGION 1..380: note = tr|A0A1E7Q9A3|A0A1E7Q9A3_9GAMM Queuine tRNA-ribosyltransferase OS=Rheinheimera salexigens; OX = 1628148 GN=tgt PE=3 SV=1
MKFELDTTDGKARRGRLIFDRGVVETPAFMPVGTYGTVKGMTPEELEATGAQICLGNTFHLMLRPGTDIISKHGDLHNFMHWQKPILTDSGGFQVFSLGELRKITEEGVKFRSPLNGERIMLTPERSMEVQRALGSDIVMIFDECTPYPATEQQAKKSMELSLRWAKRSKDAHGDNPSALFGIIQGGMYPGLRDVSLQGLEDIGFDGYAIGGLSVGEPKDDMINILNHTTDQMPAQKPRYLMGVGKPEDIVEAVRRGIDMFDCVMPTRNARNGHLFVNTGVVKIRNAKYKDDITPLDAECDCYTCKNYSRSYLHHLDRCNEILGARLNTMHNLRHYQVLMQGLRDAIAAGNLEQFVEQFYAKRDLPVPTLENSLTNTEQN

SEQ ID NO: 59986 - protein, 377 aa, Rheinheimera sp.
  REGION 1..377: note = tr|A0A3S2VTZ4|A0A3S2VTZ4_9GAMM Queuine tRNA-ribosyltransferase OS=Rheinheimera sp. YQF-1; OX = 2499626 GN=tgt PE=3 SV=1
MKFELLKTDGKARRGRLVFERGVVETPAFMPVGTYGTVKGMTPEELDATGAQICLGNTFHLMLRPGTEIIKKHGDLHDFMNWHKPILTDSGGFQVFSLGELRKIKEEGVTFRSPLNGEKIMLTPERSMQVQRDLGSDIVMIFDECTPYPATEQQAKKSMEMSLRWAKRSKDEHGDNPSALFGIIQGGMYPELRDISLQGLEEIGFDGYAIGGLSVGEPKEDMIKILNHTTGQMPQHKPRYLMGVGKPEDIVEAVRRGIDMFDCVMPTRNARNGHLFVSTGVIKIRNAKHKDDASTLDAECDCYTCKNYSRSYLHHLDRCNEILGARLNTIHNLHHYQKLMQGLRAAIAEQKLEDFVAEFYQKRGMEVPPLETSITEQ

SEQ ID NO: 59987 - protein, 380 aa, Rheinheimera sp.
  REGION 1..380: note = tr|A0A486XRW6|A0A486XRW6_9GAMM Queuine tRNA-ribosyltransferase OS=Rheinheimera sp. BAL341; OX = 1708203 GN=tgt PE=3 SV=1
MKFELDTTDGKARRGRLIFDRGVVETPAFMPVGTYGTVKGMTPEELEATGAQICLGNTFHLMLRPGTEIIKKHGDLHDFMHWHKPILTDSGGFQVFSLGELRKITEEGVKFRSPLNGERIMLTPERSMEVQRDLGSDIVMIFDECTPYPATEMQAKKSMEMSLRWAKRSKDAHGDNPSALFGIIQGGMYPHLRDVSLNGLEEIGFDGYAIGGLSVGEPKEDMIRILNHTTDKMPAHKPRYLMGVGKPEDIVEAVRRGIDMFDCVMPTRNARNGHLFVSTGVVKIRNAKYKDDIGPLDAECDCYTCKNYSRAYLHHLDRCNEIQGARLNTVHNLHHYQKLMQGLRAAIAAGTLDQFVETFYTKRGLPVPTLTTLEQNKEQH

SEQ ID NO: 59988 - protein, 392 aa, unidentified
  source 1..392: note = Rheinheimera tuosuensis
  REGION 1..392: note = tr|A0A285IXE7|A0A285IXE7_9GAMM Queuine tRNA-ribosyltransferase OS=Rheinheimera tuosuensis; OX = 1323745 GN=tgt PE=3 SV=1
MKFELDTTDGRARRGRLIFERGTVETPAFMPVGTYGTVKGMTPEELDATGAQICLGNTFHLMLRPGTEIIKKHGDLHDFMHWHKPILTDSGGFQVFSLGELRKITEEGVKFRSPLNGERIMLTPERSMEVQRDLGSDIVMIFDECTPYPASEQQAKKSMEMSLRWAKRSKDAHGDNPAALFGIIQGGMYPNLRDVSLQGLEEIGFDGYAIGGLSVGEPKQDMINILNHTTGQMPGHKPRYLMGVGKPEDIVEAVRRGIDMFDCVMPTRNARNGHLFISSGVVKIRNAKHKDDISPLDPECDCYTCKNYSRSYLHHLDRCNEILGARLNTIHNLHHYQKLMQGLRDAIAAGTLEQFVSEFYAKRELPVPPLEQLADRLDANRLDNTETPVSTN

SEQ ID NO: 59989 - protein, 376 aa, unidentified
  source 1..376: note = Rhizobacter gummiphilus
  REGION 1..376: note = tr|A0A1W6LH95|A0A1W6LH95_9BURK Queuine tRNA-ribosyltransferase OS=Rhizobacter gummiphilus; OX = 946333 GN=tgt PE=3 SV=1
MLQFELLQTDGHARRGRLTLNHGVVETPVFMPVGTYGTVKGVLPSSLEEMGAQIILGNTFHLWLRPGIDVLNQFGGLHRFEGWNKPILTDSGGFQVWSLGEMRKISEEGVRFASPVNGDKLFLTPETSMQIQRALNSDIVMQFDECTPYETKGHLTTEREARVSMELSLRWAKRCLDEFNRNENPNALFGIVQGGMFEHLREESLNALVDLDLPGYAIGGVSVGEPKPEMQRIVAHTPHRLPANKPRYLMGVGTPEDLVEGVAAGVDMFDCVMPTRNARNAHLFTRFGDVRLRNSRFRTDERPVDETCTCHTCKHFSRAYLHHLERCGEMLAPMLASIHNLHYYVNLMREVREALDAGTFPQFVAQFKADRARGTT

SEQ ID NO: 59990 - protein, 375 aa, Rhizobacter sp.
  REGION 1..375: note = tr|A0A0Q7A6G9|A0A0Q7A6G9_9BURK Queuine tRNA-ribosyltransferase OS=Rhizobacter sp. Root404; OX = 1736528 GN=tgt PE=3 SV=1
MLTFDLLKTEGHARRGRLTLNHGVVETPVFMPVGTYGTVKGVMPASLEAMGAQIILGNTFHLWLRPGLDVLKQFGGLHRFEAWNKPILTDSGGFQVWSLGEMRKISEEGVKFASPVNGDKLFLTPEISMQIQRVLNSDIVMQFDECTPYETKGHLTTEREARVSMELSLRWASRCLTEHARLENPNALFGIVQGGMFENLREESLAKLVELDLPGYAIGGVSVGEPKPLMQRIVAHTPHRLPAHKPRYLMGVGTPEDLVEGVEGGVDMFDCVMPTRNARNGHLFTRFGDLKIRNARHKADESPPDMTCTCHTCANFSRAYLHHLDRCNEMLGPMLASIHNLHYYVNLMREVREALDAGAFATFATRFREDRARGV

SEQ ID NO: 59991 - protein, 385 aa, Rhizobacter sp.
  REGION 1..385: note = tr|A0A1M7QCR1|A0A1M7QCR1_9BURK Queuine tRNA-ribosyltransferase OS=Rhizobacter sp. OV335; OX = 1500264 GN=tgt PE=3 SV=1
MLQFDLLKTEGHARRGRLTLNHGVVETPIFMPVGTYGTVKGVMPQSLEDMGAQIILGNTFHLWLRPGVDILRQFGGLHRFEGWTKPILTDSGGFQVWSLGDMRKISEEGVRFASPVNGDKLFLTPEISMQIQRALNSDIVMQFDECTPYESKGHLTTEREARSSMELSLRWARRCLAEFQRNENPNALFGIVQGGMFETLREESLASLVELDLPGYAIGGVSVGEPKAEMQRIMAHTPHRLPAHKPRYLMGVGTPEDLVEGVAAGVDMFDCVMPTRNARNGHLFTRFGDLRLRNARYRTDERPIDETCSCHTCKGFSRAYLHHLDRCGEMLGPMLTTIHNLHYYLNLMREVRDALDAGRFAEFTKQFAADRARGPGPIPEPANLP

SEQ ID NO: 59992 - protein, 373 aa, unidentified
  source 1..373: note = Rhizobiaceae bacterium
  REGION 1..373: note = tr|A0A4V6BBB3|A0A4V6BBB3_9RHIZ Queuine tRNA-ribosyltransferase OS=Rhizobiaceae bacterium LC148; OX = 1120689 GN=tgt PE=3 SV=1
MTENFQFTLKATDGGARLGEVSMPRGTIRTPAFMPVGTVGTVKAMYLDQVRETGADIILGNTYHLMLRPGAERVARLGGLHELIRWPHPILTDSGGFQVMSLAGLRKLDEKGVTFKSHVDGSLHHMSPERSIEIQGLLGSDIQMQLDECVALPAEPKEIERAMELSLRWAERCKVAFGNQPGKAMFGIVQGGDQPNLRIRSAEGLKELDLKGYAVGGLAVGEPQEVMLQMLETTLPVLPSEKPRYLMGVGTPDDILKSVARGIDMFDCVMPTRSGRHGLAFTRRGRINIRNAKHAEDLRPLDEESSCPAARDYSRAYLHHLVRSDEALGGMLLSWNNLSYYQDLMKGIRKAIAEGRFADFYAETQEVWARGDV

SEQ ID NO: 59993 - protein, 377 aa, unidentified
  source 1..377: note = Rhizobiaceae bacterium
  REGION 1..377: note = tr|A0A2D8K4T4|A0A2D8K4T4_9RHIZ Queuine tRNA-ribosyltransferase OS=Rhizobiaceae bacterium; OX = 1913961 GN=tgt PE=3 SV=1
MSQEFQFTLKTTDGNARLGAITMPRGEIRTPAFMPVGTAGTVKAMYLDQVRDLGADIILGNTYHLMLRPGAERVARLGGLHSLIRWKYPILTDSGGFQVMSLAALRQIDEKKGVTFKSHIDGSVHHMSPERSIEIQGLLGSDIQMQLDECVRLPAERAEIEKSTEMSLRWAERCREAFGDQPGKAMFGIVQGGDIPDLRVRSARGLADLDLKGYAVGGLAVGEPQEVMLAMLETTLPELPTTKPRYLMGVGTPDDILKSVSRGIDMFDCVMPTRAGRHGLAFTRRGKVNLRNARHAEDLRPLDAESYCPAARDYSRAYLHHLVRANESLAGMLLTWNNLHYYQSLMQGIRAAIAEGRYADFMAETQEGWARGDIAPV

SEQ ID NO: 59994 - protein, 377 aa, unidentified
  source 1..377: note = Rhizobiales bacterium
  REGION 1..377: note = tr|A0A1M3MHW0|A0A1M3MHW0_9RHIZ Queuine tRNA-ribosyltransferase OS=Rhizobiales bacterium 63-22; OX = 1895812 GN=tgt PE=3 SV=1
MTTENFQFKVLATDGAARRGEISMPRGVVRTPAFMPVGTAGTVKAMYMDQVKELGADIILGNTYHLMLRPGAERVARLGGLHEFGGWKGPILTDSGGFQVMSLAQLRKLNEQGVTFRSHIDGKAYEMSPERSIEIQGLLDSDIQMQLDECVALPSPEKNTERAMELSLRWAERCKAAFGEQAGKAMFGIVQGGDVARLRERSAEALKAMDLKGYSIGGLAVGEPQAVMLDMLEVVCPILPSEKPRYLMGVGTPDDMLKSVARGVDMFDCVMPTRAGRHGLAFTRFGKVNLRNARHAEDHRPLDPESNCPAARDYSRAYLHHLVKSGEALGAMLLTWNNLAYYQYLMQGIRAAISEGRFADFAAETTAGWERGDMPAL

SEQ ID NO: 59995 - protein, 376 aa, unidentified
  source 1..376: note = Rhizobiales bacterium
  REGION 1..376: note = tr|A0A1H4VBB1|A0A1H4VBB1_9RHIZ Queuine tRNA-ribosyltransferase OS=Rhizobiales bacterium GAS188; OX = 1884351 GN=tgt PE=3 SV=1
MTSFSFKIEARDGAARQGEIATPRGAIRTPAFMPVGTAATVKAMYPAEVRALGADIVLANTYHLMLRPGAERVAALGGLHRFMNWERPIITDSGGFQVMSLANLRKISERGVTFRSHIDGSAHELTPERAIEIQNLLGSDIVMQLDECVALPASDEVAEKAMRLSLAWAERCQKAFGRPEGRALFGIVQGGASESLRVESATALAAMQFQGYAIGGLAVGEPQEVMLRMIEATEPHLPRDKPRYLMGVGTPDDLIRSVERGIDMFDCVMPTRAGRHGLAYTRFGKVNLKNARHADDPRPLDGQSTSAAARDWSRAYLHHLTKAGEILGMMMLTAVNIAYYQELMGELRAAIAAGRLTDAIGEIREGWARGEADAKG

SEQ ID NO: 59996 - protein, 376 aa, unidentified
  source 1..376: note = Rhizobium acidisoli
  REGION 1..376: note = tr|A0A0N1ME92|A0A0N1ME92_9RHIZ Queuine tRNA-ribosyltransferase OS=Rhizobium acidisoli OX=1538158; GN = tgt PE=3 SV=1
MTENFQFTLKKTDAGARLGEISMPRGTIRTPAFMPVGTVGTVKAMYLDQVRETGADIILGNTYHLMLRPSAERVARLGGLHKLIRWEHPILTDSGGFQVMSLSGLRKLDEQGVTFKSHVDGSLHHMSPERSIEIQGLLGSDIQMQLDECVALPAEPREIERAMEMSLRWAERCRVAFGEQPGKAMFGIVQGGDIPALRVRSAQALSELDLKGYAIGGLAVGEPQDVMLQMLDTTLPVLPGEKPRYLMGVGTPDDILKSVARGIDMFDCVMPTRSGRHGLAFTRRGKVNIRNARHAEDMRPLDDQSNCPASRDYSRAYLHHLVRSNEALGGMLLSWNNLAYYQELMQGIRKAIAEGRFADFMAETMEEWARGDLDPV

SEQ ID NO: 59997 - protein, 376 aa, unidentified
  source 1..376: note = Rhizobium aethiopicum
  REGION 1..376: note = tr|A0A1C3XWQ5|A0A1C3XWQ5_9RHIZ Queuine tRNA-ribosyltransferase OS=Rhizobium aethiopicum; OX = 1138170 GN=tgt PE=3 SV=1
MTENFQFTLEKTDAGARLGEISMPRGTIRTPAFMPVGTVGTVKAMYLDQVRETGADIILGNTYHLMLRPTAERVARLGGLHKLIRWEHPILTDSGGFQVMSLSGLRKLDEQGVTFKSHVDGSLHHMSPERSIEIQGLLGSDIQMQLDECVALPAEPKEIERAMEMSLRWAERCKVAFGEQPGKAMFGIVQGGDIPALRVRSAKALSELDLKGYAIGGLAVGEPQDVMLQMLETTLPVLPLEKPRYLMGVGTPDDILKSVARGIDMFDCVMPTRSGRHGLAFTRRGKVNIRNARHAEDMRPLDEQSNCPASRDYSRAYLHHLVRANEALGGMLLSWHNLAYYQELMQGIRKAIAEGRFADFMAETMEEWARGDLDPV

SEQ ID NO: 59998 - protein, 376 aa, unidentified
  source 1..376: note = Rhizobium album
  REGION 1..376: note = tr|A0A2U2DT12|A0A2U2DT12_9RHIZ Queuine tRNA-ribosyltransferase OS=Rhizobium album OX=2182425; GN = tgt PE=3 SV=1
MSETFQFNLKKVEGSARLGEITMPRGTIRTPAFMPVGTVGTVKAMYLDQVRDSGADIILGNTYHLMLRPGPERVARLGGLHELIRWPHPILTDSGGFQVMSLSSLRKLDEQGVTFKSHVDGSTHHMSPERSIEIQGLLDSDIQMQLDECVALPAEPKDIERAMEMSLRWAERCRVAFGEQPGKAMFGIVQGGDVQALRVRSAEGLKQLDLKGYAVGGLAVGEPQPVMLDMLDITLPVLPTEKPRYLMGVGTPDDILKSVARGIDMFDCVMPTRSGRHGLAFTRRGKVNIRNARHAEDSRPLDEESTCPAARDYSRAYLHHLVRSNEALGGMLLSWNNLHYYQELMQGIRKSIAEGRFRDFYAETLENWAQGDIPPR

SEQ ID NO: 59999 - protein, 376 aa, unidentified
  source 1..376: note = Rhizobium altiplani
  REGION 1..376: note = tr|A0A109JLC0|A0A109JLC0_9RHIZ Queuine tRNA-ribosyltransferase OS=Rhizobium altiplani OX=1864509; GN = tgt PE=3 SV=1
MTENFQFTLKKTDAGARLGEVSMPRGTIRTPAFMPVGTVGTVKAVYLDQVRDTGADIILGNTYHLMLRPTAERVARLGGLHRLIRWEHPILTDSGGFQVMSLSGLRKLDEQGVTFKSHVDGSLHHMSPERSIEIQGLLDSDIQMQLDECVALPAEPREIERAMELSLRWAERCKVAFGNQPGKAMFGIVQGGDVPALRVRSAAALTDLDLKGYAVGGLAVGEPQEVMLKMLEETLPVLPTEKPRYLMGVGTPDDILKSVARGIDMFDCVMPTRSGRHGLAFTRRGKVNIRNARHAEDMRPLDEQSNCPASRDYSRAYLHHLVRANEALGGMLLSWHNLAYYQELMQGIRKSIVEGRFVDFMAETMEEWARGDLDPV

SEQ ID NO: 60000 - protein, 376 aa, unidentified
  source 1..376: note = Rhizobium anhuiense
  REGION 1..376: note = tr|A0A3S0SEF6|A0A3S0SEF6_9RHIZ Queuine tRNA-ribosyltransferase OS=Rhizobium anhuiense OX=1184720; GN = tgt PE=3 SV=1
MTDHFQFTLDKTDAGARLGKISMPRGEIRTPAFMPVGTVGTVKAMYLDQVRETGADIILGNTYHLMLRPTAERVARLGGLHKLIRWEHPILTDSGGFQVMSLSGLRKLDEQGVTFKSHVDGSLHHMSPERSIEIQGLLGSDIQMQLDECVALPAEPKEIERAMEMSLRWAERCRVAFGEQPGKAMFGIVQGGDIPALRIRSAEALSQLDLKGYAIGGLAVGEPQDVMLQMLETTLPVLPLEKPRYLMGVGTPDDILKSVARGIDMFDCVMPTRSGRHGLAFTRRGKVNIRNARHAEDMRPLDEQSNCPASRDYSRAYLHHLVRSNEALGGMLLSWNNLAYYQELMQGIRKAIAEGRFADFMAETQEEWARGDLQPV

SEQ ID NO: 60001 - protein, 376 aa, unidentified
  source 1..376: note = Rhizobium azibense
  REGION 1..376: note = tr|A0A4R8ANC7|A0A4R8ANC7_9RHIZ Queuine tRNA-ribosyltransferase OS=Rhizobium azibense OX=1136135; GN = tgt PE=3 SV=1
MTENFQFTLRRTDAGARLGEISMPRGTIRTPAFMPVGTVGTVKAMYLDQVRETGADIILGNTYHLMLRPTAERVARLGGLHSLIRWEHPILTDSGGFQVMSLSGLRKLDEQGVTFKSHVDGSLHHMSPERSIEIQGLLDSDIQMQLDECVALPAEPREIERAMELSLRWAERCKVAFGNQLGKAMFGIVQGGDIPALRIRSAEELAQLDLKGYAVGGLAVGEPQDVMLKMLDETLPVLPGEKPRYLMGVGTPDDILKSVARGIDMFDCVMPTRSGRHGLAFTRRGRVNIRNARHAEDLRPLDEQSNCPASRDYSRAYLHHLVRANEALGGMLLSWHNLSYYQELMQGTRTAIAEGRFADFMSETQEEWAKGDLERA

SEQ ID NO: 60002 - protein, 376 aa, unidentified
  source 1..376: note = Rhizobium azibense
  REGION 1..376: note = tr|A0A4R3RJS2|A0A4R3RJS2_9RHIZ Queuine tRNA-ribosyltransferase OS=Rhizobium azibense OX=1136135; GN = tgt PE=3 SV=1
MTENFQFTLRRTDAGARLGEISMPRGTIRTPAFMPVGTVGTVKAMYLDQVRETGADIILGNTYHLMLRPTAERVARLGGLHSLIRWEHPILTDSGGFQVMSLSGLRKLDEQGVTFKSHVDGSLHHMSPERSIEIQGLLGSDIQMQLDECVALPAEPREIERAMELSLRWAERCKVAFGNQAGKAMFGIVQGGDIPALRIRSAEELKQLDLKGYAVGGLAVGEPQDVMLKMLEETLPVLPGEKPRYLMGVGTPDDILKSVARGIDMFDCVMPTRSGRHGLAFTRRGRVNIRNARHAEDLRPLDEQSNCPASRDYSRAYLHHLVRANEALGGMLLSWHNLSYYQELMQGIRTAIAEGRFADFMAETLEEWAKGDLERA

SEQ ID NO: 60003 - protein, 376 aa, unidentified
  source 1..376: note = Rhizobium esperanzae
  REGION 1..376: note = tr|A0A246DW46|A0A246DW46_9RHIZ Queuine tRNA-ribosyltransferase OS=Rhizobium esperanzae OX=1967781; GN = tgt PE=3 SV=1
MTENFQFTLEKSDAGARLGEISMPRGTIRTPAFMPVGTVGTVKAMYLDQVRETGADIILGNTYHLMLRPTAERVARLGGLHKLIRWEHPILTDSGGFQVMSLSGLRQLDEQGVTFKSHVDGSLHHMSPERSIEIQGLLGSDIQMQLDECVALPAEPKEIERAMEMSLRWAERCKVAFGEQPGKAMFGIVQGGDIPALRVRSAEELTKLDLKGYAVGGLAVGEPQDVMLNMLKETLPVLPVEKPRYLMGVGTPDDILKSVARGIDMFDCVMPTRSGRHGLAFTRRGKVNIRNARHAEDMRPLDEQSNCPASRDYSRAYLHHLVRANEALGGMLLSWHNLAYYQELMQGIRKAIAEGRFADFMAETMEEWARGDLDPV

SEQ ID NO: 60004 - protein, 376 aa, Rhizobium etli
  REGION 1..376: note = tr|F2A5L5|F2A5L5_RHIET Queuine tRNA-ribosyltransferase OS=Rhizobium etli CNPAF512; OX = 993047 GN=tgt PE=3 SV=1
MTENFQFTLKRTDAGARLGEISMPRGAIRTPAFMPVGTVGTVKAMYLDQVRETGADIILGNTYHLMLRPTAERVARLGGLHKLVRWEHPILTDSGGFQVMSLSGLRKLDEQGVTFKSHVDGSLHHMSPERSIEIQGLLDSDIQMQLDECVALPAEPKEIERAMEMSLRWAERCRVAFGEQPGKAMFGIVQGGDIPALRIRSAEALSQLDLKGYAVGGLAVGEPQDVMLRMLETTLPVLPGEKPRYLMGVGTPDDILKSVARGIDMFDCVMPTRSGRHGLAFTRRGKVNIRNARHAEDMRPLDEKSTCPASRDYSRAYLHHLVRANEALGGMLLSWHNLAYYQELMQGIRKAIAEGRFADFMAETMEEWARGDLDPV

SEQ ID NO: 60005 - protein, 376 aa, Rhizobium etli
  REGION 1..376: note = tr|A0A0A8GCM2|A0A0A8GCM2_RHIET Queuine tRNA-ribosyltransferase OS=Rhizobium etli bv. phaseoli str. IE4803 OX=1432049 GN=tgt PE=3 SV=1
MTENFQFTLKKTDAGARLGEISMPRGEIRTPAFMPVGTVGTVKAMYLDQVRESGADIILGNTYHLMLRPTAERVARLGGLHKLIRWEHPILTDSGGFQVMSLSGLRRLDEHGVTFKSHVDGSLHHMSPERSIEIQGLLGSDIQMQLDECVALPAEPREIERAMEMSLRWAERCRVAFGEQPGKAMFGIVQGGDIPALRVRSAEALSQLDLKGYAVGGLAVGEPQDVMLRMLETTLPVLPSEKPRYLMGVGTPDDILKSVARGIDMFDCVMPTRSGRHGLAFTRRGKVNIRNARHAEDMRPLDEQSNCPASRDYSRAYLHHLVRANEALGGMLLSWHNLAYYQELMQGIRKAIAEGRFADFMAETQEEWARGDLEPV

SEQ ID NO: 60006 - protein, 376 aa, unidentified
  source 1..376: note = Rhizobium favelukesii
  REGION 1..376: note = tr|W6RBB7|W6RBB7_9RHIZ Queuine tRNA-ribosyltransferase OS=Rhizobium favelukesii OX=348824; GN = tgt PE=3 SV=1
MTENFQFTLKKTDAGARLGEVSMPRGTVRTPAFMPVGTVGTVKAMYLDQVRETGADIILGNTYHLMLRPTAERVARLGGLHKLIRWEHPILTDSGGFQVMSLSGLRKLDEQGVTFKSHVDGSLHHMSPERSIEIQGLLGSDIQMQLDECVALPAEPREIERAMELSLRWAERCKVAFGNQPGKAMFGIVQGGDVPSLRIRSAEALSELDLKGYAVGGLAVGEPQDVMLKMLEETLPVLPTEKPRYLMGVGTPDDILKSVARGIDMFDCVMPTRSGRHGLAFTRRGKVNIRNARHAEDMRPLDDQSNCPASRDYSRAYLHHLVRANEALGGMLLSWHNLAYYQELMQGIRKAIAEGRFADFMAETQEEWARGDLEPV

SEQ ID NO: 60007 - protein, 376 aa, unidentified
  source 1..376: note = Rhizobium fredii
  REGION 1..376: note = tr|A0A2A6M3Z9|A0A2A6M3Z9_RHIFR Queuine tRNA-ribosyltransferase OS=Rhizobium fredii OX=380 GN=tgt; PE = 3 SV=1
MTETFQFKLLATDGKARRGEVSMPRGTIRTPAFMPVGTVGTVKAMYLDQVRELGADIILGNTYHLMLRPGAERVARLGGLHTFIRWERPILTDSGGFQVMSLSSLRKLNEQGVTFKSHVDGALYHMSPERSIEIQGLLDSDIQMQLDECVALPAEPGEIERAMEMSIRWAERCKVAFGDQPGKAMFGIVQGGDLPKLRERSALALKELDLKGYAIGGLAVGEPQEVMLDMLDVTCPLLPAEKPRYLMGVGTPDDILKSVAHGIDMFDCVMPTRSGRHGLAFTRYGRINLRNARHAEDTRPLDEQSSCPAARDYSRAYLHHLIRSNESLGGMLLSWSNLAYYQELMAGIRKAIEEGRYADFMAETQEGWERGDLAPV

SEQ ID NO: 60008 - protein, 376 aa, unidentified; identical to SEQ ID NO: 60007
  source 1..376: note = Rhizobium fredii
  REGION 1..376: note = tr|G9A6U7|G9A6U7_RHIFH Queuine tRNA-ribosyltransferase OS=Rhizobium fredii (strain HH103); OX = 1117943 GN=tgt PE=3 SV=1

SEQ ID NO: 60009 - protein, 376 aa, unidentified
  source 1..376: note = Rhizobium freirei
  REGION 1..376: note = tr|N6V7Z6|N6V7Z6_9RHIZ Queuine tRNA-ribosyltransferase OS=Rhizobium freirei PRF 81; OX = 363754 GN=tgt PE=3 SV=1
MSESFQFQLKKTDGGARLGEVSMPRGTIRTPAFMPVGTVGTVKAMYLDQVRETGADIILGNTYHLMLRPTAERVARLGGLHQLIRWPHPILTDSGGFQVMSLSGLRKLDEQGVTFKSHVDGSLHHMSPERSIEIQGLLDSDIQMQLDECVALPATPKDIERAMEMSLRWAERCKVAFGNQPGKAMFGIVQGGDVPELRVRSAQALSSMDLKGYAVGGLAVGEPQEVMLRMLEITLPELPREKPRYLMGVGTPDDILKSVARGIDMFDCVMPTRSGRHGLAFTRRGKVNIRNARHAEDMRPLDEQSSCPASRDYSRAYLHHLVRANEALGGMLLSWHNLAYYQELMQGIRQAIAEGRFADFMAETQENWARGDLEPV

SEQ ID NO: 60010 - protein, 376 aa, Rhizobium galegae
  REGION 1..376: note = tr|A0A5J5KNB0|A0A5J5KNB0_RHIGA tRNA guanosine(34) transglycosylase Tgt OS=Rhizobium galegae OX=399 GN=tgt; PE = 4 SV=1
MTETFQFNLKATDGGARLGEITMPRGTIRTPAFMPVGTVGTVKAMYLDQVRDTGADIILGNTYHLMLRPGAERVARLGGLHELIRWKHPILTDSGGFQVMSLSGLRKLDEKGVTFKSHVDGSLHHMSPERSIEIQGLLGSDIQMQLDECVALPAEPKEIERAMELSLRWAERCRVAFGDQPGKAMFGIVQGGDQPELRIRSAEGLKQLDLKGYAVGGLAVGEPQDVMLKMLETTLPVLPFEKPRYLMGVGTPDDMLKSVARGIDMFDCVMPTRSGRHGLAFTRRGKVNIRNARHAEDMRPLDEESSCPAARDYSRAYLHHLVRADEALGGMLLSWNNLNYYQDLMKGIRQAIAEGRFADFYAETQEMWAKGDIDPV

SEQ ID NO: 60011 - protein, 376 aa, Rhizobium gallicum
  REGION 1..376: note = tr|A0A1L5NIG7|A0A1L5NIG7_9RHIZ Queuine tRNA-ribosyltransferase OS=Rhizobium gallicum OX=56730; GN = tgt PE=3 SV=1
MTENFQFTLRRTDAGARLGEISMPRGTIRTPAFMPVGTVGTVKAMYLDQVRETGADIILGNTYHLMLRPTAERVARLGGLHSLIRWEHPILTDSGGFQVMSLSGLRKLDEQGVTFKSHVDGSLHHMSPERSIEIQGLLDSDIQMQLDECVALPAEPREIERAMELSLRWAERCKVAFGNQLGKAMFGIVQGGDIPALRIRSAEELAQLDLKGYAVGGLAVGEPQDVMLKMLEETLPVLPGDKPRYLMGVGTPEDILKSVARGIDMFDCVMPTRSGRHGLAFTRRGRVNIRNARHAEDLRPLDEQSNCPASRDYSRAYLHHLVRANEALGGMLLSWHNLSYYQELMQGIRTAIAEGRFADFMAETQEEWAKGDLERA

SEQ ID NO: 60012 - protein, 376 aa, Rhizobium gallicum; identical to SEQ ID NO: 60001
  REGION 1..376: note = tr|A0A0B4X245|A0A0B4X245_9RHIZ Queuine tRNA-ribosyltransferase OS=Rhizobium gallicum bv. gallicum R602 OX=1418105 GN=tgt PE=3 SV=1

SEQ ID NO: 60013 - protein, 376 aa, unidentified
  source 1..376: note = Rhizobium grahamii
  REGION 1..376: note = tr|A0A370KS22|A0A370KS22_9RHIZ Queuine tRNA-ribosyltransferase OS=Rhizobium grahamii OX=1120045; GN = tgt PE=3 SV=1
MTENFQFTLKKTDAGARLGEVSMPRGTIRTPAFMPVGTVGTVKAMYLDQVRDTGADIILGNTYHLMLRPTAERVARLGGLHKLIRWEHPILTDSGGFQVMSLSGLRKLDEQGVTFKSHVDGSLHHMSPERSIEIQGLLDSDIQMQLDECVALPAEPREIERAMELSLRWAERCKIAFGNQPGKAMFGIVQGGDVPALRVRSAAALTDLDLKGYAVGGLAVGEPQDVMLKMLEETLPVLPTEKPRYLMGVGTPDDMLKSVARGIDMFDCVMPTRSGRHGLAFTRRGKVNIRNARHAEDMRPLDDQSNCPASRDYSRAYLHHLVRANEALGGMLLSWHNLAYYQELMQGIRKAIAEGRFADFMAETQEEWARGDLEPV

SEQ ID NO: 60014 - protein, 376 aa, unidentified
  source 1..376: note = Rhizobium grahamii
  REGION 1..376: note = tr|S3HKV0|S3HKV0_9RHIZ Queuine tRNA-ribosyltransferase OS=Rhizobium grahamii CCGE 502; OX = 990285 GN=tgt PE=3 SV=1
MTENFQFTLKKTDAGARLGEVSMPRGTIRTPAFMPVGTVGTVKAMYLEQVRDTGADIILGNTYHLMLRPTAERVARLGGLHKLIRWEHPILTDSGGFQVMSLSGLRKLDEQGVTFKSHVDGSLHHMSPERSIEIQGLLDSDIQMQLDECVALPAEPREIERAMELSLRWAERCKIAFGNQPGKAMFGIVQGGDVPALRVRSAAALTDLDLKGYAVGGLAVGEPQDVMLKMLEETLPVLPTEKPRYLMGVGTPDDILKSVARGIDMFDCVMPTRSGRHGLAFTRRGKVNIRNARHAEDMRPLDDQSNCTASRDYSRAYLHHLVRANEALGGMLLSWHNLAYYQELMQGIRKAIAEGRFADFMAETQAEWARGDLEPA

SEQ ID NO: 60015 - protein, 376 aa, Rhizobium hainanense
  REGION 1..376: note = tr|A0A1C3UPC3|A0A1C3UPC3_9RHIZ Queuine tRNA-ribosyltransferase OS=Rhizobium hainanense OX=52131; GN = tgt PE=3 SV=1
MSESFQFQLKKTDGGARLGEVSMPRGTIRTPAFMPVGTVGTVKAMYLDQVRETGADIILGNTYHLMLRPTAERVARLGGLHQLIRWPHPILTDSGGFQVMSLSGLRKLDEQGVTFKSHVDGSLHHMSPERSIEIQGLLDSDIQMQLDECVALPATPKEIERAMEMSLRWADRCKVAFGNQPGKAMFGIVQGGDVPELRVRSAQALSSMDLKGYAVGGLAVGEPQEVMLRMLEITLPELPTEKPRYLMGVGTPDDILKSVARGIDMFDCVMPTRSGRHGLAFTRRGKVNIRNARHAEDMRPLDEQSNCPASRDYSRAYLHHLVRANEALGGMLLSWHNLAYYQELMQGIRQAIAEGRFADFMAETMENWARGDLEPV

SEQ ID NO: 60016 - protein, 376 aa, unidentified
  source 1..376: note = Rhizobium hidalgonense
  REGION 1..376: note = tr|A0A2A6KHM2|A0A2A6KHM2_9RHIZ Queuine tRNA-ribosyltransferase OS=Rhizobium hidalgonense; OX = 1538159 GN=tgt PE=3 SV=1
MTETFQFTLDKTDAGARLGKISMPRGEIRTPAFMPVGTVGTVKAMYLDQVRETGADIILGNTYHLMLRPTAERVARLGGLHKLIRWEHPILTDSGGFQVMSLSGLRKLDEQGVTFKSHVDGSLHHMSPERSIEIQGLLGSDIQMQLDECVALPAEPKEIERAMEMSLRWAERCRVAFGEQPGKAMFGIVQGGDIPALRIRSAQALSQLDLKGYAIGGLAVGEPQDVMLQMLETTLPVLPGQKPRYLMGVGTPDDILKSVARGIDMFDCVMPTRSGRHGLAFTRRGKVNIRNARHAEDMRPLDEQSNCPASRDYSRAYLHHLVRSNEALGGMLLSWNNLAYYQELMQGIRKAIAEGRFADFMAETQEEWARGDLQPV

SEQ ID NO: 60017 - protein, 376 aa, unidentified
  source 1..376: note = Rhizobium ipomoeae
  REGION 1..376: note = tr|A0A4S8P4Y6|A0A4S8P4Y6_9RHIZ Queuine tRNA-ribosyltransferase OS=Rhizobium ipomoeae OX=1210932; GN = tgt PE=3 SV=1
MSENFTFNLKATSGKARLGEITMPRGTVRTPAFMPVGTVGTVKAMYLDQVKEGGADIILGNTYHLMLRPGPERVARLGGLHKLIRWPGPILTDSGGFQVMSLSGLRKLDEQGVTFKSHIDGSLHHMSPERSIEIQGLLDSDIQMQLDECVSLPNEPREIERAMELSLRWAERCRVAFGNQPGKAMFGIVQGGDQPALRIRSAEGLKQLDLKGYSIGGLAVGEPQAVMLDMLRITLPVLPTEKPRYLMGVGTPDDMLKSVAEGIDMFDCVMPTRSGRHGLAFTRRGKVNIRNARHAEDMRPLDEQSSCPAARDYSRAYLHHLVRSNEALGGMLLSWNNLSYYQELMQGIRQAIAEDRFEDFKAETIEMWARGDIDPV

SEQ ID NO: 60018 - protein, 376 aa, unidentified
  source 1..376: note = Rhizobium jaguaris
  REGION 1..376: note = tr|A0A387FUQ8|A0A387FUQ8_9RHIZ Queuine tRNA-ribosyltransferase OS=Rhizobium jaguaris OX=1312183; GN = tgt PE=3 SV=1
MSESFQFQLKKTDGGARLGEVSMPRGTIRTPAFMPVGTVGTVKAMYLDQVRETGADIILGNTYHLMLRPTAERVARLGGLHELIRWRHPILTDSGGFQVMSLSGLRKLDEKGVTFKSHVDGSTHHMSPERSIEIQGLLGSDIQMQLDECVALPATPKEIERAMELSLRWAERCKVAFGDQPGKAMFGIVQGGDVQELRVRSAQALKQMDLKGYAVGGLAVGEPQDVMLRMLELTLPELPADKPRYLMGVGTPDDILKSVARGIDMFDCVMPTRSGRHGLAFTRRGKVNIRNARHAEDMRPLDDQSTCPASRDYSRAYLHHLVRANEALGGMLLSWHNLAYYQELMQGIRQAIAEGRFADFMAETQENWARGDLEPA

SEQ ID NO: 60019 - protein, 376 aa, unidentified
  source 1..376: note = Rhizobium laguerreae
  REGION 1..376: note = tr|A0A1S9G6Y6|A0A1S9G6Y6_9RHIZ Queuine tRNA-ribosyltransferase OS=Rhizobium laguerreae OX=1076926; GN = tgt PE=3 SV=1
MTDNFQFTLKKTDAGARLGQISMPRGEIRTPAFMPVGTVGTVKAMYLDQVRETGADIILGNTYHLMLRPTAERVARLGGLHKLIRWEHPILTDSGGFQVMSLSGLRKLDEQGVTFKSHVDGSLHHMSPERSIEIQGLLGSDIQMQLDECVALPAEPKEIERAMEMSLRWAERCRVAFGEQPGKAMFGIVQGGDIPALRIRSAEALAQLDLKGYAIGGLAVGEPQDVMLQMLETTLPVLPLEKPRYLMGVGTPDDILKSVARGIDMFDCVMPTRSGRHGLAFTRRGKVNIRNARHAEDMRPLDEQSNCPASRDYSRAYLHHLVRSNEALGGMLLSWHNLAYYQELMQGIRKAIAEGRFADFMAETQEQWARGDLEPV

SEQ ID NO: 60020 - protein, 376 aa, Rhizobium leguminosarum
  REGION 1..376: note = tr|A0A154IIL7|A0A154IIL7_RHILE Queuine tRNA-ribosyltransferase OS=Rhizobium leguminosarum OX=384; GN = tgt PE=3 SV=1
MTDNFQFTLDKTDAGARLGQISMPRGEIRTPAFMPVGTVGTVKAMYLDQVRETGADIILGNTYHLMLRPTAERVARLGGLHKLIRWEHPILTDSGGFQVMSLSGLRKLDEQGVTFKSHVDGSLHHMSPERSIEIQGLLGSDIQMQLDECVALPAEPKEIERAMEMSLRWAERCRVAFGEQPGKAMFGIVQGGDIPALRIRSAEALSQLDLKGYAIGGLAVGEPQDVMLQMLETTLPVLPLEKPRYLMGVGTPDDILKSVARGIDMFDCVMPTRSGRHGLAFTRRGKVNIRNARHAEDMRPLDEQSNCPASRDYSRAYLHHLVRANEALGGMLLSWHNLAYYQELMQGIRKAIAEGRFADFMAETQEEWARGDLEPV

SEQ ID NO: 60021 - protein, 376 aa, Rhizobium leguminosarum
  REGION 1..376: note = tr|J0V089|J0V089_RHIL1 Queuine tRNA-ribosyltransferase OS=Rhizobium leguminosarum bv. viciae (strain WSM1455) OX=755176 GN=tgt PE=3 SV=1
MTDNFQFTLKKTDAGARVGQISMPRGEIRTPAFMPVGTVGTVKAMYLDQVRETGADIILGNTYHLMLRPTAERVARLGGLHKLIRWEHPILTDSGGFQVMSLSGLRKLDEQGVTFKSHVDGSLHHMSPERSIEIQGLLGSDIQMQLDECVALPAEPKEIERAMEMSLRWAERCRVAFGEQPGKAMFGIVQGGDIPALRIRSAEALAQLDLKGYAIGGLAVGEPQDVMLQMLETTLPVLPLEKPRYLMGVGTPDDILKSVARGIDMFDCVMPTRSGRHGLAFTRRGKVNIRNARHAEDMRPLDEQSNCPASRDYSRAYLHHLVRSNEALGGMLLSWHNLAYYQELMQGIRKAIAEGRFADFMAETQEEWARGDLEPV

SEQ ID NO: 60022 - protein, 376 aa, Rhizobium loessense
  REGION 1..376: note = tr|A0A1G4T3C4|A0A1G4T3C4_9RHIZ Queuine tRNA-ribosyltransferase OS=Rhizobium loessense OX=158890; GN = tgt PE=3 SV=1
MTENFQFTLRRTDAGARLGEISMPRGTIRTPAFMPVGTVGTVKAMYLDQVRETGADIILGNTYHLMLRPTAERVARLGGLHSLIRWEHPILTDSGGFQVMSLSGLRKLDEQGVTFKSHVDGSLHHMSPERSIEIQGLLGSDIQMQLDECVALPAEPREIERAMELSLRWAERCKIAFGNQLGKAMFGIVQGGDIPALRIRSAEELAQLDLKGYAVGGLAVGEPQDVMLKMLEETLPVLPGEKPRYLMGVGTPDDILKSVARGIDMFDCVMPTRSGRHGLAFTRRGKVNIRNARHAEDVRPLDEESNCPASRDYSRAYLHHLVRANEALGGMLLSWHNLSYYQELMQGIRTAIAEDRFADFMAETQEEWAKGDLERA

SEQ ID NO: 60023 - protein, 376 aa, unidentified
  source 1..376: note = Rhizobium loti
  REGION 1..376: note = tr|A0A1A5R579|A0A1A5R579_RHILI Queuine tRNA-ribosyltransferase OS=Rhizobium loti OX=381 GN=tgt; PE = 3 SV=1
MAKPFTFKVLATDGKARRGVIDMPRGEIRTPAFMPVGTGGTVKAMYMDQVRGVGADIILGNTYHLMLRPGAERVARLGGLHEFARWPHPILTDSGGFQVMSLSKLRKLTEKGVTFRSHIDGAAYEMSPERSIEIQGLLDSDIQMQLDECTALPAELKEIERAMELSLRWAERCKTAFGDQPGKAMFGIVQGGDNAALRIRSAQALSAMELKGYAVGGLAVGEPQAVMLEMLDITCPVLPHNKPRYLMGVGTPDDILKSVARGIDMFDCVMPTRAGRHGLAYTRRGKVNLRNARHADDPRPLDEESDCPAARGYSRAYLHHLVRSQEALGAMLLTWNNLSYYQKLMQDIRAAIETGSFDVRGAEITEGWARGDIPVL

SEQ ID NO: 60024 - protein, 376 aa, unidentified
  source 1..376: note = Rhizobium loti
  REGION 1..376: note = tr|A0A2T3E446|A0A2T3E446_RHILI Queuine tRNA-ribosyltransferase OS=Rhizobium loti OX=381 GN=tgt; PE = 3 SV=1
MTETFQFKLLAADGNARRGEVVTPRGTIRTPAFMPVGTVGTVKAMYLDQVRDLGADIILGNTYHLMLRPGAERVARLGGLHKFIRWERPILTDSGGFQVMSLSSLRKLNEQGVTFKSHVDGALYHMSPERSIEIQGLLGSDIQMQLDECVALPAEPDEIERAMEMSLRWAERCKVAFGDQPGKAMFGIVQGGDIPRLRERSALALRDLDLKGYAVGGLAVGEPQEVMLGMLDVTCPVLPADKPRYLMGVGTPDDILKSVAHGIDMFDCVMPTRSGRHGLAFTRYGRINLRNARHAEDTRPLDEQSSCPATRDYSRAYLHHLIRSNESLGGMLLSWNNLAYYQELMAGIRKAIEEGRYTDFMAETMEGWQRGDLPPV

SEQ ID NO: 60025 - protein, 376 aa, Rhizobium lusitanum
  REGION 1..376: note = tr|A0A1C3VHN9|A0A1C3VHN9_9RHIZ Queuine tRNA-ribosyltransferase OS=Rhizobium lusitanum OX=293958; GN = tgt PE=3 SV=1
MSESFQFQLKKTDGGARLGEVSMPRGTIRTPAFMPVGTVGTVKAMYLDQVRETGADIILGNTYHLMLRPTAERVARLGGLHELIRWKHPILTDSGGFQVMSLSGLRKLDEKGVTFKSHVDGSLHHMSPERSIEIQGLLGSDIQMQLDECVALPSTPKEIERAMEMSLRWADRCKAAFGDQPGKAMFGIVQGGDIPDLRVRSAQALSGLDLKGYAVGGLAVGEPQEVMLRMLEITLPELPTEKPRYLMGVGTPDDILKSVARGIDMFDCVMPTRSGRHGLAFTRRGKVNIRNARHAEDMRPLDQQSSCPASRDYSRAYLHHLVRANEALGGMLLSWHNLAYYQELMQGIRQAIAEDRFADFMAETQENWARGDLEPV

SEQ ID NO: 60026 - protein, 376 aa, unidentified
  source 1..376: note = Rhizobium meliloti
  REGION 1..376: note = tr|A0A437GJX4|A0A437GJX4_RHIML Queuine tRNA-ribosyltransferase OS=Rhizobium meliloti OX=382; GN = tgt PE=3 SV=1
MTEAFQFKLLANDGNARRGEVVTPRGTIRTPAFMPVGTVGTVKAMYLDQVRDLGADIILGNTYHLMLRPGAERVARLGGLHKFIRWERPILTDSGGFQVMSLSSLRKLNEQGVTFKSHVDGALYHMSPERSIEIQGLLGSDIQMQLDECVALPAEPDEIERAMEMSLRWAERCKVAFGDQPGRAMFGIVQGGDIPRLRERSALALRDLDLKGYAVGGLAVGEPQEVMLGMLDVTCPVLPADKPRYLMGVGTPDDILKSVAHGIDMFDCVMPTRSGRHGLAFTRYGRINLRNARHAEDTRPLDEQSSCPATRDYSRAYLHHLIRSNESLGGMLLSWSNLAYYQELMAGIRKAIEEGRYTDFMAETMEGWQRGDLPPV

SEQ ID NO: 60027 - protein, 376 aa, unidentified; identical to SEQ ID NO: 60024
  source 1..376: note = Rhizobium meliloti
  REGION 1..376: note = sp|Q92PY4|TGT_RHIME Queuine tRNA-ribosyltransferase; OS = Rhizobium meliloti (strain 1021) OX=266834 GN=tgt PE=3; SV = 1

SEQ ID NO: 60028 - protein, 376 aa, unidentified
  source 1..376: note = Rhizobium mesoamericanum
  REGION 1..376: note = tr|K0PWI6|K0PWI6_9RHIZ Queuine tRNA-ribosyltransferase OS=Rhizobium mesoamericanum STM3625 OX=1211777 GN=tgt PE=3 SV=1
MTEKFQFTLKKTDAGARLGEVSMPRGTIRTPAFMPVGTVGTVKAMYLDQVRDTGADIILGNTYHLMLRPTAERVARLGGLHKLIRWEHPILTDSGGFQVMSLSGLRKLDEQGVTFKSHVDGSLHHMSPERSIEIQGLLDSDIQMQLDECVALPAEPREIERAMELSLRWAERCKVAFGNQPGKAMFGIVQGGDVPALRIRSAAALTNLDLKGYAVGGLAVGEPQDVMLKMLEETLPVLPTEKPRYLMGVGTPDDILKSVARGIDMFDCVMPTRSGRHGLAFTRRGKVNIRNARHAEDMRPLDEQSNCPASRDYSRAYLHHLVRANEALGGMLLSWHNLAYYQELMQGIRKAISEGHFANFMAETMEEWARGDLDPV

SEQ ID NO: 60029 - protein, 376 aa, Rhizobium miluonense
  REGION 1..376: note = tr|A0A1C3X1A7|A0A1C3X1A7_9RHIZ Queuine tRNA-ribosyltransferase OS=Rhizobium miluonense OX=411945; GN = tgt PE=3 SV=1
MSESFQFQLKKTDGGARLGEVSMPRGTIRTPAFMPVGTVGTVKAMYLDQVRETGADIILGNTYHLMLRPTAERVARLGGLHQLIRWPHPILTDSGGFQVMSLSGLRKLDEQGVTFKSHVDGSLHHMSPERSIEIQGLLDSDIQMQLDECVALPATPKDIERAMEMSLRWAERCKVAFGNQPGKAMFGIVQGGDVPELRVRSAQALSSMDLKGYAVGGLAVGEPQEVMLRMLEITLPELPTEKPRYLMGVGTPDDILKSVARGIDMFDCVMPTRSGRHGLAFTRRGKVNIRNARHAEDMRPLDEQSNCPASRDYSRAYLHHLVRANEALGGMLLSWHNLAYYQELMQGIRQAIAEGRFADFMAETQENWARGDLEPV

SEQ ID NO: 60030 - protein, 376 aa, Rhizobium mongolense
  REGION 1..376: note = tr|A0A559SNP1|A0A559SNP1_9RHIZ Queuine tRNA-ribosyltransferase OS=Rhizobium mongolense USDA 1844; OX = 1079460 GN=tgt PE=3 SV=1
MTENFQFTLRRTDAGARLGEISMPRGTIRTPAFMPVGTVGTVKAMYLDQVRETGADIILGNTYHLMLRPTAERVARLGGLHSLIRWEHPILTDSGGFQVMSLSGLRKLDEQGVTFKSHVDGSLHHMSPERSIEIQGLLGSDIQMQLDECVALPAEPREIERAMELSLRWAERCKVAFGNQLGKAMFGIVQGGDIPALRIRSAEELAQLGLKGYAVGGLAVGEPQEVMLKMLEETLPVLPGEKPRYLMGVGTPDDILKSVARGIDMFDCVMPTRSGRHGLAFTRRGKVNIRNARHAEDVRPLDEQSNCPASRDYSRAYLHHLVRANEALGGMLLSWHNLSYYQELMQGIRTAIAAGRFADFMAETQEEWAKGDLERA

SEQ ID NO: 60031 - protein, 376 aa, Rhizobium multihospitium
  REGION 1..376: note = tr|A0A1C3WLV1|A0A1C3WLV1_9RHIZ Queuine tRNA-ribosyltransferase OS=Rhizobium multihospitium; OX = 410764 GN=tgt PE=3 SV=1
MSESFQFQLKKTDGGARLGEVSMPRGTIRTPAFMPVGTVGTVKAMYLDQVRETGADIILGNTYHLMLRPTAERVARLGGLHQLIRWPHPILTDSGGFQVMSLSGLRKLDEQGVTFKSHVDGSLHHMSPERSIEIQGLLDSDIQMQLDECVALPATPKDIERAMEMSLRWAERCKVAFGNQPGKAMFGIVQGGDVPELRVRSAQALSGMDLKGYAVGGLAVGEPQEVMLRMLEITLPELPTEKPRYLMGVGTPDDILKSVARGIDMFDCVMPTRSGRHGLAFTRRGKVNIRNARHAEDMRPLDEQSNCPASRDYSRAYLHHLVRANEALGGMLLSWHNLAYYQELMQGIRQAIAEGRFADFMAETQENWARGDLEPV

SEQ ID NO: 60032 - protein, 376 aa, unidentified
  source 1..376: note = Rhizobium naphthalenivorans
  REGION 1..376: note = tr|A0A512HD17|A0A512HD17_9RHIZ Queuine tRNA-ribosyltransferase OS=Rhizobium naphthalenivorans; OX = 1118451 GN=tgt PE=3 SV=1
MHDTFQFTLKATSGKARLGEISMPRGVIRTPAFMPVGTVGTVKAMYLDQVREGGADIILGNTYHLMLRPGPERVARLGGLHELIRWPHPILTDSGGFQVMSLSGLRKLDEQGVTFKSHIDGSLHHMSPERSIEIQGMLDSDIQMQLDECVALPAERNEIERAMEMSLRWAERCRIAFGEQPGKAMFGIVQGGDIPDLRIRSAEGLKQLDLKGYAVGGLAVGEPQHVMLEMLGITLPVLPTEKPRYLMGVGTPDDILKSVAQGIDMFDCVMPTRSGRHGLAFTRRGKVNIRNARHAEDMRPLDEQSNCPASREYSRAYLHHLVRSNEALGGMLLSWNNLSYYQELMQGIRKSIDEGRFEDFMAETQEMWARGDIDPI

SEQ ID NO: 60033 - protein, 376 aa, unidentified
  source 1..376: note = Rhizobium nepotum
  REGION 1..376: note = tr|A0A0D8KC45|A0A0D8KC45_9RHIZ Queuine tRNA-ribosyltransferase OS=Rhizobium nepotum 39/7; OX = 1368418 GN=tgt PE=3 SV=1
MHEKFTFTLKATSGGARLGEVAMPRGVIRTPAFMPVGTVGTVKAMYLDQVRELGADIILGNTYHLMLRPGPERVARLGGLHELIRWPHPILTDSGGFQVMSLSGLRKLDEKGVTFKSHVDGSLHHMSPERSIEIQGMLDSDIQMQLDECIALPAERKEIERAMEMSLRWAERCRVAFGEQSGKAMFGIVQGGDQPDLRIRSAEGLKQLDLKGYAVGGLAVGEPQEVMLGMLDITLPVLPTEKPRYLMGVGTPDDILKSVARGIDMFDCVMPTRSGRHGLAFTRRGRVNIRNARHAEDMRPLDEQSNCPASRDYSRAYLHHLTRSNEALGGMLLSWHNLAYYQELMQGIRKSIEEGRFADFYAETIEMWARGDIDPV

SEQ ID NO: 60034 - protein, 376 aa, Rhizobium oryzae
  REGION 1..376: note = tr|A0A1X7GGB1|A0A1X7GGB1_9RHIZ Queuine tRNA-ribosyltransferase OS=Rhizobium oryzae OX=464029; GN = tgt PE=3 SV=1
MTETFQFNLKKTDGGARLGEVSMPRGTIRTPAFMPVGTVGTVKAMYLDQVRDTGADIILGNTYHLMLRPGAERVARLGGLHNLIRWPHPILTDSGGFQVMSLSGLRKLDEKGVTFKSHVDGSLHHMSPERSIEIQGLLGSDIQMQLDECVALPAEPKEIERAMELSLRWAERCKIAFGDQPGKAMFGIVQGGDQPDLRIRSAEGLRELDLKGYAVGGLAVGEPQQVMLQMLETTLPVLPSEKPRYLMGVGTPDDILKSVARGIDMFDCVMPTRSGRHGLAFTRRGKVNIRNARHAEDLRPLDEESACPAALDYSRAYLHHLVRSDEALGGMLLSWNNLHYYQDLMKGIREAIAEGRFADFYAETQEMWAKGDIDPV

SEQ ID NO: 60035 - protein, 376 aa, Rhizobium oryzae
  REGION 1..376: note = tr|A0A1Q9AWQ8|A0A1Q9AWQ8_9RHIZ Queuine tRNA-ribosyltransferase OS=Rhizobium oryzae OX=464029; GN = tgt PE=3 SV=1
MTDRFQFSLLATDGKARRGQISMPRGVVRTPAFMPVGTVGTVKAMYLTQVRELGADIILGNTYHLMLRPGAERVARLGGLHELIRWPEPILTDSGGFQVMSLSGLRKLDEKGVTFKSHVDGALHHMSPERSIEIQGLLDSDIQMQLDECLALPAERNEIERAMELSLRWAERCKVAFGDQPGKAMFGIVQGGDIPELRVRSAEALAGLDLKGYAVGGLAVGEPQAVMLDMLDTTCPALPADKPRYLMGVGTPDDILKSVARGIDMFDCVMPTRSGRHGLAFTRHGRINIRNARHAEDPRPLDEASSCPAARDYSRAYLHHLVRSNEALGGMLLTWNNLSYYQDLMAGIRAAIEEGRFQSFMEETQETWARGDIAPR

SEQ ID NO: 60036 - protein, 376 aa, unidentified
  source 1..376: note = Rhizobium oryziradicis
  REGION 1..376: note = tr|A0A1Q8ZPI5|A0A1Q8ZPI5_9RHIZ Queuine tRNA-ribosyltransferase OS=Rhizobium oryziradicis; OX = 1867956 GN=tgt PE=3 SV=1
MSEQFTFTLKATSGKARLGEISMPRGTIRTPAFMPVGTVGTVKAMYLDQVREGGADIILGNTYHLMLRPGAERVARLGGLHELIRWPQPILTDSGGFQVMSLSGLRKLDEQGVTFKSHIDGSSHHMSPERSIEIQGLLDSDIQMQLDECIALPAEPREIERAMEMSLRWAERCRVAFGEQPGKAMFGIVQGGDQPALRIRSAEGLKQLDLKGYAVGGLAVGEPQDVMLSMLDITLPVLPTEKPRYLMGVGTPDDMLKSVALGVDMFDCVMPTRSGRHGLAFTRRGKVNIRNARHAEDMRPLDEQSSCPAARDYSRAYLHHLVRSNEALGGMLLSWNNLSYYQELMQGIRKSIAEGRFEDFKAETMEMWARGDIDPR

SEQ ID NO: 60037 - protein, 376 aa, Rhizobium phaseoli
  REGION 1..376: note = tr|A0A0M3GTT6|A0A0M3GTT6_9RHIZ Queuine tRNA-ribosyltransferase OS=Rhizobium phaseoli Ch24-10; OX = 1128399 GN=tgt PE=3 SV=1
MTENFQFTLDKTDAGARLGEISMPRGAIRTPAFMPVGTVGTVKAMYLDQVRETGADIILGNTYHLMLRPTAERVARLGGLHKLIRWEHPILTDSGGFQVMSLSGLRKLDEQGVTFKSHVDGSLHQMSPERSIEIQGLLGSDIQMQLDECVALPAEPKELERAMEMSLRWAERCRVAFGEQPGKAMFGIVQGGDIPALRIRSAEALSQLDLKGYAVGGLAVGEPQDVMLRMLETTLPVLPGEKPRYLMGVGTPDDILKSVARGIDMFDCVMPTRSGRHGLAFTRRGKVNIRNARHAEDMRPLDEQSNCPASRDYSRAYLHHLVRANEALGGMLLSWHNLAYYQELMQGIRKAIAEGRFADFMAETMEEWARGDLDPV

SEQ ID NO: 60038 - protein, 376 aa, Rhizobium phaseoli
  REGION 1..376: note = tr|A0A192TC66|A0A192TC66_9RHIZ Queuine tRNA-ribosyltransferase OS=Rhizobium phaseoli OX=396; GN = tgt PE=3 SV=1
MTENFQFTLDKTDAGARLGEISMPRGAIRTPAFMPVGTVGTVKAMYLDQVRETGADIILGNTYHLMLRPTAERVARLGGLHKLIRWEHPILTDSGGFQVMSLSGLRKLDEQGVTFKSHVDGSLHHMSPERSIEIQGLLGSDIQMQLDECVALPAEPKEIERAMEMSLRWAERCRVAFGEQPGKAMFGIVQGGDIPALRIRSAEALSQLDLKGYAVGGLAVGEPQDVMLRMLETTLPVLPVEKPRYLMGVGTPDDILKSVARGIDMFDCVMPTRSGRHGLAFTRRGKVNIRNARHAEDMRPLDEQSNCPASRDYSRAYLHHLVRANEALGGMLLSWHNLAYYQELMQGIRKAIAEGRFADFMAETMEEWARGDLDPV

SEQ ID NO: 60039 - protein, 376 aa, Rhizobium pisi
  REGION 1..376: note = tr|A0A427MA90|A0A427MA90_9RHIZ Queuine tRNA-ribosyltransferase OS=Rhizobium pisi OX=574561 GN=tgt; PE = 3 SV=1
MTENFQFTLKKTDAGARLGEISMPRGTIRTPAFMPVGTVGTVKAMYLDQVRETGADIILGNTYHLMLRPTAERVARLGGLHKLIRWEHPILTDSGGFQVMSLSGLRKLDEQGVTFKSHVDGSLHHMSPERSIEIQGLLGSDIQMQLDECVALPAEPKEIERAMEMSLRWAERCRVAFGEQPGKAMFGIVQGGDIPALRIRSAEELTKLDLKGYAVGGLAVGEPQEVMLKMLNETLPVLPGEKPRYLMGVGTPDDILKSVARGIDMFDCVMPTRSGRHGLAFTRRGKVNIRNARHAEDMRPLDEQSNCPASRDYSRAYLHHLVRSNEALGGMLLSWHNLAYYQELMQGIRKAIAEGRFADFMAETQEEWARGDLQPV

SEQ ID NO: 60040 - protein, 376 aa, Rhizobium pusense; identical to SEQ ID NO: 52789
  REGION 1..376: note = tr|A0A4U1K6L8|A0A4U1K6L8_9RHIZ Queuine tRNA-ribosyltransferase OS=Rhizobium pusense OX=648995; GN = tgt PE=3 SV=1

SEQ ID NO: 60041 - protein, 376 aa, Rhizobium pusense; identical to SEQ ID NO: 51343
  REGION 1..376: note = tr|A0A1L9CTT1|A0A1L9CTT1_9RHIZ Queuine tRNA-ribosyltransferase OS=Rhizobium pusense OX=648995; GN = tgt PE=3 SV=1

SEQ ID NO: 60042 - protein, 376 aa, Rhizobium radiobacter; identical to SEQ ID NO: 52789
  REGION 1..376: note = tr|A0A0X8IZF7|A0A0X8IZF7_RHIRD Queuine tRNA-ribosyltransferase OS=Rhizobium radiobacter OX=358; GN = tgt PE=3 SV=1

SEQ ID NO: 60043 - protein, 376 aa, Rhizobium radiobacter
  REGION 1..376: note = tr|A0A024IWS6|A0A024IWS6_RHIRD Queuine tRNA-ribosyltransferase OS=Rhizobium radiobacter OX=358; GN = tgt PE=3 SV=1
MHDKFTFTLKATSGGARLGEVAMPRGVIRTPAFMPVGTVGTVKAMYLDQVRELGADIILGNTYHLMLRPGPERVARLGGLHELIRWPHPILTDSGGFQVMSLSGLRKLDEKGVTFKSHVDGSLHHMSPERSIEIQGMLDSDIQMQLDECIALPAERKEIERAMEMSLRWAERCRVAFGEQPGKAMFGIVQGGDQPDLRVRSAEGLKQLDLKGYAVGGLAVGEPQDVMLGMLDITLPVLPTEKPRYLMGVGTPDDILKSVARGIDMFDCVMPTRSGRHGLAFTRRGRVNIRNARHAEDMRPLDEQSNCPASRDYSRAYLHHLTRSNEALGGMLLSWHNLAYYQELMQGIRKSIEEGRFADFYAETIEMWARGDIDPV

SEQ ID NO: 60044 - protein, 376 aa, unidentified
  source 1..376: note = Rhizobium rhizosphaerae
  REGION 1..376: note = tr|A0A1Q9AFY6|A0A1Q9AFY6_9RHIZ Queuine tRNA-ribosyltransferase OS=Rhizobium rhizosphaerae; OX = 1672749 GN=tgt PE=3 SV=1
MTDRFQFTLLATDGKARRGQVSMPRGIVRTPAFMPVGTVGTVKAMYLTQVRELGADIILGNTYHLMLRPGAERVARLGGLHELIRWPEPILTDSGGFQVMSLSGLRKLDEQGVTFKSHVDGALHHMSPERSIEIQGLLDSDIQMQLDECVALPAERNEIERAMELSLRWAERCKVAFGDQPGKAMFGIVQGGDSPELRVRSAEALAGLDLKGYAVGGLAVGEPQEVMLDMLDITCPALPFDKPRYLMGVGTPDDILKSVARGIDMFDCVMPTRSGRHGLAFTRHGRVNLRNARHAEDPRPLDEASSCPAARDYSRAYLHHLVRSNEALGGMLLTWNNLAYYQDLMAGIRASIEEGRFQSFMEETQETWARGDIPAR

SEQ ID NO: 60045 - protein, 376 aa, Rhizobium rosettiformans
  REGION 1..376: note = tr|A0A4S8Q0Y5|A0A4S8Q0Y5_9RHIZ Queuine tRNA-ribosyltransferase OS=Rhizobium rosettiformans W3; OX = 538378 GN=tgt PE=3 SV=1
MSENFTFNLKATSGKARLGEITMPRGTVRTPAFMPVGTVGTVKAMYLDQVKEGGADIILGNTYHLMLRPGPERVARLGGLHELIRWPGPILTDSGGFQVMSLSGLRKLDEQGVTFKSHVDGSLHHMSPERSIEIQGLLDSDIQMQLDECVALPAEPREIERAMELSLRWAERCRVAFGNQPGKAMFGIVQGGDQPNLRIRSAEGLKQLDLKGYAVGGLAVGEPQAVMLDMLRITLPVLPTEKPRYLMGVGTPDDILKSVAEGIDMFDCVMPTRSGRHGLAFTRRGKVNIRNARHAEDMRPLDEQSNCPATRDYSRAYLHHLVRSNEALGGMLLSWNNLSYYQELMQGIRQAIAENRFEDFKAETIEMWNRGDIDPV

SEQ ID NO: 60046 - protein, 376 aa, Rhizobium selenitireducens
  REGION 1..376: note = tr|A0A376AG89|A0A376AG89_9RHIZ Queuine tRNA-ribosyltransferase OS=Rhizobium selenitireducens ATCC BAA-1503 OX=1336235 GN=tgt PE=3 SV=1
MHDTFQFTLKATSGKARLGEISMPRGVIRTPAFMPVGTVGTVKAMYLDQVREGGADIILGNTYHLMLRPGPERVARLGGLHELIRWPGPILTDSGGFQVMSLSGLRKLDEKGVTFKSHVDGSTHYMSPERSIEIQGMLDSDIQMQLDECVALPAEPKEIERAMEMSLRWAERCRVAFGEQPGKAMFGIVQGGDIPDLRVRSAEGLKQLDLKGYAVGGLAVGEPQDVMLKMLGITLPVLPVEKPRYLMGVGTPDDILKSVAEGIDMFDCVMPTRSGRHGLAFTRRGKVNIRNARHAEDMRPLDDQSNCPAARDYSRAYLHHLVRSNEALGGMLLSWNNLSYYQELMQGIRKSIEEGRFEDFKAETMEMWARGDIDPV

SEQ ID NO: 60047 - protein, 377 aa, unidentified
  source 1..377: note = Rhizobium smilacinae
  REGION 1..377: note = tr|A0A5C4XHF0|A0A5C4XHF0_9RHIZ Queuine tRNA-ribosyltransferase OS=Rhizobium smilacinae OX=1395944; GN = tgt PE=3 SV=1
MSTENFQFTLKKTDGGARLGKVSMPRGTIRTPAFMPVGTVGTVKAMYLDQVKDTGADIILGNTYHLMLRPGAERVARLGGLHKLIRWEHPILTDSGGFQVMSLSGLRKLDEKGVTFKSHIDGSLHHMSPERSIEIQGLLGSDIQMQLDECVALPAEPKEIERAMELSLRWAERCRVAFGEQPGKAMFGIVQGGDQPALRIRSAEGLKQLDLKGYAVGGLAVGEPQDVMLSMLDTTLPVLPTEKPRYLMGVGTPDDMLKSVARGIDMFDCVMPTRSGRHGLAFTRRGKVNLRNARHAEDMRPLDEESSCPAARDYSRAYLHHLCRADEALGGMLLSWNNLHYYQDLMKGIRQAIAEGRFADFYAETQEAWAKGDIDKL

SEQ ID NO: 60048 - protein, 376 aa, unidentified
  source 1..376: note = Rhizobium sophoriradicis
  REGION 1..376: note = tr|A0A2A5KW17|A0A2A5KW17_9RHIZ Queuine tRNA-ribosyltransferase OS=Rhizobium sophoriradicis; OX = 1535245 GN=tgt PE=3 SV=1
MTENFQFTLNKTDAGARLGEISMPRGEIRTPAFMPVGTVGTVKAMYLDQVRETGADIILGNTYHLMLRPTAERVARLGGLHKLIRWEHPILTDSGGFQVMSLSGLRKLDEQGVTFKSHVDGSLHHMSPERSIEIQGLLGSDIQMQLDECVALPAEPKEIERAMEMSLRWAERCRVAFGEQPGKAMFGIVQGGDIPALRVRSAEALSQLDLKGYAVGGLAVGEPQDVMLRMLETTLPVLPVEKPRYLMGVGTPDDILKSVARGIDMFDCVMPTRSGRHGLAFTRRGKVNIRNARHAEDMRPLDEQSNCPASRDYSRAYLHHLVRANEALGGMLLSWHNLAYYQELMQGIRKAIAEGRFADFMAETQEEWARGDLEPV

SEQ ID NO: 60049 - protein, 376 aa, Rhizobium sp.
  REGION 1..376: note = tr|A0A192LWK4|A0A192LWK4_9RHIZ Queuine tRNA-ribosyltransferase OS=Rhizobium sp. N113 OX=1703960; GN = tgt PE=3 SV=1
MTENFQFTLEKSDAGARLGEISMPRGTIRTPAFMPVGTVGTVKAMYLDQVRETGADIILGNTYHLMLRPTAERVARLGGLHKLIRWEHPILTDSGGFQVMSLAGLRKLDEQGVTFKSHVDGSLHHMSPERSIEIQGLLGSDIQMQLDECVALPAEPKEIERAMEMSLRWAERCKVAFGEQPGKAMFGIVQGGDIPALRIRSAEALTKLDLKGYAVGGLAVGEPQDVMLNMLKETLPVLPVEKPRYLMGVGTPDDILKSVARGIDMFDCVMPTRSGRHGLAFTRRGKVNIRNARHAEDMRPLDEQSNCPASRDYSRAYLHHLVRANEALGGMLLSWHNLAYYQELMQGIRKAISEGRFADFMAETMEEWSRGDLDPV

SEQ ID NO: 60050 - protein, 65 aa, Rhizobium sp.
  REGION 1..65: note = tr|A0A2S6BA53|A0A2S6BA53_9RHIZ tRNA guanosine(34) transglycosylase Tgt (Fragment) OS=Rhizobium sp. KAs_5_22; OX = 2067668 GN=tgt PE=4 SV=1
CYACANGFSRAYLRHLDRCNEMLGPMLGTLHNLRYYQRLMAQMRAAIEQGTFAAFRESFYAARMQ

SEQ ID NO: 60051 - protein, 374 aa, unidentified
  source 1..374: note = Rhizobium straminoryzae
  REGION 1..374: note = tr|A0A549TGM7|A0A549TGM7_9RHIZ Queuine tRNA-ribosyltransferase OS=Rhizobium straminoryzae; OX = 1387186 GN=tgt PE=3 SV=1
MTTENFQFTLKATDGKARLGEISMPRGAIRTPAFMPVGTVGTVKAMYLNQVREGGADIILGNTYHLMLRPGPERVARLGGLHELIRWPEPILTDSGGFQVMSLSGLRKLDEKGVTFKSHVDGSTHHMSPERSIEIQGLLDSDIQMQLDECVALPAEPKEIERAMELSLRWAERCRVAFGNQPGKAMFGIVQGGDQPALRIRSAEGLKQLDLKGYAVGGLAVGEPQAVMLDMLNITLPVLPTEKPRYLMGVGTPDDILKSVACGIDMFDCVMPTRSGRHGLAFTRKGKVNIRNAKHAEDMRPLDEQSSCPATRDYSRAYLHHLVRSNEALGGMLLSWNNLSYYQELMQGIRKAIAEGRYADFMAETQDAWARGDD

SEQ ID NO: 60052 - protein, 379 aa, unidentified
  source 1..379: note = Rhizobium subbaraonis
  REGION 1..379: note = tr|A0A285UAG5|A0A285UAG5_9RHIZ Queuine tRNA-ribosyltransferase OS=Rhizobium subbaraonis OX=908946; GN = tgt PE=3 SV=1
MTERFEFKLSATDGKARRGEVSMPRGAIRTPAFMPVGTVGTVKAMYLDQVRDLGADIILGNTYHLMLRPGAERVARLGGLHELIRWPYPILTDSGGFQVMSLSGLRKLDEQGVTFKSHVDGSLHHMSPERSIEIQGLLDSDIQMQLDECVRLPAEPKEIERAMEMSYRWAERCKVAFGDQPGKAMFGIVQGGDIPELRVRSAQALTGLDLKGYAIGGLAVGEPQAVMLDMIDTTCPHLPFEKPRYLMGVGTPDDILKSVAHGIDMFDCVMPTRSGRHGLAFTRHGRINIRNARHAEDMRPLDELSSCPASRDYSRAYLHHLVRSNESLGGMLLTWNNLAYYQELMAGIRSAIEEGRYADFMAETQEAWARGEADAKKSA

SEQ ID NO: 60053 - protein, 376 aa, Rhizobium sullae
  REGION 1..376: note = tr|A0A2N0D0G8|A0A2N0D0G8_RHISU Queuine tRNA-ribosyltransferase OS=Rhizobium sullae OX=50338; GN = tgt PE=3 SV=1
MTENFQFALKKTDAGARLGEISMPRGTIRTPAFMPVGTVGSVKAMYLDQVRETGADIILGNTYHLMLRPTAERVARLGGLHSLIRWEHPILTDSGGFQVMSLSALRKLNEQGVTFKSHVDGSLHHMSPERSIEIQGLLGSDIQMQLDECVALPSEPREIERAMELSLRWAERCKVAFGNQPGKAMFGIVQGGDIPALRIRSAEELAQLDLKGYAVGGLAVGEPQDVMLKMLEETLPVLPSEKPRYLMGVGTPDDILKSVARGIDMFDCVMPTRSGRHGLAFTRRGKVNIRNARHAEDTRPLDDQSNCAASRDYSRAYLHHLVRANEALGGMLLSWHNLNYYQELMQGIRAAISEGRFADFMAETQEEWAKGDLERA

SEQ ID NO: 60054 - protein, 376 aa, Rhizobium sullae
  REGION 1..376: note = tr|A0A4R3Q5A4|A0A4R3Q5A4_RHISU Queuine tRNA-ribosyltransferase OS=Rhizobium sullae OX=50338; GN = tgt PE=3 SV=1
MTENFQFALKKTDAGARLGEISMPRGTIRTPAFMPVGTVGSVKAMYLDQVRETGADIILGNTYHLMLRPTAERVARLGGLHSLIRWEHPILTDSGGFQVMSLSALRKLNEQGVTFKSHVDGSLHHMSPERSIEIQGLLGSDIQMQLDECVALPSEPREIERAMELSLRWAERCKVAFGNQPGKAMFGIVQGGDIPALRIRSAEELAQLDLKGYAVGGLAVGEPQDVMLKMLEETLPVLPSEKPRYLMGVGTPDDILKSVARGIDMFDCVMPTRSGRHGLAFTRRGKVNIRNARHAEDMRPLDDQSNCPASRDYSRAYLHHLVRANEALGGMLLSWHNLNYYQELMQGIRAAISEGRFADFMAETQEEWAKGDLERA

SEQ ID NO: 60055 - protein, 376 aa, Rhizobium taibaishanense
  REGION 1..376: note = tr|A0A1Q9AB16|A0A1Q9AB16_9RHIZ Queuine tRNA-ribosyltransferase OS=Rhizobium taibaishanense; OX = 887144 GN=tgt PE=3 SV=1
MSEQFTFTLKATSGKARLGEVSMPRGTIRTPAFMPVGTVGTVKAMYLDQVREGGADIILGNTYHLMLRPGPERVARLGGLHELIRWPQPILTDSGGFQVMSLSGLRKLDEQGVTFKSHIDGSLHHMSPERSIEIQGLLDSDIQMQLDECVALPAEPREIERAMEMSLRWAERCRVAFGEQPGKAMFGIVQGGDQPALRIRSAEGLKQLDLKGYAVGGLAVGEPQDVMLSMLDITLPVLPSEKPRYLMGVGTPDDILKSVARGIDMFDCVMPTRSGRHGLAFTRRGKVNIRNARHAEDMRPLDEQSSCPAARDYSRAYLHHLVRSNEALGGMLLSWNNLSYYQELMQGIRQSIAEGRFEDFMAETMECWARGDIDPA

SEQ ID NO: 60056 - protein, 376 aa, Rhizobium tibeticum
  REGION 1..376: note = tr|A0A1H8LID0|A0A1H8LID0_9RHIZ Queuine tRNA-ribosyltransferase OS=Rhizobium tibeticum OX=501024; GN = tgt PE=3 SV=1
MTENFQFTLKKTDAGARLGEVSMPRGTIRTPAFMPVGTVGTVKAMYLDQVRDTGADIILGNTYHLMLRPTAERVARLGGLHKLIRWEHPILTDSGGFQVMSLSGLRKLDEQGVTFKSHVDGSLHHMSPERSIEIQGLLDSDIQMQLDECVALPAEPREIERAMELSLRWAERCKVAFGNQPGKAMFGIVQGGDVPSLRIRSAEALTELDLKGYAVGGLAVGEPQDVMLKMLEETLPVLPTEKPRYLMGVGTPDDILKSVARGIDMFDCVMPTRSGRHGLAFTRRGKVNIRNARHAEDMRPLDDQSNCPASRDYSRAYLHHLVRANEALGGMLLSWHNLAYYQELMQGIRKAIAEARFADFVAETQEEWARGDLEPV

SEQ ID NO: 60057 - protein, 376 aa, Rhizobium tropici
  REGION 1..376: note = tr|L0LM70|L0LM70_RHITR Queuine tRNA-ribosyltransferase OS=Rhizobium tropici CIAT 899; OX = 698761 GN=tgt PE=3 SV=1
MSESFQFQLKKTDGGARLGEVSMPRGTIRTPAFMPVGTVGTVKAMYLDQVRETGADIILGNTYHLMLRPTAERVARLGGLHQLIRWPHPILTDSGGFQVMSLSGLRKLDEQGVTFKSHVDGSLHHMSPERSIEIQGLLDSDIQMQLDECVALPATPKEIERAMEMSLRWAERCKVAFGNQPGKAMFGIVQGGDVPELRVRSAQALSGMDLKGYAVGGLAVGEPQEVMLRMLEITLPELPTEKPRYLMGVGTPDDILKSVARGIDMFDCVMPTRSGRHGLAFTRRGKVNIRNARHAEDMRPLDEQSNCPASRDYSRAYLHHLVRANEALGGMLLSWHNLAYYQELMQGIRQAIAEGRFADFMAETQENWARGDLEPV

SEQ ID NO: 60058 - protein, 376 aa, Rhizobium tropici
  REGION 1..376: note = tr|A0A5B0VQD3|A0A5B0VQD3_RHITR Queuine tRNA-ribosyltransferase OS=Rhizobium tropici OX=398 GN=tgt; PE = 3 SV=1
MSESFQFQLKKTDGGARLGEVSMPRGTIRTPAFMPVGTVGTVKAMYLDQVRESGADIILGNTYHLMLRPTAERVARLGGLHELIRWPHPILTDSGGFQVMSLSGLRKLDEQGVTFKSHVDGSLHHMSPERSIEIQGLLGSDIQMQLDECVALPATPKEIERAMEMSLRWAERCKVAFGNQPGKAMFGIVQGGDIPELRVRSAQALSSMDLKGYAVGGLAVGEPQEVMLRMLEITLPELPTEKPRYLMGVGTPDDILKSVARGIDMFDCVMPTRSGRHGLAFTRRGKVNIRNARHAEDMRPLDEQSSCPASRDYSRAYLHHLVRANEALGGMLLSWHNLAYYQELMQGIRQAIAEGRFADFMAETLENWARGDLEPV

SEQ ID NO: 60059 - protein, 376 aa, Rhizobium tubonense
  REGION 1..376: note = tr|A0A2W4CDY6|A0A2W4CDY6_9RHIZ Queuine tRNA-ribosyltransferase OS=Rhizobium tubonense OX=484088; GN = tgt PE=3 SV=1
MSDTFQFNLKKTNGGARLGEVSMPRGTIRTPAFMPVGTVGTVKAMYLDQVRDSGADIILGNTYHLMLRPGPERVARLGGLHELIRWPWPILTDSGGFQVMSLSGLRKLDERGVTFKSHVDGSLHHMSPERSIEIQGMLDSDIQMQLDECIALPAEPKEIERAMEMSLRWAERCKVAFGTQPGKAMFGIVQGGDIPELRIRSAEALTQLDLKGYAVGGLAVGEPQGVMLEMLEITLPALPTERPRYLMGVGTPDDILKSVARGIDMFDCVMPTRSGRHGLAFTRRGKVNIRNARHAEDMRPLDEQSNCPASRDYSRAYLHHLVRSNEALGGMLLSWHNLAYYQELMLGIRKSIDEGRFADFMAETQETWARGDIEAV

SEQ ID NO: 60060 - protein, 376 aa, unidentified
  source 1..376: note = Rhizobium tumorigenes
  REGION 1..376: note = tr|A0A2W4DPM7|A0A2W4DPM7_9RHIZ Queuine tRNA-ribosyltransferase OS=Rhizobium tumorigenes; OX = 2041385 GN=tgt PE=3 SV=1
MSQTFQFQLKKTDAGARLGEVSMPRGSIRTPAFMPVGTVGTVKAMYLDQVRDSGADIILGNTYHLMLRPGAERVARLGGLHELIRWPLPILTDSGGFQVMSLSGLRKLDEQGVTFKSHVDGSTHYMSPERSIEIQGLLDSDIQMQLDECVALPCEPKEIQRAMEMSLRWAERCRVAFGEQPGKAMFGIVQGGDIPDLRIRSAQGLTQLDLKGYAIGGLAVGEPQDVMLKMLETTLPVLPTDRPRYLMGVGTPDDILKSVARGIDMFDCVMPTRSGRHGLAFTRRGKVNLRNARHAEDMRPLDEQSNCPASRDYSRAYLHHLTRTGEALGGMLLSWHNLAYYQELMQGIRQSIKEGRFADFMAETQENWAKGDLERI

SEQ ID NO: 60061 - protein, 376 aa, Rhizobium vallis
  REGION 1..376: note = tr|A0A432PMX8|A0A432PMX8_9RHIZ Queuine tRNA-ribosyltransferase OS=Rhizobium vallis OX=634290; GN = tgt PE=3 SV=1
MTENFQFTLKKTDAGARLGEVSMPRGTIRTPAFMPVGTVGTVKAMYLDQVRETGADIILGNTYHLMLRPTAERVARLGGLHKLIRWEHPILTDSGGFQVMSLSGLRKLDEQGVTFKSHVDGSLHHMSPERSIEIQGLLGSDIQMQLDECVALPAEPKEIERAMEMSLRWAERCRVAFGEQPGKAMFGIVQGGDIPALRIRSAEALSQLDLKGYAIGGLAVGEPQEVMLQMLETTLPVLPTEKPRYLMGVGTPDDILKSVARGIDMFDCVMPTRSGRHGLAFTRRGKVNIRNARHAEDMRPLDDQSNCPASRDYSRAYLHHLVRSNEALGGMLLSWHNLAYYQELMQGIRKAIAEGRFADFMAETQEEWARGDLQPV

SEQ ID NO: 60062 - protein, 379 aa, Rhizomicrobium sp.
  REGION 1..379: note = tr|A0A177QBR2|A0A177QBR2_9PROT Queuine tRNA-ribosyltransferase OS=Rhizomicrobium sp. SCGC AG-212-E05 OX=1799655 GN=tgt PE=3 SV=1
MNDFRFELLATDGAARTGVIHTPRGDIRTPAFMPVGTAATVKAMLPQSVRETGADILLGNTYHLMLRPGAERVARLGGLHKFMDWSRPILTDSGGFQVMSLAALRKITEEGVRFQSHIDGHAEFLSPERAMEIQRLLGSDIQMVLDECPAFPAEKPVIEKSLALSMRWAQRSKDAFGLQTEEERAGRACFGIVQGGTYPDLRQRSAQGLMEIGFDGYAVGGLAVGEGQVAMFETLEATVPQLPADKPHYLMGVGKPDDIVGAVLRGIDMFDCVLPTRSGRNGQAFTRAGALNLKNARFAEDAAPLDDACGCPACRQFSRAYLHHTVKSGEIIAAMLLTWHNLTYYQDLMAQLRGAIGEGRVNSFAAAFRNAYAPAEVAL

SEQ ID NO: 60063 - protein, 379 aa, unidentified
  source 1..379: note = Rhizorhabdus dicambivorans
  REGION 1..379: note = tr|A0A2A4G2J1|A0A2A4G2J1_9SPHN Queuine tRNA-ribosyltransferase OS=Rhizorhabdus dicambivorans; OX = 1850238 GN=tgt PE=3 SV=1
MTTPRFDFSIHATDGKARTGTIRMKRGEIRTPAFMPVGTAATVKAMKPADVRATGADIILGNTYHLMLRPGAERVARLGGLHHFMRWDRPILTDSGGYQVMSLSALTKRSEEGVAFKSHLDGSAHMLSPERSMEIQRLLGSDIVMAFDELVPTTSTPQQQLEAMERSMRWAKRSRAGFDAGGEHAERAALFGIQQGALDEGLRRRSADALLDIGFDGYAVGGLAVGEGQEAMFATLDFAPGQLDAAKPRYLMGVGKPDDIVGAVERGIDMFDCVLPTRSGRNGQAFTRSGPINLRNAKFGEDQKPLDESCGCPVCAQFSRAYIHHLIRAGEILGAMLMTEHNLSFYQALMADLRAAIGEGRLTAFAAEFRAKYYRGGAG

SEQ ID NO: 60064 - protein, 376 aa, unidentified
  source 1..376: note = Rhodanobacter denitrificans
  REGION 1..376: note = tr|A0A2W5KRG3|A0A2W5KRG3_9GAMM Queuine tRNA-ribosyltransferase OS=Rhodanobacter denitrificans; OX = 666685 GN=tgt PE=3 SV=1
MSALRFDLHARDGAARTGAVHLARGAIRTPAFMPVGTYGSVKAMTPRDLHEIGADVILGNTFHLYLRPGLDVVSAFGGLHRLIGWDRPILTDSGGFQVFSLAHKRKITEQGVTFASPVDGSKVFLSPEESMRIQRALDSDIVMIFDECTPYPAEEKVARESMELSLRWALRSRQAFDAQENPHALFGIVQGSVYPELRKRSADALIGIGFDGYAIGGLAVGEPEHERNAMLDTVCPFLPEDRPRYLMGVGRPEDIVEAVRRGVDMFDCVMPTRNARNGFLFTRQGTLRIRNARYARDTEVVEPGCACYTCRSGFSRAYLRHLDRCGEILACQLATIHNLHHYQQLMADLRAAIAESRLERFVADFYAQRRGGDGAS

SEQ ID NO: 60065 - protein, 387 aa, unidentified
  source 1..387: note = Rhodanobacter denitrificans
  REGION 1..387: note = tr|M4NE69|M4NE69_9GAMM Queuine tRNA-ribosyltransferase OS=Rhodanobacter denitrificans; OX = 666685 GN=tgt PE=3 SV=1
MGVADQTRDNARMTSLQFELHATDGAARRGRLGFARGTVETPAFMPVGTYGSVKAMTPRDLVETGAEIILGNTFHLFLRPGLEVIEPFGGLHKFIGWDKPILTDSGGFQVFSLAHKRKITEEGVTFASPVDGSKVFLSPEVSMRIQKTLDSDIAMIFDECTPYPATEKVAADSMELSLRWAERSRRAFDDLKNPNSLFGIVQGSVYETLRRRSAEGLVKLGFDGYAIGGLAVGEPEAERNHALDFTVPLLPADRPRYLMGVGRPEDIVEAVRRGIDMFDCVMPTRNARNGFLFTAAGTLRIRNAKYASDTAVIEEGCDCYACSHGFSRAYLRHLDRCNEILGSQLATMHNLRYYQRLMIGLRQAIADHALEAFVAEFYARRQGAAVS

SEQ ID NO: 60066 - protein, 377 aa, Rhodanobacter fulvus
  REGION 1..377: note = tr|I4VNB2|I4VNB2_9GAMM Queuine tRNA-ribosyltransferase OS=Rhodanobacter fulvus Jip2; OX = 1163408 GN=tgt PE=3 SV=1
MQFDLQATDGAARRGQLRFARGTVETPAFMPVGTYGSVKAMTPRDVRETGAEIILGNTFHLFLRPGLEIVEKFGGLHRFIGWDKPILTDSGGFQVFSLAHKRKITEEGVLFASPVDGSKVFLSPEVSMRIQTTLDSDIAMIFDECTPYPATEKVASDSMELSLRWAARSRQAFDDLQRVNSKPPNALFGIVQGSVYENLRQRSAAGLVEIGFDGYAIGGLAVGETEDERNHALDFTVPLLPHDKPRYLMGVGRPEDIVEAVRRGVDMFDCVMPTRNARNGFLFTAEGTLRIRNAKFADDTRVIEEGCDCHACANGFSRAYLRHLDRCNEILGSQLATMHNLRYYQRLMAGLRDAIASQTLEAFTAAFYAQRQAAAGV

SEQ ID NO: 60067 - protein, 377 aa, unidentified
  source 1..377: note = Rhodanobacter glycinis
  REGION 1..377: note = tr|A0A502FPZ6|A0A502FPZ6_9GAMM Queuine tRNA-ribosyltransferase OS=Rhodanobacter glycinis; OX = 582702 GN=tgt PE=3 SV=1
MTFDLHATDGAARRGRLTFARGTVETPAFMPVGTYGSVKAMTPRDVTETGAEIILGNTFHLFLRPGLEIVEKFGGLHKFIGWDKPILTDSGGFQVFSLAHKRKITEEGVTFASPVDGSKVFLSPEVSMQIQKTLDSDIAMIFDECTPYPATEKVAGDSMELSLRWAERSRRAFDDLQRVDSKPPNALFGIVQGSMYENLRQRSAAGLVNIGFSGYAVGGLAVGEPEAERNHALDFTVPLLPADKPRYLMGVGRPEDIVEAVRRGIDMFDCVMPTRNARNGFLFTAEGTLRIRNAKFATDTRAIEEGCDCYACSNGFSRAYLRHLDRCNEILGSQLATMHNLRYYQRLMAGLREAIGSHTLPAFTAEFYARRQGAVIA

SEQ ID NO: 60068 - protein, 380 aa, unidentified
  source 1..380: note = Rhodanobacter glycinis
  REGION 1..380: note = tr|A0A1I4EC35|A0A1I4EC35_9GAMM Queuine tRNA-ribosyltransferase OS=Rhodanobacter glycinis; OX = 582702 GN=tgt PE=3 SV=1
MTSLKFDLLATDGAARRGRLNFPRGTVETPAFMPVGTYGSVKAMTPRDITDIGAEIILGNTFHLFLRPGLDIVGKFGGLHRFIGWDKPILTDSGGFQVFSLAHKRKLTEEGVTFASPVDGSKVFLSPEVSMKIQTVLDSDIAMIFDECTPYLVDGAPATQKLAADSMELSLRWAARSRQAFNELGNPNNLFGIVQGGVYEPLRRRSAEGLVDIGFDGYAVGGLAVGEPEEERNRTLDFTLPMLPADKPRYLMGVGRPEDIVEAVRRGVDMFDCVMPTRNARNGFLFVPEGTLRIRNAKFADDTRVIEEGCDCYACANGFSRAYLRHLDRCNEILASQLATMHNLRHYQRLMAGLREAIAAGKLDDFVAAFYARRAGSVTV

SEQ ID NO: 60069 - protein, 382 aa, Rhodanobacter sp.
  REGION 1..382: note = tr|A0A1V3P275|A0A1V3P275_9GAMM Queuine tRNA-ribosyltransferase OS=Rhodanobacter sp. C05; OX = 1945855 GN=tgt PE=3 SV=1
MTAMNFDLFATDGAARRGRLTFARGTVETPAFMPVGTYGSVKAMTPRDVTEIGAEIILGNTFHLFLRPGLEIVEKFGGLHKFIGWDKPILTDSGGFQVFSLAHKRKITEEGVTFASPVDGSKVFLSPEVSMQIQKTLDSDIAMIFDECTPYPATEKVASDSMELSLRWAERSRRAFDDLQRVDSRPPNALFGIVQGSVYENLRQRSAAGLVNIGFDGYAVGGLAVGEPEAERNHALDFTVPLLPVDKPRYLMGVGRPEDIVEAVRRGIDMFDCVMPTRNARNGFLFTAEGTLRIRNAKYALDTRVIEEGCDCYACSNGFSRAYLRHLDRCNEILGSQLATIHNLRYYQRLMAGLREAIAGHALDAFVAGFYAQRQSGGAASS

SEQ ID NO: 60070 - protein, 376 aa, Rhodanobacter sp.
  REGION 1..376: note = tr|A0A522H2R1|A0A522H2R1_9GAMM Queuine tRNA-ribosyltransferase OS=Rhodanobacter sp. OX=1883446; GN = tgt PE=3 SV=1
MTSLQFDIHATDGAARRGRLGFARGTVETPAFMPVGTYGSVKAMTPRDIVDVGAEIILGNTFHLFLRPGLEIVEKFGGLHRFIGWDKPILTDSGGFQVFSLAHKRKITEQGVTFASPVDGSKVFLSPEVSMQIQRTLDSDIAMIFDECTPYPATEKMAGDSMELSLRWAERSRRAFGDLNNPNALFGIVQGSVYEDLRRRSAAGLVDIGFDGYAVGGLAVGEPEAERNHALDFTVPLLPEDKPRYLMGVGRPEDIVEAVRRGIDMFDCVMPTRNARNGFLFTAEGTLRIRNAKFADDTRIIEKDCDCYSCSNGFSRAYLRHLDRCNEILASQLATMHNLRYYQRLMAGLREAIAQGVLGDFVSRFYALRQGAFVRV

SEQ ID NO: 60071 - protein, 384 aa, Rhodanobacter spathiphylli
  REGION 1..384: note = tr|I4W5F1|I4W5F1_9GAMM Queuine tRNA-ribosyltransferase OS=Rhodanobacter spathiphylli B39; OX = 1163407 GN=tgt PE=3 SV=1
MTSLQFNVHATDGAARRGRLTFARGTIETPAFMPVGTYGSVKAMTPRDVTETGAEIILGNTFHLFLRPGLEIVGKFGGLHRFIGWDKPILTDSGGFQVFSLAHKRKITEEGVTFASPVDGSKVFLSPEVSMQIQKTLDSDIAMIFDECTPYPATEKVASDSMELSLRWAARSRRAFDDLKNPNSLFGIVQGSVYENLRRRSAAGLIDIGFDGYAVGGLAVGEPEAERNHALDFTVPLLPVDKPRYLMGVGRPEDIVEAVRRGIDMFDCVMPTRNARNGFLFTAEGTLRIRNAKYATDTAVIEEGCDCYSCSNGFSRAYLRHLDRCNEILGSQLATMHNLRYYQRLMAGLREAIAGQALEAFVAEFYARRRVAGTGSGSISAGEK

SEQ ID NO: 60072 - protein, 375 aa, Rhodanobacter thiooxydans
  REGION 1..375: note = tr|A0A154QI33|A0A154QI33_9GAMM Queuine tRNA-ribosyltransferase OS=Rhodanobacter thiooxydans; OX = 416169 GN=tgt PE=3 SV=1
MTSLRFDLHATDGAARRGRLTFVRGTVETPAFMPVGTYGSVKAMTPRDVTDIGAEIILGNTFHLFLRPGLEVIEPFGGLHRFIGWDKPILTDSGGFQVFSLAHKRRITEEGVTFASPVDGSKVFLSPEVSMQIQKTLDSDIAMIFDECTPYPATEKVAADSMELSLRWAERSRRAFDDLKNPNSLFGIVQGSVYETLRRRSAEGLVKLGFDGYAVGGLAVGEPEAERNHSLDFTVPLLPADKPRYLMGVGRPEDIVEAVRRGIDMFDCVMPTRNARNGFLFTTEGTLRIRNAKYATDTGVIEEGCDCYSCSHGFSRAYLRHLDRCNEILGSQLATMHNLRYYQRLMAGLRAAIAGRTLESFVAEFYARRQGAAVS

SEQ ID NO: 60073 - protein, 433 aa, unidentified
  source 1..433: note = Rhodanobacteraceae bacterium
  REGION 1..433: note = tr|A0A2Z6E513|A0A2Z6E513_9GAMM Queuine tRNA-ribosyltransferase OS=Rhodanobacteraceae bacterium Dysh456 OX=2010829 GN=tgt PE=3 SV=1
MAVGFDAGSSGTESKGQGGRAVVNDVVVHRGRDEGFRGVAAVGDARSAWDNRPMTSLTFELLASDGAARRGRLHFPRGTVETPAFMPVGTYGSVKAMTPRDLVEVGAEIILGNTFHLHLRPGLEIVKKFGGLHRFIGWGRPILTDSGGFQVFSLAHRRKLTEEGVTFASPVDGSRVFLSPEVSMRIQTVLDSDIAMIFDECTPYEIDGVPIDEQRAAESMALSLRWAERSRRAFDELGNPNNLFGIVQGGVHEALRRRSAEGLVGIGFDGYAVGGLAVGEPEEVRNRTLDFTVPMLPADKPRYLMGVGRPEDIVEAVRRGIDMFDCVMPTRNARNGFLFVPEGTLRIRNAKYAADTRVIEEGCDCYACANGFSRAYLRHLDRCNEILASQLATMHNLRHYQRLMAGLRAAIEAGTLEDFTAAFYARRRGAAVA

SEQ ID NO: 60074 - protein, 398 aa, unidentified
  source 1..398: note = Rhodanobacteraceae bacterium
  REGION 1..398: note = tr|A0A522S2Q3|A0A522S2Q3_9GAMM Queuine tRNA-ribosyltransferase OS=Rhodanobacteraceae bacterium; OX = 2052182 GN=tgt PE=3 SV=1
MQFDLLTTDGPARRGRITLPHGVIETPAFMPVGTYGSVKAMTPRDLAGVGAEIILGNTFHLWLRPGLDVIGEFRGLHKFIGWDKPILTDSGGFQVFSLAERRKLTEEGVTFASPVDGSRVFLSPEESMRIQTVLDSDIVMAFDECTPYTIDGKPVDAWIVRESMELSLRWAARSRRAFDELGNRNALFGIVQGGVHDDLRALSAEGLLGIGFDGYALGGLAVGEPEGERNATLESTLPRLPADKPRYLMGVGRPEDIVEAVRRGIDMFDCVMPTRHARNGFLFTRAGTLRIRNAKYASDTRPIEEGCTCYACANGFSRAYLRHLDRCGEMLGAQLATIHNLHHYLTLMRELRGAIEAQALDRYVAEFYARRHPPARVTRGPLRAEGGVLLPPSLAKGD

SEQ ID NO: 60075 - protein, 375 aa, Rhodobaca barguzinensis
  REGION 1..375: note = tr|A0A2K8K5G2|A0A2K8K5G2_9RHOB Queuine tRNA-ribosyltransferase OS=Rhodobaca barguzinensis; OX = 441209 GN=tgt PE=3 SV=1
MGFSFKISARDGRARTGAISTPRGDIRTPAFMPVGTAATVKAMMPESVRETGADILLGNTYHLMLRPTSERIAALGGLHKFMNWDRPILTDSGGFQVMSLASLRKLTEEGVRFSSHIDGSRHLLTPERSMEIQRLLGSDIVMSFDECTPWPADEKTARASMELSMRWAKRSRDAFGDRPGHALFGIQQGSVYPDQRAESAEKLRAIGFDGYAIGGLAVGEGQELMFQVLDYAPGQLPDDKPRYLMGVGKPDDIVGAVQRGVDMFDCVLPSRSGRTGQGWTAHGPVNLRNARHRDDPRPLEEGCSCPACRNYSRAYLHHVIKSDEIIGSMLLTWHNLTYYQRLMQGLRDAIAAGTLEQFVARFHAEREQGDIDPAN

SEQ ID NO: 60076 - protein, 375 aa, Rhodobacter aestuarii
  REGION 1..375: note = tr|A0A1N7M1L3|A0A1N7M1L3_9RHOB Queuine tRNA-ribosyltransferase OS=Rhodobacter aestuarii OX=453582; GN = tgt PE=3 SV=1
MTQFSFSLSATDGTARTGVISTPRGEIRTPAFMPVGTAATVKAMMPESVRATGADILLGNTYHLMLRPTAERIARLGGLHKFMNWERPILTDSGGFQVMSLASLRKLTEEGVTFSSHIDGSKHHLTPERSMEIQKLLGSDIVMAFDECPALPATDAEVAKSMRLSMRWAQRSRDAFGDRPGHALFGIMQGGVTRELREESAEALKQIGFDGYAVGGLAVGEGQEAMFSVLDYAPGFLPEDKPRYLMGVGKPDDIVGAVERGIDMMDCVLPSRSGRTGQAWTRRGQINIKNARHQDDPRPLDEACTCPACRNYSRAYLHHVFRSQEMISGMLLTWHNLHYYQELMQGLRDAIAAGTLSAFVAQFHAQRAEGDIDPL

SEQ ID NO: 60077 - protein, 376 aa, Rhodobacter azotoformans
  REGION 1..376: note = tr|A0A2T5K968|A0A2T5K968_9RHOB Queuine tRNA-ribosyltransferase OS=Rhodobacter azotoformans; OX = 43057 GN=tgt PE=3 SV=1
MTQRFSFELTATDGGARTGVISTPRGEIRTPAFMPVGTAGTVKAMLPESVRATGADILLGNTYHLMLRPTAERVARLGGLHRFMNWERPILTDSGGFQVMSLADLRKLTEEGVTFRSHIDGSKHHLSPERSMEIQRLLGSDIVMAFDECPALPASEAAVATSMRLSMRWAERSRDAFGDRPGHALFGIMQGGVTRELREESAEALTAIGFEGYAIGGLAVGEGQEAMFGVLDYAPGFLPEDRPRYLMGVGKPDDIVGAVERGVDMMDCVLPSRSGRTGQAWTRRGQVNIKNARHMDDPRPLDEACTCPCCRTYSRAYLHHVFRAQEIIASMLLTWHNLHYYQDLMQGLRAAISDGRLAAFVAQFHAQRAEGDIEPL

SEQ ID NO: 60078 - protein, 376 aa, Rhodobacter blasticus
  REGION 1..376: note = tr|A0A2T4JB75|A0A2T4JB75_RHOBL Queuine tRNA-ribosyltransferase OS=Rhodobacter blasticus DSM 2131; OX = 1188250 GN=tgt PE=3 SV=1
MTERFGFTVNARDGRARSGVISTPRGDVRTPAFMPVGTAGTVKAMLPESVRATGADILLGNTYHLMLRPTAERIARLGGLHRFMNWDRPILTDSGGFQVMSLADLRKLTEDGVTFRSHVDGSKHHLSPERSMEIQRLLGSDIVMCFDECPALPATDEAVAKSMRLSMRWAQRSRDAFGDRPGHALFGIMQGGVNRDLREESATALKAIDFDGYAVGGLAVGEGQEAMFGVLDYAPDFLPEDKPRYLMGVGKPDDIVGAVERGIDMMDCVLPSRSGRTGQAWTPRGQVNIKNARHQDDPRPLDEGCTCPACRSYSRAYLHHVFKAQEIIASMLLTWHNLHYYQQLMQGLRDAIDAGQLAAFVAEFHARRAEGDIPPL

SEQ ID NO: 60079 - protein, 375 aa, Rhodobacter capsulatus
  REGION 1..375: note = tr|D5ATQ8|D5ATQ8_RHOCB Queuine tRNA-ribosyltransferase OS=Rhodobacter capsulatus (strain ATCC BAA-309 / NBRC 16581 / SB1003) OX=272942 GN=tgt PE=3; SV = 1
MTQFSFTLSATDGAARTGVIHTPRGEIRTPAFMPVGTAATVKAMLPESVRATGADILLGNTYHLMLRPTAERIARLGGLHKFMNWERPILTDSGGFQVMSLASVRKLTEEGVTFSSHIDGSKHHLSPERSMEIQKLLGSDIVMAFDECPALPADDATVAKSMRLSMRWAQRSRDAFGDRPGHALFGIMQGGVTRDLREESATKLKEIGFDGYAIGGLAVGEGQEAMFSVLDYAPGFLPADKPRYLMGVGKPDDIVGAVARGIDMMDCVLPSRSGRTGQAWTRRGQINIKNARHMDDPRPLDEACSCPACRNYSRAYLHHVFKAQEMISGMLLTWHNLHYYQDLMAGLRAAIAAGQLSAFVADFHAQRAAGDIDPL

SEQ ID NO: 60080 - protein, 367 aa, Rhodobacter capsulatus
  REGION 1..367: note = tr|A0A0E2PF43|A0A0E2PF43_RHOCA Queuine tRNA-ribosyltransferase (Fragment) OS=Rhodobacter capsulatus Y262 OX=1415161 GN=U715_09415 PE=3 SV=1
SATDGAARTGVIHTPRGEIRTPAFMPVGTAATVKAMLPESVRATGADILLGNTYHLMLRPTAERIARLGGLHKFMNWERPILTDSGGFQVMSLASLRKLTEEGVTFSSHIDGSKHHLSPERSMEIQKLLGSDIVMAFDECPALPADDATVAKSMRLSMRWAQRSRDAFGDRPGHALFGIMQGGVTRDLREESATKLKEIGFDGYAIGGLAVGEGQEAMFSVLDYAPGFLPADKPRYLMGVGKPDDIVGAVARGIDMMDCVLPSRSGRTGQAWTRRGQINIKNARHMDDPRPLDEACSCPACRNYSRAYLHHVFKAQEMISGMLLTWHNLHYYQDLMAGLRAAIAAGQLSAFVADFHAQRAAGDIDPL

SEQ ID NO: 60081 - protein, 376 aa, Rhodobacter johrii
  REGION 1..376: note = tr|A0A330H9M0|A0A330H9M0_9RHOB Queuine tRNA-ribosyltransferase OS=Rhodobacter johrii OX=445629; GN = tgt PE=3 SV=1
MTQRFSFELTATDGRARTGVISTPRGEIRTPAFMPVGTAGTVKAMLPENVRATGADILLGNTYHLMLRPTAERVARLGGLHRFMNWDRPILTDSGGFQVMSLADLRKLTEEGVTFRSHIDGSKHHLSPERSMEIQRLLGSDIVMAFDECPALPATEEAVARSMRLSMRWARRSREAFGDRPGHALFGIMQGGVTRDLREESAAALCEIGFEGYAIGGLAVGEGQEAMFGVLDYAPGFLPEDRPRYLMGVGKPDDIVGAVERGVDMMDCVLPSRSGRTGQAWTRRGQVNIKNARHMDDPRPLDEACSCPACRSYSRAYLHHVFRAQEIIASMLLTWHNLHYYQELMQGLRAAIAAGRLGEFVAAFHAARAEGDIEPL

SEQ ID NO: 60082 - protein, 375 aa, Rhodobacter maris
  REGION 1..375: note = tr|A0A285RXB8|A0A285RXB8_9RHOB Queuine tRNA-ribosyltransferase OS=Rhodobacter maris OX=446682; GN = tgt PE=3 SV=1
MTRFSFAVTATDGKARSGVISTARGEIRTPAFMPVGTAATVKAMLPESVRATGADILLGNTYHLMLRPSAERIARLGGLHKFMNWERPILTDSGGFQVMSLASLRKLTEEGVTFSSHIDGSKHHLSPERSMEIQKLLGSDIVMAFDECPALPATEEAVAKSMRLSMRWAQRSRDAFGDRPGHALFGIMQGGVTRALREESAEALTAIGFDGYAVGGLAVGEGQEAMFSVLDYAPGCLPEERPRYLMGVGKPDDIVGAVERGIDMMDCVLPSRSGRTGQAWTRRGQINIKNARHMDDPRPLDEACTCPACRNYSRAYLHHVFRAQEMISGMLLTWHNLHYYQELMAGLRAAIAAGQLSDFVAQFHALRAEGDIDPL

SEQ ID NO: 60083 - protein, 376 aa, Rhodobacter megalophilus
  REGION 1..376: note = tr|A0A239CEV5|A0A239CEV5_9RHOB Queuine tRNA-ribosyltransferase OS=Rhodobacter megalophilus; OX = 418630 GN=tgt PE=3 SV=1
MTQRFSFELTATDGRARTGVISTPRGEIRTPAFMPVGTAGTVKAMLPENVRATGADILLGNTYHLMLRPTAERVARLGGLHRFMNWDRPILTDSGGFQVMSLADLRKLSEEGVTFRSHIDGSKHHLSPERSMEIQRLLGSDIVMAFDECPALPATEEAVAQSMRLSMRWAGRSREAFGDRPGHALFGIMQGGVTRDLREESAAALREVGFEGYAIGGLAVGEGQEAMFGVLDYAPGFLPEDRPRYLMGVGKPDDIVGAVERGVDMMDCVLPSRSGRTGQAWTRRGQVNIKNARHMDDPRPLDEACSCPACRSYSRAYLHHVFRAQEIIASMLLTWHNLHYYQELMQGLRTAIAAGRLGEFVAAFHAARAEGDIEPL

SEQ ID NO: 60084 - protein, 376 aa, Rhodobacter ovatus
  REGION 1..376: note = tr|A0A285D2B6|A0A285D2B6_9RHOB Queuine tRNA-ribosyltransferase OS=Rhodobacter ovatus OX=439529; GN = tgt PE=3 SV=1
MSRRFSFQVTATDGRARLGAISTPRGEIRTPAFMPVGTAATVKAMLPESVRATGADILLGNTYHLMLRPTAERIARLGGLHRFMNWERPILTDSGGFQVMSLADLRKLTEEGVTFRSHIDGSRHHLSPERSMEIQRLLGSDIVMAFDECPALPATEADVAKSMRLSMRWAQRSRDAFGDRPGHALFGIMQGGVTRELREESAAALRAIGFDGYAIGGLAVGEGQEAMFGVLDYAPGYLPEDRPRYLMGVGKPDDIVGAVERGVDMMDCVLPSRSGRTGQAWTRRGQVNIKNARHMDDPRPLDEDCTCPACRNYSRAYLHHVFRAQEIIASMLLTWHNLHYYQQLMQGLRDAIAEGRLAGFVAGFHAARAAGDIEPV

SEQ ID NO: 60085 - protein, 376 aa, Rhodobacter sp.
  REGION 1..376: note = tr|V7EGT9|V7EGT9_9RHOB Queuine tRNA-ribosyltransferase OS=Rhodobacter sp. CACIA14H1; OX = 1408890 GN=tgt PE=3 SV=1
MAQGFGFTVHATDGKARTGIIQTTRGEIRTPAFMPVGTAATVKAMLPESVRATGADILLGNTYHLMLRPTAERIARLGGLHRFMNWDRPILTDSGGFQVMSLASLRKLTEEGVRFSSHIDGSKHMLTPERSMEIQKLLGSDIVMCFDECPALPATEDEVAKSMRLSMRWAQRSRDAFGDRPGHALFGIMQGGVTRDLREESAEALKRIGFDGYAVGGLAVGEGQEAMFSVLDYAPGFLPEDRPRYLMGVGKPDDIVGAVERGIDMMDCVLPSRSGRTGQAWTRRGQINIKNARHQDDPRPLDEDCTCPACRNYSRAYLHHVNRAQEIIASMLLTWHNLHYYQELMQGLRDAIAAGRLSAFVADFHARRAEGDIDPL

SEQ ID NO: 60086 - protein, 376 aa, Rhodobacter sp.
  REGION 1..376: note = tr|A0A366JX99|A0A366JX99_9RHOB Queuine tRNA-ribosyltransferase OS=Rhodobacter sp. 140A OX=2183910; GN = tgt PE=3 SV=1
MTEKFSFTLHATDGKARTGVISTPRGEIRTPAFMPVGTAGTVKAMMPESVAATGADILLGNTYHLMLRPTAERIDRLGGLHKFMNWPKPILTDSGGFQVMSLSGLRKLTEEGVTFASHVDGSKHFLSPERSMEIQRLLGSDIVMAFDECPALPADETRVAESMRLSMRWAERSRDAFGDRPGHALFGIMQGGVTPELRAESAEKLTEIGFDGYAVGGLAVGEGQEAMFGVLDYAPGFLPEDRPRYLMGVGKPDDIVGAVERGIDMMDCVLPSRSGRTGQAWTRRGQVNIKNARHMDDPRPLDEHCTCPACRNYSRAYLHHVFRAGEMISGMLLTWHNLQYYQELMQGLRDAIAAGRLSAFVAEFHALRAGGDIEPL

SEQ ID NO: 60087 - protein, 376 aa, Rhodobacter sphaeroides
  REGION 1..376: note = sp|Q3J2H4|TGT_RHOS4 Queuine tRNA-ribosyltransferase; OS = Rhodobacter sphaeroides (strain ATCC 17023 / 2.4.1 / NCIB 8253 / DSM 158) OX=272943 GN=tgt PE=3 SV=1
MTQRFSFELTATDGRARTGVISTPRGEIRTPAFMPVGTAGTVKAMLPENVRATGADILLGNTYHLMLRPTAERVVRLGGLHRFMNWDRPILTDSGGFQVMSLADLRKLSEEGVTFRSHIDGSKHHLSPERSMEIQRLLGSDIVMAFDECPALPATEEAVAQSMRLSMRWARRSREAFGDRPGHALFGIMQGGVTRDLREESAAALREIGFEGYAIGGLAVGEGQEAMFGVLDYAPGLLPEDRPRYLMGVGKPDDIVGAVERGVDMMDCVLPSRSGRTGQAWTRRGQVNIKNARHMDDPRPLDEACSCPACRSYSRAYLHHVFRAQEIIASMLLTWHNLHYYQELMQGLRTAIAAGRLGEFVAAFHAARAEGDIEPL

SEQ ID NO: 60088 - protein, 376 aa, Rhodobacter sphaeroides
  REGION 1..376: note = sp|A3PJT9|TGT_RHOS1 Queuine tRNA-ribosyltransferase; OS = Rhodobacter sphaeroides (strain ATCC 17029 / ATH 2.4.9); OX = 349101 GN=tgt PE=3 SV=1
MTQRFSFELTATDGRARTGVISTPRGEIRTPAFMPVGTAGTVKAMLPENVRATGADILLGNTYHLMLRPTAERVARLGGLHRFMNWDRPILTDSGGFQVMSLADLRKLSEEGVTFRSHIDGSKHHLSPERSMEIQRLLGSDIVMAFDECPALPATEEAVAQSMRLSMRWARRSREAFGDRPGHALFGIMQGGVTRDLREESAAALREIGFEGYAIGGLAVGEGQEAMFGVLDYAPGFLPEDRPRYLMGVGKPDDIVGAVERGVDMMDCVLPSRSGRTGQAWTRRGQVNIKNARHMDDPRPLDEACSCPACRSYSRAYLHHVFRAQEIIASMLLTWHNLHYYQELMQGLRTAIAAGRLGEFVAAFHAARAEGDIEPL

SEQ ID NO: 60089 - protein, 376 aa, Rhodobacter veldkampii
  REGION 1..376: note = tr|A0A2T4JHM2|A0A2T4JHM2_9RHOB Queuine tRNA-ribosyltransferase OS=Rhodobacter veldkampii DSM 11550 OX=1185920 GN=tgt PE=3 SV=1
MTTAFRFDLHATDGRARTGVIHTPRGAIRTPAFMPVGTAATVKAMLPESVRATGADILLGNTYHLMLRPTAERIARLGGLHRFMGWDRPILTDSGGFQVMSLASLRKMTEEGVRFSSHIDGSKHMLSPERSMEIQRLLGSDIVMAFDECTSFPADEATARASMELSMRWARRSRDAFGDRPGHALFGIMQGSVYPDQRAESAAALRAIGFDGYAVGGLAVGEGQETMFSVLDYAPDLLPSDRPRYLMGVGKPDDIVGAVERGIDMMDCVLPSRSGRTGQAFTRRGVVNIKNARHMDDPRPLDEACTCPACRGYSRAYLHHVFRAQEIISSMLLTWHNLHYYQELMSGLRSAIAGGRLSAFVAEFHAQRAQGDIEPL

SEQ ID NO: 60090 - protein, 377 aa, Rhodobacter vinaykumarii
  REGION 1..377: note = tr|A0A1N7JIR4|A0A1N7JIR4_9RHOB Queuine tRNA-ribosyltransferase OS=Rhodobacter vinaykumarii; OX = 407234 GN=tgt PE=3 SV=1
MSDPAFRFDLAATCGAARTGTIHTPRGPIRTPAFMPVGTAATVKAMLPESVAATGADILLGNTYHLMLRPTAERVAALGGLHRFMNWSGPILTDSGGFQVMSLTGLRKMTEEGVRFASHIDGSRHMLSPERSMEIQRLLGSDIVMAFDECTPYPATREQAQASMELSMRWARRSRDAFGDRPGHALFGIMQGSTFPDLRAQSAETLREIGFDGYAIGGLAVGEGQAAMFEVLDYAPGLLPADRPRYLMGVGKPDDIVGAVQRGVDMMDCVLPSRSGRTGQAFTRHGVVNIKNARHAEDPRPLDEACTCPACRGYSRAYLHHVFRAGEIISSMLLTWHNLHYYQELMAGLRGAIAAGTLDSFVADFHAMRAPGDIPPL

SEQ ID NO: 60091 - protein, 375 aa, unidentified
  source 1..375: note = Rhodobacter viridis
  REGION 1..375: note = tr|A0A318UH17|A0A318UH17_9RHOB Queuine tRNA-ribosyltransferase OS=Rhodobacter viridis OX=1054202; GN = tgt PE=3 SV=1
MTQFSFSLSATDGAARAGVIHTPRGEIRTPAFMPVGTAATVKAMMPESVRATGADILLGNTYHLMLRPTAERIARLGGLHKFMNWERPILTDSGGFQVMSLASLRKLTEEGVTFSSHIDGSKHHLSPERSMEIQKLLGSDIVMAFDECPALPADDATVAKSMRLSMRWAERSRDAFGDRPGHALFGIMQGGVTRELREESAEKLKEIGFDGYAVGGLAVGEGQEAMFSVLDYAPGFLPADKPRYLMGVGKPDDIVGAVERGIDMMDCVLPSRSGRTGQAWTRRGQINIKNARHMDDPRPLDEACGCPACRNYSRAYLHHVFKAQEMISGMLLTWHNLHYYQDLMAGLREAIAAGRLSAFVAEFHAARAEGDIDPL

SEQ ID NO: 60092 - protein, 370 aa, unidentified
  source 1..370: note = Rhodobacteraceae bacterium
  REGION 1..370: note = tr|A0A3N9QNE1|A0A3N9QNE1_9RHOB Queuine tRNA-ribosyltransferase OS=Rhodobacteraceae bacterium CH30; OX = 2490538 GN=tgt PE=3 SV=1
MLKFTLHKTSGGARRGTLELNHGTVETPVFQPVGTYGSVKAMSPLELNEIGAQIILGNTFHLWLRPGLEVIESFGGLHGFMGWDKPILTDSGGFQVFSLGALRKLTEEGCTFHSPVNGDKLFLSPEISMKIQTVLNSDIVMQLDECTPGQVDHKTAESSMQMSLRWAARSRQAFDDLNNPNALFGIVQGNLYTDLRQKSLEGLMEIGFDGIAIGGLSVGEPKPEMYRMLEEMRDMLPAEKPHYLMGVGTPEDLVQGVANGIDMFDCVMPTRNARNGWIFTRYGDIKIKNARHKLDHAPLDEECSCYACRNFSRAYLHHLHRTGEILGARLNTIHNLHYYQELMQEMRDAIDADRFEDWRASFHEKRARGA

SEQ ID NO: 60093 - protein, 379 aa, unidentified
  source 1..379: note = Rhodobacteraceae bacterium
  REGION 1..379: note = tr|A0A1B6YFV9|A0A1B6YFV9_9RHOB Queuine tRNA-ribosyltransferase OS=Rhodobacteraceae bacterium EhC02 OX=1849170 GN=tgt PE=3 SV=1
MTQTAGRFRFDLTATDGKARTGAISTPRGTIRTPAFMPVGTAATVKGMLPESVAATGADILLGNTYHLMLRPTAERIDRLGGLHRFMNWDKPILTDSGGFQVMSLAALRKLTEEGVTFKSHIDGSRHHLSPERSMEIQRLLGSDIVMCFDECPALPATDAEVAKSMRLSMRWAQRSRDAFGDRPGHALFGIQQGGVTQELRAESAEALCAIGFDGYAVGGLAVGEGQEAMFGVLDYAPDMLPQDKPRYLMGVGKPDDIVGAVKRGIDMMDCVLPSRSGRTGQAFTRHGVVNIKNARHQDDPRPLDEACGCPACRGYSRAYLHHVFRAGEMISGMLLTWHNLHYYQELMQGMRDAIAAGRFAAFEADFHAQRAEGDIPPL

SEQ ID NO: 60094 - protein, 376 aa, unidentified
  source 1..376: note = Rhodobacterales bacterium
  REGION 1..376: note = tr|A0A1Y5HB64|A0A1Y5HB64_9RHOB Queuine tRNA-ribosyltransferase OS=Rhodobacterales bacterium 56_14_T64 OX=1856299 GN=tgt PE=3 SV=1
MSPKVTFDLQASDGKARTGVISTPRGEIRTPAFMPVGTAATVKAMMPESVRATGADILLGNTYHLMLRPTAERIDRLGGLHKFMNWERPILTDSGGFQVMSLAGLRKLTEHGVTFKSHVDGSKHEITPERSMEIQRLLGSDIVMCFDECPALPATDAQVAESMRMSMRWAARSRDAFGDRPGHALFGIQQGGVTQELRAESAEKLREIGFDGYAVGGLAVGEGQEAMFGVLDYAPDMLPEDKPRYLMGVGKPDDIVGAVARGIDMMDCVLPSRSGRTGQVYTRQGVVNIKNARHIDDPRPLDENCSCPACRNYSRAYLSHVFRSNEMISGMLLTWHNLQYFQDIMAGMREAIAAGVFSTWQSDFHAGRAQGDIEPL

SEQ ID NO: 60095 - protein, 386 aa, unidentified
  source 1..386: note = Rhodobacterales bacterium
  REGION 1..386: note = tr|A0A2M7QMT4|A0A2M7QMT4_9RHOB Queuine tRNA-ribosyltransferase OS=Rhodobacterales bacterium CG_4_10_14_0_8_um_filter_70_9 OX=1974084 GN=tgt PE=3 SV=1
MALAAFAKDGDAPVFRFSVSAADGAARTGVIATPRGDIRTPAFMPVGTAATVKGMLPESVRATGADIVLGNTYHLMLRPGAERMARLGGLHRFMNWPRPILTDSGGFQVMSLTGLRKMSEEGVRFASHIDGSTHMLTPERSMEIQRLLGSDIVMSFDECTPFPAEEAVAAASMRLSMRWAQRSRDAFGDRPGHALFGIQQGSVFRALREESAEKLRAIGFDGYAIGGLAVGEGQEAMFGVLDYATGLLPPDKPRYLMGVGTPSDIVGAVRRGVDMFDCVMPTRSGRTGLAHTRFGQVKIKNARHADDPRPIDPDCACPCCTGYSRAYLHHVFKAGEMICAMLLTWHNLHYYQELMQGLRAAIAAQRLEDFARAFDSARAAGDLPPL

SEQ ID NO: 60096 - protein, 368 aa, unidentified
  source 1..368: note = Rhodobiaceae bacterium
  REGION 1..368: note = tr|A0A2E0T7T9|A0A2E0T7T9_9RHIZ Queuine tRNA-ribosyltransferase OS=Rhodobiaceae bacterium; OX = 2026785 GN=tgt PE=3 SV=1
MFKIIAKDRHARCGQIDLSHGMIETPVFMPVGTQGTVKAISVDTLKKIGFKIILGNTYHLYLRPGIEILNKIGGLNNFMKWDRPILTDSGGFQIMSLSKLMKIEEGGVKFQSHIDGKEFYLSPDISMKVQDSIGSDIHMILDQCIEFDQDISNIRKAMNLSLKWAEMSKKSFVKKKGRMLFGIIQGGTDQHLREHSAIETIDIGFDGYAIGGLAVGEGHDLMLKTLDFTIPNLPDEKPRYLMGVGTPEDLVESVKRGVDMFDCVMPTRAGRHGLAYTKFGAINLRNSKFSDDMRPIDEESGCPIASEYSRSYLHHLIKSKEILAAMLISEINLNYYNTLMVDLRLAIRDNRLDRTIEVIKGDWATVDA

SEQ ID NO: 60097 - protein, 368 aa, unidentified
  source 1..368: note = Rhodobiaceae bacterium
  REGION 1..368: note = tr|A0A2E9YLW7|A0A2E9YLW7_9RHIZ Queuine tRNA-ribosyltransferase OS=Rhodobiaceae bacterium; OX = 2026785 GN=tgt PE=3 SV=1
MKKYSFNVKANDGFARLGQIKTSNGSINTPAFMPIATQGSIKFTPIEFIKEIGFDLILSNTYHLLLRPGLKVLNKFDGISRFMKWDGPMLTDSGGFQVMSLAKFRKISKEGVKFQSHIDGSTHILTPENVVDSQNIINSNIQMSLDECLHYPASFEDSKKSMRLSLNWAERARRRFLDTKKNKSDAQFGIIQGGIFKDLRIESIKENTDIDFDGYAIGGLAVGEGHEMMKEIVKYTTPELPINKVRYLMGVGKPKDIIIAVENGIDIFDCVIPTREGRHGNAYTNYGIINLNNSKFSNDLNPIDEESTYYVTKNYSKSYLHHLLRINEPLGGMLVSLHNLNYYNVLMNKIRNAIRDKKFNTFKENFLL

SEQ ID NO: 60098 - protein, 381 aa, Rhodobium orientis
  REGION 1..381: note = tr|A0A327JGB3|A0A327JGB3_9RHIZ Queuine tRNA-ribosyltransferase OS=Rhodobium orientis OX=34017; GN = tgt PE=3 SV=1
MSRYTYRLIASDGMARRSELTTAHGLVKTPAFMPVGTQGTVKAMYTDQVRATGADVVLGNTYHLMLRPGAERVARLGGLHRFMNWPHTILTDSGGFQVMSLAQLRKLDETGVKFRSHLDGSEHVLTPERSIEIQGLLGADIQMQLDECIRLPASEDEVARAMRLSLAWAERSKAAFAAMGGPEKGQGLHGIVQGGDVKSLRIESARELAAMDFGGYSIGGLAVGEPQDVMLDMLETTLPELPETKPRYLMGVGTPEDIVESVARGVDMFDCVLPTRAGRHGLAYTRFGKINLKNARHADDPRPLDETSNCPAARDYSRAYLHHLVKAGEALSMMLLTWNNLAYYQSLMAGMREAISAGTFAGFREETLAGWARGDIAPHVP

SEQ ID NO: 60099 - protein, 375 aa, Rhodoblastus acidophilus
  REGION 1..375: note = tr|A0A212RG65|A0A212RG65_RHOAC Queuine tRNA-ribosyltransferase OS=Rhodoblastus acidophilus; OX = 1074 GN=tgt PE=3 SV=1
MTDDFRFTLRARDGGARLGEISTPRGAIRTPAFMPVGTAATVKAMYPGQVRELGADVVLGNVYHLMLRPGAERVAELGGLHKFMNWPHNILTDSGGFQVMSLAKLRKLDENGVTFQSHIDGSRHQLTPERSMEIQRLLGSDIQMQFDECVKLPCSHEEAERAMRLSLRWAERSRKAFGEQPGRACFGIVQGGAERDLRIESARALADMDFGGMAVGGLAVGEPQEVMLAMIETVMPHLPEHKPHYLMGVGTPDDLLQSVKRGIDMFDCVMPTRAGRHGLAYTRWGKLNLKNARHAEDPRPLDPTSSCPAARDYSRAYLHHLVRCQEILGMMLLTWVNLAYYQDLMAGAREAISAGRYDDYLAQVKDNWTRDGEPG

SEQ ID NO: 60100 - protein, 375 aa, Rhodoblastus sphagnicola
  REGION 1..375: note = tr|A0A2S6MXS2|A0A2S6MXS2_9RHIZ Queuine tRNA-ribosyltransferase OS=Rhodoblastus sphagnicola; OX = 333368 GN=tgt PE=3 SV=1
MTEDFQFTLRARDGGARLGEISTPRGIIRTPAFMPVGTAATVKAMYPGQVRELGADVVLGNVYHLMLRPGAERVAQLGGLHRFMNWPHNILTDSGGFQVMSLAKLRKLDENGVTFQSHIDGSRHQLTPERSMEIQRLLGSDIQMQFDECVKLPCSHEEAERAMRLSLRWAERSRKAFGEQPGRACFGIVQGGAERDLRIESAKTLSDMDFGGLAVGGLAVGEPQDVMLAMIETVMPHLSEHKPHYLMGVGTPDDLLESVARGIDMFDCVMPTRAGRHGLAYTRWGKINLKNAKNADDPRPLDPMSTCPAARDYSRAYLHHLMRCQEILGMMLLTWVNLAYYQDLMVYAREAIAQGRYDDYRAEVKENWARGGEPG

SEQ ID NO: 60101 - protein, 421 aa, Rhodococcus aetherivorans
  REGION 1..421: note = tr|A0A059MGF1|A0A059MGF1_9NOCA Queuine tRNA-ribosyltransferase OS=Rhodococcus aetherivorans; OX = 191292 GN=tgt PE=3 SV=1
MTDPSATASAVPTPPDPFFTVGTRLANGLGRTGTIHTPHGDIHTPAFVGVGTKATVKAVLPEAMKELGVQALLANAYHLYLQPGSDIVDEAGGLGKFMNWDGPTFTDSGGFQVMSLGVGFKKVLAMDAVGVRSDDVIAEGKERLAHVDDDGVTFKSHLDGSRHRFTPEVSMRIQHQLGADIMFAFDELTTLMNTRGYQEQSVERTQAWAVRCIAEHEKLTAQRAHRPYQALFGVVQGAQYEDLRRQACRGLESIVGESGRGFDGYGIGGALEKQNLGTIVRWCTEELPEHKPRHLLGISEPDDMFVAIEHGVDTFDCVNPSRVARNAAIYHPDGRFNINTSRFRRDFTPIDEDCDCYTCRHYTRAYIHHLFKAKEMLASTLCTIHNERFTVRLVDEIRAAIDGGYLEEHKAETLGRFYARR

SEQ ID NO: 60102 - protein, 421 aa, unidentified
  source 1..421: note = Rhodococcus agglutinans
  REGION 1..421: note = tr|A0A438BBT6|A0A438BBT6_9NOCA Queuine tRNA-ribosyltransferase OS=Rhodococcus agglutinans; OX = 1644129 GN=tgt PE=3 SV=1
MSDVVPTPPDPFFTVGTRLPDRLGRTGTIHTPHGDIQTPAFIAVGTKATVKAVLPESMRDLGAQAVLANAYHLYLQPGPDIVDEAGGLGKFMNWDGPTFTDSGGFQVMSLGVGFKKVLAMEAVGVQSDDVIAEGKQRLAHVDDDGVTFKSHLDGSPHRFTPEVSMQIQHQLGADIMFAFDELTTLLNTRGYQEQSVERTQAWAVRCIAEHEKLTAERAHRPYQALFGVVQGAQYEDLRRQAARGLESITGVSGRGFDGYGIGGALEKQNLGTIVRWVNEELPEHKPRHMLGISEPDDMFVAIENGADTFDCVNPSRVARNAAIYHPDGRFNINTARFRRDFTPIDDECDCYTCANYTRAYIHHLFKAKEMLASTLCTIHNERFTVRLVDRIRESIEGGYFEELKRETLGRFYGKRPSSNGA

SEQ ID NO: 60103 - protein, 414 aa, unidentified
  source 1..414: note = Rhodococcus biphenylivorans
  REGION 1..414: note = tr|A0A2Z4VN05|A0A2Z4VN05_9NOCA Queuine tRNA-ribosyltransferase OS=Rhodococcus biphenylivorans; OX = 1500843 GN=tgt PE=3 SV=1
MPTPPDPFFTVGARLDNGLGRTGTIHTPHGDIRTPAFVPVGTKATVKAVLPETMAELGSQALLANAYHLYLQPGSDIVDEAGGLGKFMNWPGPTFTDSGGFQVMSLGAGFKKVIAMESVGVQNDDVIAKGKERLAHVDDDGVTFKSHLDGSRHRFTPEVSMRIQHELGADIMFAFDELTTLMNTRGYQERSLERTQAWAVRCIAEHEKLTAERARRPYQALFGVVQGAQYEDLRRQACRGLESIVGETGRGFDGYGIGGALEKHNLGTIVRWCTEELPEHKPRHLLGISEPDDIFVAVEHGVDTFDCVNPSRVARNAAIYHPDGRFNINTSRHRRDFTPIDENCDCYTCRNYTRAYIHHLFKAKEMLASTLCTIHNERFTVRLVDDIRANMENGTLAEFKAETLGRFYASRRRA

SEQ ID NO: 60104 - protein, 437 aa, Rhodococcus coprophilus
  REGION 1..437: note = tr|A0A2X4U1H8|A0A2X4U1H8_9NOCA Queuine tRNA-ribosyltransferase OS=Rhodococcus coprophilus; OX = 38310 GN=tgt PE=3 SV=1
MTCHNRRVSVLRSTDSALPVPPDPFFTVGARLDNGLGRTGTIHTPHGDIRTPAFIGVGTKATVKAVLPEAMKELGAQALLANAYHLYLQPGSDIVDEAGGLGKFMNWDGPTFTDSGGFQVMSLGVGFKKVIAMEAVGVQNDDVMAHGKERLARVDDDGVTFKSHLDGSMHRFTPEVSMQIQHQLGADIMFAFDELTTLMNTRGYQERSIERTQAWAVRCIAEHEKLTAERAHRPYQALFGVVQGAQYEDLRREACRGLESIVGESGRGFDGYGIGGALEKHNLGTIVRWCCEELPDSKPRHMLGISEPDDVFVAIEHGADTFDCVNPSRVARNAAIYHPDGRFNINTSRFRRDFTPIDENCDCYTCTHYTRAYIHHLFKAKEMLASTLCTIHNERFTVRLVDDIRLSIEGGYFDEHKAETLGRFYAKKRQAAAETGA

SEQ ID NO: 60105 - protein, 429 aa, unidentified
  source 1..429: note = Rhodococcus enclensis
  REGION 1..429: note = tr|A0A1C4EF06|A0A1C4EF06_9NOCA Queuine tRNA-ribosyltransferase OS=Rhodococcus enclensis; OX = 1049584 GN=tgt PE=3 SV=1
MTSAVPTPPEPVVDKRPESIFTIGTRLEDRLGRTGTIHTPHGDIATPSFVAVGTKATVKAVLPESMKELGAQSLLANAYHLYLQPGPDIVDEAGGLGKFMNWDGPTFTDSGGFQVMSLGVGFKKVLAMEAVGVQSDDVIAKGKERLATVDDEGVTFKSHLDGSKHRFTPEVSMQIQHQLGADIMFAFDELTTLLNTRGYQERSVERTQAWAIRCINEHEKLTAERADKPYQALFGVIQGAQYEDLRRQACRGLESIEGENGYGFDGYGIGGALEKQNLGTIVRWCNEELPENKPRHMLGISEPDDFFVAIENGADTFDCVNPSRVARNAAIYVRSGRFNINTSRFRRDFTPIDDECDCYTCANYTRAYIHHLFKAKEMLASTLCTIHNERFTVKLVDDIRASIEGGYFHDFKADMLGKFYAAKTPAPQA

SEQ ID NO: 60106 - protein, 429 aa, unidentified
  source 1..429: note = Rhodococcus enclensis
  REGION 1..429: note = tr|A0A2A5JHE9|A0A2A5JHE9_9NOCA Queuine tRNA-ribosyltransferase OS=Rhodococcus enclensis; OX = 1049584 GN=tgt PE=3 SV=1
MTSAVPTPPAPSVDKRPESIFTIGTRLEDRLGRTGTIHTPHGDIATPSFVAVGTKATVKAVLPESMKELGAQSLLANAYHLYLQPGPDIVDEAGGLGKFMNWDGPTFTDSGGFQVMSLGVGFKKVLAMEAVGVQSDDVIAKGKERLATVDDEGVTFKSHLDGSKHRFTPEVSMQIQHQLGADIMFAFDELTTLLNTRGYQERSVERTQAWAIRCINEHEKLTAERVDKPYQALFGVIQGAQYEDLRRQACRGLESIEGENGYGFDGYGIGGALEKQNLGTIVRWCNEELPENKPRHMLGISEPDDFFVAIENGADTFDCVNPSRVARNAAIYVRSGRFNINTSRFRRDFTPIDDECDCYTCANYTRAYIHHLFKAKEMLASTLCTIHNERFTVKLVDDIRASIEGGYFHDFKADMLGKFYAAKTPAPQA

SEQ ID NO: 60107 - protein, 420 aa, Rhodococcus erythropolis
  REGION 1..420: note = tr|C0ZM75|C0ZM75_RHOE4 Queuine tRNA-ribosyltransferase OS=Rhodococcus erythropolis (strain PR4 / NBRC 100887) OX=234621 GN=tgt PE=3 SV=1
MPAVDKRPESIFTIGTRLEDRLGRTGTIHTPHGDIATPSFVAVGTKATVKAVLPESMKELGAQSLLANAYHLYLQPGPDIVDEAGGLGKFMNWDGPTFTDSGGFQVMSLGVGFKKVLAMEAVGVQSDDVIAKGKERLATVDDEGVTFKSHLDGSKHRFTPEVSMQIQHQLGADIMFAFDELTTLLNTRGYQERSVERTQAWAIRCINEHEKLTAERAEKPYQALFGVIQGAQYEDLRRQACRGLESIEGENGYGFDGYGIGGALEKQNLGTIVRWCNEELPENKPRHMLGISEPDDFFVAIENGADTFDCVNPSRVARNAAIYVRSGRFNINTSRFRRDFTPIDDECDCYTCANYTRAYIHHLFKAKEMLASTLCTIHNERFTVKLVDDIRASIEGGYFHDFKADMLGKFYAAKTPAPQT

SEQ ID NO: 60108 - protein, 429 aa, Rhodococcus erythropolis; identical to SEQ ID NO: 60105
  REGION 1..429: note = tr|A0A395QIM4|A0A395QIM4_RHOER Queuine tRNA-ribosyltransferase OS=Rhodococcus erythropolis; OX = 1833 GN=tgt PE=3 SV=1

SEQ ID NO: 60109 - protein, 412 aa, Rhodococcus fascians
  REGION 1..412: note = tr|A0A161GDM4|A0A161GDM4_RHOFA Queuine tRNA-ribosyltransferase OS=Rhodococcus fascians D188; OX = 1051973 GN=tgt PE=3 SV=1
MSSSNFGFDIGTRLDGELGRTGTIHTPHGDIATPAFIAVGTKATVKAVLPEAMKELGAQAVLANAYHLYLQPGSDIVDEAGGLGKFMNWDGPTFTDSGGFQVMSLGVGFKKVISMDASRVESDDVIAEGKERLAHVDDDGVTFKSHLDGSKHRFTPEVSMQIQHRLGADIMFAFDELTTLMNTRGYQEKSVDRTQAWAKRCVLEHERLTVERADKPYQALFGVVQGAQYEDLRRKAAHDLETITGETGRGFDGYGIGGALEKQNLGTITRWVNEELPEHKPRHMLGISEPDDFFVAIENGADTFDCVNPSRVARNAAIYVPTGRFNINTAKHRRDFTPIDENCDCYTCAHYTKAYIHHLFKAKEMLASTLCTIHNERFTVKLVDDIRASIEQQRFTEFKTEYLGRFYAPKTA

SEQ ID NO: 60110 - protein, 412 aa, Rhodococcus fascians
  REGION 1..412: note = tr|A0A260U1A9|A0A260U1A9_RHOFA Queuine tRNA-ribosyltransferase OS=Rhodococcus fascians OX=1828; GN = tgt PE=3 SV=1
MSSSNFGFDIGTRLDGELGRTGTIHTPHGDIATPAFIAVGTKATVKAVLPEAMKELGAQAVLANAYHLYLQPGSDIVDEAGGLGKFMNWDGPTFTDSGGFQVMSLGVGFKKVISMDASRVESDDVIAEGKERLAHVDDDGVTFKSHLDGSKHRFTPEVSMQIQHRLGADIMFAFDELTTLMNTRGYQEKSVDRTQAWAKRCVLEHERLTVERADKPYQALFGVVQGAQYEDLRRKAAHDLETITGDTGRGFDGYGIGGALEKQNLGTITRWVNEELPEHKPRHMLGISEPDDFFVAIENGADTFDCVNPSRVARNAAIYVPTGRFNINTAKHRRDFTPIDENCDCYTCAHYTKAYIHHLFKAKEMLASTLCTIHNERFTVKLVDDIRASIEQQRFTEFKTEYLGRFYASKTA

SEQ ID NO: 60111 - protein, 419 aa, Rhodococcus gordoniae
  REGION 1..419: note = tr|A0A379M2F3|A0A379M2F3_9NOCA Queuine tRNA-ribosyltransferase OS=Rhodococcus gordoniae OX=223392; GN = tgt PE=3 SV=1
MTDPSIPTPSDPFFTVGARLDNGLGRTGTIHTPHGDIRTPAFIPVGTKATVKAVLPETMAELGSQALLANAYHLYLQPGSDIVDEAGGLGQFMNWPGPTFTDSGGFQVMSLGAGFKKVIAMESVGVQNDEVIAKGKERLAHVDDDGVTFKSHLDGSRHRFTPEVSMRIQHELGADIMFAFDELTTLMNTRGYQERSLERTQAWAVRCIAEHEKLTAERAHRPYQALFGVVQGAQYEDLRRQACRGLESIVGETGRGFDGYGIGGALEKHNLGTIVRWCTEELPEHKPRHLLGISEPDDVFVAVEHGVDTFDCVNPSRVARNAAIYHPDGRFNINTSRHRRDFTPIDENCDCYTCRNYTRAYIHHLFKAKEMLASTLCTIHNERFTVRLVDDIRTSIENGTFAEFKTETLGRFYASRRQA

SEQ ID NO: 60112 - protein, 417 aa, unidentified
  source 1..417: note = Rhodococcus hoagii
  REGION 1..417: note = tr|A0A3S5Y1S6|A0A3S5Y1S6_RHOH1 Queuine tRNA-ribosyltransferase OS=Rhodococcus hoagii (strain 103S) OX=685727 GN=tgt PE=3 SV=1
MPTPPDPFFTVGTRLPDRLGRTGTIHTPHGDIRTPAFIAVGTKATVKAVLPESMKDLGTQAVLANAYHLYLQPGPDIVDEAGGLGKFMNWDGPTFTDSGGFQVMSLGVGFKKVLAMEAVGVQSDDVIAEGKQRLAHVDDDGVTFKSHLDGSPHRFTPEVSMQIQHQLGADIMFAFDELTTLLNTRGYQEQSVERTQAWAVRCIAEHEKLTAERAHRPYQALFGVVQGAQYEDLRRQAARGLESITGVSGRGFDGYGIGGALEKQNLGTIVRWVNEELPEHKPRHMLGISEPDDMFVAIENGADTFDCVNPSRVARNAAIYHPDGRFNINTARFRRDFTPIDDECDCYTCAHYTRAYIHHLFKAKEMLASTLCTIHNERFTVRLVDRIRESIEGGYFDEYKAEVLGRFYGSKPSSTGA

SEQ ID NO: 60113 - protein, 421 aa, unidentified
  source 1..421: note = Rhodococcus hoagii
  REGION 1..421: note = tr|A0A2R3S407|A0A2R3S407_RHOHA Queuine tRNA-ribosyltransferase OS=Rhodococcus hoagii OX=43767; GN = tgt PE=3 SV=1
MSDVVPTPPDPFFTVGTRLPDRLGRTGTIHTPHGDIRTPAFIAVGTKATVKAVLPESMKDLGTQAVLANAYHLYLQPGPDIVDEAGGLGKFMNWDGPTFTDSGGFQVMSLGVGFKKVLAMEAVGVQSDDVIAEGKQRLAHVDDDGVTFKSHLDGSPHRFTPEVSMQIQHQLGADIMFAFDELTTLLNTRGYQEQSVERTQAWAVRCIAEHEKLTAERAHRPYQALFGVVQGAQYEDLRRQAARGLESITGVSGRGFDGYGIGGALEKQNLGTIVRWVNEELPEHKPRHMLGISEPDDMFVAIENGADTFDCVNPSRVARNAAIYHPDGRFNINTARFRRDFTPIDDECDCYTCAHYTRAYIHHLFKAKEMLASTLCTIHNERFTVRLVDRIRESIEGGYFDEYKAEVLGRFYGSKPSSTGA

SEQ ID NO: 60114 - protein, 414 aa, Rhodococcus imtechensis
  REGION 1..414: note = tr|I0WQ70|I0WQ70_9NOCA Queuine tRNA-ribosyltransferase OS=Rhodococcus imtechensis RKJ300 = JCM 13270 OX=1165867 GN=tgt PE=3 SV=1
MNAVVPTPPDPFFTVGTRLDGQLGRTGTIHTPHGDIATPSFVAVGTKATVKAVLPESMKELGAQSLLANAYHLYLQPGPDIVDEAGGLGKFMNWDGPTFTDSGGFQVMSLGVGFKKVLAMEAVGVRSDDVIAKGKERLATVDDDGVTFKSHLDGSRHRFTPEVSMQIQHQLGADIMFAFDELTTLLNTRRYQEQSVERTQAWAVRCIAEHEKLTAERSHRPYQALFGVVQGAQYEDLRRQACRGLESITGESGRGFDGYGIGGALEKQNLGTIVRWCNEELPEHKPRHMLGISEPDDFFVAIENGADTFDCVNPSRVARNAAIYHPDGRFNINTSRFRRDFTPIDENCDCYTCANYTSAYIHHLFKAKEMLASTLCTIHNERFTVRLVDQIRASIEGGYFDEFKADTLGRFYRT

SEQ ID NO: 60115 - protein, 414 aa, Rhodococcus jostii
  REGION 1..414: note = tr|Q0S920|Q0S920_RHOJR Queuine tRNA-ribosyltransferase OS=Rhodococcus jostii (strain RHA1) OX=101510 GN=tgt PE=3 SV=1
MNAVVPTPPDPFFTVGTRLDGQLGRTGTIHTPHGDIATPSFVAVGTKATVKAVLPESMKELGAQSLLANAYHLYLQPGPDIVDEAGGLGKFMNWDGPTFTDSGGFQVMSLGVGFKKVLAMEAVGVRSDDVIAKGKERLATVDDDGVTFKSHLDGSRHRFTPEVSMQIQHQLGADIMFAFDELTTLLNTRGYQEQSVERTQAWAVRCIAEHEKLTAERAHRPYQALFGVVQGAQYEDLRRQACRGLESITGESGRGFDGYGIGGALEKQNLGTIVRWCNEELPEHKPRHMLGISEPDDFFVAIENGADTFDCVNPSRVARNAAIYHPDGRFNINTSRFRRDFTPIDENCDCYTCANYTSAYIHHLFKAKEMLASTLCTIHNERFTVRLVDQIRASIEGGYFDEFKAETLGRFYRT

SEQ ID NO: 60116 - protein, 414 aa, Rhodococcus jostii
  REGION 1..414: note = tr|A0A1H5C0Q2|A0A1H5C0Q2_9NOCA Queuine tRNA-ribosyltransferase OS=Rhodococcus jostii OX=132919; GN = tgt PE=3 SV=1
MNAVVPTPPDPFFTVGTRLEGKLGRSGTIHTPHGDIATPSFVAVGTKATVKAVLPESMKELGAQSVLANAYHLYLQPGPDIVDEAGGLGKFMNWDGPTFTDSGGFQVMSLGVGFKKVLAMEAVGVRSDDVIAKGKERLATVDDDGVTFKSHLDGSRHRFTPEVSMQIQHQLGADIMFAFDELTTLLNTRGYQEQSVERTQAWAVRCIAEHEKLTAERSHRPYQALFGVVQGAQYEDLRRQACRGLESITGESGRGFDGYGIGGALEKQNLGTIVRWCNEELPEHKPRHMLGISEPDDFFVAIENGADTFDCVNPSRVARNAAIYHPDGRFNINTSRFRRDFTPIDENCDCYTCANYTSAYIHHLFKAKEMLASTLCTIHNERFTVRLVDQIRDSIDGGYFDEFKAETLGRFYRT

SEQ ID NO: 60117 - protein, 414 aa, Rhodococcus koreensis
  REGION 1..414: note = tr|A0A1H4UBQ6|A0A1H4UBQ6_9NOCA Queuine tRNA-ribosyltransferase OS=Rhodococcus koreensis OX=99653; GN = tgt PE=3 SV=1
MNAVVPTPPDPFFTVGTRLDGQLGRTGTIHTPHGDIATPSFVAVGTKATVKAVLPESMKDLGAQSLLANAYHLYLQPGPDIVDEAGGLGKFMNWDGPTFTDSGGFQVMSLGVGFKKVLAMEAVGVRSDDVIAKGKERLATVDDDGVTFKSHLDGSRHRFTPEVSMQIQHQLGADIMFAFDELTTLLNTRGYQEQSVERTQAWAVRCIAEHEKLTAERSHRPYQALFGVVQGAQYEDLRRQACRGLESITGESGRGFDGYGIGGALEKQNLGTIVRWCNEELPEHKPRHMLGISEPDDVFVAIENGADTFDCVNPSRVARNAAIYHPDGRFNINTSRFRRDFTPIDENCDCYTCANYTSAYIHHLFKAKEMLASTLCTIHNERFTVRLVDQIRASIEGGYFAEFKAETLGRFYRT

SEQ ID NO: 60118 - protein, 408 aa, Rhodococcus kroppenstedtii
  REGION 1..408: note = tr|A0A1I0SYV4|A0A1I0SYV4_9NOCA Queuine tRNA-ribosyltransferase OS=Rhodococcus kroppenstedtii; OX = 293050 GN=tgt PE=3 SV=1
MSAPQDDFFTVGTRLDGQLGRTGTLRTPHGTIETPAFIAVGTKATVKAVLPETMKELGAQALLANAYHLYLQPGPDIVDEAGGLGAFMNWDGPTFTDSGGFQVMSLGVGFKKVISMDASRVQSDDVIAEGKERLARVDDDGVTFKSHLDGSRHRFTPEVSMQIQHQLGADIMFAFDELTTLMNTRAYQELSLDRTQAWAVRCIAEHERLTRERADKPYQALFGVVQGAQYEDLRRQAARGLESIVGESGRGFDGYGIGGALEKQNLGAIVRWVNEELPEHKPRHMLGISEPDDFFVAIENGADTFDCVNPSRVARNAAIYTRDGRYNVNTARFRRDFTPLDGDCDCYTCAHYTRAYLHHLFKAKEMLASTLATIHNERFTVRLVDDIRASIHDGRFDEFKAETLGRFY

SEQ ID NO: 60119 - protein, 417 aa, Rhodococcus kyotonensis
  REGION 1..417: note = tr|A0A177YKK0|A0A177YKK0_9NOCA Queuine tRNA-ribosyltransferase OS=Rhodococcus kyotonensis; OX = 398843 GN=tgt PE=3 SV=1
MRVAPKVVPVSAPNDPFFSIGTRIEDRLGRTGTIHTPHGDIATPAFIAVGTKATVKAVLPEAMKELGAQAVLANAYHLYLQPGPDIVDEAGGLGKFMNWDGPTFTDSGGFQVMSLGVGFKKVISMDASRVESDDVIAEGKERLAHVDDDGVTFKSHLDGSRHRFTPEVSMQIQHQLGADIMFAFDELTTLMNTRGYQELSVDRTHEWAKRCVAEHERLTAERVGKPYQALFGVVQGAQYEDLRRKAASGLETIEGETGRGFDGYGIGGALEKQNLGTITRWVNEELPEHKPRHMLGISEPDDFFTAIENGADTFDCVNPSRVARNAAIYVPTGRFNINTARFKRDFTPIDENCDCYTCAHYTKAYIHHLFKAKEMLASTLCTIHNERFTVKLVDDIRASIEQGRFEEFKKEFLGRFY

SEQ ID NO: 60120 - protein, 422 aa, Rhodococcus kyotonensis
  REGION 1..422: note = tr|A0A239FD95|A0A239FD95_9NOCA Queuine tRNA-ribosyltransferase OS=Rhodococcus kyotonensis; OX = 398843 GN=tgt PE=3 SV=1
MGGAPKVGPVSAPNDPFFTIGTRLDDRLGRTGTIHTPHGDIATPAFIAVGTKATVKAVLPEAMKELGAQAVLANAYHLYLQPGPDIVDEAGGLGKFMNWDGPTFTDSGGFQVMSLGVGFKKVISMDATRVESDDVIAEGKERLAHVDDDGVTFKSHLDGSRHRFTPEVSMQIQHQLGADIMFAFDELTTLMNTRGYQELSVDRTQAWARRCVLEHERLTAERVGKPYQALFGVVQGAQYEDLRRKAAHDLETIEGETGRGFDGYGIGGALEKQNLGTITRWVNEELPEHKPRHMLGISEPDDFFTAIENGADTFDCVNPSRVARNAAIYVPTGRFNINTAKHRRDFTPIDENCDCYTCANYTRAYIHHLFKAKEMLASTLCTIHNERFTVKLVDDIRASIEQHRFHEFKEEFLGRFYSAQRS

SEQ ID NO: 60121 - protein, 410 aa, Rhodococcus maanshanensis
  REGION 1..410: note = tr|A0A1H7IA29|A0A1H7IA29_9NOCA Queuine tRNA-ribosyltransferase OS=Rhodococcus maanshanensis; OX = 183556 GN=tgt PE=3 SV=1
MSQSFFTLGTRLPGRLGRTGTIHTPHGEIKTPAFIAVGTNATVKAVLPETMKDLGTQAVLANAYHLYLQPGPDIVDEAGGLGRFMNWPGPTFTDSGGFQVMSLGVGFKKVLSMDSVGVQSDDVIAVGKERLAHVDDDGVTFKSHRDGSRHRFTPEISMSIQHRLGADIIFAFDELTTLFNTRGYQEESVERTQAWAVRCIAEHERLTAERSHRPYQALFGVVQGAQYEDLRRKACRGLESIVGETGNGFDGYGIGGALEKQNLGTIVRWCNEELPEHKPRHLLGISEPDDLFVAIENGADTFDCVNPSRVARNAAIYTTTGRFNINTSRFRRDYNPIDDECDCYTCKNYSRAYLHHLFKSKEMLSSTLATIHNERFTIRLVDRIRESIDGGYFDELKSETLGRFYATSRV

SEQ ID NO: 60122 - protein, 414 aa, Rhodococcus opacus; identical to SEQ ID NO: 60115
  REGION 1..414: note = tr|A0A2S8JE05|A0A2S8JE05_RHOOP Queuine tRNA-ribosyltransferase OS=Rhodococcus opacus OX=37919; GN = tgt PE=3 SV=1

SEQ ID NO: 60123 - protein, 414 aa, Rhodococcus opacus
  REGION 1..414: note = tr|A0A3A9TRP1|A0A3A9TRP1_RHOOP Queuine tRNA-ribosyltransferase OS=Rhodococcus opacus OX=37919; GN = tgt PE=3 SV=1
MNAVVPTPPDPFFTVGTRLDGQLGRTGTIHTPHGDIATPSFVAVGTKATVKAVLPESMKELGAQSLLANAYHLYLQPGPDIVDEAGGLGKFMNWDGPTFTDSGGFQVMSLGVGFKKVLAMEAVGVRSDDVIAKGKERLATVDDDGVTFKSHLDGSRHRFTPEVSMQIQHQLGADIMFAFDELTTLLNTRGYQERSVERTQAWAVRCIAEHEKLTAERSHRPYQALFGVVQGAQYEDLRRQACRGLESITGESGRGFDGYGIGGALEKQNLGTIVRWCNEELPEHKPRHMLGISEPDDFFVAIENGADTFDCVNPSRVARNAAIYHPDGRFNINTSRFRRDFTPIDENCDCYTCANYTSAYIHHLFKAKEMLASTLCTIHNERFTVRLVDQIRASIEGGYFDEFKADTLGRFYRT

SEQ ID NO: 60124 - protein, 414 aa, Rhodococcus pyridinivorans
  REGION 1..414: note = tr|A0A0V9UFW1|A0A0V9UFW1_9NOCA Queuine tRNA-ribosyltransferase OS=Rhodococcus pyridinivorans KG-16 OX=1441730 GN=tgt PE=3 SV=1
MPTPRDPFFTVGARLDNGLGRTGTIHTPHGDIRTPAFVPVGTKATVKAVLPETMAELGSQALLANAYHLYLQPGSDIVDEAGGLGKFMNWPGPTFTDSGGFQVMSLGAGFKKVIAMESVGVQNDDVIAKGKERLAHVDDDGVTFKSHLDGSRHRFTPEVSMRIQHELGADIMFAFDELTTLMNTRGYQERSLERTQAWAVRCIAEHEKLTAERAHRPYQALFGVVQGAQYEDLRRQACRGLESIVGETGRGFDGYGIGGALEKHNLGTIVRWCTEELPEHKPRHLLGISEPDDIFVAVEHGVDTFDCVNPSRVARNAAIYHPDGRFNINTSRHRRDFTPIDENCDCYTCRNYTRAYIHHLFKAKEMLASTLCTIHNERFTVRLVDDIRTNMENGTLAEFKAETLGRFYASRRQV

SEQ ID NO: 60125 - protein, 419 aa, Rhodococcus pyridinivorans
  REGION 1..419: note = tr|V9XK31|V9XK31_9NOCA Queuine tRNA-ribosyltransferase OS=Rhodococcus pyridinivorans SB3094 OX=1435356 GN=tgt PE=3 SV=1
MTDSSIPTPPDPFFTVGARLDNGLGRTGTIHTPHGDIRTPAFVPVGTKATVKAVLPEMMAELGSQALLANAYHLYLQPGSDIVDEAGGLGKFMNWPGPTFTDSGGFQVMSLGAGFKKVIAMESVGVQNDDVIAKGKERLAHVDDDGVTFKSHLDGSRHRFTPEVSMRIQHELGADIMFAFDELTTLMNTRGYQERSLERTQAWAVRCIAEHEKLTAERARRPYQALFGVVQGAQYEDLRRQACRGLESIVGETGRGFDGYGIGGALEKHNLGTIVRWCTEELPEHKPRHLLGISEPDDIFVAVEHGVDTFDCVNPSRVARNAAIYHPDGRFNINTSRHRRDFTPIDENCDCYTCRNYTRAYIHHLFKAKEMLASTLCTIHNERFTVRLVDDIRANMENGTLAEFKAETLGRFYASRCRA

SEQ ID NO: 60126 - protein, 379 aa, Rhodococcus qingshengii
  REGION 1..379: note = tr|A0A4R6A171|A0A4R6A171_9NOCA Queuine tRNA-ribosyltransferase OS=Rhodococcus qingshengii; OX = 334542 GN=tgt PE=3 SV=1
MTAIRYEFIKTCKQTGARLGRVHTPHGSFDTPAFMPVGTLATVKTMSPEDLKEMGAGIILSNTYHLWLRPGNEIIKEAGGLHKFMNWDRAILTDSGGFQVFSLSEFRKIEEEGVHFRNHMSGEKLFLSPEKAMEIQNDLGSDIMMAFDECPPFPATYEYMQKSVERTSRWAERCLNAHQRPNDQGLFGIVQGGEFEELRKQSAKDLVSLDFPGYAVGGLSVGEPKDVMNRVLEFTTPLLPTDKPRYLMGVGSPDSLIDGAIRGIDMFDCVLPTRIARNGTLMTSTGRLVVKNAKFAKDFGPLDPDCDCYTCRNYSRAYIRHLIKCDETFGIRLTSYHNLYFLLRLMEKVRQAIREDRLGDFREEFFERYGFNKPNAKNF

SEQ ID NO: 60127 - protein, 429 aa, Rhodococcus qingshengii; identical to SEQ ID NO: 60105
  REGION 1..429: note = tr|A0A069JGS0|A0A069JGS0_9NOCA Queuine tRNA-ribosyltransferase OS=Rhodococcus qingshengii; OX = 334542 GN=tgt PE=3 SV=1

SEQ ID NO: 60128 - protein, 415 aa, Rhodococcus rhodnii
  REGION 1..415: note = tr|R7WID5|R7WID5_9NOCA Queuine tRNA-ribosyltransferase OS=Rhodococcus rhodnii LMG 5362; OX = 1273125 GN=tgt PE=3 SV=1
MTDSAASPAPADPFFTIGTRLDDRAGRTGTIHTPHGDITTPSFVAVGTKATVKAVLPESMRDLGAQSLLANAYHLYLQPGPDIVDEAGGLGRFMNWDGPTFTDSGGFQVMSLGVGFKKVLAMEAVGVRSDDVIAKGKERLATVDEDGVTFKSHLDGSRHRFTPEVSMGIQHQLGADIIFAFDELTTLMNTREYQERSVERTQAWAVRCIAEHEKLTAQRAHKPYQALFGVVQGAQYEDLRRQACRGLESIVGETGRGFDGYGIGGALEKQNLGTIVGWCTDELPEHKPRHLLGISEPDDFFVAVENGIDTFDCVNPSRVARNAAIYHPDGRFNINTSRFRRDFTPIDDECDCYTCRHYTRAYIHHLFKAKEMLASTLCTIHNERFTVRLVDDIRRSIDSGDYDAFKDETLGRFYR

SEQ ID NO: 60129 - protein, 416 aa, Rhodococcus rhodochrous; identical to SEQ ID NO: 58182
  REGION 1..416: note = tr|A0A379MHX5|A0A379MHX5_RHORH Queuine tRNA-ribosyltransferase OS=Rhodococcus rhodochrous OX=1829; GN = tgt PE=3 SV=1

SEQ ID NO: 60130 - protein, 414 aa, Rhodococcus rhodochrous
  REGION 1..414: note = tr|A0A385LIA5|A0A385LIA5_RHORH Queuine tRNA-ribosyltransferase OS=Rhodococcus rhodochrous OX=1829; GN = tgt PE=3 SV=1
MPTPPDPFFTVGARLDNGLGRTGTIHTPHGDIRTPAFVPVGTKATVKAVLPETMAELGSQALLANAYHLYLQPGSDIVDEAGGLGKFMNWPGPTFTDSGGFQVMSLGAGFKKVIAMESVGVQNDDVIAKGKERLAHVDDDGVTFKSHLDGSRHRFTPEVSMRIQHELGADIMFAFDELTTLMNTRGYQERSLERTQAWAVRCIAEHEKLTAERAHRPYQALFGVVQGAQYEDLRRQACRGLESIVGETGRGFDGYGIGGALEKHNLGTIVRWCTEELPEHKPRHLLGISEPDDIFVAVEHGVDTFDCVNPSRVARNAAIYHPDGRFNINTSRHRRDFTPIDENCDCYTCRNYTRAYIHHLFKAKEMLASTLCTIHNERFTVRLVDDIRANMENGTLAEFKAETLGRFYASRRQA

SEQ ID NO: 60131 - protein, 421 aa, Rhodococcus ruber
  REGION 1..421: note = tr|A0A385HGY1|A0A385HGY1_9NOCA Queuine tRNA-ribosyltransferase OS=Rhodococcus ruber OX=1830; GN = tgt PE=3 SV=1
MTDPSTTASAVPTPPDPFFTVGTRLDNGLGRTGTIHTPHGNIHTPAFVGVGTKATVKAVLPEAMKELGAQALLANAYHLYLQPGSDIVDEAGGLGKFMNWDGPTFTDSGGFQVMSLGVGFKKVLAMDAVGVRSDDVIAEGKERLAHVDDDGVTFKSHLDGSRHRFTPEASMRIQHQLGADIIFAFDELTTLMNTRGYQERSVERTQAWAVRCIAEHEKLTAQRAHRPYQALFGVVQGAQYEDLRRQACRGLESVVGESGRGFDGYGIGGALEKQNLGTIVRWCTEELPEHKPRHLLGISEPDDMFVAIEHGVDTFDCVNPSRVARNAAIYHPDGRFNINTSRFRRDFTPIDEDCDCYTCRHYTRAYIHHLFKAKEMLASTLCTIHNERFTVRLVDDIRAAVDGGNFEEHKAETLSRFYARR

SEQ ID NO: 60132 - protein, 421 aa, Rhodococcus ruber
  REGION 1..421: note = tr|A0A098BQ55|A0A098BQ55_9NOCA Queuine tRNA-ribosyltransferase OS=Rhodococcus ruber OX=1830; GN = tgt PE=3 SV=1
MTDPSTTASAVPTPPDPFFTVGTRLDNGLGRTGTIHTPHGDIHTPAFVGVGTKATVKAVLPEAMKELGAQALLANAYHLYLQPGSDIVDEAGGLGKFMNWDGPTFTDSGGFQVMSLGVGFKKVLAMDAVGVQSDDVIAEGKERLAHVDDDGVTFKSHLDGSRHRFTPEASMRIQHQLGADIIFAFDELTTLMNTRGYQERSVERTQAWAVRCIAEHEKLTAQRAHRPYQALFGVVQGAQYEDLRRQACRGLESVVGESGRGFDGYGIGGALEKQNLGTIVRWCTEELPEHKPRHLLGISEPDDMFVAIEHGVDTFDCVNPSRVARNAAIYYPDGRFNINTSRFRRDFTPIDEDCDCYTCRHYTRAYIHHLFKAKEMLASTLCTIHNERFTVRLVDDIRAAVDGGYFEEHKAETLGRFYARR

SEQ ID NO: 60133 - protein, 421 aa, Rhodococcus sp.
  REGION 1..421: note = tr|A0A4P8Q3C3|A0A4P8Q3C3_9NOCA Queuine tRNA-ribosyltransferase OS=Rhodococcus sp. SGAir0479; OX = 2567884 GN=tgt PE=3 SV=1
MSEVVPSPPDPFFTVGTRLPDKLGRTGTIHTPHGDIRTPAFIAVGTKATVKAVLPEAMKDLGAQAVLANAYHLYLQPGPDIVDEAGGLGRFMNWDGPTFTDSGGFQVMSLGVGFKKVLAMEAVGVQSDDVIAAGKERLAHVDDDGVTFKSHLDGSPHRFTPEVSMQIQHQLGADIMFAFDELTTLLNTRGYQEQSVERTQAWAVRCIAEHEKLTAERAHRPYQALFGVVQGAQYEDLRRQAARGLESITGVSGRGFDGYGIGGALEKQNLGTIVRWVNEELPEHKPRHMLGISEPDDMFVAIENGADTFDCVNPSRVARNAAIYHPDGRFNINTARFRRDFTPIDDECDCYTCAHYTRAYIHHLFKAKEMLASTLCTIHNERFTVRLVDRIRESIEGGYFEEYKRETLGRFYGKRPSTSGE

SEQ ID NO: 60134 - protein, 410 aa, Rhodococcus sp.
  REGION 1..410: note = tr|A0A285E0S6|A0A285E0S6_9NOCA Queuine tRNA-ribosyltransferase OS=Rhodococcus sp. OK270; OX = 1882814 GN=tgt PE=3 SV=1
MSQPFFTLGTRLPGRLGRTGTIHTPHGEIQTPAFIAVGTNATVKAVLPETMKELGTQAVLANAYHLYLQPGPDIVDGAGGLGRFMNWPGPTFTDSGGFQVMSLGVGFKKVLSMDSVGVQSDDVIAVGKERLAHVDDDGVTFKSHRDGSRHRFTPEISMSIQHRLGADIIFAFDELTTLFNTRGYQEESVERTQAWAVRCIAEHERLTAERSHRPYQALFGVVQGAQYEDLRRQACRGLESIVGESGTGFDGYGIGGALEKQNLGTIVRWCNEELPEHKPRHLLGISEPDDLFVAIENGADTFDCVNPSRVARNAAIYTTTGRFNINTSRFRRDYNPIDDECDCYTCKNYSRAYLHHLFKSKEMLSSTLATIHNERFTIRLVDRIRESIEGGYFDDLKSETLGRFYATSRV

SEQ ID NO: 60135 - protein, 421 aa, Rhodococcus triatomae
  REGION 1..421: note = tr|M2VK20|M2VK20_9NOCA Queuine tRNA-ribosyltransferase OS=Rhodococcus triatomae BKS 15-14; OX = 1278078 GN=tgt PE=3 SV=1
MSSNDDAPVPAPNDPFFTVGTRIPGQLGRTGTIHTPHGDIRTPAFIAVGTNATVKAVLPETIREAGAQAVLANAYHLYLQPGPDVVDEAGGLGRFMNWSGPTFTDSGGFQVMSLGVGFKKVLAMEAVGVQSDDVIAQGKERLAHVDDDGVTFKSHRDGSRHRFTPEVSMGIQHQLGADIIFAFDELTTLFNTRAYQEESVQRTQAWAVRCIAEHERLTAERRHRPYQALFGVVQGAQYEDLRREACRGLESIVGETGRGFDGYGIGGALEKQNLGTIVRWCNEELPEHKPRHLLGISEPDDLFTAIENGADTFDCVNPSRVARNAAIYTENGRFNINTSRFRRDFNPIDEHCDCYTCRNYSRAYIHHLFKAKEMLASTLATIHNERFTIRLVDRIRDSIDGGYFDDLRDRTLSSFYATARA

SEQ ID NO: 60136 - protein, 427 aa, Rhodococcus triatomae
  REGION 1..427: note = tr|A0A1G8I919|A0A1G8I919_9NOCA Queuine tRNA-ribosyltransferase OS=Rhodococcus triatomae OX=300028; GN = tgt PE=3 SV=1
MSPAAVPDSSATPTSPPPTPSDPFFTIGTRLDGQLGRTGVIHTPHGDIRTPSFVAVGTKATVKAVLPESMKELGAQSLLANAYHLYLQPGPDIVDEAGGLGAFMNWDGPTFTDSGGFQVMSLGVGFKKVLAMEHVGVRSDEVIAAGKERLATVDDDGVTFKSHLDGSRHRFTPEVSMQIQHQLGADIIFAFDELTTLFNTREYQEQSVERTQAWAVRCIAEHEKLTAARTHRPYQALFGVVQGAQYEDLRRRACRGLESLTGETGRGFDGYGIGGALEKDNLGTIVRWCSEELPEHKPRHMLGISEPDDFFVAVENGADTFDCVNPSRVARNAAIYHPDGRFNINTSRFRRDFTPIDENCDCYTCAHYTRAYLHHLFKAKEMLASTLCTIHNERFTVRLVDDIRDSIDAGRFDEFKAETLGRFYAGR

SEQ ID NO: 60137 - protein, 425 aa, Rhodococcus tukisamuensis
  REGION 1..425: note = tr|A0A1G6MRL9|A0A1G6MRL9_9NOCA Queuine tRNA-ribosyltransferase OS=Rhodococcus tukisamuensis; OX = 168276 GN=tgt PE=3 SV=1
MNSAVQPQAGVGPAKRPESIFTIGTRLEDRLGRTGTVHTPHGDIATPSFVVVGTKATVKAVLPESVKELGTQSVLANAYHLYLQPGADIVDAAGGLGKFMNWDGPTFTDSGGFQVMSLGVGFRKVLAMESVGVQSDDVIADGKERLATVDDDGVTFKSHLDGSRHRFTPEVSMQIQHQLGADIMFAFDELTTLLNTRGYQERSVQRTQEWAIRCIAEHEKLTAERADKPYQALFGVVQGAQYEDLRRQACRGLESIEGENGYGFDGYGIGGALEKQNLGTIVRWCNEELPEHKPRHMLGISEPDDFFVAIENGADTFDCVNPSRVARNAAIYVRSGRFNINTSRFRRDFTPIDDECDCYTCANYTRAYIHHLFKAKEMLASTLCTIHNERFTVKLVDDIRASIEGGYFHDFKAETLGRFYGPDKP

SEQ ID NO: 60138 - protein, 414 aa, Rhodococcus wratislaviensis
  REGION 1..414: note = tr|X0QAY3|X0QAY3_9NOCA Queuine tRNA-ribosyltransferase OS=Rhodococcus wratislaviensis NBRC 100605 OX=1219028 GN=tgt PE=3 SV=1
MNAVVPTPPDPFFTVGTRLDGQLGRTGTIHTPHGDIATPSFVAVGTKATVKAVLPESMKELGAQSLLANAYHLYLQPGPDIVDEAGGLGKFMNWDGPTFTDSGGFQVMSLGVGFKKVLAMEAVGVRSDDVIAKGKERLATVDDDGVTFKSHLDGSRHRFTPEVSMQIQHQLGADIMFAFDELTTLLNTRGYQEQSVERTQAWAVRCIAEHEKLTAERSHRPYQALFGVVQGAQYEDLRRQACRGLESITGESGRGFDGYGIGGALEKQNLGTIVRWCNEELPEHKPRHMLGISEPDDFFVAIENGADTFDCVNPSRVARNAAIYHPDGRFNINTSRFRRDFTPIDENCDCYTCANYTSAYIHHLFKAKEMLASTLCTIHNERFTVRLVDQIRASIEGGYFGEFKADTLGRFYRT

SEQ ID NO: 60139 - protein, 414 aa, Rhodococcus wratislaviensis
  REGION 1..414: note = tr|A0A402C1C6|A0A402C1C6_9NOCA Queuine tRNA-ribosyltransferase OS=Rhodococcus wratislaviensis; OX = 44752 GN=tgt PE=3 SV=1
MNAVVPTPPDPFFTVGTRLDGQLGRTGTIHTPHGDIATPSFVAVGTKATVKAVLPESMKELGAQSVLANAYHLYLQPGPDIVDEAGGLGKFMNWDGPTFTDSGGFQVMSLGVGFKKVLAMEAVGVRSDDVIAKGKERLATVDDDGVTFKSHLDGSRHRFTPEVSMQIQHQLGADIMFAFDELTTLLNTRGYQEQSVERTQAWAVRCIAEHEKLTAERSHRPYQALFGVVQGAQYEDLRRQACRGLESITGESGRGFDGYGIGGALEKQNLGTIVRWCNEELPEHKPRHMLGISEPDDFFVAIENGADTFDCVNPSRVARNAAIYHPDGRFNINTSRFRRDFTPIDENCDCYTCANYTRAYIHHLFKAKEMLASTLCTIHNERFTVRLVDQIRAGIEGGYFEEFKAETLGRFYRT

SEQ ID NO: 60140 - protein, 370 aa, unidentified
  source 1..370: note = Rhodocyclaceae bacterium
  REGION 1..370: note = tr|A0A5C7KDL7|A0A5C7KDL7_9RHOO Queuine tRNA-ribosyltransferase OS=Rhodocyclaceae bacterium; OX = 1898103 GN=tgt PE=3 SV=1
MKYELITTDGAARRGRLTLAHGVVETPVFMPVGTYGTVKAMTPQSLTEIGAQICLGNTFHLWLRPGLEVIREFGGLHRFMGWDKPILTDSGGFQVFSLGELRKITEEGVKFSSPIDGAKLFLTPEESMRIQHALNSDIVMIFDECTPYPATRDEAAKSMRLSMRWAQRSRDEHNRLGNANALFGIVQGGMYEDLRDESLAGLDQIGFDGMAIGGLSVGEPKEDMARILAHTAPRLPTHKPRYLMGVGTPEDLVNAVQAGIDMFDCVMPTRNARNGHLFTRFGDVKIKNAAHRHDTRPLDESCDCYTCKNFSRAYLHHLFRAGEILGSMLNTIHNLHYYQVVMRELRAAIESGTLAAHVARFHTDRAQEAR

SEQ ID NO: 60141 - protein, 369 aa, unidentified
  source 1..369: note = Rhodocyclaceae bacterium
  REGION 1..369: note = tr|A0A524BBT2|A0A524BBT2_9RHOO Queuine tRNA-ribosyltransferase OS=Rhodocyclaceae bacterium; OX = 1898103 GN=tgt PE=3 SV=1
MQFELLKTDGAARRGTLTLAHGQIQTPVFMPVGTYGTVKAMTPASLAEIGAQVCLGNTFHLWLRPGLDVIKAHNGLHDFMQWHKPILTDSGGFQVFSLGALRKITEEGVKFSSPHDGAKLFLSPEISMQIQHVLNSDIVMIFDECTPYPATREEAAKSMRLSMRWARRSRDEHDKLENRNALFGIVQGGMYEDLRDESLAGLDDIGFDGMAIGGLSVGEPKEDMVRILAHTAPKLPTHKPRYLMGVGTPEDLVRSVKAGIDMFDCVMPTRNARNGHLFTRFGDIKIKNARHRTDTGPLDPSCTCYTCQNFSRSYLHHLFRSGEILGGMLNTIHNLHFYQTIMAEMRAAIEAGTLEQWSAEFARTRNSGE

SEQ ID NO: 60142 - protein, 370 aa, unidentified
  source 1..370: note = Rhodocyclales bacterium
  REGION 1..370: note = tr|A0A1G3HMG4|A0A1G3HMG4_9RHOO Queuine tRNA-ribosyltransferase OS=Rhodocyclales bacterium RIFCSPLOWO2_02_FULL_63_24 OX=1802018 GN=tgt PE=3 SV=1
MNFQLLATDGAARRGVLRLAHGAAPTPTFMPVGTYGTVKAMSPDELAGIGASIVLGNTFHLWLRPGLEVIVAHGGLHRFMGWNGPILTDSGGFQVFSLGDLRKISEEGVKFASPINGDRLFLTPEESMRIQHVLNSDVVMIFDECTPYPADLPTAAESMRLSLRWARRSRDEHDRLENSNALFGIVQGGMHESLRDESLAELVDIGFDGFAIGGLSVGEPKEEFSRILAHTAPRLPVDKPRYLMGVGTPEDLVYAVGQGIDMFDCVMPTRNARNGWLFTRYGDVKIKNAQHKSDTRPLDETCGCYTCRHFTRAYLHHLHRVGEILGARLNTIHNLFYYQTLMAEMRAAIEQGDFAGFSARFNRGRAGEQV

SEQ ID NO: 60143 - protein, 368 aa, unidentified
  source 1..368: note = Rhodocyclales bacterium
  REGION 1..368: note = tr|A0A1G3HSV3|A0A1G3HSV3_9RHOO Queuine tRNA-ribosyltransferase OS=Rhodocyclales bacterium GWA2_65_20 OX=1802017 GN=tgt PE=3 SV=1
  VARIANT 305..307: note = Xaa can be any naturally occurring amino acid
MQFDLLATAGSARRGRLTLAHGVVETPVFMPVGTYGTVKAMAPNELVDIGARIVLGNTFHLWLRPGLDIVAAHGGLHRFMGWDGPILTDSGGFQVFSLGDLRKITEDGVKFASPLNGDRLFMRPEDSMQIQHVLNSDIVMIFDECTPYPATEREAADSMRLSLRWARRSRAEHDRLKNANALFGIVQGGMYEDLRDESLAGLAAIGFDGYAIGGLSVGEPKEDMVRILAHTAPRLPPDRPRYLMGVGTPEDLVHAVAQGIDMFDCVLPTRNARNGWLFTRHGDVKIKNACHKADTRPLDATCGCXXXRNFTRAYLHHLHRAHEILGARLNTIHNLFYYQALMAELRAAIAAGGLDAYIEEFERRRRGG

SEQ ID NO: 60144 - protein, 399 aa, Rhodoferax antarcticus
  REGION 1..399: note = tr|A0A1Q8YIY1|A0A1Q8YIY1_9BURK Queuine tRNA-ribosyltransferase OS=Rhodoferax antarcticus ANT.BR; OX = 1111071 GN=tgt PE=3 SV=1
MLNFDLLQTDPAQGDYAGSHARRAALTLSHGVVQTPIFMPVGTYGTVKGVMPASLEDMGAKIILGNTFHLWMRPGQDVMRSFGGLHGFERWDKPILTDSGGFQVWSLGAMRKITEQGVHFSSPVNGDKLFMSPEVSMQIQTTLNSDIAMQLDECTPYLSVEPKTKGQITTEREARTSMEMSLRWAKRSQDEFARLENPNALFGIVQGGMFEHLRQESLDALVAMNFPGYAVGGVSVGEPKDEMLRVMAHSPHRLPAHKPRYLMGVGTPEDLVEGVVQGVDMFDCVMPTRNARNGTLFTRFGDLKIRNARHKTDHGPLDTSCTCYACKGQTRPDGTVSGGFSRAYLHHLDRCAEMLSPMLSSIHNLHYYLNLMTEIRTSLDTSSFGAFRAQFKADRARGV

SEQ ID NO: 60145 - protein, 401 aa, Rhodoferax fermentans
  REGION 1..401: note = tr|A0A1T1ATF5|A0A1T1ATF5_RHOFE Queuine tRNA-ribosyltransferase OS=Rhodoferax fermentans OX=28066; GN = tgt PE=3 SV=1
MLTFDLLHTDPANADTGYAGSHARRGTLTLNHGVVQTPIFMPVGTYGTVKGVMPSSLEDMGAQIILGNTFHLWMRPGQDVMQSFGGLHGFERWNKPILTDSGGFQVWSLGAMRKITEQGVHFSSPVNGDKLFMSPEVSMQIQTTLNSDIVMQLDECTPYLSVEPKTKGQITTEREARTSMEMSLRWAKRSQDEFARLENPNALFGIVQGGMFEHLRQESLEALVAMNFPGYAVGGVSVGEPKDEMLRIMAHSPHRLPTNKPRYLMGVGTPEDLVEGVAQGVDMFDCVMPTRNARNGTLFTRYGDLKIRNARHKTDHGPLDPTCTCYACKGVTRPDGSVSGGFSRAYLHHLDRCAEMLSPMLSSIHNLHYYLNLMAEIRASLESGTFGAFRAQFKADRARGV

SEQ ID NO: 60146 - protein, 405 aa, unidentified
  source 1..405: note = Rhodoferax ferrireducens
  REGION 1..405: note = tr|Q221C6|Q221C6_RHOFT Queuine tRNA-ribosyltransferase OS=Rhodoferax ferrireducens (strain ATCC BAA-621 / DSM 15236 / T118) OX=338969 GN=tgt; PE = 3 SV=1
MLQFDLLQTDPSSHARRGRLTLNHGVVQTPIFMPVGTYGTVKGVTPRSLEDMDAQIILGNTFHLWMRPGLDVMAQFGGLHQFEKWNKPILTDSGGFQVWSLGAMRKITEDGVHFSSPVNGDKLFMSPEVSIQIQTTLNSDIAMQLDECTPYLSVEPKTKGQITTEDEARASMEMSLRWAQRSRAEFARLENPNALFGIVQGGMFEGLRQESLEQLVAMDFPGYAVGGVSVGEPKDEMLRIMAHTPHRLPAHKPRYLMGVGTPEDLIEGVAQGVDMFDCVMPTRNARNGTFFTRYGDLKIRNARHKMDQRPLDETCTCYACAGSATHANTPDTGAGRSWAQGGRGGFSRAYLHHLDRCGEMLGPMLSSIHNLHYYLNLMTEVRAALDAGTFGAFRQQFKANRARGV

SEQ ID NO: 60147 - protein, 401 aa, unidentified
  source 1..401: note = Rhodoferax ferrireducens
  REGION 1..401: note = tr|A0A1W9KTR2|A0A1W9KTR2_9BURK Queuine tRNA-ribosyltransferase OS=Rhodoferax ferrireducens; OX = 192843 GN=tgt PE=3 SV=1
MLHFDLLATDPVNLASGYAGSHARRGTLTLNHGVVQTPIFMPVGTYGTVKGVMPSSLEDMGAQIILGNTFHLWMRPGAEVMRSFGGLHGFERWDKPILTDSGGFQVWSLGAMRKITEQGVHFSSPVNGDKLFMSPEVSMQIQTTLHSDIVMQLDECTPYLSVEPKTKGQITTEREARVSMEMSLRWAKRSQDEFARLENPNALFGIVQGGMFEHLRQESLDALVAMNFPGYAVGGVSVGEPKDEMLRIMAHSPHRLPAHKPRYLMGVGTPEDLVEGVAQGVDMFDCVMPTRNARNGTLFTRFGDLKIRNARHKTDHGPLDATCTCYTCKGQTRPDGSVSGGFSRAYLHHLDRCAEMLSPMLSSIHNLHYYLNLMTEIRAALEAGTFGAFRAQFKADRARGV

SEQ ID NO: 60148 - protein, 390 aa, unidentified
  source 1..390: note = Rhodoferax koreense
  REGION 1..390: note = tr|A0A1P8JR13|A0A1P8JR13_9BURK Queuine tRNA-ribosyltransferase OS=Rhodoferax koreense OX=1842727; GN = tgt PE=3 SV=1
MLQFELLTTDPTSHARRGTLTLNHGVVQTPIFMPVGTYGTVKGVMPRSLEEMGAQIILGNTFHLWMRPGREVMQSFGGLHGFEKWNKPILTDSGGFQVWSLGAMRKITEEGVHFASPVNGDKLFMSPEVSMQIQTGLNSDIVMQLDECTPYETKGHLTTEAEARKSMEMSLRWAQRSKDEFARLENPNALFGIVQGGMFKHLRQESLEALVAMDFPGYAVGGVSVGEPKDEMLDIMAHTPHRLPAHKPRYLMGVGTPEDLVQGVADGVDMFDCVMPTRNARNGTIFTRYGDLKLRNARHKTDHQPLDATCTCHACAGTSGVSWADGGREGFSRAYLHHLDRCGEMLGPMLTTVHNLHYYLNLMREVREALDAGTFAAFRAQFKADRARGV

SEQ ID NO: 60149 - protein, 401 aa, unidentified
  source 1..401: note = Rhodoferax saidenbachensis
  REGION 1..401: note = tr|A0A1P8K666|A0A1P8K666_9BURK Queuine tRNA-ribosyltransferase OS=Rhodoferax saidenbachensis; OX = 1484693 GN=tgt PE=3 SV=1
MLKFELLKTDPAEGSYLGSHARRGTLTLNHGVVQTPIFMPVGTYGTVKGVMPQSLHDMGAQIILGNTFHLWMRPGLDVMEKFGGLHQFEKWDKPILTDSGGFQVWSLGEMRKISEEGVKFASPVNGDKLFLTPEISMQIQTTLNSDIVMQFDECTPYLSVEPKTKGLVTTEREARSSMELSLRWAKRCQEEFARLNNPNALFGIVQGGMHEHLRDESLAGLEALDFPGIAVGGLSVGEPKEDMMRVLKHIGPKLPKHKPHYLMGVGTPEDLIAGVQNGIDMFDCVMPTRNARNGTLFSRYGDLKIRNARHKSDPQPLDVTCTCHACAGKSGVSWADGGRDGFSRAYLHHLDRCGEMLGPMLASIHNLHYYLNLMQEVRDALDAGTFGAFVNQFHTDRARGV

SEQ ID NO: 60150 - protein, 396 aa, Rhodoferax sp.
  REGION 1..396: note = tr|A0A515DFQ5|A0A515DFQ5_9BURK Queuine tRNA-ribosyltransferase OS=Rhodoferax sp. CHu59-6-5; OX = 2509614 GN=tgt PE=3 SV=1
MLQFELLKTDDAQGDYAGSHARRGRLTLNHGVVETPIFMPVGTYGTVKGVLPRSLEEMGAQIILGNTFHLWMRPGQDVMASFGGLHQFEKWSRPILTDSGGFQVWSLGEMRRITEEGVHFASPVNGDKLFMSPEVSMQIQTLLNSDIAMQLDECTPYETKGHITTEREARQSMEMSLRWATRSRDEFQRLQNPNALFGIVQGGMFENLREESLEQLVAMDFPGYAIGGVSVGEPKDEMLRIMAHTPHKLPAHKPRYLMGVGTPEDLVEGVAQGVDMFDCVMPTRNARNGTLFTRFGDLKIRNARHKTDHQPLDPSCTCHACAGASGVAWADGGRDGFSRAYQHHLDRCGEMLGPMLASIHNLHYYLNLMREVREALDGGRFGEFVRQFKADRARGV

SEQ ID NO: 60151 - protein, 405 aa, Rhodoferax sp.
  REGION 1..405: note = tr|A0A515EK18|A0A515EK18_9BURK Queuine tRNA-ribosyltransferase OS=Rhodoferax sp. Gr-4 OX=2527691; GN = tgt PE=3 SV=1
MLKFELLATDPATTTPEGSYLGSHARRGRLTLNHGVVQTPIFMPVGTYGTVKGVMPRSLEEMGAQIILGNTFHLWMRPGTEVISQFGGLHDFEKWDKPILTDSGGFQVWSLGEMRKISEEGVKFSSPVNGDKLFLTPEISMQIQRALNSDIAMQFDECTPYLSVEPKTKGQVTTEREARDSMELSLRWAKRCQAEMDRLENPNALFGIVQGGMFEHLRDESLAGLEELDFPGIAVGGLSVGEPKEHMMRVLQHVGPKLPKHKPHYLMGVGTPEDLIAGVQNGIDMFDCVMPTRNARNGTLFSRFGDLKIRNARHKTDKQPLDETCTCHACAGTSGVSWANGGRDGFSRAYLHHLDRCGEMLGPMLASIHNLHYYLNLMQEVRDALDAGRFGAFVKQFHADRARGV

SEQ ID NO: 60152 - protein, 375 aa, unidentified
  source 1..375: note = Rhodohalobacter barkolensis
  REGION 1..375: note = tr|A0A2N0VFG2|A0A2N0VFG2_9BACT Queuine tRNA-ribosyltransferase OS=Rhodohalobacter barkolensis; OX = 2053187 GN=tgt PE=3 SV=1
MFTLQKTSSKTKARLGKLTTDHGTIETPIFMPVGTLGTVKAVNQDDLSEKIKAQIILGNTYHLYLRPGNKIIQDAGGLHKFIGWDKPILTDSGGYQIFSLAEIRNLKEKGATFQSHIDGSKHLFTPENVVGTQRILGSDILMILDECPPYPAEFDYVKNSMELTHRWAKRGREEFLKTDPLYGHKQFQFGIVQGGVHKDLRKESSEYMASLDFEGLAIGGLSVGEPTDLMYEISDFNTDYLPENKPRYLMGVGTPANLLQNVAFGIDMFDCVMPTRNARNGMIFTRNGKINVRNAKWKHHHKPLDPDFPSELCQRYNMSYIHHLIRSNEILGLQLTSKHNLTFYLWLMERIREQIKNDTYHEWYSGMMQTVDQKI

SEQ ID NO: 60153 - protein, 375 aa, unidentified
  source 1..375: note = Rhodohalobacter sp.
  REGION 1..375: note = tr|A0A371QK58|A0A371QK58_9BACT Queuine tRNA-ribosyltransferase OS=Rhodohalobacter sp. SW132; OX = 2293433 GN=tgt PE=3 SV=1
MFKLEKTSSSSKARTGILKTDHGSIKTPIFMPVGTVGSVKAVNQDDLADKVKAQIILGNTYHLYLRPGNEIMENAGGLHSFMRWDRPILTDSGGYQIFSLSDNRKLEEEGATFKSHLDGSKHLFTPENVVETQRVLGSDIIMILDECPPYPAEKSYVHESMGLTHRWAKRGREAFLTSKPKYGHSQAQFGIVQGGTFKDLRKESSEYMASLNFEGLAIGGLSVGEPNELMYEITDFNTEHLPEEKPRYLMGVGTPANLLQCVARGVDMFDCVMPTRNARNGMIFTRYGKINLRNAKWKHHHQPLDTDFPSDLCSKYKMSYLHHLFKANELLGLELASKQNLTFYLWLMSEARSRIEDDTFSDWYPGMSETVDKKI

SEQ ID NO: 60154 - protein, 391 aa, unidentified
  source 1..391: note = Rhodomicrobium udaipurense
  REGION 1..391: note = tr|A0A037UZJ8|A0A037UZJ8_9RHIZ Queuine tRNA-ribosyltransferase OS=Rhodomicrobium udaipurense JA643 OX=858455 GN=tgt PE=3 SV=1
MTQPFSYKLLAQDGAARLGEIATPRGVIRTPAFMPVGTTASVKAVFLDDVKAAGSDIILGNTYHLMLRPGAERIAKLGGLHSFMRWDGPILTDSGGFQVMSLAQLRKLTEKGVTFRSHIDGAMYELTPERSIEVQNLLGSDIQMQFDECTPFPATFGEAESSMRLSLRWAERSLAAFAQYGQPGRALFGIVQGSTFPELRKESAAKLTSMDFHGYSVGGLAVGEGQRAMFDTLDFTTPLLPTNKPRYLMGVGTPADIVGAVERGIDMFDCVMPTRSGRHGQAFTWAGKLNIKNAAHVEDLRPLDETSTCPASRDYSRAYIHHLFRSGEYLAPMILSWANIGFYQELMAAIRKSIAEGTFADVAARVRAVYPSTVDDDAGADAETARSLKSK

SEQ ID NO: 60155 - protein, 391 aa, Rhodomicrobium vannielii
  REGION 1..391: note = tr|E3I2T7|E3I2T7_RHOVT Queuine tRNA-ribosyltransferase OS=Rhodomicrobium vannielii (strain ATCC 17100 / ATH 3.1.1 / DSM 162 / LMG 4299); OX = 648757 GN=tgt PE=3 SV=1
MTQPFSYKLLAQDGAARLGEIATPRGVIRTPAFMPVGTTASVKAVFLDDVKAAGSDIILGNTYHLMLRPGAERIAKLGGLHSFMRWDGPILTDSGGFQVMSLAQLRKLTEKGVTFRSHIDGAMYELTPERSIEVQNLLGSDIQMQFDECTPFPATFDEAESSMRLSLRWAERSLAAFAQYGRPGRALFGIVQGSTFPELRRESAAKLTSMDFHGYSVGGLAVGEGQRAMFDTLDFTTPLLPTNKPRYLMGVGTPADIVGAVERGIDMFDCVMPTRSGRHGQAFTWAGKLNIKNAAHIEDLRPLDETSTCPASRDYSRAYIHHLFRSGEYLAPMILSWANIGFYQELMAAIRKSIAEGTFADVAARVRAVYPSTVEDDAGADAEAARSLKSK

SEQ ID NO: 60156 - protein, 376 aa, Rhodonellum psychrophilum
  REGION 1..376: note = tr|U5BQ53|U5BQ53_9BACT Queuine tRNA-ribosyltransferase OS=Rhodonellum psychrophilum GCM71 = DSM 17998 OX=1123057 GN=tgt PE=3 SV=1
MKFQLEFTDPKSKARAGTIKTDHGDIETPIFMPVGTAGSVKAVHQRELTYDVKAQIILGNTYHLYLRPGLDILERAGGLHKFNGWSKPILTDSGGYQVFSLSGTNKITEKGVIFKSHIDGSKHIFSPENVMDIQRVIGADIIMAFDECTPYPCEYVYAQNSMHMTHRWLERCIAQFDSTEGKYGYSQTLFPIVQGSVYKDLRVQSAEFIASCGREGNAIGGLSVGEPAEMMYEMTELVTDILPKDKPRYLMGVGTPANILECIALGVDMFDCVMPTRNARNGMLFTTEGIINIRNEKWKDDFSAIDLGIDSYVSSFYSKAYLRHLVISKEILGAQIASIHNLSFYLWLVGQAREKIKSGEFSSWKNVMVEKVSRRL

SEQ ID NO: 60157 - protein, 381 aa, Rhodopila globiformis
  REGION 1..381: note = tr|A0A2S6NI56|A0A2S6NI56_RHOGL Queuine tRNA-ribosyltransferase OS=Rhodopila globiformis OX=1071; GN = tgt PE=3 SV=1
MNLNCASTERFRFEVRATDGLARAGAIQTAHGPLETPAFMVVGTVGTVKAMTADAVRCTGTQCVLGNTYHLMLRPGAERIAALGGLHRFMDWPGPILTDSGGFQIMSLAALRKIDADGVTFQSHIDGSRHRLTPAICMELQRQFDSTVTMVLDECTAFPATYEDAEASMEMSMRWALSSKEAFTRRPGYGLFGIVQGSTFPDLRLRSVKALKDIGFDGYAVGGLAVGEGQAAMLSTLDITVPQLPADAPRYLMGVGTPDDILGAVQRGIDMFDCVIPTRAGRTARAYTSAGIRNMRNARYADDAGPLDPECPCPACTRHSRAYLHHLFRTQEMLGPMLLTWHNITYYQSLMRGIRQAIQAGGFAAFAAGKRAAWQAGDVLP

SEQ ID NO: 60158 - protein, 372 aa, unidentified
  source 1..372: note = Rhodopirellula bahusiensis
  REGION 1..372: note = tr|A0A2G1WC16|A0A2G1WC16_9PLAN Queuine tRNA-ribosyltransferase OS=Rhodopirellula bahusiensis; OX = 2014065 GN=tgt PE=3 SV=1
MFRYELIGTDGGARRGVFHTPRGPVRTPGFMPVGTLGTVKGLTIDQVAATGADMILGNTYHLRLRPGHETVAALGGLHKMCGWDGPILTDSGGFQVFSLGAINKVTEHAATFRSHIDGAKIELTPEHSIEIQQALGSDVAMVLDHVIALPAPMTQVEDALARSIRWAARCRVAADREDQALFAIVQGGLDRTLRQQCATELAAMSFEGYAVGGLSVGEPPEDMYTTTGFTTPHLPVDKPRYLMGVGTPRDLLENIARGIDLFDCVMPTRNGRNALAFTDEGPLKLRNAVHKLDTRPLMEDCPCLACRHSRGYLRHLFVAGEMLGPILLSHHNLMYYGRLMQATRDAIEAGEFEAFKNAKLAGWGHEPFHESV

SEQ ID NO: 60159 - protein, 372 aa, Rhodopirellula baltica
  REGION 1..372: note = sp|Q7UWK9|TGT_RHOBA Queuine tRNA-ribosyltransferase; OS = Rhodopirellula baltica (strain DSM 10527 / NCIMB 13988 / SH1) OX=243090 GN=tgt PE=3 SV=1
MFRYELIGTDGGARRGVFHTPRGPVRTPGFMPVGTLGTVKGLTIDQVAATGADMILGNTYHLRLRPGHETVAALGGLHKMCGWDGPILTDSGGFQVFSLGAINKVNEHAATFRSHIDGAKIELTPEHSIEIQQALGSDVAMVLDHVIALPAPMTQVEDALARSIRWAARCRIAADREDQALFAIVQGGLDRTLRQQCASELAAMSFEGYAVGGLSVGEPPEDMYTTTGFTTPHLPADKPRYLMGVGTPRDLLENIARGIDLFDCVMPTRNGRNALAFTDEGPLKLRNAVHKLDTRPLMEDCPCLACRHSRGYLRHLFVAGEMLGPILLSHHNLMYYGRLMQATRDAIEAGEFEAFKNAKLAGWGHEPFQETV

SEQ ID NO: 60160 - protein, 372 aa, Rhodopirellula baltica
  REGION 1..372: note = tr|K5DFS7|K5DFS7_RHOBT Queuine tRNA-ribosyltransferase OS=Rhodopirellula baltica SH28; OX = 993517 GN=tgt PE=3 SV=1
MFRYELIGTDGGARRGVFHTPRGPVRTPGFMPVGTLGTVKGLTIDQVAATGADMILGNTYHLRLRPGHETVAALGGLHKMCGWDGPILTDSGGFQVFSLGAINKVNEHAATFRSHIDGAKIELTPEHSIEIQQALGSDVAMVLDHVIALPAPMTQVEDALARSIRWAARCRIAADREDQALFAIVQGGLDRTLRQQCASELAAMSFEGYAVGGLSVGEPPEDMYTTTGFTTPHLPADKPRYLMGVGTPRDLLENIARGIDLFDCVMPTRNGRNALAFTDEGPLKLRNAVHKLDTRPLMEDCPCLACRHSRGYLRHLFVAGEMLGPILLSHHNLMYYGRLMQATRDAIEAGEFEAFKNAKLAGWGHEPFQESV

SEQ ID NO: 60161 - protein, 356 aa, unidentified
  source 1..356: note = Rhodopirellula europaea
  REGION 1..356: note = tr|M5RZX2|M5RZX2_9PLAN Queuine tRNA-ribosyltransferase OS=Rhodopirellula europaea SH398; OX = 1263868 GN=tgt PE=3 SV=1
MFHTPRGPVRTPGFMPVGTLGTVKGLTIDQVAATGADMILGNTYHLRLRPGHETVAALGGLHKMCGWDGPILTDSGGFQVFSLGAINKVNEHAATFRSHIDGAKIELTPEHSIEIQQALGSDVAMVLDHVIALPAPMTKVEDALARSIRWAARCRNAADREDQALFAIVQGGLDRTLRQQCASELAAMSFEGYAVGGLSVGEPPEDMYTTTGFTTPHLPADKPRYLMGVGTPRDLLENIARGIDLFDCVMPTRNGRNALAFTDEGPLKLRNAVHKLDTRPLMEDCPCLACRHSRGYLRHLFVAGEMLGPILLSHHNLMYYGRLMQATRDAIEAGEFEAFKNAKLAGWGHEPFHESV

SEQ ID NO: 60162 - protein, 342 aa, unidentified
  source 1..342: note = Rhodopirellula europaea
  REGION 1..342: note = tr|M2A751|M2A751_9PLAN Queuine tRNA-ribosyltransferase OS=Rhodopirellula europaea 6C; OX = 1263867 GN=tgt PE=3 SV=1
MPVGTLGTVKGLTIDQVAATGADMILGNTYHLRLRPGHETVAALGGLHKMCGWDGPILTDSGGFQVFSLGAINKVNEHAATFRSHIDGAKIELTPEHSIEIQQALGSDVAMVLDHVIALPAPMTQVEDALARSIRWAARCRNAADREDQALFAIVQGGLDRTLRQQCASELAAMSFEGYAVGGLSVGEPPEDMYTTTGFTTPHLPADKPRYLMGVGTPRDLLENIARGIDLFDCVMPTRNGRNALAFTDEGPLKLRNAVHKLDTRPLMEDCPCLACRHSRGYLRHLFVAGEMLGPILLSHHNLMYYGRLMQATRDAIEAGEFEAFKNAKLAGWGHEPFYESV

SEQ ID NO: 60163 - protein, 374 aa, unidentified
  source 1..374: note = Rhodopirellula islandica
  REGION 1..374: note = tr|A0A0J1EGI9|A0A0J1EGI9_RHOIS Queuine tRNA-ribosyltransferase OS=Rhodopirellula islandica; OX = 595434 GN=tgt PE=3 SV=1
MFRYELIGTDGGARRGVFHTPRGPVRTPGFMPVGTLGTVKGLTIDQVAATGADMILGNTYHLRLRPGHETVAALGGLHKMCGWDGPILTDSGGFQVFSLGAINKVTEHAATFRSHIDGAKIELTPEHSIEIQQALGSDVAMVLDHVIALPAPMTQVEDALARSIRWAARCRDAADREDQALFAIVQGGLDRTLRQQCASELAAMSFEGYAVGGLSVGEPPEDMYTTTGFTTPHLPADKPRYLMGVGTPRDLLENIARGIDLFDCVMPTRNGRNALAFTDEGPLKLRNAVHKLDTRPLMEDCPCLACRHSRGYLRHLFVAGEMLGPILLSHHNLMYYGRLMQATRDAIEAGEFESFKNAKLAGWGHEPFRETVAS

SEQ ID NO: 60164 - protein, 372 aa, unidentified
  source 1..372: note = Rhodopirellula sallentina
  REGION 1..372: note = tr|M5UHW8|M5UHW8_9PLAN Queuine tRNA-ribosyltransferase OS=Rhodopirellula sallentina SM41; OX = 1263870 GN=tgt PE=3 SV=1
MFRFDLQHESNGARRGVFRTPRGDVQTPGFMPVGTVGTVKGLTIDQVAATGADMILGNTYHLRLRPGHETVARLGGLHKMCGWDGPILTDSGGFQVFSLGALNKVTEQAATFRSHLDGSKIELTPEHSIEIQQALGSDVAMVLDHVIALPAEQAVVEDALARSIRWAKRCRDAADRPEQALFAIVQGGLDPELRRQCATELATMPFEGFAVGGLSVGEAPEEMYATTAVTTVHLPVDKPRYLMGVGTPRDLLENIARGIDLFDCVMPTRNGRNALAFTDDGPIKLRNAVHREDTRPIMEDCPCLACRHSRGYLRHLFNANEMLGPILLSHHNLTYYGNLMRQTRQAIEEDRFHAFAAGKLRGWGYEPMDAVA

SEQ ID NO: 60165 - protein, 374 aa, Rhodopirellula sp.
  REGION 1..374: note = tr|A0A1Z8MIX9|A0A1Z8MIX9_9PLAN Queuine tRNA-ribosyltransferase OS=Rhodopirellula sp. TMED11; OX = 1986614 GN=tgt PE=3 SV=1
MVFRFELQCTDTSTALGTPARRGVFHTPHGPVQTPGFMPVGTQGTVKGLTIDQVAGTGAHMILGNTYHLGLRPGHEVVKALGGLHAMSGWEGPILTDSGGFQVFSLDGINKISERSVIFRSHIDGALIDLTPEYSMQIQESLGSDVAMVLDHVVALPAEKDAVQDAMERSIRWAKRCLEYAGRADQAKFAIVQGGLDVELRVQCAREMAAMNFEGYAVGGLSVGEPPPEMYRITQATTPELPQQKPRYLMGVGRPIDLLESVALGIDLFDCVMPTRNGRNGYAFTDAGPIKIRNAKHKTDTSPLDPNCDCLACTRHSRGYLRHLFIVGEMLGPSLLSLHNLTYYQKVMQGAREAIEQGCFAQYMATKKQQWGIE

SEQ ID NO: 60166 - protein, 370 aa, Rhodopirellula sp.
  REGION 1..370: note = tr|A0A255REI4|A0A255REI4_9PLAN Queuine tRNA-ribosyltransferase OS=Rhodopirellula sp. MGV; OX = 2023130 GN=tgt PE=3 SV=1
MSFRFELHQTDPQTGARRGTFQTPHGPVQTPGFMPVGTQGTVKGLTIDQVKSTGAHMILGNTYHLGLRPGPEIVRALGGLHAMFAWDGPILTDSGGFQVFSLKDISKINEQSVVFRSHIDGAIVDLTPEYSIEIQEALGSDVAMVLDHVVALPAPDGEVQDAMERSIRWAKRCLEHASRADQAKFAIVQGGLNTELRQQCARELATMDFEGFAVGGLSVGETPDEMYRITAATTPELPVERPRYLMGVGRPIDLLESITRGIDLFDCVMPTRNGRNGFAFTENGHVKIRNAVHKTDTSPLDPTCDCFTCTRHSRGYLRHLFIAGEMLGPSLLSLHNLHYYQRVMAGARTAIEAGTLTEYIAEKKRLWGMQ

SEQ ID NO: 60167 - protein, 426 aa, Rhodoplanes elegans
  REGION 1..426: note = tr|A0A327JYG0|A0A327JYG0_9RHIZ Queuine tRNA-ribosyltransferase OS=Rhodoplanes elegans OX=29408; GN = tgt PE=3 SV=1
MRGTRCVHARGPSRGRADLRFGALRDVRLPRVGGPPRTASRSIHLRFRRRFRLKFTHLATDGVARLGTLETPHGTVRTPAFMPVGTQAAMKGVHWHEVRETGADIVLSNTYHLMLRPGAERIARLGGLHAFMGWSGPILTDSGGFQVMSLSELRKVDESGVTFRSHIDGATVVLSPERAVEIQRLLGSDIAMQLDECVALPAERAEIDRAMRLSLRWAERCKRAFEPDLPSGRALFAIVQGGDDVALRRESARELVAMEFQGYAIGGLAVGEPQATMLAMIEEVAPLLPTDRPRYLMGVGTPDDLLKSVARGVDMFDCVLPTRNGRHGLAYTRRGPVNLKNARHAEDPRPLDPESPCRIAREVPRAYLHHLIRANETLGAMYLSVVNIAYFQTLMQDIRAAIAESRFADHAAEVTAAWTRGDVPAL

SEQ ID NO: 60168 - protein, 374 aa, unidentified
  source 1..374: note = Rhodoplanes piscinae
  REGION 1..374: note = tr|A0A327K710|A0A327K710_9RHIZ Queuine tRNA-ribosyltransferase OS=Rhodoplanes piscinae OX=444923; GN = tgt PE=3 SV=1
MKFDLHVTDGTARLSTLDTPHGRVRTPAFMPVGTQAAMKGVHWHEVREAGADIVLSNTYHLMLRPSAERIARLGGLHAFMGWPHPILTDSGGFQVMSLAKLRKVAEHGVTFQSHVDGATVELTPERAVEIQRLLGSDIAMQLDECVALPAPPAEIERAMRLSLRWAERCKRAFEEDLPSGRALFGIVQGGDVPDLRRESARALVDLDFQGYAIGGLAVGEPQATMLAMIEEVAPLLPADRPRYLMGVGTPDDLLKGVARGIDMFDCVLPTRNGRHGLAYTRFGPVNLKNARHAEDPRPLDPESPCRVAATVPRAYLHHLIRVDEMLGAMLLSIVNIAYFQTLMQGVRAAIAERRFADHAAAVTEDWSRGDIPAL

SEQ ID NO: 60169 - protein, 374 aa, unidentified
  source 1..374: note = Rhodoplanes piscinae
  REGION 1..374: note = tr|A0A447CVF0|A0A447CVF0_9RHIZ Queuine tRNA-ribosyltransferase OS=Rhodoplanes piscinae OX=444923; GN = tgt PE=3 SV=1
MIFDLHVTDGAARLGTLDTPHGRVRTPAFMPVGTQAAMKGVHWHEVREAGADIVLSNTYHLMLRPSAERIARLGGLHAFMGWPHPILTDSGGFQVMSLAKLRKVAERGVTFQSHVDGATVELTPERAVEIQRLLGSDIAMQLDECVALPAPPAEIERAMRLSLRWAERCKRAFEEDMPSGRALFGIVQGGDVPDLRRESARALVDLDFQGYAIGGLAVGEPQATMLAMIEEVAPLLPADRPRYLMGVGTPDDLLKGVARGIDMFDCVLPTRNGRHGLAYTRFGPVNLKNARHAEDPRPLDPESPCRVAATVPRAYLHHLIRVDEMLGAMLLSIVNIAYFQTLMQGVRAAIAERRFADHAAAVTEDWSRGDVPAL

SEQ ID NO: 60170 - protein, 374 aa, Rhodoplanes roseus
  REGION 1..374: note = tr|A0A327L088|A0A327L088_9RHIZ Queuine tRNA-ribosyltransferase OS=Rhodoplanes roseus OX=29409; GN = tgt PE=3 SV=1
MKFTHLATDGAARLGSLETPHGTVRTPAFMPVGTQAAMKGVHWHEVRETGADIVLSNTYHLMLRPGAERIQKLGGLHAFMGWSGPILTDSGGFQVMSLSELRKVDESGVTFRSHVDGAIVALSPERAVEIQRCLGSDIAMQLDECVALPAETAELDRAMRLSLRWAERCKRAFEPDLASGRALFAIVQGGDDVALRRESARALVDMDFQGYAIGGLAVGEPQETMLAMIEEVAPLLPTDRPRYLMGVGTPDDLVKGVARGIDMFDCVLPTRNGRHGLAYTRCGPVNLKNARHQEDPRPLDPESPCRIAREVPRAYLHHLIRAGEALGAMYLSIVNIAYFQTLMQGLRDAIGAGRFADHAAEVTAAWARGDVPPL

SEQ ID NO: 60171 - protein, 377 aa, Rhodoplanes sp.
  REGION 1..377: note = tr|A0A127EUM5|A0A127EUM5_9RHIZ Queuine tRNA-ribosyltransferase OS=Rhodoplanes sp. Z2-YC6860; OX = 674703 GN=tgt PE=3 SV=1
MTEAFSFRLIGTDGIARRGEFVTPHGAVQTPAFMPVGTQATVKGLMPEAVRATGAEILLGNTYHLMLRPGAERIAALGGLHRFMNWNGPILTDSGGFQVMSLSELRKISDNGVVFRSHVDGAMVDLTPERAIEIQSLLGADISMQLDECIKLPNTKPELERAMRLSIAWAERCKRAFESVPKGRALFGIVQGGDDMTLRGESARALVDIGFHGYAIGGLAVGEPQETMLKVVEETTPQLPADQPRYLMGVGTPDDLLKAVARGIDMFDCVMPTRNGRHGAVFTRRGQVNLDNARHRDDPRPIDEQSPCEAARIYSRAYLHHLMRVNEMLGAILLSTINLAYYQELMAGARSAIEQGRYAAYCDAIWEGWAKGDLPPI

SEQ ID NO: 60172 - protein, 377 aa, Rhodopseudomonas faecalis
  REGION 1..377: note = tr|A0A318TB55|A0A318TB55_9BRAD Queuine tRNA-ribosyltransferase OS=Rhodopseudomonas faecalis; OX = 99655 GN=tgt PE=3 SV=1
MSLPNHFELLGQSGAARTGRLTTPHGVVRTPAFMPVGTAGAMKGLHWREVRDAGADIVLGNTYHLMLRPGAERIAALGGLQRFTTWNGPMLTDSGGFQVMSLAQLRKVTEQAVKFRSHIDGAAIELSPERAIEVQLLLGSDIAMQLDECVRLPAERDDILRAMELSLRWAERCKRAFERAPEGHMLFGIVQGGDIPQLRHASARGLIEIGFHGYAIGGLAVGEPQEVMLAMIEEAAPILPADRPRYLMGVGTPEDILEAVARGIDMFDCVMPTRNGRHGVAFTRFGPVNLRNARHADDPRPLDESSEWPSTRNCSRAYLHHLVKSGETLGAMLLSEINIAYYQSLMAGMRAAIAQGRFAEFREQTHADWARGDIAAL

SEQ ID NO: 60173 - protein, 380 aa, Rhodopseudomonas palustris
  REGION 1..380: note = tr|Q2IW39|Q2IW39_RHOP2 Queuine tRNA-ribosyltransferase OS=Rhodopseudomonas palustris (strain HaA2) OX=316058 GN=tgt PE=3 SV=1
MSVPNHFDLLATDGAARTGRLTTPHGVVRTPAFMPVGTAGAMKGLHWREVRDAGADIVLGNTYHLMLRPGAERIAALGGLQRFTTWNGPMLTDSGGFQVMSLAQLRKVSEKAVNFRSHIDGAAIELSPERAIEVQLLLGSDIAMQLDECVRLPAERADIERAMQLSLRWAERCKRAFETAPDGHMLFGIVQGGDVPELRHASARGLIELGFHGYAIGGLAVGEPQEVMLAMIEEAAPILPADRPRYLMGVGTPEDMLEAVARGIDMFDCVMPTRNGRHGVAFTRFGPVNLRNARHADDPRPLDEASDWPSTRNCSRAYLHHLIKSGETLGAMLLSEINIAYYQRLMRDIREAITRGSFETFRMQTRADWEQGDIASRDPA

SEQ ID NO: 60174 - protein, 377 aa, Rhodopseudomonas palustris
  REGION 1..377: note = tr|E6VK78|E6VK78_RHOPX Queuine tRNA-ribosyltransferase OS=Rhodopseudomonas palustris (strain DX-1) OX=652103 GN=tgt PE=3 SV=1
MTVPNHFELLGTDGAARTGRLTTPHGVVRTPAFMPVGTAGAMKGLHWREVRDAGADIVLGNTYHLMLRPGAERIAALGGLQRFTTWNGPMLTDSGGFQVMSLAQLRKVNEQAVTFRSHIDGAALELSPERAIEVQRLLGSDIAMQLDECVRLPADRADIERAMQLSLRWAERCKRAFETAPAGYMLFGIVQGGDVPELRHASARGLIDIGFHGYAIGGLAVGEPQEVMLAMIEEVAPILPEDRPRYLMGVGTPEDILEAVARGIDMFDCVMPTRNGRHGLAFTQYGPINLRNAKHADDPRPLDEESDWPSTRNYSRAYLHHLVKSSETLGAMLLSEINTAYYQRLMRDIRAAIAAGRFEEFRLRTREAWDRGDLPPR

SEQ ID NO: 60175 - protein, 377 aa, unidentified
  source 1..377: note = Rhodopseudomonas pentothenatexigens
  REGION 1..377: note = tr|A0A336JU51|A0A336JU51_9BRAD Queuine tRNA-ribosyltransferase OS=Rhodopseudomonas pentothenatexigens OX=999699 GN=tgt PE=3 SV=1
MTVPNHFELLGTDGAARTGRLTTPHGVVRTPAFMPVGTAGAMKGLHWREVRDAGADIVLGNTYHLMLRPGAERIAALGGLQRFTTWNGPMLTDSGGFQVMSLAQLRKVNEQAVTFRSHIDGAALELSPERAIEVQRLLGSDIAMQLDECVRLPADHADIERAMQLSLRWAERCKRAFETAPDGYMLFGIVQGGDVPELRHDSARGLIDIGFHGYAIGGLAVGEPQEVMLAMIEEAAPILPADRPRYLMGVGTPEDILEAVARGIDMFDCVMPTRNGRHGLAFTQYGPINLRNAKHADDPRPLDEESDWPSTRNYSRAYLHHLVKSSETLGAMLLSEINTAYYQRLMRDIRAAIAAGRFEEFRLRTREAWERGDLPPR

SEQ ID NO: 60176 - protein, 380 aa, unidentified
  source 1..380: note = Rhodopseudomonas pseudopalustris
  REGION 1..380: note = tr|A0A1H8ST32|A0A1H8ST32_9BRAD Queuine tRNA-ribosyltransferase OS=Rhodopseudomonas pseudopalustris OX=1513892 GN=tgt PE=3 SV=1
MSVPNHFELLGRDGAARTGRLTTPHGVVRTPAFMPVGTAGAMKGLHWREVRDAGADIVLGNTYHLMLRPGAERIAALGGLQRFTTWNGPMLTDSGGFQVMSLAQLRKVSEKAVNFRSHIDGAAIELSPERAIEVQLLLGSDIAMQLDECVRLPAERADIERAMQLSLRWAERCKRAFEQAPDGHMLFGIVQGGDVPELRHASARGLVDLGFHGYAIGGLAVGEPQEVMLAMIEEAAPILPADRPRYLMGVGTPEDILEAVARGIDMFDCVMPTRNGRHGVAFTPFGPVNLRNARHADDPRPLDEDSDWPSTRNCSRAYLHHLVKSGETLGAMLLSEINIAYYQRLMRDMRGAIADGSFGTFRAQTRAGWAQGDISPRGSA

SEQ ID NO: 60177 - protein, 381 aa, Rhodopseudomonas sp.
  REGION 1..381: note = tr|A0A0N1CA52|A0A0N1CA52_9BRAD Queuine tRNA-ribosyltransferase OS=Rhodopseudomonas sp. AAP120; OX = 1523430 GN=tgt PE=3 SV=1
MSVPNHFELLGTNGAARTGRLTTPHGVVRTPAFMPVGTAGAMKGLHWREVRDAGADIVLGNTYHLMLRPGAERIAALGGLQRFTTWNGPMLTDSGGFQVMSLAQLRKVTEKAVTFRSHIDGAAIELSPERAIEVQLLLGSDIAMQLDECVRLPAEHADIDRAMQLSLRWADRCKRAFESAPQGHMLFGIVQGGDVPELRHASARGLIELGFHGYAIGGLAVGEPQEVMLAMIEEAAPILPADRPRYLMGVGTPEDILEAVARGIDMFDCVMPTRNGRHGVAFTKFGPVNLRNARHADDARPLDETSDWPSTRNCSRAYLHHLIKSGETLGAMLLSEINIAYYQHLMRDIRAAIAAGTFEQFRAQTRENWARGDIAPRESAS

SEQ ID NO: 60178 - protein, 376 aa, unidentified
  source 1..376: note = Rhodosalinus sediminis
  REGION 1..376: note = tr|A0A3D9BN55|A0A3D9BN55_9RHOB Queuine tRNA-ribosyltransferase OS=Rhodosalinus sediminis; OX = 1940533 GN=tgt PE=3 SV=1
MTKRVSFECLATDGAARLGRIDTPRGAIRTPAFMPVGTAATVKAMRPESVAATGADILLGNTYHLMLRPTAERIARLGGLHRFMNWERPILTDSGGFQVMSLAELRKLTERGVTFKSHIDGSRHELTPERSMEIQRLLGSDIVMCFDECPALPADRTRIAESMQLSMRWAARSREAFGDRPGHALFGIQQGGLERDLRAESAEALREIGFDGYAVGGLAVGEGQAAMFGVLDYAPAMLPADKPRYLMGVGKPDDIVGAVKRGIDMMDCVLPTRSGRTAQAFTPRGAVNLKNARHQDDPRPLDEDCACPACRSYSRAYLHHLFRSGEILSAMLLTWHNLQYYQDLMAGMRAAIAEGRFAAWEAAFHARRAEGDIPPL

SEQ ID NO: 60179 - protein, 376 aa, unidentified
  source 1..376: note = Rhodosalinus sp.
  REGION 1..376: note = tr|A0A365U8N8|A0A365U8N8_9RHOB Queuine tRNA-ribosyltransferase OS=Rhodosalinus sp. E84 OX=2259333; GN = tgt PE=3 SV=1
MTTRFSFSLLATDGAARLGRIDTPRGQIRTPAFMPVGTAATVKAMRPESVAETGADILLGNTYHLMLRPGAERIARLGGLHRFMNWDRPILTDSGGFQVMSLAELRKLTEKGVTFRSHIDGARHELTPERSMEIQRLLGSDIVMAFDECPALPADRRRIEESMRLSMRWAARSREAFGDRPGHALFGIQQGGLERDLRAESAAALKEIGFDGYAVGGLAVGEGQAAMFGVLDHAPAMLPADRPRYLMGVGKPDDIVGAVKRGIDMMDCVLPTRSGRTGQAFTRRGAVNIKNARHQEDPRPLDADCGCPACRDYSRAYLHHLFRAGEILSAMLLTWHNLHYFQELMAGMREAIAAGRFAAWEAEFHRMRALGDIEPL

SEQ ID NO: 60180 - protein, 382 aa, Rhodospira trueperi
  REGION 1..382: note = tr|A0A1G6ZXQ1|A0A1G6ZXQ1_9PROT Queuine tRNA-ribosyltransferase OS=Rhodospira trueperi OX=69960; GN = tgt PE=3 SV=1
MTDAATASLFRYTYLATDGAARLGRVETAHGPIDTPAFMPVGTAGTVKAMRPEQVAETGAQIVLGNTYHLMLRPGAERIARLGGLRRFMNWPGPVLTDSGGFQVMSLSTLRKLDEDGVTFQSHIDGSRHRLTPERSIEIQHLLGSTITMAFDECTPYPATRDQAAESMHLSMRWAKRSRAAFEQRNGYALFGIVQGGVYEDLRRQSVDALTDIGFDGYAIGGLAVGEPHDEMLRVLESVTPLLPDDRPRYLMGVGRPQDIIAAVARGVDLFDCVMPTRSGRTAQAFTRRGTVNLRNARHADDSRPLDETCDCPCCRDYSRAYLHHLVKAGEMLGPMLLTAHNLQHYQDLMAGLRGAIGEGRLTAFLETRGSEYASGDIPPSA

SEQ ID NO: 60181 - protein, 375 aa, unidentified; identical to SEQ ID NO: 57191
  source 1..375: note = Rhodospirillaceae bacterium
  REGION 1..375: note = tr|A0A1Z8LM32|A0A1Z8LM32_9PROT Queuine tRNA-ribosyltransferase OS=Rhodospirillaceae bacterium TMED8 OX=1986645 GN=tgt PE=3 SV=1

SEQ ID NO: 60182 - protein, 402 aa, unidentified
  source 1..402: note = Rhodospirillaceae bacterium
  REGION 1..402: note = tr|A0A2E6QC82|A0A2E6QC82_9PROT Queuine tRNA-ribosyltransferase OS=Rhodospirillaceae bacterium; OX = 1898112 GN=tgt PE=3 SV=1
MSTSVPDKLEYPGFGFEILERDAASRARLGRLSTPHGELMTPAFIFCATKAAIRGASPRDLRAANVEMVLANTYHLLIQPGPDVVEKLGGLHKFMGWDGPMLTDSGGFQIFSLGQGTESSEIKGSRDGKRNPLLLDLSEEGAVFRSPRDGTKHKLTPESAIRIQRQLRPDLAVVLDECTPVHVERSYTENSLKLTHKWAERSLAEFARHHDGTQGLYGVIQGGIYEDLRREGAEFIASLPFFGHAVGGCLGDHKDAMYDIVEFAMAPLAETAQEKPVHLLGIGGIHDIWEGVAMGVDTFDCVSPTRIARHGWALKKNAKDFRINLRNARFREDGKPLDDKCGCYACENFSRGYIHHLIKADEILGLQLLTQHNIAFMVGLMAEIRSALLRGQFAEAKREWLG

SEQ ID NO: 60183 - protein, 350 aa, unidentified
  source 1..350: note = Rhodospirillales bacterium
  REGION 1..350: note = tr|A0A257VDS7|A0A257VDS7_9PROT Queuine tRNA-ribosyltransferase (Fragment) OS=Rhodospirillales bacterium 12-71-4 OX=1970563 GN=B7Z53_05335 PE=3 SV=1
MAAHDGAARAGVLHTAHGEVPTPVFMPVGTAGTVKAMTADAVRATGARMVLGNTYHLMLRPGAERVARLGGLHRMMDWHGPILTDSGGFQVMSLSGLRKLDQDGVTFQSHIDGSKHRLTPEQSVRIQHLLGADVTMCFDECTPFPATHEQAADSMRLSMRWAARSRQAFVAREGHGLFGIVQGSVFEDLRTESVAALAGIGFEGYAIGGLAVGEGQAEMLRVLDFTAPLLPQQAPRYLMGVGTPSDLIESVRRGVDMFDCVIPTRSGRTGRAYTSRGVLNLRNARHADDPEPLDAACDCPACRNHSRAYLHHLVKAEEMLGPMLLTWHNIRYYQALMARLRQAILAGRFA

SEQ ID NO: 60184 - protein, 374 aa, unidentified
  source 1..374: note = Rhodospirillales bacterium
  REGION 1..374: note = tr|A0A259MDJ9|A0A259MDJ9_9PROT Queuine tRNA-ribosyltransferase OS=Rhodospirillales bacterium 39-66-50 OX=1970570 GN=tgt PE=3 SV=1
MSLSYEQLGSDGAARRGRITTAHGTIETPAFMPVGTAGTVKAMLPQSVAETGAEIVLGNTFHLMLRPGAERVAALGGLHKFMNWPGPILTDSGGFQVMSLKELRKLDPDGVTFRSPKDGSQHRLTPESSIGIQRLLDADITMSFDECTSWPAEEPEAAFSMRLSMKWAERGRRAFVERSGYGLFGIVQGSTFPELRAESAKALIDIGFDGYAVGGLAVGEGQELMFGTLDYTVPMLPADRPRYLMGVGRPGDIVGAVKRGIDMFDCVMPTRAGRTAQAFTRRGELNMRNARHRDDPRPIDEQCGCPACKHHSRAYLHHLIRADEILGAMLLTWHNLHYYQDVMRGLRGAIESKTLDSWIASFERDQALGDIPPL

SEQ ID NO: 60185 - protein, 407 aa, unidentified
  source 1..407: note = Rhodospirillum centenum
  REGION 1..407: note = tr|B6IU64|B6IU64_RHOCS Queuine tRNA-ribosyltransferase OS=Rhodospirillum centenum (strain ATCC 51521 / SW) OX=414684 GN=tgt PE=3 SV=1
MPQTIPYPGFGFDILHRDPASRARVGRLTTPHGTIETPNFIFCGTKASVKGVTPAQLREERTDIILSNTYHLMIQPGAETVARLGGLHRFMGWDGPMLTDSGGYQIFAMGHGSVADEIKGRRSQVREKTLLRISEEGAEFRSYTNGEKLFLTPERSVDIQRKLGADLVVQLDECTPYHVDRDYTARSMRMSHRWGDRSLAEFVRGGGLSANGLPQAMYGIVQGGVYPDLRRESAEYTADRPFFATAVGGSLGAHKDQMVEVVAMAMPHVHPDRPVHLLGIGGIVDIFAGVALGIDTFDCVSPTRIARHGWALMPGVPGERLNLRNARFREDADPIDPACDCHACRRFSRGYIHHLLKAGEMLALQLVSLHNIAVMNRLMREVREAIRTGTLDAARRRWVAPAATVKA

SEQ ID NO: 60186 - protein, 375 aa, Rhodospirillum rubrum
  REGION 1..375: note = tr|Q2RXR0|Q2RXR0_RHORT Queuine tRNA-ribosyltransferase OS=Rhodospirillum rubrum (strain ATCC 11170 / ATH 1.1.1 / DSM 467 / LMG 4362 / NCIB 8255 / S1) OX=269796 GN=tg t PE=3 SV=1
MTALSFTVKATEGKARLGRIETAHGPADTPIFMPVGTAATVKAMTPDSVRATGAQIVLGNTYHLMLRPSAERIARLGGLHRFMGWSGPILTDSGGYQVMSLSKLRKLTEEGVTFQSHIDGSRHLLTPERSMEIQDLLDATITMAFDECTPYPAERQTVAESMRMSMRWAERSRAAFRPRPGYGLFGICQGGVHGDLRAESVAALTAIGFEGYAVGGLAVGEPQDEMFRVLDETCPLLPADRPRYLMGVGKPEDIVGAVLRGIDMFDCVMPTRSGRTAQGFTRRGEVNLRNARHRDDPRPLDSACSCPACTSFSRAYLHHLVRAEEILGAMLLTWHNIQYYQDLMAGLRAAIGEQRLAAFVTDFHTTRGLGDIEPV

SEQ ID NO: 60187 - protein, 383 aa, Rhodothalassium salexigens
  REGION 1..383: note = tr|A0A4R2PPF8|A0A4R2PPF8_RHOSA Queuine tRNA-ribosyltransferase OS=Rhodothalassium salexigens DSM 2132 OX=1188247 GN=tgt PE=3 SV=1
MTASPRPRFHYTVHARDGRARTGTLAMARGDIATPAFMPVGTAATVKGMLPEQVRATGADILLGNTYHLMLRPGAERVAALGGLHGFMNWDRPILTDSGGFQVMSLTDLRKLTEEGVTFRSHLDGTKHLLTPERSMEIQRLLGSDIVMAFDECTPFPASHDQARTSMELSMRWAARSRAGFDAGGDHAARAALFGIVQGGVYEDLRARSAEALQAIGFDGYAVGGLAVGEGQDLMFQTLDHTVPHLPDDAPRYLMGVGKPDDIVGAVCRGIDMFDCVLPTRSGRTGQAFTFAGPVTLKNARHRDDPRPLDPRVASPAAAYSRAYLHHLVKAGEMLGAILLTWHNLAFYQTLMAELRQAIADNRLDAYAEAFLAGYRGGDIEPL

SEQ ID NO: 60188 - protein, 377 aa, unidentified
  source 1..377: note = Rhodothermaceae bacterium
  REGION 1..377: note = tr|A0A2E3QZE5|A0A2E3QZE5_9BACT Queuine tRNA-ribosyltransferase OS=Rhodothermaceae bacterium; OX = 2026787 GN=tgt PE=3 SV=1
MPLIFELQAECPETGARAGLLHTDHGTVETPTFQPVGTVGSVKGVAPRTLREIGVQQILANTYHLALRPGREVLRAMGGLHRFMQWDGPILTDSGGFQVFSLAELRKVTEEGVRFQSHLDGTPLHFTPETVVDTQRDIGSDIMMVLDELTPATVDEAEARRANGRTLRWAERAFAHYHATEPLYGHHQALFPIVQGATFPAIRRESADALMQLGAEGYAIGGLSVGEAAPVMYEMVEIVNAVLPADRPRYLMGVGTPQNLIENVARGVDLFDCVMPTRNARTGTLFTTDGMVNIKNARWKTEQAPVDAGLDVYHSQTFSKGYLRHLTKANEPLFIEIASVQNLALYLWTMRQMRTAILEGRFPAWRREWADRLARKA

SEQ ID NO: 60189 - protein, 378 aa, unidentified
  source 1..378: note = Rhodothermaceae bacterium
  REGION 1..378: note = tr|A0A424HPD0|A0A424HPD0_9BACT Queuine tRNA-ribosyltransferase OS=Rhodothermaceae bacterium TMED105 OX=1986665 GN=tgt PE=3 SV=1
  VARIANT 136: note = Xaa can be any naturally occurring amino acid
  VARIANT 172: note = Xaa can be any naturally occurring amino acid
  VARIANT 181: note = Xaa can be any naturally occurring amino acid
  VARIANT 184: note = Xaa can be any naturally occurring amino acid
  VARIANT 196: note = Xaa can be any naturally occurring amino acid
MSKIFEHHHTDTSSKARLGTLHTDHGPIQTPIFMPVGTQATVKGVSREDLKTRINAPIILGNTYHLYLRPGMDLMREAGGLHAFMGWDRAILTDSGGYQIFSLSDMRSLEEKGAKFKSHLDGSEHWFTPENVVDIXRDLGSDIMMILDECPPWPASYKYVRESMELTHRWAXRGRSAFEQXEPXYGHKQLQFGIVXGGTYSDLRKASAEFMASLPFEGLAIGGLSVGEPTEVMMQITNENTDVLPEDRPRYLMGVGTPANLLEAIRRGIDMFDCVMPTRNARNGMLFTRHGIVNLRNAHWRNHHKPLDPEFPSEVCQAYNTSYLHHLFRCNELLGMELASEHNLTFYLWLMAEARQAIAKNRYEAWVGPMIEDVTRRL

SEQ ID NO: 60190 - protein, 375 aa, unidentified
  source 1..375: note = Rhodothermaeota bacterium
  REGION 1..375: note = tr|A0A2A5X658|A0A2A5X658_9BACT Queuine tRNA-ribosyltransferase OS=Rhodothermaeota bacterium MED-G18 OX=1986239 GN=tgt PE=3 SV=1
MFFKLLNTSSKTNARCGKIFTDRGTISTPIFMPVGTLGSVKGVHQHELKNEIKSQIILSNTYHLYLRPGTEVLKHAGGLHKFINWDKPILTDSGGYQVFSLSNNVKIFEKGVNFNSHIDGSKHLFTPESVIHTQREIGSDICMVLDECIKYPCEYSYAKESLELTHRWLDRSIEEFKISNSLYNRNQFLFPIVQGSTFKDLRIKSAEYVSKKNLPGNAIGGLSVGEPKEVIYENVDLVCNILPSDKPRYLMGVGTPENILECISLGVDMFDCVMPTRNGRNGMLFTQNGTINIKNKKWEKDFSPIDNELGLLSSLYSKSYLRHLIINKEMLGSQIASIHNLSFYIWLVKEARKHIISDDFHIWKTKILNKVSNRL

SEQ ID NO: 60191 - protein, 378 aa, unidentified
  source 1..378: note = Rhodothermaeota bacterium
  REGION 1..378: note = tr|A0A368D8A1|A0A368D8A1_9BACT Queuine tRNA-ribosyltransferase OS=Rhodothermaeota bacterium MED-G64 OX=2164156 GN=tgt PE=3 SV=1
MSKIFEHHHTDTSSKARLGTLHTDHGPIQTPIFMPVGTQATVKGVSREDLKTRINAPIILGNTYHLYLRPGMDLMREAGGLHAFMGWDRAILTDSGGYQIFSLSDMRSLEEKGAKFKSHLDGSEHWFTPENVVDIQRDLGSDIMMILDECPPWPASYKYVRESMELTHRWAHRGRSAFEQTEPCYGHKQLQFGIVQGGTYSDLRKASAEFMASLPFEGLAIGGLSVGEPTEVMMQITNENTDVLPEDRPRYLMGVGTPANLLEAIRRGIDMFDCVMPTRNARNGMLFTRHGIVNLRNAHWRNHHKPLDPEFPSEVCQAYNTSYLHHLFRCNELLGMELASEHNLTFYLWLMAEARQAIAKNRYEAWVGPMIEDVTRRL

SEQ ID NO: 60192 - protein, 376 aa, Rhodothermus marinus
  REGION 1..376: note = tr|G2SGS6|G2SGS6_RHOMG Queuine tRNA-ribosyltransferase OS=Rhodothermus marinus (strain SG0.5JP17-172) OX=762570 GN=tgt PE=3 SV=1
MRFTLEHVDAETRARAGRLETPHGVVETPMFMPVGTVGSVKAVGPRELRRDVGAQIILGNTYHLYLRPGLEVLRRAGGLHRFMGWDGPILTDSGGFQVFSLAALRKLSEEGVWFQSHLDGSRHLFTPENVIDYQRVIGADIMMVLDECPPGDASLEAARRAHELTLRWAERSKRRFEETAPLYGYEQVLFAIVQGGVFPELRRESARALVAMDFPGYAIGGLSVGEPTELMYAMVEVVTEILPADRPRYLMGVGTPANLLENIARGVDLFDCVMPTRNGRNGTIFTTEGILNIRNRKWQTDFSPLDPGLDGYVSQTFTKAYVRHLFQAGEILGLQIATIQNLSFYLWLMREARRAILEGRYRSWMNEMLPRISRRL

SEQ ID NO: 60193 - protein, 376 aa, Rhodothermus marinus
  REGION 1..376: note = tr|D0MG52|D0MG52_RHOM4 Queuine tRNA-ribosyltransferase OS=Rhodothermus marinus (strain ATCC 43812 / DSM 4252 / R-10) OX=518766 GN=tgt PE=3 SV=1
MRFTLEYVDSETRARAGRLETPHGVVETPMFMPVGTVGSVKAVSPRELRRDVGAQIILGNTYHLYLRPGLEVLRQAGGLHRFMGWDGPILTDSGGFQVFSLAALRKLSEEGVWFQSHLDGSRHLFTPENVIDYQRVIGADIMMVLDECPPGDASLEAARRAHELTLRWAERSKRRFEETAPLYGYEQALFAIVQGGVFPELRRESARALVAMDFPGYAIGGLSVGEPTELMYEMVEVVTEILPADRPRYLMGVGTPANLLENIARGVDLFDCVMPTRNGRNGTIFTTEGILNIRNRKWQTDFSPLDPGLDGYVSQTFTKAYVRHLFQAGEILGLQIATLQNLSFYLWLMREARRAILEGRYRSWMNEMLPRISRRL

SEQ ID NO: 60194 - protein, 376 aa, Rhodothermus profundi
  REGION 1..376: note = tr|A0A1M6QME9|A0A1M6QME9_9BACT Queuine tRNA-ribosyltransferase OS=Rhodothermus profundi OX=633813; GN = tgt PE=3 SV=1
MRFTLEYVDSETRARAGRLETPHGVVETPMFMPVGTVGSVKAVGPRELRQDIGAQIILGNTYHLYLRPGLEVLRQAGGLHRFMGWDGPILTDSGGFQVFSLAALRKLTEEGVWFQSHLDGSRHLFTPEGVVDYQRVIGADIMMVLDECPPGDASLEAARRAHELTLRWAERSKRRFEATRPLYGYEQALFAIVQGGVFPALRRASARALVDMNFPGYAIGGLSVGEPAERMYEMVEVVTEILPVERPRYLMGVGTPANLLENIARGVDLFDCVMPTRNGRNGTLFTTEGILNIRNRKWRTDFSPLDPGLDSYVSQTFTKAYVRHLFQAGEILGLHLATLQNLSFYLWLMREARRAILEGRYRSWMAEMLPRVSRRL

SEQ ID NO: 60195 - protein, 370 aa, Rhodovarius sp.
  REGION 1..370: note = tr|A0A437MMK9|A0A437MMK9_9PROT Queuine tRNA-ribosyltransferase OS=Rhodovarius sp. CCP-6; OX = 1979269 GN=tgt PE=3 SV=1
MTLSYSLTATDGAARAGTLHTAHGEVQTPVFMPVGTAGTVKGMTADAVRSTGARIVLGNTYHLMLRPGAERVARLGGLHRMMDWQGPILTDSGGFQVMSLSALRKMDKDGVTFQSHIDGSKHRLTPERSIEIQHLLDADITMSFDECTPHPATHEVAAKSMRLSMAWAERGRRAFVPREGYGLFGIVQGSTYADLRAESVKALTDIGFEGYAVGGLAVGEGQEAMFATLDVTTPLMPQDKPRYLMGVGTPDDIIGAVARGIDMFDCVIPTRSGRMGRAYTSQGVLNMRNARHCDDGSALDPACDCPACTRHSRAYIHHLIKSQEMLGPILLTWHNIRYYQQLMARLRAAILAGRFAEEAAAIRAGWSTPA

SEQ ID NO: 60196 - protein, 376 aa, Rhodovulum adriaticum
  REGION 1..376: note = tr|A0A4R2NIA1|A0A4R2NIA1_RHOAD Queuine tRNA-ribosyltransferase OS=Rhodovulum adriaticum OX=35804; GN = tgt PE=3 SV=1
MTVAFTFDLKATDGKARSGVISTPRGEIRTPAFMPVGTAATVKAMMPDSVAATGADIILGNTYHLMLRPTAERIDRLGGLHRFMNWQGPILTDSGGFQVMSLAELRKLTEEGVTFKSHIDGSRHTLTPERSMEIQRLLGSDIVMCFDECPALPATDAEVARAMRLSMRWAERSKAAFGDRPGHALFGIMQGGVTRELREESAEALKAIGFDGYAVGGLAVGEGQEAMFDVLDYAPDCLPVDKPRYLMGVGKPDDIVGAVARGIDMMDCVLPTRSGRTGQVFTRRGVVNIKNARHADDPRPLDEQCTCPACRNYSRAYLHHVFRAQEIIASMLLTWHNLHYYQELMAGMRAAIAEGRFADWQEAFHAQRAQGDIPPL

SEQ ID NO: 60197 - protein, 376 aa, unidentified
  source 1..376: note = Rhodovulum bhavnagarense
  REGION 1..376: note = tr|A0A4R2REB9|A0A4R2REB9_9RHOB Queuine tRNA-ribosyltransferase OS=Rhodovulum bhavnagarense; OX = 992286 GN=tgt PE=3 SV=1
MTAAFNFEVKATDGKARGGVITTPRGQIRTPAFMPVGTAGTVKAMLPDSVAATGADIILGNTYHLMLRPTAERIDRLGGLHRFMNWRGPILTDSGGFQVMSLAELRKLTEDGVTFKSHVDGSRHTLTPERSMEIQRLLGSDIVMCFDECPALPATDDEVARAMRLSMRWAERSRAAFGDRPGHALFGIMQGGVTRELREESAEALKSIGFDGYAVGGLAVGEGQEAMFGVLDYAPDCLPADKPRYLMGVGKPDDIVGAVARGIDMMDCVLPTRSGRTGQVFTRRGVVNIKNARHADDPRPLDEECACPACRHYSRAYLHHVFRAQEIISSMLLTWHNLHYYQDLMAGMRAAIAEGRFADWQATFHAARAEGDIAPL

SEQ ID NO: 60198 - protein, 376 aa, Rhodovulum euryhalinum
  REGION 1..376: note = tr|A0A4V2SAA9|A0A4V2SAA9_9RHOB Queuine tRNA-ribosyltransferase OS=Rhodovulum euryhalinum OX=35805; GN = tgt PE=3 SV=1
MTAAFNFDVTAIDGAARTGVIATPRGAIRTPAFMPVGTAGTVKAMLPESVAATGADILLGNTYHLMLRPGAERVARLGGLHRFMHWERPILTDSGGFQVMSLAGLRKLTEHGVTFKSHIDGSRHELTPERSMEIQRLLGSDIVMCFDECPALPASDDEVARAMRLSMRWAERSRAAFGDRPGHALFGIMQGGVNRELREESAEALKAIGFDGYAVGGLAVGEGQAAMFGVLDYAPGFLPAEKPRYLMGVGKPEDIVGAVARGIDMMDCVLPTRSGRTGQVFTRRGALNIKNARHQDDPRPIDEACTCPACRNYSRAYLHHVFRAQEIIASMLLTWHNLHYYQELMAGMRAAIAEGRFAAWQAGFHALREEGDVPPV

SEQ ID NO: 60199 - protein, 375 aa, Rhodovulum imhoffii
  REGION 1..375: note = tr|A0A2T5BNT7|A0A2T5BNT7_9RHOB Queuine tRNA-ribosyltransferase OS=Rhodovulum imhoffii OX=365340; GN = tgt PE=3 SV=1
MPCFDFDLTSRDGKARTGRIRTPRGDIRTPAFMPVGTAATVKAMMPESVAATGADILLGNTYHLMLRPTAERIDRLGGLHRFMNWEKPILTDSGGFQVMSLTGLRKLTEEGVRFRSHIDGSRHMLSPERSMEIQRLLGSDIVMAFDECTPFPADEETARNSMELSMRWARRSREAFGDRSGHALFGIQQGGVYPGLRAASAEKLREIGFDGYAIGGLAVGEGQETMFGVLDYAPDMLPEDKPRYLMGVGKPDDIVGAVARGVDMMDCVLPSRSGRTGQVFTRRGVLNIKNARHQDDPRPIDETCTCPACRSYSRAYLHHVFRAQEIISSMLLTWHNLHYYQQLMSDIRAAIAEGRFADWQAGFHAERAEGDVARL

SEQ ID NO: 60200 - protein, 375 aa, Rhodovulum kholense
  REGION 1..375: note = tr|A0A2T5UHV2|A0A2T5UHV2_9RHOB Queuine tRNA-ribosyltransferase OS=Rhodovulum kholense OX=453584; GN = tgt PE=3 SV=1
MTTFGFTLHATDGAARTGAIATPRGTIRTPAFMPVGTAGTVKAMLPESVAATGADILLGNTYHLMLRPGAERVARLGGLHAFMHWDKPILTDSGGFQVMSLSGLRKMSEDGVAFRSHIDGSTHMLSPERSMEIQRLLGSDIVMCFDECPALPASEAEVARAMRLSMRWAERSKAAFGDRPGHALFGIMQGGVTRELREESARALTAIGFDGYAVGGLAVGEGQEAMFGVLDYATGFLPEDRPRYLMGVGKPDDIVGAVARGIDMMDCVLPSRSGRTGQAFTRRGVVNIKNARHADDPRPLDEHCSCPACRNYSRAYLHHVFRAQEILSSMLLTWHNLHYFQELMAGMRAAIAEGRFAAWQAAFHAKRAEGDIDPL

SEQ ID NO: 60201 - protein, 376 aa, Rhodovulum marinum
  REGION 1..376: note = tr|A0A4R2Q3W3|A0A4R2Q3W3_9RHOB Queuine tRNA-ribosyltransferase OS=Rhodovulum marinum OX=320662; GN = tgt PE=3 SV=1
MTAAFNFDLKATDGKARTGVITTPRGAIRTPAFMPVGTAGTVKAMLPDSVAATGADILLGNTYHLMLRPGAERVARLGGLHRFMNWERPILTDSGGFQVMSLAGLRKLTEEGVTFKSHIDGSKHELTPERSMEIQRLLGSDIVMCFDECPALPATDDEVARAMRLSMRWAERSRAAFGDRPGHALFGIMQGGVTPELREESAAALKAIGFDGYAVGGLAVGEGQAAMFGVLDYAPGFLPEDKPRYLMGVGKPEDIVGAVARGIDMMDCVLPTRSGRTGQVFTRRGALNIKNARHQDDPRPIDEACTCPACRNYSRAYLHHVFRAQEIIASMLLTWHNLHYYQEIMAGMRAAIAEGRFEAWQADFHAGRAEGDLPPL

SEQ ID NO: 60202 - protein, 376 aa, Rhodovulum robiginosum
  REGION 1..376: note = tr|A0A3R9PHA9|A0A3R9PHA9_9RHOB Queuine tRNA-ribosyltransferase OS=Rhodovulum robiginosum OX=68292; GN = tgt PE=3 SV=1
MARPFRFQLEATDGAARRGAIETPRGTIRTPAFMPVGTAATVKAMLPESVAATGADILLGNTYHLMLRPGAERIARMGGLHSFMNWDRPILTDSGGFQVMSLAELRKLTEEGVRFRSHVDGSRHMLSPESSMEIQRLLGSDIVMAFDECTPYPADAATARSSMELSMRWAARSRAAFGDRPGHALFGIQQGSVFRDQRAESAERLIEIGFDGYAVGGLAVGEGQERMFEVLDYAPAMLPADRPRYLMGVGKPDDIVGAVARGIDMMDCVLPTRSGRTGQAFTRRGVVNIKNARHADDPRPLDEACACPACRAYSRAYLHHVFRAGEIIASMLMTWHNLHYYQDLMAGMRAAISKGRFAEFEAAFHAGRAEGDIPPL

SEQ ID NO: 60203 - protein, 375 aa, Rhodovulum sp.
  REGION 1..375: note = tr|A0A1N6IBU8|A0A1N6IBU8_9RHOB Queuine tRNA-ribosyltransferase OS=Rhodovulum sp. ES.010; OX = 1882821 GN=tgt PE=3 SV=1
MQGFGFQLLATDGAARSGVISTPRGEVRTPAFMPVGTAGTVKAMLPESVAATGADILLGNTYHLMLRPGAERVARLGGLHRLMNWDRPILTDSGGFQVMSLAGLRKLTETGVTFKSHIDGSRHELTPERSMEIQRLLGSDIVMCFDECPGLPATEDEVARAMRLSMRWAERSKAAFGDRPGHALFGIMQGGVTPDLREESAEALTAIGFDGYAVGGLAVGEGQDAMFGVLDYAPGFLPADKPRYLMGVGKPEDIVGAVAHGIDMMDCVLPTRSGRTGQAFTRRGAVNIKNARHQDDPRPLDEACTCPACRAYSRAYLHHVFRAGEIIASMLLTWHNLHYYQDVMNGMRAAIAEGRFAAFEAEFRAGLAQGDIPPL

SEQ ID NO: 60204 - protein, 375 aa, Rhodovulum sp.
  REGION 1..375: note = tr|A0A1V0I351|A0A1V0I351_9RHOB Queuine tRNA-ribosyltransferase OS=Rhodovulum sp. MB263 OX=308754; GN = tgt PE=3 SV=1
MTTFGFTLHATDGAARSGAISTPRGTIRTPAFMPVGTAATVKAMLPESVAATGADILLGNTYHLMLRPGAERVARLGGLHGFMHWDKPILTDSGGFQVMSLAGLRKMSEEGVRFKSHIDGSTHVLSPERSMEIQRLLGSDIVMCFDECPALPASEAEVARAMRLSMRWAERSKQAFGERPGHALFGIMQGGVTRELREESAAALTAIGFDGYALGGLAVGEGQEAMFGVLDYATDFLPEGRPRYLMGVGKPDDIVGAVARGVDMMDCVLPSRSGRTGQVFTRRGVVNIKNARHADDPRPLDEACSCPACRNYSRAYLHHVFRAQEIISSMLLTWHNLHYFQELMAEMRAAIAAGRFSDWQAGFHAVRAEGDIEPL

SEQ ID NO: 60205 - protein, 376 aa, Rhodovulum steppense
  REGION 1..376: note = tr|A0A4R1YNG0|A0A4R1YNG0_9RHOB Queuine tRNA-ribosyltransferase OS=Rhodovulum steppense OX=540251; GN = tgt PE=3 SV=1
MATAFNFDLTATDGAARTGVIATSRGAIRTPAFMPVGTAGTVKAMLPESVAATGADILLGNTYHLMLRPGAERVARLGGLHCFMHWERPILTDSGGFQVMSLAGLRKLTEQGVTFKSHIDGSRHELTPERSMEIQRLLGSDIVMCFDECPALPTSDEEVARAMRLSMRWAERSRVAFGDRPGHALFGIMQGGVNRALREESAEALKAIGFDGYAVGGLAVGEGQEAMFGVLDYAPGFLPADRPRYLMGVGKPDDIVGAVARGIDMMDCVLPTRSGRTGQVFTRRGALNIKNARHQDDPRPIDEACTCPACRNYSRAYLHHVFRSQEIIASMLLTWHNLHYYQEIMSGMRAAIAEGRFAAWQADFHALRAEGDIEPL

SEQ ID NO: 60206 - protein, 375 aa, Rhodovulum sulfidophilum
  REGION 1..375: note = tr|A0A1Q9QU61|A0A1Q9QU61_RHOSU Queuine tRNA-ribosyltransferase OS=Rhodovulum sulfidophilum; OX = 35806 GN=tgt PE=3 SV=1
MTTFGFTLHATDGAARSGAISTPRGQIRTPAFMPVGTAGTVKAMLPESVAATGADILLGNTYHLMLRPGAERVARLGGLHGFMHWDKPILTDSGGFQVMSLAGLRKMSEEGVRFKSHIDGSTHVLSPERSMEIQRLLGSDIVMCFDECPALPASEAEVARAMRLSMRWAERSKQAFGDRPGHALFGIMQGGVTRELREESALALTDIGFDGYALGGLAVGEGQEAMFGVLDYATGFLPEDRPRYLMGVGKPDDIVGAVARGVDMMDCVLPSRSGRTGQVFTRRGVVNIKNARHADDPRPLDEACQCPACRNYSRAYLHHVFRAQEIISSMLLTWHNLHYFQELMAEMRAAIAGGRFTDWQAGFHAARAEGDIEPL

SEQ ID NO: 60207 - protein, 375 aa, Rhodovulum sulfidophilum
  REGION 1..375: note = tr|A0A2W5NKJ5|A0A2W5NKJ5_RHOSU Queuine tRNA-ribosyltransferase OS=Rhodovulum sulfidophilum; OX = 35806 GN=tgt PE=3 SV=1
MSRIEFDIAARDGMARTGVLRMPRGEIRTPAFMPVGTAGTVKAMLPESVRETGADILLGNTYHLMLRPGAERVARLGGLHRFMNWERPILTDSGGFQVMSLNELRKLTEEGVTFKSHVDGSTHFLSPETSMEIQRLLGSDIVMCFDECPALPATEEAVAASMRLSMRWALRSREAFGDRPGHALFGIMQGGVTRDLREESAEALRGIGFDGYAIGGLAVGEGQEAMFGVLDYAPGFLPEDRPRYLMGVGKPDDIVGAVMRGVDMFDCVLPSRSGRTGQVFTRRGALNIKNARHAEDPRPLDEACGCPACRSYSRAYLHHVFKASEIIASMLLTWHNLRYYQDLVAGLRAAIAEGRLAAFAAEFEAERARGDIAPV

SEQ ID NO: 60208 - protein, 379 aa, Rhodovulum visakhapatnamense
  REGION 1..379: note = tr|A0A4R8FEJ5|A0A4R8FEJ5_9RHOB Queuine tRNA-ribosyltransferase OS=Rhodovulum visakhapatnamense; OX = 364297 GN=tgt PE=3 SV=1
MRTPMTTFGFTLHATDGAARSGAIATPRGTIRTPAFMPVGTAGTVKAMLPESVAATGADILLGNTYHLMLRPGAERVARLGGLHAFMHWNKPILTDSGGFQVMSLAGLRKMSEDGVAFRSHIDGSTHMLSPERSMEIQRLLGSDIVMCFDECPALPASEAEVARAMRLSMRWAERSKQAFGDRPGHALFGIMQGGVTRELREESAEALTAIGFDGYAVGGLAVGEGQEAMFGVLDYATGFLPADRPRYLMGVGKPDDIVGAVARGIDMMDCVLPSRSGRTGQAFTRRGVVNIKNARHADDPRPLDEHCSCPACRNYSRAYLHHVFRAQEILSSMLLTWHNLHYFQELMAGMRAAIAEGRFAAWQAAFHAGRAEGDIEPP

SEQ ID NO: 60209 - protein, 367 aa, unidentified
  source 1..367: note = Richelia intracellularis
  REGION 1..367: note = tr|M1WPW9|M1WPW9_9NOST Queuine tRNA-ribosyltransferase OS=Richelia intracellularis HM01; OX = 1165095 GN=tgt PE=3 SV=1
MTANFSFQRLAKCSQTHARVGIFSTPHGVVETPRFMPVGTLASVKTLTPSQLKDTGAQMILSNTYHLHLQPGEDIVAGSGGLHKFMGWDGPILTDSGGFQVFSLSKMRKVTEEGVTFRSPHDGKIIELTPERSIEIQNILGADVIMAFDECPSHISTYEEVEAATARTYRWLERCILSHKRLDQALFGIVQGGMYLDLRSQAVVDLEKFDLPGYAIGGVSVGEEPDMIRKIVQDTAPLLPVNKPRYLMGVGTYKEMIMAIASGMDIFDCVIPTRWARHGTAMVKGERWNLKNAQFRRDFSPIDADCPCYTCQNFTRAYLSHLVRSQEILAYTLLSIHNITELIQFTQKVRNAILNDHFTKQFAQWLN

SEQ ID NO: 60210 - protein, 367 aa, unidentified
  source 1..367: note = Richelia intracellularis
  REGION 1..367: note = tr|M1WZ72|M1WZ72_9NOST Queuine tRNA-ribosyltransferase OS=Richelia intracellularis HH01; OX = 1165094 GN=tgt PE=3 SV=1
MTANFSFQRLAKCSQTHARVGIFSTPHGVVETPRFMPVGTLASVKTLTPSQLKDTGAQMILSNTYHLHLQPGEDIVAGSGGLHKFMGWDGPILTDSGGFQVFSLSKMRKVTEEGVTFRSPHDGKIIELTPERSIEIQNILGADVIMAFDECPSHISTYEEVEAATARTYRWLERCILSHKRLDQALFGIVQGGIYLDLRSQAVVDLEKFDLHGYAIGGVSVGEEPDMIRKIVQDTAPLLPVNKPRYLMGVGTYKEMIMAIASGMDIFDCVIPTRWARHGTAMVKGERWNLKNAQFRRDFSPIDADCPCYTCQNFTRAYLSHLVRSQEILAYTLLSIHNITELIQFTQKVRNSILNDHFTKQFAQWLN

SEQ ID NO: 60211 - protein, 367 aa, unidentified
  source 1..367: note = Richelia sp.
  REGION 1..367: note = tr|A0A3B9F7P0|A0A3B9F7P0_9NOST Queuine tRNA-ribosyltransferase OS=Richelia sp. OX=2053605 GN=tgt; PE = 3 SV=1
MTANFSFQRLAKCSQTHARVGIFSTPHGVVETPRFMPVGTLASVKTLTPSQLKDTGAQMILSNTYHLHLQPGEDSVAGSGGLHKFMGWDGPILTDSGGFQVFSLSKMRKVTEEGVTFRSPHDGKIIELTPERSIEIQNILGADVIMAFDECPSHISTYEEVEAATARTYRWLERCILSHKRLDQALFGIVQGGIYLDLRSQAVVDLEKFDLHGYAIGGVSVGEEPDMIRKIVQDTAPLLPVNKPRYLMGVGTYKEMIMAIASGMDIFDCVIPTRWARHGTAMVKGERWNLKNAQFRRDFSPIDADCPCYTCQNFTRAYLSHLVRSQEILAYTLLSIHNITELIQFTQKVRNSILNDHFTKQFAQWLN

SEQ ID NO: 60212 - protein, 361 aa, Rickettsia africae
  REGION 1..361: note = sp|C3PLJ4|TGT_RICAE Queuine tRNA-ribosyltransferase; OS = Rickettsia africae (strain ESF-5) OX=347255 GN=tgt PE=3; SV = 1
MSKFSFNIHHQHKKARSGIIVTAHGEMRTPAFMPVGTRGTVKAMLPESVAETGADILLGNTYHLMLQPTAERIVQLGGLHKFMNWDKPILTDSGGFQVMSLSKLCKITEEGVSFSSHINGDKYMLTPERSTEIQYLLGSTITMAFDECTPYPATFEEAKTSMQLTTRWANRSRNAFVKREGYAQFGIIQGSVYEELREQSAKDLVELDFEGYAIGGLAVGEGQELMFKVLDYAPEFLPQNKPRYLMGVGKPVDIIGAVSRGIDMFDCVIPTRSGRNGQAFTKYGTVNIRNSKYADDNKPLEHDCLCPACRNYSKAYLHHLVRIGEILGSMLMTWHNLTYFQNLMSRIRAYIKLGKDFDFDS

SEQ ID NO: 60213 - protein, 361 aa, Rickettsia akari
  REGION 1..361: note = sp|A8GPN2|TGT_RICAH Queuine tRNA-ribosyltransferase; OS = Rickettsia akari (strain Hartford) OX=293614 GN=tgt; PE = 3 SV=1
MSKFSFNIHHQHKKARSGIIATAHGEIRTPAFMPVGTRGTVKAMLPESVAETGADILLGNTYHLMLQPSAERIARLGGLHKFMNWDKPILTDSGGFQVMSLSKLRKITEEGVSFSSHINGDKYMLTPERSTAIQYLLGSTITMAFDECTPYPVTFEEAKTSMQLTTRWAHRSRNAFVKREGYAQFGIIQGSVYEELREQSAKGLVELDFDGYAIGGLAVGEGQELMFKVLDYAPDFLPQNKPRYLMGVGKPADIIGAVNRGIDMFDCVIPTRSGRNGQAFTKYGTVNICNSKYSGDNEPLEHDCPCPACTNYTKAYLHHLVRIGEILGSMLMTWHNLTYFQNLISRIREYIKLGKDFDFYS

SEQ ID NO: 60214 - protein, 361 aa, unidentified
  source 1..361: note = Rickettsia amblyommatis
  REGION 1..361: note = tr|A0A0F3Q9I8|A0A0F3Q9I8_RICAM Queuine tRNA-ribosyltransferase OS=Rickettsia amblyommatis str. Darkwater OX=1359166 GN=tgt PE=3 SV=1
MSKFSFNIHHQHKKARSGIIVTAHGEMRTPAFMPVGTRGTVKAMLPESVAETGADILLGNTYHLMLQPTAERIVRLGGLHKFMNWDKPILTDSGGFQVMSLSKLRKITEEGVSFSSHINGDKYMLTPERSTEIQYLLGSTITMAFDECTSYPATFEEAKTSMQLTTRWANRSRNAFVKREGYAQFGIIQGSVYEELREQSAKDLVELDFEGYAIGGLAVGEGQELMFKVLNYTPDFLPQNKPRYLMGVGKPADIIGAVSRGIDMFDCVIPTRSGRNGQAFTKYGTVNIRNSKYADDNKPLEHDCLCPACRNYNKAYLHHLVRIGEILGSMLMTWHNLTYFQNLMSRIRAYIKLGKDFDFDS

SEQ ID NO: 60215 - protein, 361 aa, unidentified; identical to SEQ ID NO: 60214
  source 1..361: note = Rickettsia amblyommatis
  REGION 1..361: note = tr|H8K390|H8K390_RICAG Queuine tRNA-ribosyltransferase OS=Rickettsia amblyommatis (strain GAT-30V) OX=1105111 GN=tgt PE=3 SV=1

SEQ ID NO: 60216 - protein, 361 aa, unidentified
  source 1..361: note = Rickettsia argasii
  REGION 1..361: note = tr|A0A0F3RI79|A0A0F3RI79_9RICK Queuine tRNA-ribosyltransferase OS=Rickettsia argasii T170-B; OX = 1268837 GN=tgt PE=3 SV=1
MSKFSFNIHHQHKKARSGIIVTAHGEMRTPAFMPVGTRGTVKAMLPESVAETGADILLGNTYHLMLQPTAERIVQLGGLHKFMNWDKPILTDSGGFQVMSLSKLRKITEEGVSFSSHINGDKYMLTPERSTEIQYLLGSTITMAFDECTPYPATFEEAKISMQLTTRWANRSRNAFVKREGYAQFGIIQGSVYEELREQSAKDLVELDFEGYAIGGLAVGEGQELMFKVLDYVPDFLPQNKPRYLMGVGKPADIIGAVSRGIDMFDCVIPTRSGRNGQAFTKYGTVNIHNSKYADDNKPLEHDCLCPACRNYSKAYLHHLVRIGEILGSMLMTWHNLTYFQNLMSRIRAYIKLGKDFDFDS

SEQ ID NO: 60217 - protein, 361 aa, unidentified
  source 1..361: note = Rickettsia asembonensis
  REGION 1..361: note = tr|A0A0C2QWR8|A0A0C2QWR8_9RICK Queuine tRNA-ribosyltransferase OS=Rickettsia asembonensis; OX = 1068590 GN=tgt PE=3 SV=1
MSKFSFNIHHQNKKARSGVITTMHGEIRTPAFMPVGTRGTIKAMLPESVAETGSDILLGNTYHLMLQPTAERIARLGGLHKFMNWDKPILTDSGGFQVMSLSKLRKITEEGVSFSSHINGDKYMLTPERSTEIQYLLGSTITMAFDECTPYPATFEEAKTSMQFTTRWANRSRNAFVKRDGYAQFGIIQGSVYEELREQSAKDLVALDFEGYAIGGLAVGEGQELMFKVLNYAPDFLPQNKPRYLMGVGKPADIIGAVRRGIDMFDCVIPTRSGRNGQAFTKYGTVNIRNSKYADDNEPLEHDCLCPACKNYSKAYLHHLVRIGEILGSMLMTWHNLTYFQNLMSRIREYIKLGKDFDFDS

SEQ ID NO: 60218 - protein, 361 aa, Rickettsia asiatica
  REGION 1..361: note = tr|A0A510G8D8|A0A510G8D8_9RICK Queuine tRNA-ribosyltransferase OS=Rickettsia asiatica OX=238800; GN = tgt PE=3 SV=1
MSKFSFNIHHQHKKARSGIIATAHGEIRTPAFMPVGTRGTVKAMLPESVAETGADILLGNTYHLMLQPTAERIARPGGLHKFMNWDKPILTDSGGFQVMSLSKLRKITEEGVSFSSHINGDKYMLTPERSTEIQYLLGSTITMAFDECTPYPATFEEAKTSMQLTTRWANRSRKAFIKREGYAQFGIMQGSVYEELREQSAMDLVELDFEGYAIGGLAVGEGQELMFKVLDYAPDFLPQNKPRYLMGVGKPADIISAVSRGIDMFDCVIPTRSGRNGQAFTKYGTVNIRNSKYADDNEPLEHDCLCPACKNYSKAYIHHLVRIGEILGAMLMTWHNLTYFQNLMSRIREYIKLGKDFDFSS

SEQ ID NO: 60219 - protein, 361 aa, Rickettsia australis
  REGION 1..361: note = tr|H8K9W2|H8K9W2_RICAC Queuine tRNA-ribosyltransferase OS=Rickettsia australis (strain Cutlack) OX=1105110 GN=tgt PE=3 SV=1
MSKFSFNIHHQHKKARSGIIATAHGEIRTPAFMPVGTRGTVKAMLPESVAETGADILLGNTYHLMLQPSAERIARLGGLHKFMNWDKPILTDSGGFQVMSLSKLRKITEEGVSFSSHINGDKYMLTPERSTAIQYLLGSTITMAFDECTPYPVTFEEAKTSMQLTTRWANRSRNAFVKREGYAQFGIIQGSVYEELREQSAKDLVELDFEGYAIGGLAVGEGQELMFKVLDYAPDLLPQNKPRYLMGVGKPADIICAVNRGIDMFDCVIPTRSGRNGQAFTKYGTVNIRNSKYAGDNEPLEHDCSCPACTNYTKAYLHHVVRIGEILGSMLMTWHNLTYFQNLMSRIREYIKLGKDFDFDS

SEQ ID NO: 60220 - protein, 359 aa, Rickettsia bellii
  REGION 1..359: note = sp|Q1RH25|TGT_RICBR Queuine tRNA-ribosyltransferase; OS = Rickettsia bellii (strain RML369-C) OX=336407 GN=tgt; PE = 3 SV=1
MSKFSFNINHQYKKARSGIITTAHGNIRTPAFMPVGTRGTVKAMLPESVAETGADILLGNTYHLMLQPSAERIAKLGGLHKFMNWGKPILTDSGGFQVMSLSKLRKITEEGVSFNSHINGDKYLLTPERSTEIQHLLGSTITMAFDECTPYPATFEEAKTSMQLTTRWAHRSREAFVKRDGYAQFGIIQGSTYEELREQSAKDLIELDFEGYAIGGLAVGEGQELMFKVLAPDFLPQNKPRYLMGVGKPADIIGAVSRGVDMFDCVIPTRSGRNGQAFTKYGTVNIRNSKYAEDNDPLEADCLCPACQNYSKAYLHHLVRIGEILGAMLMTWHNLTYFQNLMSRIREYIALGKDFDFTT

SEQ ID NO: 60221 - protein, 361 aa, Rickettsia bellii
  REGION 1..361: note = sp|A8GUA5|TGT_RICB8 Queuine tRNA-ribosyltransferase; OS = Rickettsia bellii (strain OSU 85-389) OX=391896 GN=tgt; PE = 3 SV=1
MSKFSFNINHQYKKARSGIITTAHGNIRTPAFMPVGTRGTVKAMLPESVAETGADILLGNTYHLMLQPSAERIAKLGGLHKFMNWGKPILTDSGGFQVMSLSKLRKITEEGVSFNSHINGDKYLLTPERSTEIQHLLGSTITMAFDECTPYPATFEEAKTSMQLTTRWAHRSREAFVKRDGYAQFGIIQGSTYEELREQSAKDLIELDFEGYAIGGLAVGEGQELMFKVLDYAPDFLPQNKPRYLMGVGKPADIIGAVSRGVDMFDCVIPTRSGRNGQAFTKYGTVNIRNSKYAEDNDPLEADCLCPACQNYSKAYLHHLVRIGEILGAMLMTWHNLTYFQNLMSRIREYIALGKDFDFTT

SEQ ID NO: 60222 - protein, 361 aa, unidentified
  source 1..361: note = Rickettsia buchneri
  REGION 1..361: note = tr|A0A067A983|A0A067A983_9RICK Queuine tRNA-ribosyltransferase OS=Rickettsia buchneri OX=1462938; GN = tgt_2 PE=3 SV=1
MSKFSFNIHHQNKKARSGIITTAHGEIRTPAFMPVGTRGTVKAMLPESVAETGADILLGNTYHLMLQPTAERIARLGGLHKFMNWDKPILTDSGGFQVMSLSKLRKITEEGVSFSSHINGDKYMLTPERSTEIQYLLGSTITMAFDECTPYHSTFEEAKTSMQLTTRWTKRSRNAFVKREGYAQFGIIQGSIYEELREQSAKDLVELDFEGYAIGGLAVGEGQELMFKVLDYAPDFLPQNKPRYLMGVGKPADIIGAVSRGIDMFDCVIPTRSGRNGQAFTKYGMVNIRNSKYVDDNEPLEHDCLCPACKNYSKAYLHHLVRIGEILGSMLMTWHNLTYFQNLMSRIREYIKLGKDFDFNS

SEQ ID NO: 60223 - protein, 361 aa, Rickettsia canadensis
  REGION 1..361: note = sp|A8EZT7|TGT_RICCK Queuine tRNA-ribosyltransferase; OS = Rickettsia canadensis (strain McKiel) OX=293613 GN=tgt; PE = 3 SV=1
MSKFSFNIHQMHKKARSGVITTAHGEIRTPAFMPVGTRGTIKAMLSESVAETGADILLGNTYHLMLQPSSERIARLGGLHKFMNWHKPILTDSGGFQVMSLSKLCKITEEGVSFSSHINGDKYMLTPERSTEIQYLLGSTITMAFDECTAYPATFEEAKTSVQLTTRWADRSRKAFVKREGYAQFGIIQGSVYQELREQSAKDLVKLDFEGYAIGGLAVGEGQELMFKVLDYTPNFLPQNKPCYLMGVGKPADIIGAVSRGIDMFDCVIPTRSGRNGQAFTKYGTVNIRNSKYADDDEPLEYDCLCPACKNYSKAYLHYLVKIGEILGSMLMTWHNLTYFQNLMSRIRTYIKAGQDFDFIT

SEQ ID NO: 60224 - protein, 361 aa, Rickettsia conorii; identical to SEQ ID NO: 60212
  REGION 1..361: note = sp|Q92GM6|TGT_RICCN Queuine tRNA-ribosyltransferase; OS = Rickettsia conorii (strain ATCC VR-613 / Malish 7); OX = 272944 GN=tgt PE=3 SV=1

SEQ ID NO: 60225 - protein, 361 aa, unidentified
  source 1..361: note = Rickettsia endosymbiont
  REGION 1..361: note = tr|A0A0F3R719|A0A0F3R719_9RICK Queuine tRNA-ribosyltransferase OS=Rickettsia endosymbiont of Ixodes pacificus OX=1133329 GN=tgt PE=3 SV=1
MSKFSFNIHHQNKKARSGIITTAHGEIRTPAFMPVGTRGTVKAMLPESVAETGADILLGNTYHLMLQPTAERIARLGGLHKFMNWDKPILTDSGGFQVMSLSKLRKITEEGVSFSSHINGNKYMLTPERSTEIQYLLGSTITMAFDECTPYPSTFEEAKTSMQLTTRWAKRSRNAFVKQEGYAQFGIIQGSIYEELREQSAKDLVELDFEGYAIGGLAVGEGQELMFKVLDYAPDFLPQNKPRYLMGVGKPADIIGTVSRGIDMFDCVIPTRSGRNGQAFTKYGTVNIRNSKYVDDNEPLEYDCLCPACKNYSKAYLHHLVRIGEILGSMLMTWHNLTYFQNLMSRIREYIKLGKDFDFNS

SEQ ID NO: 60226 - protein, 361 aa, unidentified
  source 1..361: note = Rickettsia endosymbiont
  REGION 1..361: note = tr|A0A162VKD2|A0A162VKD2_9RICK Queuine tRNA-ribosyltransferase OS=Rickettsia endosymbiont of Proechinophthirus fluctus OX=1462733 GN=tgt PE=3 SV=1
MSKFSFNIHHQHKKARSGIIVTAHGEMRTPAFMPVGTRGTVKAMLPESVAETGADILLGNTYHLMLQPTAERIVQLGGLHKFMNWDKPILTDSGGFQVMSLSKLCKITEEGVSFSSHINGDKYMLTPERSTEIQYLLGSTITMAFDECTPYPATFEEAKTSMQLTTRWANRSRNAFVKREGYAQFGIIQGSVYEELREQSAKALVELDFEGYAIGGLAVGEGQELMFKVLDYAPDFLPQNKPRYLMGVGKPVDIIGAVSRGIDMFDCVIPTRSGRNGQAFTKYGTVNIRNSKYADDNKPLEHDCLCPACRNYSKAYLHHLVRIGEILGSMLMTWHNLTYFQNLMSRIRAYIKLGKDFDFDS

SEQ ID NO: 60227 - protein, 361 aa, Rickettsia felis
  REGION 1..361: note = sp|Q4UN16|TGT_RICFE Queuine tRNA-ribosyltransferase; OS = Rickettsia felis (strain ATCC VR-1525 / URRWXCal2); OX = 315456 GN=tgt PE=3 SV=1
MSKFSFNIHHQHKKARNGVITTAHGEIRTPAFMPVGTRGTVKAMLPESVAETGADILLGNTYHLMLQPTAERIARLGGLHKFMNWDKPILTDSGGFQVMSLSKLRKITEEGVSFSSHINGDKYMLTPERSTEIQHLLGSTITMAFDECTPYPATFEEAKTSMQLTTRWANRSRNAFVKRDGYAQFGIIQGSVYEELREQSARDLVELDFEGYAIGGLAVGEGQELMFKVLDYAPDFLPQNKPCYLMGVGKPADIIGAVRRGIDMFDCVIPTRSGRNGQAFTKYGTVNIRNSKYADDNEPLEHDCLCPACKNYSKAYLHLLVRIGEILGAMLMTWHNLTYFQNLMSRIRKYIKLGKDFDFDS

SEQ ID NO: 60228 - protein, 361 aa, Rickettsia felis; identical to SEQ ID NO: 60227
  REGION 1..361: note = tr|A0A0F3MSA2|A0A0F3MSA2_RICFI Queuine tRNA-ribosyltransferase OS=Rickettsia felis str. Pedreira; OX = 1359196 GN=tgt PE=3 SV=1

SEQ ID NO: 60229 - protein, 361 aa, Rickettsia heilongjiangensis
  REGION 1..361: note = tr|G0GZC8|G0GZC8_RICH0 Queuine tRNA-ribosyltransferase OS=Rickettsia heilongjiangensis (strain ATCC VR-1524 / 054) OX=1032845 GN=tgt PE=3 SV=1
MSKFSFNIHHQHKKARSGIIVTAHGEMRTPAFMPVGTRGTVKAMLPESVAETGADILLGNTYHLMLQPTAERIVQLGGLHKFMNWDKPILTDSGGFQVMSLSKLRKITEEGVSFSSHINGDKYMLTPERSTEIQYLLGSTITMAFDECTPYPATFEEAKISMQLTTRWANRSRNAFVKREGYAQFGIIQGSVYEELREQSAKDLVELDFEGYAIGGLAVGEGQELMFKVLDYVPDFLPQNKPRYLMGVGKPADIIGAVSRGIDMFDCVIPTRSGRNGQAFTKYGTVNIRNSKYADDNKPLEHDCLCPACRNYSKAYLHHLVRIGEILGSMLMTWHNLTYFQNLMSRIRAYIKLGKDFDFDS

SEQ ID NO: 60230 - protein, 361 aa, Rickettsia japonica
  REGION 1..361: note = tr|A0A3B7DBX2|A0A3B7DBX2_RICJA Queuine tRNA-ribosyltransferase OS=Rickettsia japonica OX=35790; GN = tgt PE=3 SV=1
MSKFSFNIHHQHKKARSGIIVTAHGEMRTPAFMPVGTRGTVKAMLPESVAETGADILLGNTYHLMLQPTAERIVQLGGLHKFMNWDKPILTDSGGFQVMSLSKLRKITEEGVSFSSHINGDKYMLTPERSTEIQYLLGSTITMAFDECTPYPATFEEAKTAMQLTTRWANRSRNAFVKREGYAQFGIIQGSVYEELREQSAKDLVELDFEGYAIGGLAVGEGQELMFKVLDYVPDFLPQNKPRYLMGVGKPADIIGAVSRGIDMFDCVIPTRSGRNGQAFTKYGTVNIRNSKYVDDNKPLEHDCLCPACRNYSKAYLHHLVRIGEILGSMLMTWHNLTYFQNLMSRIRAYIKLGKDFDFDS

SEQ ID NO: 60231 - protein, 361 aa, Rickettsia japonica; identical to SEQ ID NO: 60230
  REGION 1..361: note = tr|G4KLC4|G4KLC4_RICJY Queuine tRNA-ribosyltransferase OS=Rickettsia japonica (strain ATCC VR-1363 / YH) OX=652620 GN=tgt PE=3 SV=1

SEQ ID NO: 60232 - protein, 361 aa, Rickettsia massiliae
  REGION 1..361: note = tr|H6QI57|H6QI57_RICMA Queuine tRNA-ribosyltransferase OS=Rickettsia massiliae str. AZT80; OX = 1105112 GN=tgt PE=3 SV=1
MSKFSFNIHHQHKKARSGIIVTAHGEMRTPAFMPVGTRGTVKAMLPESVAETGADILLGNTYHLMLQPTAERIVLLGGLHKFMNWDKPILTDSGGFQVMSLSKLRKITEEGVSFSSHINGDKYMLTPERSTEIQYLLGSTITMAFDECTPYPATFEEAKTSMQLTTRWANRSRNAFVKREGYAQFGIIQGSVYEELREQSAKDLVELDFEGYAIGGLAVGEGQELMFKVLDYAPDFLPQNKPRYLMGVGKPADIIGAVSRGIDMFDCVIPTRAGRNGQAFTKYGTVNIRNSKYADDNKPLEHDCLCPACRNYSKAYLHHLVRIGEILGSMLMTWHNLTYFQNLMSRIRGYIKLGKDFDFDS

SEQ ID NO: 60233 - protein, 361 aa, Rickettsia massiliae
  REGION 1..361: note = sp|A8F2K6|TGT_RICM5 Queuine tRNA-ribosyltransferase; OS = Rickettsia massiliae (strain Mtu5) OX=416276 GN=tgt; PE = 3 SV=1
MSKFSFNIHHQHKKARSGIIVTAHGEMRTPAFMPVGTRGTVKAMLPESVAETGADILLGNTYHLMLQPTAERIVLLGGLHKFMNWDKPILTDSGGFQVMSLSKLRKITEEGVSFSSHINGDKYMLTPERSTEIQYLLGSTITMAFDECTPYPATFEEAKTSMQLTTRWANRSRNAFVKREGYAQFGIIQGSVYEELREQSAKDLVELDFEGYAIGGLAVGEGQELMFKVLDYAPDFLPQNKPRYLMGVGKPADIIGAVSRGIDMFDCVIPTRAGRNGQAFTKYGTVNIRNSKYADDNKPLEHDCLCPACRNYSKAYLHHLVRIGEILGSMLMTWHNLTYFQNLMSRIREYIKLGKDFDFDS

SEQ ID NO: 60234 - protein, 361 aa, unidentified
  source 1..361: note = Rickettsia monacensis
  REGION 1..361: note = tr|A0A0B7IZ80|A0A0B7IZ80_9RICK Queuine tRNA-ribosyltransferase OS=Rickettsia monacensis OX=109232; GN = tgt PE=3 SV=1
MSKFSFNIHHQNKKARSGIITTAHGEIRTPAFMPVGTRGTVKAMLPESVAETGADILLGNTYHLMLQPTAERIARLGGLHKFMNWDKPILTDSGGFQVMSLSKLRKITEEGVSFSSHINGDKYMLTPERSTEIQYLLGSTITMAFDECTPYPSTFEEAKTSIQLTTRWAKRSRNAFVKREGYAQFGIIQGSIYEELREQSAKDLVELDFEGYAIGGLAVGEGQELMFKVLDYAPDFLPQNKPRYLMGVGKPADIIGAVSRGIDMFDCVIPTRSGRNGQAFTKYGTVNIRNSKYVDDNEPLEYDCLCPACKNYSKAYLHHLVRIGEILGSMLMTWHNLTFFQNLMSRIREYIKLGKDFDFNS

SEQ ID NO: 60235 - protein, 361 aa, Rickettsia montanensis
  REGION 1..361: note = tr|H8KCJ1|H8KCJ1_RICMS Queuine tRNA-ribosyltransferase OS=Rickettsia montanensis (strain OSU 85-930) OX=1105114 GN=tgt PE=3 SV=1
MSKFSFNIHHQHKKARSGIIVTAHGEMRTPAFMPVGTRGTVKAMLPESVAETGADILLSNTYHLMLQPTAERIVRLGGLHKFMNWDKPILTDSGGFQVMSLSKLRKITEEGVSFSSHINGDKYMLTPERSTEIQYLLGSTITMAFDECTPYPATFEEAKTSMQLTTRWANRSRNAFVKREGYAQFGIIQGSVYEELREQSAKDLVELDFEGYAIGGLAVGEGQELMFKVLDYAPDFLPQNKPRYLMGVGKPADIIGAVSRGIDMFDCVIPTRSGRNGQAFTKYGTVNIRNSKYADDNKPLEHDCLCPACRNYSKAYLHHLVRIGEILGPMLMTWHNLTYFQNLMSRIRAYIKLGKDFDFDS

SEQ ID NO: 60236 - protein, 361 aa, Rickettsia parkeri; identical to SEQ ID NO: 60212
  REGION 1..361: note = tr|A0A0F3QP52|A0A0F3QP52_RICPA Queuine tRNA-ribosyltransferase OS=Rickettsia parkeri str. Grand Bay OX=1359203 GN=tgt PE=3 SV=1

SEQ ID NO: 60237 - protein, 361 aa, Rickettsia peacockii
  REGION 1..361: note = sp|C4K0T2|TGT_RICPU Queuine tRNA-ribosyltransferase; OS = Rickettsia peacockii (strain Rustic) OX=562019 GN=tgt; PE = 3 SV=1
MSKFSFNIYHQHKKARSGIIVTAHGEMRTPAFMPVGTRGTVKAMLPESVAETGADILLGNTYHLMLQPTAERIVQLGGLHKFMNWDKPILTDSGGFQVMSLSKLCKITEEGVSFSSHINGDKYMLTPERSTEIQYLLGSTITMAFDECTPYPATFEEAKTSMQLTTRWANRSRNAFVKREGYAQFGIIQGSVYEELREQSSKDLVELDFEGYAVGGLAVGEGQELMFKVLDYAPDFLPQNKPRYLMGVGKPADIIGAVSRGIDMFDCVIPTRSGRNGQAFTKYGTVNIRNSKYADDNKPLEHDCLCPACRNYSKAYLHHLVRIGEILGSMLMTWHNLTYFQNLMSRIRAYIKLGKDFDFDS

SEQ ID NO: 60238 - protein, 361 aa, unidentified
  source 1..361: note = Rickettsia philipii
  REGION 1..361: note = tr|H6PV15|H6PV15_RICP3 Queuine tRNA-ribosyltransferase OS=Rickettsia philipii (strain 364D) OX=481009 GN=tgt PE=3 SV=1
MSKFSFNIHHQHKKARSGIIVTAHGEMRTPAFMPVGTRGTVKAMLPESVAETGADILLGNTYHLMLQPTAERIVQLGGLHKFMNWDKPILTDSGGFQVMSLSKLCKITEEGVSFSSHINGDKYMLTPERSTEIQYLLGSTITMAFDECTPYPATFEEAKTSMQLTTRWAKRSRNTFVKREGYAQFGIIQGSVYEELREQSAKDLVELDFDGYAIGGLAVGEGQELMFKVLDYAPDFLPQNKPRYLMGVGKPADIIGAVSRGIDMFDCVIPTRSGRNGQAFTKYGTVNIRNSKYADDNKPLEHDCLCPACRNYSKAYLHHLVRIGEILGSMLMTWHNLTYFQNLMSRIRAYIKLGKDFDFDS

SEQ ID NO: 60239 - protein, 361 aa, Rickettsia prowazekii
  REGION 1..361: note = sp|Q9ZCK8|TGT_RICPR Queuine tRNA-ribosyltransferase; OS = Rickettsia prowazekii (strain Madrid E) OX=272947; GN = tgt PE=3 SV=1
MSKFSFTIHSHYKKARSGVITTAHGEIRTPAFMPVGTRGAVKAMLTEAVVETGADILLGNTYHLMLQPSAERIAYLGGLHKFMNWDKPILTDSGGFQVMSLSKLCKITEEGVSFRSHINGNKYMLTPEYSTEIQYLLGSTITMALDECTPYPSTFEKAKTSMHLTTRWANRSRDAFVKREGYAQFGIIQGSVYKELREQSVKDLVKCDFEGYAIGGLAVGEGQELMFRVLDYVPDFLPQNKPRYLMGVGKPSDIIGAVSRGIDMFDCVIPTRSGRNGQAFTKYGTVNIRNSKYADDKEPLEHDCKCPACTNYTKAYLHHLVRIREILGPMLMTWHNLTYFQNLMSRIRTYIKLGKDFDFVH

SEQ ID NO: 60240 - protein, 361 aa, Rickettsia prowazekii; identical to SEQ ID NO: 60239
  REGION 1..361: note = tr|D5AXZ1|D5AXZ1_RICPP Queuine tRNA-ribosyltransferase OS=Rickettsia prowazekii (strain Rp22) OX=449216 GN=tgt PE=3 SV=1

SEQ ID NO: 60241 - protein, 361 aa, Rickettsia raoultii
  REGION 1..361: note = tr|A0A126EA70|A0A126EA70_9RICK Queuine tRNA-ribosyltransferase OS=Rickettsia raoultii OX=369822; GN = tgt PE=3 SV=1
MSKFSFNIHHQHKKARSGIIVTAHGEMRTPAFMPVGTRGTVKAMLPESVAETGADILLGNTYHLMLQPTAERIVRLGGLHKFMNWDKPILTDSGGFQVMSLSKLRKITEEGVSFSSHINGDKYMLTPERSTEIQYLLGSTITMAFDECTPYPATFEEAKTSMQLTTRWANRSRNAFVKREGYAQFGIIQGSVYEELREQSAKDLVELDFEGYAIGGLAVGEGQELMFKVLDYAPDFLPQNKPCYLMGVGKPADIIGAVSRGIDMFDCVIPTRSGRNGQAFTKYGTVNIRNSKYADDNKPLEHDCLCPACKNYSKAYLHHLVRIGEILGSMLMTWHNLTYFQNLMSRIRAYIKLGKDFDFDS

SEQ ID NO: 60242 - protein, 361 aa, Rickettsia rhipicephali
  REGION 1..361: note = tr|A0A0S2C8G2|A0A0S2C8G2_RICRH Queuine tRNA-ribosyltransferase OS=Rickettsia rhipicephali; OX = 33992 GN=tgt PE=3 SV=1
MSKFSFNIHHQHKKARSGIIVTARGEMRTPAFMPVGTRGTVKAMLPESVAETGADILLGNTYHLMLQPTAERIALLGGLHKFMNWDKPILTDSGGFQVMSLSKLRKITEEGVSFSSHINGDKYMLTPERSTEIQYLLGSTITMAFDECTPYPATFEEAKTSMQLTTRWANRSRNAFVKREGYAQFGIIQGSVYEELREQSAKDLVELDFEGYAIGGLAVGEGQELMFKVLDYAPDFLPQNKPRYLMGVGKPADIIGAVSRGIDMFDCVIPTRAGRNGQAFTKYGTVNIRNSKYADDNKPLEHDCLCPACRNYSKAYLHHLVRIGEILGSMLMTWHNLTYFQNLMSRIRAYIKLGKDFDFDS

SEQ ID NO: 60243 - protein, 361 aa, Rickettsia rhipicephali; identical to SEQ ID NO: 60232
  REGION 1..361: note = tr|A0A0F3PFK4|A0A0F3PFK4_RICRH Queuine tRNA-ribosyltransferase OS=Rickettsia rhipicephali str. Ect OX=1359199 GN=tgt PE=3 SV=1

SEQ ID NO: 60244 - protein, 35 aa, Rickettsia rickettsii
  REGION 1..35: note = tr|A0A0H3AXH8|A0A0H3AXH8_RICRS Queuine tRNA-ribosyltransferase OS=Rickettsia rickettsii (strain Sheila Smith) OX=392021 GN=tgt PE=4 SV=1
MLWRKLYWLKSPKNAERLKRAISDFEENKNFRNWI

SEQ ID NO: 60245 - protein, 361 aa, Rickettsia rickettsii
  REGION 1..361: note = sp|B0BUZ2|TGT_RICRO Queuine tRNA-ribosyltransferase; OS = Rickettsia rickettsii (strain Iowa) OX=452659 GN=tgt; PE = 3 SV=1
MSKFSFNIHHQHKKARSGIIVTAHGEMRTPAFMPVGTRGTVKAMLPESVAETGADILLGNTYHLMLQPTAERIVQLGGLHKFMNWDKPILTDSGGFQVMSLSKLCKITEEGVSFSSHINGDKYMLTPERSTEIQYLLGSTITMAFDECTPYPATFEEAKTSMQLTTRWANRSRNTFVKREGYAQFGIIQGSVYEELREQSAKDLVELDFDGYAIGGLAVGEGQELMFKVLDYAPDFLPQNKPRYLMGVGKPADIIGAVSRGIDMFDCVIPTRSGRNGQAFTKYGTVNIRNSKYADDNKPLEHDCLCPACRNYSKAYLHHLVRIGEILGSMLMTWHNLTYFQNLMSRIRAYIKLGKDFDFDS

SEQ ID NO: 60246 - protein, 361 aa, Rickettsia sibirica; identical to SEQ ID NO: 60212
  REGION 1..361: note = tr|Q7P9L3|Q7P9L3_RICS2 Queuine tRNA-ribosyltransferase OS=Rickettsia sibirica (strain ATCC VR-151 / 246) OX=272951 GN=tgt PE=3 SV=1

SEQ ID NO: 60247 - protein, 361 aa, Rickettsia slovaca
  REGION 1..361: note = tr|H8LPR1|H8LPR1_RICSL Queuine tRNA-ribosyltransferase OS=Rickettsia slovaca str. D-CWPP; OX = 1105109 GN=tgt PE=3 SV=1
MSKFSFNIHHQHKKARSGIIVTAHGEMRTPAFMPVGTRGTVKAMLPEAVAETGADILLGNTYHLMLQPTAERIVQLGGLHKFMNWDKPILTDSGGFQVMSLSKLCKITEEGVSFSSHINGDKYMLTPERSTEIQYLLGSTITMAFDECTPYPATFEEAKTSMQLTTRWANRSRNAFVKREGYAQFGIIQGSVYEELREQSAKDLVELDFEGYAIGGLAVGEGQELMFKVLDYAPDFLPQNKPRYLMGVGKPADIIGAVSRGIDMFDCVIPTRSGRNGQAFTKYGTVNIRNSKYADDNKPLEHDCLCPACRNYSKAYLHHLVRIGEILGSMLMTWHNLTYFQNLMSRIRAYIKLGKDFDFDS

SEQ ID NO: 60248 - protein, 361 aa, Rickettsia sp.
  REGION 1..361: note = tr|A0A1C3EXC4|A0A1C3EXC4_9RICK Queuine tRNA-ribosyltransferase OS=Rickettsia sp. wb OX=1851512; GN = tgt PE=3 SV=1
MSKFSFNINHQHKKARSGVITTAHGEIRTPAFMPVGTRGTVKAMLPESVGETGADILLGNTYHLMLQPSAERIARLGGLHKFMNWDKPILTDSGGYQVMSLSKLRKITEEGVSFNSHINGDKYLLTPERSTEIQHLLGSTITMAFDECTPYPATFEEAKTSMQLTTRWAYRSREAFVKPDGYAQFGIIQGSTYEELRKQSAKDLIELNFEGYAIGGLAVGEGQELMFKVLDYAPDFLPQNKPRYLMGVGKPADIIGAVSRGVDMFDCVIPTRSGRNGQAFTKYGTVNIRNSKYAEDNEPLETDCLCPACQNYSKAYLHHLVRIGEILGAMLMTWHNLTYFQNLMSRIREYIALGKDFDFTT

SEQ ID NO: 60249 - protein, 361 aa, Rickettsia sp.; identical to SEQ ID NO: 60248
  REGION 1..361: note = tr|A0A249E1I5|A0A249E1I5_9RICK Queuine tRNA-ribosyltransferase OS=Rickettsia sp. MEAM1 (Bemisia tabaci) OX=1182263 GN=tgt PE=3 SV=1

SEQ ID NO: 60250 - protein, 361 aa, Rickettsia typhi
  REGION 1..361: note = sp|Q68W26|TGT_RICTY Queuine tRNA-ribosyltransferase; OS = Rickettsia typhi (strain ATCC VR-144 / Wilmington); OX = 257363 GN=tgt PE=3 SV=1
MSKFSFTIHSNYKKARSGVITTAHGKIRTPTFMPVGTRGTVKAMLTESVVETGADILLGNTYHLMLQPSAERIAYLGGLHKFMNWDKPILTDSGGFQVMSLSKLRKITEEGVSFRSHINGNKYMLTPEYSTEIQYLLGSTITMALDECTPYPSTFEEAKTSMNLTTRWANRSRDAFVKREGYAQFGIIQGSVYKELREQSVKDLVKFDFDGYAIGGLAVGEGQELMFKVLDYVSDFLPQNKPRYLMGVGKPADIIGAVSRGIDMFDCVIPTRSGRNGQAFTKYGTVNIRNSKYAEDKAPLEYDCKCPACTNYTKAYLHHLVRIREILGPMLMTWHNLTYFQNLMSRIRAYIKLGKDFDFVN

SEQ ID NO: 60251 - protein, 367 aa, unidentified
  source 1..367: note = Rickettsiaceae bacterium
  REGION 1..367: note = tr|A0A1W9SBP9|A0A1W9SBP9_9RICK Queuine tRNA-ribosyltransferase OS=Rickettsiaceae bacterium 4572_127 OX=1971637 GN=tgt PE=3 SV=1
MLKYTLLATDKNARRGVLETAHGEINTPAFMPVGTIATVKTQTPEMVKKTGAEVILGNTYHLMLGRRADIIEKAGGLHKFMNWDKAILTDSGGFQVMSLSDLAKVTEEGVEFKSHLDGGAKHFLTPEKSVQIQHQLDSNITMCLDRCRELPLPRKEIKEALDLSMRWAKRSKDAFIDRDGYGIFGITQGGLDKELRLESASKLTEIGFDGYAIGGLAVGEPQHEMFDTLEFTCPALPENKPRYLMGVGTPLDILGAVERGVDMFDCVMPTRSGRTAKAFTSHGELNLRNAKFREDFSSLDSECECETCRNYSRAYLSHLIRANEILGAILLTQHNLFFYQNLMKQIRKHIEDKTFLEFKKEFIGKYL

SEQ ID NO: 60252 - protein, 364 aa, unidentified
  source 1..364: note = Rickettsiaceae bacterium
  REGION 1..364: note = tr|A0A4Q3DJK4|A0A4Q3DJK4_9RICK Queuine tRNA-ribosyltransferase OS=Rickettsiaceae bacterium; OX = 2023360 GN=tgt PE=3 SV=1
MSHTPPFSFKLIKQQNRARLGIINTAHGQIRTPAFMPVGTRGTVKAMFPESVASLGSDVLLGNTYHLMLRPGASRIHKLGGLHKFMNWQKPILTDSGGFQVMSLSNLRKIHEEGVIFNSHIDGSKHLLSPEKSTEIQYLLGSTITMAFDECTPYPATEEQASKSMELTSRWAKRSRDAFIQRPGYGQFGIIQGGIYQHLREQSASDITKLGFEGYAIGGLAVGEGHELMLKVLEYSPDFLPINKPRYLMGVGKPADIIAAVAKGIDMFDCVIPTRSGRNGQAFTKAGTINIRNSRYADDDQPLDTDCLCPACQKYSKAYLHHLVRTGEILGSMLMTWHNLHYFQDLMTKIRSYIEQQRDFDFLT

SEQ ID NO: 60253 - protein, 376 aa, unidentified
  source 1..376: note = Rickettsiales bacterium
  REGION 1..376: note = tr|A0A2E0F878|A0A2E0F878_9RICK Queuine tRNA-ribosyltransferase OS=Rickettsiales bacterium; OX = 2026788 GN=tgt PE=3 SV=1
MENVKSFNFKLKANDGNARAGEIETIHGNIKTPVFMPVGTAASVKAIFPKDLLELNIEIILANTYHLMLRPGEELIKKFSGLQKFMNWEKPILTDSGGFQVWSLSKLRKMDEKGIEFSSHIDGKKYKLTPESSILIQEKLNSTISMVLDECTEYPATYTRSKESMKLSMRWAERCKKAFTQRQGYGLFGIIQGGMFNDLRKESSKILNEMEFDGYALGGLSVGENHEEMINIVKETTQHMDKKKPRYIMGVGRPVDIFNSVENGIDMFDCVLPTRFGRNGRAFTDVGEINLRNARYANDKSLLDETTDCYVSTNFSKSYLHHLTKSNEILSSMILSLHNIAYYKKMMDEIRVSIVNKSFKDLKKKYLKIHESFKKN

SEQ ID NO: 60254 - protein, 373 aa, unidentified
  source 1..373: note = Rickettsiales bacterium
  REGION 1..373: note = tr|A0A1Z9MWK4|A0A1Z9MWK4_9RICK Queuine tRNA-ribosyltransferase OS=Rickettsiales bacterium TMED211; OX = 1986869 GN=tgt PE=3 SV=1
  VARIANT 2..3: note = Xaa can be any naturally occurring amino acid
  VARIANT 8: note = Xaa can be any naturally occurring amino acid
  VARIANT 53: note = Xaa can be any naturally occurring amino acid
MXXNFFKXLNQDGKARTGLLKTKHGQVETPVFMPVGTLGTVKGIFPRDLKDIXVQIILGNTYHLMLRPGEELISEMGGLQKFMNWDRPILTDSGGFQIWSLSKLRIIDQDGVTFSSHIDGKKFRLTPEISVTVQKKLNANITMVLDECTTHPSTYMESKKSLELSLNWARKCKEVYEEREGFGLFAIIQGGMYKDLRKNSCENLIDMNFDGYAIGGLSVGEKHSEMIDIVNFTSEFLPVEKPRYLMGVGRPVDIFKSVEKGIDMFDCVLPTRFGRTGRAFTLNGELNLRNSKFSNDERPLDNNLNCFASKEFSRSYIHHLTKTNEILSSMILSLHNVAFYQKMMSDIRTSIKNKNYKELMNSYLKNHKFYEKT

SEQ ID NO: 60255 - protein, 362 aa, unidentified
  source 1..362: note = Rickettsiales endosymbiont
  REGION 1..362: note = tr|A0A4Q7DH98|A0A4Q7DH98_9RICK Queuine tRNA-ribosyltransferase OS=Rickettsiales endosymbiont of Peranema trichophorum OX=2486577 GN=tgt PE=3 SV=1
MSVAFRILKQGTRARTGLVETAHGIIKTPAFMPVGTVGSVKAMFPEDVSGAGADIILSNTYHLMLRPGAERVARMGGLHKLMNWHKPILTDSGGFQVMSLAGLRKVSHHGVIFRSHIDGTKYELTPERSMEIQHLLGSTITMAFDECTSYPATHLEAQKSMELSMAWADRSKSAYISRSGYGLFGIVQGGMYEDLRTESVKILNSIQFDGYAIGGLAVGEDKATMLRILDHTTSLMRQDKPRYLMGVGKPSDIVQAVCMGVDMFDCVLPTRSGRNGQAFVKGGTINIRNQKYAEDETRLDPYCSCYTCTNYTRAYLHHLVKAKEILGAMLMTLHNVSYYLDLMSKIRKAIEDDSLEELIRDF

SEQ ID NO: 60256 - protein, 376 aa, unidentified
  source 1..376: note = Rickettsiales endosymbiont
  REGION 1..376: note = tr|A0A3S8T453|A0A3S8T453_9RICK Queuine tRNA-ribosyltransferase OS=Rickettsiales endosymbiont of Stachyamoeba lipophora OX=2486578 GN=tgt PE=3 SV=1
MTLKFELLKTLKIGQFIARRGKLHTKHGIIDTPTFMPVGTQGTVKAMTVDMLQATNAQIILGNTYHLMLRPGVERIKELGGLHQFSNWHGPILTDSGGFQVMSLSKLRKINEEGVTFNSHIDGSKHLLTPEKSMQIQHALDSNITMSFDECTPYPATFDQAKISMELSMRWAGRSRDAFFDRDGYGIFGIVQGSIYPELRETSAKSLLDIGFDGYAVGGLAVGEGQELMFKTLKYTTPILPENKPRYLMGVGKPGDLVGAVMHGIDMFDCVIPTRSGRNGQAFVRGGTINIRNSKYALDQTPLDQDCSCYTCSNHTKAYLHHLVRAGEILGAMLMTWHNIFFYQDLMQAMRNAIEQEDEAFFVQNNFTNLQLTDLS

SEQ ID NO: 60257 - protein, 384 aa, Rickettsiella grylli
  REGION 1..384: note = tr|A8PK89|A8PK89_9COXI Queuine tRNA-ribosyltransferase OS=Rickettsiella grylli OX=59196; GN = tgt PE=3 SV=1
MNNPLHCQLIKSSKNSYGRVMQLTTAHGHVLTPAFMPVGTRAFVNHMTPYDLKTAGSQIILGGNTYHMLLNPGLDVILASGGMHRLMGWDRPLLTDSGGFQVLSLSKNAKICRIDAEGAHFKHPVTGKVIHLTPQSSIEAQRIIGADIIMAFDECTPEKGGREAALAAMDRTHRWLLASREAYTRSDSRYGYPQALFGIIQGGSFRDLREFSTQFIVEADLAGIALGGEVIGFDMQKTQEVIDWIRPLLPEDKIRYTMGVGLNPQDLIDVAAKGIDLFDCVAPTRNARHGALYHGHVIKRNNRLAFVSEEKKSRILIKKAMYAKDETPLLADCLCYTCRHFTRAYLHFLFKQSASLYYQLACIHNIHTMHQVCEQIRRFILNEC

SEQ ID NO: 60258 - protein, 378 aa, Riemerella anatipestifer
  REGION 1..378: note = tr|A0A315A3I5|A0A315A3I5_RIEAN Queuine tRNA-ribosyltransferase OS=Riemerella anatipestifer; OX = 34085 GN=tgt PE=3 SV=1
MSKPFFSIEKTTKSKARAGVISTAHGEIQTPIFMPVGTVASVKTLHQREIRDDVKAQIILGNTYHLYLRPGMEVMEKAGGLHRFMNWERPILTDSGGYQVFSLSKSRKMTEEGVKFKSHIDGSYHFISPEKSMEIQRQIGADIFMAFDECTPYPCEYNQAKASMELTHRWLKRCIEWTENNAELYGHKQRLFPIVQGSTYSDLRKISAEVISEAGAEGNAIGGLSVGEPEEEMYRITNEVTDILPKEKPRYLMGVGTPWNILESIGLGVDMMDCVMPTRNARNGMLFTWQGVMNMKNQKWKEDFSPLDEMGTSFVDKEYSKAYVRHLFVAKEYLGKQIASIHNLAFYLDLVKVAREHILAGDFYEWKEQIVPVLKQRL

SEQ ID NO: 60259 - protein, 378 aa, Riemerella anatipestifer
  REGION 1..378: note = tr|A0A1A5HHQ4|A0A1A5HHQ4_RIEAN Queuine tRNA-ribosyltransferase OS=Riemerella anatipestifer; OX = 34085 GN=tgt PE=3 SV=1
MSKPFFSIEKTTESKARAGVISTAHGEIQTPIFMPVGTVASVKTLHQREIRDDVKAQIILGNTYHLYLRPGMEVMEKAGGLHRFMNWERPILTDSGGYQVFSLSKSRKMTEEGVKFKSHIDGSYHFISPEKSMEIQRQIGADIFMAFDECTPYPCEYNQAKASMELTHRWLKRCIEWTENNAELYGHKQRLFPIVQGSTYSDLRKISAEVISEAGAEGNAIGGLSVGEPEEEMYRITNEVTDILPKEKPRYLMGVGTPWNILESIGLGVDMMDCVMPTRNARNGMLFTWQGVMNMKNQKWKDDFSPLDEMGTSFVDKEYSKAYVRHLFVAKEYLGKQIASIHNLAFYLDLVKVAREHILVGDFYEWKEQIVPVLKQRL

SEQ ID NO: 60260 - protein, 378 aa, unidentified
  source 1..378: note = Riemerella columbipharyngis
  REGION 1..378: note = tr|A0A1G7CYS8|A0A1G7CYS8_9FLAO Queuine tRNA-ribosyltransferase OS=Riemerella columbipharyngis; OX = 1071918 GN=tgt PE=3 SV=1
MNRRFFSVEKQSESKARAGVISTDHGTIKTPIFMPVGTMASVKTVHQRELKDDIKAQIILGNTYHLYLRPGMEVMQNAGGLHKFMNWDRPILTDSGGYQVFSLSSSRKMSEEGVRFKSHIDGSYHHISPEKSMEIQRQIGGDIFMAFDECTPFPCEYNQAKASMELTHRWLKRCIQWTKENLELYGHRQRLFPIVQGSTYSDLRKISAEVVAESEAEGNAIGGLSVGEPEEEMYRITNEVTDILPKERPCYLMGVGTPWNILESIGLGVDMMDCVMPTRNARNGMLFTWQGVMNIKNEKWKQDFSPLDETGVSFVDREYSKAYVRHLFIAKEYLGKQIASIHNLAFYLDLVRVAREHILAGDFYEWKKSIVPVLKQRL

SEQ ID NO: 60261 - protein, 377 aa, Riemerella sp.
  REGION 1..377: note = tr|A0A496P6I0|A0A496P6I0_9FLAO Queuine tRNA-ribosyltransferase OS=Riemerella sp. OX=2382126; GN = tgt PE=3 SV=1
MKNFFEVEKNTTGKARAGKITTDHGEIQTPIFMPVGTVASVKTVHQHELKEDIKAQIILGNTYHLYLRPGMEIMQKAGGLHQFMNWDRPILTDSGGYQVFSLAASRKMTEEGVKFKSHIDGSYHFISPEKSMEIQRQIGADIFMAFDECTPYPCEYNQAKESMELTHRWLKRCIDWTSANKELYGHQQNLFPIVQGSVYHNLRKISAEVISEAGAAGNAIGGLSVGEPEEIMYEITDIVTDILPKEKPRYLMGVGTPWNILESIGLGIDMMDCVMPTRNARNAMLFTWNGVMNMKNQKWKDDFSPLDEFGTSFVDREYSKAYVRHLFVAKEYLAKQIASIHNLAFYLDLVRTAREHILAGDFYEWKDQIIPQLKQRL

SEQ ID NO: 60262 - protein, 376 aa, Rikenella microfusus
  REGION 1..376: note = tr|A0A379MT26|A0A379MT26_9BACT Queuine tRNA-ribosyltransferase OS=Rikenella microfusus OX=28139; GN = tgt PE=3 SV=1
MRFTLEHTDPRSSARAGVFRTDHGEIRTPIFMPVGTVGSVKGVFHRDLVEEVGAQIILGNTYHLYLRPGTETLYKAGGLHRFAGWDRPILTDSGGFQVFSLTGIRKLTEEGCRFQSHIDGSRHLFTPENVIDTQRLIGADIMMAFDECPPGTAEYGYAAQSWARTSRWLERCFDRYRRTECPYGHHQSLFPIVQGCTYADLRRQSAEFVQQFDADGYAIGGLAVGEPAPVMYEMIETVNAVLPQDRPRYLMGVGTPVNILEAIERGVDMFDCVMPTRNGRNGMLFTSEGIVNIRNRKWAEDFSPIDPMGHTFVDTHYSKAYLRHLTVAGEMMAAQIASLHNLGFYLWLVREARGHIVAGDFAAWKTEMVEKLGRRL

SEQ ID NO: 60263 - protein, 376 aa, unidentified
  source 1..376: note = Rikenellaceae bacterium
  REGION 1..376: note = tr|A0A3D0FQR5|A0A3D0FQR5_9BACT Queuine tRNA-ribosyltransferase OS=Rikenellaceae bacterium; OX = 2049048 GN=tgt PE=3 SV=1
MRYERTVRDTETSASCGLLYTDHGVIETPIFMPVGTVGSVKAVFHRDLIDDIGAQIILGNTYHLYLRPGTDIINRAGGIHKFISWNKPVLTDSGGYQVFSLAENRKLTNEGCIFRSHIDGSKHFFTPENVVDIQRLIGADIIMALDECPPGSSDHHYAKESLKLTKQWLERGAVHFDATEPLYNYSQAFFPIIQGCVYPDLRVEAAEHAVSLEREGYAIGGLSVGEPTDIMYQILELLDPILPRDKPRYLMGVGTPVNILEGISRGVDMFDCVMPTRNARNGMLFTSEGVINIRNRKWADDFSLLDENGTSFVDKMYSKAYLRHLFVSSEILGAQIASEHNLAFYLNLINDARLHIKKGDFKMWKEVTIKKLENRL

SEQ ID NO: 60264 - protein, 376 aa, unidentified
  source 1..376: note = Rikenellaceae bacterium
  REGION 1..376: note = tr|A0A3D4XEC3|A0A3D4XEC3_9BACT Queuine tRNA-ribosyltransferase OS=Rikenellaceae bacterium; OX = 2049048 GN=tgt PE=3 SV=1
MRFEKTAQDAESSARCGLLYTDHGVVETPIFMPVGTVGSVKAVYHRDLKEDIKAQIILGNTYHLYLRPGLEIIKNAGGLHKFISWDRPILTDSGGYQVFSLAENRKLTDEGCMFRSHIDGSKHFFSPEGVVDIQRIIGADIIMALDECPPGDSDHAYAKKSLKLTMQWLERGIKHFDSTDPLYGYSQTFFPIVQGCVYPDLRRESAEHAVSLNREGYAIGGLSVGEPAEVMYEMIEVLDPILPKDKPRYLMGVGTPANLLEAIERGIDMFDCVMPTRNARNGMLFTSEGMINIRNKKWADDHTPIDVNGTSFVDKTYSKAYLRHLFISGEILGAQIASEHNLAFYLNLMKEAQKHIREGSFKKWKTIAVKKLETKL

SEQ ID NO: 60265 - protein, 366 aa, unidentified
  source 1..366: note = Rippkaea orientalis
  REGION 1..366: note = tr|B7K5R2|B7K5R2_RIPO1 Queuine tRNA-ribosyltransferase OS=Rippkaea orientalis (strain PCC 8801) OX=41431 GN=tgt PE=3 SV=1
MGFSFQTHKKCSQTQARVGVWHTPHGLVETPRFMPVGTLATVKGLTPDQLQTTGAQMILANTYHLHLQPGETLIEKAGGLHPFMGWKGPILTDSGGFQVFSLSELRQIREIGVTFRSPRDGRIIELTPERSIQIQNALGADVIMAFDECPPGQADYATVKAATERTYRWLERCINAHQRPQDQALFGIVQGGIYPELRQSAVNGLIEFDLPGYAIGGVSVGEDPALVREIVQFTAPLLPPNKPRYLMGVGTYREMAMAIASGVDLFDCVIPTRFGRHGTALIRGERKNLKNAQFKEDFTPLDPECPCYTCQTFTRAYLNHLVRSQEMLGYILLSLHNVTELVRFTQRIREAIIGDRFVEEFGHWLS

SEQ ID NO: 60266 - protein, 382 aa, Rivibacter subsaxonicus
  REGION 1..382: note = tr|A0A4Q7VVT7|A0A4Q7VVT7_9BURK Queuine tRNA-ribosyltransferase OS=Rivibacter subsaxonicus; OX = 457575 GN=tgt PE=3 SV=1
MLRFDLLKTEGHARRGRLTLNHGIVETPIFMPVGTYGTVKGVMPRSLEEMGAQIILGNTFHLWLRPGLEVLQTFGGLHRFEAWDKPILTDSGGFQVWSLGEMRKISEEGVKFASPVNGDKLFLTPEVSMQIQTVLNSDIVMQFDECTPYESKGKLTSEAEARASMELSLRWAARCKTEFQKLQNPNALFGIVQGGMFESLREESLAKLVEMDLPGYAVGGVSVGEPKNEMLRIMAHTPHRLPANKPRYLMGVGTPEDLVEGVAQGVDMFDCVMPTRNARNGHLFTRFGDLRIRNARYKSDERPIDESCSCYSCAGHAGHAGGFSRAYLHHLDRCGEMLGGMLTSIHNLHYYLNLMREMREALDEGRFETFRKQFHADRARGV

SEQ ID NO: 60267 - protein, 371 aa, unidentified
  source 1..371: note = Rivicola pingtungensis
  REGION 1..371: note = tr|A0A318KXF0|A0A318KXF0_9NEIS Queuine tRNA-ribosyltransferase OS=Rivicola pingtungensis; OX = 1054498 GN=tgt PE=3 SV=1
MLQFTLHSTSAGARRGTLTLNHGQIETPTFMPVGTYGSVKAMSPLELNEIGAQIILGNTFHLWLRPGLDVIRQFGGLHQFIGWDKPILTDSGGFQVFSLGDLRKITEEGVTFQSPINGDKLFLSPEKSMEIQHVLNSDIVMIFDECTPYPADEKTAADSMRMSLRWAERSRKAFDDLHNPNALFGIVQGSMYPALREESLRELMAIGFDGIAIGGLSVGEPKHEMQRMLQVMQPMLPAEKPHYLMGVGTPEDLVYGVAHGIDMFDCVMPTRNARNGWIFTRFGDVKIKNAKYRSDTRPLDETCGCYACRNFSRAYLHHLHRAGEILGARLNTIHNLYYYQQLMADMRAAIEADRFNDFVAQFHADRQRGVD

SEQ ID NO: 60268 - protein, 367 aa, Rivularia sp.
  REGION 1..367: note = tr|K9RFJ1|K9RFJ1_9CYAN Queuine tRNA-ribosyltransferase OS=Rivularia sp. PCC 7116; OX = 373994 GN=tgt PE=3 SV=1
MSVNFSFQCLAKCSNTSARAGIFSTPHGVVETPRFMPVGTLANVKTITPAQLQETGAQMVLSNTYHLHLQPGEAIVAGGGGLHKFMGWDKPMLTDSGGFQVFSLSEMRSITEEGVSFRSPHDGQIINLTPEKSIEIQNTLGADVIMAFDECPPATANRTEVEAATERTYRWLLRCIEAHNRNEQALFGIVQGGIYADLRSSAANALTQLDLPGYAIGGVSVGEEPELIHEIVQKTAPLLPAHKPRYLMGVGTHQEMVMAIASGVDLFDCVIPTRWARHGTAMVKGERWNIKNAKFREDFTPLDETCPCYTCRNFTRAYLSHLIRAQEILAYTLLSIHNITELIRFTQKIRASILNDTFTTEFGHWLK

SEQ ID NO: 60269 - protein, 376 aa, unidentified
  source 1..376: note = Robbsia andropogonis
  REGION 1..376: note = tr|A0A0F5JZF8|A0A0F5JZF8_9BURK Queuine tRNA-ribosyltransferase OS=Robbsia andropogonis OX=28092; GN = tgt PE=3 SV=1
MLKFELLGHDGHARRGRITVNHGVIETPIFMPVGTYGTVKAMTPRDLHEINAQIVLGNTFHLWLRPGLDTIAQHGGLHGFMGWNKPILTDSGGFQVFSLGDLRKISEDGVRFASPINGDKLFLSPEISMQIQRVLNSDIVMQFDECTPYQVNGVPTSQELAAESMRMSARWARRSRDEFDREGNPNALFGIVQGGMFEDLRDESLERLRDIPFDGLAIGGLSVGEPKADMMRILAYTGPKLPADKPHYLMGVGTPEDLVNGVANGIDMFDCVMPTRNARNGWLFTRFGDLKIKNASFKNDLRPLDETCGCYTCKNFTRGYLHHLHRTGEILGAQLNTIHNLHYYLALMQEIRDAIDARQFDAFVKRFQTDRARGVT

SEQ ID NO: 60270 - protein, 376 aa, unidentified
  source 1..376: note = Robbsia sp.
  REGION 1..376: note = tr|A0A494XM32|A0A494XM32_9BURK Queuine tRNA-ribosyltransferase OS=Robbsia sp. DHC34 OX=2419776; GN = tgt PE=3 SV=1
MLKFDLLTTDGHARRGRLTLNHGVIETPIFMPVGTYGTVKAMTPRDLDEIGAQIILGNTFHLWLRPGNEIMAAHGGLHGFMGWNKPILTDSGGFQVFSLGELRKISEEGVTFASPINGDRLFLSPEVSMQIQRVLNSDIVMQFDECTPYATDGVPTNHKDAADSMRMSMRWAKRSIDEFRRLENPNALFGIVQGGMYEDLRDESLAGLADIGFDGLAIGGLSVGEPKEDMMRVLSHIGPKLPAQKPHYLMGVGTPEDLVESVALGVDMLDCVMPTRNARNGWLFTRFGDVKIKNASHKASLRPLDESCACYTCRNFTRSYLHHLHRVGEILGAQLNTIHNLHYYLELMSEVRKAIEDHAFEAFRVKFHAERARGAT

SEQ ID NO: 60271 - protein, 376 aa, unidentified
  source 1..376: note = Robertkochia marina
  REGION 1..376: note = tr|A0A4S3M011|A0A4S3M011_9FLAO Queuine tRNA-ribosyltransferase OS=Robertkochia marina OX=1227945; GN = tgt PE=3 SV=1
MQFKRIANDPGSRARAGELTTDHGTIETPIFMPVGTAGTVKGVHQRELTDDINPDIILGNTYHLYLRPKTDILEKAGGLHKFMNWDRNILTDSGGYQVYSLSNNRKIKEEGVKFKSHIDGSYHVFTPENVMDIQRTIGADIIMAFDECTPYPCDYHYAKRSMYMTHRWLDRCIKRFNDTPSKYGYEQTLFPIVQGSTYKDLRKQSAEYIANAGAFGNAIGGLSVGEPAEEMYAMTEVVCEILPEEKPRYLMGVGTPINILENIALGVDMFDCVMPTRNARNGMLFTAHGTINIKNKKWEDDFSPIDEMGITYVDTYYSKAYLRHLFAANEYLGKQIATIHNLGFYLWLVREARKHILAGDFAEWKNTMVKQMDKRL

SEQ ID NO: 60272 - protein, 419 aa, Robiginitalea biformata
  REGION 1..419: note = tr|A4CN78|A4CN78_ROBBH Queuine tRNA-ribosyltransferase OS=Robiginitalea biformata (strain ATCC BAA-864 / HTCC2501 / KCTC 12146) OX=313596 GN=tgt; PE = 3 SV=1
MREAHANAGIARQNFIFLLRGKAAGVVYFWPQRIQGDSQNTKPVAFTLKHTDPGSKARAGVLQTAHGEIGTPIFMPVGTAGTVKGVHQRELRNDVDPDVILGNTYHLFLRPGMEILEAAGGLHPFMGWDRPILTDSGGYQVYSLSGTRKIKEEGVKFQSHIDGSRHLFTPERVMELQRSIGADIIMAFDECTPYPCDYRYAKRSMDMTHRWLDRCMAHLEEAPPLYGFDQLFFPIVQGSVYKDLRKASAEYIANAGAPGNAIGGLSVGEPAEELYGMAEVVCDILPAEKPRYLMGVGTPANLLECIALGVDMFDCVMPTRNARNGMLFTSEGTINIKNKKWEADFSPLDPMGHTFVDTEYTRAYLRHLFAANEYLGKQIATLHNLGFYLWLVREARRRILDGTFAGWKSEMVQKLDKRL

SEQ ID NO: 60273 - protein, 376 aa, Robiginitalea myxolifaciens
  REGION 1..376: note = tr|A0A1I6H5R4|A0A1I6H5R4_9FLAO Queuine tRNA-ribosyltransferase OS=Robiginitalea myxolifaciens; OX = 400055 GN=tgt PE=3 SV=1
MNFTLKHTDPGSKARAGLLKTAHGTIETPIFMPVGTVASVKGVHQRELRDEIDPDIILGNTYHLYLRPGTEILKSAGGLHKFMGWDRPILTDSGGYQVYSLSGRRKIKEEGVKFKSHIDGSLHEFTPESVVDLQREIGADIIMAFDECTPYPCEYDYARRSMHLTHRWLDRCIKHFEESEPLYGYQQLFFPIVQGSVYTDLRKQSAEYIAGTDAVGNAIGGLSVGEPAEEMYEMAEAVCDILPTGKPRYLMGVGTPINILENIALGVDMFDCVMPTRNARNGMLFTSEGTINIKNKKWEDDFSPLDPMGHTFVDQEYSKAYLRHLFAANEYLGKQIATIHNLGFYLWLVRESRRRILDGSFRPWKDQMVKQMDKRL

SEQ ID NO: 60274 - protein, 373 aa, Robiginitomaculum sp.
  REGION 1..373: note = tr|A0A2G2GMD0|A0A2G2GMD0_9RHOB Queuine tRNA-ribosyltransferase OS=Robiginitomaculum sp.; OX = 2030823 GN=tgt PE=3 SV=1
MAEFPFEINAVDGKARTGVLRTSRGPIRTPAFMPVGTAGTVKALTMDQVKGAGSDIILGNTYHLMLRPGAERVRDLGGLHKFSTWAGPILTDSGGFQVFSLSQLAKKSENGMIFQSHIDGSRYELTPERSIEIQADLLGADISMQFDECTEHPVSHADAKTSMELSLRWGARSKAAFGERETQNLFGIVQGSTYRDLREQSAAGLIEQGFDGYAIGGLAVGEGFEKMCEVLDYTPDFLPADRPRYLMGVGRPLDIIEAVARGVDMFDCVMPTRAGRHGQAWSDYGSFNLKNARFRDDAEPLLAEIDCPASQDYSRAYIHHLVKCGETLGAILLSWHNIAYYQSLMMRIRSAIADGSFEDLRRELHEKTAAGLP

SEQ ID NO: 60275 - protein, 377 aa, Robiginitomaculum sp.
  REGION 1..377: note = tr|A0A2G2J0I7|A0A2G2J0I7_9RHOB Queuine tRNA-ribosyltransferase OS=Robiginitomaculum sp.; OX = 2030823 GN=tgt PE=3 SV=1
MTGFSFDIAATDGAARTGVLKTARGDIRTPAFMPVGTAGTVKGLYMDQVAGAGADIILGNTYHLMLRPGAERVARLGGLHALGGWKGPILTDSGGFQVWSLSKLRKMSEKGVEFQSHLDGSKHMLSPERSIEIQADLLGADICMQLDECTNFPSTHAEAAKSMELSLRWGKRSLEAFGDREIQTLFAIVQGSTFPDLRQISAESSVEARVNGAGYGGFAIGGLAVGEGHEAMLEVLENVMPHLPAARPRYLMGVGKPIDLVESVARGVDMFDCVIPTRSGRHGQVWTDTGPYNIKSARFAEDLSPLDASIDCPASCDYSKAYIHHLIRCGELLGGMLLSWHNIAYYQNLMQRIRASIVAGRFNEFADNFRKNLIIKT

SEQ ID NO: 60276 - protein, 380 aa, Robinsoniella peoriensis
  REGION 1..380: note = tr|A0A4U8Q3C1|A0A4U8Q3C1_9FIRM Queuine tRNA-ribosyltransferase OS=Robinsoniella peoriensis; OX = 180332 GN=tgt PE=3 SV=1
MYKLIKQDGKAKRGELHTVHGVIQTPVFMNVGTAAAIKGAVATTDLQEIGTQVELSNTYHLHVRPGDDVVRKMGGLHKFMVWDKPILTDSGGFQVFSLAGLRKIKEEGVYFSSHIDGRKIFMGPEESMQIQSNLASTIAMAFDECPSSVASREYVQNSVDRTTRWLARCKEEMARLNSLEDTINKDQLLFAINQGAIYEDIRIEHAKTIAQMDLDGYAIGGLAVGETHEEMYRILDAVVPHLPLEKPTYLMGVGTPANILEAVDRGVDFFDCVYPSRNGRHGHVYTNQGKLNLFNAKFELDDKPIEEGCQCPACRHYSRAYIRHLLKAKEMLGMRLCVLHNLYFYNHMMEEIREAIEQGRYAEYKKAKLEGFEQGNIKIR

SEQ ID NO: 60277 - protein, 375 aa, Robinsoniella sp.
  REGION 1..375: note = tr|A0A371AUV8|A0A371AUV8_9FIRM Queuine tRNA-ribosyltransferase OS=Robinsoniella sp. MCWD5; OX = 1812858 GN=tgt PE=3 SV=1
MYRIIKQDGKAKRGELKTVHGTIQTPVFMNVGTAAAIKGAVSTQDLQTLKTQVQLSNTYHLHVRPGDQVVRQLGGLHKFMVWDKPILTDSGGFQVFSLASLRKIKEEGVYFQSHVDGRKIFMGPEESMRIQSNLASTIAMAFDECPSSKAPKEYVESSVERTTRWLERCKNELNRLNQLEDTINKKQLLFGINQGAIFDEIRIEHAKRIAEMDLDGYAVGGLAVGETHEEMYHILDATVEHLPINKPTYLMGVGTPFNILEAVDRGVDFFDCVYPTRNGRHGHLYTNNGKINLFNQKFELDDRPIEEGCQCPACQAYSRAYIRHLLKAKEMLGMRLCVMHNLYFYNTMMEEIREAIEQGNYKKYKTEKIRRMTQI

SEQ ID NO: 60278 - protein, 380 aa, Robinsoniella sp.; identical to SEQ ID NO: 60276
  REGION 1..380: note = tr|A0A0J1J0X9|A0A0J1J0X9_9FIRM Queuine tRNA-ribosyltransferase OS=Robinsoniella sp. RHS; OX = 1504536 GN=tgt PE=3 SV=1

SEQ ID NO: 60279 - protein, 379 aa, unidentified
  source 1..379: note = Rodentibacter genomosp.
  REGION 1..379: note = tr|A0A1V3J380|A0A1V3J380_9PAST Queuine tRNA-ribosyltransferase OS=Rodentibacter genomosp. 1; OX = 1908264 GN=tgt PE=3 SV=1
MKYELDKTSGNARRGRLVFERPQGTFKVETPAFMPVGTYGTVKGMTPEEVRATGAEILLGNTFHLSLRPGQEIMRKHGDLHDFMQWHRPILTDSGGFQVFSLGKLRKITEEGVKFQNPINGERIFLSPEKSMEIQYDLGSDIVMIFDECTPYPATFDYAKKSMEMSLRWAKRSRDRFDELGNKNALFGIIQGGVFEELRKISLEGLVNIGFDGYAVGGLAVGEPKEDMHRILEYICPQIPADKPRYLMGVGKPEDLVEGVRRGIDMFDCVMPTRNARNGHLFVTDGIVKIRNAKYRDDTSPLDPHCDCYTCKNYTKAYLYHLDKCGEILGARLNTIHNLRYYQHLMAEIRQAIEEDRFDDFVVEFYARIGKPVPPLQKG

SEQ ID NO: 60280 - protein, 387 aa, unidentified
  source 1..387: note = Rodentibacter genomosp.
  REGION 1..387: note = tr|A0A1V3JQ17|A0A1V3JQ17_9PAST Queuine tRNA-ribosyltransferase OS=Rodentibacter genomosp. 2; OX = 1908266 GN=tgt PE=3 SV=1
MKYELDKTSGNARRGRLVFERPQGTFKVETPAFMPVGTYGTVKGMTPEEVRATGAEILLGNTFHLWLRPGQEVMRKHGDLHDFMQWHRPILTDSGGFQVFSLGKLRKITEEGVQFQNPINGERIFLSPEKSMEIQYDLGSDIVMIFDECTPYPATFDYAKKSMEMSLRWAKRSRDRFDELSNKNALFGIIQGGIFEELRKISLEGLVNIGFDGYAVGGLAVGEPKEDMHRILEYICPKIPADKPRYLMGVGKPEDLVEGVRRGIDMFDCVMPTRNARNGHLFVTDGIVKIRNAKYRDDTSPLDPHCDCYTCKNYTKAYLYHLDKCGEILGARLNTIHNLRYYQRLMAEIRQAIEDDRFDDFVVAFYARIGKPVPPLQLDTTSLPLSE

SEQ ID NO: 60281 - protein, 379 aa, unidentified
  source 1..379: note = Rodentibacter heidelbergensis
  REGION 1..379: note = tr|A0A1V3IAS5|A0A1V3IAS5_9PAST Queuine tRNA-ribosyltransferase OS=Rodentibacter heidelbergensis; OX = 1908258 GN=tgt PE=3 SV=1
MKYELDKTSGNARRGRLVFERPQGTFSVETPAFMPVGTYGTVKGMTPEEVRATGADILLGNTFHLWLRPGQEVMCKHGDLHDFMQWHRPILTDSGGFQVFSLGKLRKITEEGVKFQNPINGERIFLSPEKSMEIQYDLGSDIVMIFDECTPYPATFDYAKKSMEMSLRWAKRSRDRFDELGNKNALFGIIQGGVFEELRKISLEGLVNIGFDGYAVGGLAVGEPKEDMHRILEYICPQIPADKPRYLMGVGKPEDLVEGVRRGIDMFDCVMPTRNARNGHLFVTDGIVKIRNAKYRDDTSPLDPHCDCYTCKNYTKAYLYHLDKCGEILGARLNTIHNLRYYQRLMAEIRQAIEEDRFDDFVVEFYARIGKPVPPLQLG

SEQ ID NO: 60282 - protein, 387 aa, unidentified
  source 1..387: note = Rodentibacter heylii
  REGION 1..387: note = tr|A0A1V3KN05|A0A1V3KN05_9PAST Queuine tRNA-ribosyltransferase OS=Rodentibacter heylii OX=1906744; GN = tgt PE=3 SV=1
MKYELDKTSGNARRGRLVFERPQGTFKVETPAFMPVGTYGTVKGMTPEEVRATGAEILLGNTFHLWLRPGPEVMRKHGDLHDFMQWHRPILTDSGGFQVFSLGKLRKITEEGVKFQNPINGERIFLSPEKSMEIQYDLGSDIVMIFDECTPYPATFDYAKKSMEMSLRWAKRSRDRFDELGNKNALFGIIQGGVFEELRKISLEGLVNIGFDGYAVGGLAVGEPKEDMHRILEYICPQIPADKPRYLMGVGKPEDLVEGVRRGIDMFDCVMPTRNARNGHLFVTDGIVKIRNAKYRDDTTPLDPHCDCYTCKNYTKAYLYHLDKCGEILGARLNTIHNLRYYQRLMAEIRQAIEEDRFDDFVTEFYTRMGKPIPPLQLDTTPSPQSE

SEQ ID NO: 60283 - protein, 383 aa, unidentified
  source 1..383: note = Rodentibacter heylii
  REGION 1..383: note = tr|A0A1V3K9R6|A0A1V3K9R6_9PAST Queuine tRNA-ribosyltransferase OS=Rodentibacter heylii OX=1906744; GN = tgt PE=3 SV=1
MKFKLHKTDGTARRGTMTFQRPQGEFSVETPAFMPVGTYGTVKGMTPEEVRQTGAEILLGNTFHLWLRPGQEIMRKHGDLHDFMQWHRPILTDSGGFQVFSLGKLRKITEEGVKFQNPINGEHIFLSPEKSMEIQYDLGSDIVMIFDECTPYPATFDYAKKSMEMSLRWAKRSRDRFDQLENKNALFGIVQGGIYEELRKISVEGLVKIGFDGYAVGGLAVGEPKEDMHRILEYVCPQLPQDKPRYLMGVGKPEDLVEGVRRGIDMFDCVMPTRNARNGHLFVSNGIVKIRNAKYRDDTTTLDPECDCYTCKHYTKSYLYHLDKCGEILGARLNTIHNLRYYQRLMDQIRQAIEEDSFEQFVIDFYAKIGKPVPPLQSTPKNL

SEQ ID NO: 60284 - protein, 387 aa, unidentified
  source 1..387: note = Rodentibacter mrazii
  REGION 1..387: note = tr|A0A1V3IG01|A0A1V3IG01_9PAST Queuine tRNA-ribosyltransferase OS=Rodentibacter mrazii OX=1908257; GN = tgt PE=3 SV=1
MKYELDKTSGNARRGRLVFERPQGTFKVETPAFMPVGTYGTVKGMTPEEVRATGAEILLGNTFHLWLRPGQEVMRKHGDLHDFMQWHRPILTDSGGFQVFSLGKLRKITEEGVQFQNPINGERIFLSPEKSMEIQYDLGSDIVMIFDECTPYPATFDYAKKSMEMSLRWAKRSRDRFDELSNKNALFGIIQGGIFEELRKISLEGLVNIGFDGYAVGGLAVGEPKEDMHRILEYICPQIPADKPRYLMGVGKPEDLVEGVRRGIDMFDCVMPTRNARNGHLFVTDGIVKIRNAKYRDDTSPLDPHCDCYTCKNYTKAYLYHLDKCGEILGARLNTIHNLRYYQRLMAEIRQAIEDDRFDDFVVAFYARIGKPVPPLQLDTTSLPLSE

SEQ ID NO: 60285 - protein, 390 aa, unidentified
  source 1..390: note = Rodentibacter myodis
  REGION 1..390: note = tr|A0A1V3JM07|A0A1V3JM07_9PAST Queuine tRNA-ribosyltransferase OS=Rodentibacter myodis OX=1907939; GN = tgt PE=3 SV=1
MKYELDKTSGNARRGRLVFERPQGTFSVETPAFMPVGTYGTVKGMTPEEVRATGAEILLGNTFHLWLRPGQAVMRKHGDLHDFMQWHRPILTDSGGFQVFSLGKLRKITEEGVKFQNPINGERIFLSPEKSMEIQYDLGSDIVMIFDECTPYPATFDYAKKSMEMSLRWAKRSRDRFDELGNKNALFGIIQGGVFEELRKASLEGLVNIGFDGYAVGGLAVGEPKEDMHRILEYICPQIPADKPRYLMGVGKPEDLVEGVRRGIDMFDCVMPTRNARNGHLFVTDGIVKIRNAKYRDDTGPLDPHCDCYTCKNYTKAYLYHLDKCGEILGARLNTIHNLRYYQRLMAEIRQAIEEDRFDDFVVEFYARMGKPVPPLQLELSQSTETQLSA

SEQ ID NO: 60286 - protein, 387 aa, unidentified
  source 1..387: note = Rodentibacter pneumotropicus
  REGION 1..387: note = tr|A0A4S2QRL8|A0A4S2QRL8_9PAST Queuine tRNA-ribosyltransferase OS=Rodentibacter pneumotropicus; OX = 758 GN=tgt PE=3 SV=1
MKYELDKTSGNARRGRLVFERPQGTFKVETPAFMPVGTYGTVKGMTPEEVRATGADILLGNTFHLWLRPGQEVMRKHGDLHDFMQWHRPILTDSGGFQVFSLGKLRKITEESVQFQNPINGERIFLSPEKSMEIQYDLGSDIVMIFDECTPYPATFDYAKKSMEMSLRWAKRSRDRFDELDNKNALFGIIQGGVFEELRKISLEGLVNIGFDGYAVGGLAVGEPKEDMHRILEYICPQIPADKPRYLMGVGKPEDLVEGVRRGIDMFDCVMPTRNARNGHLFVTDGIVKIRNAKYRDDTSPLDPHCDCYTCKNYTKAYLYHLDKCGEILGARLNTIHNLRYYQRLMAEIRQAIEDDRFDDFVVEFYARIGKPVPPLQLDTTPSSLSE

SEQ ID NO: 60287 - protein, 387 aa, unidentified
  source 1..387: note = Rodentibacter pneumotropicus
  REGION 1..387: note = tr|A0A1V3K6B2|A0A1V3K6B2_9PAST Queuine tRNA-ribosyltransferase OS=Rodentibacter pneumotropicus; OX = 758 GN=tgt PE=3 SV=1
MKYELDKTSGNARRGRLVFERPQGTFKVETPAFMPVGTYGTVKGMTPEEVRATGADILLGNTFHLWLRPGQEVMRKHGDLHDFMQWHRPILTDSGGFQVFSLGKLRKITEEGVQFQNPINGERIFLSPEKSMEIQYDLGSDIVMIFDECTPYPATFDYAKKSMEMSLRWAKRSRDRFDELDNKNALFGIIQGGVFEELRKISLEGLVNIGFDGYAVGGLAVGEPKEDMHRILEYICPQIPADKPRYLMGVGKPEDLVEGVRRGIDMFDCVMPTRNARNGHLFVTDGIVKIRNAKYRDDTSPLDPHCDCYTCKNYTKAYLYHLDKCGEILGARLNTIHNLRYYQRLMAEIRQAIEEDRFDDFVVEFYARIGKPVPPLQLDTTPSSLSE

SEQ ID NO: 60288 - protein, 386 aa, unidentified
  source 1..386: note = Rodentibacter rarus
  REGION 1..386: note = tr|A0A1V3ISR0|A0A1V3ISR0_9PAST Queuine tRNA-ribosyltransferase OS=Rodentibacter rarus OX=1908260; GN = tgt PE=3 SV=1
MKYELDKTSGNARRGRLVFERPQGTFSVETPAFMPVGTYGTVKGMTPEEVRATGADILLGNTFHLWLRPGQEVMRKHGDLHDFMQWHRPILTDSGGFQVFSLGKLRKITEEGVKFQNPINGERIFLSPEKSMEIQYDLGSDIVMIFDECTPYPATFDYAKKSMEMSLRWAKRSRDRFDELGNKNALFGIIQGGVFEELRKISLEGLVNIGFDGYAVGGLAVGEPKEDMHRILEYICPQIPADKPRYLMGVGKPEDLVEGVRRGIDMFDCVMPTRNARNGHLFVTEGIVKIRNAKYRDDTSPLDPHCDCYTCKNYTKAYLYHLDKCGEILGARLNTIHNLRYYQRLMAEIRQAIEEDRFDDFVVEFYARMGRAGLPLRLDTTSPLSE

SEQ ID NO: 60289 - protein, 387 aa, unidentified
  source 1..387: note = Rodentibacter ratti
  REGION 1..387: note = tr|A0A1V3L8M6|A0A1V3L8M6_9PAST Queuine tRNA-ribosyltransferase OS=Rodentibacter ratti OX=1906745; GN = tgt PE=3 SV=1
MKYELDKTSGNARRGRLVFERPQGTFSVETPAFMPVGTYGTVKGMTPEEVRATGAEILLGNTFHLWLRPGQEVMRKHGDLHDFMQWHRPILTDSGGFQVFSLGKLRKITEEGVKFQNPINGERIFLSPEKSMEIQYDLGSDIVMIFDECTPYPATFDYAKKSMEMSLRWAKRSRDRFDELGNKNALFGIIQGGVFEELRKISLEGLVNIGFDGYAVGGLAVGEPKEDMHRILEYICPQIPANKPRYLMGVGKPEDLVEGVRRGIDMFDCVMPTRNARNGHLFVTDGIVKIRNAKYRDDTSPLDPHCDCYTCKNYTKAYLYHLDKCGEILGARLNTIHNLRYYQRLMAEIRQAIEDDRFDDFVVEFYARIGKPVPPLQLDTTSSPLSE

SEQ ID NO: 60290 - protein, 387 aa, unidentified
  source 1..387: note = Rodentibacter ratti
  REGION 1..387: note = tr|A0A1V3L2K5|A0A1V3L2K5_9PAST Queuine tRNA-ribosyltransferase OS=Rodentibacter ratti OX=1906745; GN = tgt PE=3 SV=1
MKYELDKTSGNARRGRLVFERPQGTFSVETPAFMPVGTYGTVKGMTPEEVRATGAEILLGNTFHLWLRPGQEVMRKHGDLHDFMQWHRPILTDSGGFQVFSLGKLRKITEEGVKFQNPINGERIFLSPEKSMEIQYDLGSDIVMIFDECTPYPATFDYAKKSMEMSLRWAKRSRDRFDELGNKNALFGIIQGGIFEELRKISLEGLVNIGFDGYAVGGLAVGEPKEDMHRILEYICPQIPADKPRYLMGVGKPEDLVEGVRRGIDMFDCVMPTRNARNGHLFVTDGIVKIRNAKYRDDTSPLDPHCDCYTCKNYTKAYLYHLDKCGEILGARLNTIHNLRYYQRLMAEIRQAIEDDRFDDFVVEFYARIGKPVPPLQLDTPSSPLSE

SEQ ID NO: 60291 - protein, 387 aa, unidentified
  source 1..387: note = Rodentibacter sp.
  REGION 1..387: note = tr|A0A1V3K291|A0A1V3K291_9PAST Queuine tRNA-ribosyltransferase OS=Rodentibacter sp. Ppn85; OX = 1908525 GN=tgt PE=3 SV=1
MKYELDKTSGNARRGRLIFERPQGTFKVETPAFMPVGTYGTVKGMTPEEVRATGAEILLGNTFHLWLRPGQEVMRKHGDLHDFMQWHRPILTDSGGFQVFSLGKLRKITEEGVKFQNPINGERIFLSPEKSMEIQYDLGSDIVMIFDECTPYPATFDYAKKSMEMSLRWAKRSRDRFDELGNKNALFGIIQGGVFEELRKISLEGLVNIGFDGYAVGGLAVGEPKEDMHRILEYICPQIPADKPRYLMGVGKPEDLVEGVRRGIDMFDCVMPTRNARNGHLFVTDGIVKIRNAKYRDDTTPLDPHCDCYTCKNYTKAYLYHLDKCGEILGARLNTIHNLRYYQRLMAEIRQAIEDNRFDDFMTEFYTRMGKPVPPLQLNTTPSPLSE

SEQ ID NO: 60292 - protein, 387 aa, unidentified
  source 1..387: note = Rodentibacter trehalosifermentans
  REGION 1..387: note = tr|A0A1V3IM62|A0A1V3IM62_9PAST Queuine tRNA-ribosyltransferase OS=Rodentibacter trehalosifermentans OX=1908263 GN=tgt PE=3 SV=1
MKYELDKTSGNARRGRLVFERPQGTFSVETPAFMPVGTYGTVKGMTPEEVRATGAEILLGNTFHLWLRPGQEVMRKHGDLHDFMQWHRPILTDSGGFQVFSLGKLRKITEEGVKFQNPINGERIFLSPEKSMEIQYDLGSDIVMIFDECTPYPATFDYAKKSMEMSLRWAKRSRDRFDELGNKNALFGIIQGGVFEELRKISLEGLVDIGFDGYAVGGLAVGEPKEDMHRILEYICPQIPADKPRYLMGVGKPEDLVEGVRRGIDMFDCVMPTRNARNGHLFVTDGIVKIRNAKYRDDTSPLDPHCDCYTCKHYTKAYLYHLDKCGEILGARLNTIHNLRYYQRLMAEIRQAIEKDRFDDFVVEFYARIGKPVPPLQLSTAQSALSE

SEQ ID NO: 60293 - protein, 387 aa, unidentified
  source 1..387: note = Rodentibacter trehalosifermentans
  REGION 1..387: note = tr|A0A1V3IZD3|A0A1V3IZD3_9PAST Queuine tRNA-ribosyltransferase OS=Rodentibacter trehalosifermentans OX=1908263 GN=tgt PE=3 SV=1
MKYELDKTSGNARRGRLVFERPQGTFSVETPAFMPVGTYGTVKGMTPEEVRATGAEILLGNTFHLWLRPGQEVMRKHGDLHDFMQWHRPILTDSGGFQVFSLGKLRKITEEGVKFQNPINGERIFLSPEKSMEIQYDLGSDIVMIFDECTPYPATFDYAKKSMEMSLRWAKRSRDRFDELGNKNALFGIIQGGVFEELRKISLEGLVNIGFDGYAVGGLAVGEPKEDMHRILEYICPQIPADKPRYLMGVGKPEDLVEGVRRGIDMFDCVMPTRNARNGHLFVTDGIVKIRNAKYRDDTSPLDPHCDCYTCKHYTKAYLYHLDKCGEILGARLNTIHNLRYYQRLMAEIRQAIEKDRFDDFVVEFYARIGKPVPPLQLSTAQSALSE

SEQ ID NO: 60294 - protein, 373 aa, unidentified
  source 1..373: note = Romboutsia hominis
  REGION 1..373: note = tr|A0A2P2BUB8|A0A2P2BUB8_9FIRM Queuine tRNA-ribosyltransferase OS=Romboutsia hominis OX=1507512; GN = tgt PE=3 SV=1
MSAIRYELIKTCKQSGARLGRLHTPHGVIETPIFMPVGTQATVKSMTPEELKEIGSQIILSNTYHLYMRPGHELVKEAGGLHKFMNWDKPILTDSGGFQVFSLGPLRKITEEGVHFRSHIDGSKHFISPEKAMEIQNALGSDIMMAFDECAPYPADREYVKNSLERTTRWLKRCKEAHKNTEKQALFGIIQGGMYKDLREQSAKEILELDLPGYAVGGLSVGEPKELMYEVLDYTVPLMPEDKPRYLMGVGSPDDLLEGVIRGIDMFDCVLPTRIARNGTAMTSVGKIVVRNAKYAKDFTPLDPNCDCYCCKNYTRAYIRHLVKANEILAARLITTHNLHFLLNLMKQVRQAIMEDRLLDFKEEFFKQYGYKL

SEQ ID NO: 60295 - protein, 373 aa, unidentified
  source 1..373: note = Romboutsia ilealis
  REGION 1..373: note = tr|A0A1V1I3B3|A0A1V1I3B3_9FIRM Queuine tRNA-ribosyltransferase OS=Romboutsia ilealis OX=1115758; GN = tgt PE=3 SV=1
MSAIRYELIKTCKQSGARLGRLHTPHGVIETPIFMPVGTQATVKSMTPEELKEIGSQIILSNTYHLYMRPGHDLVKEAGGLHKFMNWDRPILTDSGGFQVFSLGPLRKITEEGVHFRSHIDGSKHFISPEKAMEIQNALGSDIMMAFDECAPYPADREYVKNSLERTTRWLKRCKEAHKNTENQALFGIIQGGMYKDLREQSAKEILELDLPGYAVGGLSVGEPKELMYEVLDYTVPLMPEDKPRYLMGVGSPDDLLEGVIRGIDMFDCVLPTRIARNGTAMTSVGKVVVRNAKYARDFSPLDPNCDCYCCRNYTRAYIRHLVKANEILASRLITTHNLYFLLNLMKQVREAIMEDRLLDFKEEFFKAYGYTK

SEQ ID NO: 60296 - protein, 373 aa, unidentified
  source 1..373: note = Romboutsia lituseburensis
  REGION 1..373: note = tr|A0A1G9RA49|A0A1G9RA49_9FIRM Queuine tRNA-ribosyltransferase OS=Romboutsia lituseburensis DSM 797 OX=1121325 GN=tgt PE=3 SV=1
MSAIRYELIKTCKQSGARLGRLHTPHGVIETPIFMPVGTQATVKSMTPEELKEIGSQIILSNTYHLYMRPGHDLVKEAGGLHKFMNWDKPILTDSGGFQVFSLGPLRKITEEGVHFRSHIDGSKHFISPEKAMEIQNALGSDIMMAFDECAPYPADREYVKNSLERTTRWLKRCKEAHTNTEKQALFGIIQGGMYKDLREQSAKEILELDLPGYAVGGLSVGEPKELMYEVLDYTVPLMPENKPRYLMGVGSPDDLLEGVIRGIDMFDCVLPTRIARNGTAMTSVGKIVVRNASYARDFGPLDPNCDCYCCRNYSRAYIRHLVKANEILASRLITTHNLHFLLNLMKQVREAIMEDRLLDFKEEFFKAYGYTK

SEQ ID NO: 60297 - protein, 373 aa, unidentified
  source 1..373: note = Romboutsia maritimum
  REGION 1..373: note = tr|A0A371IRE4|A0A371IRE4_9FIRM Queuine tRNA-ribosyltransferase OS=Romboutsia maritimum OX=2020948; GN = tgt PE=3 SV=1
MYAVRYELIKTCKQSGARLGRLHTPHGVIETPIFMPVGTQATVKAMTPEELKEIGSQIILSNTYHLYMRPGHDLVKEAGGLHKFMNWDKPILTDSGGFQVFSLGPLRKITEEGVNFRSHIDGSKHFISPEKAMEIQNALGSDIMMAFDECAPYPADREYVKNSLERTTRWLKRCKEAHKNTENQALFGIIQGGMYKDLREQSAKEVLAVDLPGYAIGGLSVGEPKKLMYEVLEYTTPLMPVDKPRYLMGVGSPDDLIEGVIRGVDMFDCVLPTRIARNGTAMTSEGKVVVRNAKYARDFTPLDPECDCYCCKNYTRAYIRHLVKANEILASRLISTHNLHFLLKLMEQVRQAIMEDRLLDFRAEFFQKYGYEL

SEQ ID NO: 60298 - protein, 373 aa, unidentified
  source 1..373: note = Romboutsia weinsteinii
  REGION 1..373: note = tr|A0A371J8X2|A0A371J8X2_9FIRM Queuine tRNA-ribosyltransferase OS=Romboutsia weinsteinii; OX = 2020949 GN=tgt PE=3 SV=1
MSAVRYELIKTCKQSGARLGRLHTPHGVIETPIFMPVGTQATVKSMTPEELKEIGSQIILSNTYHLYMRPGHDLVKEAGGLHKFMNWDKPILTDSGGFQVFSLGPLRKITEEGVNFRSHIDGSKHFISPEKAMEIQNALGSDIMMAFDECAPYPADRDYVKKSLERTTRWLHRCKEAHKNTENQALFGIIQGGMYKDLREQSAKEILELDLPGYAVGGLSVGEPKDLMYEVLDYTVPLMPENKPRYLMGVGSPDDLLEGVIRGIDMFDCVLPTRIARNGTAMTSEGKVVVRNAKYARDFSPLDPECDCYCCKNYTRGYIRHLVKANEILASRLITTHNLHFLLKLMEQVREAIREDRLLDFKDEFFKKYGYEL

SEQ ID NO: 60299 - protein, 375 aa, Roseateles aquatilis
  REGION 1..375: note = tr|A0A246IU23|A0A246IU23_9BURK Queuine tRNA-ribosyltransferase OS=Roseateles aquatilis OX=431061; GN = tgt PE=3 SV=1
MLKFELLKTEGRARRGTMTLNHGVVQTPIFMPVGTYGTVKGVMPRSLEEMGAQIILGNTFHLWMRPGLDIMKQFGGLHRFESWNKPILTDSGGFQVWSLGEMRKISEEGVKFASPVNGDKLFLTPEISMQIQTVLNSDIVMQFDECTPYESKGQLTTEKEARLSMEMSLRWARRCQDEFGRLENPNALFGIVQGGMFEHLRDESLAGLKALDLPGYAIGGLSVGEPKADMLRVLDHIGHQLPADKPRYLMGVGTPEDLVEGVRQGIDMFDCVMPTRNARNGHLFTRFGDLRLRNARYKADERPVDETCTCYCCQNFSRAYLHHLDRCGEMLGPMLTSVHNLHYYLNLMKEVRESLDAGDFEGFRARFAADRARGI

SEQ ID NO: 60300 - protein, 375 aa, Roseateles depolymerans
  REGION 1..375: note = tr|A0A2W5DU92|A0A2W5DU92_9BURK Queuine tRNA-ribosyltransferase OS=Roseateles depolymerans; OX = 76731 GN=tgt PE=3 SV=1
MLQFELHKTEGRARRGTLTLNHGVVQTPIFMPVGTYGTVKGVMPRSLEEMGAQIILGNTFHLWMRPGLDIIKQFGGLHRFESWHKPILTDSGGFQVWSLGEMRKISEEGVKFASPVNGDKLFLTPEISMQIQTILNSDIVMQFDECTPYETKGKLTTEREAKASMEMSLRWAKRCQAEFARLENPNALFGIVQGGMFEHLRDHSLAGLVDLDLPGYAIGGLSVGEPKADMQRVLAHTGHQLPANKPRYLMGVGTPEDLVEGVAQGIDMFDCVMPTRNARNGHLFTRFGDLRLRNARYKADESPVDPTCSCYTCRNFSRAYLHHLDRCGEMLGPMLTSIHNLHYYLNLMQEVRDALDAGDFEGFRRRFAADRARGV

SEQ ID NO: 60301 - protein, 375 aa, Roseateles depolymerans
  REGION 1..375: note = tr|A0A0U3M7V6|A0A0U3M7V6_9BURK Queuine tRNA-ribosyltransferase OS=Roseateles depolymerans; OX = 76731 GN=tgt PE=3 SV=1
MLKFELLKTEGRARRGRMTLNHGVVQTPIFMPVGTYGTVKGVMPRSLEEMGAQIILGNTFHLWMRPGLDIMKQFGGLHRFESWNKPILTDSGGFQVWSLGEMRKISEEGVKFASPVNGDKLFLTPEISMQIQTVLNSDIVMQFDECTPYETKGHITTEKEARLSMEMSLRWAKRCQDEFARLENPNALFGIVQGGMFENLRDESLNGLKALDLPGYAIGGLSVGEPKADMLRVLDHIAHQLPEHKPRYLMGVGTPEDLVEGVRQGVDMFDCVMPTRNARNGHLFTRFGDLRLRNARYKADERPVDETCTCYCCQNFSRAYLHHLDRCGEMLGPMLTSIHNLHYYLNLMKEVREALDADDFEGFRQRFQADRARGI

SEQ ID NO: 60302 - protein, 375 aa, Roseateles sp.
  REGION 1..375: note = tr|A0A1H7KCL5|A0A1H7KCL5_9BURK Queuine tRNA-ribosyltransferase OS=Roseateles sp. YR242 OX=1855305; GN = tgt PE=3 SV=1
MLKFELLKTEGRARRGRMTLNHGVVQTPIFMPVGTYGTVKGVMPRSLEEMGAQIILGNTFHLWMRPGLDIMKQFGGLHRFESWDKPILTDSGGFQVWSLGEMRKISEEGVKFASPVNGDKLFLTPEISMQIQTVLNSDIVMQFDECTPYETKGHITTEKEARLSMEMSLRWAKRCQDEFARLENPNALFGIVQGGMFENLRDESLAGLKALDLPGYAIGGLSVGEPKADMLRVLDHLAHQLPDQKPRYLMGVGTPEDLVEGVRQGVDMFDCVMPTRNARNGHLFTRFGDLRLRNARYKADERPVDETCSCYCCQNFSRAYLHHLDRCGEMLGPMLTSVHNLHYYLNLMKEVREALDGGDFAGFQVRFKADRARGI

SEQ ID NO: 60303 - protein, 382 aa, Roseburia faecis
  REGION 1..382: note = tr|A0A173TDH9|A0A173TDH9_9FIRM Queuine tRNA-ribosyltransferase OS=Roseburia faecis OX=301302; GN = tgt PE=3 SV=1
MATYELLKQEGSAKRAVFHTVHGDIQTPVFMNVGTVAAIKGAVSTMDLKEIKCQVELSNTYHLHVRPGDKLIKEMGGLHKFMVWDRPILTDSGGFQVFSLAGLRKIKEEGVYFHSHVDGAKIFMGPEESMQIQSNLGSTIAMAFDECPSSVAERRYVEDSVARTTRWLERCKKEMQRLNSLEDTINKEQLLFGINQGAIFSDIRTDHAKRISELDLDGYAIGGLAVGETHEQMYQIIEETVPYLPKNKPTYLMGVGTPANILEGVARGIDFFDCVYPSRNGRHGHVYTNEGKLNLFNQKYEKDMRPIEEGCQCPACRHYSRAYIRHLLKAKEMLGMRLCVLHNLYFYNTMMEEIRNALDAGNFASYKEEKLYRMGQSSIKNV

SEQ ID NO: 60304 - protein, 382 aa, Roseburia faecis
  REGION 1..382: note = tr|A0A0M6WS06|A0A0M6WS06_9FIRM Queuine tRNA-ribosyltransferase OS=Roseburia faecis OX=301302; GN = tgt PE=3 SV=1
MATYELLKQEGSAKRAVFHTVHGDIQTPVFMNVGTVAAIKGAVSTMDLKEIKCQVELSNTYHLHVRPGDKLIKEMGGLHKFMVWDRPILTDSGGFQVFSLAGLRKIKEEGVYFHSHVDGAKIFMGPEESMQIQSNLGSTIAMAFDECPSSVAERRYVEDSVARTARWLERCKKEMQRLNSLEDTINKEQLLFGINQGAIFSDIRTDHAKRISELDLDGYAIGGLAVGETHEQMYQIIEETVPYLPKNKPTYLMGVGTPANILEGVARGIDFFDCVYPSRNGRHGHVYTNEGKLNLFNQKYEKDMRPIEEGCQCPACRHYSRAYIRHLLKAKEMLGMRLCVLHNLYFYNTMMEEIRDALDAGNFASYKEEKLYRMGQSSIKNV

SEQ ID NO: 60305 - protein, 383 aa, Roseburia hominis
  REGION 1..383: note = tr|G2T1C9|G2T1C9_ROSHA Queuine tRNA-ribosyltransferase OS=Roseburia hominis (strain DSM 16839 / NCIMB 14029 / A2-183) OX=585394 GN=tgt PE=3 SV=1
MYELLKQEGRAKRGVFHTVHGDIQTPVFMNVGTVAAIKGAVSTEDLEQIKCQVELSNTYHLHVRTGDKLIREVGGLHKFMSWNRPILTDSGGFQVFSLAGLRKIKEEGVYFHSHIDGAKIFMGPEESMQIQSNLGSTIAMAFDECPPALAERKYVEDSVARTTRWLERCKNEMQRLNGLEDTVNRHQMLFGINQGAIYTDIRIDHAKRISELDLDGYAVGGLAVGETHEEMYHVLDETVPYLPVNKPIYLMGVGTPANILEGVERGIDFFDCVYPSRNGRHGHVYTNQGKINLFNQKYEKDMRPIEEGCGCPTCRRYSRAYIRHLLKAKEMLGMRLCVLHNLYFYNTMMEEIRDALDAGNFASYKEEKLYSMGQINREKEMEK

SEQ ID NO: 60306 - protein, 383 aa, Roseburia hominis
  REGION 1..383: note = tr|A0A395VAN0|A0A395VAN0_9FIRM Queuine tRNA-ribosyltransferase OS=Roseburia hominis OX=301301; GN = tgt PE=3 SV=1
MYELLKQEGRAKRGVFHTVHGDIQTPVFMNVGTVAAIKGAVSTEDLEQIKCQVELSNTYHLHVRTGDKLIKEVGGLHKFMSWNRPILTDSGGFQVFSLAGLRKIKEEGVYFHSHIDGAKIFMGPEESMQIQSNLGSTIAMAFDECPPALAERKYVEDSVARTTRWLERCKNEMQRLNGLEDTVNRHQMLFGINQGAIYTDIRIDHAKRISELDLDGYAVGGLAVGETHEEMYHVLDETVPYLPVNKPTYLMGVGTPANILEGVERGIDFFDCVYPSRNGRHGHVYTNQGKINLFNQKYEKDMRPIEEGCGCPTCRRYSRAYIRHLLKAKEMLGMRLCVLHNLYFYNTMMEEIRDALDAGNFASYKEEKLYGMGQINREKEMAK

SEQ ID NO: 60307 - protein, 384 aa, Roseburia intestinalis
  REGION 1..384: note = tr|D4KNK7|D4KNK7_9FIRM Queuine tRNA-ribosyltransferase OS=Roseburia intestinalis M50/1; OX = 657315 GN=tgt PE=3 SV=1
MYELLKQEGRAKRGILHTVHGDIQTPVFMNVGTVAAIKGAVSTEDLEQIKCQVELSNTYHLHVRTGDKLIREVGGLHKFMSWNRPILTDSGGFQVFSLAGLRKIKEEGVYFHSHIDGAKIFMGPEESMQIQSNLGSTIAMAFDECAPALADRSYVEASVARTTRWLERCKTKMQQLNAEEGTVNRHQMLFGINQGAIYSDIRIDHAKRISELDLDGYAVGGLAVGETHEEMYHILDETVPYLPLHKPTYLMGVGTPANILEGVERGVDFFDCVYPTRNGRHGHVYTNQGKINLFNQKYEKDMRPIEEGCGCPTCRRYSRAYVRHLLKAKEMLGMRLCVLHNLYFYNTMMEEIRDAIDEGRFHSYKEEKLYGMGQINREKEKQNG

SEQ ID NO: 60308 - protein, 384 aa, Roseburia intestinalis
  REGION 1..384: note = tr|A0A3R6AT71|A0A3R6AT71_9FIRM Queuine tRNA-ribosyltransferase OS=Roseburia intestinalis; OX = 166486 GN=tgt PE=3 SV=1
MYELLKQEGRAKRGILHTVHGDIQTPVFMNVGTVAAIKGAVSTEDLEQIKCQVELSNTYHLHVRTGDKLIREVGGLHKFMSWNRPILTDSGGFQVFSLAGLRKIKEEGVYFHSHIDGAKIFMGPEESMQIQSNLGSTIAMAFDECAPALADRSYVEASVARTTRWLERCKTKMQQLNSEEGTVNCHQMLFGINQGAIYSDIRIDHAKRISELDLDGYAVGGLAVGETHEEMYHILDETVPYLPLHKPTYLMGVGTPANILEGVERGVDFFDCVYPTRNGRHGHVYTNQGKINLFNQKYEKDMRPIEEGCGCPTCRRYSRAYVRHLLKAKEMLGMRLCVLHNLYFYNTMMEEIRDAIDEGRFHSYKEEKLYGMGQINREKEKQNG

SEQ ID NO: 60309 - protein, 401 aa, Roseburia inulinivorans
  REGION 1..401: note = tr|A0A3R6DQH5|A0A3R6DQH5_9FIRM Queuine tRNA-ribosyltransferase OS=Roseburia inulinivorans; OX = 360807 GN=tgt PE=3 SV=1
MPKYNGNRKGVQKLYELLKEEGRAKRGVFHTVHGDIQTPVFMNVGTVAAIKGAVSTEDLEQIKCQVELSNTYHLHVRTGDKLIKEMGGLHKFMSWNRPILTDSGGFQVFSLAGLRKIKEEGVYFHSHIDGAKIFMGPEESMQIQSNLGSTIAMGFDECAPALAERPYVEASVARTTRWLERCKKEMNRLNSLEDTVNKNQMLFGINQGAIYADIRIDHAKRISELDLDGYAVGGLAVGETHEEMYYILDETVPYLPRKKPTYLMGVGTPANILEGVDRGIDFFDCVYPSRNGRHGHVYTNQGKINLFNQKYEKDMRPIEEGCQCPACRRYSRAYIRHLLKAKEMLGMRLCVLHNLYFYNTMMEEIRDALDAGNFRSYKEEKLYNMGQIDREKEMSGQKKFY

SEQ ID NO: 60310 - protein, 388 aa, Roseburia inulinivorans
  REGION 1..388: note = tr|A0A0M6WX43|A0A0M6WX43_9FIRM Queuine tRNA-ribosyltransferase OS=Roseburia inulinivorans; OX = 360807 GN=tgt PE=3 SV=1
MYELLKEEGRAKRGVFHTVHGDIQTPVFMNVGTVAAIKGAVSTEDLEQIKCQVELSNTYHLHVRTGDKLIKEMGGLHKFMSWNRPILTDSGGFQVFSLAGLRKIKEEGVYFHSHIDGAKIFMGPEESMQIQSNLGSTIAMGFDECAPALAERPYVEASVARTTRWLERCKKEMNRLNSLEDTVNKNQMLFGINQGAIYADIRIDHAKRISELDLDGYAVGGLAVGETHEEMYYILDETVPYLPRKKPTYLMGVGTPANILEGVDRGIDFFDCVYPSRNGRHGHVYTNQGKINLFNQKYEKDMRPIEEGCQCPACRRYSRAYIRHLLKAKEMLGMRLCVLHNLYFYNTMMEEIRDALDAGNFRSYKEEKLYNMGQIDREKEMSGQKKFY

SEQ ID NO: 60311 - protein, 372 aa, Roseburia sp.
  REGION 1..372: note = tr|A0A1Q6TRM2|A0A1Q6TRM2_9FIRM Queuine tRNA-ribosyltransferase OS=Roseburia sp. CAG:197_41_10; OX = 1897018 GN=tgt PE=3 SV=1
MASYELLKQEGRAKRGIFHTVHGDIQTPVFMNVGTIGAIKGAVSTEDLKEIHCQVELSNTYHLHVRPGDKLIKEIGGLHKFMVWDRPILTDSGGFQVFSLAGLRKIKEEGVYFHSHVDGAKIFMGPEESMQIQSNLGSTIAMAFDECPSSVADRRYVEDSVNRTARWLERCKKEMQRLNALPDTINKEQLLFGINQGAIYEDIRIDHAKRIAEMDLDGYAVGGLAVGETHEEMYHILDETVPHLPVNKPTYLMGVGTPANILEGVARGVDFFDCVYPSRNGRHGHVYTNQGKLNLFNQKFEEGCQCPACRTYSRAYIRHLLKAKEMLGMRLCVLHNLYFYNTMMEEIRDALDEGRFHSYKEEKLYGMQQGEH

SEQ ID NO: 60312 - protein, 376 aa, Roseburia sp.
  REGION 1..376: note = tr|R5TGM9|R5TGM9_9FIRM Queuine tRNA-ribosyltransferase OS=Roseburia sp. CAG:50 OX=1262949; GN = tgt PE=3 SV=1
MYKLLKKDGRAKRAEVTTVHGTIQTPVFMNVGTAAAIKGAVSTDDLQQIKTQVELSNTYHLHVRPGDKLIKELGGLHKFMVWDKPILTDSGGFQVFSLAGLRKIKEEGVQFHSHVDGRKIFMGPEESMQIQSNLGSTIAMAFDECPPALADRNYVQPSVDRTTRWLERCKKEMQRLNSLEDTINKNQMLFGINQGAIFDDIRIDHAKRISEMDLDGYAVGGLAVGESHEEMYHILDVTVPHLPEDKPTYLMGVGTPANILEAVDRGVDFFDCVYPSRNGRHGHVYTNFGKLNLFNQKFERDMRPIEVGCQCPACRTYSRAYIRHLLKAKEMLGMRLCVLHNLYFYNTMMEEIRDAIDMGNYQNYKAEKLYRMEHGE

SEQ ID NO: 60313 - protein, 377 aa, unidentified
  source 1..377: note = Roseiarcus fermentans
  REGION 1..377: note = tr|A0A366F7L3|A0A366F7L3_9RHIZ Queuine tRNA-ribosyltransferase OS=Roseiarcus fermentans; OX = 1473586 GN=tgt PE=3 SV=1
MTDAIALTIHARDGAARTGALLTPRGDIRTPAFMPVGTAATVKAMRPEDVRATGADIVLSNTYHLMLAPGAERIARLGGLHRFMNWPRPILTDSGGFQVMSLAKLRKINGNGVIFQSHIDGSRHELTPERSMEIQRLLGADIQMQMDECVKLPCPPEEAERAMRLSLRWAERSKAAFGDDQPGRALFGIVQGGVERTLRIESARALVGMDFHGYAIGGLAVGEPQADMLATIEAVIPHLPDTKPRYLMGVGTPDDLLQSLRRGVDMFDCVMPTRAGRHGMVFTRAGRLNLRNARFADDSRPVDPLSTSAMARDYSRAYFRHLVKAGEILAMMALTEINLAYYQDLMAGARSAIGEGRLDAYIEETRRGWAEGEAEET

SEQ ID NO: 60314 - protein, 374 aa, unidentified
  source 1..374: note = Roseibaca calidilacus
  REGION 1..374: note = tr|A0A0N8K780|A0A0N8K780_9RHOB Queuine tRNA-ribosyltransferase OS=Roseibaca calidilacus; OX = 1666912 GN=tgt PE=3 SV=1
MKFAFQIEARDGRARQGRIDTPRGEIRTPAFMPVGTAATVKGMMPEQVRQTGADILLGNTYHLMLRPSAERIAALGGLHRFMNWDRPILTDSGGFQVMSLANLRKLTEEGVQFSSHVDGSRHMLTPERSMEIQRLLGSDIVMAFDECTPFPADELVARQSMELSMRWAKRSREAFGDRPGYALFGIQQGSVYPDLRAESAEALRGIGFDGYAIGGLAVGEGQELMFDVLDYAPGQLHDDKPRYLMGVGKPDDIVGAVQRGVDMFDCVLPTRSGRTGQAWTARGSVNLRNARHRDDGRPLEEGCDCPACTKYSRAYLHHVVRLDEMIAGMLLTWHNLRYYQRLMAGLRAAIAETRLEAFVADFHALRAQGDIDPI

SEQ ID NO: 60315 - protein, 374 aa, Roseibaca ekhonensis
  REGION 1..374: note = tr|A0A3B0M6G1|A0A3B0M6G1_9RHOB Queuine tRNA-ribosyltransferase OS=Roseibaca ekhonensis OX=254356; GN = tgt PE=3 SV=1
MRFAFQIEARDGRARQGRIDTPRGEIRTPAFMPVGTAATVKGMLPEQVRETGADILLGNTYHLMLRPSAERIADLGGLHKFMNWDRPILTDSGGFQVMSLANLRKLTEEGVRFASHVDGSRHMLTPERSMEIQRLLGSDIVMAFDECTPFPADEALARASMELSMRWAQRSREAFGDRPGYALFGIQQGSVYKDLRAESAEALTAIGFDGYAIGGLAVGEGQELMFDVLDYAPGQLPDDKPRYLMGVGKPDDIVGAVQRGVDMFDCVLPTRSGRTGQAWTARGSVNLRNARHRDDPRPLEEGCDCPACTKYSRAYLHHVVRLDEMIAGMLLTWHNLRYYQRLMAGLRGAIATARLDAFVAEFHALRAQGDIDPI

SEQ ID NO: 60316 - protein, 391 aa, Roseibacillus sp.
  REGION 1..391: note = tr|A0A2E3IJR2|A0A2E3IJR2_9BACT Queuine tRNA-ribosyltransferase OS=Roseibacillus sp. OX=2024856; GN = tgt PE=3 SV=1
MFELLATDSSSKARYGRLTTAHGTVETPIFMPVGTQGSVKTLHPDELRLLGSEIILGNTYHLWLRPGQETIRELGGLHRFTSWDRPILTDSGGFQVWSLAKTRKITEEGVHFQNHLDGSPALLTPEKSMEIQATLGSDIAMVFDECPPYPCERSYAEESTALTTRWAERCRIWHADYSSDFFPDAPTNTNEGENSRPSTRRQLCFGIVQGSSYEDLRAASARDLAMLDFDGYAVGGVSVGEPEEEMFRAVEHSEPFLPPEKPRYAMGLGTPPQMLEMIARGVDMFDCVHPTRSARHGLAFTNDGPIHIKNARFERDKSPLTEDCHPHLADFSRAYLRHLFKAGEMLALRLLSFHNLDFYLRLVRNARKAISEDQFEEFRSSFCERYNHKRT

SEQ ID NO: 60317 - protein, 391 aa, Roseibacillus sp.
  REGION 1..391: note = tr|A0A2E7AKD4|A0A2E7AKD4_9BACT Queuine tRNA-ribosyltransferase OS=Roseibacillus sp. OX=2024856; GN = tgt PE=3 SV=1
  VARIANT 320: note = Xaa can be any naturally occurring amino acid
  VARIANT 326: note = Xaa can be any naturally occurring amino acid
MFELLATDSFSKARCGRLTTAHGPIETPIFMPVGTQGSVKTLHPDELKLLGSEIILGNTYHLWLRPGHNVIRDLGGLHHFTNWDRPILTDSGGFQVWSLAKTRKITEEGVHFQNHLDGSPALLTPEKSMEIQASLGSDIAMVFDECPPYPCERSYAEQSTALTSRWAERCRTWHSEKSSLYYPETISPGLGEDSSTASAKRQLCFGIVQGSSYADLRATSARDLSQLDFDGYAVGGVSVGEPEEEMLRAVEHSEPFLPPHKPRYAMGLGTPPQMLEMIARGVDMFDCVHPTRSARHGLAFTNDGPIHIKNAQFERDPSPXTEDCHXHLAGFSRAYLRHLFKAGEMLALRLLSFHNLDFYLTLMRKAREAIKEGHFEEFHSSFSERYNQQRK

SEQ ID NO: 60318 - protein, 368 aa, Roseibacterium elongatum
  REGION 1..368: note = tr|W8RUS3|W8RUS3_9RHOB Queuine tRNA-ribosyltransferase OS=Roseibacterium elongatum DSM 19469 OX=1294273 GN=tgt PE=3 SV=1
MTATDGRARSGVIDTPRGQIRTPAFMPVGTAATVKAMMPESVAATGADILLGNTYHLMLRPTAERIAALGGLHKFMNWSGPILTDSGGFQVMSLAELRKLTEEGVTFRSHIDGSRHMLSPERSMEIQTLLGSDIVMCFDECPALPADRDRIAESMRLSMRWAERSKEAFGDRPGHALFGIQQGGLDEDLRGESAEALQAIGFDGYAVGGLAVGEGQAAMFGCLDYAPQMLPADKPRYLMGVGKPDDIVGAVARGIDMMDCVLPSRSGRTGQAWTRRGQVNIKNARHADDPRPLDEHCTCPACRNYSRAYLHHVFRSGEIISSMLLTWHNLHYYQELMAGMRAAIAQGRFAAFEATFHAQRAEGDIAPL

SEQ ID NO: 60319 - protein, 384 aa, Roseibium hamelinense
  REGION 1..384: note = tr|A0A562THC9|A0A562THC9_9RHOB Queuine tRNA-ribosyltransferase OS=Roseibium hamelinense OX=150831; GN = tgt PE=3 SV=1
MTNQTQKPFSFKLLKTDGLARRGEITTPHGTVRTPTFMPVGTQATVKAMYPGQVRETGADVVLGNTYHLMLRPTAERVDRLGGLHTFMNWPHTILTDSGGFQVMSLAQLRKLDEDGVRFQSHIDGQKYHLTPERSVEIQGLLGSDIQMQLDECIKLPSPEEEVQRAMELSLRWAERSRVQFEKMGGPAKGQGLYGIVQGGDVPHLRVRSAEELAKMPFEGYSVGGLAVGEPQDVMLKMLEVTTPVMPADKPRYLMGVGTPDDLLESVARGIDQFDCVMPTRAGRHGLAYTRFGKVNLKNARHMDDPRPLDAESACPAASSYSRAYLHHLVRANEALAAMLLTWNNLAYYQFLMQGMRDAIDEGRFEYFRLKTKADWAKGDIAAL

SEQ ID NO: 60320 - protein, 383 aa, Roseibium sp.
  REGION 1..383: note = tr|E2CRA1|E2CRA1_9RHOB Queuine tRNA-ribosyltransferase OS=Roseibium sp. TrichSKD4; OX = 744980 GN=tgt PE=3 SV=1
MSSETPKFSFKLTKTDGMARRGEITTPHGVVQTPAFMPVGTQGTVKAMYPEQVRELGSDVVLGNTYHLMLRPGAERVARLGGLHSFMNWPHTILTDSGGFQVMSLAQLRKLDEDGVRFQSHIDGQKYHLTPERSIEIQGLLGSDIQMQLDECIKLPSPPKEVQRAMGLSLRWAERSRVQFENMGGPAKGQGLYGIVQGGDVPDLRIKSAESLRDMPFEGYSVGGLAVGEPQDVMLRMLEVTTPVMPTGKPRYLMGVGTPDDLLESVARGIDQFDCVMPTRAGRHGLAYTRFGKVNLKNARHAEDLRPLDEESDCPATSQYSRAYLHHLVRAGEGLAGMLLTWNNLAYYQTLMRGMREAIEAGTFEEFRLKTKADWAKGDIDPL

SEQ ID NO: 60321 - protein, 377 aa, Roseicitreum antarcticum
  REGION 1..377: note = tr|A0A1H2WH76|A0A1H2WH76_9RHOB Queuine tRNA-ribosyltransferase OS=Roseicitreum antarcticum; OX = 564137 GN=tgt PE=3 SV=1
MTSATFGFAVQATCGKARAGTITTPRGDIRTPAFMPVGTAATVKAMLPGSVRATGADILLGNTYHLMLRPTAERIAALGGLHKFMNWDRPILTDSGGFQVMSLASLRKMTEKGVTFRSHIDGSRHEITPERSMEIQRLLGSDIVMAFDECTPYPADEGTARASMELSMRWAQRSRDAFGDRPGHALFGIQQGSVYADQRAESASKLRTIGFDGYAVGGLAVGEGQEKMFEVLDYAPDMLPEDKPRYLMGVGKPSDIVGAVARGIDMMDCVLPSRSGRTGQGWTARGQVNLRNARHRDDPRPLEEGCTCPACTGYSRAYLHHVIKSDEIIGSMLLTWHNLHYYQSLMQGLRDAISAGALADFTAAFHANVALGDVDLR

SEQ ID NO: 60322 - protein, 376 aa, Roseicyclus mahoneyensis
  REGION 1..376: note = tr|A0A316GQ45|A0A316GQ45_9RHOB Queuine tRNA-ribosyltransferase OS=Roseicyclus mahoneyensis; OX = 164332 GN=tgt PE=3 SV=1
MGDLFEFHVTATDGAARTGAISTPRGQIRTPAFMPVGTAATVKAMLPESVAATGADILLGNTYHLMLRPTAERIARLGGLHAFMNWTGPILTDSGGFQVMSLADLRKLTEEGVTFRSHVDGSKHVLSPERSMEIQKLLGSDIVMCFDECPALPATRDRIAESMRLSMRWADRSKTAFGDRPGHALFGIQQGGLERDFREESADALKAIGFDGYAVGGLAVGEGQEAMFACLDYAPAMLPQDKPRYLMGVGKPDDIVGAVKRGIDMMDCVLPSRSGRTGQAWTRMGQINIKNARHADDPRPLDADCSCPACRSYSRAYLHHVFRAGEMISGMLLTWHNLHYYQELMAGMRAAIAEGRFAGFEADFHARRADGDIEPL

SEQ ID NO: 60323 - protein, 385 aa, Roseiflexus castenholzii
  REGION 1..385: note = tr|A7NP22|A7NP22_ROSCS tRNA-guanine transglycosylase, various specificities OS=Roseiflexus castenholzii (strain DSM 13941 / HLO8) OX=383372; GN = Rcas_3266 PE=4 SV=1
MRIVSPARGILPSMPAHLNALATRHGVLPLPAFLPDATFGTVRAADADDVRTAGVRALVMNTFHLMQKPGSSTVQALGGLHAMTGWNGPIMTDSGGFQAYSLIRRNAKQGRITDQGIVFQPEGAGRKFQLTPEKCIQLQLAYGADIVVCLDDCTHVDDSLAEQHASVRRTIRWALRCKQEFARQLAMRRLDDERPLLFAVVQGGGIPELRRECAEALLEIGFDGYGYGGWPLDTQGTLLTEMLALTRELIPLHLPLHALGVGHPEYVATCARMGYRLFDSALPTRDARHGRLYAFTADPRDPGFRLADRWFHYVYVEDDRYIKADTPISPGCDCYTCTRYSLGYLHHLQAIGETLFYRLATIHNLRFMSTLMGLIAAETTVASAS

SEQ ID NO: 60324 - protein, 405 aa, Roseiflexus castenholzii
  REGION 1..405: note = tr|A7NJT0|A7NJT0_ROSCS Queuine tRNA-ribosyltransferase OS=Roseiflexus castenholzii (strain DSM 13941 / HLO8) OX=383372 GN=tgt PE=3 SV=1
MTLIFEIEARDTHSRARIGRITTAHGVIETPVFMPVGTRGSIKSLTPDEVRDHGAQIILGNTYHLYLQPGHELIARMGGLHRFMGWEGPILTDSGGFQVFSLVYGGIADEIKGRRPTQQVQPGMVRVTDDAVIFKSYIDGSTHVFTPERSIEIQKGIGADIILCFDELPPFHAGYDYTARSLERTHEWERRCLIFHQETRAGGLPFAPPNPDQALFGIVHGGVFPDLRRASAEYLRELSFDGLCIGGSLGGDKEQMRAVVDMTVPHLPDHLPRHLLGIGDVDDLIECVARGIDMFDCVSPTRLGRHGTALVRDMSTLPAQRRWKLNVTNASLRDDQEPLDSWCDCYTCQRYSRAYIHHLFRAQELLGIRLVSLHNVAFLLKLMREIRQSIREGRFAQLRAEWLGD

SEQ ID NO: 60325 - protein, 400 aa, Roseiflexus sp.
  REGION 1..400: note = sp|A5USV3|TGT_ROSS1 Queuine tRNA-ribosyltransferase; OS = Roseiflexus sp. (strain RS-1) OX=357808 GN=tgt PE=3 SV=1
MTLAFDIEARDPHSRARAGRITTAHGVIETPVFMPVGTRGSIKSLTPDEVRNHGAQIILGNTYHLYLQPGHELIARMGGLHHFMGWDGPILTDSGGFQVFSLVYGGIADEIKGRRPTQQVQPGMVKVTDDAVIFKSYIDGSMHVFTPERSIEIQKGIGADIILCFDELPPFHAGYDYTARSLERTHAWERRCLMFHRATQEGGLPFVPPNPYQALFGIVHGGVFPDLRRASAEYLRELPFDGLCIGGSLGENKQQMREVVDMTVPHMPDHLPRHLLGIGDVDDLIECVARGIDMFDCVSPTRLGRHGTALVRDAERRWKLNVANAALRDDPTPLDAWCDCYTCRRYSRAYIHHLFRAQELLGIRLVSLHNVAFLLKLMRTIRQSIIEGRFAHLRAEWLGI

SEQ ID NO: 60326 - protein, 373 aa, Roseiflexus sp.
  REGION 1..373: note = tr|A5UUS2|A5UUS2_ROSS1 tRNA-guanine transglycosylase, various specificities OS=Roseiflexus sp. (strain RS-1) OX=357808 GN=RoseRS_1988 PE=4 SV=1
MSAHSDELPTRRGRLPLPAFLPDATFGTVRAADAGDVRAAGVHALVMNTFHLMQKPGSSTIQALGGLHAMAGWDGPIMTDSGGFQAYSLIRQNPKQGRLSDQGIVFQPEGAGRKFQLTPEKCIQLQLAYGADIVVCLDDCTHVDDTPTEQRASVRRTIRWAARCKQEFERQLAMRRMDDERPLLFAVVQGGGIAELRRECAEALLEIGFDGYGYGGWPLDSAGNLLTDMLALTRELIPAHLPLHALGVGHPEYVAACARMGYQMFDSALPTRDARNGRLYAFAADPHTPAFRLVDRWFHSIYIQDDRYIKSTLPIFPGCDCYTCTHYSLGYLHHLHAIGETLFYRLATIHNLRFMSILTDLLRAEWQGKRGER

SEQ ID NO: 60327 - protein, 399 aa, unidentified
  source 1..399: note = Roseimaritima ulvae
  REGION 1..399: note = tr|A0A5B9QTJ5|A0A5B9QTJ5_9PLAN Queuine tRNA-ribosyltransferase OS=Roseimaritima ulvae OX=980254; GN = tgt PE=3 SV=1
MTEPADPPAAASTDAASTAPFQYQCLARDVGTDARRGVFTTPHGDIQTPTFMPVGTQATVKGVTGDLLRQTTATLPDVTAQIILGNTYHLALRPGHELIRQMGGLHRFMNWDGPILTDSGGFQVFSLSALTKIDEHAAVFRSHIDGRKIELTPEHSIEIQESLGSDIAMVLDHVIALPASTEAVIDATERSVRWAQRCLNAASRPDQARFAIVQGGLDETIRAQCARDLAQHAFEGFAIGGLSVGEPPPEMYRVLSATCPHLPEEKPRYLMGVGRPIDMLEGIARGVDLFDCVMPTRNGRNGFAFTDEGPLKLRNAVHRDDPRPLEANCPCPACRHSRAYLRHLFVAGEMLGPILLTLHNLTYYQRIMHQARQAILAGTFSELLQRHRQLAGADKPEAV

SEQ ID NO: 60328 - protein, 377 aa, unidentified
  source 1..377: note = Roseimicrobium gellanilyticum
  REGION 1..377: note = tr|A0A366HK07|A0A366HK07_9BACT Queuine tRNA-ribosyltransferase OS=Roseimicrobium gellanilyticum; OX = 748857 GN=tgt PE=3 SV=1
MFTLLATDSQTLARRGRLVTPHGAIETPVFMPVGTQGSVKTVHPVELEAIGAQIILGNTYHLAVRPGVDIVKEAGGLHAFANWSKPILTDSGGFQVFSLGKLRKIKEEGVHFQNHVDGSPMFLGPETAMEIQAGLGSDIAMLFDECPPHPCEASYASKSLDLTLRWARRCREWVDKNQPMTGGGRQLHFGIVQGSSYAELRARSARELVAMGFDGYAVGGVSVGEPEPEMMAGVENSVPHLPMDKPRYAMGLGTPPQMIEMVARGIDMFDCVLPTRLARHSTAFTDEGSMNLKNNCFARDFRPISEDTHPLCQGFTRAYIRHLIKAGEILGLRLISLHNLHFYLSLLSRARTAIEGGYFSEFRREFTSKYKNHTSEA

SEQ ID NO: 60329 - protein, 374 aa, Roseinatronobacter monicus
  REGION 1..374: note = tr|A0A543KHV6|A0A543KHV6_9RHOB Queuine tRNA-ribosyltransferase OS=Roseinatronobacter monicus; OX = 393481 GN=tgt PE=3 SV=1
MGFKFDISARDGRARTGVIATPRGEIRTPAFMPVGTAATVKAMMPESVRETGADILLGNTYHLMLRPTAERIANLGGLHKFMNWDRPILTDSGGFQVMSLASLRNMTEEGVRFASHIDGARHMLTPERSMEIQRLLGSDIVMSFDECTPWPADEKTARASMELSMRWARRSRDAFGDIPGHALFGIQQGSVYPDQRAESAEKLRAIGFDGYAIGGLAVGEGQELMFQVLDYAPDQLPEDKPRYLMGVGKPDDIVGAVQRGVDMFDCVLPSRSGRTGQGWTARGPVNLRNARHRDDPRPLEAGCTCPACRNYSRAYLHHVIKSDEIIGSMLLTWHNLTYYQRLMQGLRDAISLGKLDQFVARFHADRAQGDIDPL

SEQ ID NO: 60330 - protein, 374 aa, Roseinatronobacter thiooxidans
  REGION 1..374: note = tr|A0A2W7R5D9|A0A2W7R5D9_9RHOB Queuine tRNA-ribosyltransferase OS=Roseinatronobacter thiooxidans; OX = 121821 GN=tgt PE=3 SV=1
MGFSFDISARDGRARTGVISTPRGEIRTPAFMPVGTAATVKAMMPESVRETGADILLGNTYHLMLRPTAERIADLGGLHRFMNWDRPILTDSGGFQVMSLASLRKLTEEGVQFSSHIDGSRHMLTPERSMEIQRLLGSDIVMAFDECPALPADRAAIDASMQLSMRWAQRSRDAFGDRPGHALFGIQQGGLEPDLRARSAEALRAIGFDGYAIGGLAVGEGQEAMFGVLEYAPGQLPEDKPRYLMGVGKPDDIVGAVQRGVDMFDCVLPSRSGRTGQGWTARGPVNLRNARHRDDPRPLEEGCPCPACRNYSRAYLHHVIKSDEIIGAMLLTWHNLAYYQRLMQGLRDAISAGRLELFAARFHEDRAQGDIGLI

SEQ ID NO: 60331 - protein, 375 aa, Roseisalinus antarcticus
  REGION 1..375: note = tr|A0A1Y5T6X4|A0A1Y5T6X4_9RHOB Queuine tRNA-ribosyltransferase OS=Roseisalinus antarcticus; OX = 254357 GN=tgt PE=3 SV=1
MTRITFDLQATDGSARTGVISTARGEIRTPAFMPVGTAATVKAMLPESVAATGADILLGNTYHLMLRPTAERIDRLGGLHRFMNWHKPILTDSGGFQVMSLADLRKLTERGVTFRSHVDGSKHELTPERSMEIQRLLGSDIVMAFDECPALPAPRERIEESMRLSMRWAARSREAFGDRPGHALFGIQQGGLEPDLRAESGKALTEIGFDGYAIGGLAVGEGQEAMFACLDHAPASLPVDRPRYLMGVGKPDDIVGAVKRGVDMMDCVLPSRSGRTGQAWTRRGQVNLKNARHADDPRPLDAACTCPTCRGYSRAYLHHVFRAGEMISGMLLTWHNLHYYQALMAGMREAIAEGRFAAFESAFHAARAEGDIERV

SEQ ID NO: 60332 - protein, 375 aa, unidentified
  source 1..375: note = Roseitalea porphyridii
  REGION 1..375: note = tr|A0A4P6V276|A0A4P6V276_9RHIZ Queuine tRNA-ribosyltransferase OS=Roseitalea porphyridii; OX = 1852022 GN=tgt PE=3 SV=1
MAEFGFALHATDGGARRGTVTTGRGAIATPAFMPVGTAGTVKGLYLDQVKDAGADIILGNTYHLMLRPGAERIDRLGGLHRFIGWDRPILTDSGGFQVMSLSALRQMSEEGVTFKSHVDGAIHEMSPERSIEIQGLLGSDIQMQLDECVALPADADTMKAAMELSLRWAERCRVAFGDQPGKAMFGIVQGGDDESLREQSARALTAMDLKGYSIGGLAVGEPQEVMLAMLDVVCPILPAEKPRYLMGVGTPQDLLRSVARGVDMFDCVMPTRSGRHGLAFTRRGRVNLKNARHAEDHRPLDDQMACPASRDYSRAYLHHLIRSGEMLGMMLLSWHNTFYYQWLMREMRSAIEQGRFAAFAAETEAVWEQGDIEAL

SEQ ID NO: 60333 - protein, 376 aa, Roseivirga echinicomitans
  REGION 1..376: note = tr|A0A150X2H4|A0A150X2H4_9BACT Queuine tRNA-ribosyltransferase OS=Roseivirga echinicomitans; OX = 296218 GN=tgt PE=3 SV=1
MKFNLVGVDKQSKARAGEVITDHGVIETPIFMPVGTAGSVKAVHQRELKDDVQAQIILGNTYHLYLRPGLEVIEAAGGLHKFNGWDKPILTDSGGYQVYSLSGTRKIKEEGVTFKSHIDGSKHVFSPEAVMDIQRTIGADIMMAFDECTPYPCDYEYARKSMEMTHRWLKRCCDRFDATEGKYGYSQTLFPIVQGSTYKDLRVKSAETIASFEREGNAIGGLSVGEPAEMMYEHTEIVCDILPKDKPRYLMGVGTPENILEGIALGVDMFDCVMPTRNARNGMLFTSEGILNMRNEKWKNDHSPIDPNLGGYNSTFYSKAYLRHLITSKEILGAQIASIHNLTFYLWLVKEARKQILAGTFVDWKNQMVKKVTQRL

SEQ ID NO: 60334 - protein, 376 aa, Roseivirga ehrenbergii
  REGION 1..376: note = tr|A0A150X7L0|A0A150X7L0_9BACT Queuine tRNA-ribosyltransferase OS=Roseivirga ehrenbergii; OX = 279360 GN=tgt PE=3 SV=1
MKFNLAGVDKQSKARAGEIITDHGAIETPIFMPVGTAGSVKAVHQRELKDDVQAQIILGNTYHLYLRPGLDVIEAAGGLHKFNGWDKPILTDSGGYQVYSLSGTRKIKEEGVTFKSHIDGSKHIFSPEGVMDIQRTIGADIMMAFDECTPYPCDYEYARKSMEMTHRWLKRCCDRFDATEGKYGYSQTLFPIVQGSTYKDLRVKSAETIASYEREGNAIGGLSVGEPAEMMYEHTEIVCDILPKDKPRYLMGVGTPENILEGIALGVDMFDCVMPTRNARNGMLFTSEGILNMRNEKWKNDHSPIDRNLGGYNSTFYSKAYLRHLITSKEILGAQIASIHNLTFYLWLVKEARKQILAGTFVDWKNRMVKKVTQRL

SEQ ID NO: 60335 - protein, 376 aa, unidentified
  source 1..376: note = Roseivirga seohaensis
  REGION 1..376: note = tr|A0A150XRA7|A0A150XRA7_9BACT Queuine tRNA-ribosyltransferase OS=Roseivirga seohaensis; OX = 1914963 GN=tgt PE=3 SV=1
MKFNLAGVDKQSKARAGEITTDHGVIETPIFMPVGTAGSVKAVHQRELKDDVQAQIILGNTYHLYLRPGLEVIEAAGGLHKFNGWDKPILTDSGGYQVYSLSGTRKIKEEGVTFKSHIDGSKHIFSPEGVMDIQRTIGADIMMAFDECTPYPCDYEYARKSMEMTHRWLKRCCDRFDATEGKYGYSQTLFPIVQGSTYKDLRVKSAETIASYEREGNAIGGLSVGEPAEMMYEHTEIVCDILPKDKPRYLMGVGTPENILEGIALGVDMFDCVMPTRNARNGMLFTSEGILNMRNEKWKNDHSPIDSNLGGYNSTFYSKAYLRHLITSKEILGAQIASIHNLTFYLWLVKEARKQILAGTFVDWKNRMVKKVTQRL

SEQ ID NO: 60336 - protein, 376 aa, unidentified
  source 1..376: note = Roseivirga seohaensis
  REGION 1..376: note = tr|A0A0L8ANJ1|A0A0L8ANJ1_9BACT Queuine tRNA-ribosyltransferase OS=Roseivirga seohaensis subsp. aquiponti OX=1566026 GN=tgt PE=3 SV=1
MKFNLAGVDKQSKARAGEITTDHGVIETPIFMPVGTAGSVKAVHQRELKDDVQAQIILGNTYHLYLRPGLEVIEAAGGLHKFNGWDKPILTDSGGYQVYSLSGTRKIKEEGVTFKSHIDGSKHIFSPEGVMDIQRTIGADIMMAFDECTPYPCDYEYARKSMEMTHRWLKRCCDRFDATEGKYGYSQTLFPIVQGSTYKDLRVKSAETIASYEREGNAIGGLSVGEPAEMMYEHTEIVCDILPKDKPRYLMGVGTPENILEGIALGVDMFDCVMPTRNARNGMLFTSEGILNMRNEKWKNDHSPIDPNLGGYNSTFYSKAYLRHLITSKEILGAQIASIHNLTFYLWLVKEARKQILAGTFVDWKNRMVKKVTQRL

SEQ ID NO: 60337 - protein, 376 aa, Roseivirga sp.
  REGION 1..376: note = tr|A0A316JUG1|A0A316JUG1_9BACT Queuine tRNA-ribosyltransferase OS=Roseivirga sp. XM-24bin3; OX = 2133949 GN=tgt PE=3 SV=1
MDFKLVAEDKGSKARAGVVTTAHGEIQTPIFMPVGTAGTVKAVHQRELHDDVKAQIILGNTYHLYLRPGLDIIEAAGGLHKFNGWEKPILTDSGGYQVYSLSGTRKIKEEGVTFKSHIDGSKHVFTPENVMDIQRTIGADIIMAFDECTPYPCEYGYARESMEMTHRWLKRCCDRFDETEGKYGYDQTLFPIVQGSTFKDLRIKSAETIASFGREGNAIGGLSVGEPHEMMYEQTEVVCDILPHDKPRYLMGVGTPENILECIALGVDMFDCVMPTRNARNGMLFTSEGIINIRNEKWKDDFSPIDPNLGGYVDTFYSKAYLRHLVISKEILAAQIASIHNLSFYLWLVKEAREQIQKGTFVDWKNKMVKKVTTRL

SEQ ID NO: 60338 - protein, 376 aa, Roseivirga spongicola
  REGION 1..376: note = tr|A0A150X404|A0A150X404_9BACT Queuine tRNA-ribosyltransferase OS=Roseivirga spongicola OX=333140; GN = tgt PE=3 SV=1
MDFKLVAEDKGSKARAGVVTTAHGEILTPIFMPVGTAGTVKAVHQRELHDDVKAQIILGNTYHLYLRPGLDIIEAAGGLHKFNGWEKPILTDSGGYQVYSLSGTRKIKEEGVTFKSHIDGSKHVFTPENVMDIQRTIGADIIMAFDECTPYPCEYGYARESMEMTHRWLKRCCDRFDETEGKYGYDQTLFPIVQGSTFKDLRIKSAETIASFGREGNAIGGLSVGEPHEMMYEQTEVVCDILPHDKPRYLMGVGTPENILECIALGVDMFDCVMPTRNARNGMLFTSEGIINIRNEKWKDDFSPIDPNLGGYVDTFYSKAYLRHLVISKEILAAQIASIHNLSFYLWLVKEAREQIQKGTFVDWKNKMVKKVTTRL

SEQ ID NO: 60339 - protein, 374 aa, Roseivivax halodurans
  REGION 1..374: note = tr|X7EKA6|X7EKA6_9RHOB Queuine tRNA-ribosyltransferase OS=Roseivivax halodurans JCM 10272; OX = 1449350 GN=tgt PE=3 SV=1
MTFRFTLSGTDGAARTGAIDTPRGSIRTPAFMPVGTAATVKGMFPESVAETGADILLGNTYHLMLRPGAERIAHLGGLHEFMNWQKPILTDSGGFQVMSLSGLRKLTEEGVTFKSHIDGSKHFLSPERSMEIQQLLGSDIVMAFDECPALPADRDRIAESMRLSMRWAQRSREAFGDRLGHALFGIQQGGLERDFREESANALREIGFEGYAVGGLAVGEGQEAMFGCLDFATDMLPQDKPRYLMGVGKPDDIVGAVKRGIDMMDCVLPSRSGRTGQGWTRRGMVNVKNARHADDPRPLDEACTCPCCRSYSRAYLHHVQRSHEMISGMLLTWHNLHYYQELMQAMREAIAAGAFAAFEADFHAQRAEGDIEPL

SEQ ID NO: 60340 - protein, 375 aa, Roseivivax halotolerans
  REGION 1..375: note = tr|A0A1I5ZKR9|A0A1I5ZKR9_9RHOB Queuine tRNA-ribosyltransferase OS=Roseivivax halotolerans; OX = 93684 GN=tgt PE=3 SV=1
MTQFSFSLAARSGKARTGTISTPRGQIRTPAFMPVGTAATVKGMMPESVAETGADILLGNTYHLMLRPGAERIDRLGGLHHFMNWEKPILTDSGGFQVMSLAGLRKLTEDGVTFKSHIDGSRHELTPERSMEIQRLLGSDIVMAFDECPALPAPKERIAASMQLSMRWAARSREAFGDRPGHALFGIQQGGLEPDLREESAKALTDIGFEGYAIGGLAVGEGQEAMFGCLDTAPDMLPEDKPRYLMGVGKPDDIVGAVKRGVDMMDCVLPSRSGRTGQAWTRRGQVNLKNARHQDDPRPLEEGCSCPACRNYSRAYLHHVFRSNEMISGMLLTWHNLHYYQLLMSEMRAAIADDTFAAFEEKFHATRALGDIERI

SEQ ID NO: 60341 - protein, 375 aa, Roseivivax isoporae
  REGION 1..375: note = tr|X7F384|X7F384_9RHOB Queuine tRNA-ribosyltransferase OS=Roseivivax isoporae LMG 25204; OX = 1449351 GN=tgt PE=3 SV=1
MSGFSFTLDATCGKARTGRISTPRGEIRTPAFMPVGTAGTVKAMLPDSVAATGADILLGNTYHLMLRPGAERVARLGGLHAFMNWDRPILTDSGGFQVMSLSDLRKLTEDGVTFKSHIDGSRHMFSPEKSMEIQKLLGSDIVMAFDECPALPAPRDRIEASMRLSMRWAQRSRDAFGDRPGHALFGIQQGGLEPDLRAESAKALKAIGFDGYAVGGLAVGEGQEAMFACLDTACDMLPEDRPRYLMGVGKPDDIVGAVARGIDMMDCVLPSRSGRTGQAWTRRGQVNLRNARHADDPRPLDEACTCPACRSYSRAYLHHVVRSGEMIAGMLLTWHNLHYYQELMAGIRAAVAAGTFAGFEAGFHAARAEGDIPPR

SEQ ID NO: 60342 - protein, 375 aa, unidentified
  source 1..375: note = Roseivivax jejudonensis
  REGION 1..375: note = tr|A0A1X6Z497|A0A1X6Z497_9RHOB Queuine tRNA-ribosyltransferase OS=Roseivivax jejudonensis; OX = 1529041 GN=tgt PE=3 SV=1
MSRFSFILQATDGAARTGRIDTPRGAIRTPAFMPVGTAATVKAMLPESVASTGADILLGNTYHLMLRPGAERVHALGGLHRFMNWDKPILTDSGGFQVMSLADLRKLDESGVTFRSHIDGSKHALSPERSMEIQRLLGSDIVMAFDECPALPADRDRLASSMHLSMRWARRSREAFGDRPGHALFGIQQGGLEHDLREESAAALREIGFEGYAIGGLAVGEGQEAMFGCLDHAPAMLPEDKPRYLMGVGKPDDIVGAVARGVDMMDCVLPSRSGRTGQAWTRRGQVNLRNARHADDPRPLDEACGCPACRGYSRAYLHHVTRSQEMIAGMLLTWHNLHYYQELMQGMRDAIAEGRFSEFEAAFHAARAEGDIERL

SEQ ID NO: 60343 - protein, 375 aa, Roseivivax lentus
  REGION 1..375: note = tr|A0A1N7LBV1|A0A1N7LBV1_9RHOB Queuine tRNA-ribosyltransferase OS=Roseivivax lentus OX=633194; GN = tgt PE=3 SV=1
MTPFSFTLEARSGGARLGRIDTARGAIRTPAFMPVGTAATVKAMLPESVAATGADILLGNTYHLMLRPTAERIDRLGGLHRFMNWSKPILTDSGGFQVMSLAGLRKLTEKGVTFKSHIDGSKHELTPERSMEIQRLLGSDIVMAFDECPALPASRDRIAESMQLSMRWAARSRDAFGDRPGHALFGIMQGGLEKDLREESARALTEIGFEGYAIGGLAVGEGQEAMFDCLDYAPGFLPEDRPRYLMGVGKPDDIVGAVKRGVDMMDCVLPSRSGRTGQAWTRRGQVNIKNARHMDDSRPLDEACSCPACRHYSRAYLHHVYRAGEMISGMLLTWHNLHYYQELMQAMRDAIAADAFDAFESAFHAQRAEGDIPPL

SEQ ID NO: 60344 - protein, 375 aa, unidentified
  source 1..375: note = Roseivivax marinus
  REGION 1..375: note = tr|W4HIF5|W4HIF5_9RHOB Queuine tRNA-ribosyltransferase OS=Roseivivax marinus OX=1379903; GN = tgt PE=3 SV=1
MTRFFFRLDATDGRARTGAIDTPRGTIRTPAFMPVGTAATVKGMMPESVAETGADILLGNTYHLMLRPGAERIERLGGLHRFMNWDGPILTDSGGFQVMSLSDLRKLTEDGVTFKSHIDGSKHFLSPERSMEIQRQLGSDIVMAFDECPALPAPRERVAASMRMSMRWAARSREAFGDRPGHALFGIQQGGLEADLREESAAALKEIGFDGYAVGGLAVGEGQEAMFACLDHAPETLPREAPRYLMGVGKPDDIVGAVKRGIDMMDCVLPSRSGRTGQAWTRRGQVNLKNARHMDDPRPLDEACTCPCCRNYSRAYLHHVHRAGEMIAGMLLTWHNLHYYQELMSGLRAAIAGGRFAAFEAAFHAERAEGDIERL

SEQ ID NO: 60345 - protein, 375 aa, unidentified
  source 1..375: note = Roseivivax pacificus
  REGION 1..375: note = tr|A0A2T6ARP9|A0A2T6ARP9_9RHOB Queuine tRNA-ribosyltransferase OS=Roseivivax pacificus OX=1267769; GN = tgt PE=3 SV=1
MTETGFELKAQDGKARTGLLRTPRGDIRTPAFMPVGTAATVKGMLPESVRETGADILLGNTYHLMLRPGAERIARLGGLHQFMNWQRPILTDSGGFQVMSLADLRKLTEEGVTFRSHVDGSKHHLTPEHSMEIQRLLGSDIVMAFDECPALPADRARIEESMRLSMRWALRSREAFGDRPGHMLFGIQQGGLERDLREESARALRDIGFEGYAVGGLAVGEGQEAMFSCLDYAPDMLPEDKPRYLMGVGKPDDIVGAVKRGIDLMDCVLPSRSGRTGQAWTRRGQVNIKNARHADDPRPLDEDCGCPACRSYSRAYLHHVFRSGEMISGMLLTWHNLHYYQELMAGLRTAIFEGTFESFEAAFHEARAERDIPRL

SEQ ID NO: 60346 - protein, 376 aa, unidentified
  source 1..376: note = Roseivivax roseus
  REGION 1..376: note = tr|A0A1H9TLH0|A0A1H9TLH0_9RHOB Queuine tRNA-ribosyltransferase OS=Roseivivax roseus OX=641238; GN = tgt PE=3 SV=1
MTNRFSFSLKATDGRARTGTISTPRGEVRTPAFMPVGTAATVKAMLPESVRDTGADILLGNTYHLMLRPTAERIARLGGLHDFMNWQRPILTDSGGFQVMSLADLRKLDERGVTFKSHIDGSRHELTPERSMEIQRLLGSDIVMCFDECPSLPADESRVADSMRLSMRWAERSRAAFGDRPGHALFGIQQGGVTPELREESAKALTDIGFDGYAVGGLAVGEGQEAMFGVLDYAPEMLPHDKPRYLMGVGKPDDIVGAVARGIDMMDCVLPSRSGRTGQAWTRRGQVNIKNARHQDDPRPLDESCGCPACRSYSRAYLHHVFRAGEMISGMLLTWHNLHYYQDLMQGLRDAIAAGRLEAFTDEFHALRAEGDIERL

SEQ ID NO: 60347 - protein, 375 aa, unidentified
  source 1..375: note = Roseivivax sediminis
  REGION 1..375: note = tr|A0A1I2CDC5|A0A1I2CDC5_9RHOB Queuine tRNA-ribosyltransferase OS=Roseivivax sediminis OX=936889; GN = tgt PE=3 SV=1
MPAFSFTLAARDGAARTGRIDTPRGSIRTPAFMPVGTAATVKAMLPESVAATGADILLGNTYHLMLRPGAERVAALGGLHRFMNWDRPILTDSGGFQVMSLADLRKLDENGVTFRSHIDGSRHALSPERSMEIQRLLGSDIVMAFDECPALPADRDRIEQSMRLSMRWAARSREAFGDRPGHALFGIQQGGLEPDLREESATALREIGFEGYAIGGLAVGEGQEAMFGCLDHAVGWLPEDRPRYLMGVGKPDDIVGAVARGVDMMDCVLPSRSGRTGQAWTRRGQVNLRNARHADDPRPLDETCTCPACRGYSRAYLHHVVRAREMIAGMLLTWHNLHYYQELMQDLRDAVAEGRFAAFESAFHAARAEGDIERL

SEQ ID NO: 60348 - protein, 374 aa, unidentified
  source 1..374: note = Rosenbergiella nectarea
  REGION 1..374: note = tr|A0A1H9DZR2|A0A1H9DZR2_9ENTR Queuine tRNA-ribosyltransferase OS=Rosenbergiella nectarea; OX = 988801 GN=tgt PE=3 SV=1
MKFEYIKRDGRARRGRLVFDRGVVETPAFMPVGTYGTVKGMTPEEVKETGAQILLGNTFHLWLRPGQEIMKLHGDLHDFMQWQGPILTDSGGFQVFSLGDIRKITEKGVHFRNPINGDPIFLDPEKSMEIQHDLGSDIVMIFDECTPYPADWDYAKRSMEMSLRWAQRSRDRFDELGNKNALFGIIQGGVYEDLRDISVKGLVDIGFDGYAVGGLAVGEPKADMHRILEHVCPQLPEEKPRYLMGVGKPEDLVEGVRRGIDMFDCVMPTRNARNGHLFVTDGVVKIRNAKHKSDTSPLDAECDCYTCKHYTRAYLYHLDRCNEILGARLNTIHNLRYYQRLMAGLRQAIEDDRLEEFVADFYTKIGKEVPALPF

SEQ ID NO: 60349 - protein, 394 aa, Roseobacter denitrificans
  REGION 1..394: note = tr|Q164X0|Q164X0_ROSDO Queuine tRNA-ribosyltransferase OS=Roseobacter denitrificans (strain ATCC 33942 / OCh 114) OX=375451 GN=tgt PE=3 SV=1
MGAAINQGLGTKGNLRQTDRMRFSFDLQATDGRARTGVISTPRGDIRTPAFMPVGTAATVKAMLPASVRQTGADILLGNTYHLMLRPTAERIDRLGGLHRFMDWDGPILTDSGGFQVMSLAALRKLTEEGVSFKSHIDGSRHMLTPERSMEIQRLLGSDIVMCFDECPALPADRAAIEKSMQLSMRWAARSKDAFGDRPGHALFGIQQGGLEEDLRAESAAALREIEFDGYAVGGLAVGEGQAAMFGCLDYAPEQLPRDKPRYLMGVGKPDDIVGAVARGIDMMDCVLPSRSGRTGQVFTRRGVVNIKNARHADDPRPLDEQCSCPACRSYSRAYLHHVFRSQEIISSMLLTWHNLHYYQELMAGMRSAIAQGTFDQWTSGFMAERALGDIEPI

SEQ ID NO: 60350 - protein, 374 aa, Roseobacter litoralis
  REGION 1..374: note = tr|F7ZF50|F7ZF50_ROSLO Queuine tRNA-ribosyltransferase OS=Roseobacter litoralis (strain ATCC 49566 / DSM 6996 / JCM 21268 / NBRC 15278 / OCh 149); OX = 391595 GN=tgt PE =3 SV=1
MRFNFDLQATDGRARTGVISTPRGDIRTPAFMPVGTAATVKAMLPGSVRQTGADILLGNTYHLMLRPTAERIERLGGLHKFMDWDRPILTDSGGFQVMSLAALRKLTEEGVSFKSHIDGSRHMLTPERSMEIQRLLGSDIVMCFDECPALPADRAAIEKSMHLSMRWAARSRDAFGDRPGHALFGIQQGGLEEDLRAQSAAALRDIEFDGYAVGGLAVGEGQEAMFGCLDYAPEQLPHEKPRYLMGVGKPDDIVGAVARGIDMMDCVLPSRSGRTGQVFTRRGVVNIKNARHADDPRPLDEHCTCPACRSYSRAYLHHVFRSQEIISSMLLTWHNLHYYQELMSDMRAAISQGTFVEWTAAFATERAQGDIEPV

SEQ ID NO: 60351 - protein, 377 aa, Roseobacter sp.
  REGION 1..377: note = tr|A4EK89|A4EK89_9RHOB Queuine tRNA-ribosyltransferase OS=Roseobacter sp. CCS2 OX=391593; GN = tgt PE=3 SV=1
MTQRFSFALNATDGKARTGVISTPRGDIRTPAFMPVGTAATVKAMMPESVAATGADILLGNTYHLMLRPTAERIDRLGGLHKFMNWDKPILTDSGGFQVMSLADLRKMTETGVTFKSHIDGSKHELTPERSMEIQKLLGSDIVMCFDECPALPADRARIAESMQLSMRWAQRSRDAFGDRPGHALFGIQQGGLEEDLRAQSAEALKAVEFDGYAVGGLAVGEGQEAMFGVLDFAPDQLPVDKPRYLMGVGKPDDIVGAVKRGIDMMDCVLPSRSGRTGQLFTRRGVINIKNARHADDPRPLDEHCTCPACSNYSRAYLHHVFRAQEMISGMLLTWHNLHYFQEIMQGMRDAIAAGAFADWEADFHAMRALGDIAPLS

SEQ ID NO: 60352 - protein, 362 aa, Roseobacter sp.
  REGION 1..362: note = tr|A6FNP1|A6FNP1_9RHOB Queuine tRNA-ribosyltransferase OS=Roseobacter sp. AzwK-3b; OX = 351016 GN=tgt PE=3 SV=1
MARTGVIDTPRGEVRTPAFMPVGTAATVKAMLPGSVRETGADILLGNTYHLMLRPGAERIANLGGLHRFMNWERPILTDSGGFQVMSLAGLRKLTEEGVTFKSHIDGSRHELTPERSMEIQRLLGSDIVMCFDECPALPASDDEVARAMRLSMRWAERSKDAFGDRPGHALFGIMQGGVTQELREESARALVDIGFDGYAVGGLAVGEGQEAMFGVLDYAPGYLPTDKPRYLMGVGKPDDIVGAVKRGIDMMDCVLPSRSGRTGQVFTRHGVLNIKNARHQDDPRPLDDQCGCPACRGYSRAYLHHVFRSQEIISSMLLTWHNLHYYQDIMAGMREAIAEGRFADWEAAFHKGREAGDIEPL

SEQ ID NO: 60353 - protein, 372 aa, Roseococcus sp.
  REGION 1..372: note = tr|A0A4V2NKJ6|A0A4V2NKJ6_9PROT Queuine tRNA-ribosyltransferase OS=Roseococcus sp. SYP-B2431; OX = 2496640 GN=tgt PE=3 SV=1
MTLQWSHQQSDGRARAGTLHTAHGTVPTPVFMPVGTAGTVKAMTADAVRSTGARMVLGNTYHLMLRPGGERIARLGGLHRFMDWKGPILTDSGGFQVMSLSGLRKMDADGVTFQSHVDGSKHRLTPERSVEIQRLLGADVTMCFDECTPFPATHDEAAKSMRLSMRWAARCRSCFEARDGHGLFGIVQGSTYEDLRAESAAALTSVGFEGYAIGGLAVGEGQEAMFSTLDFTVPMLPETQPRYLMGVGKPADLLGAVRRGVDMFDCVIPTRSGRMGRAYTARGQLNLRNARHAEDDRPLDPDCACPACRGHSRAYLHHLLKCDEMLGPILLTWHNIQYYQDLMARMRGAILEGRFEAEAAAIERGLAGEEQT

SEQ ID NO: 60354 - protein, 378 aa, unidentified
  source 1..378: note = Roseofilum reptotaenium
  REGION 1..378: note = tr|A0A1L9QVU8|A0A1L9QVU8_9CYAN Queuine tRNA-ribosyltransferase OS=Roseofilum reptotaenium AO1-A; OX = 1925591 GN=tgt PE=3 SV=1
MHQPFQFSIQAQCSQTQARAATFLTPHGKVETPRFMPVGTLATVKALTPAQLKGTGAQMVLANTYHLHLQPGEDLIARAGGLHRFMGWDGPMLTDSGGFQVFSLASLRTIQEEGVKFRSPRDGRIINLTPEKAIAIQNQLGADVIMAFDECPPYPASKEAVIAATERTYRWLKRCIAAHDRSEQALFGIVQGGVYADLRTAAAEQLVDLNLPGYAIGGVSVGEPGDLINQIVKVTVPLLATEKPRYLMGVGTYQEMVQAIAAGIDLFDCVIPTRLARHGAVFVRGERWNIKNAQFREDFAPLDAECPCYTCQNFSRAYLGHLWRCRELLVYTLLSIHNITELVRFTARIREAILGDRFLSEFGHYLAPPESHQYHEKR

SEQ ID NO: 60355 - protein, 374 aa, Roseomonas aestuarii
  REGION 1..374: note = tr|A0A2U1V918|A0A2U1V918_9PROT Queuine tRNA-ribosyltransferase OS=Roseomonas aestuarii OX=568898; GN = tgt PE=3 SV=1
MTLHWSCQCQDGKARAGTLHTAHGDVATPVFMPVGTAGTVKGMTADAVRATGANIVLGNTYHLMLRPGAERVGRLGGLHKMMDWHGPILTDSGGFQVMSLSQLRKLDKDGVTFQSHINGEKFRLTPERSIEIQHLLDADITMCFDECTPFPATHEVAGKSMRLSMDWAARSRAAFVARPGYGLFGIQQGSVFEDLRAESARALTEIGFEGYAIGGLAVGEGQAEMFRTLDFSVPMLPETHPRYLMGVGTPSDLIGAVMRGVDMFDCVIPTRSGRTGRAYTSHGVVNIRNARHAEDTGSLDPECDCPACTRHSLGYLQHLFKAGEMLGPILLTWHNIRYYQRLMARLRQAILDGRLAEEAAALEAGWRKPEETPV

SEQ ID NO: 60356 - protein, 375 aa, Roseomonas cervicalis
  REGION 1..375: note = tr|D5RRV8|D5RRV8_9PROT Queuine tRNA-ribosyltransferase OS=Roseomonas cervicalis ATCC 49957 OX=525371 GN=tgt PE=3 SV=1
MTLSWSCQCQDGKARAGTLHTAHGDVPTPVFMPVGTAGTVKGMTADAVRSTGAQIVLGNTYHLMLRPGAERVARLGGLHTMMDWHGPILTDSGGFQVMSLSQLRKLDKDGVTFQSHINGQKFRLTPERSIEIQHLLDADITMCFDECTPFPATHEVAAQSMRLSMAWAARSRAAFVERPGYGLFGIQQGSVYEDLRAESAKALREIGFEGYAIGGLAVGEGQEEMFRVLDFCVPMLPETHPRYLMGVGTPSDLIGAVRRGVDMFDCVMPTRSGRTGRAYTSRGVLNIRNARHAEDVSPLDPECDCPACTRHSRGYLHHLFKADEMLGPILLSWHNIRYYQRLMQRLRQAILENRFEQEAAAIEAGWAPQAEETTA

SEQ ID NO: 60357 - protein, 374 aa, unidentified
  source 1..374: note = Roseomonas deserti
  REGION 1..374: note = tr|A0A1V2GWR2|A0A1V2GWR2_9PROT Queuine tRNA-ribosyltransferase OS=Roseomonas deserti OX=1817963; GN = tgt PE=3 SV=1
MTLSWSCQCHDGKARAGTLHTAHGEVQTPVFMPVGTAGTVKGMTADAVRSTGASIVLGNTYHLMLRPGAERVAKLGGLHRMMDWHGPILTDSGGFQVMSLSQLRKLDKDGVTFQSHINGERFRVTPERSIEIQHLLDADITMCFDECTPFPATHEVAAKSMRLSMDWAARSRAAFVERPGYGLFGIQQGSVFEDLRAESARALREIGFEGYALGGLAVGEGQEEMFRVLDFAVPMLPEEKPRYLMGVGTPSDLIGAVSRGVDMFDCVIPTRSGRTGRAYTSRGVINIRNARHAESLAPLDPDCDCPACTKHSIGYLHHLFKAGEMLGPILLTWHNIRYYQALMARLRQAILENRFAAEAEAIQAGWAKTEEVPA

SEQ ID NO: 60358 - protein, 426 aa, Roseomonas gilardii
  REGION 1..426: note = tr|A0A379NB09|A0A379NB09_9PROT Queuine tRNA-ribosyltransferase OS=Roseomonas gilardii subsp. rosea OX=243956 GN=tgt PE=3 SV=1
MTLSFTLSTTDGGARAGMLHTAHGEVPTPVFMPVGTAGTVKAMTADAVRATGARMILGNTYHLMLRPGAERVGRLGGLHRMVDWSGPILTDSGGFQVMSLSKLRKMDADGVTFHSHIDGSKHRLTPERSIGIQNLLDADVTMCLDECTPFPATEEEAARSMRQSMLWAARCREAFVPRPGYGLFGIVQGSVYAGLRAESVRALTGIGFEGYAVGGLAVGEGQEMMFSTLDVTTPLLPRDKPRYLMGVGTPSDIIGAVRRGIDMFDCVIPTRSGRTARAYTSRGVMNLRNAKFAEDTRPLDPECDCPACTRHSRAYLNHLFKAEEMLGPMLLTWHNIRYYQVLMARLREAILASRFEDEAARIEAGWAGGAAETAAAPTGQASRPSAGRASAVPGADPMPDPAGGVPISGVNEEPWGETSPAKSAAP

SEQ ID NO: 60359 - protein, 418 aa, Roseomonas mucosa
  REGION 1..418: note = tr|A0A1S8D6F6|A0A1S8D6F6_9PROT Queuine tRNA-ribosyltransferase OS=Roseomonas mucosa OX=207340; GN = tgt PE=3 SV=1
MTLSFTLQTTDGGARAGTLHTAHGEVPTPVFMPVGTAGTVKAMTADAVRATGARMILGNTYHLMLRPGAERVGRLGGLHRMVDWSGPILTDSGGFQVMSLSKLRKMDADGVTFHSHIDGSKHRLTPERSIEIQNLLDADVTMCLDECTPFPATEEEAARSMRQSMLWAARCREAFVPRPGYGLFGIVQGSVYAGLRAESVRALTGIGFEGYAVGGLAVGEGQEMMFSTLDVTTPLLPRDKPRYLMGVGTPSDIIGAVRRGIDMFDCVIPTRSGRTARAYTSRGVMNLRNAKFAEDTRPLDPECDCPACTRHTRAYLNHLFKAEEMLGPMLLTWHNIRYYQTLMARLRGAILEGRFEDEAARIEAGWVEGAAASAAAATGQPNAPSAGRAPADPMADPVGDPVGGDSPREPGPAASADP

SEQ ID NO: 60360 - protein, 418 aa, Roseomonas mucosa
  REGION 1..418: note = tr|A0A4Y1MXL2|A0A4Y1MXL2_9PROT Queuine tRNA-ribosyltransferase OS=Roseomonas mucosa OX=207340; GN = tgt PE=3 SV=1
MTLSFTLQTTDGGARAGTLHTAHGEVPTPVFMPVGTAGTVKAMTADAVRATGARMILGNTYHLMLRPGAERVGRLGGLHRMVDWSGPILTDSGGFQVMSLSKLRKMDADGVTFHSHIDGSKHRLTPERSIEIQNLLDADVTMCLDECTPFPATEEEAARSMRQSMLWAARCREAFVPRPGYGLFGIVQGSVYADLRAESVRTLTGIGFEGYAVGGLAVGEGQEMMFSTLDVTTPLLPRDKPRYLMGVGTPSDIIGAVRRGIDMFDCVIPTRSGRTARAYTSRGVMNLRNAKFAEDTRPLDPECDCPACTRHTRAYLNHLFKAEEMLGPMLLTWHNIRYYQTLMARLRGAILEGRFEDEAARIEAGWAEGAAASAAAPTGQPNAPSAGRAPADPMADPVGDPVGGDSPREPGPAASADP

SEQ ID NO: 60361 - protein, 380 aa, unidentified
  source 1..380: note = Roseomonas nepalensis
  REGION 1..380: note = tr|A0A502FR38|A0A502FR38_9PROT Queuine tRNA-ribosyltransferase OS=Roseomonas nepalensis; OX = 1854500 GN=tgt PE=3 SV=1
MGFTLQGRDGAARAGTLHTAHGEVPTPVFMPVGTAGTVKAMTADAVRATGARMVLGNTYHLMLRPGAERVGRLGGLHRLMDWQGPILTDSGGFQVMSLAGLRKMDADGVTFQSHIDGSKHRLTPERSIEIQHLLDADVTMCFDECTPFPATEAAAARSMRLSMRWAARSRAAFTPRDGYGLFGIQQGSTFEGLRAESARALTDIGFEGYAIGGLAVGEGQEAMFRTLDFSVPMLPTEKPRYLMGVGTPADIIGAVARGVDMFDCVIPTRSGRTGRAYTSRGVLNMRNARHADDASALDPECDCPACTRHSRAYIQHLVRAEEMLGPMLLTWHNIRYYQTLTARLRAAILEGRFEAEAAAIAAKWETPAPAEPPLKEETTS

SEQ ID NO: 60362 - protein, 374 aa, unidentified
  source 1..374: note = Roseomonas oryzae
  REGION 1..374: note = tr|A0A5B2TE48|A0A5B2TE48_9PROT Queuine tRNA-ribosyltransferase OS=Roseomonas oryzae OX=1608942; GN = tgt PE=3 SV=1
MTLSWTCHCHDGKARAGMLHTAHGDVPTPVFMPVGTAGTVKGMTADAVRATGASIVLGNTYHLMLRPGAERVGRLGGLHRMMDWQGPILTDSGGFQVMSLSKLRKLDKDGVTFQSHINGERFRVTPERSIEIQHLLDSDITMCFDECIEYPAAHPEAARAMRLSMDWAARSRAAFTPREGYGLFGIQQGSTFADLRAESSKALTEIGFEGYAIGGLAVGEGQEEMFRTLDFCADMLPETHPRYLMGVGTPSDIIGAVRRGVDMFDCVIPTRSGRTGRAYTSQGVLNMRNARHADDTAPLDPECDCPACTRHSRGYLQHLFKAGEMLGPILLTWHNIRYYQQLMQRLREAILAGRLDAEAAIIEAGWNRAQETAA

SEQ ID NO: 60363 - protein, 374 aa, unidentified
  source 1..374: note = Roseomonas rhizosphaerae
  REGION 1..374: note = tr|A0A2C7AGP6|A0A2C7AGP6_9PROT Queuine tRNA-ribosyltransferase OS=Roseomonas rhizosphaerae; OX = 1335062 GN=tgt PE=3 SV=1
MTLSWSCQCHDGKARAGMLRTAHGDVPTPVFMPVGTAGTVKGMTADAVRATGARIVLGNTYHLMLRPGAERVGRLGGLHRMMDWHGPILTDSGGFQVMSLSKLRKLDKDGVTFQSHINGERFRVTPERSIEIQHLLDSDITMCFDECIEYPAAHAEAARAMRLSMDWAARSRAAFTPREGYGLFGIQQGSTFEDLRAESSKALTGIGFEGYAIGGLAVGEGQEEMFRTLDFCADMLPETHPRYLMGVGTPSDLLGAVARGVDMFDCVIPTRSGRTGRAYTSRGVLNIRNARHAEDTGPLDPECDCPACTRHSRGYLLHLFKAGEMLGPMLLTWHNIRYYQNLMARIRAAIVAGRFAQEAEIIQAGWTTAQETAA

SEQ ID NO: 60364 - protein, 384 aa, unidentified
  source 1..384: note = Roseomonas rosea
  REGION 1..384: note = tr|A0A1M6LVP9|A0A1M6LVP9_9PROT Queuine tRNA-ribosyltransferase OS=Roseomonas rosea OX=198092; GN = tgt PE=3 SV=1
MNGPLNFTLQAKDGAARAGTLHTAHGEVQTPVFMPVGTAGTVKAMTADAVRSTGARMVLGNTYHLMLRPGAERVGRLGGLHRLMDWHGPILTDSGGFQVMSLAGLRKMDADGVTFQSHIDGSKHRLTPERSIEIQHLLDADVTMCFDECTPFPATHEVAAKSMRLSMKWAARSREAFTPRPGYGLFGIQQGSIFEDLRAESAKALTEIGFEGYAIGGLAVGEGQAEMFRTLDFSVPMLPQDKPRYLMGVGTPSDIIGAVGRGVDMFDCVIPTRSGRTGRAYTSRGVLNMRNARHADDASTLDPECDCPACTRHSRAYIQHLIRAEEMLGPMLLTWHNIRYYQTLTARLRAAILEGRFEAEAAAIMAKWETTPPPEPPSPEETTS

SEQ ID NO: 60365 - protein, 418 aa, Roseomonas sp.; identical to SEQ ID NO: 60359
  REGION 1..418: note = tr|A0A2D2H446|A0A2D2H446_9PROT Queuine tRNA-ribosyltransferase OS=Roseomonas sp. FDAARGOS_362; OX = 2018065 GN=tgt PE=3 SV=1

SEQ ID NO: 60366 - protein, 376 aa, Roseomonas sp.
  REGION 1..376: note = tr|A0A317F9X4|A0A317F9X4_9PROT Queuine tRNA-ribosyltransferase OS=Roseomonas sp. CQN31 OX=2184016; GN = tgt PE=3 SV=1
MTLRWSLTTTDGAARAGTLHTAHGEVPTPVFMPVGTAGTVKAMTADAVRSTGARMVLGNTYHLMLRPGAERVARLGGLHRLMDWRGPILTDSGGFQVMSLTDLRKMDADGVTFRSHVDGSYHRLTPERSVEIQHLLGADVTMCFDECTPFPATHAQAADSMRLSMRWAARCREAFVPRDGHGLFGIVQGSTFDDLRAESVAALSGIGFEGYAIGGLAVGEGQSEMFRVLDATTPLLPEDAPRYLMGVGTPADLIGAVRRGVDMFDCVIPTRSGRTGRAYTSRGVLNLRNARHAEDPSPLDPDCDCPACTRHSRAYLHHLIKAEEMLGPMLLTWHNIRYYQTLMARLRRAIVEGRFEAEAAAIEAVWAEGEAERKAA

SEQ ID NO: 60367 - protein, 395 aa, Roseomonas stagni
  REGION 1..395: note = tr|A0A1I4C8V1|A0A1I4C8V1_9PROT Queuine tRNA-ribosyltransferase OS=Roseomonas stagni DSM 19981; OX = 1123062 GN=tgt PE=3 SV=1
MTLHWTMAARDGAARAGTLMTAHGEVPTPVFMPVGTAGTVKAMTADAVRSTGARMVLGNTYHLMLRPGAERVARLGGLHRLMDWHGPILTDSGGYQVMSLAGLRKLDADGVTFQSHIDGSKHRITPERSVEIQHLLGADVTMCFDECTPYPATHEQAAESMRLSMRWAARSRAAFKPRPGHGLFGIVQGSTFEDLRSESIQALTAIGFEGYAIGGLAVGEGQAEMLRVLDFTTPQLPQDAPRYLMGVGTPSDLIESIRRGVDMFDCVIPTRSGRTGRAYTSRGVLNMRNAKHAEDTGPVDPDCDCPACRNHSRAYIHHLIKAEEMLGPMLLTWHNIQYYQRLTARLRAAILAGRFEEEAAVIEAGWGGAGEAGDGALPPPQTPSPPRGSGPLDPM

SEQ ID NO: 60368 - protein, 380 aa, Roseospirillum parvum
  REGION 1..380: note = tr|A0A1G7UJT3|A0A1G7UJT3_9RHIZ Queuine tRNA-ribosyltransferase OS=Roseospirillum parvum OX=83401; GN = tgt PE=3 SV=1
MPSPLPDGLGFRVLATDGAARRGRLLTAHGTVETPAFMPVGTAATVKAMMPETVAATGAEILLANTYHLMLRPGAEAVAALGGLHRMMDWPRPILTDSGGFQVMSLGDLCRIDPDGVTFKSHLDGSTHRLTPVRAIDIQHKLDATISMVFDECTPFPAEHEVAAASMRRSMDWAARCREAFVPRPGYGLFGIVQGGVYPDLRAESAARLIDIGFEGYAIGGLAVGEGQAAMFETLSATVPHLPTDRPRYLMGVGKPEDLLGAVARGVDMFDCVLPTRSGRTAQAFTRRGPLNLRNARHKADPRPLDEACGCPACRRFSRAYLHHLIRAGEILGLMLLTTHNVTLYQDLMADLRQAIAEGRLKAELEAWRNGLARGDVSPM

SEQ ID NO: 60369 - protein, 376 aa, Roseovarius aestuarii
  REGION 1..376: note = tr|A0A1X7BNH4|A0A1X7BNH4_9RHOB Queuine tRNA-ribosyltransferase OS=Roseovarius aestuarii OX=475083; GN = tgt PE=3 SV=1
MVKKFQFELLATDGAARHGLISTPRGDIRTPAFMPVGTAATVKAMMPESVRDTGADILLGNTYHLMLRPGAERIDRLGGLHRFMNWARPILTDSGGFQVMSLAGLRKLTEAGVTFKSHIDGSKHELTPERSMEIQRLLGSNIVMCFDECPALPASDEAVAESMRLSMRWAARSKEAFGDRPGHALFGIMQGGVTPELREESAAALRDIGFDGYAIGGLAVGEGQEAMFGVLDYACGFLPEDRPRYLMGVGKPDDIVGAVKRGVDMMDCVLPSRSGRTGQVFTRRGVVNIKNARHSEDPRPLDEQCRCPACRNYSRAYLHHVFRAQEMISGMLLTWHNLQYYQDLMAGMRDAIAEKQFAAWEAAFHQTRVEGDIEPI

SEQ ID NO: 60370 - protein, 397 aa, unidentified
  source 1..397: note = Roseovarius albus
  REGION 1..397: note = tr|A0A1X6Z8U2|A0A1X6Z8U2_9RHOB Queuine tRNA-ribosyltransferase OS=Roseovarius albus OX=1247867; GN = tgt PE=3 SV=1
MYGPGVQPGGLAIATIRCMWAGMNSFSFSLHAESGQARTGVISTPRGEIRTPAFMPVGTAATVKAMLPESVRETGADILLGNTYHLMLRPTAERIAKLGGLHKFMNWERPILTDSGGFQVMSLAGLRKLNEQGVTFKSHIDGSKHELTPERSMEIQKLLGSDIVMCFDECPALPATDKEVAESMRLSMRWAARSKEAFGDRPGHALFGIMQGGVTPELREESAKALQEIGFDGYAVGGLAVGEGQEAMFGVLDYAPGYLPKDRPRYLMGVGKPDDIVGAVKRGIDMMDCVLPSRSGRTGQVWTRYGFLNIKNARHQDDPRPIDENCTCPTCRNYSRAYLHHVFRSQEIISSMLLTWHNLHYYQEIMAGMREAIAAGRFDTWETEFHAQRAQGDIEQL

SEQ ID NO: 60371 - protein, 376 aa, unidentified
  source 1..376: note = Roseovarius atlanticus
  REGION 1..376: note = tr|A0A0T5NT98|A0A0T5NT98_9RHOB Queuine tRNA-ribosyltransferase OS=Roseovarius atlanticus; OX = 1641875 GN=tgt PE=3 SV=1
MTQGFAFELGATDGQARTGVIRTPRGDVRTPAFMPVGTAATVKAMMPESVHETGADILLGNTYHLMLRPTAERIDALGGLHRFMNWERPILTDSGGFQVMSLAGLRKLTEAGVTFKSHIDGSKHELTPERSMEIQRLLGSDIVMCFDECPALPASDDEVARAMRLSMRWAARSKDAFGDRPGHALFGIMQGGVTQELREESASALVEIGFDGYAIGGLAVGEGQAAMFGVLDYATGYLPEDKPRYLMGVGKPDDIVGAVKRGVDMMDCVLPSRSGRTGQVFTRRGVLNIKNARHQDDPRPLDAACTCPACRKYSRAYLHHVFRSQEIISSMLLTWHNLHYYQEIMAGMRAAIAAGRFDAWEAAFHAQRAEGDIAAI

SEQ ID NO: 60372 - protein, 379 aa, unidentified
  source 1..379: note = Roseovarius azorensis
  REGION 1..379: note = tr|A0A1H7M218|A0A1H7M218_9RHOB Queuine tRNA-ribosyltransferase OS=Roseovarius azorensis; OX = 1287727 GN=tgt PE=3 SV=1
MGSASMRFGFGKVAQDGAARAGVIRTPRGEIRTPAFMPVGTAATVKAMLPESVAATGADILLGNTYHLMLRPGAERVARLGGLHRFMNWQRPILTDSGGFQVMSLAGLRKLTEEGVTFRSHIDGSKHHLTPERSMEIQALLGSDIVMCFDECPALPASDKAVAESMRLSMRWAARSKEAFGDRPGHALFGIMQGGVTRALREESAEALKEIGFDGYAVGGLAVGEGQEAMFGVLDYAPGSLPEDRPRYLMGVGKPDDIVGAVKRGIDMMDCVLPSRSGRTGQVFTRHGVVNIKNARHQDDPRPLDEDCTCPACCGYSRAYLHHVFRAGEMISGMLLTWHNLHYFQQIMAEMRAAIVEGRFTEWEAGFHAGRAQGDIEPL

SEQ ID NO: 60373 - protein, 376 aa, unidentified
  source 1..376: note = Roseovarius gaetbuli
  REGION 1..376: note = tr|A0A1X6Z9U5|A0A1X6Z9U5_9RHOB Queuine tRNA-ribosyltransferase OS=Roseovarius gaetbuli OX=1356575; GN = tgt PE=3 SV=1
MTARISFEMQASDGLARTGVISTPRGEIRTPAFMPVGTAATVKAMMPESVRATGADILLGNTYHLMLRPGAERIDRLGGLHKFMNWDRPILTDSGGFQVMSLAGLRKLTEKGVTFKSHIDGSKHELTPERSMEIQKLLGSDIVMCFDECPALPATDKAVAESMRLSMRWAERSKEAFGDRPGHALFGIMQGGVTPELREESAEALKAIGFDGYAVGGLAVGEGQEAMFGVLDYAPGFLPEDKPRYLMGVGKPDDIVGAVKRGIDMMDCVLPSRSGRTGQVFTRRGVLNIKNARHQDDPRPIDEACSCPACSHYSRAYLHHVFRSQEIISSMLLTWHNLHYFQDIMAGMREAIAQGTFAQWEAGFHAGRAEGDIELL

SEQ ID NO: 60374 - protein, 374 aa, Roseovarius halotolerans
  REGION 1..374: note = tr|A0A1X6YJS8|A0A1X6YJS8_9RHOB Queuine tRNA-ribosyltransferase OS=Roseovarius halotolerans; OX = 505353 GN=tgt PE=3 SV=1
MTVSFELTARDGAARTGVIRTTRGDVRTPAFMPVGTAATVKAMMPNSVRQTGADILLGNTYHLMLRPGAERIARLGGLHRFMNWERPILTDSGGFQVMSLAGLRKLSEHGVTFKSHVDGSRHELTPERSMEIQRLLGSDIVMCFDECPALPASDDEVARAMRLSMRWAARSKEAFGDRPGHALFGIMQGGVNRDLREESAEALVNIGFDGYAVGGLAVGEGQAAMFDVLDYAPGFLPEDKPRYLMGVGKPDDIVGAVKRGIDMMDCVLPSRSGRTGQVFTRRGQINIKNARHQDDPRPLDEDCTCPACRNYSRAYLHHVFRSQEIISSMLLTWHNLHYYQEIMEAMRQAIAEGRFDAWEAAFHEMRAEGDIAPL

SEQ ID NO: 60375 - protein, 379 aa, Roseovarius indicus
  REGION 1..379: note = tr|A0A0T5P5G1|A0A0T5P5G1_9RHOB Queuine tRNA-ribosyltransferase OS=Roseovarius indicus OX=540747; GN = tgt PE=3 SV=1
MRGRPVRVSYQKTGQDGQARTGVISTPRGEIRTPAFMPVGTAGTVKAMMPESVRETGADILLGNTYHLMLRPGAERVARLGGLHGFMNWDRPILTDSGGFQVMSLAGLRKLTEEGVTFKSHIDGSKHELTPERSMEIQRLLGSDIVMCFDECPALPASDEAVAESMRLSMRWAARSKEAFGDRPGHALFGIQQGGVTRDLRAESAEKLVEIGFDGYAVGGLAVGEGQEAMFGVLDYAPGMLPEDKPRYLMGVGKPDDIVGAVKRGIDMMDCVLPSRSGRTGQAWTRRGQVNIKNARHMDDPRPLDEDCTCPACRNYSRAYLHHVFRSQEIISSMLLTWHNLHYYQQIMEGMRGAIAAGTFAAWEDEFHAGRAEGDIEPV

SEQ ID NO: 60376 - protein, 374 aa, unidentified
  source 1..374: note = Roseovarius litoreus
  REGION 1..374: note = tr|A0A1M7ISX9|A0A1M7ISX9_9RHOB Queuine tRNA-ribosyltransferase OS=Roseovarius litoreus OX=1155722; GN = tgt PE=3 SV=1
MTFRFRLQATDGMARTGVIDTPRGEVRTPAFMPVGTAATVKAMLPGSVRETGADIVLGNTYHLMLRPTAERIAGLGGLHRFMNWERPILTDSGGFQVMSLAGLRKLTEEGVTFKSHIDGSRHELTPERSMEIQRLLGSDIVMCFDECPALPASDDEVARAMRLSMRWAERSKDAFGDRPGHALFGIMQGGVTQELREESARALVDIGFDGYAVGGLAVGEGQEAMFGVLDYAPGYLPTDKPRYLMGVGKPDDIVGAVKRGIDMMDCVLPSRSGRTGQVFTRHGVLNIKNARHQDDPRPLDDQCSCPACRGYSRAYLHHVFRSQEIISSMLLTWHNLHYYQQIMAGMRGAIAEGRFADWEAAFHKEREAGDIAPL

SEQ ID NO: 60377 - protein, 376 aa, unidentified
  source 1..376: note = Roseovarius lutimaris
  REGION 1..376: note = tr|A0A1I5CMW6|A0A1I5CMW6_9RHOB Queuine tRNA-ribosyltransferase OS=Roseovarius lutimaris; OX = 1005928 GN=tgt PE=3 SV=1
MTAQIRFEMQARDGLARSGVISTPRGDIRTPAFMPVGTAATVKAMMPESVRATGADILLGNTYHLMLRPGAERIDRLGGLHEFMNWDRPILTDSGGFQVMSLAGLRKLTEAGVTFRSHIDGSKHELTPERSMEIQRLLGSDIVMCFDECPALPATDKAVAESMRLSMRWAARSKDAFGDRPGHALFGIMQGGVTPELREESAEALKAIGFDGYAVGGLAVGEGQEAMFGVLDYAPGFLPEDKPRYLMGVGKPDDIVGAVKRGIDMMDCVLPSRSGRTGQVFTRRGVLNIKNARHQDDPRPLDEACSCPACSNYSRAYLHHVFRSQEIISSMLLTWHNLHYFQDIMAGMREAIAQGRFAEWEAGFHAGRAQGDIEPL

SEQ ID NO: 60378 - protein, 376 aa, unidentified
  source 1..376: note = Roseovarius marisflavi
  REGION 1..376: note = tr|A0A1M7BCX4|A0A1M7BCX4_9RHOB Queuine tRNA-ribosyltransferase OS=Roseovarius marisflavi; OX = 1054996 GN=tgt PE=3 SV=1
MTAQISFEMQARDGLARTGVISTPRGEIRTPAFMPVGTAATVKAMMPESVRATGADILLGNTYHLMLRPGAERIDRLGGLHKFMNWDRPILTDSGGFQVMSLAGLRKLTEKGVTFKSHIDGSKHELTPERSMEIQKLLGSDIVMCFDECPALPATDKAVAESMRLSMRWAERSKEAFGDRPGHALFGIMQGGVTPELREESAEALKAIGFDGYAVGGLAVGEGQEAMFGVLDYAPGLLPEDKPRYLMGVGKPDDIVGAVKRGIDMMDCVLPSRSGRTGQVFTRCGVLNIKNARHQDDPRPLDEACTCPACRHYSRAYLHHVFRSQEIISSMLLTWHNLHYFQDIMAGMREAIAAGRFAEWEAGFHAGRAAGDIEPL

SEQ ID NO: 60379 - protein, 379 aa, Roseovarius mucosus
  REGION 1..379: note = tr|A0A0A0HL13|A0A0A0HL13_9RHOB Queuine tRNA-ribosyltransferase OS=Roseovarius mucosus DSM 17069; OX = 1288298 GN=tgt PE=3 SV=1
MGHEGMRFGFEKLAQDGAARAGVIHTPRGDIRTPAFMPVGTAATVKAMMPESVRATGADILLGNTYHLMLRPGAERIDRLGGLHRFMNWERPILTDSGGFQVMSLAGLRKLTEQGVTFKSHIDGSKHELTPERSMEIQRLLGSDIVMCFDECPALPASDKAVAESMRLSMRWAARSKEAFGDRPGHALFGIMQGGVTPELREESAEALKAIGFDGYAVGGLAVGEGQEAMFGVLDYATGFLPEDRPRYLMGVGKPDDIVGAVKRGIDMMDCVLPSRSGRTGQVFTRHGVVNIKNARHQDDPRPLDEACTCPACRNYSRAYLHHVFRSQEIISSMLLTWHNLHYFQQIMGEMRAAIAEARFDAWEAAFHAGRAEGDIEPL

SEQ ID NO: 60380 - protein, 374 aa, Roseovarius mucosus
  REGION 1..374: note = tr|A0A1V0RJF7|A0A1V0RJF7_9RHOB Queuine tRNA-ribosyltransferase OS=Roseovarius mucosus OX=215743; GN = tgt PE=3 SV=1
MRFGFEKLAQDGAARAGVIRTPRGDIRTPAFMPVGTAATVKAMMPESVRATGADILLGNTYHLMLRPGAERIDRLGGLHRFMNWERPILTDSGGFQVMSLAGLRKLTEQGVTFKSHIDGSKHELTPERSMEIQRLLGSDIVMCFDECPALPATDKAVAESMRLSMRWAARSKEAFGDRPGHALFGIMQGGVTPELREESAEALKAIGFDGYAVGGLAVGEGQEAMFGVLDYAPGFLPEDRPRYLMGVGKPDDIVGAVKRGIDMMDCVLPSRSGRTGQVFTRHGVVNIKNARHQDDPRPLDEACICPACRNYSRAYLHHVFRSQEIISSMLLTWHNLHYFQQIMSEMRAAIADGQFEAWEAAFHAGRAEGDIDPL

SEQ ID NO: 60381 - protein, 376 aa, Roseovarius nanhaiticus
  REGION 1..376: note = tr|A0A1N7GFQ2|A0A1N7GFQ2_9RHOB Queuine tRNA-ribosyltransferase OS=Roseovarius nanhaiticus; OX = 573024 GN=tgt PE=3 SV=1
MTKRIEFQLAATDGAARTGTIRTTRGDIRTPAFMPVGTAATVKAMMPESVAATGADILLGNTYHLMLRPTAERIARLGGLHDFMNWQGPILTDSGGFQVMSLADLRKLTEEGVAFRSHIDGSKHMLTPERSMEIQKLLGSDIVMCFDECPALPATDKAVAESMELSMRWARRSKEAFGDRPGHALFGIMQGGVTQELRGISAEKLKEIGFDGYAIGGLAVGEGQEAMFGVLDYAPAMLPEDKPRYLMGVGKPDDIVGAVARGVDMMDCVLPSRSGRTGQAWTRQGQVNIKNARHADDPRPLDEHCTCPACRNYSRAYLHHVFRAQEMISGMLLTWHNLHYYQEIMSGMRQAIAAQRFDAWQQGFHSTRAMGDIEPL

SEQ ID NO: 60382 - protein, 376 aa, Roseovarius nubinhibens
  REGION 1..376: note = tr|A3SP95|A3SP95_ROSNI Queuine tRNA-ribosyltransferase OS=Roseovarius nubinhibens (strain ATCC BAA-591 / DSM 15170 / ISM) OX=89187 GN=tgt PE=3 SV=1
MTRSFGFTLSATDGRARTGRIDTPRGEIRTPAFMPVGTAATVKAMMPENVRATGADILLGNTYHLMLRPGSDRVARLGGLHKFMNWERPILTDSGGFQVMSLAGLRKLTEEGVKFKSHIDGSVHNLTPERSMEIQAELGSDIVMCFDECPALPADEKRVAESMRLSMRWAQRSRDAFGDRPGHALFGIMQGGLSPELREESAEALRGIGFDGYAIGGLAVGEGQEAMFDVLDYAPGLLPEDQPRYLMGVGKPDDLVGGVKRGVDMFDCVLPSRSGRTGQAFTRRGVVNIKNARHQDDPRPLDESCDCPCCRNYSRAYLHHVMRAKEIISSMLMTWHNLHYYQVLMSEMREAISAGRFDTWEAGFHAERAQGDIEPL

SEQ ID NO: 60383 - protein, 379 aa, Roseovarius pacificus
  REGION 1..379: note = tr|A0A1M6WX18|A0A1M6WX18_9RHOB Queuine tRNA-ribosyltransferase OS=Roseovarius pacificus OX=337701; GN = tgt PE=3 SV=1
MRDDAVKFSFQLQATDRAARTGVIETPRGEVRTPAFMPVGTAATVKAMLPESVRATGADILLGNTYHLMLRPTAERIDRLGGLHRFMNWERPILTDSGGFQVMSLAGLRKLTEEGVTFKSHIDGSRHELTPERSMEIQRLLGSDIVMCFDECPALPATEAQVAESMRLSMRWAARSKAAFGDRPGHALFGIMQGGVTPELREESAKALCEIGFDGYAVGGLAVGEGQEAMFGVLDYAPGFLPPDKPRYLMGVGKPDDIVGAVKRGIDMMDCVLPSRSGRTGQVFTRHGQLNIKNARHQDDPRPIDDQCTCPACRNYSRAYLHHVFRSQEIISSMLLTWHNLHYYQDIMQGMRDAIAAGRFADWEAAFHAGREQGDIERL

SEQ ID NO: 60384 - protein, 376 aa, Roseovarius sp.
  REGION 1..376: note = tr|A0A365TWG0|A0A365TWG0_9RHOB Queuine tRNA-ribosyltransferase OS=Roseovarius sp. TE539; OX = 2249812 GN=tgt PE=3 SV=1
MTASFSFELKAIDGAARAGVIATPRGEIRTPAFMPVGTAGTVKAMLPDSVRETGADILLGNTYHLMLRPGPERVARLGGLHRFMNWDRPILTDSGGFQVMSLAGLRKLTEQGVTFKSHIDGSRHELTPERSMEIQRLLGSDIVMCFDECPALPATDDEVARAMHLSMRWAERSKVAFGNRPGHALFGIMQGGVAPDLRAESAEALTAIGFDGYAIGGLAVGEGQAAMFGVLDYAPGLLPRDRPRYLMGVGKPDDIVGAVKRGVDMMDCVLPSRSGRTGQAFTRRGVVNIKNARHADDPRPLDDACGCPACRGYSRAYLHHVFRAGEMISGMLLTWHNLHYFQEIMAGMRLAIAEARFAQWEAAFHAGRADGDIDPL

SEQ ID NO: 60385 - protein, 376 aa, Roseovarius sp.
  REGION 1..376: note = tr|A0A246QR64|A0A246QR64_9RHOB Queuine tRNA-ribosyltransferase OS=Roseovarius sp. 22II1-1F6A; OX = 1317112 GN=tgt PE=3 SV=1
MSQKFSYAVHATDGSARLGTISTPRGDIRTPAFMPVGTAATVKAMRPESVRETGADILLGNTYHLMLRPTAERIDRLGGLHRFMNWDRPILTDSGGFQVMSLADLRKLTEEGVTFRSHVDGSRHHLTPERSMEIQKLLGSDIVMCFDECPALPADEMRVAESMRLSMRWAQRSRDAFGDRTGHALFGIQQGGVTQHLRAESAEKLRAIGFDGYAVGGLAVGEGQEAMFGVLDYACDMLPEDRPRYLMGVGKPDDIVGAVKRGIDMMDCVLPSRSGRTGQAFTRRGVVNIKNARHQDDPRPLDEDCTCPACRSYSRAYLHHVFRSQEIISSMLLTWHNLHYYQELMGDMRAAIGQGRFAAFEAQFHADRADGDIERL

SEQ ID NO: 60386 - protein, 376 aa, Roseovarius tolerans
  REGION 1..376: note = tr|A0A0L6CVY3|A0A0L6CVY3_9RHOB Queuine tRNA-ribosyltransferase OS=Roseovarius tolerans OX=74031; GN = tgt PE=3 SV=1
MTALFNYKLKGTDGLARTGVISTPRGEIRTPAFMPVGTAATVKAMMPESVAATGADILLGNTYHLMLRPGAERVANLGGLHRFMNWQKPILTDSGGFQVMSLAGLRKLTEAGVTFRSHIDGSKHELTPERSMEIQRLLGSDIVMCFDECPALPASDKAVAESMQLSMRWAARSKEAFGDRPGHALFGIMQGGVAPELREESAAALTGIGFDGYAVGGLAVGEGQEAMFGVLDYAPGFLPEDKPRYLMGVGKPDDIVGAVKRGIDMMDCVLPSRSGRTGQAWTRRGQVNIKNARHQDDPRPLDEACSCPACRNYSRAYLHHVFRSQEMISGMLLTWHNLHYYQEIMAGMRAAIAARQFAAWEAAFHALRAEGDIEPV

SEQ ID NO: 60387 - protein, 376 aa, Roseovarius tolerans
  REGION 1..376: note = tr|A0A1H7UYQ9|A0A1H7UYQ9_9RHOB Queuine tRNA-ribosyltransferase OS=Roseovarius tolerans OX=74031; GN = tgt PE=3 SV=1
MTALFNYKLKGTDGLARTGVISTPRGEIRTPAFMPVGTAATVKAMMPESVAATGADILLGNTYHLMLRPGAERVANLGGLHRFMNWEKPILTDSGGFQVMSLAGLRKLTEAGVTFRSHIDGSKHELTPERSMEIQRLLGSDIVMCFDECPALPASDTAVADSMQLSMRWAARSKEAFGDRPGHALFGIMQGGVTPELREESAAALSGIGFDGYAVGGLAVGEGQAAMFGVLDYAPGFLPEDKPRYLMGVGKPDDIVGAVKRGIDMMDCVLPSRSGRTGQAWTRRGQVNIKNARHQDDPRPLDEACGCPACRNYSRAYLHHVFRSQEMISGMLLTWHNLHYYQEIMAGMRAAISEWRFAAWETAFHALRAEGDIEPL

SEQ ID NO: 60388 - protein, 436 aa, Rothia aeria
  REGION 1..436: note = tr|I0UUN6|I0UUN6_9MICC Queuine tRNA-ribosyltransferase OS=Rothia aeria F0474 OX=1125724; GN = tgt PE=3 SV=1
MSSSNSEFPNPGFGFTVTSRLAETASPSAERVEANGGQFLGRTGVIRTPHGDIETPAFTPVGTKATVKAVLPEAMKELGAQALLANAYHLYLQPGPEILDAAGGLGRFMNWDGPTFTDSGGFQVMSLGSGFKKVIDMGTVADAKGADGRPIGDDDVAHGKERLAHIDDDGVNFKSHINGSIHRFTPEVSMQVQHQIGADIMFAFDELTTLYNSRGYQEEALERTRLWALRCIAEHERLTDERTGKPYQALFGVIQGAQYEDLRRKACRDLGAMPFDGFGIGGALEKENLGTIVRWCAEELPEAKPRHLLGISEPDDIFVGLENGVDTFDCVSPTRVARNAALYSPTGRFNVTNARFKADFSPIYEGCDCYTCAHYTRAYLRHLFKADERLAATLASIHNERFIVRMVDDARAAIADGTYFEYRDEFLGNYYSGKKP

SEQ ID NO: 60389 - protein, 436 aa, Rothia aeria
  REGION 1..436: note = tr|U7UXK7|U7UXK7_9MICC Queuine tRNA-ribosyltransferase OS=Rothia aeria F0184 OX=888019; GN = tgt PE=3 SV=1
MSSSNSEFPNPGFGFTVTSRLAETASPSAERVEANGGQFLGRTGVIRTPHGDIETPAFTPVGTKATVKAVLPEAMKDLGAQALLANAYHLYLQPGPEILDAAGGLGRFMNWDGPTFTDSGGFQVMSLGSGFKKVIDMGTVADAKGADGRPIGDDDVAHGKERLAHIDDDGVNFKSHINGSIHRFTPEVSMQVQHQIGADIMFAFDELTTLYNSRGYQEEALERTRLWALRCIAEHERLTDERTGKPYQALFGVIQGAQYEDLRRKACRDLGAMPFDGFGIGGALEKENLGTIVRWCAEELPEARPRHLLGISEPDDIFVGLENGVDTFDCVSPTRVARNAALYSPTGRFNVTNARFKADFSPIYEGCDCYTCTHYTRAYLRHLFKADERLAATLASIHNERFIVRMVDDARTAIADGTYFEYRDEFLGNYYSGKKP

SEQ ID NO: 60390 - protein, 433 aa, Rothia dentocariosa
  REGION 1..433: note = tr|E3H4Q8|E3H4Q8_ROTDC Queuine tRNA-ribosyltransferase OS=Rothia dentocariosa (strain ATCC 17931 / CDC X599 / XDIA) OX=762948 GN=tgt PE=3 SV=1
MNNEFPNPDFGFTVTSRLAETASPSAERVEANGGQFLGRTGVIRTPHGNIETPAFTPVGTKATVKAVLPEAMKELGAQALLANAYHLYLQPGPEILDAAGGLGRFMNWDGPTFTDSGGFQVMSLGSGFKKVIDMGTVADAKGADGRPIGDDDVAHGKERLAHIDDDGVNFKSHINGSIHRFTPEVSMQVQHQIGADIMFAFDELTTLYNSRGYQEEALERTRLWALRCIAEHERLTDERTGNPYQALFGVIQGAQYEDLRRKACRDLGDMPFDGFGIGGALEKENLGIIVRWCAEELPEAKPRHLLGISEPDDIFVGLENGVDTFDCVSPTRVARNAALYSPTGRFNVTNARFKADFSPIYEGCDCYTCAHYTRAYLRHLFKADERLAATLASIHNERFIVRMVDDARAAIADGTYFEYRDEFLGNYYSGKKP

SEQ ID NO: 60391 - protein, 436 aa, Rothia dentocariosa
  REGION 1..436: note = tr|A0A448PVQ1|A0A448PVQ1_9MICC Queuine tRNA-ribosyltransferase OS=Rothia dentocariosa OX=2047; GN = tgt PE=3 SV=1
MSSSNSEFPNPGFGFTVTSRLAETASPSAERVEANGGQFLGRTGVIRTPHGDIETPAFTPVGTKATVKAVLPEAMKDLGAQALLANAYHLYLQPGPEILDAAGGLGRFMNWDGPTFTDSGGFQVMSLGSGFKKVIDMGTVADAKGADGRPIGDDDVAHGKERLAHIDDDGVNFKSHINGSIHRFTPEVSMQVQHQIGADIMFAFDELTTLYNSRGYQEEALERTRLWALRCIAEHERLTDERTGKPYQALFGVIQGAQYEDLRRKACRDLGDMPFDGFGIGGALEKENLGTIVRWCAEELPETKPRHLLGISEPDDIFVGLENGVDTFDCVSPTRVARNAALYSPTGRFNVTNARFKADFSPIYEGCDCYTCTHYTRAYLRHLFKADERLAATLASIHNERFIVRMVDDARAAIADGTYFEYRDEFLGNYYSGKKP

SEQ ID NO: 60392 - protein, 483 aa, unidentified
  source 1..483: note = Rothia kristinae
  REGION 1..483: note = tr|A0A2X3ERP5|A0A2X3ERP5_9MICC Queuine tRNA-ribosyltransferase OS=Rothia kristinae OX=37923; GN = tgt PE=3 SV=1
MPTAESPQRPTPGVAASNPGAEPAENTAPPSGTAAFGFAVGARLAETDDARGTRSARERNDGGQFLGRTGVITTPHGSIATPAFIPVGTQATVKAVLPESMAELGAQALLANAYHLYLQPGPEVLDAAGGLGAFMNWPGPTFTDSGGFQVMSLGSGFKKVIDMGTVTGAVGADGRPVGDDDVAAGKERMAYVDDDGVTFRSHLNGDRHRFTPEVSMRVQHQLGADIMFAFDELTTLYNSRGYQELALERTRLWALRCVAEHRRLTEQRAGKPYQALFGVIQGAQYEDLRRKACRDLGAMGFNGFGLGGALEKENLGTIVRWCSEELPEAKPRHLLGISEPDDIFVAIENGADTFDCVSPTRVARTSAVYSPDGRFNVSNARFKTDFSPIVDGCDCYTCTHYTRAYLHHLFKAKERLAATLASIHNERFIVRMVDTARQTIASGDYFAYRDEFLGRYYAARTTPGPASGAAPSDDAASAGKGRA

SEQ ID NO: 60393 - protein, 436 aa, unidentified
  source 1..436: note = Rothia kristinae
  REGION 1..436: note = tr|A0A1S2MZX8|A0A1S2MZX8_9MICC Queuine tRNA-ribosyltransferase OS=Rothia kristinae OX=37923; GN = tgt PE=3 SV=1
MAETDDARGTRDARERNDGGEFLGRTGVITTPHGSIATPAFIPVGTQATVKAVLPESMAELGAQALLANAYHLYLQPGPEVLDAAGGLGAFMNWPGPTFTDSGGFQVMSLGSGFKKVIDMGTVTDAVGADGRPVGDDDVAAGKERMADVDDDGVTFKSHLNGDLHRFTPEVSMRVQHQLGADIMFAFDELTTLYNSRGYQERALERTRLWALRCVEEHRRLTEQRAGKPYQALFGVIQGAQYEDLRRKACRDLGAMGFDGFGLGGALEKENLGTIVRWCAEELPEAKPRHLLGISEPDDIFVAIENGADTFDCVSPTRVARTSAVYSPDGRFNVSNARFKTDFSPLVDGCDCYTCAHYTRAYLHHLFKAKERLAATLASIHNERFIVRMVDTARETIASGDYFAYRDEFLGRYYAARTPSGPAVSAGAASAGKGRA

SEQ ID NO: 60394 - protein, 436 aa, Rothia mucilaginosa
  REGION 1..436: note = tr|A0A2I1Z3D4|A0A2I1Z3D4_9MICC Queuine tRNA-ribosyltransferase OS=Rothia mucilaginosa OX=43675; GN = tgt PE=3 SV=1
MSVLDNSFPTEDFGFTITSRLADTASPSAERVEANGGQFRGRTGVITTPHGQIQTPAFTPVGTKATVKAVLPESMKELGAQALLSNAYHLYLQPGPEILDAAGGLGAFMNWDGPTFTDSGGFQVMSLGSGFKKVIDMGTVADAKGADGRPLGDDDVAKGKERLAHIDDDGVNFKSHIDGSIHRFTPEVSMQVQHQIGADVMFAFDELTTLYNSRGYQEEALERTRLWALRCIAEHQRLTTERVGKPYQALFGVIQGAQYEDLRRKACQDLGSMPFDGFGIGGALEKENLGTIVRWCAEELPESKPRHLLGISEPDDIFVGIENGVDTFDCVSPTRVARNAAVYSPTGRYNITNARFKADFSPIYEGCDCYTCTHYTRAYLRHLFKADERLAATLASIHNERFIVRMVDDAREAIKDGTYFEYRDEFLGNYYSGKKP

SEQ ID NO: 60395 - protein, 436 aa, Rothia mucilaginosa
  REGION 1..436: note = tr|G5ETI2|G5ETI2_9MICC Queuine tRNA-ribosyltransferase OS=Rothia mucilaginosa M508; OX = 563033 GN=tgt PE=3 SV=1
MSVLDNSFPTEDFGFTITSRLADTASSSAERVEANGGQFRGRTGVITTPHGQIQTPAFTPVGTKATVKAVLPESMKELGTQALLSNAYHLYLQPGPEILDAAGGLGAFMNWDGPTFTDSGGFQVMSLGSGFKKVIDMGTVADAKGADGRPLGDDDVAKGKERLAHIDDDGVNFKSHIDGSIHRFTPEVSMQVQHQIGADVMFAFDELTTLYNSRGYQEEALERTRLWALRCIAEHQRLTTERVGKPYQALFGVIQGAQYEDLRRKACQDLGSMPFDGFGIGGALEKENLGTIVRWCAEELPESKPRHLLGISEPDDIFVGIENGVDTFDCVSPTRVARNAAVYSPTGRYNITNARFKADFSPIYEGCDCYTCTHYTRAYLRHLFKADERLAATLASIHNERFIVRMVDDAREAIKDGTYFEYRDEFLGNYYSGKKP

SEQ ID NO: 60396 - protein, 436 aa, Rothia sp.; identical to SEQ ID NO: 60394
  REGION 1..436: note = tr|A0A1E9GD68|A0A1E9GD68_9MICC Queuine tRNA-ribosyltransferase OS=Rothia sp. HMSC062H08; OX = 1739269 GN=tgt PE=3 SV=1

SEQ ID NO: 60397 - protein, 436 aa, Rothia sp.
  REGION 1..436: note = tr|A0A1E9Z6M2|A0A1E9Z6M2_9MICC Queuine tRNA-ribosyltransferase OS=Rothia sp. HMSC071B01; OX = 1715007 GN=tgt PE=3 SV=1
MSVLDNSFPTEDFGFTITSRLADTASPSAERVEANGGQFRGRTGVITTPHGQIQTPAFTPVGTKATVKAVLPESMKELGAQALLSNAYHLYLQPGPEILDAAGGLGAFMNWDGPTFTDSGGFQVMSLGSGFKKVIDMGTVAGAKGADGRPLGDDDVAKGKERLAHIDDDGVNFKSHIDGSIHRFTPEVSMQVQHQIGADVMFAFDELTTLYNSRGYQEEALERTRLWALRCIAEHQRLTTERVGKPYQALFGVIQGAQYEDLRRKACQDLGSMPFDGFGIGGALEKENLGTIVRWCAEELPESKPRHLLGISEPDDIFVGIENGVDTFDCVSPTRVARNAAVYSPTGRYNITNARFKADFSPIYEGCDCYTCTHYTRAYLRHLFKADERLAATLASIHNERFIVRMVDDAREAIKDGTYFEYRDEFLGNYYSGKKP

SEQ ID NO: 60398 - protein, 374 aa, unidentified
  source 1..374: note = Rouxiella badensis
  REGION 1..374: note = tr|A0A1X0WJG3|A0A1X0WJG3_9GAMM Queuine tRNA-ribosyltransferase OS=Rouxiella badensis OX=1646377; GN = tgt PE=3 SV=1
MKYELQTTDGRARRGRLVFERGVVETPAFMPVGTYGTVKGMTPEEVKDTGAQILLGNTFHLWLRPGQEIMKLHGDLHDFMNWHGPILTDSGGFQVFSLGAMRKIKEEGVHFRNPINGDPVFLSPEKSMEIQNDLGSDIVMIFDECTPYPADWDYAKRSMEMSLRWAKRSRDRHDELKNNNALFGIIQGSVYEDLRDVSIKGLVDIGFDGYAVGGLAVGEPKEDMHRILEHVCPQIPEDKPRYLMGVGKPQDLVEGVRRGVDMFDCVMPTRNARNGHLFVTDGVVKIRNAKHKDDTSTLDEHCDCYTCRNYSRAYLHHLDRCNEILGARLNTIHNLRYYQRLMAGLRQAIEEGKLEQFVTEFYERQGKPVPPLNF

SEQ ID NO: 60399 - protein, 374 aa, unidentified
  source 1..374: note = Rouxiella silvae
  REGION 1..374: note = tr|A0A1X0W6H4|A0A1X0W6H4_9GAMM Queuine tRNA-ribosyltransferase OS=Rouxiella silvae OX=1646373; GN = tgt PE=3 SV=1
MKYELSTTDGRARRGRLVFERGVVETPAFMPVGTYGTVKGMTPEEVKETGAQILLGNTFHLWLRPGQEIMKLHGDLHDFMNWHGPILTDSGGFQVFSLGAMRKIKEEGVHFRNPINGDPVFLSPEKSMEIQNDLGSDIVMIFDECTPYPADWDYAKRSMEMSLRWAKRSRDRHDELKNNNALFGIIQGSVYEDLRDVSIKGLVDIGFDGYAVGGLAVGEPKEDMHRILEHVCPQIPEDKPRYLMGVGKPQDLVEGVRRGVDMFDCVMPTRNARNGHLFVTDGVVKIRNAKHKDDTSTLDEHCDCYTCRNYSRAYLHHLDRCNEILGARLNTIHNLRYYQRLMAGLRQAIEEGKLELFVADFYARQGKEVPPLNF

SEQ ID NO: 60400 - protein, 401 aa, unidentified
  source 1..401: note = Ruaniaceae bacterium
  REGION 1..401: note = tr|A0A239QT73|A0A239QT73_9MICO Queuine tRNA-ribosyltransferase OS=Ruaniaceae bacterium KH17; OX = 1945888 GN=tgt PE=3 SV=1
MPFRFEPRSHLAGAAGRTGTIHTPHGSIQTPAFIPVATKAAIKAVLPEAMRAAGAQALLANAYHLYLQPGAEIVEEGGGVGQFMGWDGPTFTDSGGFQVLSLGAGFKKVLAMATEGLGNDEIVAESKERLAQVDDDGVTFKSHLDGSLHRFTPEVSMQIQHQLGADIIFSFDELTTLVNTRRYQEESLERTRLWAERCVAEHRRLTEARGERPYQALFGVLQGANYEDLRRKAARDLSTMGFDGYGLGGAIEKPRLGEIVGWMTAELQEDRPRHLLGISEPDDLFAAVAAGADTFDCVSPTRVARNSAIYSRFGRYNVTGARYRRDFSPLDEGCDCYTCTHVTRAYLHHLFKAKEMNAATLASIHNERFILRLMDEIRESIDGGYFSELRTERMHDYYGRT

SEQ ID NO: 60401 - protein, 376 aa, Rubellimicrobium mesophilum
  REGION 1..376: note = tr|A0A017HN84|A0A017HN84_9RHOB Queuine tRNA-ribosyltransferase OS=Rubellimicrobium mesophilum DSM 19309 OX=442562 GN=tgt PE=3 SV=1
MGSGFSFTLNATDGRARTGVISTPRGEIRTPAFMPVGTAGTVKAMLPESVRATGADILLGNTYHLMLRPGAERLARLGGLHRFMNWERPILTDSGGFQVMSLSTLRKLTEEGVTFSSHVDGSKHHLTPERSMEIQRLLGSDIVMAFDECPALPAAEDTVAKSMRLSMRWAARSREAFGDRPGHALFGIMQGGVTRELREESAEALKGIGFEGYAVGGLAVGEGQEAMFGVLDYAPGLLPEDKPRYLMGVGKPDDIVGAVKRGIDMMDCVLPTRSGRTGQAWTRRGQVNLRNARHAEDPRPLDEACTCPACRSYSRAYLHHVVRAGEMIAGMLLTWHNLHYFQEIMAGMREAIAGGRFEAWESGFHASRAEGDVEPL

SEQ ID NO: 60402 - protein, 376 aa, unidentified
  source 1..376: note = Rubellimicrobium roseum
  REGION 1..376: note = tr|A0A5C4NK78|A0A5C4NK78_9RHOB Queuine tRNA-ribosyltransferase OS=Rubellimicrobium roseum; OX = 687525 GN=tgt PE=3 SV=1
MATGFSFTLNATDGRARTGVISTPRGEIRTPAFMPVGTAATVKAMLPESVRATGADILLGNTYHLMLRPGAERVARLGGLHKFMNWERPILTDSGGFQVMSLSSLRKMTEEGVTFSSHIDGSKHALTPERSMEIQKLLGSDIVMAFDECTPFPATGEVSLASMQRSMRWAQRSRDAFGDRPGHALFGIQQGSVFPEQRAESAEALKAIGFDGYAVGGLAVGEGQEKMFEVLDYAPGMLPEDRPRYLMGVGKPDDIVGAVKRGIDMMDCVLPTRSGRTGQAWTRRGQVNLRNARHAEDTRPLDEACTCPACRSYSRAYLHHVVRADEMIAGMLLTWHNLHYFQEIMAGMRAAIAAGRFAEWETGFHTLRAEGDIEPV

SEQ ID NO: 60403 - protein, 376 aa, Rubellimicrobium sp.
  REGION 1..376: note = tr|A0A5C4MZ66|A0A5C4MZ66_9RHOB Queuine tRNA-ribosyltransferase OS=Rubellimicrobium sp. YIM 131921; OX = 2585369 GN=tgt PE=3 SV=1
MATGFSFTLAATDGRARTGVITTPRGEIRTPAFMPVGTAGTVKAMLPDSVRATGADILLGNTYHLMLRPGAERVARLGGLHKFMNWERPILTDSGGFQVMSLSSLRKMTEEGVTFSSHIDGSKHVLTPERSMEIQRLLGSDIVMAFDECTPFPAAQDVSLESMRRSMRWARRSRDAFGDRLGHALFGIQQGSVFREQREESAEALKAVGFDGYAVGGLAVGEGQGQMFDVLNYAPGMLPDDKPRYLMGVGKPDDIVGAVKRGIDMMDCVLPSRSGRTGQAWTRRGQVNLRNARHADDPRPVDEACSCPACRNYSRAYLHHVVRANEMIAGMLLTWHNLHYFQEIMAGMREAISKGRFASWENDFQSRRSEGDIEPL

SEQ ID NO: 60404 - protein, 376 aa, Rubellimicrobium thermophilum
  REGION 1..376: note = tr|S9QMN1|S9QMN1_9RHOB Queuine tRNA-ribosyltransferase OS=Rubellimicrobium thermophilum DSM 16684 OX=1123069 GN=tgt PE=3 SV=1
MASGIIFTVAATDGRARTGVLKTPRGEIRTPAFMPVGTAATVKAMLPQSVRATGADILLGNTYHLMLRPGAERIARLGGLHRFMNWDGPILTDSGGFQVMSLAALRRLDEDGVTFASHIDGSRHRLTPERSMEIQRLLGSDIVMAFDECPALPAPEEAVAASMRLSMRWAARSREAFGDRPGHALFGIMQGGVTRELREESAAALRAIGFDGYAIGGLAVGEGQAAMFEVLDYAPGLLPQDRPRYLMGVGKPDDIVGAVARGVDMMDCVLPTRSGRTGQAWTRRGPVNLRNARHAEDPRPLDEACTCPACRGYSRAYLHHVVRAGEMIAGMLLTWHNLHYFQQLMQEMRTAIAAGRFAAWEAEFHRLRAEGDIEPL

SEQ ID NO: 60405 - protein, 372 aa, unidentified
  source 1..372: note = Rubidibacter lacunae
  REGION 1..372: note = tr|U5DPM6|U5DPM6_9CHRO Queuine tRNA-ribosyltransferase OS=Rubidibacter lacunae KORDI 51-2; OX = 582515 GN=tgt PE=3 SV=1
MGEQTRSQFEFECLATCSVTGARAGRFFTPHGIVDTPRFMPVGTLADVKGVTPAQLADCQAQMVLANTYHLHLQPGEAIVEQAGGLHAFMGWSGPMLTDSGGFQVFSLSELRQVSERGVVFRSPRDGDIIDLTPERAIAIQNILGADVIMAFDECPPYPAERAAVEAATARTYRWLERCMTAHERTDQALFGIVQGGVHLDLRTQAARELVALDLPGYAIGGVSVGEPVEAMHAIVRATAPLLPADRPRYLMGVGTYREMAIAIAAGVDLFDCVIPTRLGRHGTALVRSGERLNLKNAQFREDFTPLDPLCECYTCQTFSRGYLHHLVRSREILAATLLSIHNITELIRFTRSIRAAIFGDRFARDFSRFLN

SEQ ID NO: 60406 - protein, 372 aa, unidentified
  source 1..372: note = Rubinisphaera brasiliensis
  REGION 1..372: note = tr|F0SG11|F0SG11_RUBBR Queuine tRNA-ribosyltransferase OS=Rubinisphaera brasiliensis (strain ATCC 49424 / DSM 5305 / JCM 21570 / NBRC 103401 / IFAM 1448) OX=756272 G N=tgt PE=3 SV=1
MSQFRFELEHVDRHTGARAGKWHTPHGVVQTPTFMPVGTLGTVKGLLPEQLREAGAEMILANTYHLALRPGADVVADLGGLHEFSKWDGPILTDSGGFQVFSLAKLSKLTDDKVVFRSHIDGSVLELSPEKAIDIQEKLGADCIMCLDECPPHDVGKPRLRKAIERTTAWAKRCRDAQKRDDQALFGIVQGGIDQELRETSAAGLLPLDFPGYAIGGLSVGEDPQDMYRTLDFTTPLLPKEKPRYLMGVGKPVDLVEGILRGVDMFDCVMPTRNGRNAMAFTSNGPVKIRNAKYQRDEQPLDAEGASRVGREYSRGYLRHLFMAGEMLGPILLSWHNIAFYEQLVRDMRTAILNDESAEFRSRQLARWGMEP

SEQ ID NO: 60407 - protein, 372 aa, unidentified
  source 1..372: note = Rubinisphaera sp.
  REGION 1..372: note = tr|A0A2E9VM35|A0A2E9VM35_9PLAN Queuine tRNA-ribosyltransferase OS=Rubinisphaera sp. OX=2024857; GN = tgt PE=3 SV=1
MASFRFELQHTDPNTGARAGQWHTPHGIVDTPAFMPVGTLGTVKGLLPEQLKAAGAQMVLANTYHLALRPGADVVEELGGLHQFMNWSGPILTDSGGFQVFSLAKLSKLTDDQVVFRSHIDGSLLELSPEKAIRIQEQLGADCIMCLDECPPHDVGQDRLRAAVQRTTAWAARCRDAQKRGDQALFGIVQGGIDPHLREESAEGLLPLDFPGYAVGGLSVGEDPNDMYKTLDFTTPFLPVEKPRYLMGVGKPVDLLESIIRGIDLFDCVMPTRNGRNAMAFTSNGPVKIRNAKYQRDVTPLDPEGPSEVGRIYSKGYLRHLFVAKEMLGAILLSWHNIAFYENLVREMRQAIFENRSAEFRADQLARWGSDP

SEQ ID NO: 60408 - protein, 381 aa, unidentified
  source 1..381: note = Rubneribacter badeniensis
  REGION 1..381: note = tr|A0A2K2U7T4|A0A2K2U7T4_9ACTN Queuine tRNA-ribosyltransferase OS=Rubneribacter badeniensis; OX = 2070688 GN=tgt PE=3 SV=1
MALFDCVCEAESGHARALAYETAHGTFRTPMFMPVGTSATVKGVTAGQLRDLQSQVVLANTYHLSLRPGADVVEAAGGVHTFMNYDGPMLTDSGGFQVFSLADTVKLDADGLTFRSIYDGAKVRWTPEDNMRIQQQLGADIAMQLDQCAPYPAERAFVARAVDLSASWARRCLAAHTRPDQTLFGIVQGGMHLDLRLRSVEALCEIEKESLAAGGRRFGGFGIGGYSVGESHEVMFETLGQVARALPKDRPRYLMGVGNPTTLVRAVREGVDMFDCVLPTRTARMGTAFSSTGRMNLRNAKYTRDFGPLDPACTCPTCQNHSRAYLRHLVKQNEMLGGILLSLHNLHYLLDLMRRAREAVLAGAYEDFYEEWMASPAARDY

SEQ ID NO: 60409 - protein, 378 aa, Rubricoccus marinus
  REGION 1..378: note = tr|A0A259U1Q0|A0A259U1Q0_9BACT Queuine tRNA-ribosyltransferase OS=Rubricoccus marinus OX=716817; GN = tgt PE=3 SV=1
MPLRYTLQAECPETGARAGTIETDHGTIETPIFMPVGTAGSVKALSPRALTEDIGAQIILGNTYHLHLRPGREVLHELGGLHKFMSWDGPILTDSGGFQVFSLAELRKMSEEGVRFRNHLDGAYLHFTPENVIDTQRDIGSDIMMVLDECPPATVDIATARKSNELTVRWAKRAFEHYHNTTPHYGHHQALFPIVQGAVYPEVRRESADALLQLDAEGYAIGGLSVGETADVMYEIVEVVNEVLPHDRPRYLMGVGTPQNLIENVARGVDMFDCVMPTRNGRNGSLFTTEGLVNIKNKRWERSPEAIDPGLDLYASQNFSKAYLRHLIKSNEPLAMELASMQNVGFYLWLMREMRAAILEGRFPAFRAEWSERVAQKV

SEQ ID NO: 60410 - protein, 376 aa, Rubrimonas cliftonensis
  REGION 1..376: note = tr|A0A1H3YIP4|A0A1H3YIP4_9RHOB Queuine tRNA-ribosyltransferase OS=Rubrimonas cliftonensis; OX = 89524 GN=tgt PE=3 SV=1
MASGVSFSVSATDGRARTGALVTPRGAIRTPAFMPVGTAATVKAMLPENVRETGADILLGNTYHLMLRPGAERVARLGGLHRFMNWDGPILTDSGGFQVMSLADLRKLTEEGVTFRSHVDGSKHMLSPESSMEIQRLLGSDIVMCFDECPALPAPRERVADSMRLSMRWAARSRDAFGDRPGHALFGIQQGGLEQDLRAESAEALTAIGFDGYAIGGLAVGEGQDAMFGVLDHAPQMLPADRPRYLMGVGKPDDIVGAVRRGVDMFDCVLPSRSGRTGQALTRRGAVNIKNARHADDPRPLDPDCPCPCCRSYSRAYLHHVFKAGEIISSMLMTWHNLHYYQELMQGLRDAIAEERLDAFAQGFERRRAGGDLDPL

SEQ ID NO: 60411 - protein, 371 aa, unidentified
  source 1..371: note = Rubripirellula obstinata
  REGION 1..371: note = tr|A0A5B1CHB5|A0A5B1CHB5_9PLAN Queuine tRNA-ribosyltransferase OS=Rubripirellula obstinata; OX = 406547 GN=tgt PE=3 SV=1
MTHFSFELTHRDAGSLARRGVFVTPHGPVQTPGFMPVGTQGTVKGVTIDQVAATGAHMILGNTYHLALRPGHETVRKLGGLHGMTRWEGPILTDSGGFQVFSLDAINHVDEEAATFRSHLDGSIVRLTPEHSIEIQESLGSDVAMVLDHVVALPAEKDIVQDAMERSIRWARRCLESATRDDQAKFAIVQGGLDVELRIQCARELAAMDFEGFAVGGLSVGEPPTEMYRITEATTPELPENKPRYLMGVGTPVDLIESVARGIDLFDCVMPTRNGRNGLAFTDSGSIKLRNAVHREDTSPLQESCPCIACRHSRGYLRHLFHAKEMLGPILLSIHNLTYYQQVMAETRAAIEQNRFNQYVAEKKQGWGIDA

SEQ ID NO: 60412 - protein, 391 aa, unidentified
  source 1..391: note = Rubritalea profundi
  REGION 1..391: note = tr|A0A2S7U021|A0A2S7U021_9BACT Queuine tRNA-ribosyltransferase OS=Rubritalea profundi OX=1658618; GN = tgt PE=3 SV=1
MFKLLKTDEKTKARRGELTTAHGVIQTPIFMPVGTQGTVKTLHPDDLVDLGSQIILGNTYHLNLRPGLEVIRAAQGLHKFSSWDEPILTDSGGFQVWSLAKLRKISEKGVEFANHLDGSKMMMTPENSMEIQATLGSDIAMLFDECPPYPCDEKYAEESLALTTRWAKRCKIWHDENIDTVVPWQVDPSQIDDDKKTPVKRQLAFGIVQGSTFAHLRERSAKELIEIGFDGYAVGGISVGEPEHEMIRAIDNAVPHLPEDKPRYAMGLGTPPQMLEMIARGVDMFDCVMPTRVARHGLAFTHDGPIHIKNKEFELDQRPLTETTHPSVRRFTRSYIRHLWRAKEMLALRLLSYHNLHFYLQLMEQAREAIEAGTFSEFKDAFIGRYTANSK

SEQ ID NO: 60413 - protein, 391 aa, Rubritalea squalenifaciens
  REGION 1..391: note = tr|A0A1M6KTX3|A0A1M6KTX3_9BACT Queuine tRNA-ribosyltransferase OS=Rubritalea squalenifaciens DSM 18772 OX=1123071 GN=tgt PE=3 SV=1
MFELIQTDKETKARRGRLTTAHGVIETPIFMPVGTQGTVKTLHPDDLLDLGSQIILGNTYHLNLRPGLDVIRAAKGLHQFSTWDKPILTDSGGFQVWSLAKLRKISEEGVQFANHLDGSKMMLSPETSMEIQATLGSDIAMLFDECPPYPCEEKYAADSLALTTRWAKRCKEWHEENASKIVPWMTEPSLLGESPMPQPRQLAFGIVQGSSYAELREQSAKELIEIGFDGYAVGGISVGEPEHEMIRAIDNAVPHLPADKPRYAMGLGTPPQMLEMIARGVDMFDCVMPTRVARHGLAFTEDGPIHIKNKEFEFDQRPLTEYTHPSVARFSRSYIRHLWRAKEMLALRLLSFHNLHFYLRLMQQSREAIEAGTFAEFKDAFITRYNSHKEQ

SEQ ID NO: 60414 - protein, 376 aa, unidentified
  source 1..376: note = Rubrivirga marina
  REGION 1..376: note = tr|A0A271J6E1|A0A271J6E1_9BACT Queuine tRNA-ribosyltransferase OS=Rubrivirga marina OX=1196024; GN = tgt PE=3 SV=1
MTFELQAECPETGARAGLLHTDHGTVETPMFMPVGTVGSVKAVAPRTLRDDLGVQILLGNTYHLALRPGRDVLRTVGGLHPFMQWDGPILTDSGGFQVFSLADLRKVTEEGVRFRNHLDGQYLTFTPESVVDTQRDIGSDIMMVLDELTPATVDEAEARRANARTVRWAERAFAHYRATEPHYGHHQALFPIVQGAVFPDVRRESAEALLQLDAEGYAIGGLAVGEEAEVMYDTVALTNEVLPQDRPRYLMGVGTPQNLIENVARGVDLFDCVMPTRNARTGTLFTTDGTVNIKNARFKTDTSAIDEALDVYHSRTFSKAYLRHLTKANEPLYMEIASVQNLALYLWTMRSMRAAILEGRFPAFRREWSDRLVQKA

SEQ ID NO: 60415 - protein, 375 aa, unidentified
  source 1..375: note = Rubrivirga sp.
  REGION 1..375: note = tr|A0A271JFJ5|A0A271JFJ5_9BACT Queuine tRNA-ribosyltransferase OS=Rubrivirga sp. SAORIC476; OX = 1961794 GN=tgt PE=3 SV=1
MTFELQAECPETGARAGLLHTDHGTVETPTFQPVGTVGSVKGVAPRTLREIGVQQILANTYHLALRPGREVLRAMGGLHRFMQWDGPILTDSGGFQVFSLAELRKVTEEGVRFQSHLDGTPLHFTPETVVDTQRDIGSDIMMVLDELTPATVDETEARRANGRTLRWAERAFAHYRATEPLYGHHQALFPIVQGATFPAIRRESADALMQLGAEGYAIGGLSVGEAAPVMYEMVEIVNAVLPADRPRYLMGVGTPQNLIENVARGVDLFDCVMPTRNARTGTLFTTDGMVNIKNARWKTEQAPVDAGLDVYHSQTFSKGYLRHLTKANEPLFIEIASVQNLALYLWTMRQMRTAILEGRFPAWRREWADRLARKA

SEQ ID NO: 60416 - protein, 406 aa, unidentified
  source 1..406: note = Rubrivirga sp.
  REGION 1..406: note = tr|A0A2E8PA43|A0A2E8PA43_9BACT Queuine tRNA-ribosyltransferase OS=Rubrivirga sp. OX=1885344; GN = tgt PE=3 SV=1
MGEDRSLPGSQLGRSGVITTPHGQIRTPAFIPVGTKATVKTVLPESMRDLGAQAVLANAYHLYLQPGADIVEAAGGLGAFMNWPGPTFTDSGGFQVLSLGVGFKKVLAMDVSDRTVDDVVAPGKDRLAHVDDDGVTFTSHLDGSRHRFTAEVSMQVQHALGADIIFAFDECTTLMNSRDYQQVAMRRTLEWAKRCIAEHRRITTDRPGRAYQALFGVIQGAQYEDLRRQAASDIAALPFDGFGIGGAIEKERMADIVRWVCEELPEDKPRHLLGIGEPQDFFTAIASGADTFDCVSPARVARNSALYTSRGRFNVTASINRRTFAPIEEGCTCYTCKNYTRAYLHHAFKAKESIAATLATIHNQHFIVNLVDNIRVAIEAGDFHAYREAFVGGYANDGQAGSQAGG

SEQ ID NO: 60417 - protein, 376 aa, Rubrivivax benzoatilyticus
  REGION 1..376: note = tr|F3LMZ2|F3LMZ2_9BURK Queuine tRNA-ribosyltransferase OS=Rubrivivax benzoatilyticus JA2 = ATCC BAA-35 OX=987059 GN=tgt PE=3 SV=1
MLRYELLKTEGHARRGRLTLNHGVVETPIFMPVGTYGTVKGVLPRSLEEAGAQIILGNTFHLWMRPGLDVLQSFGGLHRFEGWNKPILTDSGGFQVWSLGEMRKISEEGVKFASPVNGDKLFLTPEVSMQIQTVLNSDIVMQFDECTPYETKGQLTTEAQARASMELSRRWAKRCIAEFERLENPNALFGIVQGGMFEHLRQESLDALVEMDLPGYAIGGVSVGEPKDEMLRIMAHTPHRLPAHKPRYLMGVGTPEDLVDGVACGVDMFDCVMPTRNARNGHLFTRFGDLKIRNAKHRASDRPVDETCSCYCCRNFSRAYLHHLDRCGEMLGPMLASIHNIHYYLNLMREVREALDEGRFEAFRQQFKADRSRGIG

SEQ ID NO: 60418 - protein, 376 aa, Rubrivivax gelatinosus
  REGION 1..376: note = tr|A0A4R2M8E4|A0A4R2M8E4_RUBGE Queuine tRNA-ribosyltransferase OS=Rubrivivax gelatinosus OX=28068; GN = tgt PE=3 SV=1
MLRYELLKTEGHARRGRLTLNHGVVETPIFMPVGTYGTVKGVLPRSLEEAGAQIILGNTFHPWMRPGLDVLQSFGGLHRFEGWNKPILTDSGGFQVWSLGEMRKISEEGVKFASPVNGDKLFLTPEVSMQIQTVLNSDIVMQFDECTPYETKGVLTTEAQARASMELSRRWAKRCVAEFNRLENPNALFGIVQGGMFEHLRQESLDALVEMDLPGYAIGGVSVGEPKDEMLRIMAHTPHRLPAHKPRYLMGVGTPEDLVEGVACGVDMFDCVMPTRNARNGHLFTRFGDLKIRNAKHRASERPVDETCSCYCCRNFSRAYLHHLDRCGEMLGPMLASIHNIHYYLNLMREVREALDEGRFEAFRQQFKADRARGIG

SEQ ID NO: 60419 - protein, 376 aa, Rubrivivax gelatinosus
  REGION 1..376: note = tr|I0HKA8|I0HKA8_RUBGI Queuine tRNA-ribosyltransferase OS=Rubrivivax gelatinosus (strain NBRC 100245 / IL144) OX=983917 GN=tgt PE=3 SV=1
MLRYELLKTEGHARRGRLTLNHGVVETPIFMPVGTYGTVKGVLPRSLEEAGAQIILGNTFHLWMRPGLDVLQSFGGLHRFEGWDKPILTDSGGFQVWSLGEMRKISEEGVKFASPVNGDKLFLTPEVSMQIQTVLNSDIVMQFDECTPYETKGRITTEAEARASMELSRRWAKRCIAEFARLENPNALFGIVQGGMFEHLRQESLEALVEMDLPGYAIGGVSVGEPKDEMLRIMAHTPHRLPAHKPRYLMGVGTPEDLVEGVACGVDMFDCVMPTRNARNGHLFTRFGDLKIRNAKHRASDRPVDETCSCYCCRNFSRAYLHHLDRCGEMLGPMLASIHNLHYYLNLMREVREALDEGRFEAFRQQFRADRARGVG

SEQ ID NO: 60420 - protein, 402 aa, Rubrivivax sp.
  REGION 1..402: note = tr|A0A519ZT09|A0A519ZT09_9BURK Queuine tRNA-ribosyltransferase OS=Rubrivivax sp. OX=50259 GN=tgt; PE = 3 SV=1
MLSFDLLKTEGQARRGRLTLNHGVVETPIFMPVGTYGTVKGVMPQSLEDMGAQIILGNTFHLWMRPGQDVMTQFGGLHRFENWHKPILTDSGGFQVWSLGEMRKISEEGVRFASPVNGDKLFLTPEVSMQIQTTLNSDIVMQFDECTPYWKGDKSLGHITTEKEARYSMELSLRWARRCIAEFDKLQNPNALFGIVQGGMFNHLREESLAGLVDLNLPGYAIGGVSVGEPKDEMMRIMDFISPKLPAHKPRYLMGVGTPEDLVAGVAAGVDMFDCVMPTRNARNGHLFTRFGDLRLRNARNKTDERPIDETCTCYTCKGLPAAYGGGTAGNAAVPSGAVSGGFSRAYLHHLDRCNEMLGPMLTTIHNLHYYLNLMREVREALDAGRFGEFRQQFAADRARGV

SEQ ID NO: 60421 - protein, 375 aa, Rubrivivax sp.
  REGION 1..375: note = tr|A0A519IKF1|A0A519IKF1_9BURK Queuine tRNA-ribosyltransferase OS=Rubrivivax sp. OX=50259 GN=tgt; PE = 3 SV=1
MLKFDLLKTEGRARRGTLTLNHGVVQTPIFMPVGTYGTVKGVTPRSLEEMGAQIILGNTFHLWMRPGLDVVTQFGGLHRFESWSKPILTDSGGFQVWSLGAMRKISEEGVKFASPVNGDKLFLTPEVSMQIQTVLNSDIVMQFDECTPYESKGVLTTEREAKQSMELSLRWARRCIAEFSRLENPNALFGIVQGGMFTNLRDASLAGLVDLDLPGYAIGGLSVGEPKAEMQRILEHTGHQLPANKPRYLMGVGTPEDLVEGVSQGIDMFDCVMPTRNARNGHLFTRFGDLRLRNARYKADEKPVDQTCGCECCKGFSRAYLHHLDRCGEMLGPMLTSVHNLHYYLNLMQEMRDALDAGRFETWRAQFAADRSRGV

SEQ ID NO: 60422 - protein, 386 aa, Rubrobacter radiotolerans
  REGION 1..386: note = tr|A0A023X3N6|A0A023X3N6_9ACTN Queuine tRNA-ribosyltransferase OS=Rubrobacter radiotolerans; OX = 42256 GN=tgt PE=3 SV=1
MKTPAQPTVEPPVGISIEGRDGEARAGTLRTPHGSVPTPTFMPVGTKGTVKGLDRGELREIGAGVVLGNTYHLYFRPGAQIVREAGGLHGFTGWDGPMLTDSGGYQVFSLAKTREIGERGVRFASVYDGSKHEFTPERATRVQEDLGADIAMVLDECPPANASREYHAASLERTARWAERCRETHGRSDQALFGIVQGGLFPDLRKRSLRLTTELDFPGYAVGGLSVGESREEMLGTLGLTAPLLPPEKPRYFMGIGDPVGILEVIGLGVDMFDCVLPTRLARHGSALTVNGRVNLRNARFRRDFGPIDEECDCRTCAGYSRAYLAHLVREDELLGHRLVTLHNVRFVTKLCEEARRHILDRDFYGWAGWWTERYTGGSAGKVEKG

SEQ ID NO: 60423 - protein, 364 aa, Rubrobacter taiwanensis
  REGION 1..364: note = tr|A0A4R1BHE8|A0A4R1BHE8_9ACTN Queuine tRNA-ribosyltransferase OS=Rubrobacter taiwanensis; OX = 185139 GN=tgt PE=3 SV=1
MEVVATDGEARAGVLRTPRGEVETPTFMPVGTKATVKGLTMEEVRRTGAGIVLGNTYHLYFRPGVEVVQEAGGLHAFSGWKGPMLTDSGGFQVFSLAKTRRISEEGVAFASIYDGSPHFFTPELVVEVQEALGADIAMVLDECPPHDADYGYHAESLRRTARWAERCRTAHTREDQALFGIVQGGLHRELRLESLKRTVELDFPGYAIGGLSVGEERGAMLEALAYVASGLPADRPRYFMGIGDPVGVVEVIGLGVDMFDCVLPTRLARHGSALTAAGRLNLKNARFRRDFLPLDPECGCEVCAEYTRAYLAHLVREDELLGHRLVTFHNVYFMEELCRRARAAILEGRYARWAAEWRGRYAGS

SEQ ID NO: 60424 - protein, 365 aa, Rubrobacter xylanophilus
  REGION 1..365: note = tr|Q1AWD4|Q1AWD4_RUBXD Queuine tRNA-ribosyltransferase OS=Rubrobacter xylanophilus (strain DSM 9941 / NBRC 16129) OX=266117 GN=tgt PE=3 SV=1
MEAVCGAARAGLLRTPHGAVETPTFMPVGTKGAVKGLSPRDLAEIGAGIVLGNTYHLYLRPGAEVVREAGGLHEFTGWSGPMLTDSGGYQVFSLARIRRLSEEGVRFTSVYDGSVHAFTPELAVRVQEALGADVAMVLDECPPAEADRAYHVSSLRRTARWAARCKKAHSRPDQALFGIVQGGLYPDLREESLRRTLELDFDGYAVGGLSVGEPRERMLEILSLLTPRLPEDRPRYFMGIGDPVGILEVIALGVDMFDCVLPTRLARHGTALTSEGRLNLKNARYRRDFGPLDPGCPCEACAGFSRAYLAHLLRENELLGHRLVSLHNVRFVTELCRSARREILAGTYAAWMRGWISRYTAARSG

SEQ ID NO: 60425 - protein, 332 aa, Rubrobacter xylanophilus
  REGION 1..332: note = tr|A0A510HFS7|A0A510HFS7_9ACTN Queuine tRNA-ribosyltransferase OS=Rubrobacter xylanophilus; OX = 49319 GN=tgt PE=3 SV=1
MKGLSPRDLAEVGVGIVLGNTYHLYLRPGPEIVREAGGLHGFTGWRGPMLTDSGGYQVFSLAGIRRLSEEGVEFTSVYDGSVHAFTPELAVRVQEALGADVAMVLDECPPAEADRAYHAASLRRTARWAARCKKAHSRPDQALFGIVQGGLYPELREESLQRTLELDFDGYAVGGLSVGEPRERMLEVLSMISPRLPQDRPRYFMGIGDPVGILEVISLGVDMFDCVLPTRLARHGTALTSEGRLNLKNARYRRDLGPLDPECPCEACTGFSRAYLSHLMRENELLGHRLVSLHNVCFVTRLCREARRRILSGTYGEWMRDWISRYTAARSG

SEQ ID NO: 60426 - protein, 376 aa, unidentified
  source 1..376: note = Ruegeria arenilitoris
  REGION 1..376: note = tr|A0A238JUC1|A0A238JUC1_9RHOB Queuine tRNA-ribosyltransferase OS=Ruegeria arenilitoris; OX = 1173585 GN=tgt PE=3 SV=1
MTQRFSFELKATDGKARTGVIHTPRGEVRTPAFMPVGTAATVKAMMPESVRATGADILLGNTYHLMLRPTAERIDRLGGLHKFMNWERPILTDSGGFQVMSLAGLRKLTEKGVTFKSHIDGSKHELTPERSMEIQRLLGSDIVMCFDECPALPADRDRIAESMRLSMRWAERSREAFGDRPGHALFGIMQGGLERDLREESAEALKAIGFEGYAVGGLAVGEGQEAMFDCLNYAPDFLPTDKPRYLMGVGKPDDIVGAVARGIDMMDCVLPSRSGRTGQVFTRRGVVNIKNARHADDPRPLDEQCTCPACSNYSRAYLHHVFRANEMISGMLLTWHNLHYFQEIMQGMRDAIAAGAFEAWQAEFHAQRAQGDNEPL

SEQ ID NO: 60427 - protein, 376 aa, Ruegeria atlantica
  REGION 1..376: note = tr|A0A0P1E130|A0A0P1E130_9RHOB Queuine tRNA-ribosyltransferase OS=Ruegeria atlantica OX=81569; GN = tgt PE=3 SV=1
MTDRFSFDLKATDGKARTGVINTPRGEVRTPAFMPVGTAATVKAMMPESVRATGADILLGNTYHLMLRPTAERIDRLGGLHKFMNWERPILTDSGGFQVMSLAGLRKLTEKGVTFKSHIDGSRHELTPERSMEIQRLLGSDIVMCFDECPALPADRNRIAESMRLSMRWAERSRDTFGDRPGHALFGIQQGGLEQDFREESAEALKEIGFEGYAVGGLAVGEGQQAMFDVLDFAPDMLPVDKPRYLMGVGKPDDIVGAVARGIDMMDCVLPSRSGRTGQVFTRYGVVNIKNARHSDDPRPLDEHCTCPACSNYSRAYLHHVFRSNEMISGMLLTWHNLHYFQEIMQGMRDAIAAGTFDAWQVEFHAQRAQGDIEPV

SEQ ID NO: 60428 - protein, 376 aa, Ruegeria atlantica
  REGION 1..376: note = tr|A0A0P1F4Q0|A0A0P1F4Q0_9RHOB Queuine tRNA-ribosyltransferase OS=Ruegeria atlantica OX=81569; GN = tgt PE=3 SV=1
MTDRFSFDLKATDGKARTGVIHTPRGEVRTPAFMPVGTAATVKAMMPESVRATGADILLGNTYHLMLRPTAERIDRLGGLHKFMNWERPILTDSGGFQVMSLAGLRKLTEKGVTFKSHIDGSRHELTPERSMEIQRLLGSDIVMCFDECPALPADRDRIAESMRLSMRWAERSRDAFGDRPGHALFGIQQGGLEQDFREESAEALKEIGFEGYAVGGLAVGEGQEAMFDVLDFAPDMLPVDKPRYLMGVGKPDDIVGAVARGIDMMDCVLPSRSGRTGQVFTRYGVVNIKNARHSDDPRPLDEHCTCPACTNYSRAYLHHVFRSNEMISGMLLTWHNLHYFQEIMQGMRDAIAAGTFEAWQVEFHAQRAQGDIEPV

SEQ ID NO: 60429 - protein, 376 aa, unidentified
  source 1..376: note = Ruegeria conchae
  REGION 1..376: note = tr|A0A497ZM16|A0A497ZM16_9RHOB Queuine tRNA-ribosyltransferase OS=Ruegeria conchae OX=981384; GN = tgt PE=3 SV=1
MTDRFSFDLKATDGKARTGVINTPRGEVRTPAFMPVGTAATVKAMMPESVRATGADILLGNTYHLMLRPTAERIDRLGGLHKFMNWKRPILTDSGGFQVMSLAGLRKLTEKGVTFKSHIDGSKHELTPERSMEIQRLLGSDIVMCFDECPALPSDRDRIAESMRLSMRWAERSRDAFGDRPGHALFGIMQGGLEPDLREESAEALKQIGFEGYAVGGLAVGEGQEAMFSCLDYAPEFLPKDKPRYLMGVGKPDDIVGAVARGIDMMDCVLPSRSGRTGQVFTRYSVVNIKNARHADDPRPLDEHCTCPACSNYSRAYLHHVFRSNEMISGMLLTWHNLHYFQEIMQGMREAISKGTFAQWQAQFHAQREQGDIEPL

SEQ ID NO: 60430 - protein, 376 aa, unidentified
  source 1..376: note = Ruegeria denitrificans
  REGION 1..376: note = tr|A0A0N7M9A6|A0A0N7M9A6_9RHOB Queuine tRNA-ribosyltransferase OS=Ruegeria denitrificans; OX = 1715692 GN=tgt PE=3 SV=1
MTERFSFDLKATDGKARTGVISTPRGEVRTPAFMPVGTAATVKAMMPESVRATGADILLGNTYHLMLRPTAERIDRLGGLHKFMNWDRPILTDSGGFQVMSLAGLRKLTEKGVTFKSHVDGSKHELTPERSMEIQRLLGSDIVMCFDECPALPADRDRIAESMRLSMRWAERSREAFGDRPGHALFGIMQGGLEQDLREESAEALKAIGFEGYAVGGLAVGEGQEAMFDCLDYAPDFLPTDTPRYLMGVGKPDDIVGAVARGIDMMDCVLPSRSGRTGQVFTRYGVVNIKNARHADDPRPLDEACSCPACLNYSRAYLHHVFRSNEMISGMLLTWHNLHYFQEIMQGMRDAIAAGTFAAWQAEFHAQRAQGDIEPL

SEQ ID NO: 60431 - protein, 376 aa, Ruegeria faecimaris
  REGION 1..376: note = tr|A0A521BAT6|A0A521BAT6_9RHOB Queuine tRNA-ribosyltransferase OS=Ruegeria faecimaris OX=686389; GN = tgt PE=3 SV=1
MTDRFSFDLKATDGKARAGVIHTPRGEVRTPAFMPVGTAATVKAMMPESVRATGADILLGNTYHLMLRPTAERIDRLGGLHKFMNWDRPILTDSGGFQVMSLAGLRKLTEKGVTFKSHVDGSKHELTPERSMEIQRLLGSDIVMCFDECPALPADRDRIAESMRLSMRWADRSRQAFGDRPGHALFGIMQGGLEQDLREESAEALKAIGFEGYAVGGLAVGEGQEAMFGCLDYAPDFLPADRPRYLMGVGKPDDIVGAVARGIDMMDCVLPSRSGRTGQVFTRYGVVNIKNARHADDPRPLDEACSCPACSNYSRAYLHHVFRSNEMISGMLLTWHNLHYFQEIMQGMRDAIAAGTFDAWQATFHAQRAQGDIEQI

SEQ ID NO: 60432 - protein, 376 aa, Ruegeria halocynthiae
  REGION 1..376: note = tr|A0A1H2TS84|A0A1H2TS84_9RHOB Queuine tRNA-ribosyltransferase OS=Ruegeria halocynthiae OX=985054; GN = tgt PE=3 SV=1
MTDRFSFDLKATDGKARTGVINTPRGEVRTPAFMPVGTAATVKAMMPESVRATGADILLGNTYHLMLRPTAERIDRLGGLHKFMNWERPILTDSGGFQVMSLAGLRKLTEKGVTFKSHIDGSRHELTPERSMEIQRLLGSDIVMCFDECPALPADRERIAESMRLSMRWADRSRDAFGDRPGHALFGIMQGGLEQDLREESAEALKQIGFEGYAVGGLAVGEGQEAMLDCLDYAPDFLPEDKPRYLMGVGKPDDIVGAVARGIDMMDCVLPSRSGRTGQVFTRYGVINIKNARHADDPRPLDEQCSCPACSSYSRAYLHHVFRSNEMISGMLLTWHNLHYFQEIMHGMRDAIAGGAFAQWQARFQAQREQGDIEPL

SEQ ID NO: 60433 - protein, 376 aa, unidentified
  source 1..376: note = Ruegeria intermedia
  REGION 1..376: note = tr|A0A1M4VKY3|A0A1M4VKY3_9RHOB Queuine tRNA-ribosyltransferase OS=Ruegeria intermedia OX=996115; GN = tgt PE=3 SV=1
MTQRFSFELKATDGKARTGVIHTPRGEVRTPAFMPVGTAATVKAMMPESVRATGADILLGNTYHLMLRPTAERIDRLGGLHKFMNWERPILTDSGGFQVMSLAGLRKLTEKGVTFKSHIDGSKHELTPERSMEIQRLLGSDIVMCFDECPALPADRDRIAESMRLSMRWAERSREAFGDRPGHALFGIMQGGLERDLREESAEALKAIGFDGYAVGGLAVGEGQEAMFDCLDYAPDFLPTDKPRYLMGVGKPDDIVGAVARGIDMMDCVLPSRSGRTGQVFTRRGVVNIKNARHADDPRPLDEQCSCPACSNYSRAYLHHVFRANEMISGMLLTWHNLHYFQEIMQGMRDAIAAGTFEAWQAEFHAQRAQGDIEPL

SEQ ID NO: 60434 - protein, 394 aa, Ruegeria lacuscaerulensis
  REGION 1..394: note = tr|D0CRL1|D0CRL1_RUELI Queuine tRNA-ribosyltransferase OS=Ruegeria lacuscaerulensis (strain DSM 11314 / KCTC 2953 / ITI-1157) OX=644107 GN=tgt; PE = 3 SV=1
MRAPIGQSLPGSATRGDDMTERFSFELKATDGKARTGVIHTPRGEVRTPAFMPVGTAATVKAMMPESVRATGADILLGNTYHLMLRPTAERIDRLGGLHKFMNWDRPILTDSGGFQVMSLAGLRKLTEKGVTFKSHIDGSKHELTPERSMEIQRLLGSDIVMCFDECPALPADRDRIAESMRLSMRWAERSREAFGDRPGHALFGIMQGGLERDLREESAEALKAIGFDGYAVGGLAVGEGQEAMFGCLDYAPDFLPTDKPRYLMGVGKPDDIVGAVARGIDMMDCVLPSRSGRTGQVFTRRGVVNIKNARHADDPRPLDEQCTCPACSNYSRAYLHHVFRANEMISGMLLTWHNLHYFQEIMQGMRDAIAAGTFEAWQAEFHAQRAQGDIDPI

SEQ ID NO: 60435 - protein, 376 aa, unidentified
  source 1..376: note = Ruegeria litorea
  REGION 1..376: note = tr|A0A1Y5S905|A0A1Y5S905_9RHOB Queuine tRNA-ribosyltransferase OS=Ruegeria litorea R37 OX=1200284; GN = tgt PE=3 SV=1
MTERFSFDLKATDGKARTGVINTPRGEIRTPAFMPVGTAATVKAMMPESVRATGADILLGNTYHLMLRPTAERIDRLGGLHKFMNWDRPILTDSGGFQVMSLAGLRKLTEKGVTFKSHVDGSKHELTPERSMEIQRLLGSDIVMCFDECPALPADRDRIAESMRLSMRWAARSKEAFGDRPGYALFGIQQGGLETDFREESSEALKEIGFDGYAVGGLAVGEGQEAMFGCLDHAPDHLPQDKPRYLMGVGKPDDIVGAVARGIDMMDCVLPSRSGRTGQVFTRHGVVNIKNARHADDPRPLDEQCTCPACANYSRAYLHHVYRSNEMISGMLLTWHNLHYFQEIMAGMRDAIAAGTFEAWQAEFHAQRAQGDIEPL

SEQ ID NO: 60436 - protein, 376 aa, Ruegeria marina
  REGION 1..376: note = tr|A0A1G6QD84|A0A1G6QD84_9RHOB Queuine tRNA-ribosyltransferase OS=Ruegeria marina OX=639004; GN = tgt PE=3 SV=1
MTERFSFDLQATDGKARTGLIHTPRGAVRTPAFMPVGTAATVKAMMPESVRATGADILLGNTYHLMLRPTAERIDRLGGLHKFMNWDRPILTDSGGFQVMSLAGLRKLTEKGVTFKSHIDGSKHELTPERSMEIQRLLGSDIVMCFDECPALPADRDRIAESMRLSMRWAERSRDAFGDRPGHALFGIMQGGLEQDLREESAAALKAIGFEGYAVGGLAVGEGQAAMFDCLDYAPGFLPEDKPRYLMGVGKPDDIVGAVKRGIDMMDCVLPSRSGRTGQVFTRHGVLNIKNARHMDDPRPLDEECTCPACRGYSRAYLHHVFRSQEIISSMLLTWHNLHYFQEIMAGMRDAIAAGRFVEWEADFHARRAVGDIEPL

SEQ ID NO: 60437 - protein, 376 aa, unidentified
  source 1..376: note = Ruegeria marisrubri
  REGION 1..376: note = tr|A0A0X3U5S2|A0A0X3U5S2_9RHOB Queuine tRNA-ribosyltransferase OS=Ruegeria marisrubri OX=1685379; GN = tgt PE=3 SV=1
MTQRFSFELKATDGKARTGVINTPRGEVRTPAFMPVGTAGTVKAMMPESVRATGADILLGNTYHLMLRPTAERIHRLGGLHKFMNWHRPILTDSGGFQVMSLASLRKLTEKGVTFKSHIDGSKHELTPERSMEIQRLLGSDIVMCFDECPALPADRDRIATSMRLSMRWAARSRDAFGDRPGHALFGIQQGGLERDFREESAEALKQIGFDGYAVGGLAVGEGQEAMFGVLDFAPDMLPVDKPRYLMGVGKPDDIVGAVARGIDMMDCVLPSRSGRTGQAFTRRGVVNIKNARHADDPRPLDEHCTCPACSNYCRAYLHHVFRANEMISGMLLTWHNLHYFQEIMQGMRDAISAGTFETWQAEFHAQRAQGDIEPL

SEQ ID NO: 60438 - protein, 376 aa, unidentified
  source 1..376: note = Ruegeria mediterranea
  REGION 1..376: note = tr|A0A2R8C421|A0A2R8C421_9RHOB Queuine tRNA-ribosyltransferase OS=Ruegeria mediterranea M17; OX = 1200281 GN=tgt PE=3 SV=1
MTERFSFELKATDGKARTGVINTPRGEIRTPAFMPVGTAATVKAMMPESVRATGADILLGNTYHLMLRPTAERIDRLGGLHKFMNWDRPILTDSGGFQVMSLAGLRKLTEKGVTFKSHIDGSKHELTPERSMEIQKLLGSDIVMCFDECPALPADRDRIAESMRLSMRWAARSKEAFGDRPGHALFGIQQGGLEADFREESAEALKEIGFDGYAVGGLAVGEGQEAMFGCLDHAPDHLPKDKPRYLMGVGKPDDIVGAVARGIDMMDCVLPSRSGRTGQVFTRRGVVNIKNARHADDPRPLDEACSCPACSNYSRAYLHHVYRSNEMISGMLLTWHNLHYFQEIMQGMRDAIGAGTFEDWQAEFHAQRAQGDIEPL

SEQ ID NO: 60439 - protein, 376 aa, unidentified
  source 1..376: note = Ruegeria meonggei
  REGION 1..376: note = tr|A0A1X7A1P1|A0A1X7A1P1_9RHOB Queuine tRNA-ribosyltransferase OS=Ruegeria meonggei OX=1446476; GN = tgt PE=3 SV=1
MTNRFSFDLKATDGKARTGVINTPRGEVRTPAFMPVGTAATVKAMMPESVRATGADILLGNTYHLMLRPTAERIDRLGGLHKFMNWDRPILTDSGGFQVMSLAGLRKLTEKGVTFKSHIDGSKHELTPERSMEIQRLLGSDIVMCFDECPALPADRDRIAESMRLSMRWADRSRQAFGDRPGYALFGIMQGGLEQDLREESAQALTQIGFEGYAVGGLAVGEGQEAMFGCLDYAPDFLPVDKPRYLMGVGKPDDIVGAVARGIDMMDCVLPSRSGRTGQVFTRNGVVNIKNARHADDPRPLDESCSCPACTKYSRAYLHHVFRANEMISGMLLTWHNLHYFQEIMQGMRDAIATGTFQSWQSEFHAQRAQGDIEPI

SEQ ID NO: 60440 - protein, 376 aa, Ruegeria pomeroyi
  REGION 1..376: note = sp|Q5LQ80|TGT_RUEPO Queuine tRNA-ribosyltransferase; OS = Ruegeria pomeroyi (strain ATCC 700808 / DSM 15171 / DSS-3) OX=246200 GN=tgt PE=3 SV=1
MSERFSFDLHASDGKARTGVIHTPRGGVRTPAFMPVGTAATVKAMMPESVRATGADILLGNTYHLMLRPTAERIDRLGGLHRFMNWDRPILTDSGGFQVMSLAGLRKLTEKGVTFKSHIDGSKHELTPERSMEIQRLLGSDIVMCFDECPALPADRDRIAESMRLSMRWAERSREAFGDRPGHALFGIMQGGLEQDLREESAQALRSVGFDGYAVGGLAVGEGQAAMFDCLDYAPGFLPEDKPRYLMGVGKPDDIVGAVKRGIDMMDCVLPSRSGRTGQVFTRHGVLNIKNARHMDDPRPLDEACTCPACRNYSRAYLHHVFRSQEIISSMLLTWHNLHYFQEIMQGMREAIAGGTFEAWEAAFHAGRAQGDIEPL

SEQ ID NO: 60441 - protein, 376 aa, unidentified
  source 1..376: note = Ruegeria profundi
  REGION 1..376: note = tr|A0A0X3U1U4|A0A0X3U1U4_9RHOB Queuine tRNA-ribosyltransferase OS=Ruegeria profundi OX=1685378; GN = tgt PE=3 SV=1
MTKRFSFDLKATDGKARTGVINTPRGEVRTPAFMPVGTAATVKAMMPESVRATGADILLGNTYHLMLRPTAERIDRLGGLHKFMNWERPILTDSGGFQVMSLAGLRKLTEKGVTFKSHIDGSKHELTPERSIEIQRLLGSDIVMCFDECPALPADRERIAESMRLSMRWAERSREAFGDRPGHALFGIMQGGLEQDLREESAEALRKIGFEGYAVGGLAVGEGQEAMFGCLDYAPDFLPVDKPRYLMGVGKPDDIVGAVARGIDMMDCVLPSRSGRTGQAFTRHGVVNIKNARHADDPRPLDENCSCPACSNYSRAYLHHVFRSNEMISGMLLTWHNLHYFQEIMQGMRDAIAAGTFEAWQAEFHAQRAQGDIEPL

SEQ ID NO: 60442 - protein, 376 aa, Ruegeria sp.
  REGION 1..376: note = tr|A0A366X8R5|A0A366X8R5_9RHOB Queuine tRNA-ribosyltransferase OS=Ruegeria sp. A3M17 OX=2267229; GN = tgt PE=3 SV=1
MTDRFSFDLKATDGKARTGVINTPRGEVRTPAFMPVGTAATVKAMMPESVRATGADILLGNTYHLMLRPTAERIDRLGGLHKFMNWERPILTDSGGFQVMSLAGLRKLTEKGVTFKSHIDGSRHELTPERSMEIQRLLGSDIVMCFDECPALPADRDRIAESMRLSMRWAERSRDAFGDRPGHALFGIQQGGLEQDFREESAEALKEIGFEGYAVGGLAVGEGQEAMFDVLDFAPDMLPVDKPRYLMGVGKPDDIVGAVARGIDMMDCVLPSRSGRTGQVFTRYGVVNIKNARHSDDPRPLDEHCTCPACSNYSRAYLHHVFRSNEMISGMLLTWHNLHYFQEIMQGMRDAIAAGTFDAWQVEFHAQRAQGDIEPV

SEQ ID NO: 60443 - protein, 376 aa, Ruegeria sp.
  REGION 1..376: note = sp|Q1GIL3|TGT_RUEST Queuine tRNA-ribosyltransferase; OS = Ruegeria sp. (strain TM1040) OX=292414 GN=tgt PE=3 SV=1
MAELFNFEMTATDGKARTGVIHTPRGEIRTPAFMPVGTAATVKAMMPESVRATGADILLGNTYHLMLRPTAERIDRLGGLHKFMNWDRPILTDSGGFQVMSLAGLRKLTEKGVTFKSHIDGSRHELTPERSMEIQRLLGSDIVMCFDECPALPADRDRIAESMRLSMRWAERSREAFGDRPGHALFGIQQGGLEQDFREESAEALTKIGFDGYAVGGLAVGEGQEAMFGCLDYAPDMLPVDKPRYLMGVGKPDDIVGAVSRGIDMMDCVLPSRSGRTGQAFTRHGVVNIKNARHQDDPRPLDENCSCPACSNYSRAYLHHVFRSNEMISGMLLTWHNLHYFQDIMAGMRESIAAGTFEAWQKTFHETRAQGDIEPL

SEQ ID NO: 60444 - protein, 376 aa, unidentified
  source 1..376: note = Rufibacter immobilis
  REGION 1..376: note = tr|A0A3M9MW74|A0A3M9MW74_9BACT Queuine tRNA-ribosyltransferase OS=Rufibacter immobilis OX=1348778; GN = tgt PE=3 SV=1
MTFDLVAQDPASKARAGVLTTAHGTIQTPIFMPVGTAGTVKAVHQRELKEDIKAQIILGNTYHLYLRPGLDVLEKAGGLHKFNGWDRPILTDSGGYQVFSLSGTRKIVEEGVKFRSHIDGSRHLFTPENVMDTQRVIGADIIMAFDECTPYPCDYHYAKNSMERTHRWLQRCIDRFDSTEGKYGYEQTLFPIVQGSTYKDLRTQSAETIASKNRPGNAIGGLSVGEPAEMMYEMTELVCDILPSDKPRYLMGVGTPANILENIALGVDMFDCVLPTRNARNGMLFTTQGIINIRNERWKEDYSPIDAELGGYVSTFYSKAYLRHLMHATEMLGAQIASVHNLTFYLWLVGQAREQILAGTFRPWKDQMVKKLMTRL

SEQ ID NO: 60445 - protein, 376 aa, unidentified
  source 1..376: note = Rufibacter sp.
  REGION 1..376: note = tr|A0A0H4VRQ1|A0A0H4VRQ1_9BACT Queuine tRNA-ribosyltransferase OS=Rufibacter sp. DG31D OX=1379910; GN = tgt PE=3 SV=1
MTFDLVAKDPASKARAGVLTTAHGNIQTPIFMPVGTAGTVKAVHQRELKEDVKAQIILGNTYHLYLRPGLGVLEKAGGLHKFNGWDFPILTDSGGYQVFSLSGTRKIIEEGVKFRSHIDGSTHLFTPENVMDTQRTIGADIIMAFDECTPYPCDYHYAKNSMDRTHRWLQRCIDRFDTTEGKYGYEQTLFPIVQGSTYKDLRIQSAEMIASKNRPGNAIGGLSVGEPAEMMYEMTELVCDILPADKPRYLMGVGTPANILENIALGVDMFDCVLPTRNARNGMLFTTQGIINIRNERWKEDFSPIDSELGGYASTFYSKAYLRHLMHATEMLGAQIASVHNITFYLWLVGQAREQIIAGTFATWKDQMVKKLMTRL

SEQ ID NO: 60446 - protein, 376 aa, unidentified
  source 1..376: note = Rufibacter sp.
  REGION 1..376: note = tr|A0A127AZB6|A0A127AZB6_9BACT Queuine tRNA-ribosyltransferase OS=Rufibacter sp. DG15C OX=1379909; GN = tgt PE=3 SV=1
MTFDLVAKDPASKARAGELTTAHGTIQTPIFMPVGTAGTVKAVHQRELKEDVKAQIILGNTYHLYLRPGLNVLEKAGGLHKFNGWDRPILTDSGGYQVFSLSGTRKIIEDGVKFRSHIDGSSHLFTPENVMDTQRTIGADIIMAFDECTPYPCDYNYAKNSMDRTHRWLQRCIDRFDSTEPKYGYEQTLFPIVQGSTYKDLRIQSAEMIASKNRPGNAIGGLSVGEPAEMMYEMTELVCDILPADKPRYLMGVGTPANILENIALGVDMFDCVLPTRNARNGMLFTTQGIINIRNERWKEDFSPIDAELGGYASTFYSKAYLRHLMHATEMLGAQIASVHNLTFYLWLVGQAREQIIAGTFASWKDVMVKKLMTRL

SEQ ID NO: 60447 - protein, 376 aa, unidentified
  source 1..376: note = Rufibacter tibetensis
  REGION 1..376: note = tr|A0A0P0CV98|A0A0P0CV98_9BACT Queuine tRNA-ribosyltransferase OS=Rufibacter tibetensis OX=512763; GN = tgt PE=3 SV=1
MTFDLVANDPASKARAGVLTTAHGTIQTPIFMPVGTAGTVKAVHQRELKEDVKAQIILGNTYHLYLRPGLNVLEKAGGLHKFNGWDKPILTDSGGYQVFSLSGTRKIIEDGVKFRSHIDGSSHLFTPENVMDTQRTIGADIIMAFDECTPYPCDYNYARNSMERTHRWLQRCIDRFDSTEGKYSYEQTLFPIVQGSTYKDLRIQSAETIASKNRPGNAIGGLSVGEPAEMMYEMTELVCDILPTDKPRYLMGVGTPANILENIALGVDMFDCVLPTRNARNGMLFTTQGIINIRNERWKEDYSPIDAELGGYVSTFHSKAYLRHLMHATEMLGAQIASVHNLTFYLWLVSQAREQILAGTFRTWKDQMVKKLMTRL

SEQ ID NO: 60448 - protein, 379 aa, Rugamonas rubra
  REGION 1..379: note = tr|A0A1I4PXA3|A0A1I4PXA3_9GAMM Queuine tRNA-ribosyltransferase OS=Rugamonas rubra OX=758825; GN = tgt PE=3 SV=1
MLEFKLIKTDSSGLTKARRGTVKLNHGEVQTPIFMPVGTYGSVKAMSPLELKEIKAEIILGNTFHLWLRPGNDVIAKFGGLHDFMGWDKPILTDSGGFQVFSLGAMRKITEEGVHFNSPINGDKLFLSPEVSMQIQRVLNSDIVMQFDECTPYEIDGRPATLDEAAKSMRMSLRWAQRSHDEFHRGGNPNALFGIVQGGMFENLRDESLAQLEEIDFPGLAIGGLSVGEPKEDMMRMLAHVGPRLPANKPHYLMGVGTPEDLVAGVSNGIDMFDCVMPTRNARNGWIFTRYGDIKIKNARYKEEKAPLDESCACYACRNFSRAYLHHLNRTQEILGARLNTIHNLHYYLDIMRQMREALDEDRFHAWTLQFHADRARGV

SEQ ID NO: 60449 - protein, 370 aa, unidentified
  source 1..370: note = Rugosibacter aromaticivorans
  REGION 1..370: note = tr|A0A0C5JAK0|A0A0C5JAK0_9RHOO Queuine tRNA-ribosyltransferase OS=Rugosibacter aromaticivorans; OX = 1565605 GN=tgt PE=3 SV=1
MNFELLAQDGAARRGRLTLAHGVVETPVFMPVGTYGTVKAMAPDELVGMGATVVLGNTFHLWLRPGLEVIMAHRGLHRFMAWDRPILTDSGGFQVFSLGELRKISEEGVRFASPINGDRLFLTPEISMQIQHVLNSDIVMIFDECTPYPATLEQAAQSMRLSLRWARRSRDEHDRLNNANALFGIVQGGMHEALREESLAGLTEINFDGFAIGGLSVGEPKEEFSRILVHTTPQLPHDKPRYLMGVGTPEDLVFAVGQGIDMFDCVMPTRNARNGWLFTRRGDIRIKNAQYRADTQPLDEACGCYTCRHFTRAYLHHLHRTGEILGARLNTVHNLFYYQVLMAEMRAAIAQGAFAEFVRRFHRVRAGEQV

SEQ ID NO: 60450 - protein, 370 aa, unidentified; identical to SEQ ID NO: 60449
  source 1..370: note = Rugosibacter sp.
  REGION 1..370: note = tr|A0A522Y4X3|A0A522Y4X3_9RHOO Queuine tRNA-ribosyltransferase OS=Rugosibacter sp. OX=1914450; GN = tgt PE=3 SV=1

SEQ ID NO: 60451 - protein, 370 aa, unidentified
  source 1..370: note = Rugosibacter sp.
  REGION 1..370: note = tr|A0A522XSD8|A0A522XSD8_9RHOO Queuine tRNA-ribosyltransferase OS=Rugosibacter sp. OX=1914450; GN = tgt PE=3 SV=1
MNFELLAQDGAARRGQLTLAHGVVETPVFMPVGTYGTVKAMAPNELVEMGATVVLGNTFHLWLRPGLEVIAAHGGLHRFMAWERPILTDSGGFQVFSLGELRKISEEGVYFSSPINGDRLFLTPEISMQIQQVLNSDIVMIFDECTPYPATVDQAAQSMRLSLRWARRSRDEHDRLGNANALFGIVQGGMHGSLRDESLAGLTEIDFDGFAIGGLSVGEPKEEFSRILAHTAPQLPRDKPRYLMGVGTPEDLVFAVSQGIDMFDCVMPTRNARNGWLFTRRGDIKIKNAQYKADTRPLDEACACYTCCNFTRAYLHHLHRSREILGARLNTIHNLFYYQVLMAEMRDAITTRTFTEFVRGFHRMRAGEQV

SEQ ID NO: 60452 - protein, 374 aa, unidentified
  source 1..374: note = Ruminiclostridium cellobioparum
  REGION 1..374: note = tr|S0FN08|S0FN08_RUMCE Queuine tRNA-ribosyltransferase OS=Ruminiclostridium cellobioparum subsp. termitidis CT1112 OX=1195236 GN=tgt PE=3 SV=1
MAAVTYELIKTCKQTGARLGKVHTPHGSFDTPVFMPVGTLATVKGMSPEELKEIDAKIILSNTYHCYLRPGQDIVKQAGGLHGFMNWDRAILTDSGGFQVFSLSGLRKISEEGVIFRSHLDGSKHIFTPESVMGIENDLGADIIMAFDECAPYPAEYDYVKKSMERTTRWAKRCKDAHANTEKQSLFGIVQGGMYRDLRIESAKQLNELEFPGYAIGGLSVGEPAELMYEVLDYTAPLLPAHKPRYLMGVGSPDYLIEGTIRGIDMFDCVLPTRIGRNGTVMTSQGRVIIRDAKYARDFSRLDPGCDCYVCRNYSRAYIRHLLKCGEVLGLRLTTWHNLYFLINLMKQVRQAIIDDRLGSFRDEFYYKYGYSKN

SEQ ID NO: 60453 - protein, 373 aa, unidentified
  source 1..373: note = Ruminiclostridium cellulolyticum
  REGION 1..373: note = sp|B8I6M0|TGT_RUMCH Queuine tRNA-ribosyltransferase; OS = Ruminiclostridium cellulolyticum (strain ATCC 35319 / DSM 5812 / JCM 6584 / H10) OX=394503 GN=tgt PE=3 SV=1
MAAVTYELIKTCKQTGARLGKVHTPHGSFDTPVFMPVGTLATVKGMSPEELKEIDARIILSNTYHCYLRPGQDIVKQAGGLHGFMNWDRPILTDSGGFQVFSLSGLRKITEEGVTFRSHLDGSKHVFTPESVMDIENDLGADIIMAFDECAPYPAEYDYVKKSMERTTRWAKRCKEAHTNTEKQSLFGIIQGGMYKELRIESANQLKELDFPGYAIGGLSVGEPAEIMYEVLDYTAPLMPADKPRYLMGVGTPDYLIEGAIRGIDMFDCVLPTRIGRNGTVLTSNGRVIIRDAKYSRDFSKLDPECDCYVCRNYSRAYIRHLIKCGELLGLRLTTWHNLYFLINLMKQVRQAIMDDKLASFRDEFYLKYGYTK

SEQ ID NO: 60454 - protein, 374 aa, unidentified
  source 1..374: note = Ruminiclostridium hungatei
  REGION 1..374: note = tr|A0A1V4SIS2|A0A1V4SIS2_RUMHU Queuine tRNA-ribosyltransferase OS=Ruminiclostridium hungatei; OX = 48256 GN=tgt PE=3 SV=1
MAAVTYELIKTCKQTGARLGRVHTPHGSIDTPVFMPVGTLATVKGMSPEELKEIDARIILSNTYHCYLRPGQDIVRQAGGLHGFMNWDRPILTDSGGFQVFSLSGLRKITEEGVTFRSHLDGSKHVFTPEAVMKIENDLGADIIMAFDECAPYPAEYDYVKKSMERTTRWAKRCRDAHENTEQQSLFGIIQGGMYKDLRIESAKQLKELEFPGYAIGGLSVGEPAELMYEVLDYTAPLMPEDKPRYLMGVGSPDYLIEGAIRGIDMFDCVLPTRIGRNGTVMTSQGRVIIRDAKYAKDFSKLDPECDCYVCRNYSRAYIRHLLKCGELLGLRLTTWHNLYFLINLMKQVRQAIIDDRLGSFRDEFYYKYGYSKK

SEQ ID NO: 60455 - protein, 373 aa, unidentified
  source 1..373: note = Ruminiclostridium papyrosolvens
  REGION 1..373: note = tr|U4R670|U4R670_9FIRM Queuine tRNA-ribosyltransferase OS=Ruminiclostridium papyrosolvens C7 OX=1330534 GN=tgt PE=3 SV=1
MAAVTYELIKTCKQTGARLGKVHTPHGSFDTPVFMPVGTLATVKGMSPEELKEIDARIILSNTYHCYLRPGQEIVKQAGGLHGFMNWDRPILTDSGGFQVFSLSGLRKITEEGVTFRSHLDGSKHVFTPESVMGIENDLGADIIMAFDECAPYPAEYDYVKKSMERTTRWAKRCKEAHTNTEKQSLFGIIQGGMYKDLRIESANQLKELDFPGYAIGGLSVGEPAEIMYEVLDYTAPLMPADKPRYLMGVGTPDYLIEGAIRGIDMFDCVLPTRIGRNGTVLTSRGRVIIRDAKYSRDFSKLDPECDCYVCRNYSRAYIRHLLKCGEVLGLRLTTWHNLYFLINLMKQVRQAIMDGRLASFRDEFYLKYGYTK

SEQ ID NO: 60456 - protein, 373 aa, unidentified
  source 1..373: note = Ruminiclostridium papyrosolvens
  REGION 1..373: note = tr|F1THA7|F1THA7_9FIRM Queuine tRNA-ribosyltransferase OS=Ruminiclostridium papyrosolvens DSM 2782 OX=588581 GN=tgt PE=3 SV=1
MAAVTYELIKTCKQTGARLGKVHTPHGSFDTPVFMPVGTLATVKGMSPEELKEIDARIILSNTYHCYLRPGQDIVKQAGGLHGFMNWDRPILTDSGGFQVFSLSGLRKITEEGVTFKSHLDGSKHVFTPESVMGIENDLGADIIMAFDECAPYPAEYDYVKKSMERTTRWAKRCKEAHIDTEKQSLFGIIQGGMYKELRIESANQLKELDFPGYAIGGLSVGEPAELMYEVLDYTAPLMPADKPRYLMGVGTPDYLIEGAMRGIDMFDCVLPTRIGRNGTVLTNRGRVIIRDAKYSRDFSRLDPECDCYVCRNYSRAYIRHLVKCGELLGLRLTTWHNLYFLINLMKQVRQAIMDDRLASFRDEFYLKYGYTK

SEQ ID NO: 60457 - protein, 378 aa, unidentified
  source 1..378: note = Ruminiclostridium sp.
  REGION 1..378: note = tr|A0A4U7JM96|A0A4U7JM96_9FIRM Queuine tRNA-ribosyltransferase OS=Ruminiclostridium sp. MA18; OX = 2488810 GN=tgt PE=3 SV=1
MAAVTYELIKTCKQTGARLGRVHTPHGSFETPIFMPVGTLATVKGMSPEELKEIDAEIILSNTYHCYLRPGQDIVKEAGGLHGFMNWDRPILTDSGGFQVFSLSDLRKITEEGVTFRSHLDGSKHIFTPESVMGIENDLGADIIMAFDECAPYPAEYNYVKKSMERTTRWAKRCKDAHKNTEKQSLFGIIQGGMYKDLRIESAHQLKDLDFPGYAIGGLSVGEPAEIMYEVLDYTVPLMPADKPRYLMGVGSPDYLIEGSIRGLDMFDCVLPTRIGRNGTVMTSNGRIIIRDAKYARDFSRLDPECDCYVCRNYSRAYIRHLIKCGELLGLRLTTWHNLYFLINLMKQVRQAIMNDSLGSFRDEFYYKYGYKNKSNNE

SEQ ID NO: 60458 - protein, 381 aa, unidentified
  source 1..381: note = Ruminiclostridium sp.
  REGION 1..381: note = tr|A0A3B8J715|A0A3B8J715_9FIRM Queuine tRNA-ribosyltransferase OS=Ruminiclostridium sp.; OX = 2053608 GN=tgt PE=3 SV=1
MAAVKYELIHKCKQTGARLGRVHTPHGNFDTPVFMPVGTQASVKGMSPDEVKSIGAEIILGNTYHLYLRPGCEIIKEAGGLHAFMNWDLPILTDSGGFQVFSLADLRDIKEEGVTFRSHIDGSKHFISPEKSIEIQNILGADIIMAFDECVPYPCEYEYAKKSMEMTTRWAIRCMEAHKNTETQALFGIIQGSVYEDLRRESAKQITALDLPGYAIGGLSVGEPAEIMNDILEKTVQFIPEDKPRYLMGVGSPDYLIDGSIRGIDMFDCVLPTRIGRNGTVFTSKGRIIVRDAKYAKDFSPIDPECDCYACQNFSRAYIRHLFKSGEMFGLRLATWHNLRFLTKLMENIRDAIKNDRLADFRKEFFDKFGYTAKTDSAPKC

SEQ ID NO: 60459 - protein, 374 aa, unidentified
  source 1..374: note = Ruminiclostridium sufflavum
  REGION 1..374: note = tr|A0A318XIK1|A0A318XIK1_9FIRM Queuine tRNA-ribosyltransferase OS=Ruminiclostridium sufflavum DSM 19573 OX=1121337 GN=tgt PE=3 SV=1
MTAVTYELIKTCKQTGARLGRVHTPHGSFETPVFMPVGTLATVKGMSPEELKEIDANIILSNTYHCYLRPGQDIVREAGGLHGFMNWDRPILTDSGGFQVFSLSGLRKITEEGVTFRSHIDGSKHVFTPESVIGIENDLGADIIMAFDECAPYPAEYNYVKKSMERTTRWAKRCKEAHQDTERQSLFGIIQGGMYRDLRMESAHQLKELDFPGYAIGGLSVGEPADIMYEVLDYTVPLMPAGKPRYLMGVGSPDYLIEGALRGIDMFDCVLPTRIGRNGTVMTSNGRIIIRDAKYARDFSRLDPECDCYVCRNYSRAYIRHLIKCGELLGLRLTTWHNLYFLINLMKQVRQAIMDDRLGGFRDEFYYKYGYKKG

SEQ ID NO: 60460 - protein, 376 aa, unidentified
  source 1..376: note = Ruminococcaceae bacterium
  REGION 1..376: note = tr|A0A1G4V2N2|A0A1G4V2N2_9FIRM Queuine tRNA-ribosyltransferase OS=Ruminococcaceae bacterium P7; OX = 1200751 GN=tgt PE=3 SV=1
MFQLIKAEGSARRGEFVTPHGTVQTPAFMNVATCGAIKGAVSALDLKNIKCQVQLCNTYHLHLRPGDDKVRQLGGLHRFTRWDGPILTDSGGFQVFSLAKLRNIKEEGVYFNSHIDGRKIFMGPEESMNIQSNLGSTIAMAFDECVENPSPYEYTRDSVARTTRWLKRCIERMAYLNSLEETINREQMLFGINQGGTYRDLRINHMKEIAELNLDGYAIGGLAVGEPTEVMYEIIEAVELFAPKDKIRYLMGVGTPVNILEAVYRGVDLFDCVMPSRNARHGQLFTWEGVRNLNNAKYELDERPIDEHCDCPTCRSFSRAYIRHLLKSGEMLGMRLAVLHNLYFYNNLMEVIRSELDKGTFSDFYQTYRNVLGVRI

SEQ ID NO: 60461 - protein, 371 aa, unidentified
  source 1..371: note = Ruminococcaceae bacterium
  REGION 1..371: note = tr|A0A1H3FD99|A0A1H3FD99_9FIRM Queuine tRNA-ribosyltransferase OS=Ruminococcaceae bacterium YAD3003 OX=1520816 GN=tgt PE=3 SV=1
MSYPVWYEHIHTCAQTGARLGKVHTPHGTFMTPAFMPVGTQASVKGMSPEEVYGMGAGIMLSNTYHLWLRPGSDIVAKAGGLHKFMNWKGAILTDSGGFQVFSLAKPKDVKEDGVKFSSHIDGRKLFLTPEISMQVQNDLGADIIMAFDECCPYPCEHSYADRSQAKTTRWLERCIEAHKRPDEQALFGIIQGSMYPDLRKKSAESITSFDLPGFAIGGISVGEPKNLFLDMIDCTVPLMPEDKPRYLMGVGTPDYLIEGACRGVDMFDCVLPTRMGRHGTILTDYGKKIIRDKKFAEDFGPMDPECNCYACTNFSSAYVRHLIKANEMFGLRLCTYHNIHFLLVLMERIRQAIAEDRLGDFRKEFYERLG

SEQ ID NO: 60462 - protein, 382 aa, Ruminococcus albus
  REGION 1..382: note = tr|E9SBQ2|E9SBQ2_RUMAL Queuine tRNA-ribosyltransferase OS=Ruminococcus albus 8 OX=246199; GN = tgt PE=3 SV=1
MFRLIKQEGCARRGEFTTVHGTIQTPVFMNVGTSAAIKGGVSSLDLKNELKTQVELCNTYHLHVRPGDEVVYKMGGLHKFMNWDKPILTDSGGFQVFSLAKLRRIKEEGVYFNSHVDGRKIFMGPEESMQIQSHLASTIAMAFDECVENPAEYNYSRKSCERTTRWLKRCIAEMKRLNSLEDTINKDQLLFAINQGCTYDDLRIEHMKVIREEEYCAGFAIGGLAVGEPTDVMYHVIEQVEPFMPKDKPRYLMGVGTPSNIIEAVARGIDFFDCVMPSRNARHGTMFTWNGIVHIANRRFETDSRPVDPQCDCPCCRNFTRAYVRHLFKSEEQLGGRLAVMHNLYFYNTLTERIREALDEGRFAEFRAEYSAKLAQRLPDEL

SEQ ID NO: 60463 - protein, 382 aa, Ruminococcus albus
  REGION 1..382: note = tr|A0A1I1F006|A0A1I1F006_RUMAL Queuine tRNA-ribosyltransferase OS=Ruminococcus albus OX=1264; GN = tgt PE=3 SV=1
MFKLLKQEGAARRGEFKTVHGTIQTPVFMNVGTSAAIKGGVSSIDLKNELKTQVELCNTYHLHVRPGDDVIYKMGGLHKFMNWDKPILTDSGGFQVFSLAKLRRIKEEGVYFNSHVDGRKIFMGPEESMQIQSHLASTIAMAFDECVENPAEYNYSKRSCERTTRWLHRCIAEMKRLNSLEETINRDQMLFGINQGCTYDDLRIEHMKTIRELDYCAGFAIGGLAVGEPTEIMYHVIEQVEPYMPKDKPRYLMGVGTPSNLIEAVYRGIDFFDCVMPSRNARHGTMFTWNGIIHIENKRFETDDRPVDPQCDCPCCRNFSRAYVRHLFKSEEQLGGRLAVMHNLYFYNTLTERMREALDEGRFGAFRAEYSAKLAQRLPDGE

SEQ ID NO: 60464 - protein, 380 aa, unidentified
  source 1..380: note = Ruminococcus bicirculans
  REGION 1..380: note = tr|W0U7F8|W0U7F8_9FIRM Queuine tRNA-ribosyltransferase OS=Ruminococcus bicirculans; OX = 1160721 GN=tgt PE=3 SV=1
MFTLLKQEGAARRGQFETVHGTIQTPVFMNVGTSAAIKGGVSSIDLKNELKTQVELCNTYHLHVRPGDDVIYKMGGLHKFMNWDKPILTDSGGFQVFSLAKLRKIKEEGVYFNSHVDGRRIFMGPEESMQIQSHLASTIAMAFDECVENPAEHSYSKASCDRTVRWLERCVAEQKRLNGLEETINKHQMLFGINQGCTYEDLRIEHMKRIREMEYCSGFAIGGLAVGEPTEVMYNIIEKVEPFMPKDKPRYLMGVGTPTNIIEAVYRGVDFFDCVMPSRNARHGTLFTWNGIMHITNKRYETDPRPIDEHCDCPACRNHSRAYIRHLFKSEEQLGGRLAVMHNLYFYNTLTEKIREALDEGRFEQFRNQYSSLLASKCED

SEQ ID NO: 60465 - protein, 376 aa, Ruminococcus bromii
  REGION 1..376: note = tr|A0A1G5B1Q5|A0A1G5B1Q5_9FIRM Queuine tRNA-ribosyltransferase OS=Ruminococcus bromii OX=40518; GN = tgt PE=3 SV=1
MYKLIKTEGNARRAEFVTPHGTFQTPAFMNVATGGAIKGGVSALDLKNLKCQVQLCNTYHLHIRPGDTKVKELGGLHKFTRWDGPILTDSGGFQVFSLANLRNIKEEGVYFNSHIDGRKIFMGPEESMQIQSNLGSTIAMAFDECVKNPSPYDYTKKSVERTTRWLKRCVAEMKRLNSLDTTINKEQMLFGINQGGIYNDLRIEHMKEIAELDLDGYAIGGLAVGETTEKTYEIIENVEPYAPKDKIRYLMGVGTPVNILEAVARGVDLFDCVMPSRNARHGQLFTWEGVRNINNAKYETDNRPIDEHCDCPTCKNFSRAYIRHLLKSGEMLGMRLAVMHNLYFYNNLMEVIRNELDNGTFTQFYEKQRNILGVRI

SEQ ID NO: 60466 - protein, 376 aa, Ruminococcus bromii
  REGION 1..376: note = tr|A0A2N0UP44|A0A2N0UP44_9FIRM Queuine tRNA-ribosyltransferase OS=Ruminococcus bromii OX=40518; GN = tgt PE=3 SV=1
MFKVIKKEGSARRGEFVTVHGTVQTPAFMNVATCGAIKGAVSALDLKNIKCQVQLCNTYHLHLRPGDEKVKQMGGLHKFTRWNGPILTDSGGFQVFSLAKLRNIKEEGVYFNSHIDGRKIFMGPEESMRIQSNLASTIAMAFDECVENPSPYEYTKNSVERTTRWLKRCVTEMKRLNSLDDTINKNQMLFGINQGGIYDDLRVNHMKEIAELNLDGYAIGGLAVGEPAETMYHIIEEVEPFAPKDKIRYLMGVGTPVNILESVARGVDLFDCVMPSRNARHGQLFTWDGVRNINNAKYETDESPIDEHCDCPVCRNFSRAYIRHLLKSGEMLGMRLAVLHNLYFYNNLMEVIRTQLDNGTYMEFYEKYRNILGVRI

SEQ ID NO: 60467 - protein, 377 aa, Ruminococcus callidus
  REGION 1..377: note = tr|U2KED5|U2KED5_9FIRM Queuine tRNA-ribosyltransferase OS=Ruminococcus callidus ATCC 27760 OX=411473 GN=tgt PE=3 SV=1
MFTLLKTEGHARRGIFETVHGTIQTPFFMNVGTAAAIKGGISSIDLANELKCQVELCNTYHLHLRPGDKIVRQMGGLHQFMNWHKPILTDSGGFQVFSLAKLRRIREEGVYFQSHIDGKAIFMGPEESMQIQSNLGSTIAMAFDECVENPAPLDYVKNSCARTTRWLIRCQKEMQRLNSLEGTINPHQMLFGINQGGTYDAIRVSHMQEIAQLGLDGYAIGGLAVGEPTEIMYHIIEQVEPHMPVDKPRYLMGVGTPSNIIEGVARGVDMFDCVMPSRNARHGTIFTWDGILHITNAAYETDSQPLDPKCDCPVCRNHTRAYVRHLFKAKEQLAGRLAVMHNLYFYNTLLERIRDALDAGEFAQFRKEYSERLAQRI

SEQ ID NO: 60468 - protein, 377 aa, Ruminococcus champanellensis
  REGION 1..377: note = tr|D4LEM6|D4LEM6_RUMC1 Queuine tRNA-ribosyltransferase OS=Ruminococcus champanellensis (strain DSM 18848 / JCM 17042 / KCTC 15320 / 18P13); OX = 213810 GN=tgt PE=3 SV=1
MYKLLKQEGLARRGTVDTVHGTFQTPCFMNVGTAGAIKGGISTMDLKELKCQVELCNTYHLHLRPTDTVIRKMGGLHKFINWDRPILTDSGGFQVFSLAKLRRIKEEGVYFQSHIDGRRIFMGPEESMRIQSNLGSTIAMAFDECVENPATYAYAKQSCARTTRWLQRCKAEMARLNSLPDTINPHQLLFGINQGCTFDDLRVEHMKQIRELDLDGYAVGGLAVGEPTEEMYHVLDVVVPHMPEHKPRYLMGVGTPSNIIEGVARGIDMFDCVMPSRNARHATVFTWNGIMHLTNQCYETDDRPIDEHCDCPACRHYSRAYIRHLFKAKEMLAGRLAVMHNLYFYNTLTERIRSAIETDTFAQFRAEYSGRLAKLIR

SEQ ID NO: 60469 - protein, 376 aa, Ruminococcus flavefaciens
  REGION 1..376: note = tr|A0A315XYI4|A0A315XYI4_RUMFL Queuine tRNA-ribosyltransferase OS=Ruminococcus flavefaciens; OX = 1265 GN=tgt PE=3 SV=1
MFKLLKTDNKARRGTFETVHGTFQTPCFMNVGTAAAIKGGISSVDLKGLKTQVELCNTYHLHLRPGDHVVKQMGGLHKFMNWDKPILTDSGGFQVFSLAQLRKIKEEGVYFASHIDGHRIFMGPEESMQIQSNLGSTIAMAFDECIENPSPYKYVAASIERTTRWLIRCKEEMARLNSLPDTINKHQLLFGINQGSTFDDLRIKHMEDIAKLDLDGYAIGGLAVGEATEEMYRIIDVVEPYMPVEKPRYLMGVGTPSNIIEAVARGVDMFDCVMPSRNARHATVFTWSGIMHLNNKCYETDPRPVDEQCDCPTCKNFTRAYIRHLFKANEQLAGRLAVQHNLYFYNTLTEKIREAIDEDRFEQFRGKYSQLLATRI

SEQ ID NO: 60470 - protein, 376 aa, Ruminococcus flavefaciens
  REGION 1..376: note = tr|A0A1H6KC49|A0A1H6KC49_RUMFL Queuine tRNA-ribosyltransferase OS=Ruminococcus flavefaciens; OX = 1265 GN=tgt PE=3 SV=1
MFKLLKTDNKARRGTFETVHGTFQTPCFMNVGTAAAIKGGISSVDLKGLKTQVELCNTYHLHLRPGDHVVKQMGGLHKFMNWDKPILTDSGGFQVFSLAQLRKIKEEGVYFASHIDGHRIFMGPEESMQIQSNLASTIAMAFDECIENPSPYKYVADSIERTTRWLIRCKEEMARLNSLPDTINKHQMLFGINQGSTFDDLRIKHMEDIAKLDLDGYAIGGLAVGEATEEMYRIIDVVEPYMPVNKPRYLMGVGTPSNIIEAVARGVDMFDCVMPSRNARHATVFTWSGIMHLTNKCYETDPRPVDEQCDCPTCRNFSRAYVRHLFKANEQLAGRLAVQHNLYFYNTLTEKIREAIDEDRFKQFRGKYSQLLATRI

SEQ ID NO: 60471 - protein, 376 aa, unidentified
  source 1..376: note = [Ruminococcus] gnavus
  REGION 1..376: note = tr|R5TKJ3|R5TKJ3_9FIRM Queuine tRNA-ribosyltransferase OS=[Ruminococcus] gnavus CAG:126; OX = 1263106 GN=tgt PE=3 SV=1
MYELIKKDGRAKRGRFHTVHGTIETPVFMNVGTAAAIKGAVSTDDLRGIKTQVELSNTYHLHVRPGDEVVKKMGGLHKFMNWDKPILTDSGGFQVFSLAGLRKIKEEGVHFNSHIDGRKIFMGPEESMQIQSNLASTIAMAFDECPSSVADRVYMRDSVARTTRWLKRCKAEMDRLNTLQDTINPHQMLFGINQGGIYEDIRIEHAKQIVDLDLDGYAVGGLAVGESHEEMYRILDAVVPYLPEQKPTYLMGVGTPINILEAVDRGVDFFDCVYPSRNGRHGHVYTNHGKLNLFNAKYELDDRPIEEGCQCPACRSYSRGYIRHLLKAKEMLGMRLCVLHNLYFYNTMMEEIRAAIEAGEYQVYKKKKIEGMTSGK

SEQ ID NO: 60472 - protein, 392 aa, Ruminococcus gnavus
  REGION 1..392: note = tr|A7AZ77|A7AZ77_RUMGV Queuine tRNA-ribosyltransferase OS=Ruminococcus gnavus (strain ATCC 29149 / VPI C7-9) OX=411470 GN=tgt PE=3 SV=1
MRERGPLFHEDKGEEIMYELIKKDGRAKRGRFHTVHGTIETPVFMNVGTAAAIKGAVSTDDLRGIKTQVELSNTYHLHVRPGDEVVKKMGGLHKFMNWDKPILTDSGGFQVFSLAGLRKIKEEGVHFNSHIDGRKIFMGPEESMQIQSNLASTIAMAFDECPSSVADRVYMRDSVARTTRWLKRCKAEMDRLNTLQDTINPHQMLFGINQGGIYEDIRIEHAKQIVDLDLDGYAVGGLAVGESHEEMYRILDAVVPYLPEQKPTYLMGVGTPINILEAVDRGVDFFDCVYPSRNGRHGHVYTNHGKLNLFNAKYELDDRPIEEGCQCPACRSYSRGYIRHLLKAKEMLGMRLCVLHNLYFYNTMMEEIRAAIEAGEYQVYKKKKIEGMTSGK

SEQ ID NO: 60473 - protein, 376 aa, Ruminococcus gnavus
  REGION 1..376: note = tr|A0A2N5P6T3|A0A2N5P6T3_RUMGN Queuine tRNA-ribosyltransferase OS=Ruminococcus gnavus OX=33038; GN = tgt PE=3 SV=1
MYELIKKDGRAKRGRFHTVHGTIETPVFMNVGTAAAIKGAVSTDDLRGIKTQVELSNTYHLHVRPGDEVVKKMGGLHKFMNWDKPILTDSGGFQVFSLAGLRKIKEEGVHFNSHIDGRKIFMGPEESMQIQSNLASTIAMAFDECPSSVADRVYMRDSVARTTRWLKRCKAEMDRLNTLPDTINPHQMLFGINQGGIYEDIRIEHAKQIVDLDLDGYAVGGLAVGESHEEMYRILDAVVPYLPEQKPTYLMGVGTPINILEAVDRGVDFFDCVYPSRNGRHGHVYTNHGKLNLFNAKYELDDRPIEEGCQCPACRSYSRGYIRHLLKAKEMLGMRLCVLHNLYFYNTMMEEIRAAIEAGEYQAYKKKKIEGMTSGK

SEQ ID NO: 60474 - protein, 375 aa, Ruminococcus lactaris
  REGION 1..375: note = tr|A0A414PAF4|A0A414PAF4_9FIRM Queuine tRNA-ribosyltransferase OS=Ruminococcus lactaris OX=46228; GN = tgt PE=3 SV=1
MYELIKRDGMAKRGRLTTVHGTIETPVFMNVGTAAAIKGGVSTDDLRQIKTQVELSNTYHLHVRPGDEVVKKLGGLHKFMNWDKPILTDSGGFQVFSLASLRKIKEEGVHFNSHIDGRKIFMGPEQSMQIQSNLASTIAMAFDECPSSVADKKYMANSVARTTRWLKRCKDEMARLNALPDTINPQQMLFGINQGGIYEDIRIEHAQQISELDLDGYAVGGLAVGESHEEMYRILDEVVPHLPTNKPTYLMGVGTPANILEAVDRGVDFFDCVYPSRNGRHGHVYTNHGKMNLFNAKYELDDRPIEEGCGCPACRSYSRAYIRHLLKAKEMLGMRLCVLHNLYFYNTMMEEIRDAIDAGEYKAYKKRKLEGMEQK

SEQ ID NO: 60475 - protein, 375 aa, Ruminococcus lactaris
  REGION 1..375: note = tr|V8BXZ2|V8BXZ2_9FIRM Queuine tRNA-ribosyltransferase OS=Ruminococcus lactaris CC59_002D; OX = 1073376 GN=tgt PE=3 SV=1
MYELIKRDGMAKRGRLTTVHGTIETPVFMNVGTAAAIKGGVSTDDLRQIKTQVELSNTYHLHVRPGDEVVKKLGGLHKFMNWDKPILTDSGGFQVFSLASLRKIKEEGVHFNSHIDGRKIFMGPEQSMQIQSNLASTIAMAFDECPSSVADKKYMANSVARTTRWLKRCKDEMARLNALPDTINPQQMLFGINQGGVYEDIRIEHAQQISELDLDGYAVGGLAVGESHEEMYRILDEVVPHLPTNKPTYLMGVGTPANILEAVDRGVDFFDCVYPSRNGRHGHVYTNHGKMNLFNAKYELDDRPIEEGCGCPACRSYSRAYIRHLLKAKEMLGMRLCVLHNLYFYNTMMEEIRDAIDAGEYKAYKKRKLEGMEQK

SEQ ID NO: 60476 - protein, 380 aa, Ruminococcus obeum
  REGION 1..380: note = tr|R7D9A0|R7D9A0_9FIRM Queuine tRNA-ribosyltransferase OS=Ruminococcus obeum CAG:39; OX = 1263107 GN=tgt PE=3 SV=1
MAKYTLMKTEGRAKRAQFETVHGTIQTPVFMNVGTIGAIKGAVSTQDLYDIGTQVELSNTYHLHVRPGDKVVKQLGGLHKFMNWERPILTDSGGFQVFSLAKLRKIKEEGVHFQSHIDGHKIFMGPEESMQIQSNLGSTIAMAFDECPSSVADRDYVQKSVERTTRWLARCKTEMARLNSLPDTINKEQLLFGINQGAVYEDIRIGHAKEIAKMDLDGYAVGGLAVGETHEEMYRILDAVVPYLPQDKPTYLMGVGTPANILEGVERGIDFFDCVYPSRNGRHGHVYTNHGKMNMFNAKYELDTRPIEEGCGCPACRHYSRAYIRHLLKAKEMLGMRLCVLHNLYFYNHMMEEIRDALDEGRFADYKKMRLEGFAAGEQK

SEQ ID NO: 60477 - protein, 383 aa, Ruminococcus sp.; identical to SEQ ID NO: 52651
  REGION 1..383: note = tr|A0A417KUK8|A0A417KUK8_9FIRM Queuine tRNA-ribosyltransferase OS=Ruminococcus sp. TM09-4; OX = 2293244 GN=tgt PE=3 SV=1

SEQ ID NO: 60478 - protein, 376 aa, Ruminococcus sp.
  REGION 1..376: note = tr|A0A374DMX2|A0A374DMX2_9FIRM Queuine tRNA-ribosyltransferase OS=Ruminococcus sp. AM36-18; OX = 2293209 GN=tgt PE=3 SV=1
MFKVIKKEGSARRGEFVTVHGTVQTPAFMNVATCGAIKGAVSALDLKNIKCQVQLCNTYHLHLRPGDEKVKQMGGLHKFTRWNGPILTDSGGFQVFSLAKLRNIKEEGVYFNSHIDGRKIFMGPEESMRIQSNLASTIAMAFDECVENPSPYEYTKNSVERTTRWLKRCVTEMKRLNSLDDTINKNQMLFGINQGGIYDDLRINHMKEIAELNLDGYAIGGLAVGEPAETMYHIIEEVEPFAPKDKIRYLMGVGTPVNILESVARGVDLFDCVMPSRNARHGQLFTWDGVRNINNAKYETDESPIDEHCDCPVCRNFSRAYIRHLLKSGEMLGMRLAVLHNLYFYNNLMEVIRTQLDNGTYMEFYEKYRNILGVRI

SEQ ID NO: 60479 - protein, 374 aa, unidentified
  source 1..374: note = [Ruminococcus] torques
  REGION 1..374: note = tr|A5KQ94|A5KQ94_9FIRM Queuine tRNA-ribosyltransferase OS=[Ruminococcus] torques ATCC 27756 OX=411460 GN=tgt PE=3 SV=1
MYELLKKDGMAKRGRFHTVHGTIETPVFMNVGTAAAIKGAVSTDDLRQIKTQVELSNTYHLHVRPGDEIVKKMGGLHRFMNWDKPILTDSGGFQVFSLASLRKIKEEGVHFHSHIDGRKIFMGPEESMQIQSNLASTIAMAFDECPSSVADREYMVHSVARTTRWLKRCKAEMNRLNSLEDTINHNQMLFGINQGGIYEDIRVEHARQIAELDLDGYAVGGLAVGESHEDMYRILEAVVPHLPENKPTYLMGVGTPANILEAVDRGVDFFDCVYPSRNGRHGHVYTNHGKMNLFNAKYELDDRPIEEGCGCPACRSYSRAYIRHLLKAKEMLGMRLCVLHNLYFYNTMMEEIREAIEAGEYKAYKKRKLEGMMQ

SEQ ID NO: 60480 - protein, 374 aa, unidentified
  source 1..374: note = [Ruminococcus] torques
  REGION 1..374: note = tr|A0A414U133|A0A414U133_9FIRM Queuine tRNA-ribosyltransferase OS=[Ruminococcus] torques OX=33039; GN = tgt PE=3 SV=1
MYELLKKDGMAKRGRFHTVHGTIETPVFMNVGTAAAIKGAVSTDDLRQIKTQVELSNTYHLHVRPGDEIVKKMGGLHRFMNWDKPILTDSGGFQVFSLASLRKIKEEGVHFHSHIDGRKIFMGPEESMQIQSNLASTIAMAFDECPSSVADREYMVHSVARTTRWLKRCKAEMNRLNSLEDTINHNQMLFGINQGGIYEDIRVEHARQIAELDLDGYAVGGLAVGESHEDMYRILDAVVPHLPENKPTYLMGVGTPANILEAVDRGVDFFDCVYPSRNGRHGHVYTNHGKMNLFNAKYELDDRPIEEGCGCPACRSYSRAYIRHLLKAKEMLGMRLCVLHNLYFYNTMMEEIREAIEAGEYKAYKKRKLEGMMQ

SEQ ID NO: 60481 - protein, 380 aa, Rummeliibacillus sp.
  REGION 1..380: note = tr|A0A3N5ZXH7|A0A3N5ZXH7_9BACL Queuine tRNA-ribosyltransferase OS=Rummeliibacillus sp. TYF005; OX = 2058214 GN=tgt PE=3 SV=1
MSQAIRYELIKTDKQTGARLGIVHTPHGSFETPAFMPVGTQATVKTMSPEEVKGMGAGIILSNTYHLWLRPGHEIIREAGGLHKFMNWDRAILTDSGGFQVFSLSDIRRIEEEGVHFRNHLNGDKLFLSPEKSMEIQNALGSDIMMAFDECPPYPATDEYMKNSVERTSRWAERCLKAHARPEDQGLFGIVQGGEFEDLRKQSAKDLVSLDFPGYAIGGLSVGEPKDIMNRMLEYTTPLLPSNKPRYLMGVGSPDSLIDGAIRGIDMFDCVLPTRIARNGTCMTSQGRLVVKNAKYARDFGPLDPNCDCYTCKNYSRAYIRHLIKADETFGIRLTSYHNLYFLQDLMRQVRQAIREDRLGDFREEFFEQYGFNKPNAKNF

SEQ ID NO: 60482 - protein, 380 aa, Rummeliibacillus stabekisii
  REGION 1..380: note = tr|A0A511BXN6|A0A511BXN6_9BACL Queuine tRNA-ribosyltransferase OS=Rummeliibacillus stabekisii; OX = 241244 GN=tgt PE=3 SV=1
MSQAIRYELIKTDKQTGARLGIVHTPHGSFETPAFMPVGTQASVKTMAPEEVKEMGAGIILSNTYHLWLRPGHEIIREAGGLHKFMNWDRAILTDSGGFQVFSLSDIRRIEEEGVHFRNHLNGDKLFLSPEKAMEIQNALGSDIMMAFDECPPYPATFEYMKKSVERTSRWAERCLEAHARPQDQGLFGIVQGGEFEELRKQSAKDLVSLDFPGYAIGGLSVGEPKDIMNRMLEYTTPLLPTNKPRYLMGVGSPDSLIDGAIRGIDMFDCVLPTRIARNGTCMTSQGRLVIKNAKFARDFGPLDPNCDCYTCKNYSRAYIRHLIKADETFGIRLTSYHNLYFLQDLMRQVRQAIREDRLGDFREEFFEQYGFNKPNAKNF

SEQ ID NO: 60483 - protein, 380 aa, Rummeliibacillus stabekisii
  REGION 1..380: note = tr|A0A143HCK3|A0A143HCK3_9BACL Queuine tRNA-ribosyltransferase OS=Rummeliibacillus stabekisii; OX = 241244 GN=tgt PE=3 SV=1
MSQAIRYELIKTDKQTGARLGIVHTPHGSFETPAFMPVGTQASVKTMAPEEVKEMGAGIILSNTYHLWLRPGHEIIREAGGLHKFMNWDRAILTDSGGFQVFSLSDIRRIEEEGVHFRNHLNGDKLFLSPEKAMEIQNALGSDIMMAFDECPPYPATFEYMKKSVERTSRWAERCLEAHSRPQDQGLFGIVQGGEFEELRKQSAKDLVSLDFPGYAIGGLSVGEPKDIMNRMLEYTTPLLPTNKPRYLMGVGSPDSLIDGAIRGIDMFDCVLPTRIARNGTCMTSQGRLVIKNAKFARDFGPLDPNCDCYTCKNYSRAYIRHLIKADETFGIRLTSYHNLYFLQDLMRQVRQAIREDRLGDFREEFFEQYGFNKPNAKNF

SEQ ID NO: 60484 - protein, 377 aa, Runella sp.
  REGION 1..377: note = tr|A0A3C0UXC7|A0A3C0UXC7_9BACT Queuine tRNA-ribosyltransferase OS=Runella sp. OX=1960881 GN=tgt; PE = 3 SV=1
MKFDLVTNDPHSKARAGVVYTDHGAIQTPIFMPVGTAGTVKAVHQRELKEDIKAQIILGNTYHLYLRPGLDILEKAGGLHKFNGWDFPILTDSGGYQVYSLAGTGRKITEEGVKFKSHIDGSLHFFTPESVMDIQRRIGADIIMAFDECTPYPCDFSYARKSMEMTHRWLQRCCERFDATESMYGYSQTLFPIVQGSTYKDLRRQSAEFIASMGREGNAIGGLSVGEPAEDMYEMTELVCDILPKDKPRYLMGVGTPENILECIALGIDMFDCVLPTRNARHGILYTTQGVINIRNEKWKDDFSPIDETLGGYVSSFYSKSYLRHLIKSEEILGSQIASVHNLTFYLWLVGQAREQILAGTFAQWKNEILKKINQRL

SEQ ID NO: 60485 - protein, 377 aa, Runella sp.
  REGION 1..377: note = tr|A0A344TIW9|A0A344TIW9_9BACT Queuine tRNA-ribosyltransferase OS=Runella sp. HYN0085 OX=2259595; GN = tgt PE=3 SV=1
MKFDIIHKDSGTKARAGIIQTDHGTIQTPIFMPVGTAGTVKAVHQRELRDDIKAQIILGNTYHLYLRPGLDILEKAGGLHRFNGWDKPILTDSGGYQVYSLAKTGRKISEEGVKFKSHIDGSTHFFTPEGVMDIQRRIGADIIMAFDECTPYPCDFSYARTSMDMTHRWLKRCCDRFDNTQSIYGYQQTLFPIVQGSVYKDLRRQSAEFIASMEREGNAIGGLSVGEPAEDMYEMTELVCNILPADKPRYLMGVGTPENILESIALGIDMFDCVMPTRNARHGILYTTEGVINIKNEKWKDDFSPIDERLGGYVSTSYTKGYLRHLIKSEEILGAQIASVHNLSFYLWLVGQAREQIIAGTFPLWKAEILRKLTCRL

SEQ ID NO: 60486 - protein, 376 aa, unidentified
  source 1..376: note = Ruthenibacterium lactatiformans
  REGION 1..376: note = tr|A0A0D8J3N2|A0A0D8J3N2_9FIRM Queuine tRNA-ribosyltransferase OS=Ruthenibacterium lactatiformans; OX = 1550024 GN=tgt PE=3 SV=1
MYKLLKNEGSARRGEFSTVHGTVQTPAFMNVATAAAIKGGLSAFDLKANDCQVMLCNTYHLHLRPGDKNVARLGGLHKFTRWDGPILTDSGGFQVFSLSKLRKITEEGVTFNSHLDGHRIFMGPEESMQIQANLGSTIAMAFDECMENPAEYQYAKASCDRTVRWLKRCKAELSRLKGEGLAVNPHQLLFGINQGCCYDDLRVGHMQEIAALDLDGYAIGGLAVGEPKEEMYRVISVVEEHMPKDKIRYLMGVGTPGNILEGVRRGVDLFDCVMPSRNARHGHLNTWKGIINIKNAKYELDEQPLDEACSCECCRNFSRAYLRHLFKADEMLGMRLAVMHNLHFYNNLMLRIREALDNGTFDAFYRRYVNLLDTRI

SEQ ID NO: 60487 - protein, 376 aa, unidentified
  source 1..376: note = Ruthenibacterium lactatiformans
  REGION 1..376: note = tr|A0A0W7TVF6|A0A0W7TVF6_9FIRM Queuine tRNA-ribosyltransferase OS=Ruthenibacterium lactatiformans; OX = 1550024 GN=tgt PE=3 SV=1
MYKLLKNEGSARRGEFSTVHGTVQTPAFMNVATAAAIKGGLSAFDLEANDCQVMLCNTYHLHLRPGDKNVARLGGLHKFTRWDGPILTDSGGFQVFSLSKLRKITEEGVTFNSHLDGHRIFMGPEESMQIQANLGSTIAMAFDECMENPAEYQYAKASCDRTVRWLKRCKAELSRLKGEGLAVNPHQLLFGINQGCCYDDLRVGHMQEIAALDLDGYAIGGLAVGEPKEEMYRVISVVEEHMPKDKIRYLMGVGTPGNILEGVRRGVDLFDCVMPSRNARHGHLNTWKGIINIKNAKYELDEQPLDEACSCECCRNFSRAYLRHLFKADEMLGMRLAVMHNLHFYNNLMLRIREALDNGTFDAFYCRYVNLLDTRI

SEQ ID NO: 60488 - protein, 379 aa, Saccharibacillus sp.
  REGION 1..379: note = tr|A0A4Y6UR03|A0A4Y6UR03_9BACL Queuine tRNA-ribosyltransferase OS=Saccharibacillus sp. ATSA2; OX = 2583377 GN=tgt PE=3 SV=1
MTSAIRYEPIKTCKQSGARLGRVHTPHGIIDTPTFMPVGTLATVKTMSPEELKQMDAHIILSNTYHLFLRPGHDIIREAGGLHKFMNWDRPILTDSGGFQVFSLAEMRKITEEGVNFRSHINGDKLFLSPEVAMNIQNALGSDIMMAFDECPPYPAEHAYLKRSLERTSRWAERCLEAHARPQDQGLFAIVQGGMHEDLRRQSAADLTSMDFPGYAIGGLSVGEPKHLMYEVLEYTVPLLPANKPRYLMGVGSPDALLEGAIRGVDMFDCVLPTRIARNGTTMTSQGRVVVRNAQYARDFGPLDPNCDCYTCRNYSRAYLRHLIKADETFGLRLTTYHNLHFLLELMRGVRQAIREDRLLDFRDEFFEQYGMHANDKGF

SEQ ID NO: 60489 - protein, 379 aa, Saccharibacillus sp.
  REGION 1..379: note = tr|A0A254NK60|A0A254NK60_9BACL Queuine tRNA-ribosyltransferase OS=Saccharibacillus sp. O23; OX = 2009338 GN=tgt PE=3 SV=1
MTSAIRYEHIKTCKQSGARLGLVHTPHGVIETPTFMPVGTLATVKTMSPEELKQMDAQIILSNTYHLFLRPGHDIIREAGGLHKFMNWDRPILTDSGGFQVFSLAEMRKITEEGVNFRSHLNGDKLFLSPEVAMEIQNALGSDIMMAFDECPPYPAEKEYIKRSLERTSRWAERCLKAHARPQDQGLFAIIQGGMHEDLRRQSAADLTSMDFPGYAIGGLSVGEPKHLMYEVLEYTVPLLPTNKPRYLMGVGSPDALLEGAIRGVDMFDCVLPTRIARNGTTMTSQGRVVVRNAQYARDFGPLDPNCDCYTCRNYSRAYLRHLIKADETFGLRLTTYHNLHFLLDLMRGVRQAIREDRLLDFRDEFFEQYGMHANDKGF

SEQ ID NO: 60490 - protein, 397 aa, Saccharibacter sp.
  REGION 1..397: note = tr|A0A060Q8B6|A0A060Q8B6_9PROT Queuine tRNA-ribosyltransferase OS=Saccharibacter sp. AM169; OX = 1343158 GN=tgt PE=3 SV=1
MTTESIRPNLTPSDRMHWQKDAQCGRARAGWLHTRHGSVPTPTFMPVGTVGTVKGITMDNVRATGAGIVLGNTYHLMLRPTAERVQRLGGLHRMMDWPGPILTDSGGFQVMSLGPLRKMDEDGVTFRSHIDGSSHRLTPESSTDIQYKLDATITMAFDECPALPATKDVLEASMERSMRWAARSREAFIARPGYGQFGIVQGGTEQDLRERSALALREIGFEGYAIGGLAVGEGQELMFSTLDYTTPMLPEDQPRYLMGVGTPDDLLGAVMRGCDMFDCVMPSRAGRTARAYTERGTLNLRNARFAEDTRPISPEDDSPMAGRYSRAYLHHLFRANEMLGPMLLTLHNLAYYQRLMRQIRAAIVAGTLEQTATQLRRNWARGDWSEDEWPMPRYQQG

SEQ ID NO: 60491 - protein, 376 aa, unidentified
  source 1..376: note = Saccharicrinis carchari
  REGION 1..376: note = tr|A0A521ELV4|A0A521ELV4_9BACT Queuine tRNA-ribosyltransferase OS=Saccharicrinis carchari; OX = 1168039 GN=tgt PE=3 SV=1
MEFELQITDPQSRARTGKITTDHGVIETPIFMPVGTVGSVKGVHFNDLRNDIEAQIILGNTYHLYLRPGLDIIEKAGGLHKFNGWDRPILTDSGGYQVFSLSANRKIKEDGAVFRSHIDGSKHLFTPENVVDTQRIIGADIMMAFDECAPGDAPHDYAKKSMELTHRWLQRGITQFDSTRAKYGYSQTFFPIVQGAGFKDLRTQSAEYIASFGREGNAIGGLSVGEPAEVMYEMTEVVTGILPKDKPRYLMGVGTPVNILESIALGVDMFDCVMPTRNGRNGMLFTSRGIMNMKNQKWKDDFSPVDPEGTSFVDHHYTKAYLRHLFVSKELLAAQIGSLHNLAFYLWLVKEARSHIQAGDFIPWKNQMVKQLSVRL

SEQ ID NO: 60492 - protein, 376 aa, unidentified
  source 1..376: note = Saccharicrinis fermentans
  REGION 1..376: note = tr|W7Y4N0|W7Y4N0_9BACT Queuine tRNA-ribosyltransferase OS=Saccharicrinis fermentans DSM 9555 = JCM 21142 OX=869213 GN=tgt PE=3 SV=1
MDFELQITDPKSRARTGKITTDHGEIETPIFMPVGTVGSVKGVHFNDLRNDTHAEIILGNTYHLYLRPGLKIIEKAGGLHKFNGWDRPILTDSGGFQVFSLSGNRKLKEEGAIFRSHIDGSKHLFTPENVVDTQRIIGADIIMAFDECAPGDADHKYAKNSMQLTHRWLQRGITQFDATQALYGHSQTFFPIVQGAGFRDLRKQSAEYIASFEREGNAIGGLAVGEPPEVMYEMIEVVTDILPQNKPRYLMGVGTPVNILESIALGVDMFDCVMPTRNGRNGMLFTSRGIMNMKNEKWKDDFSLLDPEGTSFVDHQYTKAYLRHLFVSKELLAAQIGSLHNLAFYLWLVKEARKHIQAGDFSEWKDNMVKQLSVRL

SEQ ID NO: 60493 - protein, 374 aa, Saccharophagus degradans
  REGION 1..374: note = sp|Q21KW1|TGT_SACD2 Queuine tRNA-ribosyltransferase; OS = Saccharophagus degradans (strain 2-40 / ATCC 43961 / DSM 17024) OX=203122 GN=tgt PE=3 SV=1
MKFELTTTDGDARRGQLTFSRGTVQTPAFMPVGTYGTVKGMLPRDIVDSGAEIILGNTFHLMLRPGTEVVKAHGDLHDFIQWQGPILTDSGGFQVFSLGDMRKISEEGVKFRSPIDGSEVFLDPEKAMQVQRDLGSDIVMIFDECTPYPATVHEARVSMELSLRWAKRSKDAHGDNPSALFGIVQGGMHESLRSESLKGLTEIGFDGYAIGGLSVGEPKEDMLRILNHLKTEMPADKPRYLMGVGKPEDLVEGVCRGIDMFDCVMPTRNARNGHLFTQAGVVKIRNAKHRHDTGPLDPTCDCYTCQNFSRAYLHHLDKCGEILGAQLNTIHNLRHYQTVMSELRAAIGKGELAQYVSHFYARQGKERPAIATQS

SEQ ID NO: 60494 - protein, 378 aa, Saccharospirillum sp.
  REGION 1..378: note = tr|A0A2T6E3C7|A0A2T6E3C7_9GAMM Queuine tRNA-ribosyltransferase OS=Saccharospirillum sp. MSK14-1; OX = 1897632 GN=tgt PE=3 SV=1
MSRTCFMDFELKTTDGAARRGTLNFPRGQVETPAFMPVGTYGTVKGMTPQQIEEIGAHIILGNTFHLMLRPGTQVIEEHGDLHDFAGWNKPILTDSGGFQVFSLGKMRKITEQGVTFRSPVDGAKVELTPERSMEVQRSLGSDIVMIFDECTPHPATHEVAKKSMELSLRWAKRSKTAHGDSPSALFGIIQGGMYEDLRDVSLKGLTDIDFDGYAIGGLSVGEPKEDMMRMLDHVTPQMPTDKPRYLMGVGTPEDLVEGVRRGVDMFDCVMPTRNGRNGHFFTTDGVVRIRNARHRHDSAPLDAQCDCYTCQNFSRAYLHHLDKCGEMLGAQLGTLHNLRYYQRLMAGLRGAIEAGKLSAFVDDFYAARGLETPPLTP

SEQ ID NO: 60495 - protein, 375 aa, Sagittula sp.
  REGION 1..375: note = tr|A0A2K8WIG0|A0A2K8WIG0_9RHOB Queuine tRNA-ribosyltransferase OS=Sagittula sp. P11 OX=2009329; GN = tgt PE=3 SV=1
MALTSFELNARDGRARTGVIRTPRGDIRTPAFMPVGTAATVKGMMPESVRETGADILLGNTYHLMLRPGAERVAKLGGLHRFMNWERPILTDSGGFQVMSLSDLRKLTEEGVTFRSHVDGSKHMLSPETSMEIQRLLGSDIVMAFDECPALPADRARLEESMRLSMRWAARSREAFGDRPGHMLFGIQQGGLERDLREESAQALVNIGFDGYAIGGLAVGEGQEAMFGCLDFAPGMLPADKPRYLMGVGKPADIVGAVARGIDMMDCVLPSRSGRTGQAWTRRGQVNLRNARHAEDPRPLEEGCSCPCCRSYSRAYLHHVVRAKEMIAGMLLTWHNLHYYQELMAGMRAAIAEGRFAAFEAEFHEGEALGDIERL

SEQ ID NO: 60496 - protein, 375 aa, Sagittula stellata
  REGION 1..375: note = tr|A3K1F9|A3K1F9_9RHOB Queuine tRNA-ribosyltransferase OS=Sagittula stellata E-37; OX = 388399 GN=tgt PE=3 SV=1
MALTSFDLNARDGRARTGVIRTPRGEIRTPAFMPVGTAATVKGMMPESVRETGADILLGNTYHLMLRPGAERVARLGGLHRFMNWERPILTDSGGFQVMSLSDLRKLTEEGVTFRSHVDGSKHMLSPETSMEIQRLLGSDIVMAFDECPALPADRARLEESMRLSMRWAARSREAFGDRPGHMLFGIQQGGLERDLREESAQALVNIGFDGYAIGGLAVGEGQEAMFGCLDFAPGMLPEDKPRYLMGVGKPADIVGAVARGIDMMDCVLPSRSGRTGQAWTRRGQVNLRNARHADDPRPLDEGCTCPCCQNYSRAYLHHVVRAKEMIAGMLLTWHNLHYYQELMAGMRAAIAEARFAAFEEAFHAGEALGDIERL

SEQ ID NO: 60497 - protein, 376 aa, Salegentibacter agarivorans
  REGION 1..376: note = tr|A0A1I2PCL0|A0A1I2PCL0_9FLAO Queuine tRNA-ribosyltransferase OS=Salegentibacter agarivorans; OX = 345907 GN=tgt PE=3 SV=1
MKFDLLSTDTGSKARAGTITTDHGKIETPIFMPVGTVASVKGVHQRELKEDINPDIILGNTYHLYLRPQTEILKKAGGLHKFMNWDRNILTDSGGYQVYSLSARRKIKEEGVKFKSHIDGSYHVFTPENVMEIQRTIGADIIMAFDECTPYPCDYKYAKRSMHMTHRWLDRCVNHLQKVDPLYGFDQTLFPIVQGSTYKDLRKQSAEYIASVGAEGNAIGGLSVGEPAEEMYAMTEVVTEILPEDKPRYLMGVGTPINILENIALGVDMFDCVMPTRNARNGMLFTAHGTINIKNKKWEDDFSPLDEMGTTFVDKDYSKAYVRHLFSVNELLGKQIATIHNLGFYMWLVREARKHILAGDFARWKNMMVKQMDKRL

SEQ ID NO: 60498 - protein, 393 aa, unidentified
  source 1..393: note = Salegentibacter echinorum
  REGION 1..393: note = tr|A0A1M5KM90|A0A1M5KM90_9FLAO Queuine tRNA-ribosyltransferase OS=Salegentibacter echinorum; OX = 1073325 GN=tgt PE=3 SV=1
MPLGGLFKYLCAHLNSNMKFDLLGADAGSKARAGTITTDHGKIETPIFMPVGTVASVKGVHQRELKKDINPDVILGNTYHLYLRPKIEILKKAGGLHKFMNWDRNILTDSGGYQVYSLSARRKIKEEGVRFKSHIDGSMHTFTPENVMEIQRAIGADIIMAFDECTPYPCDYKYAQRSMHMTHRWLDRCVNHLQKVDPFYGYDQTLFPIVQGSTYKDLRKQSAEYIASVGAEGNAIGGLSVGEPAEEMYEMTEVVTNILPEDKPRYLMGVGTPINILENIALGVDMFDCVMPTRNARNGMLFTAHGTINLKNKKWEDDFSPIDEMGITFVDTDYSKAYVRHLFSVNELLGKQIATIHNLGFYMWLVREARKHILAGDFTSWKNMMVKQMDKRL

SEQ ID NO: 60499 - protein, 376 aa, Salegentibacter flavus
  REGION 1..376: note = tr|A0A1I5D2X5|A0A1I5D2X5_9FLAO Queuine tRNA-ribosyltransferase OS=Salegentibacter flavus; OX = 287099 GN=tgt PE=3 SV=1
MKFDLLATDAGSKARAGTITTNHGKIETPIFMPVGTVASVKGVHQRELKEDINPDIILGNTYHLYLRPQTEILKKAGGLHKFMNWDRNILTDSGGYQVYSLSARRKIKEEGVKFKSHIDGSSHTFTPENVMEIQRAIGADIIMAFDECTPYPCDYRYAKRSMHMTHRWLDRCVTHLDKVEPMYGFNQTLFPIVQGSTYKDLREQSAEYIASVGAEGNAIGGLSVGEPAEEMYAMTEVVTKILPEDKPRYLMGVGTPINILENIALGIDMFDCVMPTRNARNGMLFTAHGTINIKNKKWGDDFSPIDDMDITWVDSEYSKAYLRHLFTVNEMLGKQIATIHNLGFYLWLVREARKHILAGDFTPWKDKMVKQMDKRL

SEQ ID NO: 60500 - protein, 376 aa, Salegentibacter holothuriorum
  REGION 1..376: note = tr|A0A1T5CVA7|A0A1T5CVA7_9FLAO Queuine tRNA-ribosyltransferase OS=Salegentibacter holothuriorum; OX = 241145 GN=tgt PE=3 SV=1
MKFDLLSTDAGSKARAGTITTDHGKIETPIFMPVGTVASVKGVHQRELKEEINPDIILGNTYHLYLRPKTEILKKAGGLHKFMNWDRNILTDSGGYQVYSLSARRKIKEEGVKFKSHIDGSYHTFTPENVMEIQRAIGADIIMAFDECTPYPCDYKYAKRSMHMTHRWLDRCVNHLDKVDPLYGFDQTLFPIVQGSTYKDLRKQSAEYIASVGAEGNAIGGLSVGEPAEEMYAMTEVVTEILPEDKPRYLMGVGTPINILENIALGVDMFDCVMPTRNARNGMLFTAHGTINIKNKKWEDDFSPIDEMGITFVDTEYSKAYVRHLFSVNELLGKQIATIHNLGFYMWLVREARKHILAGDFASWKSMMVKQMDKRL

SEQ ID NO: 60501 - protein, 376 aa, Salegentibacter mishustinae
  REGION 1..376: note = tr|A0A0Q9Z9L3|A0A0Q9Z9L3_9FLAO Queuine tRNA-ribosyltransferase OS=Salegentibacter mishustinae; OX = 270918 GN=tgt PE=3 SV=1
MKFDLLSTDAGSKARAGTITTDHGKIETPIFMPVGTVASVKGVHQRELKEEINPDIILGNTYHLYLRPQTEILKKAGGLHKFMNWDRNILTDSGGYQVYSLSARRKIKEEGVKFKSHIDGSYHTFTPENVMEIQRAIGADIIMAFDECTPYPCDYKYAKRSMHMTHRWLDRCVNHLEKVDPFYGFDQTLFPIVQGSTYKDLRKQSAEYIASVGAEGNAIGGLSVGEPAEEMYAMTEVVTEILPEDKPRYLMGVGTPINILENIALGVDMFDCVMPTRNARNGMLFTAHGTINIKNKKWEDDFSPIDEMGITFVDTEYSKAYVRHLFSVNELLGKQIATIHNLGFYMWLVREARKHILAGDFTTWKNMMVKQMDKRL

SEQ ID NO: 60502 - protein, 376 aa, Salegentibacter salarius
  REGION 1..376: note = tr|A0A2N0TZV6|A0A2N0TZV6_9FLAO Queuine tRNA-ribosyltransferase OS=Salegentibacter salarius; OX = 435906 GN=tgt PE=3 SV=1
MKFDLLSTDAGSKARAGTITTDHGKIETPIFMPVGTVASVKGVHQRELKEEINPDIILGNTYHLYLRPQTEILKKAGGLHKFMNWDRNILTDSGGYQVYSLSDRRKIKEEGVKFKSHIDGSYHTFTPENVMEIQRAIGADIIMAFDECTPYPCDYKYAKRSMHMTHRWLDRCVNHLEKVDPFYGFDQTLFPIVQGSTYKDLRKQSAEYIASVGAEGNAIGGLSVGEPAEEMYAMTEVVTEILPEDKPRYLMGVGTPINILENIALGVDMFDCVMPTRNARNGMLFTAHGTINIKNKKWEDDFSPIDEMGITFVDTEYSKAYVRHLFSVNELLGKQIATIHNLGFYMWLVREARKHILAGDFTTWKNMMVKQMDKRL

SEQ ID NO: 60503 - protein, 376 aa, Salegentibacter salegens
  REGION 1..376: note = tr|A0A1M7KJR1|A0A1M7KJR1_9FLAO Queuine tRNA-ribosyltransferase OS=Salegentibacter salegens; OX = 143223 GN=tgt PE=3 SV=1
MKFDLLSTDAGSKARAGTITTDHGKIETPIFMPVGTVASVKGVHQRELKEDINPDIILGNTYHLYLRPQTEILRKAGGLHKFMNWDRNILTDSGGYQVYSLSARRKIKEEGVKFKSHIDGSYHVFTPENVMEIQRTIGADIIMAFDECTPYPCDYKYAKCSMHMTHRWLDRCVNHLKKVDPLYGFDQTLFPIVQGSTYKDLRKQSAEYIASVGAEGNAIGGLSVGEPAEEMYAMTEVVTAILPEDKPRYLMGVGTPINILENIALGVDMFDCVMPTRNARNGMLFTAHGTINIKNKKWEDDFSPLDEMGTTFVDKDYNKAYVRHLFSVNELLGKQIATIHNLGFYMWLVREARKHILAGDFTTWKNMMVKQMDKRL

SEQ ID NO: 60504 - protein, 376 aa, Salegentibacter salinarum
  REGION 1..376: note = tr|A0A2N0TSY2|A0A2N0TSY2_9FLAO Queuine tRNA-ribosyltransferase OS=Salegentibacter salinarum; OX = 447422 GN=tgt PE=3 SV=1
MKFDLLSTDAGSKARAGTITTDHGKIETPIFMPVGTVASVKGVHQRELKEDINPDIILGNTYHLYLRPKTEILKKAGGLHKFMNWDRNILTDSGGYQVYSLSARRKIKEEGVKFKSHIDGSYHVFTPENVMEIQRTIGADIIMAFDECTPYPCDYKYAKRSMHMTHRWLDRCVNHLKKVDPLYGFDQTLFPIVQGSTYKDLRKQSAEYIASVGAEGNAIGGLSVGEPAEEMYAMTEVVTEILPEDKPRYLMGVGTPINILENIALGVDMFDCVMPTRNARNGMLFTAHGTINIKNKKWEDDFSPLDEMGTTFADKDYSKAYVRHLFSVNELLGKQIATIHNLGFYMWLVREARKHILAGDFTSWKNMMVKQMDKRL

SEQ ID NO: 60505 - protein, 376 aa, Salegentibacter sp.
  REGION 1..376: note = tr|A0A4R6FSI2|A0A4R6FSI2_9FLAO Queuine tRNA-ribosyltransferase OS=Salegentibacter sp. 24; OX = 2183986 GN=tgt PE=3 SV=1
MKFDLLRTDAGSKARAGTITTDHGKIETPIFMPVGTVASVKGVHQRELKEEINPDIILGNTYHLYLRPKTEILEKAGGLHKFMNWDRNILTDSGGYQVYSLSARRKIKEEGVKFKSHIDGSYHVFTPENVMEIQRAIGADIIMAFDECTPYPCDYKYAKRSMHMTHRWLDRCVSHLDKLDPLYGFNQTLFPIVQGSTYKDLRKQSAEYIASVGADGNAIGGLSVGEPAEEMYAMTEVVTEILPEDKPRYLMGVGTPINILENIALGIDMFDCVMPTRNARNGMLFTAHGTINIKNKKWEDDFSVIDEMGITFVDTEYSKAYVRHLFSVNELLGKQIATIHNLGFYMWLVREARKHILAGDFSTWKNMMVKQMDKRL

SEQ ID NO: 60506 - protein, 376 aa, Salegentibacter sp.; identical to SEQ ID NO: 60497
  REGION 1..376: note = tr|A0A1L6R7A5|A0A1L6R7A5_9FLAO Queuine tRNA-ribosyltransferase OS=Salegentibacter sp. T436; OX = 1729720 GN=tgt PE=3 SV=1

SEQ ID NO: 60507 - protein, 379 aa, unidentified
  source 1..379: note = Salibacterium halotolerans
  REGION 1..379: note = tr|A0A1I5UGU0|A0A1I5UGU0_9BACI Queuine tRNA-ribosyltransferase OS=Salibacterium halotolerans; OX = 1884432 GN=tgt PE=3 SV=1
MAAITYELKKTCKQSGARLGTIHTPHGAIDTPMFMPVGTLATVKTLSPEELEDMNAQIILSNTYHLWLRPGEDIVQEAGGLHSFMNWDRPILTDSGGFQVFSLSDFRNIKEEGVHFRNHISGEKLFLSPEKAMQIQNALGPDIMMALDECPPYPAEESYMKASVERTSRWAERCLEAHRNKDSQGLFGIIQGGEYEHLRKQSANDLISLDFPGYAIGGLSVGEPKDVMNRVLEFTSPLLPIHKPRYLMGVGSADSLIDGAIRGVDMFDCVLPTRIARNGACMTSRGRLVVRNAAYARDFSPIDSDCGCHVCRNYSRAYIRHLIKSNETFGFRLTSYHNLYFLLDLMKKVREAIMEDRLLDFRDDFFEQYGFNRPDAKNF

SEQ ID NO: 60508 - protein, 379 aa, unidentified
  source 1..379: note = Salibacterium qingdaonense
  REGION 1..379: note = tr|A0A1I4JE19|A0A1I4JE19_9BACI Queuine tRNA-ribosyltransferase OS=Salibacterium qingdaonense; OX = 266892 GN=tgt PE=3 SV=1
MAAVTYELKKTCKQSGARLGTIHTPHGSIETPMFMPVGTLATVKTLSPEELEDMNAQIILSNTYHLWLRPGEDIVQEAGGLHSFMNWDRPILTDSGGFQVFSLSDFRNIKEEGVHFRNHISGEKLFLSPEKAMQIQNALGPDIMMALDECPPYPAEESYMKASVERTSRWAERCLEAHQNKDSQGLFGIIQGGEYEHLRKQSADDLISLDFPGYAIGGLSVGEPKDVMNRVLDFTTPLLPDHKPRYLMGVGSADSLIDGAIRGVDMFDCVLPTRIARNGACMTNHGRLVVRNAAYARDFSPIDRDCNCHVCRNYSRAYIRHLIKSNETFGFRLTSYHNLYFLLDLMKKVREAIMEDRLLDFREEFFEQYGFNRPDAKNF

SEQ ID NO: 60509 - protein, 381 aa, unidentified
  source 1..381: note = Salilacibacter sp.
  REGION 1..381: note = tr|A0A514LLS7|A0A514LLS7_9ACTN Queuine tRNA-ribosyltransferase OS=Salilacibacter sp. NKC3-5; OX = 2502791 GN=tgt PE=3 SV=1
MTEAIRYEHLKTCRQSGARLGRIHTPHGVIDTPIFMPVGTLATVKMMSPEELKEMDAQIILSNTYHLWLRPGEDLVEEAGGLHTFMNWDRPMLTDSGGFQVFSLSDLRDIDEEGVRFRNHISGERLFLSPEKAVHIQQSLGADIIMAFDECPPYPASYAYMRDSVARTSRWAERCLKAHDGNNGQQALFGIIQGGEYEDLRRESVEDLVSLDFPGYAIGGLSVGEPKSVMNEVLEQTTQHLPTDKPRYLMGVGSADALIDGTIRGVDMFDCVLPTRIGRNGTCMTSEGRKVIRNASFARDFRPIDEACGCYACRNYSRAYIRHLIKSKEAFGFRLTSYHNLYFLIELMRKVRQAIKEDRLLDFRASFFEQYGFNRPDAKNF

SEQ ID NO: 60510 - protein, 378 aa, Salimicrobium flavidum
  REGION 1..378: note = tr|A0A1N7II04|A0A1N7II04_9BACI Queuine tRNA-ribosyltransferase OS=Salimicrobium flavidum; OX = 570947 GN=tgt PE=3 SV=1
MAITYEHIKTCKQTGARLGKVHTPHGTFDTPAFMPVGTLATVKTMSPEELESMGAGMILSNTYHLWLRPGSDIVEEAGGLHKFMNWKGSILTDSGGFQVFSLSDLRKIKEEGVHFRNHISGEKLFLSPEKAMHIQNQLGADIMMAFDECPPYPAEHKYMKDSVERTSRWAERCLSAHQRPHDQGLFGIVQGGEYEDLRKQSARDLTSLDFPGYAIGGLSVGEPKDVMNRVLESTTPLLPTEKPRYLMGVGSPDSLVDGAIRGIDMFDCVLPTRIARNGTCMTSNGRLVVRNAKFARDFGPIDENCDCYTCRNYSKAYIRHLVKANETFGFRLTTYHNLYFLLKLMRQVREAIKEDRLGDFREEFFEQYGFNKPDAKNF

SEQ ID NO: 60511 - protein, 378 aa, Salimicrobium halophilum
  REGION 1..378: note = tr|A0A1G8PLQ1|A0A1G8PLQ1_9BACI Queuine tRNA-ribosyltransferase OS=Salimicrobium halophilum; OX = 86666 GN=tgt PE=3 SV=1
MAITYEHIKTCRQTGARLGKVHTPHGTFDTPAFMPVGTLATVKTMSPEELESMGAGMILSNTYHLWLRPGSDIVEEAGGLHKFMNWNGSILTDSGGFQVFSLSDLRKIKEEGVHFRNHISGEKLFLSPEKAMHIQNQLGADIMMAFDECPPYPAEHKYMKDSVERTSRWAERCLTAHKRPHDQGLFGIVQGGEYEDLRKQSARDLTSLDFPGYAIGGLSVGEPKDVMNRVLEYTTPLLPTDKPRYLMGVGSPDSLVDGALRGVDMFDCVLPTRIARNGTCMTSNGRLVVRNAKFARDFRPLDENCDCHTCRNYSRAYIRHLVKANETFGIRLTTYHNLYFLLNLMGQVREAIKEDRLGDFREEFFEQYGFNKPDAKNF

SEQ ID NO: 60512 - protein, 378 aa, unidentified
  source 1..378: note = Salimicrobium jeotgali
  REGION 1..378: note = tr|K2FMS6|K2FMS6_9BACI Queuine tRNA-ribosyltransferase OS=Salimicrobium jeotgali; OX = 1230341 GN=tgt PE=3 SV=1
MAVTYEHIKTCKQTGARLGKVHTPHGTFETPAFMPVGTLATVKTMSPEELESMGAGMILSNTYHLWLRPGADIVEEAGGLHKFMNWKGSILTDSGGFQVFSLSDLRKIEEEGVHFRNHISGEKLFLSPEKAMHIQNQLGADIMMAFDECPPYPAEHKYMKDSVERTSRWAERCLSAHKRPHDQGLFGIVQGGEYEDLRKQSARDLTSLDFPGYAIGGLSVGEPKDVMNRMLESTTPLLPTDKPRYLMGVGSPDSLVDGAIRGIDMFDCVLPTRIARNGTCMTSNGRLVVRNAKFARDFGPIDENCDCHTCRNYSRAYIRHLVKSNETFGIRLTTYHNLYFLLKLMRQVREAIKEDRLGDFREEFFEQYGFNRPDAKNF

SEQ ID NO: 60513 - protein, 378 aa, Salimicrobium salexigens
  REGION 1..378: note = tr|A0A1N7JPC0|A0A1N7JPC0_9BACI Queuine tRNA-ribosyltransferase OS=Salimicrobium salexigens; OX = 908941 GN=tgt PE=3 SV=1
MAVTYEHIKTCKQTGARLGKVHTPHGTFETPAFMPVGTLATVKTMSPEELESMGAGMILSNTYHLWLRPGADIVEEAGGLHKFMNWKGSILTDSGGFQVFSLSDLRKIEEEGVHFRNHISGEKLFLSPEKAMHIQNQLGADIMMAFDECPPYPAEHKYMKDSVERTSRWAERCLSAHKRPHDQGLFGIVQGGEYEDLRKQSARDLTSLDFPGYAIGGLSVGEPKDVMNRMLESTTPLLPSDKPRYLMGVGSPDSLVDGAIRGIDMFDCVLPTRIARNGTCMTSNGRLVVRNAKFARDFGPIDENCDCHTCRNYSRAYIRHLVKSNETFGIRLTTYHNLYFLLKLMRQVREAIKEDRLGDFREEFFEQYGFNRPDAKNF

SEQ ID NO: 60514 - protein, 378 aa, Salimicrobium sp.; identical to SEQ ID NO: 60512
  REGION 1..378: note = tr|A0A2A3ABH8|A0A2A3ABH8_9BACI Queuine tRNA-ribosyltransferase OS=Salimicrobium sp. WN024; OX = 2029857 GN=tgt PE=3 SV=1

SEQ ID NO: 60515 - protein, 378 aa, unidentified
  source 1..378: note = Salinarimonadaceae bacterium
  REGION 1..378: note = tr|A0A0P7X7Y4|A0A0P7X7Y4_9RHIZ Queuine tRNA-ribosyltransferase OS=Salinarimonadaceae bacterium HL-109 OX=1653334 GN=tgt PE=3 SV=1
MADEFMFTLTGTDGAARTGEIRMPRGVIRTPAFMPVGTAGTVKAMYPDQVKVLGADVVLGNTYHLMLRPGAERVARLGGLHAFMNWPYPILTDSGGFQVMSLAGLRKIEESGVTFQSHIDGSRHVLTPERSIEIQGLLGSDIQMQLDECVKLPASEEVVAKAMHLSLRWAERCRIAFGEQPGKAMFGIVQGGDVPHLRVESARELVGLDLKGYGIGGLAVGEPQHVMLSMIESVEPHLPREKPRYLMGVGTPDDIVEAVRRGVDMFDCVMPTRAGRHGMAYTRAGRLNLKNARYAEDLSPLDPESTCPASNGYSRAYLHHLVRANEILAMMLLTWNNLAYYQDLMAGLRKAIREERLEDFIAQTKEGWEKGERERKAG

SEQ ID NO: 60516 - protein, 385 aa, Salinarimonas sp.
  REGION 1..385: note = tr|A0A5B2VAK6|A0A5B2VAK6_9RHIZ Queuine tRNA-ribosyltransferase OS=Salinarimonas sp. BN140002; OX = 1638099 GN=tgt PE=3 SV=1
MTDHFSFTVNATDGAARTGEIRMPRGVIRTPAFMPVGTAATVKAMYPEQVKALGADVVLGNVYHLMLRPGAERVASLGGLHAFMNWPYPILTDSGGFQVMSLSALRKIDEEGVTFQSHIDGSTHSLTPERSIEIQGLLGSDIQMQLDECVKLPNSEEAVEKAMRLSLRWAERCRVAFGEQPGRAMFGIVQGGAVERLRVESARALVDLDLKGYAIGGLAVGEPQEVMLRMIETVEPHLPREKPRYLMGVGTPDDIVESVRRGVDMFDCVMPTRAGRHGTAYTRFGRLNLKNAKWADDPTPLDPASACEATRSYSKAYLHHLVRSQEILGMMLLTWSNLAYYQELMAGLRKAIAEKRLEDFVAETKEGWARGVRDGEAEPVGKVES

SEQ ID NO: 60517 - protein, 378 aa, Salinibacillus kushneri
  REGION 1..378: note = tr|A0A1I0G939|A0A1I0G939_9BACI Queuine tRNA-ribosyltransferase OS=Salinibacillus kushneri; OX = 237682 GN=tgt PE=3 SV=1
MAIQYELIKEDKQTGARLGKVTTPHGSFETPVFMPVGTLATVKTMSPEELEEMGAHIILSNTYHLWLRPGEDIIKEAGGLHSFMNWDGSILTDSGGFQVFSLSDMRDITEKGVHFRNHLNGEKLFLSPEKAIEIQNALGSDIIMAFDECPPYPAEYEYMKASVERTSRWAERCLKAHKRPDEQGLFGIVQGGEYEDLRRQSAKDLVSLDLPGYAIGGLSVGEPKHVMNEVLSYTAPLLPKHKPRYLMGVGSPDSLIDGAIRGVDMFDCVLPTRIARNGTCMTSTGRLVVRNAKYARDFSPIDEHCNCYTCRNYSRAYIRHLVKTNETFGFRLTTYHNLYFLVKLMGQVRQAIKDDCLGDFREEFFEQYGFNKPNAKNF

SEQ ID NO: 60518 - protein, 376 aa, Salinibacter sp.
  REGION 1..376: note = tr|A0A2P6C0D6|A0A2P6C0D6_9BACT Queuine tRNA-ribosyltransferase OS=Salinibacter sp. 10B OX=1923971; GN = tgt PE=3 SV=1
MTFTLDHTDASSAARAGRLHTSHGTVETPIFMPVGTRGSVKAVSPRTLRQDVGAEMILGNTYHLFLRPGLDVIEGGGGLHEFMRWEGPMLTDSGGYQVFSLSDHATLSEEGVEFKNPIDGDTHLFTPENVVDTQRTLGADVMMVLDECPAADVSKAYARRSNDLTLRWAERAKDRFDETDPRYGHEQALFGIVQGVVYPEVRRASARALVDLGFPGYAIGGLSVGEPHEQMYEMVSVTTAELPADKPRYLMGVGTPANLLENVARGVDMFDCVMPTRNGRNGQLFTTEGIINIKNAQWTDDHTPIDPGLDTYVSQTFTKAYVRHLQKSREYLGLQIASQQNLAFYCWLMREARAAIREDRFSSWKEEVQPRVSRRL

SEQ ID NO: 60519 - protein, 382 aa, Salinicoccus alkaliphilus
  REGION 1..382: note = tr|A0A1M7BSQ4|A0A1M7BSQ4_9STAP Queuine tRNA-ribosyltransferase OS=Salinicoccus alkaliphilus DSM 16010 OX=1123231 GN=tgt PE=3 SV=1
MMAIRYEHIKTCKQTGARLGKLHTPHGVIDTPIFMPVGTLATVKSMTPEELADIGSQIILSNTYHLWLRPGSDLIREAGGLHKFMNWDKPILTDSGGFQVFSLSDSRKIEEEGVHFRSHLDGSKLFLSPEGAMDIQHDLGSDIMMSFDECPPIPAEHKYVKDSIERTTRWAERGLEHHIKKGRDKHQALFGIVQGGEYEDLRAQSAKDLVSMDFPGYSIGGLSVGEPKPVMYRMLEQTIPLLPENKPRYLMGIGSPDSLIEGVMRGVDMFDCVLPTRIARNGTTMTSSGRVVVKNKKFERDFTPLDPNCDCYTCKNYSKAYLRHLFKADEILGLRLTTYHNLYFLLKLMEDVRSAILNDNLLDFKEAFFDSYGLNVENPKNF

SEQ ID NO: 60520 - protein, 381 aa, Salinicoccus halodurans
  REGION 1..381: note = tr|A0A0F7HLY3|A0A0F7HLY3_9STAP Queuine tRNA-ribosyltransferase OS=Salinicoccus halodurans; OX = 407035 GN=tgt PE=3 SV=1
MAIRYEHIKTCKQTGARLGRLHTPHGTIDTPIFMPVGTLATVKTMTPEELADIGSQIILSNTYHLWLRPGSDIVAEAGGLHKFMNWDKPILTDSGGFQVFSLSDRRKIEEEGVHFRSHLDGSKLFLSPEKAMDIQHDLGSDIMMSFDECPPHPAEHKYVKDSIERTSRWAERGLNHHIKSGKDKTQALFGIVQGGEYADLRAQSAKDLVSMDFPGYSIGGLSVGEPKPIMYRALEETIPHLPEDKPRYLMGVGSPDALIEGVIRGVDMFDCVLPTRIARNGTTMTSKGRVVVKKKIYERDFTPLDAQCDCYTCRNYTKAYLRHLFKTDEILGLRLTTYHNLYFLLKLMEDIRTAILNDSLLDFKEAFFESYGLNVENPKNF

SEQ ID NO: 60521 - protein, 381 aa, unidentified
  source 1..381: note = Salinicoccus kekensis
  REGION 1..381: note = tr|A0A285U8W1|A0A285U8W1_9STAP Queuine tRNA-ribosyltransferase OS=Salinicoccus kekensis OX=714307; GN = tgt PE=3 SV=1
MAIRYEHIKTCKQTGARLGKLHTPHGVIDTPIFMPVGTLATVKSMTPEELADIGSQIILSNTYHLWLRPGSDLIREAGGLHKFMNWDKPILTDSGGFQVFSLSDTRKIEEEGVHFRSHLDGSKLFLSPEGAMDIQHDLGSDIMMSFDECPPIPAEHKYVKDSIERTTRWAERGLEHHLKKGRDKHQALFGIVQGGEYEDLRAQSAKDLVSMDFPGYSIGGLSVGEPKPVMYRMLEHTIPLLPENKPRYLMGIGSPDSLIEGVIRGVDMFDCVLPTRIARNGTTMTSKGRVVVKNKKFERDFTPLDPNCDCYTCKNYTKAYIRHLFKADEILGLRLTTYHNLYFLLKLMEDVRTAILNDNLLDFKEAFFESYGLNVENPKNF

SEQ ID NO: 60522 - protein, 381 aa, Salinicoccus qingdaonensis
  REGION 1..381: note = tr|A0A1G9AJQ1|A0A1G9AJQ1_9STAP Queuine tRNA-ribosyltransferase OS=Salinicoccus qingdaonensis; OX = 576118 GN=tgt PE=3 SV=1
MAIRYEHIKTCKQTGARLGKLHTPHGVIDTPIFMPVGTLATVKSMTPEELADIGSQIILSNTYHLWLRPGNDIIREAGGLHKFMNWDRPILTDSGGFQVFSLSDSREIKEEGVHFRSHLDGSKLFLSPEGAMDIQHDLGSDIMMSFDECPPIPAEYDYVKDSLERTSRWAERGLEHHIKKGHDKHQALFGIVQGGEYEDLRTQSAKDLVSMDFPGYSIGGLSVGEPKPVMYRMLEHTIPLLPENKPRYLMGIGSPDALIEGVIRGVDMFDCVLPTRIARNGTTMTSQGRVVVKNKKFERDFTPLDPNCDCYTCKNYSKAYLRHLIKANEILGLRLTTYHNLYFLLKLMEDVRSAILNDRLLDFKEAFFDSYGLNVNNPKNF

SEQ ID NO: 60523 - protein, 381 aa, Salinicoccus roseus
  REGION 1..381: note = tr|A0A0C2E6I0|A0A0C2E6I0_9STAP Queuine tRNA-ribosyltransferase OS=Salinicoccus roseus OX=45670; GN = tgt PE=3 SV=1
MAIRYEHIKTCKQTGARIGKLHTPHGTIDTPIFMPVGTLATVKTMTPEELADIGSQIILSNTYHLWLRPGSDIIREAGGLHKFMNWDKPILTDSGGFQVFSLSDRRKIEEEGVHFRSHLDGSKLFLSPEKAMDIQHDLGSDIMMAFDECPPFPAEKKYVKDSIERTTRWAERCLTHHVKEGHDRNQALFGIVQGGEYSDLRAQSAKDLVAMDFPGYSIGGLSVGEPKPIMYRMLEETVPFLPEDKPRYLMGVGSPDALIEGVIRGIDMFDCVLPTRIARNGTTMTSKGRVVVKNKKFERDFTPLDPGCDCYTCRNYTKAYLRHLFKTDEILGLRLTTYHNLYFLLKLMEDIRTAILNDQLMDFKEAFFESYGLNVENPKNF

SEQ ID NO: 60524 - protein, 382 aa, unidentified
  source 1..382: note = Salinicoccus sediminis
  REGION 1..382: note = tr|A0A0M2SL48|A0A0M2SL48_9STAP Queuine tRNA-ribosyltransferase OS=Salinicoccus sediminis; OX = 1432562 GN=tgt PE=3 SV=1
MMAIRYEHIKTCKQTGARLGRLHTPHGTIDTPIFMPVGTLATVKTMTPEELADIGSQIILSNTYHLWLRPGSDIVAEAGGLHKFMNWDRPILTDSGGFQVFSLSDRRQIEEAGVHFRSHLDGSKLFLSPEGAMDIQHDLGSDIMMSFDECPPHPAEHKYVKDSIERTTRWAERGLDHHIKSGRDKTQALFGIVQGGEYSDLRAQSAKDLVSMDFPGYSIGGLSVGEPKPIMYRVLEETVPHLPEDKPRYLMGVGSPDALIEGVIRGVDMFDCVLPTRIARNGTTMTSKGRVVVKKKMYERDFTPLDEQCDCYTCRNYTKAYLRHLFKTDEILGLRLTTYHNLYFLLKLMEDVRSAILNDNLMDFKEAFFESYGLNVENPKNF

SEQ ID NO: 60525 - protein, 381 aa, Salinicoccus sp.
  REGION 1..381: note = tr|A0A558AYJ3|A0A558AYJ3_9STAP Queuine tRNA-ribosyltransferase OS=Salinicoccus sp. CT19; OX = 2493691 GN=tgt PE=3 SV=1
MAIRYEHIKTCKQTGARIGKLHTPHGTIDTPIFMPVGTLATVKTMTPEELADIGSQIILSNTYHLWLRPGSDIIREAGGLHKFMNWDRPILTDSGGFQVFSLSDRRKIEEEGVHFRSHLDGSKLFLSPEKAMDIQHDLGSDIMMAFDECPPFPAEKQYVQDSIDRTTRWAERCLNHHVKSGNDKHQALFGIVQGGEYKDLRAQSAKELVSMDFPGYSIGGLSVGEPKPIMYRVLEETIPYLPEDKPRYLMGVGSPDALIEGVIRGVDMFDCVLPTRIARNGTTMTSQGRVVVKNKKFERDFTPLDPACDCYTCRNYTKAYLRHLFKTDEILGLRLTTYHNLYFLLKLMEDIRTAILNDELLDFKEAFFESYGLNVENPKNF

SEQ ID NO: 60526 - protein, 372 aa, Salinicola socius
  REGION 1..372: note = tr|A0A1Q8STQ6|A0A1Q8STQ6_9GAMM Queuine tRNA-ribosyltransferase OS=Salinicola socius OX=404433; GN = tgt PE=3 SV=1
MKFERLAQEGRARRGRLTFPRGTVETPAFMPVGTYGTVKGMTPRDVEAIGAEIILGNTFHLWLRPGTEVIEAHGDLHDFSQWHKPILTDSGGFQVFSLGAMRKITEQGVHFRSPVDGAKVFMGPEESMAVQRSLSSDVVMIFDECTPYPATESEAQKSMELSLRWAARSRAAHGDSPSALFGIVQGGMYPELRKRSLEGLLEIGFDGLAIGGLSVGEPKEEMIRVLDYLPSWMPEDKPRYLMGVGKPEDLVEGVRRGIDMFDCVMPTRNARNGHLFTADGTVKIRNATHRHDTRPLEADCDCYTCQHFSRGYLHHLDRCGEMLGSMLNTIHNLRYYQRLMAGLRGAIEAGTLADFVAQFYQRRGLPVPPGVD

SEQ ID NO: 60527 - protein, 372 aa, Salinicola sp.
  REGION 1..372: note = tr|A0A2D8NWL5|A0A2D8NWL5_9GAMM Queuine tRNA-ribosyltransferase OS=Salinicola sp. OX=1978524; GN = tgt PE=3 SV=1
MKFERLGQQGRARRGRLTFPRGTVETPAFMPVGTYGTVKGMTPKDVEAIGAEIILGNTFHLWLRPGTEVIEGHGDLHDFSQWHKPILTDSGGFQVFSLGAMRKITEQGVHFRSPVDGAKVFMGPEESMAVQRSLGSDIVMIFDECTPYPATEAEARKSMELSLRWAKRSREAHGDSPSALFGIVQGGMYPDLRKRSLEGLLEIGFDGLAIGGLSVGEPKEEMIGVLDYLPTWMPEDKPRYLMGVGKPEDLVEGVRRGIDMFDCVMPTRNARNGHLFTADGTVKIRNASHRHDTDPLEADCDCYTCQHFSRGYLHHLDRCGEMLGSMLNTIHNLRYYQRLMAGLRGAIEAGTLADFVAQFYRRRGLPVPPGVD

SEQ ID NO: 60528 - protein, 372 aa, Salinicola sp.
  REGION 1..372: note = tr|A0A1Q8SZE2|A0A1Q8SZE2_9GAMM Queuine tRNA-ribosyltransferase OS=Salinicola sp. MH3R3-1; OX = 1928762 GN=tgt PE=3 SV=1
MKFERLGQQGRARRGRLTFPRGTVETPAFMPVGTYGTVKGMTPKDVEAIGAEIILGNTFHLWLRPGTEVIEAHGDLHDFSQWHKPILTDSGGFQVFSLGAMRKITEQGVHFRSPVDGAKVFMGPEESMAVQRSLGSDVVMIFDECTPYPASEAEAQKSMELSLRWAARSRAAHGDSPSALFGIVQGGMYPELRKRSLEGLLDIGFDGLAIGGLSVGEPKEEMIRVLDYLPSWMPEDKPRYLMGVGKPEDLVEGVRRGIDMFDCVMPTRNARNGHLFTADGTVKIRNAVHRHDTNPLEADCACYTCQHFSRGYLHHLDRCGEMLGSMLNTVHNLRYYQRLMAGLRGAIEAGTLADFVAQFYRRRGLSVPPEAD

SEQ ID NO: 60529 - protein, 376 aa, Salinihabitans flavidus
  REGION 1..376: note = tr|A0A1H8UB98|A0A1H8UB98_9RHOB Queuine tRNA-ribosyltransferase OS=Salinihabitans flavidus; OX = 569882 GN=tgt PE=3 SV=1
MVQRFRFDLKATDGRARTGVIATPRGEIRTPAFMPVGTAGTVKAMLPEQVRATGADIVLGNTYHLMLRPTAERIARLGGLHRFMNWDRPILTDSGGFQVMSLAELRKLSEKGVQFRSHIDGSRHELTPERSMEIQRLLGSDIVMCFDECPALPADEARVAESMRLSMRWAARSKEAFGDRPGHALFGIQQGGVTQELRAESAEALTAIGFDGYAIGGLAVGEGQEAMFGVLEYAPDMLPEGRPRYLMGVGKPDDIVGAVARGVDMMDCVLPTRSGRTGQAWTRRGQVNIKNARHADDPRPLDENCTCPACRHYSRAYLHHVFRAGEMISGMLLTWHNLHYFQSLMAGMRDAIAEGRFDGWQAQFHSDRAQGDIEPL

SEQ ID NO: 60530 - protein, 386 aa, Salinimicrobium catena
  REGION 1..386: note = tr|A0A1H5PFU4|A0A1H5PFU4_9FLAO Queuine tRNA-ribosyltransferase OS=Salinimicrobium catena; OX = 390640 GN=tgt PE=3 SV=1
MVIFAALKSSMKFELAVNDPGSSARAGIITTDHGTIETPIFMPVGTVASVKGISQKELKEEVNPDIILGNTYHLYLRPQTEILKKAGGLHKFMNWDRNILTDSGGYQVYSLAERRKIKEEGVRFKSHIDGSYHNFTPENVMEIQRLIGADIIMAFDECTPYPCDYNYAKNSMHRTHRWLDRCITHLDKTPPEYGYSQALFPIVQGSTYKDLRKQSAEYIANAGAEGNAIGGLSVGEPAEEMYAMTEVVTNILPKEKPRYLMGVGTPINILENIALGVDMFDCVMPTRNARNGMLFTSHGTINIKNKKWQDDFSPLDENGTTYVDTFYTKAYLRHLFTVNEMLGKQIATMHNLGFYLWLVREARKHILAGDFASWKNMMVKQMDKRL

SEQ ID NO: 60531 - protein, 376 aa, unidentified
  source 1..376: note = Salinimicrobium sediminis
  REGION 1..376: note = tr|A0A285WZI9|A0A285WZI9_9FLAO Queuine tRNA-ribosyltransferase OS=Salinimicrobium sediminis; OX = 1343891 GN=tgt PE=3 SV=1
MKFELAVTDPGSSARAGVITTDHGIIETPIFMPVGTIATVKGISQKDLKEQVDPDIILGNTYHLYLRPQTEILKKAGGLHKFMNWDRNILTDSGGYQVYSLSERRKIKEEGVRFKSHIDGSYHNFTPENVMEIQRAIGADIIMAFDECTPYPCDYRYAKNSMHRTHRWLDRCITHFEKTPPLYGYSQALFPIVQGSTYKDLRKESAEYIASAGAEGNAIGGLSVGEPAEEMYAMTEIVTNILPKEKPRYLMGVGTPINILENIALGVDMFDCVMPTRNARNGMLFTSHGTINIKNKKWEDDFSPIDEAANTYVDTYYTKAYLKHLFSVNELLGKQIATMHNLGFYLWLVREARKHILAGDFSSWKNVMVKQMNNRL

SEQ ID NO: 60532 - protein, 370 aa, unidentified
  source 1..370: note = Salinimonas sediminis
  REGION 1..370: note = tr|A0A346NP40|A0A346NP40_9ALTE Queuine tRNA-ribosyltransferase OS=Salinimonas sediminis; OX = 2303538 GN=tgt PE=3 SV=1
MQFELLKTEGKARRGRLKFDRGEVETPAFMPVGTYGTVKGMTPEELKDSGAHICLGNTFHLMLRPGTSIIRQHGDLHDFMHWDKPILTDSGGFQVFSLGDLRKITEEGVTFRSPINGEKILLTPEKSMEVQRDLGSDIVMIFDECTPFPATEQEARLSMEMSLRWAERSKTAHGDNPAALFGIIQGGMYEELRDVSLAGLEDIGFDGYAIGGLSVGEPKEDMIRIIEHTAHQIPDNKPRYLMGVGKPEDIVEAVRRGVDMFDCVMPTRNARNGHLFVTEGVVKIRNAKHRTDTSALDENCDCYTCQHYSRSYLHHLDKCNEILGARLNTIHNLRYYQRVMQGLRDALDAGTLDDFVSEFYAQKEMPVPAL

SEQ ID NO: 60533 - protein, 370 aa, Salinimonas sp.
  REGION 1..370: note = tr|A0A5B7YCH8|A0A5B7YCH8_9ALTE Queuine tRNA-ribosyltransferase OS=Salinimonas sp. KX18D6; OX = 2572577 GN=tgt PE=3 SV=1
MQFELLKTEGKARRGRLVFDRGVVETPAFMPVGTYGTVKGMTPEELEDSGAHICLGNTFHLMLRPGTSIIKQHGDLHDFMHWDKPILTDSGGFQVFSLGDLRKITEEGVTFRSPINGEKILLTPEKSMEVQRDLGSDIVMIFDECTPFPATEQEARLSMEMSLRWAERSKVAHGDSPAALFGIIQGGMYENLRDVSLAGLEEIGFDGYAIGGLSVGEPKEDMIRIIDHTAHQIPDDKPRYLMGVGKPEDIVEAVRRGVDMFDCVMPTRNARNGHLFVTEGVVKIRNAKHRNDTSALDENCDCYTCKNYSRSYLHHLDKCNEILGARLNTIHNLRYYQRVMQGLRDALDAGDLDSFVKEFYAQKDMPVPAL

SEQ ID NO: 60534 - protein, 380 aa, unidentified
  source 1..380: note = Saliniradius amylolyticus
  REGION 1..380: note = tr|A0A2S2E504|A0A2S2E504_9ALTE Queuine tRNA-ribosyltransferase OS=Saliniradius amylolyticus; OX = 2183582 GN=tgt PE=3 SV=1
MKYELLKTDGAARRGRLVFERGVVETPAFMPVGTYGTVKGMTPEELAESGAEICLGNTFHLMLRPGTEIMKQHGDLHDFMHWDKPILTDSGGFQVFSLGDLRKITEEGVTFRSPINGEKIMLTPEKSMQVQRDLGADIVMIFDECTPYPATRQQARESMELSLRWAKRSKDAHEGNKAALFGIVQGGMYEDLRDKSLEGLCEIGFDGYAIGGLSVGEPKEDMIRVLDNTAHQIPVDKPRYLMGVGKPEDIVEAVRRGIDMFDCVMPTRNARNGHLFVTEGVIKIRNARHRTDTGPLDENCDCYTCKNYSRSYLHHLDKCNEILGARLNTIHNLRYYQRVMEGLRGAIADGKLDDFVQTFYAQKGMEVPALTAAPSSTNNE

SEQ ID NO: 60535 - protein, 377 aa, unidentified
  source 1..377: note = Salinisphaera halophila
  REGION 1..377: note = tr|A0A423Q3J5|A0A423Q3J5_9GAMM Queuine tRNA-ribosyltransferase OS=Salinisphaera halophila YIM 95161 OX=1051139 GN=tgt PE=3 SV=1
MHLEPLCQSGDARRARLHLPHGVVDTPAFMPVGTYGTVKGMTPSEVAELGAQIVLGNTYHLMLRPGTEVIGEHGGLHDFMGWQGPILTDSGGFQVWSLAGMRKLTEDGVAFQSPLDGARWFLSPEDAVSVQHALNSDIVMCLDECTDYPVSQADAAASMQRSMRWAARCREAHGDSGNLLFGINQGSVYADLRAESMAALVDIGFDGYAIGGVSVGEGWDDKADVLAGVLPLAPRDRPRYLMGVGTPADLVASVYFGVDMFDCVMPTRNARNGYLFTSRGVVKIKNAVHRHDTGPLDPACGCPTCRGYSRAYLHHLYRCGEILAARLHTWHNLYYYQSLMARIRTAIEADDYPRFMADFFTGPEGAGTAQAAGFGHS

SEQ ID NO: 60536 - protein, 377 aa, Salinisphaera hydrothermalis
  REGION 1..377: note = tr|A0A084IGJ8|A0A084IGJ8_SALHC Queuine tRNA-ribosyltransferase OS=Salinisphaera hydrothermalis (strain C41B8) OX=1304275 GN=tgt PE=3 SV=1
MIYEALGRDGNARRGRLHLPHGTVETPAFMPVGTYGTVKGMTPEELTGLGAEIVLGNTYHLMLRPGTEIVGAHGGLHGFMHWDRPILTDSGGFQVWSLAEMRKLTEDGVAFRSPLDGSRQYLSPERSIEVQHALNSDIVMCLDECTDYPVSKQDAAQSMQLSMRWAARCRAAHGDSNNKLFGINQGSVFDDLRAESMAALVDIGFDGYAIGGVSVGEGWEDKASVLAGVLPRTPADAPRYLMGVGTPADLVASVAYGIDMFDCVMPTRNARNGYLFTHDGVVKIKNAVHKHDTGPLDASCDCYTCRHYSRAYLHHLYRCGEILAARLNTWHNLAYYQRLMQRIRGAIEAGEYAAFMRDFFTGAEGRGTPQAAHGGYA

SEQ ID NO: 60537 - protein, 377 aa, unidentified
  source 1..377: note = Salinisphaera japonica
  REGION 1..377: note = tr|A0A423PEV7|A0A423PEV7_9GAMM Queuine tRNA-ribosyltransferase OS=Salinisphaera japonica YTM-1; OX = 1209778 GN=tgt PE=3 SV=1
MIYESIRASGNARRGRVHLPHGTVETPAFMPVGTYGTVKGMTPEEVAGLGAEIVLGNTYHLMLRPGTDIIDAHGGLHDFMQWHGPILTDSGGFQVWSLAEMRKLTEEGVAFASPLDGAKWFLTPERSIAVQHSLNSDIVMCLDECTDFPVAKDQAAASMQLSMRWAARCRAAHGDSGNKLFGINQGSIYPDLRAESMAALVDIGFDGYAIGGVSVGEGWDDKAAVLDNILPLTPNDAPRYLMGVGTPADLVAAVGYGIDMFDCVMPTRNARNGYLFTHAGIVKIKNAVHKFDTGPLDTACDCYTCTHYSRAYLHHLHRCGEILGARLNTWHNLAYYQRLMARIRAAIEAGDYAGFQRDFFTGAEGAGTPQAAHGGWA

SEQ ID NO: 60538 - protein, 377 aa, unidentified; identical to SEQ ID NO: 60535
  source 1..377: note = Salinisphaera orenii
  REGION 1..377: note = tr|A0A423PGW3|A0A423PGW3_9GAMM Queuine tRNA-ribosyltransferase OS=Salinisphaera orenii MK-B5; OX = 856730 GN=tgt PE=3 SV=1

SEQ ID NO: 60539 - protein, 378 aa, Salinisphaera shabanensis
  REGION 1..378: note = tr|U2ESP1|U2ESP1_9GAMM Queuine tRNA-ribosyltransferase OS=Salinisphaera shabanensis E1L3A; OX = 1033802 GN=tgt PE=3 SV=1
MHLEHISNSGDARRARLTLPHGVVDTPTFMPVGTYGTVKGMTPEELESLGAQIVLGNTYHLMLRPGTEIIGQHGGLHDFMHWHKPILTDSGGFQVWSLAEMRKLTEDGVAFRSPLDGSRQYLSPERSIEVQHALNSDIVMCLDECTDYPVPKQDAAASMQLSMRWAERCRTAHGDSQNLLFGINQGSVFADLRAESMAALVDIGFDGYAIGGVSVGEAWADKAAVLEGVLPVTPADYPRYLMGVGTPSDLVAAVSFGIDMFDCVMPTRNARNGYLFTSEGVVKIKNAVHKHDTGPLDANCGCPTCRNYSRAYLHHLYRCGEILAARLNTWHNLFYYQRLMQRIREAIETDRYSEFMREFFSGPEGAGTAQAAYFGYGV

SEQ ID NO: 60540 - protein, 377 aa, Salinisphaera sp.
  REGION 1..377: note = tr|A0A2E9AHE5|A0A2E9AHE5_9GAMM Queuine tRNA-ribosyltransferase OS=Salinisphaera sp. OX=1914330; GN = tgt PE=3 SV=1
MLNLLNQSGAARRARLTLPHGVVDTPTFMPVGTYGTVKGMTPEELESLGAQIVLGNTYHLMLRPGTEIIQQHDGLHGFMHWDKPILTDSGGFQVWSLAEMRKLTEDGVAFRSPLDGSRQYLSPERSIEVQHALNSDIVMCLDECTDYPVPKEDAAASMQLSMRWAARCRAAHGDSGNLLFGINQGSVFADLRAESMAALVDIGFDGYAIGGVSVGEAWDDKAAVLEGVLPVTPADYPRYLMGVGTPSDLVAAVSFGIDMFDCVMPTRNARNGYLFTTEGVVKIKNAVHKHDTGPLDPNCGCPTCQNYSRAYLHHLYRCGEILAARLNTWHNLYYYQQLMQRIRSAIEADRYAEFMREFFTAPEGRGSAQAAYFGYGG

SEQ ID NO: 60541 - protein, 379 aa, Salinisphaera sp.
  REGION 1..379: note = tr|A0A2Z3JBU3|A0A2Z3JBU3_9GAMM Queuine tRNA-ribosyltransferase OS=Salinisphaera sp. LB1; OX = 2183911 GN=tgt PE=3 SV=1
MIYEALGRDGDARRGRLHLPHGTVETPAFMPVGTYGTVKGMTPEELTALGAEIVLGNTYHLMLRPGTGIVGAHGGLHRFMHWDRPILTDSGGFQVWSLAEMRKLGEDGVAFRSPLDGSRQYLSPERSIEVQHALNSDIVMCLDECTDYPVPKADAAQSMQLSMRWAARCREAHGESGNKLFGINQGSVFADLRAESMAALVDIGFDGYAIGGVSVGEGWADKAAVLAGVLPETPADAPRYLMGVGTPADLVASVAYGIDMFDCVMPTRNARNGYLFTHEGVLKIKNAVHKHDTAPLDAACDCYTCRHYSRAYLHHLFRCGEILASRLNTWHNLAYYQRLMQRVRAAIEAGDYAAFMRDFFSGAEGRGTPQAAHGGYGGG

SEQ ID NO: 60542 - protein, 368 aa, unidentified
  source 1..368: note = Salinisphaeraceae bacterium
  REGION 1..368: note = tr|A0A2D4S9S7|A0A2D4S9S7_9GAMM Queuine tRNA-ribosyltransferase OS=Salinisphaeraceae bacterium; OX = 2026789 GN=tgt PE=3 SV=1
MKFQLLRQSGDARLGRLELMHGAVETPVFMPVGTYGTVKAMTPEELWDIGARIILGNTFHLMLRPGAQRIEQLGGLQRFMNWRGPILTDSGGFQVWSLAEMRQLTETGVRFRSPVDGAACELTPESAVEIQRELGSDIVMALDECTDYPVSHAQAAESMALSMRWAARCKTAHAGNPNALFGINQGGVYPDLRADSMRQLADIGFDGYAVGGVSVGEPKADRARIFEAALPHAPTLAPRYLMGVGTPADIVNAVGYGVDMFDCVMPTRNARNGYLFTSQGVVKIKNAIHRDADEPLDPACACYTCRSYSRAYLHHLYRCGEILAARLHTWHNLYFYLDLMRRIREAIAEDRFDRFQRDFQQSALGESF

SEQ ID NO: 60543 - protein, 372 aa, unidentified
  source 1..372: note = Salinispira pacifica
  REGION 1..372: note = tr|V5WHT4|V5WHT4_9SPIO Queuine tRNA-ribosyltransferase OS=Salinispira pacifica OX=1307761; GN = tgt PE=3 SV=1
MIYRKLHKDQHCEARTGQIHLPHGNVDTPVFMPVGTNASVKAVRLEDLFSMGVQLILGNTYHLYLRPGMDVIQKFGGLHGFNNWNGNILTDSGGYQVFSLAPFRKVTNEGVEFRSHIDGSKHFLTPEKVVGIQEILNSDIQMVLDVCTEPGISHKSAREALEITTSWALRAKNSWETTTETYQGKLFGIVQGNFYEDLRARSAEELSALDLPGYAIGGLSVGEPFDQFQHYLAFTAPLLPGGKPRYLMGVGTPEYILEAIEHGIDMFDCVFPTRVARNGTLFTDHGRLVLKNQRYEYDTRPVSEHSPTAAYSRSYLRHLFKAGEMLGPMLASLHNLWFLKKLVEDSRRAIHENRFLEFKRSFLDLYSMGIPD

SEQ ID NO: 60544 - protein, 373 aa, unidentified
  source 1..373: note = Salinivibrio kushneri
  REGION 1..373: note = tr|A0A1V3GIF9|A0A1V3GIF9_9GAMM Queuine tRNA-ribosyltransferase OS=Salinivibrio kushneri; OX = 1908198 GN=tgt PE=3 SV=1
MEYELKKTDGRARRGRLIFERGTVETPAFMPVGTYGTVKGMTPEEVKGTGAEILLGNTFHLWLRPGQEIMRLHGDLHDFMQWHGPILTDSGGFQVFSLGDIRKITEEGVHFRNPVNGDRIFMDAEKSMEIQYDLGSDIVMIFDECTPYPATHAEAKKSMEMSLRWAKRSRNHFDKLGNKNALFGIVQGGVYEDLRDVSVEGLTEIGFDGYAVGGLAVGEPKEDMHRILEHTCPQLPEDKPRYLMGVGKPEDLVEGVRRGVDMFDCVMPTRNARNGHLFITGGVIKIRNAKHKSDTSPLDPECDCYTCRHYSRAYLYHLDRCNEILGARLNTIHNLRYYQRVMEGLRNAIDEGRLDAFVADFYARRGKEVPPLD

SEQ ID NO: 60545 - protein, 373 aa, Salinivibrio sharmensis
  REGION 1..373: note = tr|A0A1V3H3D9|A0A1V3H3D9_9GAMM Queuine tRNA-ribosyltransferase OS=Salinivibrio sharmensis; OX = 390883 GN=tgt PE=3 SV=1
MEYELKKTDGRARRGRLIFERGTVETPAFMPVGTYGTVKGMTPEEVKGTGAEILLGNTFHLWLRPGQEIMRLHGDLHDFMQWHGPILTDSGGFQVFSLGDIRKITEEGVHFRNPVNGDRIFMDAEKSMEIQYDLGSDIVMIFDECTPYPATHEEAKKSMEMSLRWAKRSRNHFDKLGNKNALFGIVQGGVYEDLRDVSVEGLTEIGFDGYAVGGLAVGEPKEDMHRILEHTCPQLPEDKPRYLMGVGKPEDLVEGVRRGVDMFDCVMPTRNARNGHLFITGGVIKIRNAKHKSDTSPLDPECDCYTCRHYSRAYLYHLDRCNEILGARLNTIHNLRYYQRVMEGLRNAIDEGRLDAFVADFYARRGKEVPPLD

SEQ ID NO: 60546 - protein, 373 aa, Salinivibrio sp.
  REGION 1..373: note = tr|A0A1V3HXV8|A0A1V3HXV8_9GAMM Queuine tRNA-ribosyltransferase OS=Salinivibrio sp. IB872; OX = 1766123 GN=tgt PE=3 SV=1
MEYELKKTDGRARRGRLIFERGTVETPAFMPVGTYGTVKGMTPEEVKGTGAEILLGNTFHLWLRPGQEVMRLHGDLHDFMQWQGPILTDSGGFQVFSLGDIRKITEEGVHFRNPVNGDRIFMDAEKSMEIQYDLGSDIVMIFDECTPYPATHAEAKKSMEMSLRWAKRSRNHFDKLGNKNALFGIVQGGVYEDLRDVSVKGLTEIGFDGYAVGGLAVGEPKEDMHRILEHTCPQLPEDKPRYLMGVGKPEDLVEGVRRGVDMFDCVMPTRNARNGHLFITGGVIKIRNAKHKSDTSPLDPECDCYTCRHYSRAYLHHLDRCNEILGARLNTIHNLRYYQRVMEGLRHAIDEGRLDAFVEDFYARRGKEVPPLD

SEQ ID NO: 60547 - protein, 373 aa, Salinivibrio sp.
  REGION 1..373: note = tr|A0A1N6DSV6|A0A1N6DSV6_9GAMM Queuine tRNA-ribosyltransferase OS=Salinivibrio sp. ES.052; OX = 1882823 GN=tgt PE=3 SV=1
MEYELKKTDGRARRGRLIFERGTVETPAFMPVGTYGTVKGMTPEEVKGTGAEILLGNTFHLWLRPGQEVMRLHGDLHDFMQWHGPILTDSGGFQVFSLGDIRKITEEGVHFRNPVNGDRIFMDAEKSMEIQYDLGSDVVMIFDECTPYPATHAEAKKSMEMSLRWAKRSRNHFDKLGNKNALFGIVQGGVYEDLRDVSVEGLTEIGFDGYAVGGLAVGEPKEDMHRILEHTCPQLPEDKPRYLMGVGKPEDLVEGVRRGVDMFDCVMPTRNARNGHLFITGGVIKIRNAKHKSDTSPLDPECDCYTCRHYSRAYLYHLDRCNEILGARLNTIHNLRYYQRVMEGLRNAIDEGRLDAFVADFYARRGKEVPPLD

SEQ ID NO: 60548 - protein, 377 aa, unidentified
  source 1..377: note = Salinivirga cyanobacteriivorans
  REGION 1..377: note = tr|A0A0S2HX63|A0A0S2HX63_9BACT Queuine tRNA-ribosyltransferase OS=Salinivirga cyanobacteriivorans; OX = 1307839 GN=tgt PE=3 SV=1
MLSFNLLSTDVRGKARAGVIRTDRGEIETPIFMPVGTVGTVKGVLGPVLTDDIKAQIILGNTYHLFLRPGNDVIQKAGGLHQFMNWKRPILTDSGGFQVFSLADNRKLSEEGVTFRSHIDGGKHFFSPENVVDTQRIIGSDIMMALDECPPGDADYQYAHKSLQLTQNWLKRGHAHFKKTNPLYGKHQAWFPIVQGAGYPDLRRSAARCVTDLGAEGNAIGGLSVGEPTDLMYEMIEVTNEVLPEDKPRYLMGVGTPANILEAIDRGVDMFDCVMPTRNGRNGMLFTSEGIINIKNKKWEHDYSPVDPNGTSWVDRYYSKAYLRHLFVSRELLGPQIASIHNLAFYLWLVKTAREKIIAGNFASWKSKMVQNVAQRI

SEQ ID NO: 60549 - protein, 43 aa, unidentified
  source 1..43: note = Salinivirgaceae bacterium
  REGION 1..43: note = tr|A0A2N6A2K5|A0A2N6A2K5_9BACT tRNA guanosine(34) transglycosylase Tgt (Fragment) OS=Salinivirgaceae bacterium OX=2053305 GN=tgt PE=4 SV=1
MLTFNLVSTDTNGKARAGVIRTDRGEIETPIFMPVGTVGTVKG

SEQ ID NO: 60550 - protein, 340 aa, unidentified
  source 1..340: note = Salinivirgaceae bacterium
  REGION 1..340: note = tr|A0A2N5ZAT9|A0A2N5ZAT9_9BACT Queuine tRNA-ribosyltransferase (Fragment) OS=Salinivirgaceae bacterium OX=2053305 GN=C0599_16160 PE=3 SV=1
VGTVKGVLNRELNEDIKAQIILGNTYHLFLRPGMDIMRQAGGLHQFINWDKPILTDSGGFQVFSLAENRKLSEEGVTFRSHIDGGKHFFSPENVVETQRIIGSDIMMALDECPPGDADYQYAYKSLQLTQHWLKRGIDHFKKTEPLYGKHQAWFPIVQGAGYPDLRRDAAKFVTDLGAEGNAIGGLSVGEPTDVMYEMIEVTNEVLPADKPRYLMGVGTPANILEAIDRGVDMFDCVMPTRNGRNGMLFTSNGIINIKNKKWENDFSAIDENGTSWVDSHYSKGYLRHLFVARELLGPQIASIHNLAFYLWLVKEARKQIVSGTFSTWKKEMVERVAQRI

SEQ ID NO: 60551 - protein, 379 aa, unidentified
  source 1..379: note = Salipaludibacillus aurantiacus
  REGION 1..379: note = tr|A0A1H9RKS5|A0A1H9RKS5_9BACI Queuine tRNA-ribosyltransferase OS=Salipaludibacillus aurantiacus; OX = 1601833 GN=tgt PE=3 SV=1
MQAITYEHIKTCRQSGARLGIVHTPHGSFETPIFMPVGTLATVKTMSPEDLKSMNAQIILSNTYHLWLRPGEDIVEEAGGLHKFMNWDRPILTDSGGFQVFSLSDLRKITEEGVHFRNHLSGEKLFLTPERSMEIQNALGPDIMMAFDECPPYPAEHAYMKASVERTSRWAERCLEAHSRAEDQGLFGIIQGGEYEDLRRQSAKDLVSLDFPGYAIGGLSVGEPKDVMNKVLEHTAPLLPDNKPRYLMGVGSADSLIDGAIRGIDMFDCVLPTRIARNGTIMTSEGRLVVRNASYARDFSPLDKNCSCHVCQNHSRAYIRHLIKCNETLGLRLCSYHNLYFLLELMEKVRQAIRDDRLLDFREEFFEAYGFNKPNAKNF

SEQ ID NO: 60552 - protein, 379 aa, unidentified
  source 1..379: note = Salipaludibacillus keqinensis
  REGION 1..379: note = tr|A0A323TIX3|A0A323TIX3_9BACI Queuine tRNA-ribosyltransferase OS=Salipaludibacillus keqinensis; OX = 2045207 GN=tgt PE=3 SV=1
MTAISYEHIKTCKQSGARLGIVHTPHGSFETPIFMPVGTLATVKTMSPEDLKSMNAQIILSNTYHLWLRPGEDIIEEAGGLHKFMNWDRPILTDSGGFQVFSLSDLRNITEEGVHFRNHLSGEKLFLTPEKSMQVQNALGPDIMMAFDECPPYPAEHKYMKASVERTSRWAERCLEAHSRKNDQGLFGIIQGGEYEDLRRQSAKDLVSLDFPGYAIGGLSVGEPKDVMNKVLDYTTPLLPHDKPRYLMGVGSADSLIDGAIRGVDMFDCVLPTRIARNGTIMTSSGRLVVRNAKYARDFKPLDENCDCNVCKNYSRAYIRHLIKCNETLGLRLCSYHNLYFLLTLMENVRQAIREDRLLDFREEFFEAYGFNKPNAKNF

SEQ ID NO: 60553 - protein, 379 aa, unidentified
  source 1..379: note = Salipaludibacillus neizhouensis
  REGION 1..379: note = tr|A0A3A9KAF1|A0A3A9KAF1_9BACI Queuine tRNA-ribosyltransferase OS=Salipaludibacillus neizhouensis; OX = 885475 GN=tgt PE=3 SV=1
MPAITYEHIKTCKQSGARLGIVHTPHGSFETPVFMPVGTLGTVKTMSPEDLKSMNTNIILSNTYHLWLRPGEDIVKEAGGLHKFMNWDRPILTDSGGFQVFSLSELRNIKEEGVEFRNHLSGEKLFLTPEKSMEIQNALGPDIMMAFDECPPYPAEYKYMNDSVERTSRWAERCLEAHARPNEQGLFGIVQGGEYEDLRRKSAEDLVSLDFPGYAIGGLSVGEPKDVMKQVLEFTTPFLPEDKPRYLMGVGSADSLIDGAIRGIDMFDCVLPTRIARNGTLMTSKGRLVVRNAQYARDFRPLDENCDCHVCQNYTRAYIRHLVKCKESFGFRLTSYHNLYFLSQLMENVRQAIREDRLLDFREEFFEAYGFNKPNAKNF

SEQ ID NO: 60554 - protein, 375 aa, unidentified
  source 1..375: note = Salipiger aestuarii
  REGION 1..375: note = tr|A0A327Y6M6|A0A327Y6M6_9RHOB Queuine tRNA-ribosyltransferase OS=Salipiger aestuarii OX=568098; GN = tgt PE=3 SV=1
MSITSFSLSATDGKARTGVIRTPRGEIRTPAFMPVGTAATVKAMLPEQVRATGADILLGNTYHLMLRPGAERIAKLGGLHRFMNWDLPILTDSGGFQVMSLASLRKLTEEGVTFASHVDGSRHMLSPERSMEIQKLLGSDIVMAFDECPALPADRARIEHSMHLSMRWAQRSRDAFGDRPGHMLFGIQQGGLEQDLRGQSAEALRAIGFDGYAIGGLAVGEGQEAMFACLDHAPDQLPTDKPRYLMGVGKPDDIVGAVKRGIDMMDCVLPTRSGRTGQAFTRHGVVNIKNARHADDPRPLDASCTCPACTGYSRAYLHHVFRAHEMISGMLLTAHNLHYFQQIMEGMRVAIAAGQFEAWETAFHAGRAEGDIPPL

SEQ ID NO: 60555 - protein, 375 aa, unidentified
  source 1..375: note = Salipiger bermudensis
  REGION 1..375: note = tr|Q0FP72|Q0FP72_SALBH Queuine tRNA-ribosyltransferase OS=Salipiger bermudensis (strain DSM 26914 / JCM 13377 / KCTC 12554 / HTCC2601) OX=314265; GN = tgt PE=3 SV=1
MSTTSFTLHATDGKARTGVISTPRGEIRTPAFMPVGTAATVKAMLPEQVRSTGADILLGNTYHLMLRPTAERIARLGGLHQFMNWDRPILTDSGGFQVMSLADLRKLTEEGVSFRSHIDGSKHMLTPERSMEIQRLLGSDIVMCFDECPALPADRKRLEESMRLSMRWAQRSRDAFGDRPGHMLFGIQQGGLEPDLREESAKALTQIGFDGYAVGGLAVGEGQEAMFGCLDHAPDTLPVDKPRYLMGVGKPDDIVGAVKRGIDMMDCVLPTRSGRTGQAFTRRGVVNIKNARHADDPRPLDEHCSCPACTGYSRAYLHHVFRSHEMISGMLLTWHNLQYFQDIMDGMRGAIAEGRFDAWEAVFHAGRAEGDIERL

SEQ ID NO: 60556 - protein, 375 aa, unidentified; identical to SEQ ID NO: 53878
  source 1..375: note = Salipiger marinus
  REGION 1..375: note = tr|A0A1G8JDK8|A0A1G8JDK8_9RHOB Queuine tRNA-ribosyltransferase OS=Salipiger marinus OX=555512; GN = tgt PE=3 SV=1

SEQ ID NO: 60557 - protein, 375 aa, Salipiger mucosus
  REGION 1..375: note = tr|S9QL24|S9QL24_9RHOB Queuine tRNA-ribosyltransferase OS=Salipiger mucosus DSM 16094; OX = 1123237 GN=tgt PE=3 SV=1
MSETSFTLHGTDGAARTGVIRTPRGEIRTPAFMPVGTAATVKAMLPESVRETGADVLLGNTYHLMLRPGAERVARLGGLHRFMNWDRPILTDSGGFQVMSLAGLRKLTEEGVTFRSHVDGSKHMLSPERSMEIQRLLGSDIVMAFDECPALPAERERVASSMRLSMRWAQRSRDAFGDRPGHMLFGIQQGGLDRELREESAEALRGIGFDGYAVGGLAVGEGQAAMFDCLDFAPGMLPEDKPRYLMGVGKPDDVVGAVKRGIDMMDCVLPTRSGRTGQAFTRRGVVNIKNARHADDPRPLDEHCACPACTGYSRAYLHHVYRSHEMISGMLLSWHNLQYFQDIMEGMRGAIAAGRFGEWEAAFHAGRAEGDIPPL

SEQ ID NO: 60558 - protein, 375 aa, unidentified
  source 1..375: note = Salipiger profundus
  REGION 1..375: note = tr|A0A1U7DBQ2|A0A1U7DBQ2_9RHOB Queuine tRNA-ribosyltransferase OS=Salipiger profundus OX=1229727; GN = tgt PE=3 SV=1
MSTTSFTLNATDGAARTGVIRTPRGEIRTPAFMPVGTAGTVKAMLPENVRATGADILLGNTYHLMLRPTAERIARLGGLHAFMNWDRPILTDSGGFQVMSLADLRKLTEKGVTFRSHVDGSKHELSPERSMEIQRLLGSDIVMCFDECPALPADRKRLEESMRLSMRWAQRSRDAFGDRPGHMLFGIQQGGLERDLREESAEALRSIGFDGYAVGGLAVGEGQKAMFDCLDFAPGMLPEDKPRYLMGVGKPDDIVGAVKRGIDMMDCVLPTRSGRTGQAFTRRGVVNIKNARHADDPRPLDEHCSCPACTGYSRAYLHHVYRSHEMISGMLLTWHNLHYFQEIMQGMRDAIAEGRFAAWEAAFHAGRAEGDIEPL

SEQ ID NO: 60559 - protein, 376 aa, Salipiger sp.
  REGION 1..376: note = tr|A0A4Q3YVK3|A0A4Q3YVK3_9RHOB Queuine tRNA-ribosyltransferase OS=Salipiger sp. IMCC34102; OX = 2510647 GN=tgt PE=3 SV=1
MTDRFSFTLAATDGRARTGVIHTPRGEIRTPAFMPVGTAATVKAMLPESVAATGADILLGNTYHLMLRPTAERIDALGGLHRFMNWDRPILTDSGGFQVMSLADLRKLTEDGVTFRSHVDGSKHFLSPERSMEIQRLLGSDIVMAFDECPALPADRARLESSMRLSMRWAARSREAFGDRPGHALFGIQQGGLEPDLRAESAKALTDIGFEGYAVGGLAVGEGQAAMFDCLDTAPGMLPVDKPRYLMGVGKPDDIVGAVKRGIDMMDCVLPSRSGRTGQAFTRHGVVNIKNARHQDDPRPLDEACTCPACRGYSRAYLHHVFRAKEMISGMLLTWHNLHYFQAIMGEMRAAIAEARFDAWEADFHAARAEGDIEPL

SEQ ID NO: 60560 - protein, 375 aa, unidentified
  source 1..375: note = Salipiger thiooxidans
  REGION 1..375: note = tr|A0A1G7DK14|A0A1G7DK14_9RHOB Queuine tRNA-ribosyltransferase OS=Salipiger thiooxidans OX=282683; GN = tgt PE=3 SV=1
MTRTSFTLTATDGAARTGVISTPRGEIRTPAFMPVGTAATVKAMMPENVRATGADILLGNTYHLMLRPTAERIARLGGLHKFMNWERPILTDSGGFQVMSLAALRKLTEEGVSFRSHIDGSRHMLTPERSMEIQRLLGSDIVMAFDECPALPADRTRIEESMRLSMRWAQRSRDAFGDRPGHMLFGIQQGGLEPDLREESAAALKAIGFDGYAVGGLAVGEGQEAMFGCLDHAPGFLPEDKPRYLMGVGKPDDIVGAVKRGIDMMDCVLPTRSGRTGQAWTRHGVVNIKNARHSDDPRPLDEQCSCPACTGYSRAYLHHVYRAGEMISGMLLSWHNLQYFQEIMQGMRDAIAEGRFAAWEAEFDAGRAEGDIGPL

SEQ ID NO: 60561 - protein, 379 aa, unidentified
  source 1..379: note = Salisediminibacterium haloalkalitolerans
  REGION 1..379: note = tr|A0A1H9VCV6|A0A1H9VCV6_9BACI Queuine tRNA-ribosyltransferase OS=Salisediminibacterium haloalkalitolerans OX=1464123 GN=tgt PE=3 SV=1
MSAITYEHIKTCKQSGARLGKIHTPHGSIDTPIFMPVGTLATVKTMSPEELKEMNAQIILSNTYHLWLRPGEDIIQEAGGLHTFMNWDRPILTDSGGFQVFSLSDLRNIKEEGVHFRNHISGEKLFLSPEKAMGIQNALGPDIMMAFDECPPYPAEHSYMKASVERTSRWAERCLEGHKRPQDQGLFGIVQGGEYEDLRRQSAKDLISLDFPGYAIGGLSVGEPKSVMNEVLEFTTPLLPQNKPRYLMGVGSADSLIDGAIRGVDMFDCVLPTRIARNGTLMTSKGRLVVRNAKFERDFRPLDENCSCYVCRNYTRAYIRHLIKANEMFGLRLCSYHNLHFLIDLMEQVREAIRTDRLLDFREEFFENYGFNRADAKNF

SEQ ID NO: 60562 - protein, 379 aa, unidentified
  source 1..379: note = Saliterribacillus persicus
  REGION 1..379: note = tr|A0A368XEN5|A0A368XEN5_9BACI Queuine tRNA-ribosyltransferase OS=Saliterribacillus persicus; OX = 930114 GN=tgt PE=3 SV=1
MTAIRYELIKTCKQTGARVGKVHTPHGSFDTPIFMPVGTLATVKTMSPEELEELGAKIILSNTYHLWLRPGEDIVKTAGGLHKFMNWDKPILTDSGGFQVFSLSDLRQIEEKGVHFRNHLSGEKLFLSPEKAMEIQNALGSDIMMAFDECPPYPASEQYMKDSVERTSRWAERCLEGHKRPAEQGLFGIVQGGEYENLRKQSARDLTSLDFPGYAIGGLSVGEPKDVMNRVLEFTTPHLPENKARYLMGVGSPDSLIDGAIRGIDMFDCVLPTRIARNGTCMTSNGRLVVRNAKYAKDFSPIDPNCDCHTCKNYSRAYIRHLVKCNETFGYRLTTYHNLYFLLKLMEQVREAIMQDRLGDFKEEFFEQYGFNKPNAKNF

SEQ ID NO: 60563 - protein, 375 aa, unidentified
  source 1..375: note = Salmonella abony
  REGION 1..375: note = tr|A0A5I1FMV0|A0A5I1FMV0_SALAB tRNA guanosine(34) transglycosylase Tgt OS=Salmonella abony OX=29482 GN=tgt; PE = 4 SV=1
MKFELDTTDGRARRGRLVFDRGVVETPAFMPVGTYGTVKGMTPEEVEATGAQIILGNTFHLWLRPGQEIMKLHGDLHDFMQWKGPILTDSGGFQVFSLGDIRKITEQGVHFRNPINGDPIFLDPEKSMEIQYDLGSDIVMIFDECTPYPADWDYAKRSMEMSLRWAKRSRDRFDSLGNKNALFGIIQGSVYEDLRDISVKGLVEIGFDGYAVGGLAVGEPKADMHRILEHVCPQIPADKPRYLMGVGKPEDLVEGVRRGIDMFDCVMPTRNARNGHLFVTDGVVKIRNAKHKSDTSPLDAECDCYTCRNYSRAYLHHLDRCNEILGARLNTIHNLRYYQRLMAGLRKAIEEGKLESFVTEFYQRQGRPVPPLNVD

SEQ ID NO: 60564 - protein, 375 aa, unidentified; identical to SEQ ID NO: 60563
  source 1..375: note = Salmonella agona
  REGION 1..375: note = sp|B5EWT9|TGT_SALA4 Queuine tRNA-ribosyltransferase; OS = Salmonella agona (strain SL483) OX=454166 GN=tgt PE=3; SV = 1

SEQ ID NO: 60565 - protein, 375 aa, unidentified; identical to SEQ ID NO: 60563
  source 1..375: note = Salmonella anatum
  REGION 1..375: note = tr|A0A2T8MNS1|A0A2T8MNS1_SALAN Queuine tRNA-ribosyltransferase OS=Salmonella anatum OX=58712; GN = tgt PE=3 SV=1

SEQ ID NO: 60566 - protein, 375 aa, unidentified
  source 1..375: note = Salmonella arizonae
  REGION 1..375: note = sp|A9MM57|TGT_SALAR Queuine tRNA-ribosyltransferase; OS = Salmonella arizonae (strain ATCC BAA-731 / CDC346-86 / RSK2980) OX=41514 GN=tgt PE=3 SV=1
MKFELDTTDGRARRGRLVFERGVVETPAFMPVGTYGTVKGMTPEEVEATGAQIILGNTFHLWLRPGQEIMKLHGDLHDFMQWKGPILTDSGGFQVFSLGDIRKITEQGVHFRNPINGDPIFLDPEKSMEIQYDLGSDIVMIFDECTPYPADWDYAKCSMEMSLRWAKRSRDRFDGLGNKNALFGIIQGSVYEDLRDISVKGLVEIGFDGYAVGGLAVGEPKADMHRILEHVCPQIPADKPRYLMGVGKPEDLVEGVRRGIDMFDCVMPTRNARNGHLFVTDGVVKIRNAKHKSDTSPLDAECDCYTCRNYSRAYLHHLDRCNEILGARLNTIHNLRYYQRLMAGLRKAIEEGKLESFVTEFYQRQGRPVPPLNVD

SEQ ID NO: 60567 - protein, 375 aa, unidentified
  source 1..375: note = Salmonella berta
  REGION 1..375: note = tr|A0A3V6R406|A0A3V6R406_SALBE Queuine tRNA-ribosyltransferase OS=Salmonella berta OX=28142; GN = tgt PE=3 SV=1
MKFELDTTDGRARRGRLVFDRGIVETPAFMPVGTYGTVKGMTPEEVEATGAQIILGNTFHLWLRPGQEIMKLHGDLHDFMQWKGPILTDSGGFQVFSLGDIRKITEQGVHFRNPINGDPIFLDPEKSMEIQYDLGSDIVMIFDECTPYPADWDYAKRSMEMSLRWAKRSRDRFDSLGNKNALFGIIQGSVYEDLRDISVKGLVEIGFDGYAVGGLAVGEPKADMHRILEHVCPQIPADKPRYLMGVGKPEDLVEGVRRGIDMFDCVMPTRNARNGHLFVTDGVVKIRNAKHKSDTSPLDAECDCYTCRNYSRAYLHHLDRCNEILGARLNTIHNLRYYQRLMAGLRKAIEEGKLESFVTEFYQRQGRPVPPLNVD

SEQ ID NO: 60568 - protein, 375 aa, unidentified; identical to SEQ ID NO: 60563
  source 1..375: note = Salmonella berta
  REGION 1..375: note = tr|A0A3U8PAF2|A0A3U8PAF2_SALBE Queuine tRNA-ribosyltransferase OS=Salmonella berta OX=28142; GN = tgt PE=3 SV=1

SEQ ID NO: 60569 - protein, 375 aa, unidentified; identical to SEQ ID NO: 60563
  source 1..375: note = Salmonella blockley
  REGION 1..375: note = tr|A0A5H8HE24|A0A5H8HE24_SALBL tRNA guanosine(34) transglycosylase Tgt OS=Salmonella blockley OX=57741; GN = E1672_07870 PE=4 SV=1

SEQ ID NO: 60570 - protein, 375 aa, Salmonella bongori
  REGION 1..375: note = tr|A0A248KCD2|A0A248KCD2_SALBN Queuine tRNA-ribosyltransferase OS=Salmonella bongori serovar 66:z41:- str. SA19983605 OX=1243617 GN=tgt PE=3 SV=1
MKFELDTTDGRARRGRLVFDRGVVETPAFMPVGTYGTVKGMTPEEVEATGAQIILGNTFHLWLRPGQEIMKLHGDLHDFMQWKGPILTDSGGFQVFSLGDIRKITEQGVHFRNPINGDPIFLDPEKSMEIQYDLGSDIVMIFDECTPYPADWDYAKRSMEMSLRWAKRSRERFDSLGNKNALFGIIQGSVYEDLRDISVKGLVEIGFDGYAVGGLAVGEPKEDMHRILEHVCPQIPADKPRYLMGVGKPEDLVEGVRRGIDMFDCVMPTRNARNGHLFVTDGVVKIRNAKHKSDTSPLDAECDCYTCRNYSRAYLHHLDRCNEILGARLNTIHNLRYYQRLMAGLRRAIEEGKLESFVTEFYQRQGRPVPPLNVD

SEQ ID NO: 60571 - protein, 375 aa, Salmonella bongori; identical to SEQ ID NO: 60570
  REGION 1..375: note = tr|A0A0K0H7V8|A0A0K0H7V8_SALBC Queuine tRNA-ribosyltransferase OS=Salmonella bongori (strain ATCC 43975 / DSM 13772 / NCTC 12419) OX=218493 GN=tgt PE=3 SV=1

SEQ ID NO: 60572 - protein, 375 aa, unidentified
  source 1..375: note = Salmonella choleraesuis
  REGION 1..375: note = sp|Q57SF8|TGT_SALCH Queuine tRNA-ribosyltransferase; OS = Salmonella choleraesuis (strain SC-B67) OX=321314; GN = tgt PE=3 SV=1
MKFELDTTDGRARRGRLVFDRGVVETPAFMPVGTYGTVKGMTPEEVEATGAQIILGNTFHLWLRPGQEIMKLHGDLHDFMQWKGPILTDSGGFQVFSLGDIRKITEQGVHFRNPINGDPIFLDPEKSMEIQYDLGSDIVMIFDECTPYPADWDYAKRSMEMSLRWAKRSRDRFDSLGNKNALFGIIQGSVYEDLRDISVKGLVEIGFDGYAVGGLAVGEPKADMHRILEHVCPQIPADKPRYLMGVGKPEDLVEGVRRGIDMFDCVMPTRNARNGHLFVTDGVVKIRNAKHKSDTSPLDAECDCYTCRNYSRAYLHHLDRCNEILGARLNTIHNLRYYQRLMAGLRKAIEEGKLESFVTKFYQRQGRPVPPLNVD

SEQ ID NO: 60573 - protein, 375 aa, unidentified
  source 1..375: note = Salmonella derby
  REGION 1..375: note = tr|A0A4P5EY05|A0A4P5EY05_SALDE Queuine tRNA-ribosyltransferase OS=Salmonella derby OX=28144; GN = tgt PE=3 SV=1
MKFELDTTDGRARRGRLVFDRGVVETPAFMPVGTYGTVKGMTPEEVEATGAQIILGNTFHLWLRPGQEIMKLHGDLHDFMQWKGPILTDSGGFQVFSLGDIRKITEQGVHFRNPINGDPIFLDPEKSMEIQYDLGSDIVMIFDECTPYPADWDYAKRSMEMSLRWAKRSRERFDSLGNKNALFGIIQGSVYEDLRDISVKGLVEIGFDGYAVGGLAVGEPKADMHRILEHVCPQIPADKPRYLMGVGKPEDLVEGVRRGIDMFDCVMPTRNARNGHLFVTDGVVKIRNAKHKSDTSPLDAECDCYTCRNYSRAYLHHLDRCNEILGARLNTIHNLRYYQRLMAGLRKAIEEGKLESFVTEFYQRQGRPVPPLNVD

SEQ ID NO: 60574 - protein, 375 aa, unidentified; identical to SEQ ID NO: 60563
  source 1..375: note = Salmonella derby
  REGION 1..375: note = tr|A0A3V8R3H6|A0A3V8R3H6_SALDE Queuine tRNA-ribosyltransferase OS=Salmonella derby OX=28144; GN = tgt PE=3 SV=1

SEQ ID NO: 60575 - protein, 375 aa, unidentified
  source 1..375: note = Salmonella diarizonae
  REGION 1..375: note = tr|A0A2I5HJQ2|A0A2I5HJQ2_SALDZ Queuine tRNA-ribosyltransferase OS=Salmonella diarizonae OX=59204; GN = tgt PE=3 SV=1
MKFELDTTDVRARRGRLVFDRGVVETPAFMPVGTYGTVKGMTPEEVEATGAQIILGNTFHLWLRPGQEIMKLHGDLHDFMQWKGPILTDSGGFQVFSLGDIRKITEQGVHFRNPINGDPIFLDPEKSMEIQYDLGSDIVMIFDECTPYPADWDYAKRSMEMSLRWAKRSRDRFDSLGNKNALFGIIQGSVYEDLRDISVKGLVEIGFDGYAVGGLAVGEPKEDMHRILEHVCPQIPADKPRYLMGVGKPEDLVEGVRRGIDMFDCVMPTRNARNGHLFVTDGVVKIRNAKHKSDTSPLDAECDCYTCRNYSRAYLHHLDRCNEILGARLNTIHNLRYYQRLMAGLRKAIEEGKLESFVTEFYQRQGRPVPPLNVD

SEQ ID NO: 60576 - protein, 375 aa, unidentified
  source 1..375: note = Salmonella diarizonae
  REGION 1..375: note = tr|A0A379U2J7|A0A379U2J7_SALDZ Queuine tRNA-ribosyltransferase OS=Salmonella diarizonae OX=59204; GN = tgt PE=3 SV=1
MKFELDTTDGRARRGRLVFDRGVVETPAFMPVGTYGTVKGMTPEEVEATGAQIILGNTFHLWLRPGQEIMKLHGDLHDFMQWKGPILTDSGGFQVFSLGDIRKITEQGVHFRNPINGDPIFLDPEKSMEIQYDLGSDIVMIFDECTPYPADWDYAKRSMEMSLRWAKRSRDRFDSLGNKNALFGIIQGSVYEDLRDISVKGLVEIGFDGYAVGGLAVGEPKEDMHRILEHVCPQIPADKPRYLMGVGKPEDLVEGVRRGIDMFDCVMPTRNARNGHLFVTDGVVKIRNAKHKSDTSPLDAECDCYTCRNYSRAYLHHLDRCNEILGARLNTIHNLRYYQRLMAGLRKAIEEGKLESFVTEFYQRQGRPVPPLNVD

SEQ ID NO: 60577 - protein, 375 aa, unidentified; identical to SEQ ID NO: 60567
  source 1..375: note = Salmonella dublin
  REGION 1..375: note = tr|A0A3T3IJT9|A0A3T3IJT9_SALDU Queuine tRNA-ribosyltransferase OS=Salmonella dublin OX=98360; GN = tgt PE=3 SV=1

SEQ ID NO: 60578 - protein, 375 aa, unidentified; identical to SEQ ID NO: 60567
  source 1..375: note = Salmonella dublin
  REGION 1..375: note = sp|B5FKR0|TGT_SALDC Queuine tRNA-ribosyltransferase; OS = Salmonella dublin (strain CT_02021853) OX=439851 GN=tgt; PE = 3 SV=1

SEQ ID NO: 60579 - protein, 375 aa, Salmonella enterica
  REGION 1..375: note = tr|A0A5F1MMM1|A0A5F1MMM1_SALET Queuine tRNA-ribosyltransferase OS=Salmonella enterica subsp. enterica serovar Wilhelmsburg OX=1960126 GN=tgt PE=3 SV=1
MKFELDTTDGRARRGRLVFDRGIVETPAFMPVGTYGTVKGMTPEEVEATGAQIILGNTFHLWLRPGQEIMKLHGDLHDFMQWKGPILTDSGGFQVFSLGDIRKITEQGVHFRNPINGDPIFLDPEKSMEIQYDLGSDIVMIFDECTPYPADWDYAKRSMEMSLRWAKRSRDRFDSLGNKNALFGIIQGSVYEDLRDISVKGLVEIGFDGYAVGGLAVGEPIADMHRILEHVCPQIPADKPRYLMGVGKPEDLVEGVRRGIDMFDCVMPTRNARNGHLFVTDGVVKIRNAKHKSDTSPLDAECDCYTCRNYSRAYLHHLDRCNEILGARLNTIHNLRYYQRLMAGLRKAIEEGKLESFVTEFYQRQGRPVPPLNVD

SEQ ID NO: 60580 - protein, 375 aa, Salmonella enterica; identical to SEQ ID NO: 60567
  REGION 1..375: note = tr|A0A402MTT7|A0A402MTT7_SALET Queuine tRNA-ribosyltransferase OS=Salmonella enterica subsp. enterica serovar Braenderup str. CFSAN001740 OX=1299119; GN = tgt PE=3 SV=1

SEQ ID NO: 60581 - protein, 375 aa, unidentified; identical to SEQ ID NO: 60576
  source 1..375: note = Salmonella enteritidis
  REGION 1..375: note = tr|A0A403FIM5|A0A403FIM5_SALEN Queuine tRNA-ribosyltransferase OS=Salmonella enteritidis; OX = 149539 GN=tgt PE=3 SV=1

SEQ ID NO: 60582 - protein, 375 aa, unidentified; identical to SEQ ID NO: 60567
  source 1..375: note = Salmonella enteritidis
  REGION 1..375: note = sp|B5QTF4|TGT_SALEP Queuine tRNA-ribosyltransferase; OS = Salmonella enteritidis PT4 (strain P125109) OX=550537; GN = tgt PE=3 SV=1

SEQ ID NO: 60583 - protein, 375 aa, unidentified; identical to SEQ ID NO: 60567
  source 1..375: note = Salmonella gallinarum
  REGION 1..375: note = tr|A0A3V9NI21|A0A3V9NI21_SALGL Queuine tRNA-ribosyltransferase OS=Salmonella gallinarum OX=594; GN = tgt PE=3 SV=1

SEQ ID NO: 60584 - protein, 375 aa, unidentified; identical to SEQ ID NO: 60567
  source 1..375: note = Salmonella gallinarum
  REGION 1..375: note = sp|B5R6Q7|TGT_SALG2 Queuine tRNA-ribosyltransferase; OS = Salmonella gallinarum (strain 287/91 / NCTC 13346); OX = 550538 GN=tgt PE=3 SV=1

SEQ ID NO: 60585 - protein, 375 aa, unidentified; identical to SEQ ID NO: 60563
  source 1..375: note = Salmonella hadar
  REGION 1..375: note = tr|A0A4Q8S826|A0A4Q8S826_SALHA Queuine tRNA-ribosyltransferase OS=Salmonella hadar OX=149385; GN = tgt PE=3 SV=1

SEQ ID NO: 60586 - protein, 375 aa, unidentified; identical to SEQ ID NO: 60563
  source 1..375: note = Salmonella heidelberg
  REGION 1..375: note = sp|B4T8P5|TGT_SALHS Queuine tRNA-ribosyltransferase; OS = Salmonella heidelberg (strain SL476) OX=454169 GN=tgt; PE = 3 SV=1

SEQ ID NO: 60587 - protein, 375 aa, unidentified; identical to SEQ ID NO: 60576
  source 1..375: note = Salmonella houtenae
  REGION 1..375: note = tr|A0A3V3VJH0|A0A3V3VJH0_SALHO Queuine tRNA-ribosyltransferase OS=Salmonella houtenae OX=59205; GN = tgt PE=3 SV=1

SEQ ID NO: 60588 - protein, 375 aa, unidentified
  source 1..375: note = Salmonella houtenae
  REGION 1..375: note = tr|A0A2K0JFE2|A0A2K0JFE2_SALHO Queuine tRNA-ribosyltransferase OS=Salmonella houtenae OX=59205; GN = tgt PE=3 SV=1
MKFELDTTDGRARRGRLVFDRGVVETPAFMPVGTYGTVKGMTPEEVEATGAQIILGNTFHLWLRPGQEIMKLHGDLHDFMQWKGPILTDSGGFQVFSLGDIRKITEQGVHFRNPINGDPIFLDPEKSMEIQYDLGSDIVMIFDECTPYPADWDYAKRSMEMSLRWAKRSRDRFDSLGNKNALFGIIQGSVYEDLRDISVKGLVEISFDGYAVGGLAVGEPKEDMHRILEHVCPQIPADKPRYLMGVGKPEDLVEGVRRGIDMFDCVMPTRNARNGHLFVTDGVVKIRNAKHKSDTSPLDAECDCYTCRNYSRAYLHHLDRCNEILGARLNTIHNLRYYQRLMAGLRKAIEEGKLESFVTEFYQRQGRPVPPLNVD

SEQ ID NO: 60589 - protein, 375 aa, unidentified; identical to SEQ ID NO: 60567
  source 1..375: note = Salmonella infantis
  REGION 1..375: note = tr|A0A5F1J315|A0A5F1J315_SALIN Queuine tRNA-ribosyltransferase OS=Salmonella infantis OX=595; GN = tgt PE=3 SV=1

SEQ ID NO: 60590 - protein, 375 aa, unidentified; identical to SEQ ID NO: 60572
  source 1..375: note = Salmonella infantis
  REGION 1..375: note = tr|A0A3W0HMC6|A0A3W0HMC6_SALIN Queuine tRNA-ribosyltransferase OS=Salmonella infantis OX=595; GN = tgt PE=3 SV=1

SEQ ID NO: 60591 - protein, 375 aa, unidentified
  source 1..375: note = Salmonella montevideo
  REGION 1..375: note = tr|A0A3U8JNX9|A0A3U8JNX9_SALMO Queuine tRNA-ribosyltransferase OS=Salmonella montevideo OX=115981; GN = tgt PE=3 SV=1
MKFELDTTDGRARRGRLVFDRGVVETPAFMPVGTYGTVKGMTPEEVEATGAQIILGNTFHLWLRPGQEIMKLHGDLHDFMQWKGPILTDSGGFQVFSLGDIRKITEQGVHFRNPINGDPIFLDPEKSMEIQYDLGSDIVMIFDECTPYPANWDYAKRSMEMSLRWAKRSRDRFDSLGNKNALFGIIQGSVYEDLRDISVKGLVEIGFDGYAVGGLAVGEPKADMHRILEHVCPQIPADKPRYLMGVGKPEDLVEGVRRGIDMFDCVMPTRNARNGHLFVTDGVVKIRNAKHKSDTSPLDAECDCYTCRNYSRAYLHHLDRCNEILGARLNTIHNLRYYQRLMAGLRKAIEEGKLESFVTEFYQRQGRPVPPLNVD

SEQ ID NO: 60592 - protein, 375 aa, unidentified; identical to SEQ ID NO: 60563
  source 1..375: note = Salmonella montevideo
  REGION 1..375: note = tr|A0A3V6QCD6|A0A3V6QCD6_SALMO Queuine tRNA-ribosyltransferase OS=Salmonella montevideo OX=115981; GN = tgt PE=3 SV=1

SEQ ID NO: 60593 - protein, 375 aa, unidentified; identical to SEQ ID NO: 60567
  source 1..375: note = Salmonella moscow
  REGION 1..375: note = tr|A0A5H7LIB6|A0A5H7LIB6_SALMC tRNA guanosine(34) transglycosylase Tgt OS=Salmonella moscow OX=28146; GN = E1B69_04735 PE=4 SV=1

SEQ ID NO: 60594 - protein, 375 aa, unidentified; identical to SEQ ID NO: 60563
  source 1..375: note = Salmonella muenchen
  REGION 1..375: note = tr|A0A3U7XKG2|A0A3U7XKG2_SALMU tRNA guanosine(34) transglycosylase Tgt OS=Salmonella muenchen OX=596; GN = D4Z66_02210 PE=3 SV=1

SEQ ID NO: 60595 - protein, 375 aa, unidentified; identical to SEQ ID NO: 60567
  source 1..375: note = Salmonella muenchen
  REGION 1..375: note = tr|A0A3T3ET81|A0A3T3ET81_SALMU Queuine tRNA-ribosyltransferase OS=Salmonella muenchen OX=596; GN = tgt PE=3 SV=1

SEQ ID NO: 60596 - protein, 375 aa, unidentified; identical to SEQ ID NO: 60563
  source 1..375: note = Salmonella muenster
  REGION 1..375: note = tr|A0A5J2RWP5|A0A5J2RWP5_SALMS tRNA guanosine(34) transglycosylase Tgt OS=Salmonella muenster OX=82689; GN = tgt PE=3 SV=1

SEQ ID NO: 60597 - protein, 375 aa, unidentified; identical to SEQ ID NO: 60563
  source 1..375: note = Salmonella newport
  REGION 1..375: note = tr|A0A0R9NTX3|A0A0R9NTX3_SALNE Queuine tRNA-ribosyltransferase OS=Salmonella newport OX=108619; GN = tgt PE=3 SV=1

SEQ ID NO: 60598 - protein, 375 aa, unidentified; identical to SEQ ID NO: 60563
  source 1..375: note = Salmonella newport
  REGION 1..375: note = sp|B4SWP7|TGT_SALNS Queuine tRNA-ribosyltransferase; OS = Salmonella newport (strain SL254) OX=423368 GN=tgt PE=3; SV = 1

SEQ ID NO: 60599 - protein, 375 aa, unidentified
  source 1..375: note = Salmonella oranienberg
  REGION 1..375: note = tr|A0A3V8KLE2|A0A3V8KLE2_SALON Queuine tRNA-ribosyltransferase OS=Salmonella oranienberg OX=28147; GN = tgt PE=3 SV=1
MKFELDTTDGRARRGRLVFDRGVVETPAFMPVGTYGTVKGMTPEEVEATGAQIILGNTFHLWLRPGQEIMKVHGDLHDFMQWKGPILTDSGGFQVFSLGDIRKITEQGVHFRNPINGDPIFLDPEKSMEIQYDLGSDIVMIFDECTPYPADWDYAKRSMEMSLRWAKRSRDRFDSLGNKNALFGIIQGSVYEDLRDISVKGLVEIGFDGYAVGGLAVGEPKADMHRILEHVCPQIPADKPRYLMGVGKPEDLVEGVRRGIDMFDCVMPTRNARNGHLFVTDGVVKIRNAKHKSDTSPLDAECDCYTCRNYSRAYLHHLDRCNEILGARLNTIHNLRYYQRLMAGLRKAIEEGKLESFVTEFYQRQGRPVPPLNVD

SEQ ID NO: 60600 - protein, 375 aa, unidentified; identical to SEQ ID NO: 60563
  source 1..375: note = Salmonella oranienberg
  REGION 1..375: note = tr|A0A3V8URK2|A0A3V8URK2_SALON Queuine tRNA-ribosyltransferase OS=Salmonella oranienberg OX=28147; GN = tgt PE=3 SV=1

SEQ ID NO: 60601 - protein, 375 aa, unidentified; identical to SEQ ID NO: 60563
  source 1..375: note = Salmonella paratyphi
  REGION 1..375: note = tr|A0A3Z1EF09|A0A3Z1EF09_SALPB Queuine tRNA-ribosyltransferase OS=Salmonella paratyphi B (strain ATCC BAA-1250 / SPB7) OX=1016998 GN=tgt PE=3 SV=1

SEQ ID NO: 60602 - protein, 375 aa, unidentified
  source 1..375: note = Salmonella paratyphi
  REGION 1..375: note = sp|Q5PFT6|TGT_SALPA Queuine tRNA-ribosyltransferase; OS = Salmonella paratyphi A (strain ATCC 9150 / SARB42); OX = 295319 GN=tgt PE=3 SV=1
MKFELDTTDGRARRGRLVFDRGVVETPAFMPVGTYGTVKGMTPEEVEATGAQIILGNTFHLWLRPGQEIMKLHGDLHDFMQWKGPILTDSGGFQVFSLGDIRKITEQGVHFRNPINGDPIFLDPEKSMEIQYDLGSDIVMIFDECTPYPADWDYAKRSMEMSLRWAKRSRDRFDSLGNKNALFGIIQGSVYEDLRDISVKGLVEIGFDGYAVGGLAVGEPKADMHRILEHVCPQLPADKPRYLMGVGKPEDLVEGVRRGIDMFDCVMPTRNARNGHLFVTDGVVKIRNAKHKSDTSPLDAECDCYTCRNYSRAYLHHLDRCNEILGARLNTIHNLRYYQRLMAGLRKAIEEGKLESFVTEFYQRQGRPVPPLNVD

SEQ ID NO: 60603 - protein, 375 aa, unidentified; identical to SEQ ID NO: 60563
  source 1..375: note = Salmonella potsdam
  REGION 1..375: note = tr|A0A5H6BV84|A0A5H6BV84_SALPO tRNA guanosine(34) transglycosylase Tgt OS=Salmonella potsdam OX=597 GN=tgt; PE = 4 SV=1

SEQ ID NO: 60604 - protein, 375 aa, unidentified
  source 1..375: note = Salmonella rubislaw
  REGION 1..375: note = tr|A0A5I1KTS1|A0A5I1KTS1_SALRU tRNA guanosine(34) transglycosylase Tgt OS=Salmonella rubislaw OX=598; GN = E0976_03675 PE=4 SV=1
MKFELDTTDGRARRGRLVFDRGVVETPAFMPVGTYGTVKGMTPEEVEATGAQIILGNTFHLWLRPGQEIMKLHGDLHDFMQWKGPILTDSGGFQVFSLGDIRKITEQGVHFRNPINGDPIFLDPEKSMEIQYDLGSDIVMIFDECTPYPADWDYAKRSMEMSLRWAKRSRDRFDSLGNKNALFGIIQGSVYEDLRDISVKGLVEIGFDGYAVGGLAVGEPKADMHRILEHVCPQIPADKPRYLMGVGKPEDLVEGGRRGIDMFDCVMPTRNARNGHLFVTDGVVKIRNAKHKSDTSPLDAECDCYTCRNYSRAYLHHLDRCNEILGARLNTIHNLRYYQRLMAGLRKAIEEGKLESFVTEFYQRQGRPVPPLNVD

SEQ ID NO: 60605 - protein, 375 aa, unidentified; identical to SEQ ID NO: 60563
  source 1..375: note = Salmonella rubislaw
  REGION 1..375: note = tr|A0A3V7IKV1|A0A3V7IKV1_SALRU Queuine tRNA-ribosyltransferase OS=Salmonella rubislaw OX=598; GN = tgt PE=3 SV=1

SEQ ID NO: 60606 - protein, 375 aa, unidentified; identical to SEQ ID NO: 60563
  source 1..375: note = Salmonella schwarzengrund
  REGION 1..375: note = sp|B4TZI0|TGT_SALSV Queuine tRNA-ribosyltransferase; OS = Salmonella schwarzengrund (strain CVM19633) OX=439843; GN = tgt PE=3 SV=1

SEQ ID NO: 60607 - protein, 375 aa, unidentified; identical to SEQ ID NO: 60563
  source 1..375: note = Salmonella senftenberg
  REGION 1..375: note = tr|A0A3R0HJK4|A0A3R0HJK4_SALSE Queuine tRNA-ribosyltransferase OS=Salmonella senftenberg OX=28150; GN = tgt PE=3 SV=1

SEQ ID NO: 60608 - protein, 375 aa, Salmonella sp.; identical to SEQ ID NO: 60563
  REGION 1..375: note = tr|A0A509CHF0|A0A509CHF0_9ENTR Queuine tRNA-ribosyltransferase OS=Salmonella sp. NCTC 6947; OX = 2583581 GN=tgt PE=3 SV=1

SEQ ID NO: 60609 - protein, 375 aa, Salmonella sp.; identical to SEQ ID NO: 53884
  REGION 1..375: note = tr|A0A1F2K4K2|A0A1F2K4K2_9ENTR Queuine tRNA-ribosyltransferase OS=Salmonella sp. HMSC13B08; OX = 1581094 GN=tgt PE=3 SV=1

SEQ ID NO: 60610 - protein, 375 aa, unidentified; identical to SEQ ID NO: 60563
  source 1..375: note = Salmonella thompson
  REGION 1..375: note = tr|A0A403SNK3|A0A403SNK3_SALTH Queuine tRNA-ribosyltransferase OS=Salmonella thompson OX=600; GN = tgt PE=3 SV=1

SEQ ID NO: 60611 - protein, 375 aa, unidentified
  source 1..375: note = Salmonella typhi
  REGION 1..375: note = sp|Q8Z8Y0|TGT_SALTI Queuine tRNA-ribosyltransferase; OS = Salmonella typhi OX=90370 GN=tgt PE=3 SV=1
MKFELDTTDGRARRGRLVFDRGVVETPAFMPVGTYGTVKGMTPEEVEATGAQIILGNTFHLWLRPGQEIMKLHGDLHDFMQWKGPILTDSGGFQVFSLGDIRKITEQGVHFRNPINGDPIFLDPEKSMEIQYDLGSDIVMIFDECTPYPADWDYAKRSMEMSLRWAKRSRDRFDSLGNKNALFGIIQGSVYEDLRDISVKGLVEIGFDGYAVGGLAVGEPKADMHRILEHVCPQIPADKPRYLMGVGKPEDLVEGVRRGIDMFDCVMPTRNARNGHLFVTDGVVKIRNAKHKSDISPLDAECDCYTCRNYSRAYLHHLDRCNEILGARLNTIHNLRYYQRLMAGLRKAIEEGKLESFVTEFYQRQGRPVPPLNVD

SEQ ID NO: 60612 - protein, 375 aa, unidentified; identical to SEQ ID NO: 60611
  source 1..375: note = Salmonella typhi
  REGION 1..375: note = tr|A0A4U8FH14|A0A4U8FH14_SALTI Queuine tRNA-ribosyltransferase OS=Salmonella typhi OX=90370; GN = tgt PE=3 SV=1

SEQ ID NO: 60613 - protein, 375 aa, unidentified; identical to SEQ ID NO: 60563
  source 1..375: note = Salmonella typhimurium
  REGION 1..375: note = sp|Q8ZRD8|TGT_SALTY Queuine tRNA-ribosyltransferase; OS = Salmonella typhimurium (strain LT2 / SGSC1412 / ATCC 700720) OX=99287 GN=tgt PE=3 SV=1

SEQ ID NO: 60614 - protein, 375 aa, unidentified; identical to SEQ ID NO: 60563
  source 1..375: note = Salmonella typhimurium
  REGION 1..375: note = tr|A0A3Z2EZN2|A0A3Z2EZN2_SALTU Queuine tRNA-ribosyltransferase OS=Salmonella typhimurium (strain ATCC 68169 / UK-1) OX=990282 GN=tgt PE=3 SV=1

SEQ ID NO: 60615 - protein, 375 aa, unidentified; identical to SEQ ID NO: 60563
  source 1..375: note = Salmonella virchow
  REGION 1..375: note = tr|A0A3V4BET0|A0A3V4BET0_SALVI Queuine tRNA-ribosyltransferase OS=Salmonella virchow OX=48409; GN = tgt PE=3 SV=1

SEQ ID NO: 60616 - protein, 379 aa, Salsuginibacillus halophilus
  REGION 1..379: note = tr|A0A2P8HFX7|A0A2P8HFX7_9BACI Queuine tRNA-ribosyltransferase OS=Salsuginibacillus halophilus; OX = 517424 GN=tgt PE=3 SV=1
MAAVTYEHIKTCAQSGARLGRLHTPHGTVETPIFMPVGTLATVKTLSPEELEDMSAQIILANTYHLWLRPGEDIVKEAGGLHKFMNWDRPILTDSGGFQVFSLSERRKITEEGVHFRNHINGEKLFLPPEKAMQIQNDLGPDVMMAFDECPPYPAEHSYMKSSVERTSRWAERCLEAHARPEEQALFGIVQGGEYKDLRRQSAEDLVSMNFPGYAIGGLSVGEPKDVMNEMLEFTTPLLPDDKPRYLMGVGSADALIDGAIRGVDMFDCVLPTRIARNGSCMTSHGRVTVRNAKYARDFGPLDENCNCHVCRNYSRAYIRHLVKANETFGFRLTSYHNLYFLLELMRKVRQAIQEDRLLDFREEFFEQYGFNRPDAKNF

SEQ ID NO: 60617 - protein, 381 aa, Samsonia erythrinae
  REGION 1..381: note = tr|A0A4R3VSA7|A0A4R3VSA7_9GAMM Queuine tRNA-ribosyltransferase OS=Samsonia erythrinae OX=160434; GN = tgt PE=3 SV=1
MKYELHTTDGRARRGRLIFERGVVETPAFMPVGTYGTVKGMTPEEVKETGAQILLGNTFHLWLRPGQEIMKLHGDLHDFMQWHGPILTDSGGFQVFSLGDIRKITEQGVHFRNPINGDAIFLSPEKSMEIQYDLGSDIVMIFDECTPYPADWDYAKRSMEMSLRWAKRSRQRFDELNNKNALFGIIQGGVYEDLRDVSVKGLVDIGFDGYAVGGLAVGEPKEDMHRILEHVCPQIPEDKPRYLMGVGKPEDLVEGVRRGIDMFDCVMPTRNARNGHLFVTDGVVKIRNAKYKDDVSPLDEHCDCYTCRNYSRAYLHHLDRCNEILGARLNTIHNLRYYQRLMAGLRQAIEEGKLERFVVDFYQRLGKPIPPLAEENVAAGN

SEQ ID NO: 60618 - protein, 389 aa, unidentified
  source 1..389: note = Sandaracinaceae bacterium
  REGION 1..389: note = tr|A0A520QP82|A0A520QP82_9DELT Queuine tRNA-ribosyltransferase OS=Sandaracinaceae bacterium; OX = 2510337 GN=tgt PE=3 SV=1
MPTDGFAFDELARDGDARRGRFTTPRATVETPAFMPVGTQATVKATTPEELERTGARLILANTYHLWLRPGAERIAKLGGVQRFMAWPHALLTDSGGFQVFSLTHMNQIDDDGVTFRSHLDGAKLRLTPEESMRVQGLLGSDVAMLFDECPPGGAPREVVERAMRRTTAWARRSLAVPAPEGQARFGIVQGGTHVDLRLSHLEDIASLAVDGVALGGFSVGEPIEEMVRVLGEVTPKLPTDRPRYLMGVGTPFDLLAAIGTGVDLFDCVLPTRNARNGQALTWTGRVNLRQARHKEDERALDPGCECPTCRTFSRAYLHHLVRTKEMLAPRLVTQHNLWFYQDLTRGARAAIERGRYAAWSDEVATRMREGDEIGSPDPNQREWRANRT

SEQ ID NO: 60619 - protein, 370 aa, Sandaracinobacter sp.
  REGION 1..370: note = tr|A0A501XTJ6|A0A501XTJ6_9SPHN Queuine tRNA-ribosyltransferase OS=Sandaracinobacter sp. PAMC 28131 OX=1715348 GN=tgt PE=3 SV=1
MFNFQIHATDGRARTGLIETDRGTIRTPAFMPVGTAATVKGMHPEAVRAAGADIILGNTYHLMLRPGAERMARLGGLHHFMNWEKPILTDSGGFQVMSLGALVKITEEGVSFQSHVDGSKHFVSPERSIEIQRLLGSDIVMAFDECTKHPATHEEAARSMRMSMRWAKRSREAFEANPAPALFGIQQGSLYPDLRRESAEKLIEIGFEGYAIGGLAVGEGQEAMFEALDTAPELLPTEKPRYLMGVGRPSDIIGAVLRGVDMFDCVMPTRSGRTAQAFVMDGTLNLRNARHAEDAGPLDAECPCPTCAHYSRAYLHHLFKTEEMLGPMLLTQHNIWHYQQLMQGLREAIAEGRVQAFAKTRLDRLSAAAA

SEQ ID NO: 60620 - protein, 395 aa, Sandaracinus amylolyticus
  REGION 1..395: note = tr|A0A0F6YJK8|A0A0F6YJK8_9DELT Queuine tRNA-ribosyltransferase OS=Sandaracinus amylolyticus; OX = 927083 GN=tgt PE=3 SV=1
MRTEGFSYREIARDGDARRGVFTTPRAVVQTPVFMPVGTLATVKSQSPDEIEATGARLILANTYHLWLRPGAEIVDAMGGVQKFQSWPHAVLTDSGGFQVFSLADLRTIDDEGVSFKSHLDGRPLRLTPEESMRIQALLGSDVAMAFDECPPGGAERPIIEKALRRTSAWARRCLLSPWREGQARFGIVQGATHVDLRLSHLDEIAGMEAGGREFDGIALGGFSVGEPIPEMYRALSEITPKMPTDKPRYLMGVGTPYDLLHAIGCGIDLFDCVLPTRNARNAQALTWSGRVNMKQARHKRDESPIDRECDCPVCARHSRAYLHHLIRAEEMLGARLLTQHNLWFYGALTRRAREKIEAGGYHAWAAEAAAKMREGDEVGKGAREKPRFPGEGDG

SEQ ID NO: 60621 - protein, 386 aa, Sandaracinus sp.
  REGION 1..386: note = tr|A0A2E0TDP7|A0A2E0TDP7_9DELT Queuine tRNA-ribosyltransferase OS=Sandaracinus sp. OX=2024858; GN = tgt PE=3 SV=1
MSAEVGAGALPTKGFAFELRAEDGHARRATFTTPRAVVETPTFMPVGTAATVKGLTPDEVEATGARMILANTYHLWLRPGAELIARRGGVTRFMGWEHALLTDSGGFQVFSLAGLRKVDDDGVTFRSHLDGAEKRLTPEESMRVQRLLGSTVAMVLDVCPPGGAARPEVEEAMRRTTAWAKRCLETEPAEGQARFGIVQGATYLDLRRAHLAELAPMAFDGLALGGFSVGEPVETMYELLDAMAHELPRQKPRYLMGVGTPYDLLKAIGAGVDLFDCVLPTRNARNGQALTWDGRVNLRQARHKEDDGPISEACGCPVCARFSRAYLRHLVKANELLGHRLVTQHNLSFYGELVAEARRQIEAGTYHSWAAEAAKRMREGDEVGRG

SEQ ID NO: 60622 - protein, 392 aa, Sandaracinus sp.
  REGION 1..392: note = tr|A0A2D9T170|A0A2D9T170_9DELT Queuine tRNA-ribosyltransferase OS=Sandaracinus sp. OX=2024858; GN = tgt PE=3 SV=1
MSALPTEGFSFAVKAEDGDARRGTFTTTTAVIETPTFMPVGTAATVKGLTPNEVEETGARIILANTYHLWLRPSAELIERRGGVKRFMGWPHSLLTDSGGFQVFSLAKLRDIDDDGVTFRSHLDGSKRRMTPEESMRVQRLLGSDVAMVLDVCPPGGADRATTERAMALTTAWARRSLAAPAAEGQGRFVIAQGATYEDLRLRHLEEVSALDADGVALGGFSVGEPIETMYELLNTVAPRMPREKPRYLMGVGTPFDLLHAIGTGVDLFDCVLPTRNARNGQALTWTGRVNLRQARLSEDDRPISADCGCPVCDPERGYSRAYLRHLIKANELLGHRLMTQHNLFFYGELVREARAHIEAGDYHAWARGAAERMREGDEVGPVDPNSMRRPS

SEQ ID NO: 60623 - protein, 381 aa, unidentified
  source 1..381: note = Sandarakinorhabdus cyanobacteriorum
  REGION 1..381: note = tr|A0A255Y8R0|A0A255Y8R0_9SPHN Queuine tRNA-ribosyltransferase OS=Sandarakinorhabdus cyanobacteriorum OX=1981098 GN=tgt PE=3 SV=1
MPPRFQFTIHARSGKARTGTIAMRRGEIRTPAFMPVGTAATVKAMRTSEVRAAGADIILGNTYHLMLRPTAERIHRLGGLHRFMGWNRPILTDSGGYQVMSLSSLTKRSEEGVTFASHLDGSRHLMSPERSMEIQRLLGSDIVMAFDELVALPAPREQVAAAMERSMRWAVRSRAAFDAGGEHAAGAALFGIQQGGLDERLRAESATALRAIGFDGYAIGGLAVGEGQPAMFGVLDYATDQLPETAPRYLMGVGKPDDIVGAVVRGVDMFDCVLPTRSGRNGQAFTHDGPLNLRNAAHAEDLRPLDEDCRCPVCHGPDAASRAYLHHLIKAGEMLGAMLLTQHNIGFYQQLMAGLRAAIAAGTLTDFAAGFLARYNARVTR

SEQ ID NO: 60624 - protein, 372 aa, Sandarakinorhabdus sp.
  REGION 1..372: note = tr|A0A552UHX6|A0A552UHX6_9SPHN Queuine tRNA-ribosyltransferase OS=Sandarakinorhabdus sp. LB1R16; OX = 2593303 GN=tgt PE=3 SV=1
MTTRFEFSIQARDGAARTGTIAMARGTIRTPAFMPVGTAATVKAMRASEVRAAGADIILGNTYHLMLRPGAERVARLGGLHDFMGWSGPILTDSGGYQVMSLSTLTKRSEEGVAFASHLDGSKHMVTPERSIEIQRLLGSDIVMAFDELVALPAERPVVEAAMQRSMRWAARSRTAFDALGDTGAIFGIQQGGLDERLRAESAAALTGIGFHGYAIGGLAVGEGQEAMFGVLDYATAQLPAEAPRYLMGVGKPDDIVGAVRRGVDMFDCVLPTRSGRNGQAFTRDGPVNLRNAKHAEDKAPLDPGCACPVCNGPSRAYLHHLTKAGEMLGAMLLTEHNIWFYQQLMADLRAAIAEGRLEAFAEGFLARYRQG

SEQ ID NO: 60625 - protein, 376 aa, unidentified
  source 1..376: note = Sanguibacteroides justesenii
  REGION 1..376: note = tr|A0A318N4Z5|A0A318N4Z5_9PORP Queuine tRNA-ribosyltransferase OS=Sanguibacteroides justesenii; OX = 1547597 GN=tgt PE=3 SV=1
MNYTLLAKDKHSEARCGLLTTDHGTIETPIFMPVGTVGTVKAVHARELKEDIQAQIILGNTYHLYLRPGTDVLQAAGGLHKFNAWDRPILTDSGGFQVFSLTDSRKITEEGVTFRSHIDGSKHLFTPENVMDVQRKIGADIVMAFDECPPGQSDYVYAKKSLELTQRWLERCVKRFDATEPLYGYRQSLFPIVQGCVYKDLRERAAEHAVSLEREGYAIGGLAVGEPAESMYAMIEVVNRILPKDKPRYLMGVGTPENILEAIALGVDMFDCVMPTRNGRNGMLFTTEGVINIKNKKWEKDFSPIDPLALSFADKDYSKAYLRHLIKADEILGLQICSIHNLSFYLWLVKEARKHILEGDFLAWKTKTVKKVTTRL

SEQ ID NO: 60626 - protein, 376 aa, unidentified
  source 1..376: note = Sanguibacteroides justesenii
  REGION 1..376: note = tr|A0A0C3RJZ1|A0A0C3RJZ1_9PORP Queuine tRNA-ribosyltransferase OS=Sanguibacteroides justesenii; OX = 1547597 GN=tgt PE=3 SV=1
MNYTLLAKDKHSEARCGLLTTDHGTIETPIFMPVGTVGTVKAVHARELKEDIQAQIILGNTYHLYLRPGTDVLQAAGGLHKFNAWDRPILTDSGGFQVFSLTDSRKITEEGVTFRSHIDGSKHLFTPENVMDVQRRIGADIVMAFDECPPGQSDYAYAKKSLELTQRWLERCVKRFDATEPLYGYRQSLFPIVQGCVYEDLRERAAEHAVSLEREGYAIGGLAVGEPAESMYAMIEVVNRILPKDKPRYLMGVGTPENILEAIALGVDMFDCVMPTRNGRNGMLFTTEGVINIKNKKWEKDFSPIDPLALSFVDKDYSKAYLRHLIKADEILGLQICSIHNLSFYLWLVKEARKHILEGDFLAWKAKTVKKVTTRL

SEQ ID NO: 60627 - protein, 377 aa, unidentified
  source 1..377: note = Sapientia aquatica
  REGION 1..377: note = tr|A0A4V3AUW5|A0A4V3AUW5_9BURK Queuine tRNA-ribosyltransferase OS=Sapientia aquatica OX=1549640; GN = tgt PE=3 SV=1
MLDFKLIKKDPNSAARRGQVTVNHGVIQTPIFMPVGTYGSVKAMSPLELKEIEAQIILGNTFHLWLRPGLDVVNKFGGLHKFMGWDQPILTDSGGFQVYSLGAMRKITEEGVKFASPINGERLFLSPEISMQIQRVLNSDIVMQFDECTPYEIDGRPATTEEAAKSMRMSLRWAKRSMDEFNQGENPNALFGIVQGGMFEHLRDESLAGLEELNFHGVAIGGLSVGEPKEDMLRVLQHVGPRLPANKPHYLMGVGTPEDLVAGVQNGIDMFDCVMPTRNARNGWLFTRFGDVKIKNARYKEDTAPLDETCSCYACKNFSRAYLHHLHRTGEILGARLNTIHNLHYYLELMQEMRDALDADRFSTFVVQFHADRARGV

SEQ ID NO: 60628 - protein, 376 aa, Saprospira grandis
  REGION 1..376: note = tr|H6L8T5|H6L8T5_SAPGL Queuine tRNA-ribosyltransferase OS=Saprospira grandis (strain Lewin) OX=984262 GN=tgt PE=3 SV=1
MKFELEHSDPQSQARVGTLQTAHGQIPTPIFMPVGTIGTVKGVHQKELSEDIKAKIILGNTYHLYLRPGTELLEKAGGLHQFMNWQGPILTDSGGFQVFSLAHRRKIKEEGATFASHIDGSKHLFSPEGVMDIQRSIGADIIMAFDECTPYPCDYRYAKKSMELTHRWLKRCYTRFKETEPKYGYPQSLFPIVQGSVYKDLRLKSAETVAQYADLGIAIGGLSVGEPKEEMYAMTDLVCSQLPTDKPRYLMGVGTPANILECIALGVDMFDCVMPTRNARHGLIFTRKGKLNIKNKKWKDDFSPIDEDAPNPTSRQHTKAYLRHLFTVNELLGMQIATLHNLSFYLELVREARERILDGSFRAWKDELVPILEQKR

SEQ ID NO: 60629 - protein, 376 aa, Saprospira grandis
  REGION 1..376: note = tr|J0PBQ8|J0PBQ8_9BACT Queuine tRNA-ribosyltransferase OS=Saprospira grandis DSM 2844; OX = 694433 GN=tgt PE=3 SV=1
MKFELEHSDPHSKARVGTLQTAHGQIPTPIFMPVGTIGTVKGVHQKELSEDIKAKIILGNTYHLYLRPGSELLEKAGGLHQFMNWQGPILTDSGGFQVFSLAHRRKIKEEGATFASHIDGSKHLFSPEGVMDIQRSIGADIIMAFDECTPYPCDYRYAKKSMELTHRWLKRCYTRFKETEPKYGYPQSLFPIIQGSVYKDLRLKSAETVVQYADLGIAIGGLSVGEPKEEMYAMTDLVCSQLPSDKPRYLMGVGTPANILECIALGVDMFDCVMPTRNARHGLIFTRKGKLNIKNKKWKDDFSPIDEEAPNPTSRQHTKAYLRHLFTVNELLGMQIATLHNLSFYLELVREARERILDGSFRAWKDELVPILEQKR

SEQ ID NO: 60630 - protein, 376 aa, unidentified
  source 1..376: note = Saprospiraceae bacterium
  REGION 1..376: note = tr|A0A521V9P7|A0A521V9P7_9BACT Queuine tRNA-ribosyltransferase OS=Saprospiraceae bacterium; OX = 2202734 GN=tgt PE=3 SV=1
MDFTLQHTDPTSSARAGLIETAHGPIETPIFMPVGTVGAVRAIHQHELEQQIQAQIILGNTYHLYLRPGTEILQKAGGLHKFTGWNHPTLTDSGGYQVYSLSNQRKIKEEGVTFQSHLDGSKHFISPERAVDIQREIGADIIMAFDECTPYPCEYDYARKSMEMTHRWLKRCCDRFDETQGLYGYKQALFPIVQGSIYKDLRAESAETIASFGREGNAIGGLSVGEPAEKMYEMTELVCSILPKDKPRYLMGVGTPVNILEGIALGVDMFDCVLPTRNARHGMLYTAQGIINIKNNKWKDDFGPIDEDSPSHTSRTHSKAYLRHLIYSKEYLGAQVASLHNLSFFLWLVKEARQHIIAGDFPTWKKEMVEKMGRRI

SEQ ID NO: 60631 - protein, 377 aa, unidentified
  source 1..377: note = Saprospirales bacterium
  REGION 1..377: note = tr|A0A1Z9NU86|A0A1Z9NU86_9BACT Queuine tRNA-ribosyltransferase OS=Saprospirales bacterium TMED214; OX = 1986670 GN=tgt PE=3 SV=1
MSQFEFTLKHRDAATSARRGVFLTPHGPVQTPGFMPVGTQGTVKGVTIDQVAATGAHMILGNTYHLSLRPGHDTVRRLGGLHGMSGWQGPILTDSGGFQIFSLKAISQITEQEATFRSHIDGAIVRLTPEHSIEIQEALGSDVAMVLDHVIALPATHDEVEDAMARSIRWAKRCLEASKRDDQAKFAIVQGGLDAELRVQCARELSAMDFNGYAVGGLSVGEAPTEMYRITAATCPSLPEHKPRYLMGVGRPIDLLESIARGIDLFDCVMPTRNGRNGLAFTDEGNLKLRNAIHREDRRPIEEDCPCLACRHSRGYIRHLFVSGEMLGPILLSIHNLTYYQRVMSEARVAIESDRFNEFLAEKKQGWGGTPQNSSAC

SEQ ID NO: 60632 - protein, 376 aa, unidentified
  source 1..376: note = Saprospirales bacterium
  REGION 1..376: note = tr|A0A350C5S5|A0A350C5S5_9BACT Queuine tRNA-ribosyltransferase OS=Saprospirales bacterium; OX = 2026790 GN=tgt PE=3 SV=1
MKFNITHKDHGSSARAGILQTGHGEIQTPIFMPVGTQGTVKSVHQEELKTTINADIILGNTYHLYLRPHTDILQKAGGLHKFINWERPILTDSGGYQVYSLKGMRKITEKGVKFRSHIDGSMHFFSPESVMDIQREIGADIIMAFDECTPYPCDYKYARRSMHMTHRWLERCITRFNETDPIYDYEQTLAPIVQGSTYTDLREMSAEYIAGTNMPINAIGGLSVGEPAEELYAMTEVVTNILPEDKPRYLMGVGLPENILECIALGIDMFDCVLPTRNARHGMLYTKNGVINMKNAKWKEDFSPIDPDSEAATSREHNKAYLRHLFKVKEYLAMQIATINNLSFYMWLVRTAREKIQEGTFTQWKNVILPVITQRL

SEQ ID NO: 60633 - protein, 378 aa, unidentified
  source 1..378: note = Unknown
  REGION 1..378: note = tr|A0A2A5YBY5|A0A2A5YBY5_9PROT Queuine tRNA-ribosyltransferase OS=SAR116 cluster bacterium MED-G05 OX=1986234 GN=tgt PE=3 SV=1
MPDFSFSLKTTDGAARRGRLKTAWGEVETPVFMPVGTAATVKGMTVDSVRSTGASIILANTYHLMLRPGAERVARLGGVRKMMGWDGPLLTDSGGFQVMSLGPLRKLDEDGVTFKSHLDGSKHRLTPERSTEIQHLLDATITMAFDECTPFPATESAAAESMRLSMRWAKRSRSAFVARPGYGQFGIVQGSVFRDLRAESVAALEEIDFEGYAIGGLAVGEGQEAMFEALAFTTPLMRADRPRYLMGVGKPADLVGGVARGVDMFDCVLPTRSGRTGQAFTRRGPVNIKNARHAEDQRPLDEECQCPACAHYSRAYLHHLFKADEVLGLMLLSWHNIQYYQDLMAGMRAAIEAGSFAAFEADFHAGQARGDIEPVGSG

SEQ ID NO: 60634 - protein, 382 aa, unidentified
  source 1..382: note = Unknown
  REGION 1..382: note = tr|G5ZVJ9|G5ZVJ9_9PROT Queuine tRNA-ribosyltransferase OS=SAR116 cluster alpha proteobacterium HIMB100 OX=909943 GN=tgt PE=3 SV=1
MANHSDSRPDFGFTLLGTDGAARRGRVTTGFGVVETPAFMPVGTAASVKAMMPNQVASTGAQIILSNTYHLMLRPGPERVERLGGVRALMGWDGPLLTDSGGFQVMSLGPLRKITEQGVSFKSHLDGTVYDLTPERSIQIQHMLDATITMAFDECTPFPATHDEAAASMQLSMRWAERSRAAFVVRTGYGQFGIVQGSVYEDLRHGSIKALTDIGFEGYAIGGLAVGEGQKAMFDTLDVTCPAMPDDKPRYLMGVGKPADIVGAVRRGVDMFDCVMPTRSGRTAQGFTRWGPVNIRNARHAEDLRPLDETCSCPACTRFSRAYLHHLFKADEIQGLMLLTWHNLQHYQDLMAGLRSAIDAGRLDDFAAAFDAEQARGDIPPL

SEQ ID NO: 60635 - protein, 391 aa, unidentified
  source 1..391: note = Unknown
  REGION 1..391: note = tr|A0A2N0L5S7|A0A2N0L5S7_9CHLR Queuine tRNA-ribosyltransferase OS=SAR202 cluster bacterium Io17-Chloro-G3 OX=1926612 GN=tgt PE=3 SV=1
MKNRENTTSFWLENVDEKARAGRLVTPRGCVDTPLFMPVATQGSVKALDPEDLERVGAGLVLGNAYHLYLRPGVEIISNLGGLHRFMGWNGPILTDSGGFQGFSLKHLREIDENGITFRSHIDGSTHVITPESIIDVQEKLCSDIMMPLDVCLPHDADEELVSAGISRTNRWMERCIGSRTNTNQVLFGIVQGGLFKDLRRQSVAFMNNLDMPGYSIGGLSVGESKSEMYEITSLTAGLLPEKKPRYLMGVGAPEDIVECVARGIDMFDCVLPTRVARNGALYTRNGRINITAAKFKNFDGPVDSGCHCYCCERFSAAYLNHLFKAREYLAYRLASLHNLSFIFQLMVEIRSSILEGEFANYRNCFWSKYRVSDESVRTQQRKKWESSDRT

SEQ ID NO: 60636 - protein, 392 aa, unidentified
  source 1..392: note = Unknown
  REGION 1..392: note = tr|A0A2N0KH96|A0A2N0KH96_9CHLR Queuine tRNA-ribosyltransferase OS=SAR202 cluster bacterium Casp-Chloro-G3 OX=1926605 GN=tgt PE=3 SV=1
MAQQFSFNLKKTQGRARLGEFTTPHGRVATPAFMPVATQATVKTLTPDEVVSVGAEIVLSNAYHLYLRPGVELVQRLGGLHQFMGWSRPILTDSGGFQAFSMGALKSVDESGIRFRSHIDGSEHNFTPELATRNQEGIGADIIMCLDQCIAFGSARDEVVRAMERTHRWAEICHQTHSTAPNADAQALFGIIQGGTFPDLREESAKFITGIPFDGYAIGGLAVGESKDQMYEVTRQVADQLPVAKPRYLMGVGSPEDLVESVAGGVDMCDCVLPTRVARNGALFTQQGRVNITNRRFADQDAPLEPDCDCYTCQRFTAAYLWHLFKAREILGLRLASLHNLRFILRLMDNIRQAIREDRFDQFRQNFWSSYRPTDENTRRQQKEKWLNAREG

SEQ ID NO: 60637 - protein, 381 aa, unidentified
  source 1..381: note = Unknown
  REGION 1..381: note = tr|A0A2A4T8U4|A0A2A4T8U4_9DELT Queuine tRNA-ribosyltransferase OS=SAR324 cluster bacterium; OX = 2024889 GN=tgt PE=3 SV=1
MNPKSFSFKLHSVDPSGARRGTMQTPHGKIETPIFMPVGTAAAMKALTVQQLKDTKTQIVLSNAYHLNNQPGADMVEKFGGLHKFMGWDGPMLTDSGGYQVFSLPGKVIDDDGVTFKYAKGGKSTRLSPEISIDIQNRLGADIIMAFDECVEFPATYEYTKRSLKVTSEWARRCKAAHKREDQALFGISQGGLYKDLREEGLKPLIDLDLPGYAVGGLSVGEGLDNMKMALDFTTHMMPVNKPRYLMGIGTPEDILEAVERGIDMMDCVMPTKYARSATLFTNVGKLRLTNREFRNDKFQLDTGCSCYTCENFTRAYLHHLYTSNEILGAILGSIHNVSFYIELMTRSRKAIEEKRFSSFKQDFLALYNRKVKSKKPKKKR

SEQ ID NO: 60638 - protein, 376 aa, unidentified
  source 1..376: note = Unknown
  REGION 1..376: note = tr|A0A432GLW3|A0A432GLW3_9DELT Queuine tRNA-ribosyltransferase OS=SAR324 cluster bacterium; OX = 2024889 GN=tgt PE=3 SV=1
MIQFELEAKDHNSRAGILKTLHGTIHTPVFMPVGTLGTVKALTPEEVSELGAEIILGNTYHLHLRPGDELVRKLGGLHHFMNWDGPILTDSGGFQIFSLAKLLKLDQSGVVIRSHIDGSKITLTPEISIAIQQNLGSTIMMCLDQCLELPATRQEIERSIALTTKWAQRSKDASSQGSGVSGEQALFGIVQGGGELNLREQSLEQMVNIGFDGYAIGGLSVGETKEEMYSVVHHIAVKMPAQKPRYLMGVGDPEDLLEGIEAGIDMFDCVMPTRNARNGSLFTSHGKISIKQNQYKEDPAPLDPDCACSTCKNYSRAYLRHLFKTNEILGMRLNTYHNLFFYISLIKQARNAIKEKRFPNFKKTFLQKYRSGIEGV

SEQ ID NO: 60639 - protein, 370 aa, unidentified
  source 1..370: note = Unknown
  REGION 1..370: note = tr|J4V1C2|J4V1C2_9GAMM Queuine tRNA-ribosyltransferase OS=SAR86 cluster bacterium SAR86B; OX = 1123867 GN=tgt PE=3 SV=1
MFEVINTSEYARTGLLKLRHGSIQTPAFMPVGTNGTVKSLTNDDLIETGAEIILGNTYHLMLRPGDELIKELGGLNNFINWSKPILTDSGGFQVWSLGDLVKITEEGVSFKSPYDGRNIFIRPEDSIQIQQNLDSDIIMVFDECTNYPATHEEAKSSMELSMRWAKRCKDFHTSDGKLFGIVQGGMYKDLRSSSLEKLNDIGFDGIAIGGLSVGESKEEKTEILEHLAPELPQNLPHYLMGVGKPEDIVEGVRYGIDMFDCVIPTRNARNGQLFTSEGVVNIRNAEHKKSTLPIDPNCKCKVCKNYSRAYLNHLDRTNEILGSMLSSYHNIFYYQNLMQDIRDSIKNNKFANFVKDFYNKRDLEMPKGPV

SEQ ID NO: 60640 - protein, 372 aa, unidentified
  source 1..372: note = Unknown
  REGION 1..372: note = tr|A0A368BMJ3|A0A368BMJ3_9GAMM Queuine tRNA-ribosyltransferase OS=SAR86 cluster bacterium; OX = 2030880 GN=tgt PE=3 SV=1
MSFKIINQDGYARRGVLTTKTSEIQTPVFMPVGTYGTVKAMTPLQLKEIGFEIILGNAFHLNLRPGLDVIEKFEGLHKFMGWDRSVLTDSGGFQVWSLGDLRKIHANGVEFKSPLDGSMMNITPEDSIKIQLKLDADIVMIFDECTPYPSTHSQALESMQLTHRWAESSKKYFDKMHRNNLIFGIVQGGKYLDLREESLKHMMSLNFDGIAIGGLSVGEPKSIKTKVLQALADKLPSTLPHYVMGVGTPEELVEGVRYGIDMFDCVIPTRNARNGFIYTTNGILKIRNSKHKNSTLPVDQDCDCYTCSNFSRGYLHHLDKCNEILANTLLTICNLAHFYKLMKQIQGAIEQNTFEEFVDLFYDMRGLKKPKL

SEQ ID NO: 60641 - protein, 370 aa, unidentified
  source 1..370: note = Unknown
  REGION 1..370: note = tr|A0A0R2W2P5|A0A0R2W2P5_9GAMM Queuine tRNA-ribosyltransferase OS=SAR92 bacterium BACL16 MAG-120619-bin48 OX=1655625 GN=tgt PE=3 SV=1
MTFDVSATDGKARRGEISFPRGKVQTPAFMPVGTYGTVKGMLPKDIADIGAEIILGNTFHLMLRPGTEVVKAHGDLHNFIQWQGPILTDSGGFQVFSLGDMRKISEAGVKFQSPIDGSPVFIDPETSMQVQRDLGSDIVMIFDECTPHPATEQQARDSMQLSLRWAARSKAAHGDNPSALFGIVQGGMYESLRDESLQGLVDIGFDGYAIGGLSVGEPKEDMMRVLDHLAYQMPADRPRYLMGVGKPEDLVEGVRRGIDMFDCVMPTRNARNGHLFTSTGVIKIRNARHRYDTGPLDSQCDCYTCRNFSRAYLHHLEKCGEMLSAQLNTIHNLRYYQTLMAGLREAITEGRLDAFADDFYAMRAPTTSAD

SEQ ID NO: 60642 - protein, 373 aa, unidentified
  source 1..373: note = Unknown
  REGION 1..373: note = tr|A0A0R2UA07|A0A0R2UA07_9GAMM Queuine tRNA-ribosyltransferase OS=SAR92 bacterium BACL26 MAG-121220-bin70 OX=1655626 GN=tgt PE=3 SV=1
MQFKVSATDGKARRGEMQFPRGTVQTPAFMPVGTYGTVKGMLPRDIKEIGAEMILGNTFHLMLRPGTEVIKGHGDLHDFTQWQGPILTDSGGFQVFSLGDMRKISEQGVKFQSPIDGSPVFLDPETSMQVQADLGADVVMIFDECTPYPASEKEAEESMQLSLRWAKRSKDAHGDNPSALFGIVQGGMYESLRDESLAGLVDIGFDGYAIGGLSVGEPKEDMVRVLDYLADTMPADRPRYLMGVGKPADLVEGVRRGIDMFDCVMPTRNARNGHLFTSAGVIKIRNARHRYDTGPLDADCDCYTCTNFSRGYLHHLEKCGEMLSAQLNTIHNLRYYQTLMAGLREAIAEGELEAFADKFYLKQAAGDSRGLNP

SEQ ID NO: 60643 - protein, 373 aa, unidentified
  source 1..373: note = Unknown
  REGION 1..373: note = tr|A0A520MD78|A0A520MD78_9GAMM Queuine tRNA-ribosyltransferase OS=SAR92 clade bacterium; OX = 2315479 GN=tgt PE=3 SV=1
MQFKVSATDGKARRGEMQFPRGAVQTPAFMPVGTYGTVKGMLPKDIEEIGAEMILGNTFHLMLRPGTEVVKAHGDLHDFIQWQGPILTDSGGFQVFSLGDMRKITEEGVKFKSPIDGSPVFIDPETSMQVQRDLGSDVVMIFDECTPYPATEKEAEDSMQLSLRWAQRSKAAHGNNPSALFGIVQGGMYESLRDISLASLVDIDFDGYAIGGLSVGEPKEDMLRVLDHLADTMPADKPRYLMGVGKPADLVEGVRRGIDMFDCVMPTRNARNGHLFTSTGVIKIRNAKHRHDTQPLDSECDCYTCKNFSRGYLHHLEKCGEMLSAQLNTIHNLRFYQTLMAGLRDAIAQGELDSFADEFYRKQAIGDSGGLNP

SEQ ID NO: 60644 - protein, 367 aa, unidentified
  source 1..367: note = Unknown
  REGION 1..367: note = tr|A0A520LJV6|A0A520LJV6_9GAMM Queuine tRNA-ribosyltransferase OS=SAR92 clade bacterium; OX = 2315479 GN=tgt PE=3 SV=1
MKFEISKTDGHARTGHLIFDKGIVRTPAFMPVGTYGTVKSLTPSDILRSGADIVLGNTFHLMLRPGTEIIKKHGSLHNFMCWEKPILTDSGGFQVFSLGNMRQITEDGVIFKSPIDGSTVSLDPEKSMEVQRALGSDIVMIFDDCTPFPATKKQAMESMHLSLRWAERSKVAHAGNPSALFGIVQGGMHEDLRGESLEQLTAIGFDGYAIGGLSVGEPKKDMQRILNAIGPKMPENKPRYLMGVGKPEDIIRAVQKGVDMFDCVMPTRNARNGHLFTSEGIIRIRNSVYKDDLNPLDPECDCYTCSNFSRSYLHHLEKCKEMLGPQLNTIHNLRFYQNLMSQIRGAIAEGNLDSFANNYFEKHSITI

SEQ ID NO: 60645 - protein, 379 aa, Sarcina sp.
  REGION 1..379: note = tr|A0A1G9CS76|A0A1G9CS76_9CLOT Queuine tRNA-ribosyltransferase OS=Sarcina sp. DSM 11001; OX = 1798184 GN=tgt PE=3 SV=1
MYKILKKEGSAKRAHMTTVHGVIETPVFMNVATAGAIKGGLSADDLRSIRTQVALCNTYHLHVRPGDELVHRRGGIHRFMRWDRPILTDSGGFQVFSLADLRSIKEEGVTFRCHIDGHKIFMGPEESMRIQSNLGSTIAMAFDECPPALAEREYVTHSVDRTTRWLERCKKEMQRLNQLEDTVNPGQLLFGINQGAIYGDIRIDHAKRITEMDLDGYAVGGLAVGETHEQMYDMLDQTVPWLPADKPTYLMGVGTPENILEGVARGIDFFDCVYPSRNGRHGNLYTHHGTVHIKSARYAEDDRPIEEGCGCPVCRAGYSRAYLRHLYKAQEALGLRMGVMHNLYYYNHLMEEIRQALDEGRFEAFKKAAIEEMHVGENA

SEQ ID NO: 60646 - protein, 440 aa, Scardovia inopinata; identical to SEQ ID NO: 58790
  REGION 1..440: note = tr|W5IHS0|W5IHS0_SCAIO Queuine tRNA-ribosyltransferase OS=Scardovia inopinata F0304; OX = 641146 GN=tgt PE=3 SV=1

SEQ ID NO: 60647 - protein, 428 aa, Scardovia wiggsiae
  REGION 1..428: note = tr|J0X095|J0X095_9BIFI Queuine tRNA-ribosyltransferase OS=Scardovia wiggsiae F0424; OX = 857290 GN=tgt PE=3 SV=1
MMKNEKTAKLPVPRGARPGQPGDRSAFGFEISTQLPGHHGRTGMIRTPHGDIRTPAFVPVATQGTMKAVLPEQMEALGAQCMLSNAFHLFERPGEDILDAAGGLNEFMHWDKPTYTDSGGFQVLSLGAGFKKTLAMDTEGKKSDDVIAKGKNRLAFVDEDGVTFKSPLNGAQKRFSAEISMQIQHKIGADIMFAFDELTTLMNTRHYQEKSVERTFRWAKRCIAEHEKLTAERTGKPYQALFGVVQGANYEDLRRKAASQIGSLGFDGFGIGGAIEKRIIGDICSWICDELPEGKPRHVLGIAAVDDIFACVENGGDTFDCVAPARTARNGAVYTRDGRWNVKRSAMRNDFRPIEDGCDCYTCKNYSRAYVCHLLHAGEMAGATLATIHNERFFIRLLDDIRASIDGGYFTEFKNDTLSRFYAHGSRG

SEQ ID NO: 60648 - protein, 451 aa, unidentified
  source 1..451: note = Schaalia canis
  REGION 1..451: note = tr|A0A3P1SFQ3|A0A3P1SFQ3_9ACTO Queuine tRNA-ribosyltransferase OS=Schaalia canis OX=100469 GN=tgt; PE = 3 SV=1
MNAHWIEAPLAETEKTSAAASSFFPVLEAPAVTADRGFTLGERLDTGAGLGRTGVIHTAHGDIATPAFIPVGTKANVKALVPEMVAGLGAQAVLANAYHLYLQPGSDLVDAAGGLGSFMGWRGPTYTDSGGFQVLSLGAGFKKVLSEEFSGNADTTNEALLRQVVKASRAVVDDDGVIFHSHIDGTAHRFNPEVSMGIQHELGSDIMFAFDELTSLLHPRSYQEESLDRTEAWAVRCLREHKRLTEERSHRPYQQLWGVVQGAQYEDLRRRAARTLAQMEVDGQRFDGFGVGGALEKENLGTIVSWVCEELPEDLPRHLLGISEPDDFFRAVEAGADTFDCVNPSRVARNGSIYTPDGRYNITNARFRSDFTPLVEGCGCYTCTHFTRAYVRHLFKAKEILASTLATIHNEWFTVRLVDGIRRSIAEGTYESFRDEMLGRYRVGALAAKRG

SEQ ID NO: 60649 - protein, 437 aa, unidentified
  source 1..437: note = Schaalia cardiffensis
  REGION 1..437: note = tr|N6X2E3|N6X2E3_9ACTO Queuine tRNA-ribosyltransferase OS=Schaalia cardiffensis F0333; OX = 888050 GN=tgt PE=3 SV=1
MNTHWLATAPSPLPASGSNLPTRDRGFDLGTRLNAGPGLGRTGVLHTAHGEIHTPAFIPVGTKANVKALVPEMLAALGAQAVLANAYHLYLQPGSDLVDEAGGLGSFMNWPGPTYTDSGGFQVLSLGAGFKKVLSQEFSGSANTDDPRLHMQAVKASEAVVDEDGVVFRSHIDGTRHRFTAEVSMRIQHELGSDIMFSFDELTSLLHPRSYQEESLERTHAWARRCLRAHARLTEERVDKPYQQLWGVIQGAQYEDLRRKAARTMAEMDEGGWRFDGFGLGGALEKENLGTILTWVSEELGEDRPRHLLGISEPEDFFSGVEAGADTFDCVNPSRVARNAAIYSPDGRFNVTNARFKRDFSPLVEGCGCYTCTHYSAAYVHHLFKAKEMLASTLATIHNEWFTVRLVDAIRDSIDNGDYEAFRDDMLGRYTSKGSPA

SEQ ID NO: 60650 - protein, 443 aa, unidentified
  source 1..443: note = Schaalia georgiae
  REGION 1..443: note = tr|J1HYX7|J1HYX7_9ACTO Queuine tRNA-ribosyltransferase OS=Schaalia georgiae F0490; OX = 1125717 GN=tgt PE=3 SV=1
MSSDWLAAPPVPFALPAAPPSGWRDRGFQVGTHLASGSGLGRTGTIHTAHGTIRTPAFIPVGTKANVKALTPEMVEALGAQAVLANAYHLYLRPGSDVVDEAGGFARFMNWRGPTYTDSGGFQVLSLGAGFKKVLSQEFSGAADPNDPRLSAQAVKASNAVVDDDGVVFSSHIDGTKHRFTPEVSMRIQHQLGADIMFAFDELTSLLHPRSYQVESLERTHAWARRCLVEHARLTEERRATPYQQLWGVVQGAQWEDLRRRAARTMAGMEADGQRFDGFGVGGALEKEHLGTIVAWVCEELGEDRPRHLLGISEPEDLFAGVEAGADTFDCVNPSRVARNAAIYTPTGRYNITNARFKRDFSPLAPGCGCYTCTNHTRAYVHHLFKAKEILSSTLATIHNEWFTLRLVDAMRDSIERGCFEDFRDDMLGRYRSGGGREGRSAQ

SEQ ID NO: 60651 - protein, 443 aa, unidentified
  source 1..443: note = Schaalia georgiae
  REGION 1..443: note = tr|A0A3R8QVA5|A0A3R8QVA5_9ACTO Queuine tRNA-ribosyltransferase OS=Schaalia georgiae OX=52768; GN = tgt PE=3 SV=1
MSSDWLAAPPVPLALPAAPPSGWRDRGFQVGTRLASGSGLGRTGTIHTAHGTIRTPAFIPVGTKANVKALTPEMVEALGAQAVLANAYHLYLRPGSDVVDEAGGFARFMNWRGPTYTDSGGFQVLSLGAGFKKVLSQEFSGAADPNDPRLSAQAVKASNAVVDDDGVVFSSHIDGTKHRFTPEVSMRIQHQLGADIMFAFDELTSLLHPRSYQVESLERTHAWARRCLVEHARLTEERRAMPYQQLWGVVQGAQWEDLRRRAARTMAGMEADGQRFDGFGVGGALEKERLGTIVAWVCEELGEDRPRHLLGISEPEDLFAGVEAGADTFDCVNPSRVARNAAIYTPTGRYNITNARFKRDFSPLAPGCGCYTCTNHTRAYVHHLFKAKEILSSTLATIHNEWFTLRLVDAVRDSIERGCFEDFRDDMLGRYRSGGGREGRSAQ

SEQ ID NO: 60652 - protein, 441 aa, unidentified
  source 1..441: note = Schaalia meyeri
  REGION 1..441: note = tr|A0A1H1KRT6|A0A1H1KRT6_9ACTO Queuine tRNA-ribosyltransferase OS=Schaalia meyeri OX=52773 GN=tgt; PE = 3 SV=1
MNANWLQAPSPDAVAAFDATAASGAHSPDRGFEINARLHTNGGLGRTGIIRTAHGDIRTPAFIPVGTKANVKALTPEMVRSLGAQAVLANAYHLYLQPGSDIIDEAGGFAAFMNWAGPTYTDSGGFQVLSLGAGFKKVLSQEFSGQADPNDPALNAQAIKASNAVVDDDGVVFSSHIDGSKHRFNPEVSMGIQHQLGSDIMFAFDELTSLLHPRSYQVESLERTHAWAARCLAEHKRLTEQRAGKPYQQLWGVIQGARWEDLRRQAARTMARMEVDGQRFDGFGVGGALEKENLGTIVSWVCEELGEDRPRHLLGISEPEDLFEGVAAGADTFDCVNPSRVARNAAIYTPDGRFNITNARFKRDFTPLVDGCGCYTCTHYTRAYMHHLFKAKEILSATLATIHNEWFTLRLVDGIRASIEDGCFDEFRSDMLGRYLAGRRH

SEQ ID NO: 60653 - protein, 441 aa, unidentified
  source 1..441: note = Schaalia odontolytica
  REGION 1..441: note = tr|D4U1M2|D4U1M2_9ACTO Queuine tRNA-ribosyltransferase OS=Schaalia odontolytica F0309; OX = 649742 GN=tgt PE=3 SV=1
MNDNWLSAPTPEQLTPFEPPASEGAHHPDRGFTIGHRMESHGGLGRTGVIHTAHGTIATPAFIPVGTKANVKALTPEMVRSLGAQAVLANAYHLYLQPGSDIVDEAGGFGPFMNWSGPTYTDSGGFQVLSLGAGFKKVLSQEFSGQADPTDPKVQMQAIKASNAVVDDDGVIFSSHIDGTKHRFNPEVSMGIQHQLGSDIMFAFDELTSLLHPRSYQEESLARTHAWAARCLAEHKRLTEERSHKPYQQLWGVIQGAQWEDLRRQAARTMADMEVDGQRFDGFGVGGALEKENLGTIVSWVCEELGEDRPRHLLGISEPEDLFAGVAAGADTFDCVNPSRVARNAAIYTPDGRFNITNARFKRDFTPLVEGCGCYTCTHYTRAYIHHLFKAKEILSATLATIHNEWFTLRLVDGIRASIIDGCFDQFRSDMLGRYEAGRRR

SEQ ID NO: 60654 - protein, 441 aa, unidentified
  source 1..441: note = Schaalia odontolytica
  REGION 1..441: note = tr|A0A2X0U354|A0A2X0U354_9ACTO Queuine tRNA-ribosyltransferase OS=Schaalia odontolytica OX=1660; GN = tgt PE=3 SV=1
MNDNWLCAPAPEQLTPFEAPASSGGHSPDRGFTIGTRLDTHGCLGRTGVVHTAHGDIRTPAFIPVGTKANVKALTPEMVRGLGAQAVLANAYHLYLQPGSDIVDDAGGFAQFMNWSGPTFTDSGGFQVLSLGAGFKKVLSQEFSGKADPTDPAVQMQAIKASHAVVDNDGVIFSSHIDGTKHRFNPEVSMGIQHQLGSDIMFAFDELTSLLHPRSYQEESLERTHAWAARCLSEHKRLTEERSHKPYQQLWGVIQGAQWEDLRRQAARTMADMDVEGQRFDGFGVGGALEKENLGTIVSWVCEELGEDRPRHLLGISEPEDLFAGVAAGADTFDCVNPSRVARNAAIYSPDGRFNITNARFKRDFTPLVEGCECYTCTHYTRAYLHHLFKAKEILSATLATIHNEWFTLRLVDSIRDSIEEGCFDEFRSDMLGRYEAGRRR

SEQ ID NO: 60655 - protein, 448 aa, unidentified
  source 1..448: note = Schaalia radingae
  REGION 1..448: note = tr|A0A1H2ELP9|A0A1H2ELP9_9ACTO Queuine tRNA-ribosyltransferase OS=Schaalia radingae OX=131110; GN = tgt PE=3 SV=1
MTDAPQWIALPSRPHPEITPQPGQADKVSEGGVGFEVTYRHDSGMGLSRTGVITTPHGQIHTPAFIPVGTKANVKALVPEMVANLGGQAVLANAYHLYLQPGSDIVDRAGGFGAFMNWHGPTFTDSGGFQVLSLGAGFKKVLTQEFSGVYKEASAAEQDWMFRQAVKSSRAVVDSDGVVFQSHIDGSHHRFTPEKSMQIQHQLGADIMFAFDELTSLLHPRWYQEESLERTHEWARRCLAEHERLTRERADHPYQQLFGVVQGAQYEDLRRCAARTLAQMEVDGRTFDGFGVGGALEKENLGRIVSWVCEELPDDRPRHLLGISEPDDLFAGVEAGADTFDCVNPSRVARNAAIYTPDGRFNVTNARFADDFTPLVDGCGCYTCQHYTRAYVRHLFKAREILASTLATIHNEWFTVHLVDAIRGSIQSGDFDAFRDEMLGRYHHADQR

SEQ ID NO: 60656 - protein, 440 aa, unidentified
  source 1..440: note = Schaalia turicensis
  REGION 1..440: note = tr|A0A2I1I523|A0A2I1I523_9ACTO Queuine tRNA-ribosyltransferase OS=Schaalia turicensis OX=131111; GN = tgt PE=3 SV=1
MSEQWLAAPPSNECPLGAQPGSLDRGFNVGSRLESGRGLGRTGILHTAHGDIRTPAFIPVGTKANVKALVPEMVADLGAQAVLANAYHLYLQPGSNLVDEAGGLGKFMNWPGPTYTDSGGFQVLSLGAGFKKVLSQEFSGAADPNDPKLHMQAVKASTAVVDDDGVVFSSHIDGTKHRFTAEVSMNIQHQLGSDIMFAFDELTSLLHPRSYQEMSLERTHEWARRCLREHARLTEVRADKPYQQLWGVIQGAQYEDLRRLAARTMNDMDEDGTRFDGFGIGGALEKENLGTIVSWVSEELDEDRPRHLLGISEPDDFFRGVEAGADTFDCVNPSRVARNAAIYSPNGRFNITNARFKRDFNPMVEGCGCYTCTHYSAAYVHHLFKAHEILASTLATIHNEWFTVRLVDTIRDSIDNGNFEAFRADMLGKYAGGSTRARHS

SEQ ID NO: 60657 - protein, 440 aa, unidentified
  source 1..440: note = Schaalia turicensis
  REGION 1..440: note = tr|K0ZF85|K0ZF85_9ACTO Queuine tRNA-ribosyltransferase OS=Schaalia turicensis ACS-279-V-Col4 OX=883077 GN=tgt PE=3 SV=1
MSEQWLAAPPSDERPLGAKPGSPDRGFDVGSRLESGRGLGRTGILHTAHGDIRTPAFIPVGTKANVKALVPEMVADLGAQAVLANAYHLYLQPGSDLVDEAGGLGEFMNWPGPTYTDSGGFQVLSLGAGFKKVLSQEFSGAADPNDPKLHMQAVKASTAVVDDDGVVFSSHIDGTKHRFTAEVSMNIQHQLGSDIMFAFDELTSLLHPRSYQETSLERTHQWARRCLREHARLTKVRANKPYQQLWGVIQGAQYEDLRRLAARTMNDMDEDGTRFDGFGIGGALEKENLGTIVSWVSEELDEDRPRHLLGISEPDDFFRGVEAGADTFDCVNPSRVARNAAIYSPNGRFNITNARFKRDFNPMVEGCGCYTCTHYSAAYVHHLFKAHEILASTLATIHNEWFTVRLVDAIRDSIDNGNFEVFRADMLGKYAGGSTRVVHS

SEQ ID NO: 60658 - protein, 392 aa, Schlegelella thermodepolymerans
  REGION 1..392: note = tr|A0A2S5T893|A0A2S5T893_9BURK Queuine tRNA-ribosyltransferase OS=Schlegelella thermodepolymerans; OX = 215580 GN=tgt PE=3 SV=1
MTTTDTAAPVLSRGLHFEILKTEGHARRGRLTLNHGVVETPIFMPVGTYGTVKGVMPRSLEEMGAQIILGNTFHLWLRPGLDVLRQFGGLHRFEGWHKPILTDSGGFQVWSLGEMRKISEEGVKFASPVNGDKLFLTPEVSMQIQRVLNSDIVMQFDECTPYIMGDKASGHVTTEKEARASMELSLRWAKRCLAEFERLENPNALFGIVQGGMYTHLRDESLAGLEALDFPGLAVGGLSVGEPKEEMLRVLSHIGPKLPAHKPHYLMGVGTPEDLVDGVASGIDMFDCVMPTRNARNGHLFTRYGDLRLRNSRYKTDERPVDETCTCYTCRHFSRAYLHHLDRCGEMLGPMLTSIHNLHYYLNLMREIREALDAGNFAGFRRQFAQDRARGV

SEQ ID NO: 60659 - protein, 377 aa, Schleiferia sp.
  REGION 1..377: note = tr|A0A401XL62|A0A401XL62_9FLAO Queuine tRNA-ribosyltransferase OS=Schleiferia sp. LA OX=2173829; GN = tgt PE=3 SV=1
MLTFQLQATDPHSKARAGCITTDHGQIETPIFMPVGTAGTVKATHQYELTDDIRAQIILGNTYHLYLRPGTEILKKAGGLHRFIGWQRPILTDSGGYQVFSLADSRKLTEEGARFKSHIDGSYHLFTPESVIDIQRAIGADIIMAFDECPPWPCDERYAEESMHLTHRWLDRCIARMQTTEPLYGYGQSVFPIVQGSTIARLRRESAEYIAAKDMPGNAIGGLSVGEPPELMYEMTDLVTDILPAHKPRYLMGVGTPENILNAIALGVDMFDCVMPTRNGRNGMLFTTEGIINIKNRKWAEDFSPIDPAGISRVDTLYTKAYLRHLFVADEYLARQIASVHNLAFYLWLVREARSHILAGTFPDWKRTILPIITRRL

SEQ ID NO: 60660 - protein, 377 aa, Schleiferia thermophila
  REGION 1..377: note = tr|A0A369A158|A0A369A158_9FLAO Queuine tRNA-ribosyltransferase OS=Schleiferia thermophila; OX = 884107 GN=tgt PE=3 SV=1
MLRFELEAMDPGSKARAGRIATDHGVIETPIFMPVGTVGSVKAVHQYELVDDVDAKIILGNTYHLYLRPGTDVLKKAGGLHRFMGWERPILTDSGGYQVFSLAENRKLTEEGARFKSHIDGSYHMFTPEGVMDIQRSIGADVVMAFDECPPWPCDERYVEESMHLTHRWLERCIRRFDETPSLYGYEQSLFGIVQGGTVSRLRKESAEFVASKNLSGNAIGGLSVGEPAELMYEMTDLVTDILPADRPRYLMGVGTPENILNSIALGVDMFDCVMPTRNGRNGMLFTTEGIINIKNRRWADDFSPIDPAGISRVDFQYSKAYLRHLFVADEFLGRQIASVHNLAFYLWLVREARRHIVQGDFVEWKNEILPVISRRL

SEQ ID NO: 60661 - protein, 376 aa, Schleiferia thermophila
  REGION 1..376: note = tr|A0A085L2D7|A0A085L2D7_9FLAO Queuine tRNA-ribosyltransferase OS=Schleiferia thermophila str. Yellowstone OX=1453500 GN=tgt PE=3 SV=1
MRFELEATDPGSKARAGRIATDHGVIDTPIFMPVGTVGSVKAVHQYELVDDVDAKIILGNTYHLYLRPGTDVLRKAGGLHRFMGWERPILTDSGGYQVFSLAENRKITEEGARFKSHIDGSYHMFTPEGVMDIQRSIGADVVMAFDECPPWPCDERYVEESMHLTHRWLERCISRFDETPSLYGYEQSLFGIVQGGTVSRLRKESAEFVASKNLSGNAIGGLSVGEPAELMYEMTDLVTDILPADRPRYLMGVGTPENILNSIALGVDMFDCVMPTRNGRNGMLFTTEGIINIKNRRWADDFSPIDPAGISRVDFQYSKAYLRHLFVADEFLGRQIASVHNLAFYLWLVREARRHIVQGDFVEWKNEILPVISRRL

SEQ ID NO: 60662 - protein, 375 aa, Schwartzia succinivorans
  REGION 1..375: note = tr|A0A1M4VBR0|A0A1M4VBR0_9FIRM Queuine tRNA-ribosyltransferase OS=Schwartzia succinivorans DSM 10502 OX=1123243 GN=tgt PE=3 SV=1
MPAITYELVHRDEKTGARAGIIHTPHGSFETPIFMPVGTQASVKGISPDELKELHAGIILSNTYHLFLRPGMDLVREAGGLHKFMHWDRGILTDSGGFQVFSLGPLRKITEEGVTFRSHIDGSKQFLSPEVSIAVQTALGSDIVMAFDECVPYPADFEYTKNSLARTLRWAERCKNAMTREDQGLFGIVQGGMYQELRHESVDRLIEMDLPGYSIGGLSVGEPKEMMYEVLSYTAERLPSNKPRYLMGVGTPDCLVESVERGIDMFDCVFPTRVARNGMAMTWTGRLVMKNKAFEHDHTVLEDGCGCYACRNGYTRAYIRHLVRAGEIFGLRLLTLHNLWFLQDYMRKMRKAILEDRFTEFKNDFFRNYDMRGKN

SEQ ID NO: 60663 - protein, 379 aa, unidentified
  source 1..379: note = Scopulibacillus darangshiensis
  REGION 1..379: note = tr|A0A4R2PAY5|A0A4R2PAY5_9BACL Queuine tRNA-ribosyltransferase OS=Scopulibacillus darangshiensis; OX = 442528 GN=tgt PE=3 SV=1
MSAVTYELIKECGQSGARLGKIHTPHGSFDTPMFMPVGTLATVKTMSPEELKEMGAGIILSNTYHLWLRPGEDIVEEAGGLHQFMNWDRGILTDSGGFQVFSLSDLRKITEEGVHFRNHLSGEKLFLSPEKSIAIQNALGSDIMMAFDECPPYPAEFDYMKASVERTSRWAERCLHSNKSPDRQALFGIIQGGEYEALRKQSAADLTSLDFPGYAVGGLSVGEPKDVMNRVLEFTTPLLPQNKPRYLMGVGSPDSLIDGVIRGIDMFDCVLPTRIARNGTCMTSTGRLVVRNSKYARDFGPLDEACDCHVCQTYSRAYIRHLVKANETFGFRLTTYHNLYFLIKLMGQVRQAIKEDRLLDFKAAFFEQYGFNKPNARNF

SEQ ID NO: 60664 - protein, 373 aa, Scytonema hofmannii
  REGION 1..373: note = tr|A0A139XAZ5|A0A139XAZ5_9CYAN Queuine tRNA-ribosyltransferase OS=Scytonema hofmannii PCC 7110; OX = 128403 GN=tgt PE=3 SV=1
MTAQFSFQRLAYCSQTKARVGIFSTPHGIVETPRFMPVGTLANVKTMTPSQLEETGAQMVLCNTYHLHLQPGEAIVAGGGGLHKFMGWNGPILTDSGGFQVFSLSEMRKISEEGVTFRSPHDGQIINLTPERSIEIQNTLGADVIMAFDECPPYPATYQEVEASTQRTYRWLERCVTAHQCQDQALFGIVQGGVYLDLRSQAALSLAELDLPGYAIGGVSVGEPPELISHVVKATAPLLPPEKPRYLMGVGTYREIAIAIASGVDLFDCVIPTRWARHGTAMVQGDRWNLKNAKFREDFTPIDETCPCYTCRNFSRAYISHLVRAQEILAYTLLSIHNITELIRFTQKIREAILDDRFAIDFASWLEEGTSDQ

SEQ ID NO: 60665 - protein, 367 aa, unidentified
  source 1..367: note = Scytonema millei
  REGION 1..367: note = tr|A0A4R4IVM1|A0A4R4IVM1_9CYAN Queuine tRNA-ribosyltransferase OS=Scytonema millei VB511283; OX = 1245923 GN=tgt PE=3 SV=1
MTTQFSFQVSTRCSQTKARAGVFYTPHGAVETPRFMPVGTLANVKTITPAQLQETGAQMVLANTYHLHLQPGESIVEKAGGLHQFMRWNQPILTDSGGFQVFSLSEMRQITDDGVIFRSPHDGQMINLTPERSIQIQNALGADVIMAFDECPPYPASREAVEAATQRTYRWLERCISAHQRPDQALFGIVQGGIYPDLRAAAAEALAGLDLVGYAIGGVSVGEPPELIAKIVQATTPMLPVDKPRYLMGVGTYKEMAQAIASGMDLFDCVIPTRLARHGAALVKGERWNLKNSQYREDFQPLDETCPCYTCQNFTRAYISHLVRSQEILAYTLLTIHNITELVRFTQKIREAIISDRFATEFAQWLS

SEQ ID NO: 60666 - protein, 360 aa, unidentified
  source 1..360: note = Scytonema millei
  REGION 1..360: note = tr|A0A1D2P5A9|A0A1D2P5A9_9CYAN Queuine tRNA-ribosyltransferase OS=Scytonema millei VB511283; OX = 1245923 GN=tgt PE=3 SV=1
MFFTPHGPVETPRFMPVGTLANVKTLTPAQLRDTEAQMILCNTYHLHLQPGEAIVAGGGGLHKFMGWNGPILTDSGGFQVFSLSEMRKISEEGVTFRSPHDGQIINLTPERSIEIQNILGADVIMAFDECPPYPASREEVEAATQRTYRWLERCIVAHQRSDQALFGIVQGGVHLDLRSSAAVALTQLDLPGYAIGGVSVGEPPELIANIVQATAPLLPPEKPRYLMGVGTYREMAIAIASGVDLFDCVIPTRWARHGTAMVQGERWNLKNAKFREDFTPLDETCPCYTCQNFSRAYLSHLVRSQEILAYTLLSIHNITELIRFTQNIRKAILEDQFATKFAQWLTPTPQSGETVSRNCL

SEQ ID NO: 60667 - protein, 373 aa, Scytonema sp.
  REGION 1..373: note = tr|A0A1Z4J316|A0A1Z4J316_9CYAN Queuine tRNA-ribosyltransferase OS=Scytonema sp. HK-05 OX=1137095; GN = tgt PE=3 SV=1
MKAKFSFQRLTSCSQTKARAGIFFTPHGPVETPRFMPVGTLANVKTLTPAQLRDTEAQMILCNTYHLHLQPGEAIVAGGGGLHKFMGWNGPILTDSGGFQVFSLSEMRKISEEGVTFRSPHDGRIINLTPERSIEIQNILGADVIMAFDECPPYPATREDVEAATLRTYRWLERCIAAHQRSDQALFGIVQGGVHLDLRSSAAIALAQLDLPGYAIGGVSVGEPPELIAKIVEATAPLLPPEKPRYLMGVGTFREMAIAIASGVDLFDCVIPTRWARHGTAMVQGERWNLKNAQFREDFTPLDETCPCYTCQNFSRAYLSHLVRSQEILAYTLLSIHNITEVIRFTQNIRKAILEDQFATKFAQWLTPTPQSG

SEQ ID NO: 60668 - protein, 714 aa, Scytonema sp.
  REGION 1..714: note = tr|A0A1Z4PMR7|A0A1Z4PMR7_9CYAN Queuine tRNA-ribosyltransferase OS=Scytonema sp. NIES-4073; OX = 2005464 GN=tgt PE=4 SV=1
MTKSIPTKTLVSTSTISRLRTLIITSCTGKKLHNPTNQLTIEDFKDTERLRERTQSLSEFSCPSGQMYTGLQHLRLMEGVDILRSHFGREVVDVKIISAAYGLIPEDKVIVPYSVTFNSMKSDEISSWANFIGIHKDFQEAVIGYDLVFVLLGDKYIRALNLPIETHPKQTFIFLASNKSRNLLVLGNANFEVLTFSNADASRFGCALVGLKGQLIKLIATEIRQKPNLLSELYNNPKTLEKVLNNQPQQLELPLGISVATAKKSNIKNKKPKRAIANLDEFLNLPRAVNTHLRMKYFIPEWDDKVDIGYNFLLDESSLNRNAYRDDVYAHEIYSQPNYDGILVSKVVVDKIKNKRADIEKLGGIRNFVRFPGEIMGDCGAFGYIKQEVPPYNTVEILDYYEKLQFNYGVSIDHLIVGPFAEPGVREKRYDLTLQNAEEFISKHQKIGYTFTPIGVAQGWNPETYADAVKKLVEMGYDYIAIGGVARTPTIEILEILKEVYQHLTPNTRLHLFGVGRIDALPYFRHLGVTSFDSASPLRKAWFDAVENYHTLSGKAYAAVRIPFVDKQSPRIKHLLLEGYERETLRQLEQEALKAIREYDKDNISLDESLEKLLAYDELLELPRDGKVTPTAKARRLRQHTQLYRELLEVKPWQECECKICKDYGVETAIFRGNDRNRRRGFHNTYVFYQRFQEFLSNENHLENYNVDTTGESI

SEQ ID NO: 60669 - protein, 384 aa, Scytonema tolypothrichoides
  REGION 1..384: note = tr|A0A0C2QIT6|A0A0C2QIT6_9CYAN Queuine tRNA-ribosyltransferase OS=Scytonema tolypothrichoides VB-61278 OX=1233231 GN=tgt PE=3 SV=1
MSAKFSFQHLANCSQTKARAGIFFTPHGPVETPRFMPVGTLANVKTLTPAQLLDTGAQMVLCNTYHLHLQPGEAIVAGGGGLHKFMGWNGPILTDSGGFQVFSLSEMRKISEEGVTFRSPHDGQIINLTPERSIEIQNILGADVIMAFDECPPYPASREDVEAATQRTYRWLERCIVAHQRSEQALFGIVQGGVHLDLRSDAAIALRKLDLPGYAIGGVSVGEPPELIAKIVQATAPLLPPEKPRYLMGVGTYREIAIAIASGVDLFDCVIPTRWARHGTAMVQGERWNLKNAKFREDFTPLDETCPCYTCQNFSRAYLSHLVRSQEILAYTLLSIHNITELIRFTQRIRKAILEDRFPCEFAQWLTPESSDCSVDKDSGLIED

SEQ ID NO: 60670 - protein, 384 aa, Sebaldella termitidis
  REGION 1..384: note = tr|D1AH21|D1AH21_SEBTE Queuine tRNA-ribosyltransferase OS=Sebaldella termitidis (strain ATCC 33386 / NCTC 11300) OX=526218 GN=tgt PE=3 SV=1
MELPVKYTLEKKDGNARAGVIETPHGKIETPVFMPVGTQATVKTMTREELETIETEIILGNTYHLYLRPGDKLIDDFGGLHKFMNWDKPILTDSGGFQVFSLGDLRKITEEGVHFRSHIDGSKHFLSPEKSIDIQNNLGSDIMMALDECPPGLSAREYLIPSIERTTRWAQRCIEANRNKDRQGLFGIFQGGIYEDLREKSFEELYKMDEYFSGYAIGGLAVGEPREDMYRILEYMTPKLPENKPRYLMGVGEPVDMLEAVEDGVDMMDCVQPTRIGRHGTVFTKYGRLVIKNAKYFRDPRPLDDGCDCYVCRNYTRAYIRHLFKAEEMLGQRLTTYHNLYFLIKLMKGARTAILENRFQEYKNNFISDYSAGSTHEWITAKEL

SEQ ID NO: 60671 - protein, 372 aa, unidentified
  source 1..372: note = Unknown
  REGION 1..372: note = tr|J3TWS3|J3TWS3_9ENTR Queuine tRNA-ribosyltransferase OS=secondary endosymbiont of Ctenarytaina eucalypti OX=1199245 GN=tgt PE=3 SV=1
MKYQLLKTDCQARRGRLVFQRGVVETPAFMPVGTYGTVKSMTPEELKDTGTQILLGNSFHLWLRPGQEVIKLHGDLHDFMQWHGPILTDSGGFQVFSLGETRTINESGVNFCNYINGAEIFLSPEKSMEIQYHLGADIVMIFDECMPYPSSWEDVKRSMEMSLRWATRSRQHFNALENPNALFGIIQGGIYEDLRDISIKRLVDIGFDGYAIGGLSVGEPKADMHRILSYLCPKMPTDKPRYLMGVGNPEDVVRGVQCGVDMFDCVLPTRNARNGYLFVANGVVKIRNAQYKNDIQPIDTTCDCYTCRHYSRAYLHHLDHCKEILGARLNTIHNLRYYQILMAGLRQAINAGTLEGFVDEFYCRTSNPRLNL

SEQ ID NO: 60672 - protein, 372 aa, unidentified
  source 1..372: note = Unknown
  REGION 1..372: note = tr|J3TZ87|J3TZ87_9ENTR Queuine tRNA-ribosyltransferase OS=secondary endosymbiont of Heteropsylla cubana OX=134287 GN=tgt PE=3 SV=1
MKYQVLKKDNQARRGRLIFNRGIVETPAFMPVGTYGSVKGITPEELQATGTQILLSNTFHLWLRPGPVIIKSHGDLHNFMQWSNPILTDSGGYQVFSLRNMRHITEIGVYFRNPINGDVIFLNPEKSIELQNDLGSDIVMVFDECLPYPSNWNDAKKSMEMSIRWARRSRERFDELGNQNSLFGIIQGSVYEDLRDISITKLVEIGFDGYAFGGLAVGEPKEYMYRILERFCPQIPPDKPRYLMGVGKPEDLVEGVRRGIDMFDCVIPTRNARNGHLFVSNGIIKIRNTRYKNDLSPLDEACDCYTCCNYTRSYLHHLDHCKEMLGARLNTIHNLRYYQTLMRCLRQAIFEGKLEDYIDNFYNQRGNFQFRL

SEQ ID NO: 60673 - protein, 369 aa, Sedimentibacter saalensis
  REGION 1..369: note = tr|A0A562JA83|A0A562JA83_9FIRM Queuine tRNA-ribosyltransferase OS=Sedimentibacter saalensis; OX = 130788 GN=tgt PE=3 SV=1
MFSFELIKESKECKARLGKIHTNHGDIETPIFMPVGTKATVKAMTPEEMKELEAQIILGNTYHLYLRPGHELIKEAGGLHKFMNWDRPILTDSGGFQVFSLGNLRKIKEEGVEFRSHVDGSKHFLSPEKSMEIQNYLGSDIMMAFDECIPYPASREYVEQSIKRTTRWAKRCKEFHENTENQALFGIVQGGMYEDLRRESAKQITDIDFPGYAIGGLSVGEPRELMCEVMDYTVDLLPKDKPRYLMGVGSPDYLFEAVERGIDMADCVLPTRMARHGAFFTSRGQLTIKNAKYKRDFGPIDENCNCYTCRNYSRAYIRHLFNENEILGARLASIHNLFFLINLMKSIRISIKEDNFMNFKKEFYDNYGY

SEQ ID NO: 60674 - protein, 381 aa, Sedimentibacter sp.
  REGION 1..381: note = tr|A0A252CMW9|A0A252CMW9_9FIRM Queuine tRNA-ribosyltransferase OS=Sedimentibacter sp. SX930; OX = 1955060 GN=tgt PE=3 SV=1
MTEPAIRYRLIKKEKHTGARLGEIITPHGTFQTPMFMPVGTLATVKTMSPEELKTMGSQIILSNTYHLWLRPGSDLVEEAGGLHKFMNWDRGILTDSGGFQVFSLSQNRQITEAGVHFRNHLNGSKMFLSPEKAIHIENQLGADIIMSFDECPPYSESYDYIKASVERTTRWAERGLEAHKKPNQQGLFGIIQGAGYKDLRLQSAKELISLDFPGYSIGGLSVGETKEEMNGVLDYLTPVMPENKPRYLMGVGAPDSLIDGVIRGIDMFDCVLPTRIARNGTCMTSSGRLVIKNAKYERDFRPLDEKCDCYTCKNYTRAYIRHLIKADETFGLRLTSYHNLHFLINLMKNVRQAIMDDNLLEFREAFVEEYGFNVENPKKF

SEQ ID NO: 60675 - protein, 364 aa, Sedimenticola selenatireducens
  REGION 1..364: note = tr|A0A557RTW3|A0A557RTW3_9GAMM Queuine tRNA-ribosyltransferase OS=Sedimenticola selenatireducens; OX = 191960 GN=tgt PE=3 SV=1
MLFDVEKIDGAARRGQLTFARGTIQTPAFMPVGTYGTVKAMTPEELEASGAEIILGNTFHLMLRPGTEIIAAHGDLHDFTHWQRPILTDSGGFQVFSLGAMRKITEAGVHFRSPIDGSKIFMGPEESMEVQRKLGSDIVMIFDECTPYPATETEARVSMELSLRWAERSKLAHADNPSALFGIVQGGVYESLRGRSLEGLIEIGFDGYAVGGLSVGEPPEDRWRVLDYLASRLPVDKPHYLMGVGTPEDIVEAVRRGIDMFDCVMPTRNARNGHLFTHEGVVRIRNAVHANDTGPLDPHCDCYTCQNYSRSYLRHLSRCNEILGARLNTIHNLHYYQTLMRNIRQAISEQRFDVFARDFYALRA

SEQ ID NO: 60676 - protein, 364 aa, Sedimenticola selenatireducens
  REGION 1..364: note = tr|A0A2N6CRA4|A0A2N6CRA4_9GAMM Queuine tRNA-ribosyltransferase OS=Sedimenticola selenatireducens; OX = 191960 GN=tgt PE=3 SV=1
MLFEVVNIDGAARRGQLTFPRGTIQTPAFMPVGTYGTVKAMTPEELESGGAEIILGNTFHLMLRPGTDIISAHGDLHDFIHWQRPILTDSGGFQVFSLGAMRKITEAGVHFRSPIDGSRIFMGPEESMAVQRKLGSDIVMIFDECTPYPATELEARVSMELSLRWAERSRQAHGDNPSALFGIVQGGVYESLRGRSLEGLMEIGFDGYAVGGLSVGEPPADRWRVLDFLSSRLPADKPHYLMGVGTPEDIVEAVRRGIDMFDCVMPTRNARNGHLFTHQGVVRIRNAVHAGDTGPLDPHCDCYTCQNYSRSYLRHLSRCNEILGARLNTIHNLHYYQSLMRDIRQAITEQRFDAFVRDFYAMRA

SEQ ID NO: 60677 - protein, 365 aa, Sedimenticola sp.
  REGION 1..365: note = tr|A0A2N6GC44|A0A2N6GC44_9GAMM Queuine tRNA-ribosyltransferase OS=Sedimenticola sp. OX=1940285; GN = tgt PE=3 SV=1
MKYEILETDGAARRGRLTFERCTIETPAFMPVGTYGTVKAMTPEELEGIGAEIILGNTFHLMLRPGTDIIEMHGDLHDFMHWKLPILTDSGGFQVFSLGQMRKITEQGVHFRSPVDGSKIFMGPEESMAVQRKLGSDIVMIFDECTPYPATESEAETSMELSLRWAERSRAAHADNPSALFGIIQGSVFSELRERSLDGLVEIGFDGYAVGGLSVGEPPEDRWRVLDFLSTSLPAMHPHYLMGVGTPEDIVEAVGRGIDMFDCVMPTRNARNGHLFTHQGVVRIRNAVHGTDTGPLDPMCDCYTCQNYSKSYLRHLARCNEILWARLNTIHNLHYYQTLMRNIRAAIEEQRFERFVQEFYALRKS

SEQ ID NO: 60678 - protein, 364 aa, unidentified
  source 1..364: note = Sedimenticola thiotaurini
  REGION 1..364: note = tr|A0A558D8J7|A0A558D8J7_9GAMM Queuine tRNA-ribosyltransferase OS=Sedimenticola thiotaurini; OX = 1543721 GN=tgt PE=3 SV=1
MLFRVENSDGAARRGQLTFPRGTIQTPAFMPVGTYGTVKAMTPEELEASGAEIILGNTFHLMLRPGTEIISAHGDLHDFTHWQRPILTDSGGFQVFSLGAMRKITEEGVHFRSPIDGSRIFMGPEESMAVQRKLGSDIVMIFDECTPYPATETEARVSMELSLRWAGRSKQAHGDNPSALFGIVQGGVYESLRGRSLEGLIEIGFDGYAVGGLSVGEPPEDRWRVLDYLSPRLPANKPHYLMGVGTPEDIVEAVRRGIDMFDCVMPTRNARNGHLFTHEGVVRIRNAVHANDTGPLDPHCDCYTCQNYSRSYLRHLSRCNEILGARLNTIHNLHYYQTLMRNIRDAISAQRFDLFAQDFYAMRS

SEQ ID NO: 60679 - protein, 364 aa, unidentified
  source 1..364: note = Sedimenticola thiotaurini
  REGION 1..364: note = tr|A0A0F7JV20|A0A0F7JV20_9GAMM Queuine tRNA-ribosyltransferase OS=Sedimenticola thiotaurini; OX = 1543721 GN=tgt PE=3 SV=1
MLFEVSKIDGIARRGQLTFPRGTIQTPAFMPVGTYGTVKAMTPEELDACGAEIILGNTFHLMLRPGTEIISAHGDLHDFMHWERPILTDSGGFQVFSLGAMRKITEAGVHFRSPIDGSRIFMGPEESMAVQRQLGSDIVMIFDECTPYPATEAEARASMELSLRWAERSRQAHGDNPSALFGIVQGGVYESLRGRSLEGLMEIGFDGYAVGGLSVGEPPADRWRVLDYLASRLPADKPHYLMGVGTPEDIVEAVRRGIDMFDCVMPTRNARNGHLFTHEGVVRIRNAVHAHDTGPLDPHCDCYTCQNYSRSYLRHLARCNEILGARLNTIHNLHYYQSLMRDIRQAISEGRFEAFAQDFYAMRS

SEQ ID NO: 60680 - protein, 376 aa, unidentified
  source 1..376: note = Sedimentisphaera cyanobacteriorum
  REGION 1..376: note = tr|A0A1Q2HNE3|A0A1Q2HNE3_9BACT Queuine tRNA-ribosyltransferase OS=Sedimentisphaera cyanobacteriorum OX=1940790 GN=tgt PE=3 SV=1
MGKVFEVKSKDEFSHARTGVLETAHGEIETPVFMPVGTRGSVKGLTPEQITETDSQIILANTYHMMLRPGADIVEELGGLHKLMAWDKPILTDSGGYQVFSLSTLNKITDSGVEFASHIDGKKYILGPESSIEIQNKLGADIIMAFDECTPFPCPEERLKTAVNRSIRWAEQSLKSHKRDDQLLFGIVQGGIDLALRSGCAEGLVSMGFPGYAIGGLSVGEGHKNMIETVNHTATLLPEDKPRYLMGVGMPPDIIAAVKAGVDMFDCVLPTRNGRNAFAFTQSGAVRLRNSIHTKDSSPIENNCDCYACRNFSRAAIRHFFNVGEMLGPTLVSIHNIRFFQRLIASIKERIKDGSFSSWADKQVEKYQKCGLCRDF

SEQ ID NO: 60681 - protein, 376 aa, unidentified
  source 1..376: note = Sedimentisphaera salicampi
  REGION 1..376: note = tr|A0A1W6LJX2|A0A1W6LJX2_9BACT Queuine tRNA-ribosyltransferase OS=Sedimentisphaera salicampi; OX = 1941349 GN=tgt PE=3 SV=1
MGKIFEVKSRDESSNARTAVLKTNHGAIQTPVFMPVGTRGSVKGLTPDQITETGSQIILANTYHMMLRPGADIVAELGGLHKLMAWDKPILTDSGGYQVFSLNTLNKINDNGVEFASHIDGKKYMLGPKDSIGIQNKLGADIIMAFDECTPFPCPEDRLKTAVEKSIRWAEQSLNAHDREEQLLFGIVQGGIDLDLRSRCAEELVSMDFPGYAIGGLSVGEGHKNMIRAVNHTAPLLPENKPRYLMGVGMPPDVIAAVKAGVDMFDCVLPTRNGRNAFAFTQSGAVRLRNSIHTKDKSPIEEGCDCYACRNFSRAAIRHFFNVGEMLGPTLVSIHNIRFFQRLIHSIREKIEEGNFSSWADEQIENYQKCGLCRDF

SEQ ID NO: 60682 - protein, 405 aa, unidentified
  source 1..405: note = Sedimentitalea nanhaiensis
  REGION 1..405: note = tr|A0A1I6YKM1|A0A1I6YKM1_9RHOB Queuine tRNA-ribosyltransferase OS=Sedimentitalea nanhaiensis; OX = 999627 GN=tgt PE=3 SV=1
MPTLIIKLIRALATSRPLLFATRAGNRAGMSDRFSFALNATDGKARTGVISTPRGEIRTPAFMPVGTAATVKAMLPENVRATGADILLGNTYHLMLRPTAERIDRLGGLHRFMNWERPILTDSGGFQVMSLAGLRKLTETGVTFKSHIDGSRHELTPERSMEIQRLLGSDIVMCFDECPALPADRARIAESMELSMRWAARSRDAFGDRPGHALFGIQQGGLETDLRAQSAAALTEIGFDGYAVGGLAVGEGQEAMFACLDHAPDTLPTDKPRYLMGVGKPDDIVGAVARGIDMMDCVLPSRSGRTGQVFTRHGVLNIKNARHQDDPRPLDDNCGCPACRGYSRAYLHHVFRSQEIISSMLLTWHNLRYYQDLMAGMRAAIAGGTFADWQADFHAARAQGDIEPL

SEQ ID NO: 60683 - protein, 376 aa, unidentified
  source 1..376: note = Sedimentitalea sp.
  REGION 1..376: note = tr|A0A3T0N0X3|A0A3T0N0X3_9RHOB Queuine tRNA-ribosyltransferase OS=Sedimentitalea sp. W43; OX = 2483033 GN=tgt PE=3 SV=1
MPSKVTFDLQATDGKARTGVISTPRGEIRTPAFMPVGTAATVKAMMPESVRSTGADILLGNTYHLMLRPTAERIDRLGGLHKFMNWERPILTDSGGFQVMSLAGLRKMTEHGVTFKSHVDGSKHELTPERSMEIQKLLGSDIVMCFDECPALPASDAEVAESMRMSMRWAARSRDAFGDRPGHALFGIQQGGVTHDLRAESAEKLREIEFDGYAVGGLAVGEGQEAMFNVLDYAPDMLPTDKPRYLMGVGKPDDIVGAVARGIDMMDCVLPSRSGRTGQVYTRQGVVNIKNARHIDDPRPLDENCACPACRNYSRAYLSHVFRSNEMISGMLLTWHNLQYFQDIMAGMREAIAAGTFAAWQSDFHSGRAQGDIDPL

SEQ ID NO: 60684 - protein, 378 aa, Sediminibacillus albus
  REGION 1..378: note = tr|A0A1G9CJ08|A0A1G9CJ08_9BACI Queuine tRNA-ribosyltransferase OS=Sediminibacillus albus; OX = 407036 GN=tgt PE=3 SV=1
MPITYEHIKTCKQTGARLGRVHTPHGSFETPMFMPVGTLATVKTMSPEELEEMGAKIILSNTYHLWLRPGEDIIEEAGGLHKFMNWDGAILTDSGGFQVFSLSDLRDIVEEGVHFRNHISGEKLFLSPEKAIEIQNSLGSDIMMAFDECPPYPAAHDYMKASVERTSRWAERCLQAHRRPGDQGLFGIVQGGEYEDLRRQSANDLTSMDFSGYAVGGLSVGEPKDVMNKVLEFTTPLLPTNKPRYLMGVGSPDSLIDGAIRGIDMFDCVLPTRVARNGTCMTSNGRLVVRNAKFARDFRPLDENCSCHVCRNYSRAYIRHLVKTNETFGFRLTTYHNLYFLLELMMQVREAIREDRLGDFREEFFEQYGFNKPNAKNF

SEQ ID NO: 60685 - protein, 378 aa, Sediminibacillus halophilus
  REGION 1..378: note = tr|A0A1G9XR73|A0A1G9XR73_9BACI Queuine tRNA-ribosyltransferase OS=Sediminibacillus halophilus; OX = 482461 GN=tgt PE=3 SV=1
MPITYEHIKTCKQTGARLGRVHTPHGSFDTPMFMPVGTLATVKTMSPEELEEMGAKIILSNTYHLWLRPGEDIVEEAGGLHKFMNWDGAILTDSGGFQVFSLSDLRDIEEQGVHFRNHISGEKLFLSPEKAIQIQNSLGSDIMMAFDECPPYPASHDYMKASVERTSRWAERCLAAHKRPEEQGLFGIVQGGEYEELRRQSARDLTSLDFSGYAVGGLSVGEPKDVMNKVLEFTTPLLPTNKPRYLMGVGSPDSLIDGAIRGIDMFDCVLPTRVARNGTCMTSNGRLVVRNAKYARDFGPLDENCGCHVCRNYSRAYIRHLIKANETFGFRLTTYHNLYFLLELMMQVREAIKEDRLGDFREEFFEQYGFNKPNAKNF

SEQ ID NO: 60686 - protein, 380 aa, unidentified
  source 1..380: note = Sediminibacterium ginsengisoli
  REGION 1..380: note = tr|A0A1T4KS11|A0A1T4KS11_9BACT Queuine tRNA-ribosyltransferase OS=Sediminibacterium ginsengisoli; OX = 413434 GN=tgt PE=3 SV=1
MAALTFELQASGLQGSKARAGKIRTDHGEILTPIFMPVGTVGSVKAVTQQQLKQDINAQIILGNTYHLYLRPGIEVLEAAGGLHRFNGWDRPILTDSGGYQVFSLAANRKIKEEGVMFQSHIDGSRHLFTPEYVMDIQRAIGADIIMAFDECPPYPSDYSYARKSMDLTHRWLNRCFEQLARTEDKYGYTQNLFPIVQGSTYKDLRKASCEFVAEKNAVGNAIGGLSVGEPEEMMYEFTELCAENLPADKPRYLMGVGTPWNILEGIDRGIDMFDCVMPTRNGRNGMLFTTQGLVNIRNKKWAADFSPIDPGLPNEMSQYYTKAYLRHLFVADEILGLQLASIQNLSFYLWLVTTARGHILAGDFSSWKQEMIPILKQRL

SEQ ID NO: 60687 - protein, 379 aa, unidentified
  source 1..379: note = Sediminibacterium goheungense
  REGION 1..379: note = tr|A0A4R6IWE9|A0A4R6IWE9_9BACT Queuine tRNA-ribosyltransferase OS=Sediminibacterium goheungense; OX = 1086393 GN=tgt PE=3 SV=1
MAALSFELETTSVGSRARAGKISTDHGEIHTPIFMPVGTVGTVKAVTQQQLKDDVEAQIILGNTYHLYLRPGTEVLEAAGGLHKFNGWDRPILTDSGGYQVFSLAANRKIKEEGVMFQSHIDGSRHLFSPESVMDIQRSIGADIIMAFDECPPYPSEYGYAKKSMELTHRWLDRCIQRLADTPDKYGYTQNLFPIVQGSTYKDLRKASCEYIASKQAVGNAIGGLSVGEPEEMMYEFTELCTENLPVDKPRYLMGVGTPWNILECIDRGIDMFDCVMPTRNGRNGMIFTTEGVINIKNKKWATDFSPIDPGLDNEISRFYTKAYLRHLFVADEILGMQLASLQNLSFYLWLVGEARQHILAGDFASWKTGMVDQVKRRC

SEQ ID NO: 60688 - protein, 379 aa, Sediminibacterium sp.
  REGION 1..379: note = tr|A0A2M8JYE8|A0A2M8JYE8_9BACT Queuine tRNA-ribosyltransferase OS=Sediminibacterium sp. FEMGT703S; OX = 2080766 GN=tgt PE=3 SV=1
MAALSFTLNNTADGSAARAGIIQTDHGTIQTPIFMPVGTVGSVKAVTQQQLKLDVQAQIILGNTYHLYLRPGTDVLEAAGGLHRFNGWDRPILTDSGGYQVFSLAANRKIKEEGVVFQSHIDGSKHLFSPESVMDIQRSIGADIIMAFDECPPYPSDYDYAKKSMELTHRWLNRCIARLAETPDKYGYTQNLFPIVQGSTYKDLRKASCEFIASRGAVGNAIGGLSVGEPEEMMYEFTALCTEHLPLDKPRYLMGVGTPWNLLECIDLGIDMFDCVMPTRNGRNGMLFTTQGVINIRNKKWYKDFSPIDPGLPAETSQYYTKAYLRHLFVAEEILGLQIASIHNLSFYLWLVGEARKHILDNSFSSWKKEMLEIIKRRL

SEQ ID NO: 60689 - protein, 376 aa, Sediminicola luteus
  REGION 1..376: note = tr|A0A2A4G747|A0A2A4G747_9FLAO Queuine tRNA-ribosyltransferase OS=Sediminicola luteus OX=319238; GN = tgt PE=3 SV=1
MKFEKLHNDPASKARAGKITTDHGVIETPIFMPVGTVASVKGVHQRELKEEINPDIILGNTYHLYLRPKLPILEQAGGLHKFMGWDRNILTDSGGYQVYSLSANRKIKEEGVKFKSHIDGSYHTFTPENVMEIQRTIGADIIMAFDECTPYPCDYNYAKRSMHMTHRWLDRCIAHLEKLPFKYGYSQAFFPIVQGSTYKDLRMQSAEYIANSGAVGNAIGGLSVGEPAEEMYAMTEVVCDILPEDKPRYLMGVGTPINILENIALGVDMFDCVMPTRNARNGMLFTAHGTINIKNKKWEDDFSPIDEMGHTFVDQEYSKAYLRHLFAANEYLGKQIATIHNLGFYLWLVREARRRIIAGDFRDWKDKMVKQMDKRL

SEQ ID NO: 60690 - protein, 376 aa, Sediminicola sp.
  REGION 1..376: note = tr|A0A0S1SFA2|A0A0S1SFA2_9FLAO Queuine tRNA-ribosyltransferase OS=Sediminicola sp. YIK13; OX = 1453352 GN=tgt PE=3 SV=1
MEFTLLHTDPNSKARAGKMVTDHGTIETPIFMPVGTVASVKGVHQRELKEDINPDIILGNTYHLYLRPKTRILEEAGGLHKFMNWDRNILTDSGGYQVYSLSDNRKIKEEGVKFKSHIDGSYHVFTPENVMEIQRTIGADIIMAFDECTPYPCDYNYAKRSMHMTHRWLERCLTHLEKTPFKYGYSQAFFPIVQGSTYKDLRRQSAEYIAGVGAVGNAIGGLSVGEPADEMYAMTEVVTEILPEDKPRYLMGVGTPINILENIALGIDMFDCVMPTRNARNGMLFTANGTINIKNKKWEDDFSPLDEMGITFVDTEYTKAYLRHLFAANEYLGKQIATIHNLGFYLWLTREARKHILAGDFYEWKNIMVKQMDKRL

SEQ ID NO: 60691 - protein, 374 aa, unidentified
  source 1..374: note = Sediminispirochaeta smaragdinae
  REGION 1..374: note = tr|E1R1L8|E1R1L8_SEDSS Queuine tRNA-ribosyltransferase OS=Sediminispirochaeta smaragdinae (strain DSM 11293 / JCM 15392 / SEBR 4228) OX=573413; GN = tgt PE=3 SV=1
MLTIDHNDTLTAARTGTLALPHGTIEVPAFMPVGTNGTVKAISHAAVDNMGYRLILGNTYHLYLRPGKEVFETYGGLHAFSSWPHNILTDSGGFQVFSLAPFRKIRDEGVRFRSHIDGSYHHLTPESVVEFQRTLGSDIMMCLDECTPPEISYKKAIEACRRTTAWAKRSKVRWDIEREAGFEGKLFGIIQGNFFKDLRKISSEEIIELDFPGIAIGGLSVGEPKETFEEYLAYTSQFLPSEKPRYLMGIGTPDYIFAAVENGIDLFDCVFATRTARNGTVFTKDGMINLKKAGHALDKGPIEEGCTCQACTRYSRGYMRHLFKAGELFGPMLATEHNLQFLYDLMVEIRHSIREDRFSSFKKNFLDRYVKKGN

SEQ ID NO: 60692 - protein, 379 aa, Sediminitomix flava
  REGION 1..379: note = tr|A0A315ZAC7|A0A315ZAC7_9BACT Queuine tRNA-ribosyltransferase OS=Sediminitomix flava OX=379075; GN = tgt PE=3 SV=1
MSGLKFELKKKDPQSKARLGEITTGHGKIQTPIFMPVGTAGTVKSVHTREIKEDINAEIILGNTYHLYLRPKLEILEKAGGLHKFNGWDRPILTDSGGYQVFSLGDMRKITEEGVLFRSHIDGSKHLFTPENVMDTQRTIGADIIMAFDECTPYPCDYAYAKNSMERTHRWLQRCVDRFDSTDPKYGYHQSLFPIVQGSTFKDLRIKSAETIASFGREGNAIGGLSVGEPAEDMYEMTDLVTDILPEDKPRYLMGVGTPANILEGIALGVDMFDCVMPTRNARNGMLFTTQGVINIKNLKWADDFSPIDEELGGYVSTFYSKAYLRHLIHAKEILAAQIASIHNLTFYLWLVREARKHIEAGDFREWKDVMVKKLMTRL

SEQ ID NO: 60693 - protein, 379 aa, Segetibacter aerophilus
  REGION 1..379: note = tr|A0A512BHE3|A0A512BHE3_9BACT Queuine tRNA-ribosyltransferase OS=Segetibacter aerophilus; OX = 670293 GN=tgt PE=3 SV=1
MPALQFELTHTQQHSKARAGKITTDHGEIETPIFMPVGTVGSVKAVTQQQLYNDVHAQIILGNTYHLYLRPGLEVLEAAGGLHKFNGWHRPILTDSGGYQVFSLAANRKINEEGVMFQSHIDGGKHLFTPEKVMDIERTIGADIMMAFDECPPYPSEYKYAKDSMELTHRWLDRCFTHFNATPSKYGYTQNLFPIVQGGTYKDLRTASCQYIASKDATGNAIGGLSVGEPMEMMYEFTALCCEELPENKPRYLMGVGTPWNILECIDLGIDMFDCVMPTRNGRNGMLFTTRGVINIKNLKWAKDFSVIDNQLPNEVSQYYSKAYMRHLFVANEILGLQLASIHNLAFYLWLVKEARKHILQDCFTSWKNDVVPVLQQRL

SEQ ID NO: 60694 - protein, 411 aa, Segniliparus rotundus
  REGION 1..411: note = tr|D6ZAQ1|D6ZAQ1_SEGRD Queuine tRNA-ribosyltransferase OS=Segniliparus rotundus (strain ATCC BAA-972 / CDC 1076 / CIP 108378 / DSM 44985 / JCM 13578) OX=640132 GN=tg t PE=3 SV=1
MGVRFSLAGRLPDGRGRAGVIHTPHGDIETPAFIPVGTAAAVKTVLPSLVADLGAHAVLANAYHLYLRPGAQLVAQAGGVAAFMGWRGPTYTDSGGFQVLSLGAGHRKILAMDTAGVGADQVIAKPEARLAKVDEDGVTFTSHVDGSKHRFTPEVSIAVQRDIGADIIFAFDELTTLLHSEEYQRSSVERTLRWARRCLAEHNRTKGLATATAAPQSLWAVVQGAQYEYLRRHCARELVGMSEADEAEGGVGFGGFGIGGAIAKERLGEIIGWVAEELPEHKPRHVLGVGEPDDLFAAVESGGDTFDCVAPTRLARNGVVFSWDGRYHLTNARFRRDFRPLDDALANSSAEFTRAYIHHLFKIREPLAGTLASVHNLSFLVTLMARVRAAILENRYEEYKAEVLGRYYAKR

SEQ ID NO: 60695 - protein, 411 aa, Segniliparus rugosus
  REGION 1..411: note = tr|E5XKY0|E5XKY0_9ACTN Queuine tRNA-ribosyltransferase OS=Segniliparus rugosus ATCC BAA-974 OX=679197 GN=tgt PE=3 SV=1
MRLSFSLARRLSGSQGRAGVIHTPHGEIETPAFIPVGTAAAVKTVLPGLVSGLGAQAVLSNAYHLYLRPGPQLMAEAGGLGAFMGWPGPTYTDSGGFQVLSLGAGHRKILAMDTSGLGAEQVIAKPEARLAKVDEDGVTFKSHIDGSKHRFTPEVSISVQRDIGADIMFAFDELTTLLHSEDYQRASVERTLRWARRCLAEHNRGGGLATATGAPQSLWAVVQGAQYEYLRRRCAKELVAMSEADEAEGGVGFGGFGIGGAIAKERLGEIIGWVSGELPERKPRHVLGVGEPDDLFAAVESGGDTFDCVSPTRLARNGVVFSWDGRYHVTNARFRRDFRPLDEGLSNLSAGFTRAYIHHLFKIREPLAGTLVSVHNMSFLVTLMARMRAAILEDRYEEYKAETLGRYYAKR

SEQ ID NO: 60696 - protein, 378 aa, Seinonella peptonophila
  REGION 1..378: note = tr|A0A1M4TRK7|A0A1M4TRK7_9BACL Queuine tRNA-ribosyltransferase OS=Seinonella peptonophila; OX = 112248 GN=tgt PE=3 SV=1
MAVRFEQIQDCQQTNARLGRLHTPHGTIETPIFMPVGTLATVKTMSPEELKAIGSQIILANTYHLYLRPGHEIVREAGGLHTFMNWNRPILTDSGGFQVFSLSKLRKITEEGVSFRSHLSGEPLFLGPEQAMEIQNALGSDIAMAFDECAPYPADREYVRQSAERTVRWLKRCKEAHQRTDSQALFGIVQGGMYPDLRVENAKAIVDLDLPGYAIGGLSVGESKEQMYEMISHTTPYLPKDKPRYLMGVGSPDALIRGVMLGIDMFDCVLPTRIARNGTAMTSQGRLVVKKAEYARDFTSLDPECDCYTCTKYTRAYIRHLVKADETFGLRLISYHNLHFLLQLMTKVREAIRNKQLPEFANRFLTQYYGSDELSVRF

SEQ ID NO: 60697 - protein, 371 aa, Selenihalanaerobacter shriftii
  REGION 1..371: note = tr|A0A1T4MZG0|A0A1T4MZG0_9FIRM Queuine tRNA-ribosyltransferase OS=Selenihalanaerobacter shriftii; OX = 142842 GN=tgt PE=3 SV=1
MSFEYTLHKESNNTKARLGEFSTPHGVIETPIFMPVGTQATVKTMTPEELEELGAQIILSNTYHLYLRPGHELIAEAGGLHEFMNWDRPILTDSGGFQVFSLADMRDISEEGVEFQSHLDGSKHFITPEKATEIQMDLGADIIMSFDECPPYPAEKDYVKESLERTTRWAKRCKEAHTRDDQALFGIIQGGMHRDLREQSAKEIIDLDFPGYALGGLSVGEANELMYEVLDYAPDLLPKNKPRYLMGVGTPQDLFEGVIRGIDMFDCVFPTRIARNGAVFTSQGRITIRNATYKRQFTKLDPECDCYVCNNYTRAYIRHLIKRNEVLGIRLTTYHNLYFLCSLMTKIREAISKGRLLEYQEEFYKKYGLDL

SEQ ID NO: 60698 - protein, 369 aa, unidentified
  source 1..369: note = Seleniivibrio woodruffii
  REGION 1..369: note = tr|A0A4R1K5L3|A0A4R1K5L3_9BACT Queuine tRNA-ribosyltransferase OS=Seleniivibrio woodruffii; OX = 1078050 GN=tgt PE=3 SV=1
MFSFRLEETDNRARTGTITTPHGIIETPIFMPVGTVGSVKTISPQELDDMGAQIILGNTYHLHLRPGDEVVAKFGGLAKFNSWHKPTLTDSGGFQVFSLAEMNKITDEGVHFRSHLDGSKLFLNPERSIEIQQNIGADIMMAFDECVSLPAEKEYVRKSIERTYRWAVRSRAAKTNGHQALFGIIQGGTDLDLRRISAEQITSIDFEGFAIGGLSVGEEIPLMYETTSFTTEYMPKDKPRYLMGVGTPQDLLHGIKYGVDMFDCVMPTRNARNAMLFTSAGKLHIKNKQWELSDEPVDAECSCYTCRNFSRGYLRHLHKAGEYLGLRLNSIHNLHFYLSLVKRARNAIKLGIYDKFMNETLEKMSTGGL

SEQ ID NO: 60699 - protein, 374 aa, unidentified
  source 1..374: note = Selenomonadales bacterium
  REGION 1..374: note = tr|A0A316QJ29|A0A316QJ29_9FIRM Queuine tRNA-ribosyltransferase OS=Selenomonadales bacterium; OX = 2137878 GN=tgt PE=3 SV=1
MQTAQFKYEIIKECRQTGARIGRLSTPHGIIETPVFMPVGTQGTVKAMSPEELKEMEAQIILSNTYHLFLRPGHELIRSAGGLHNFMHWDRPILTDSGGFQVFSLAALRRIKEEGVAFQSHIDGSPRFLSPETSIEVQTALGSDIMMAFDVCSPYPCDYNSTAASMERTLRWLERCKKAWTREDQALFGIVQGGMYKDLRIESAKATAAMDLPGIAVGGLSVGEPKEVMYEMLEAIRPYLPEDKPRYLMGVGSPDCLVEGFMRGIDMMDCVLPTRIARNGTFMTSRGRMVIRNAKYARDLTPVDPECGCYTCRNYTRAYIRHLFKAGEILGARLASYHNLYFLINLTKQIKKAIYEDRLADFRNEFFVKYGYDV

SEQ ID NO: 60700 - protein, 374 aa, Selenomonas artemidis
  REGION 1..374: note = tr|E7MZ80|E7MZ80_9FIRM Queuine tRNA-ribosyltransferase OS=Selenomonas artemidis F0399; OX = 749551 GN=tgt PE=3 SV=1
MAAISYELVRQDETTGARAGVLHTPHGSYPTPIFMPVGTQATVKGVSPDELRDLGAGIILGNTYHLFLRPGAELVREAGGLHRFMHWEGAILTDSGGVQVFSLGDLRKITEEGVAFRSHIDGSKKFLSPEVSMQVQRCLGSDIVMAFDECIPYPADHDYAKASTERTQRWLVRCKAAMAGAEGQGLFGIVQGGMYRDLRARHAAEVAELDLPGYAIGGLSVGEPHALMEEILSYTAQLLPAGKPRYLMGVGTPDYLLTGVRHGIDMFDCVFPTRVARNGMAMTWTGRLVMKNAEHTHAHEILEEGCGCYACRNGYTRAYIRHLVRAQEIFGLRLLTLHNLYFLQEFMRRMRAAIIDGTFPAFYGSVMEHYRKNG

SEQ ID NO: 60701 - protein, 340 aa, Selenomonas flueggei
  REGION 1..340: note = tr|C4V0G5|C4V0G5_9FIRM Queuine tRNA-ribosyltransferase OS=Selenomonas flueggei ATCC 43531; OX = 638302 GN=tgt PE=3 SV=1
MPVGTQASVKGVSPDELRDLGAGIILSNTYHLFLRPGMELVREAGGLHRFMHWDGAILTDSGGFQVFSLGDLRKITEEGATFRSHIDGSKKFLSPEVSMEVQRALGADIVMAFDECIPYPADHDYAKASTERTQRWLIRCRDAMAGAEGQGLFGIVQGGMYRDLRAWHAAAATELDLPGYAIGGLSVGEPHALMEEILSYTTELLPEEKPRYLMGVGTPDYLLTGVRHGIDMFDCVFPTRVARNGMAMTWTGRLVMKNAAYAHDHTVMEDGCGCYACRNGYTRAYIRHLVRAQEIFGLRLLSLHNLYFLQEFMRRIRASILDGTFLSFYQDFMSHYHRNK

SEQ ID NO: 60702 - protein, 373 aa, Selenomonas infelix
  REGION 1..373: note = tr|G5GLN8|G5GLN8_9FIRM Queuine tRNA-ribosyltransferase OS=Selenomonas infelix ATCC 43532; OX = 679201 GN=tgt PE=3 SV=1
MAAITYELIRKDETTGARAGVIHTPHGSFPTPIFMPVGTQATVKGVSPDELRELGAGIILSNTYHLFLRPGMELVREAGGLHRFMHWDGAILTDSGGFQVFSLGDLRKITEEGATFRSHIDGSKKFLSPEVSMEVQKALGSDIVMAFDECIPYPADHTYAKASTERTQRWLVRCRDAMADAEGQGLFGIVQGGMYRDLRAWHAAEVTALELPGYAIGGLSVGEPHELMEEILSYTVELLPANKPRYLMGVGTPDYLLTGVRHGIDMFDCVFPTRVARNGMAMTWTGRLVMKNAVHTHDHTVIEEGCGCYTCRNGYTRAYIRHLVRAEEIFGLRLLTLHNLYFLQEFMRRMRAAIIAGTFSAFYQDFMNHYHKK

SEQ ID NO: 60703 - protein, 339 aa, Selenomonas noxia
  REGION 1..339: note = tr|D4S7Z4|D4S7Z4_9FIRM Queuine tRNA-ribosyltransferase OS=Selenomonas noxia ATCC 43541; OX = 585503 GN=tgt PE=3 SV=1
MPVGTQASVKGVSPDELRDLGAGIILSNTYHLFLRPGMELVREAGGLHRFMHWDGAILTDSGGFQVFSLGDLRKITEDGATFRSHIDGSKKFLSPEVSMQVQRCLGSDIVMAFDECIPYPADYAYAKASTERTQRWLVRCRKAMAEAEDQGLFGIVQGGMYHDLRAWHAAEAAALDLPGYAIGGLSVGEPHALMEEILSSTAELLPADKPRYLMGVGTPDYLLTGVRHGIDMFDCVFPTRVARNGMAMTWTGRLVMKNAVHTHEHTVLSEGCGCYACRSGYTRAYIRHLVRAQEIFGLRLLSLHNLYFLQEFMQRMREAILAGTFLSFYQDFMNHYHKK

SEQ ID NO: 60704 - protein, 373 aa, Selenomonas noxia
  REGION 1..373: note = tr|G5H256|G5H256_9FIRM Queuine tRNA-ribosyltransferase OS=Selenomonas noxia F0398; OX = 702437 GN=tgt PE=3 SV=1
MAAITYELLRRDETTGARAGIIHTPHGSFPTPIFMPVGTQASVKGVSPDELRDLGAGIILSNTYHLFLRPGMELVREAGGLHRFMHWDGAILTDSGGFQVFSLGDLRKITEDGATFRSHIDGSKKFLSPEVSMQVQRCLGSDIVMAFDECIPYPADYAYAKASTERTQRWLVRCRKAMAEAEDQGLFGIVQGGMYHDLRAWHAAEAAALDLPGYAIGGLSVGEPHALMEEILSSTAELLPADKPRYLMGVGTPDYLLTGVRHGIDMFDCVFPTRVARNGMAMTWTGRLVMKNAVHTHEHTVLSEGCGCYACRSGYTRAYIRHLVRAQEIFGLRLLSLHNLYFLQEFMQRMREAILAGTFLSFYQDFMNHYHKK

SEQ ID NO: 60705 - protein, 371 aa, Selenomonas ruminantium
  REGION 1..371: note = tr|A0A1H0MS25|A0A1H0MS25_SELRU Queuine tRNA-ribosyltransferase OS=Selenomonas ruminantium OX=971; GN = tgt PE=3 SV=1
MAAITYELVKKDEATGARAGIIHTPHGSFPTPIFMPVGTQASVKGVSPDELKDLGAGIILSNTYHLFLRPGMELVKEAGGLHKFMHWDGAILTDSGGFQVFSLGDLRKITEEGVTFRSHIDGSKKFLSPEVSMEVQMCLGSDIVMAFDECVPYPADHDYAKQSTERTLRWAQRCKDAMTAPNQGLFGIVQGGMYKDLRKWHAKEMVEMDFPGYAVGGLSVGEPPELMYEMLEYSTSLLPENKPRYLMGVGTPDHLVEGVMRGIDMFDCVYPTRVARNGMAMTWTGRLVMKNANLTHDHHVIEEGCGCYACRNGYTRAYIRHLVRAGEIFGLRLLSLHNLYFLEEFVRRMRQSIIDGKFTQFRSDFLANYKR

SEQ ID NO: 60706 - protein, 375 aa, Selenomonas ruminantium
  REGION 1..375: note = tr|A0A1H6HEE2|A0A1H6HEE2_SELRU Queuine tRNA-ribosyltransferase OS=Selenomonas ruminantium OX=971; GN = tgt PE=3 SV=1
MAAITYELIKQDETTGARAGIIHTPHGSFPTPIFMPVGTQATVKGVSPEELKDLGAGIILSNTYHLFLRPGMELVKEAGGLHKFMHWDGAILTDSGGFQVFSLGELRKITEEGVTFRSHLDGSRKFLSPEVSMEVQMCLGSDIVMAFDECVPYPADYEYAKRSTERTLRWAKRCQAAMTAPNQGLFGIVQGGMYKDLREWHAKEMTALDFPGYAVGGLSVGEPKELMYEMLEYSTAHLPKDKARYLMGVGTPDHLVEGVARGIDMFDCVYPTRVARNGMAMTWHGRLVMKNSNFTHDHNVLEEGCGCYACRNGYTRAYIRHLVRAGEIFGLRLLSLHNLYFLEEFVRRMRTAILEDRFPAFRAEFLENYNPRGNK

SEQ ID NO: 60707 - protein, 373 aa, Selenomonas sp.
  REGION 1..373: note = tr|L1NEW4|L1NEW4_9FIRM Queuine tRNA-ribosyltransferase OS=Selenomonas sp. oral taxon 138 str. F0429 OX=1127695 GN=tgt PE=3 SV=1
MAAITYELIRKDETTGARAGVIHTPHGSFPTPIFMPVGTQATVKGVSPDELRELGAGIILSNTYHLFLRPGMELVREAGGLHRFMHWDGAILTDSGGFQVFSLGDLRKITEEGATFRSHIDGSKKFLSPEVSMEVQKALGSDIVMAFDECIPYPADHTYAKASTERTQRWLVRCRDAMADAEGQGLFGIVQGGMYRDLRAWHAAEVTALELPGYAIGGLSVGEPHELMEEILSYTVELLPEHKPRYLMGVGTPDYLLTGVRHGIDMFDCVFPTRVARNGMAMTWTGRLVMKNAVHTHDHTVLEEGCGCYACRNGYTRAYIRHLVRAEEIFGLRLLTLHNLYFLQEFMRRMRAAIIAGTFSAFYHDFMNHYHKK

SEQ ID NO: 60708 - protein, 374 aa, Selenomonas sp.
  REGION 1..374: note = tr|A0A109WDT4|A0A109WDT4_9FIRM Queuine tRNA-ribosyltransferase OS=Selenomonas sp. oral taxon 136; OX = 713030 GN=tgt PE=3 SV=1
MAAITYELIRKDPATGARAGVIHTPHGSFPTPIFMPVGTQASVKGVSPDELRDLGAGIILSNTYHLFLRPGMELVREAGGLHRFMHWDGAILTDSGGFQVFSLGDLRKITEEGATFRSHIDGAKKFLSPEVSMEVQRALGADIVMAFDECIPYPADHDYAKASTERTQRWLIRCRNAMAGAEEQGLFGIVQGGMYRDLRAWHAAAATELDLPGYAIGGLSVGEPHALMEEILSYTTELLPEEKPRYLMGVGTPDYLLTGVRHGIDMFDCVFPTRVARNGMAMTWTGRLVMKNAAYAHDHTVMEDGCGCYACRNGYTRAYIRHLVRAQEIFGLRLLSLHNLYFLQEFMRRIRASILDGTFLSFYQDFMSHYHRNK

SEQ ID NO: 60709 - protein, 395 aa, Selenomonas sputigena
  REGION 1..395: note = tr|C9LW36|C9LW36_SELS3 Queuine tRNA-ribosyltransferase OS=Selenomonas sputigena (strain ATCC 35185 / DSM 20758 / VPI D19B-28) OX=546271 GN=tgt; PE = 3 SV=1
MGGGIYLWFLNMPCRKRCERGGDFLTAITYELIKKDEATGARAGILHTPHGSFPTPIFMPVGTQASVKGVSPDELKELGAGVILSNTYHLFLRPGMDLVREAGGLHRFMNWDGAILTDSGGFQVFSLGDLRKITEDGVTFRSHIDGSKKFLSPEVSMEVQMALGSDIVMAFDECVPYPADYEYAKTSTERTTRWAKRCKDAMTSESQGLFGIVQGGMYKDLREKSVADLVELDFPGYAVGGLSVGEPKELMYEMLGLTVHLLPEDKPRYLMGVGTPDYLLEGVMYGIDMFDCVFPTRVARNGMAMTHEGRLVMKNAAYTRDFSVLEEGCGCYACRNGYTRAYIRHLVRAEEIFGLRLLTLHNLYFLQAFMREMREAILADAFSDFRAKFLARYQK

SEQ ID NO: 60710 - protein, 371 aa, Selenomonas sputigena
  REGION 1..371: note = tr|F4EZG3|F4EZG3_SELS3 Queuine tRNA-ribosyltransferase OS=Selenomonas sputigena (strain ATCC 35185 / DSM 20758 / VPI D19B-28) OX=546271 GN=tgt; PE = 3 SV=1
MTAITYELIKKDEATGARAGILHTPHGSFPTPIFMPVGTQASVKGVSPDELKELGAGVILSNTYHLFLRPGMDLVREAGGLHRFMNWDGAILTDSGGFQVFSLGDLRKITEDGVTFRSHIDGSKKFLSPEVSMEVQMALGSDIVMAFDECVPYPADYEYAKTSTERTTRWAKRCKDAMTSESQGLFGIVQGGMYKDLREKSVADLVELDFPGYAVGGLSVGEPKELMYEMLGLTVHLLPEDKPRYLMGVGTPDYLLEGVMYGIDMFDCVFPTRVARNGMAMTHEGRLVMKNAAYTRDFSVLEEGCGCYACRNGYTRAYIRHLVRAEEIFGLRLLTLHNLYFLQAFMREMREAILADAFSDFRAKFLARYQK

SEQ ID NO: 60711 - protein, 377 aa, unidentified
  source 1..377: note = Sellimonas intestinalis
  REGION 1..377: note = tr|A0A3E3K540|A0A3E3K540_9FIRM Queuine tRNA-ribosyltransferase OS=Sellimonas intestinalis; OX = 1653434 GN=tgt PE=3 SV=1
MYELLKRDGLAKRGRFTTVHGTVETPVFMNVGTAAAIKGAVSTDDLREIKTQVELSNTYHLHVRPGDEVIKKLGGLHKFMVWDKPILTDSGGFQVFSLAGLRKIQEEGVHFHSHIDGRKIFMGPEESMQIQSNLASTIAMAFDECPASTKDRDYIERSVARTARWLRRCKAEMERLNSLPDTINPHQMLFGINQGGILENVRIAHAQEIAELDLPGYAIGGLAVGESHEEMYRILDAVVPYLPLEKPTYLMGVGTPANILEAVDRGVDFFDCVYPTRNGRHGHVYTNHGKLNLFNAKYELDERPIEEGCGCPVCRKYSRAYIRHLLKAKEMLGMRFCVLHNLYFYNTMMEEIRAAIEEGRYKEYKKQKLEGMSLSQK

SEQ ID NO: 60712 - protein, 381 aa, unidentified
  source 1..381: note = Senegalimassilia anaerobia
  REGION 1..381: note = tr|A0A369L8Q5|A0A369L8Q5_9ACTN Queuine tRNA-ribosyltransferase OS=Senegalimassilia anaerobia; OX = 1473216 GN=tgt PE=3 SV=1
MALFDCTIEATCGHARALSYETAHGTFHTPMFMPVGTSATVKGITVDQLHQLNSQVVLANTYHLSMRPGADLVEEAGGVHKFMNYDGPMLTDSGGFQVFSLADTLKLDADGLTFRSIYDGSYVRWTPESNMRIQEQIGADIAMQLDQCTPYPAERSFVANAVDLSANWARRCLAAHKRPDQTLFGIVQGGMELDLRLESIRRLREIEDESLAAGGRRFGGFGIGGYSVGEDHETMFETLGQVARACPEDRPRYLMGVGNPTTLVRAVREGVDMFDCVLPTRTARMGTAFSSTGRMNMRNAKFTRDFTPLDHSCTCPTCQNYTRAYLRHLVKQNEMLGAILLSVHNLHFLLDLMRRAREAVLAGEYEQFYEEWMNSPAAKDY

SEQ ID NO: 60713 - protein, 381 aa, unidentified
  source 1..381: note = Senegalimassilia sp.
  REGION 1..381: note = tr|A0A4V1QU15|A0A4V1QU15_9ACTN Queuine tRNA-ribosyltransferase OS=Senegalimassilia sp. KGMB04484; OX = 2509433 GN=tgt PE=3 SV=1
MALFDCTIEAQSGHARALSYETAHGTFRTPMFMPVGTSATVKGITVDQLHDLQSQVVLANTYHLSMRPGADLVEEAGGVHKFMNYDGPMLTDSGGFQVFSLADTLKLDADGLTFRSIYDGSYVRWTPESNMHIQEQIGADIAMQLDQCTPYPAERSFVANAVDLSANWARRCLAAHKRPDQTLFGIVQGGMELDLRMESIRRLRQIEDESLAAGGRRFGGFGIGGYSVGEDHETMFETLGQVARACPEDRPRYLMGVGNPTTLVRAVREGVDMFDCVLPTRTARMGTAFSSTGRMNMRNAKYTRDFTPLDHNCTCPTCQSYTRAYLRHLVKQNEMLGAILLSVHNLHFLLDLMRRAREAVLADAYEEFCQAWMNSPAAKDY

SEQ ID NO: 60714 - protein, 376 aa, unidentified
  source 1..376: note = Seonamhaeicola algicola
  REGION 1..376: note = tr|A0A5C7AFE1|A0A5C7AFE1_9FLAO Queuine tRNA-ribosyltransferase OS=Seonamhaeicola algicola; OX = 1719036 GN=tgt PE=3 SV=1
MKFTLKAQDPKSKARAGEITTDHGVIQTPIFMPVGTVATVKGVHQRELKNDINPDIILGNTYHLYLRPQTKILEQAGGLHKFMNWDRNILTDSGGYQVYSLSANRKIKEEGVKFKSHIDGSYHTFTPENVMEIQRSIGADIIMAFDECTPYPCDYNYAKRSMHMTHRWLDRCIAHLEKTPLKYGYNQAFFPIVQGSTYKDLRIQSAEYIANAGAVGNAIGGLSVGEPAEEMYAMTDVVCNILPEDKPRYLMGVGTPINILENIALGVDMFDCVMPTRNARNGMLFTAHGTINIKNKKWEDDFSPIDEMGITFVDTEYSKAYLRHLFSVNELLGKQIATIHNLGFYLWLVREARKHILAGDFNTWKNTMVKQMDKRL

SEQ ID NO: 60715 - protein, 376 aa, unidentified
  source 1..376: note = Seonamhaeicola aphaedonensis
  REGION 1..376: note = tr|A0A3D9HFF8|A0A3D9HFF8_9FLAO Queuine tRNA-ribosyltransferase OS=Seonamhaeicola aphaedonensis; OX = 1461338 GN=tgt PE=3 SV=1
MKFQLNAQDNQSKARAGKITTDHGVIETPIFMPVGTVATVKGVHQRELKEEINPDIILGNTYHLYLRPQTNIIEKAGGLHKFMNWDRNILTDSGGYQVYSLSANRKIKEEGVKFKSHIDGSYHIFTPENVMEIQRSIGADIIMAFDECTPYPCDYNYAKRSMHMTHRWLDRCMNHLEKTPFKYDYSQAFFPIVQGSTYKDLRIQSAEYIANAGAIGNAIGGLSVGEPAEEMYAMTDVVCGVLPEDKPRYLMGVGTPINILENIALGIDMFDCVMPTRNARNGMLFTAHGTINIKNKKWEDDFSPIDEMGITFVDTEYSKAYLRHLFSVNELLGKQIATIHNLGFYLWLVREARKHILAGDFRIWKDTMVKQMDKRL

SEQ ID NO: 60716 - protein, 376 aa, unidentified
  source 1..376: note = Seonamhaeicola marinus
  REGION 1..376: note = tr|A0A5D0J2C3|A0A5D0J2C3_9FLAO Queuine tRNA-ribosyltransferase OS=Seonamhaeicola marinus; OX = 1912246 GN=tgt PE=3 SV=1
MKFQLNAQDAQSKARAGKITTDHGVIETPIFMPVGTVATVKGVHQRELKQDINPDIILGNTYHLYLRPQTDIIEKAGGLHKFMNWDRNILTDSGGYQVYSLSANRKIKEEGVKFKSHIDGSYHTFTPENVMEIQRSIGADIIMAFDECTPYPCDYNYAKRSMHMTHRWLDRCIAHLEKTPLKYDYSQAFFPIVQGSTYKDLRLQSAEYIANSGAVGNAIGGLSVGEPAEEMYAMTDIVCGVLPEDKPRYLMGVGTPINILENIALGVDMFDCVMPTRNARNGMLFTAHGTINIKNKKWEDDFSPIDEMGITFVDTEYSKAYLRHLFSVNELLGKQIATIHNLGFYLWLVREARKHILAGDFRTWKDTMVKQMDKRL

SEQ ID NO: 60717 - protein, 376 aa, unidentified
  source 1..376: note = Seonamhaeicola sp.
  REGION 1..376: note = tr|A0A562Y9J7|A0A562Y9J7_9FLAO Queuine tRNA-ribosyltransferase OS=Seonamhaeicola sp. W255; OX = 2528206 GN=tgt PE=3 SV=1
MKFQLKAQDSQSKARAGIITTDHGHIETPIFMPVGTVATVKGVHQRELKEDINPDIILGNTYHLYLRPQTDIIEKAGGLHKFMNWDRNILTDSGGYQVYSLSANRKIKEEGVKFKSHIDGSYHIFTPENVMEIQRSIGADIIMAFDECTPYPCDYNYAKRSMHMTHRWLDRCISHLEKTPLKYDYSQAFFPIVQGSTYKDLRIQSAEYIANTGAVGNAIGGLSVGEPAEEMYAMTEVVCGVLPEDKPRYLMGVGTPINILENIALGIDMFDCVMPTRNARNGMLFTAHGTINIKNKKWEDDFSPIDDMGITFVDTEYSKAYLRHLFSVNELLGKQIATIHNLGFYLWLVREARKHILAGDFKTWKDTMVKQMDKRL

SEQ ID NO: 60718 - protein, 376 aa, unidentified
  source 1..376: note = Seonamhaeicola sp.
  REGION 1..376: note = tr|A0A1U7DMZ8|A0A1U7DMZ8_9FLAO Queuine tRNA-ribosyltransferase OS=Seonamhaeicola sp. S2-3; OX = 1936081 GN=tgt PE=3 SV=1
MKFQLNGKDSQSKARAGKLTTDHGVIETPIFMPVGTVATVKGVHQRELKQDINPDIILGNTYHLYLRPQTDIIEKAGGLHKFMNWDRNILTDSGGYQVYSLSANRKIKEEGVKFKSHIDGSYHVFTPENVMEIQRSIGADIIMAFDECTPYPCDYNYAKRSMHMTHRWLDRCIAHLAKTPLKYGYNQAFFPIVQGSTYKDLRIQSAEYIANAGAVGNAIGGLSVGEPAEEMYAMTDVVCSILPEDKPRYLMGVGTPINILENIALGVDMFDCVMPTRNARNGMLFTAHGTINIKNKKWEDDFSPIDEMGITFVDTEYTKAYLRHLFSVNELLGKQIATIHNLGFYLWLVREARKHILAGDFKAWKDKMVKQMDKRL

SEQ ID NO: 60719 - protein, 371 aa, unidentified
  source 1..371: note = Serpentinicella alkaliphila
  REGION 1..371: note = tr|A0A4R2TY05|A0A4R2TY05_9CLOT Queuine tRNA-ribosyltransferase OS=Serpentinicella alkaliphila; OX = 1734049 GN=tgt PE=3 SV=1
MGIKYELIKECKQSGARLGKIYTPHGVIETPIFMPVGTQATVKTMTKEELEEIHSQIILSNTYHLYLRPGHELIKKAGGLHKFMNWDKPILTDSGGFQVFSLGDLRKITEEGVEFRSHIDGSKHFISPEKAVEIQTALGSDIMMAFDECAPYPADREYVKNSLERTTRWAKRCKEAHWNTEKQSLFGIIQGGMYNDLRKISAEQIIELDFPGYAVGGLSVGEPKPLMYEVLDHTTPLMPKDKPRYLMGVGSPDALIEGVIRGIDMFDCVLPTRIGRNGTAMTSHGKVIIKNAKHTESFEPLDVECGCYTCKNYSRAYLRHLFKADEILGLRLLTYHNLYFLLKLMEEMRQAIREDRLLDYRKSFYEKYGLK

SEQ ID NO: 60720 - protein, 400 aa, unidentified
  source 1..400: note = Serpentinomonas mccroryi
  REGION 1..400: note = tr|A0A060NTB4|A0A060NTB4_9BURK Queuine tRNA-ribosyltransferase OS=Serpentinomonas mccroryi; OX = 1458426 GN=tgt PE=3 SV=1
MLQFEILATDPTSHARRGRLSLRHGVVQTPIFMPVGTYGTVKGVLPQSLQQMGAQIILGNTFHLWLRPGLEVVQGFGGLHGFENWQAPILTDSGGFQVWSLGAMRKISEQGVQFASPVNGDKLFLSPEVSMQIQTVLDSDIAMQFDECTPYWQGDGAAAAKGGSGHVTTEAEARASMELSLRWARRSQAEFARLQNPNALFGIVQGGMFEHLRLESLQALVDLDLPGYAIGGVSVGEPKELMRQIMAHTPHRLPAHKPRYLMGVGTPEDLVQGVADGVDMFDCVMPTRNARNGTLFTRYGDLKIRNARHRHDPQPIDPSCSCTACAGPEGVPWEQGGRGGFSRAYLHHLERCGEMLAPMLASIHNLHYYLNLMRELRAALEAGAFAAWRARFAVERSRGV

SEQ ID NO: 60721 - protein, 398 aa, unidentified
  source 1..398: note = Serpentinomonas raichei
  REGION 1..398: note = tr|A0A060NKH3|A0A060NKH3_9BURK Queuine tRNA-ribosyltransferase OS=Serpentinomonas raichei; OX = 1458425 GN=tgt PE=3 SV=1
MLQFERLATDPASHARRGRLTLRHGVVQTPIFMPVGTYGTVKGVLPQSLQQMGAEIILGNTFHLWLRPGLEVVQTFGGLHRFENWHAPILTDSGGFQVWSLGAMRKISEQGVQFASPVNGDKLFLSPEVSMQIQTVLDSDIAMQFDECTPYWQGEGATQGGSGHVTSEAEARASMALSLRWARRSKAEFERLQNPNALFGIVQGGMFEHLRLESLQALVELDLPGYAIGGVSVGEPKELMRQIMAHTPHRLPAHKPRYLMGVGTPEDLVQGVADGVDMFDCVMPTRNARNGTLFTRYGDLKIRNARHRHDPQPIDPSCSCSACAGPDGLSWEQGGRGGFSRAYLHHLERCGEMLAPMLASIHNLHYYLNLMREVRAALEGGVFAAWRLRFAADRSRGV

SEQ ID NO: 60722 - protein, 374 aa, Serratia ficaria
  REGION 1..374: note = tr|A0A240BFK3|A0A240BFK3_SERFI Queuine tRNA-ribosyltransferase OS=Serratia ficaria OX=61651; GN = tgt PE=3 SV=1
MKYELQTTDGRARRGRLIFDRGVVETPAFMPVGTYGTVKGMTPEEVKETGAQILLGNTFHLWLRPGQEIMKLHGDLHDFMQWHGPILTDSGGFQVFSLGAMRKIKEEGVYFRNPINGDKVFLSPEKSMEIQYDLGSDIVMIFDECTPYPADWDYAKRSMEMSLRWAQRSRQRFDELKNKNALFGIIQGGVYEDLRDVSVKGLVDIGFDGYAVGGLAVGEPKEDMHRILEHVCPQIPEDKPRYLMGVGKPEDLVEGVRRGIDMFDCVMPTRNARNGHLFVTDGVVKIRNAKHKDDTSPLDKDCDCYTCRNYSRAYLHHLDRCNEILGARLNTIHNLRHYQRLMAGLRQAIEEGKLELFVADFYGRIGKPIPPLNA

SEQ ID NO: 60723 - protein, 374 aa, Serratia fonticola
  REGION 1..374: note = tr|A0A0F7D255|A0A0F7D255_SERFO Queuine tRNA-ribosyltransferase OS=Serratia fonticola OX=47917; GN = tgt PE=3 SV=1
MKYELQTTDGRARRGRLVFERGVVETPAFMPVGTYGTVKGMTPEEVKDTGAQILLGNTFHLWLRPGQEIMKLHGDLHDFMQWHGPILTDSGGFQVFSLGAMRKIKEEGVYFRNPINGDKVFLSPEKSMEIQYDLGSDIVMIFDECTPYPADWDYAKRSMEMSLRWAQRSRQRFDELNNNNALFGIIQGGVYEDLRDVSVKGLVEIGFDGYAVGGLAVGEPKEDMHRILEHVCPQIPEDKPRYLMGVGKPEDLVEGVRRGIDMFDCVMPTRNARNGHLFVTDGVVKIRNAKHKDDTSTLDSECDCYTCRHYSRAYLHHLDRCNEILGARLNTIHNLRYYQRLMAGLRQAIEEGKLELFVADFYGRIGKPIPPLNA

SEQ ID NO: 60724 - protein, 77 aa, Serratia fonticola
  REGION 1..77: note = tr|A0A4V6KMX3|A0A4V6KMX3_SERFO Queuine tRNA-ribosyltransferase OS=Serratia fonticola OX=47917; GN = tgt_2 PE=4 SV=1
MKYELQTTDGRARRGRLVFERGVVETPAFMPVGTYGTVKGMTPEEVKDTGAQILLGNTFPPVAAPRAGDHEAARRSA

SEQ ID NO: 60725 - protein, 374 aa, Serratia liquefaciens
  REGION 1..374: note = tr|A0A515CZH5|A0A515CZH5_SERLI Queuine tRNA-ribosyltransferase OS=Serratia liquefaciens OX=614; GN = tgt PE=3 SV=1
MKYELDTTDGRARRGRLIFDRGVVETPAFMPVGTYGTVKGMTPEEVKETGAQILLGNTFHLWLRPGQEIMKLHGDLHDFMQWHGPILTDSGGFQVFSLGAMRKIKEEGVHFRNPINGDKVFLSPEKSMEIQYDLGSDIVMIFDECTPYPADWDYAKRSMEMSLRWAQRSRQRFDELNNKNALFGIIQGGVYEDLRDVSVKGLVDIGFDGYAVGGLAVGEPKEDMHRILEHVCPQIPEDKPRYLMGVGKPEDLVEGVRRGIDMFDCVMPTRNARNGHLFVTDGVVKIRNAKHKDDTSPLDKDCDCYTCRNYSRAYLHHLDRCNEILGARLNTIHNLRHYQRLMAGLREAIEQGKLELFVADFYGRIGKPIPPLNA

SEQ ID NO: 60726 - protein, 311 aa, Serratia liquefaciens
  REGION 1..311: note = tr|A0A484X9S5|A0A484X9S5_SERLI Queuine tRNA-ribosyltransferase OS=Serratia liquefaciens OX=614; GN = tgt PE=3 SV=1
MVETPAFMPVGTYGTVKGMTPEEVEATGAQIILGNTFHLWLRPGQEIMKLHGDLHDFMQWKGPILTDSGGFQVFSLGDIRKITEQGVHFRNPINGDPIFLDPEKSMEIQYDLGSDIVMIFDECTPYPADWDYAKRSMEMSLRWAKRSRDRFDSLGNKNALFGIIQGSVYEDLRDISVKGLVEIGFDGYAVGGLAVGEPKEDMHRILEHVCPQIPADKPRYLMGVGKPEDLVEGVRRGIDMFDCVMPTRNARNGHLFVTDGVVKIRNAKHKSDTAPLDAECDCYTCRNYSRAYLHHLDRCNEILGRASQYHS

SEQ ID NO: 60727 - protein, 374 aa, Serratia marcescens
  REGION 1..374: note = tr|A0A5F0Z717|A0A5F0Z717_SERMA Queuine tRNA-ribosyltransferase OS=Serratia marcescens subsp. sakuensis OX=211760 GN=tgt PE=3 SV=1
MKYELQTTDGRARRGRLIFDRGVVETPAFMPVGTYGTVKGMTPEEVKETGAQILLGNTFHLWLRPGQEIMKLHGDLHDFMQWPGPILTDSGGFQVFSLGAMRKIKEEGVYFRNPINGDKVFLSPEKSMEIQYDLGSDIVMIFDECTPYPADWDYAKRSMEMSLRWAQRSRKRFDELENKNALFGIIQGGVYEDLRDVSVKGLVDIGFDGYAVGGLAVGEPKEDMHRILEHVCPQIPEDKPRYLMGVGKPEDLVEGVRRGIDMFDCVMPTRNARNGHLFVTDGVVKIRNAKHKDDTSPLDKDCDCYTCRHYSRAYLHHLDRCNEILGARLNTIHNLRHYQRLMAGLRQAIEEGKLEQFVADFYGRIGKPIPPLNA

SEQ ID NO: 60728 - protein, 374 aa, Serratia marcescens
  REGION 1..374: note = tr|A0A0F6KZH1|A0A0F6KZH1_SERMA Queuine tRNA-ribosyltransferase OS=Serratia marcescens OX=615; GN = tgt PE=3 SV=1
MKYELQTTDGRARRGRLIFDRGVVETPAFMPVGTYGTVKGMTPEEVKETGAQILLGNTFHLWLRPGQEIMKLHGDLHDFMQWPGPILTDSGGFQVFSLGAMRKIKEEGVYFRNPINGDKVFLSPEKSMEIQYDLGSDIVMIFDECTPYPADWDYAKRSMEMSLRWAQRSRQRFDELENKNALFGIIQGGVYEDLRDVSVKGLVDIGFDGYAVGGLAVGEPKEDMHRILEHVCPQIPEDKPRYLMGVGKPEDLVEGVRRGIDMFDCVMPTRNARNGHLFVTDGVVKIRNAKHKDDTSPLDKDCDCYTCRHYSRAYLHHLDRCNEILGARLNTIHNLRHYQRLMAGLRQAIEEGKLEQFVADFYGRIGKPIPPLNA

SEQ ID NO: 60729 - protein, 374 aa, Serratia nematodiphila
  REGION 1..374: note = tr|A0A5C7D0X2|A0A5C7D0X2_9GAMM Queuine tRNA-ribosyltransferase OS=Serratia nematodiphila; OX = 458197 GN=tgt PE=3 SV=1
MKYELQTTDGRARRGRLIFDRGVVETPAFMPVGTYGTVKGMTPEEVKETGAQILLGNTFHLWLRPGQEIMKLHGDLHDFMQWPGPILTDSGGFQVFSLGAMRKIKEEGVYFRNPINGDKVFLSPEKSMEIQYDLGSDIVMIFDECTPYPADWDYAKRSMEMSLRWAERSRKRFDELENKNALFGIIQGGVYEDLRDVSVKGLVDIGFDGYAVGGLAVGEPKEDMHRILEHVCPQIPEDKPRYLMGVGKPEDLVEGVRRGIDMFDCVMPTRNARNGHLFVTDGVVKIRNAKHKDDTSPLDKDCDCYTCRHYSRAYLHHLDRCNEILGARLNTIHNLRHYQRLMAGLRQAIEEGKLEQFVADFYGRIGKPIPPLNA

SEQ ID NO: 60730 - protein, 386 aa, Serratia odorifera
  REGION 1..386: note = tr|D4DWD3|D4DWD3_SEROD Queuine tRNA-ribosyltransferase OS=Serratia odorifera DSM 4582; OX = 667129 GN=tgt PE=3 SV=1
MTSDCFSDAGGIVKYELQTTDGRARRGRLVFERGVVETPAFMPVGTYGTVKGMTPEEVKETGAQILLGNTFHLWLRPGQEIMKLHGDLHDFMQWHGPILTDSGGFQVFSLGAMRKIKEEGVYFRNPINGDKVFLSPEKSMEIQYDLGSDIVMIFDECTPYPADWDYAKRSMEMSLRWAQRSRARFDELNNKNALFGIIQGGVYEDLRDVSVKGLVEIGFDGYAVGGLAVGEPKEDMHRILEHVCPQIPEDKPRYLMGVGKPEDLVEGVRRGIDMFDCVMPTRNARNGHLFVTDGVVKIRNAKHKDDTSPLDNECDCYTCRNYSRAYLHHLDRCNEILGARLNTIHNLRYYQRVMAGLRQAIEEGKLETFVADFYGRIGKPVPPLTV

SEQ ID NO: 60731 - protein, 374 aa, Serratia odorifera
  REGION 1..374: note = tr|A0A3S5D6R5|A0A3S5D6R5_SEROD Queuine tRNA-ribosyltransferase OS=Serratia odorifera OX=618; GN = tgt PE=3 SV=1
MKYELQTTDGRARRGRLVFERGVVETPAFMPVGTYGTVKGMTPEEVKETGAQILLGNTFHLWLRPGQEIMKLHGDLHDFMQWHGPILTDSGGFQVFSLGAMRKIKEEGVYFRNPINGDKVFLSPEKSMEIQYDLGSDIVMIFDECTPYPADWDYAKRSMEMSLRWAQRSRARFDELNNKNALFGIIQGGVYEDLRDVSVKGLVEIGFDGYAVGGLAVGEPKEDMHRILEHVCPQIPEDKPRYLMGVGKPEDLVEGVRRGIDMFDCVMPTRNARNGHLFVTDGVVKIRNAKHKDDTSPLDNECDCYTCRNYSRAYLHHLDRCNEILGARLNTIHNLRYYQRVMAGLRQAIEEGKLETFVADFYGRIGKPVPPLTV

SEQ ID NO: 60732 - protein, 374 aa, unidentified
  source 1..374: note = Serratia oryzae
  REGION 1..374: note = tr|A0A1S8CNS8|A0A1S8CNS8_9GAMM Queuine tRNA-ribosyltransferase OS=Serratia oryzae OX=2034155; GN = tgt PE=3 SV=1
MKYELQTTDGRARRGRLVFERGVVETPAFMPVGTYGTVKGMTPEEVRDTGAQILLGNTFHLWLRPGQEIMKLHGDLHDFMQWHGPILTDSGGFQVFSLGAMRKIKEEGVYFRNPINGDKVFLSPEKSMEIQYDLGSDIVMIFDECTPYPADWDYAKRSMEMSLRWAQRSRQRFDELNNKNALFGIIQGGVYEDLRDVSVKGLVDIGFDGYAVGGLAVGEPKEDMHRILEHVCPQIPEDKPRYLMGVGKPEDLVEGVRRGIDMFDCVMPTRNARNGHLFVTDGVIKIRNAKHKDDTSALDKDCDCYTCRHYSRAYLHHLDRCNEILGARLNTIHNLRYYQRLMAGLRQAIEESKLELFVADFYGRIGKPVPPLNA

SEQ ID NO: 60733 - protein, 374 aa, Serratia plymuthica
  REGION 1..374: note = tr|A0A447Q308|A0A447Q308_SERPL Queuine tRNA-ribosyltransferase OS=Serratia plymuthica OX=82996; GN = tgt PE=3 SV=1
MKYELQATDGRARRGRLIFERGVVETPAFMPVGTYGTVKGMTPEEVKETGAQILLGNTFHLWLRPGQEIMKLHGDLHDFMQWHGPILTDSGGFQVFSLGAMRKIKEEGVYFRNPINGDKVFLSPEKSMEIQYDLGSDIVMIFDECTPYPADWDYAKSSMEMSLRWAQRSRQRFDELNNKNALFGIIQGGVYEDLRDVSVKGLVDIGFDGYAVGGLAVGEPKEDMHRILEHVCPQIPEDKPRYLMGVGKPEDLVEGVRRGIDMFDCVMPTRNARNGHLFVNDGVVKIRNAKHKDDTSPLDKDCDCYTCRNYSRAYLHHLDRCNEILGARLNTIHNLRHYQRLMAGLRQAIEQGKLELFVTDFYGRIGKPIPPLNA

SEQ ID NO: 60734 - protein, 374 aa, Serratia plymuthica
  REGION 1..374: note = tr|A0A318NVM0|A0A318NVM0_SERPL Queuine tRNA-ribosyltransferase OS=Serratia plymuthica OX=82996; GN = tgt PE=3 SV=1
MKYELQATDGRARRGRLVFERGVVETPAFMPVGTYGTVKGMTPEEVKETGAQILLGNTFHLWLRPGQEIMKLHGDLHDFMQWHGPILTDSGGFQVFSLGAMRKIKEEGVYFRNPINGDKVFLSPEKSMEIQYDLGSDIVMIFDECTPYPADWDYAKSSMEMSLRWAQRSRQRFDELNNKNALFGIIQGGVYEDLRDVSVKGLVDIGFDGYAVGGLAVGEPKEDMHRILEHVCPQIPEDKPRYLMGVGKPEDLVEGVRRGIDMFDCVMPTRNARNGHLFVTDGVVKIRNAKHKDDTSPLDKDCDCYTCRNYSRAYLHHLDRCNEILGARLNTIHNLRHYQRLMAGLRQAIEQGKLELFVTDFYGRIGKPIPPLNA

SEQ ID NO: 60735 - protein, 374 aa, Serratia proteamaculans; identical to SEQ ID NO: 60725
  REGION 1..374: note = tr|A0A379ZZE6|A0A379ZZE6_9GAMM Queuine tRNA-ribosyltransferase OS=Serratia proteamaculans; OX = 28151 GN=tgt PE=3 SV=1

SEQ ID NO: 60736 - protein, 374 aa, Serratia proteamaculans
  REGION 1..374: note = sp|A8GAM5|TGT_SERP5 Queuine tRNA-ribosyltransferase; OS = Serratia proteamaculans (strain 568) OX=399741 GN=tgt; PE = 3 SV=1
MKYELDTTDGRARRGRLIFERGVVETPAFMPVGTYGTVKGMTPEEVKETGAQILLGNTFHLWLRPGQEIMKLHGDLHDFMQWHGPILTDSGGFQVFSLGAMRKIKEEGVHFRNPINGDKVFLSPEKSMEIQYDLGSDIVMIFDECTPYPADWDYAKSSMEMSLRWAQRSRQRFDELNNKNALFGIIQGGVYEDLRDVSVKGLVDIGFDGYAVGGLAVGEPKEDMHRILEHVCPQIPEDKPRYLMGVGKPEDLVEGVRRGIDMFDCVMPTRNARNGHLFVTDGVVKIRNAKHKDDTSPLDKDCDCYTCRNYSRAYLHHLDRCNEILGARLNTIHNLRHYQRLMAGLREAIEQGKLELFVADFYGRIGKPVPPLNA

SEQ ID NO: 60737 - protein, 374 aa, Serratia quinivorans
  REGION 1..374: note = tr|A0A2X2GEQ3|A0A2X2GEQ3_9GAMM Queuine tRNA-ribosyltransferase OS=Serratia quinivorans OX=137545; GN = tgt PE=3 SV=1
MKYELDTTDGRARRGRLIFERGVVETPAFMPVGTYGTVKGMTPEEVKETGAQILLGNTFHLWLRPGQEIMKLHGDLHDFMQWHGPILTDSGGFQVFSLGAMRKIKEEGVHFRNPINGDKVFLSPEKSMEIQYDLGSDIVMIFDECTPYPADWDYAKSSMEMSLRWAQRSRQRFDELNNKNALFGIIQGGVYEDLRDVSVKGLVDIGFDGYAVGGLAVGEPKEDMHRILEHVCPQIPEDKPRYLMGVGKPEDLVEGVRRGIDMFDCVMPTRNARNGHLFVTDGVVKIRNAKHKDDTSPLDKDCDCYTCRNYSRAYLHHLDRCNEILGARLNTIHNLRHYQRLMAGLREAIEQGKLELFVADFYGRIGKPIPPLNA

SEQ ID NO: 60738 - protein, 374 aa, Serratia quinivorans; identical to SEQ ID NO: 60736
  REGION 1..374: note = tr|A0A2X2HAL7|A0A2X2HAL7_9GAMM Queuine tRNA-ribosyltransferase OS=Serratia quinivorans OX=137545; GN = tgt PE=3 SV=1

SEQ ID NO: 60739 - protein, 156 aa, Serratia rubidaea
  REGION 1..156: note = tr|A0A4U9HAI5|A0A4U9HAI5_SERRU Queuine tRNA-ribosyltransferase OS=Serratia rubidaea OX=61652; GN = tgt_2 PE=4 SV=1
MTWGSDIVMIFDECTPYPADWDYAKRSMEMSLRWAQRSRQRFDELNNKNALFGIIQGGVYEDLRDVSVKGLVEIGFDGYAVGGLAVGEPKEDMHRILEHVCPQIPADKPRYLMGVGKPEDLVEGVRRGIDMFDCVMPTRNARNGHLFVTGRCGKNP

SEQ ID NO: 60740 - protein, 374 aa, Serratia rubidaea
  REGION 1..374: note = tr|A0A140F0H4|A0A140F0H4_SERRU Queuine tRNA-ribosyltransferase OS=Serratia rubidaea OX=61652; GN = tgt PE=3 SV=1
MKYELDTTDGRARRGRLIFERGVVETPAFMPVGTYGTVKGMTPEEVKETGAQILLGNTFHLWLRPGQEIMKLHGDLHDFMQWPGPILTDSGGFQVFSLGAMRKIKEEGVYFRNPINGDKVFLSPEKSMEIQYDLGSDIVMIFDECTPYPADWDYAKRSMEMSLRWAQRSRQRFDELNNKNALFGIIQGGVYEDLRDVSVKGLVEIGFDGYAVGGLAVGEPKEDMHRILEHVCPQIPADKPRYLMGVGKPEDLVEGVRRGIDMFDCVMPTRNARNGHLFVTDGVVKIRNAKHKDDTSPLDSECDCYTCRNYSRAYLHHLDRCNEILGARLNTIHNLRFYQRLMAGLRQAIEEGKLEAFVADFYGRIGKPVPPLNV

SEQ ID NO: 60741 - protein, 374 aa, Serratia sp.; identical to SEQ ID NO: 60728
  REGION 1..374: note = tr|A0A1B3F8E6|A0A1B3F8E6_9GAMM Queuine tRNA-ribosyltransferase OS=Serratia sp. YD25 OX=1759437; GN = tgt PE=3 SV=1

SEQ ID NO: 60742 - protein, 374 aa, Serratia sp.; identical to SEQ ID NO: 60399
  REGION 1..374: note = tr|A0A0Q4MJW8|A0A0Q4MJW8_9GAMM Queuine tRNA-ribosyltransferase OS=Serratia sp. Leaf50 OX=1736223; GN = tgt PE=3 SV=1

SEQ ID NO: 60743 - protein, 374 aa, Serratia symbiotica
  REGION 1..374: note = tr|A0A068Z5Y2|A0A068Z5Y2_9GAMM Queuine tRNA-ribosyltransferase OS=Serratia symbiotica OX=138074; GN = tgt PE=3 SV=1
MEYQLQTTDGCARRGRLIFERGVVETPAFMPVGTYGTVKGMTPEEVKETGAQILLGNTFHLWLRPGQTIMKLHGDLHDFMQWHGPILTDSGGFQVFSLGAMRKIKEEGVYFRNPINGDKVFLSPEKSMEIQYDLGSDIVMIFDECTPYPADWDYAKRSMELSLRWAQRSRQRFDELNNKNALFGIIQGGVYEDLRDASVKGLVDIGFDGYAIGGLAVGEPKEAMHRILEHVCPQIPPDKPRYLMGVGKPEDLVEGVRRGIDMFDCVMPTRNARNGHLFVTDGVVKIRNAKYKDDISPLDKDCDCYTCRHYSRAYLHHLDRCNEILGARLNTIHNLRYYQRLMAGLRQAIEEGKLALFVADFYGRLGKPMPPLNT

SEQ ID NO: 60744 - protein, 374 aa, Serratia symbiotica
  REGION 1..374: note = tr|A0A068RC48|A0A068RC48_9GAMM Queuine tRNA-ribosyltransferase OS=Serratia symbiotica SCt-VLC; OX = 1347341 GN=tgt PE=3 SV=1
MEYQLQTTDGCAHRGRLIFERGVVETPAFMPVGTYGTVKGMTPEEVKETGAQILLGNTFHLWLRPGQTIMKLHGDLHDFMQWHGPILTDSGGFQVFSLGAMRKIKEEGVYFRNPINGDKVFLSPEKSMEIQYDLGSDIVMIFDECTPYPADWDYAKRSMELSLRWAQRSRQRFDELNNKNALFGIIQGGVYEDLRDASVKGMVDIGFDGYAVGGLAVGEPKEAMHRILEHVCPQIPPDKPRYLMGVGKPEDLVEGVRRGIDMFDCVMPTRNARNGHLFVTDGVVKIRNAKYKDDISPLDKDCDCYTCRHYSRAYLHHLDRCNEILGARLNTIHNLRYYQRLMAGLRQAIEEGKLAMFVADFYGRLGKPMPPLNT

SEQ ID NO: 60745 - protein, 374 aa, Serratia ureilytica; identical to SEQ ID NO: 60728
  REGION 1..374: note = tr|A0A5C7BVK5|A0A5C7BVK5_9GAMM Queuine tRNA-ribosyltransferase OS=Serratia ureilytica OX=300181; GN = tgt PE=3 SV=1

SEQ ID NO: 60746 - protein, 377 aa, Sharpea azabuensis
  REGION 1..377: note = tr|A0A1H6TBP9|A0A1H6TBP9_9LACO Queuine tRNA-ribosyltransferase OS=Sharpea azabuensis OX=322505; GN = tgt PE=3 SV=1
MKDFWYELKHVEKDTGARYGILHTPHGDVETPMFMPVGTQATVKGIWPEMLKEMQSQVVLANTYHLWLRPGDDVVKQAGGLHKFMNYDGPILTDSGGFQVFSLGKMRKIEEEGVTFRSYIDGSKLFLSPEKSIEIQENLGADIIMSFDECAPYPSDYYYMKNSVERTLRWAERGLKAHKREDQALFGIVQGGEFADLRELSAKTLASMDFPGYSIGGTSVGEPKDVMYQMIDDSVKWLPENKPRYLMGVGNPIDLIEAAMRGIDMYDCVLPTRVARHGALMTHHGRMNINNEKYKYDFTPIDDQCNCYACKNYTRAYIRHLHKEDEIFGKSLMSIHNVQFLLDLSRDIREAIKNDRLLEFRKEFLDAYGHNVYERAF

SEQ ID NO: 60747 - protein, 374 aa, Shewanella algae
  REGION 1..374: note = tr|A0A1S2TUN6|A0A1S2TUN6_9GAMM Queuine tRNA-ribosyltransferase OS=Shewanella algae OX=38313; GN = tgt PE=3 SV=1
MKFELDTTDGRARRGRLIFERGTVETPAFMPVGTYGTVKGMTPEEVRATGADILLGNTFHLWLRPGEEIMRKHGDLHDFMNWQRPILTDSGGFQVFSLGDIRKITEEGVHFRSPINGEKIFMDAEKSMQIQYSLGSDVVMIFDECTPYPATHDEARKSMQMSLRWAKRSRDEFDRLENPNSLFGIIQGSVYEDLRDESLKGLLEIGFDGYAVGGLAVGEPKADMHRVLEHVCPQIPTDKPRYLMGVGKPEDLVEGVRRGIDMFDCVMPTRNARNGHLFVTEGVIKIRNARHRDDTSPLDPECDCYTCKNYSRAYLYHLDRCNEILGARLNTIHNLRYYQRLMEGLRGAIETGTLDAFVKDFYGRQGREVPELVD

SEQ ID NO: 60748 - protein, 374 aa, Shewanella algae
  REGION 1..374: note = tr|A0A2T3H602|A0A2T3H602_9GAMM Queuine tRNA-ribosyltransferase OS=Shewanella algae OX=38313; GN = tgt PE=3 SV=1
MKFELDTTDGRARRGRLIFDRGTVETPAFMPVGTYGTVKGMTPEEVRATGADILLGNTFHLWLRPGEEIMRKHGDLHDFMNWQRPILTDSGGFQVFSLGDIRKITEEGVHFRSPINGEKIFMDAEKSMQIQYSLGSDVVMIFDECTPYPATHDEARKSMQMSLRWAKRSRDEFDRLENPNSLFGIIQGSVYEDLRDESLKGLLEIGFDGYAVGGLAVGEPKADMHRVLEHVCPQIPTDKPRYLMGVGKPEDLVEGVRRGIDMFDCVMPTRNARNGHLFVTEGVIKIRNARHRDDTSPLDPECDCYTCKNYSRAYLYHLDRCNEILGARLNTIHNLRYYQRLMEGLRGAIETGTLDAFVKDFYGRQGREVPELVD

SEQ ID NO: 60749 - protein, 374 aa, Shewanella amazonensis
  REGION 1..374: note = sp|A1S7P2|TGT_SHEAM Queuine tRNA-ribosyltransferase; OS = Shewanella amazonensis (strain ATCC BAA-1098 / SB2B); OX = 326297 GN=tgt PE=3 SV=1
MKFELITTQGRARRGRLVFERGTVETPAFMPVGTYGTVKGMTPEEVRATGADILLGNTFHLWLRPGEEIMRKHGDLHDFMNWQRPILTDSGGFQVFSLGDIRKITEEGVHFRSPINGEKIFMDAEKSMQIQHSLGSDVVMIFDECTPYPATHDEARKSMQMSLRWAKRSRDEFDRLENPNSLFGIIQGSVYEDLRDESLKGLLEIGFDGYAVGGLAVGEPKEDMHRVLEHVCPQIPADKPRYLMGVGKPEDLVEGVRRGVDMFDCVMPTRNARNGHLFTSEGVIKIRNARHRDDTSPLDPKCDCYTCTNYSRAYLHHLDRCNEILGARLNTIHNLRYYQRLMEGLRGAIETGTLDAFVADFYTSQGREVPELKD

SEQ ID NO: 60750 - protein, 377 aa, Shewanella atlantica
  REGION 1..377: note = tr|A0A3S0I7X7|A0A3S0I7X7_9GAMM Queuine tRNA-ribosyltransferase OS=Shewanella atlantica OX=271099; GN = tgt PE=3 SV=1
MKFELDTTQGRARRGRLVFERGTVETPAFMPVGTYGTVKGMTPEEVRATGADILLGNTFHLWLRPGEEIMRKHGDLHDFMNWQRPILTDSGGFQVFSLGDIRKITEEGVHFRSPINGEKIFLDPEKSMQIQNSLGSDVVMIFDECTPYPATEDEARKSMQMSLRWAQRSRDEFDKLENPNSLFGIIQGGVYEDLRDESLKGLVDIGFDGYAVGGLAVGEPKEDMHRILEHTCPQIPTDKPRYLMGVGKPEDLVEGVRRGVDMFDCVMPTRNARNGHLFTTEGVIKIRNARHRDDTSPLDDKCDCYTCKNYSRAYLYHLDRCNEILGARLNTIHNLRYYQKLMEGLRGAIETGTLDAFVEEFYTSQGREVPEVPELTD

SEQ ID NO: 60751 - protein, 374 aa, Shewanella baltica
  REGION 1..374: note = tr|A0A161WKV7|A0A161WKV7_9GAMM Queuine tRNA-ribosyltransferase OS=Shewanella baltica OX=62322; GN = tgt PE=3 SV=1
MKFELDTTDGRARRGRLIFDRGTVETPAFMPVGTYGTVKGMTPEEVRATGADILLGNTFHLWLRPGEEIMRKHGDLHDFMNWQRPILTDSGGFQVFSLGDIRKITEEGVHFRSPINGEKIFLDPEKSMQIQDALGSDVVMIFDECTPYPATEDEARKSMQMSLRWARRSRDEFDRLENPNSLFGIIQGGVYEDLRDESLKGLVDIGFDGYAVGGLAVGEPKADMHRILEHICPQIPADKPRYLMGVGKPEDLVEGVRRGVDMFDCVMPTRNARNGHLFTSEGVIKIRNARHRDDTSPLDTKCDCYTCKNYSRAYLYHLDRCNEILGARLNTIHNLRYYQMLMEGLRGAIETGTLDAFVADFYTSQGREVPELVD

SEQ ID NO: 60752 - protein, 374 aa, Shewanella baltica; identical to SEQ ID NO: 60751
  REGION 1..374: note = sp|B8EDJ7|TGT_SHEB2 Queuine tRNA-ribosyltransferase; OS = Shewanella baltica (strain OS223) OX=407976 GN=tgt PE=3; SV = 1

SEQ ID NO: 60753 - protein, 374 aa, Shewanella benthica
  REGION 1..374: note = tr|A9D3Y7|A9D3Y7_9GAMM Queuine tRNA-ribosyltransferase OS=Shewanella benthica KT99; OX = 314608 GN=tgt PE=3 SV=1
MKFELDTTDGRARRGRLIFDRGTVETPAFMPVGTYGTVKGMTPEEVRETGAEILLGNTFHLWLRPGEEIMRKHGGLHDFMNWQGPILTDSGGFQVFSLGDIRKITEAGVHFRSPINGDKIFLDPEKSMQIQNSLGSDVVMIFDECTPYPATEDEARKSMQMSLRWAQRSRDEFDKLENPNSLFGIIQGGVYEDLRDESLQGLVDIGFDGYAVGGLAVGEPKEDMHRILEHVCPQIPTDKPRYLMGVGKPEDLVEGVRRGVDMFDCVMPTRNARNGHLFTSEGVIKIRNARHRDDTATLDAKCDCYTCKNYSRAYLYHLDRCNEILGARLNTIHNLRYYQRLMQGLRGAIETGTLDAFVEEFYTSQGREVPKLFD

SEQ ID NO: 60754 - protein, 374 aa, Shewanella benthica
  REGION 1..374: note = tr|A0A330M5Y4|A0A330M5Y4_9GAMM Queuine tRNA-ribosyltransferase OS=Shewanella benthica OX=43661; GN = tgt PE=3 SV=1
MKFELDTTDGRARRGRLIFDRGTVETPAFMPVGTYGTVKGMTPEEVRETGAEILLGNTFHLWLRPGEEIMRKHGGLHDFMNWQGPILTDSGGFQVFSLGDIRKITEAGVHFRSPINGDKIFLDPEKSMQIQNSLGSDVVMIFDECTPYPATEDEARKSMQMSLRWAQRSRAEFDKLENPNSLFGIIQGGVYEDLRDESLQGLVDIGFDGYAVGGLAVGEPKEDMHRILEHVCPQIPTDKPRYLMGVGKPEDLVEGVRRGVDMFDCVMPTRNARNGHLFTSEGVIKIRNARHRDDTATLDAKCDCYTCKNYSRAYLYHLDRCNEILGARLNTIHNLRYYQRLMQGLRGAIETGTLDAFVEEFYTSQGREVPKLFD

SEQ ID NO: 60755 - protein, 374 aa, unidentified
  source 1..374: note = Shewanella bicestrii
  REGION 1..374: note = tr|A0A220UQ57|A0A220UQ57_9GAMM Queuine tRNA-ribosyltransferase OS=Shewanella bicestrii OX=2018305; GN = tgt PE=3 SV=1
MKFELDTTDGRARRGRLIFERGTVETPAFMPVGTYGTVKGMTPEEVRATGADILLGNTFHLWLRPGEEIMRKHGDLHDFMNWQRPILTDSGGFQVFSLGDIRKITEEGVHFRSPINGEKIFLDPEKSMQIQHALGSDVVMIFDECTPYPATEDEARKSMQMSLRWAKRSRDEFDRLENPNSLFGIIQGSVYEDLRDESLKGLVEIGFDGYAVGGLAVGEPKEDMHRILEHVCPQIPADKPRYLMGVGKPEDLVEGVRRGIDMFDCVMPTRNARNGHLFTSEGVIKIRNARHRDDTSPLDPKCDCYTCKNYSRAYLYHLDRCNEILGARLNTIHNLRYYQMLMEGLRGAIETGTLDAFVKDFYTSQGREVPELVD

SEQ ID NO: 60756 - protein, 377 aa, Shewanella canadensis
  REGION 1..377: note = tr|A0A431WUP3|A0A431WUP3_9GAMM Queuine tRNA-ribosyltransferase OS=Shewanella canadensis OX=271096; GN = tgt PE=3 SV=1
MKFELDTTQGRARRGRLVFERGTVETPAFMPVGTYGTVKGMTPEEVRATGADILLGNTFHLWLRPGEEIMRKHGDLHDFMNWQRPILTDSGGFQVFSLGDIRKITEEGVHFRSPINGEKIFLDPEKSMQIQNSLGSDVVMIFDECTPYPATEDEARKSMQMSLRWAQRSRDEFDKLENPNSLFGIIQGGVYEDLRDESLKGLVDIGFDGYAVGGLAVGEPKADMHRILEHVCPQIPTDKPRYLMGVGKPEDLVEGVRRGVDMFDCVMPTRNARNGHLFTTEGVIKIRNARHRDDTSPLDDKCDCYTCKNYSRAYLYHLDRCNEILGARLNTIHNLRYYQKLMEGLRGAIETGTLDAFVEEFYTSQGREVPEVPELTD

SEQ ID NO: 60757 - protein, 374 aa, Shewanella chilikensis; identical to SEQ ID NO: 60748
  REGION 1..374: note = tr|A0A2V4W3X3|A0A2V4W3X3_9GAMM Queuine tRNA-ribosyltransferase OS=Shewanella chilikensis; OX = 558541 GN=tgt PE=3 SV=1

SEQ ID NO: 60758 - protein, 374 aa, Shewanella colwelliana
  REGION 1..374: note = tr|A0A1E5INA5|A0A1E5INA5_SHECO Queuine tRNA-ribosyltransferase OS=Shewanella colwelliana OX=23; GN = tgt PE=3 SV=1
MKFELDTTDGRARRGRLVFERGTVETPAFMPVGTYGTVKGMTPEEVRATGADILLGNTFHLWLRPGEEIMRKHGDLHDFMNWQRPILTDSGGFQVFSLGDIRKITEEGVHFRSPINGEKIFLDPEKSMQIQDSLGSDVVMIFDECTPYPATEDEARKSMQMSLRWAQRSRDEFNRLENPNSLFGIIQGGVYEDLRDESLEGLVNIGFDGYAIGGLAVGEPKEDMHRILEHVCPKIPTEKPRYLMGVGKPEDLVEGVRRGVDMFDCVMPTRNARNGHLFTSEGVIKIRNARHRDDTSPLDTKCDCYTCKNYSRAYLYHLDRCNEILGARLNTIHNLRYYQMLMEGLRGAIETGTLDAFVEEFYTSQGREVPKLID

SEQ ID NO: 60759 - protein, 374 aa, Shewanella decolorationis
  REGION 1..374: note = tr|A0A5B8QWY2|A0A5B8QWY2_9GAMM Queuine tRNA-ribosyltransferase OS=Shewanella decolorationis; OX = 256839 GN=tgt PE=3 SV=1
MKFELDTTDGRARRGRLIFERGTVETPAFMPVGTYGTVKGMTPEEVRATGADILLGNTFHLWLRPGEEIMRKHGDLHDFMNWQRPILTDSGGFQVFSLGDIRKITEEGVHFRSPINGEKIFLDPEKSMQIQHALGSDVVMIFDECTPYPATEDEARKSMQMSLRWAKRSRDEFDRLENPNSLFGIIQGSVYEDLRDESLKGLVDIGFDGYAVGGLAVGEPKEDMHRILEHICPQIPADKPRYLMGVGKPEDLVEGVRRGIDMFDCVMPTRNARNGHLFTSEGVIKIRNARHRDDTSPLDPKCDCYTCKNYSRAYLYHLDRCNEILGARLNTIHNLRYYQMLMEGLRGAIETGTLDAFVKDFYTSQGREVPELVD

SEQ ID NO: 60760 - protein, 374 aa, Shewanella decolorationis; identical to SEQ ID NO: 60759
  REGION 1..374: note = tr|V1DHQ6|V1DHQ6_9GAMM Queuine tRNA-ribosyltransferase OS=Shewanella decolorationis S12; OX = 1353536 GN=tgt PE=3 SV=1

SEQ ID NO: 60761 - protein, 377 aa, Shewanella denitrificans
  REGION 1..377: note = sp|Q12PD9|TGT_SHEDO Queuine tRNA-ribosyltransferase; OS = Shewanella denitrificans (strain OS217 / ATCC BAA-1090 / DSM 15013) OX=318161 GN=tgt PE=3 SV=1
MKFELDTTQGRARRGRLIFDRGTVETPAFMPVGTYGTVKGMTPEEVRATGADILLGNTFHLWLRPGEEIMRKHGDLHDFMNWQRPILTDSGGFQVFSLGDIRKITEEGVHFRSPINGEKIFLDPEKSMQIQDSLGSDVVMIFDECTPYPATEDEARKSMQMSLRWAQRSRDEFDRLENPNALFGIIQGGVYEDLRDESLTGLVNIGFDGYAIGGLAVGEPKPDMHRILEHVCPQIPADKPRYLMGVGKPEDLVEGVRRGVDMFDCVMPTRNARNGHLFTSEGVIKIRNARHRDDTAPLDEKCDCYTCKNYSRAYLYHLDRCNEILGARLNTIHNLRYYQMLMEGLRGAIETGTLDAFVSDFYTGLGREVPEVPELVD

SEQ ID NO: 60762 - protein, 374 aa, Shewanella fodinae
  REGION 1..374: note = tr|A0A4R2FER6|A0A4R2FER6_9GAMM Queuine tRNA-ribosyltransferase OS=Shewanella fodinae OX=552357; GN = tgt PE=3 SV=1
MKFELDTTDGRARRGRLIFERGTVETPAFMPVGTYGTVKGMTPEEVRATGADILLGNTFHLWLRPGEAIMRKHGDLHDFMNWPRPILTDSGGFQVFSLGDIRKITEEGVHFRSPINGEKIFLDPEKSMQIQHALGSDIVMIFDECTPYPATPDEARKSMEMSLRWAKRSREEFDRLQNPNSLFGIIQGSIYETLRDESLKGLVDIGFDGYAIGGLAVGEPKADMHRILEHICPQIPADKPRYLMGVGKPEDLVEGVRRGVDMFDCVMPTRNARNGHLFTSDGVIKIRNARHRDDTSPLDPECDCYTCKHYSRAYLHHLDRCNEMLGARLNTIHNLRYYQRLMEGLRGAIETGTLDAFVREFYSRQGREVPEAID

SEQ ID NO: 60763 - protein, 374 aa, Shewanella frigidimarina
  REGION 1..374: note = sp|Q07ZM2|TGT_SHEFN Queuine tRNA-ribosyltransferase; OS = Shewanella frigidimarina (strain NCIMB 400) OX=318167; GN = tgt PE=3 SV=1
MKFELDTTDGRARRGRLIFDRGTVETPAFMPVGTYGTVKGMTPEEVRATGADILLGNTFHLWLRPGEEIMRKHGDLHDFMNWQRPILTDSGGFQVFSLGDIRKITEEGVHFRSPINGEKIFLDPEKSMQIQDSLGSDVVMIFDECTPYPATHDEARKSMQMSLRWAKRSRDEFDRLENPNSLFGIIQGGVFEDLRDESVKGLLDIGFDGYAVGGLAVGEPKADMHRILEHVCPQIPADKPRYLMGVGKPEDLVEGVRRGVDMFDCVMPTRNARNGHLFTSEGVIKIRNARHRDDTATLDPKCDCYTCKNYSRAYLYHLDRCNEILGARLNTIHNLRYYQMLMEGLRGAIETGTLDAFVKEFYTSFGREVPELIV

SEQ ID NO: 60764 - protein, 374 aa, Shewanella frigidimarina; identical to SEQ ID NO: 60763
  REGION 1..374: note = tr|A0A106C3P4|A0A106C3P4_SHEFR Queuine tRNA-ribosyltransferase OS=Shewanella frigidimarina; OX = 56812 GN=tgt PE=3 SV=1

SEQ ID NO: 60765 - protein, 377 aa, Shewanella halifaxensis
  REGION 1..377: note = sp|B0TND4|TGT_SHEHH Queuine tRNA-ribosyltransferase; OS = Shewanella halifaxensis (strain HAW-EB4) OX=458817; GN = tgt PE=3 SV=1
MKFELDTTQGRARRGRLIFERGTVETPAFMPVGTYGTVKGMTPEEVRATGADILLGNTFHLWLRPGEEIMRKHGDLHDFMNWQRPILTDSGGFQVFSLGDIRKITEEGVHFRSPINGEKIFLDPEKSMQIQDSLGSDVVMIFDECTPYPATEDEARKSMQMSLRWAQRSRDEFDRLENPNSLFGIIQGGVYEDLRDESLNGLVDIGFDGYAVGGLAVGEPKEDMHRILEHVCPKIPADKPRYLMGVGKPEDLVEGVRRGVDMFDCVMPTRNARNGHLFTSEGVIKIRNARHRDDTSPLDDKCDCYTCKNYSRAYLYHLDRCNEILGARLNTIHNLRYYQRLMEGLRGAIETGTLDAFVTEFYTSQGREVPEVPELTD

SEQ ID NO: 60766 - protein, 377 aa, Shewanella hanedai
  REGION 1..377: note = tr|A0A553JH39|A0A553JH39_SHEHA Queuine tRNA-ribosyltransferase OS=Shewanella hanedai OX=25 GN=tgt; PE = 3 SV=1
MKFELDTTDGRARRGRLIFDRGTVETPAFMPVGTYGTVKGMTPEEVRETGADILLGNTFHLWLRPGEEIMRKHGDLHDFMNWQRPILTDSGGFQVFSLGDIRKITEAGVHFRSPINGEKIFLDPEKSIQIQNSLGSDVVMIFDECTPYPATEDEARKSMQMSLRWAQRSRDEFDRLENPNSLFGIIQGGVYEDLRDESLNGLVNIGFDGYAVGGLAVGEPKEDMHRILEHVCPQIPNDKPRYLMGVGKPEDLVEGVRRGVDMFDCVMPTRNARNGHLFTSEGVIKIRNARHRDDTATLDDKCDCYTCKNYSRAYLYHLDRCNEILGARLNTIHNLRYYQRLMEGLRGAIETGTLEAFVEEFYTSQGREVPEVPELIV

SEQ ID NO: 60767 - protein, 374 aa, Shewanella livingstonensis; identical to SEQ ID NO: 60763
  REGION 1..374: note = tr|A0A3G8LZ32|A0A3G8LZ32_9GAMM Queuine tRNA-ribosyltransferase OS=Shewanella livingstonensis; OX = 150120 GN=tgt PE=3 SV=1

SEQ ID NO: 60768 - protein, 374 aa, Shewanella loihica
  REGION 1..374: note = sp|A3QFF5|TGT_SHELP Queuine tRNA-ribosyltransferase; OS = Shewanella loihica (strain ATCC BAA-1088 / PV-4); OX = 323850 GN=tgt PE=3 SV=1
MKFELDTTDGRARRGRLVFERGTVETPAFMPVGTYGTVKGMTPEEVRATGADILLGNTFHLWLRPGEEIMRKHGDLHDFMNWQRPILTDSGGFQVFSLGDIRKITEEGVHFRSPINGEKIFMDAEKSMQIQYSLGSDVVMIFDECTPYPATHDEARKSMQMSLRWAQRSRDEFDRLENPNSLFGIIQGSVYEDLRDESLKGLLEIGYDGYAVGGLAVGEPKEDMHRILEHVCPQIPADKPRYLMGVGKPEDLVEGVRRGVDMFDCVMPTRNARNGHLFTSEGVIKIRNARHRDDTSPLDAKCDCYTCKNYSRAYLYHLDRCNEILGARLNTIHNLRYYQMLMEGLRGAIETGTLDAFVEEFYTSQGREVPKLSD

SEQ ID NO: 60769 - protein, 374 aa, unidentified
  source 1..374: note = Shewanella mangrovi
  REGION 1..374: note = tr|A0A094JXI0|A0A094JXI0_9GAMM Queuine tRNA-ribosyltransferase OS=Shewanella mangrovi OX=1515746; GN = tgt PE=3 SV=1
MKFELQTTDGRARRGRLVFERGTVETPAFMPVGTYGTVKGMTPEEVRETGADILLGNTFHLWLRPGEEVMQKHGDLHDFMNWQRPILTDSGGFQVFSLGDIRKITEEGVHFRSPINGEKIFLDPEKSMQIQHSLGSDVVMIFDECTPYPATVDEARKSMQMSLRWAQRSRDEFDRLKNPNALFGIIQGSVYEHLRDESLDGLVNIGFDGYAIGGLAVGEPKEDMHRILEHVCPKIPADKPRYLMGVGKPEDLVEGVRRGVDMFDCVMPTRNARNGHLFTADGVIKIRNARHRDDTSPLEAECDCYTCKHYSRAYLHHLDRCNEMLGARLNTIHNLRYYQRLMQGLRGAIETGTLDAFVRDFYTRQGREVPELLD

SEQ ID NO: 60770 - protein, 374 aa, Shewanella marisflavi
  REGION 1..374: note = tr|A0A4Y6IZT9|A0A4Y6IZT9_9GAMM Queuine tRNA-ribosyltransferase OS=Shewanella marisflavi OX=260364; GN = tgt PE=3 SV=1
MKFELDTTDGRARRGRLVFERGTVETPAFMPVGTYGTVKGMTPEEVRATGADILLGNTFHLWLRPGEEIMRKHGDLHDFMNWQRPILTDSGGFQVFSLGDIRKITEEGVHFRSPINGEKIFMDAEKSMQIQDSLGSDVVMIFDECTPYPATHDEARKSMQMSLRWAQRSRDEFDRLENPNSLFGIIQGSVYEDLRDESLKGLLEIGFDGYAVGGLAVGEPKEDMHRVLEHVCPQIPADKPRYLMGVGKPEDLVEGVRRGVDMFDCVMPTRNARNGHLFTSEGVIKIRNARHRDDTSPLDAKCDCYTCKNYSRAYLYHLDRCNEILGARLNTIHNLRYYQMLMEGLRGAIETGTLDAFVEEFYTSQGREVPKLSD

SEQ ID NO: 60771 - protein, 374 aa, Shewanella morhuae
  REGION 1..374: note = tr|A0A1N6W5X3|A0A1N6W5X3_9GAMM Queuine tRNA-ribosyltransferase OS=Shewanella morhuae OX=365591; GN = tgt PE=3 SV=1
MKFELDTTDGRARRGRLIFERGTVETPAFMPVGTYGTVKGMTPEEVRATGADILLGNTFHLWLRPGEEIMRKHGDLHDFMNWQRPILTDSGGFQVFSLGDIRKITEEGVHFRSPINGEKIFLDPEKSMQIQDALGSDVVMIFDECTPYPATEDEARKSMQMSLRWAKRSRDEFDRLDNPNSLFGIIQGGVYEDLRDESLKGLVDIGFDGYAVGGLAVGEPKADMHRILEHICPQIPADKPRYLMGVGKPEDLVEGVRRGVDMFDCVMPTRNARNGHLFTSEGVIKIRNARHRDDTSPLDAKCDCYTCKNYSRAYLYHLDRCNEILGARLNTMHNLRYYQMLMEGLRGAIETGTLDAFVKDFYTNQGREVPEFVD

SEQ ID NO: 60772 - protein, 374 aa, Shewanella oneidensis
  REGION 1..374: note = sp|Q8ECM3|TGT_SHEON Queuine tRNA-ribosyltransferase; OS = Shewanella oneidensis (strain MR-1) OX=211586 GN=tgt; PE = 3 SV=1
MKFELDTTDGRARRGRLIFDRGTVETPAFMPVGTYGTVKGMTPEEVRATGADILLGNTFHLWLRPGEEIMRKHGDLHDFMNWQRPILTDSGGFQVFSLGDIRKITEEGVHFRSPINGEKIFLDPEKSMQIQHALGSDVVMIFDECTPYPATEDEARKSMQMSLRWAKRSRDEFDRLENPNSLFGIIQGSVYEDLRDESLKGLVEIGFDGYAVGGLAVGEPKEDMHRILEHVCPQILADKPRYLMGVGKPEDLVEGVRRGIDMFDCVMPTRNARNGHLFTSEGVIKIRNARHRDDTSPLDPKCDCYTCKNYSRAYLYHLDRCNEILGARLNTIHNLRYYQMLMEGLRGAIETGTLDAFVKDFYTSQGREVPELVD

SEQ ID NO: 60773 - protein, 374 aa, Shewanella oneidensis; identical to SEQ ID NO: 60755
  REGION 1..374: note = tr|A0A2W5FAZ0|A0A2W5FAZ0_SHEOE Queuine tRNA-ribosyltransferase OS=Shewanella oneidensis OX=70863; GN = tgt PE=3 SV=1

SEQ ID NO: 60774 - protein, 377 aa, Shewanella pealeana
  REGION 1..377: note = sp|A8H2K8|TGT_SHEPA Queuine tRNA-ribosyltransferase; OS = Shewanella pealeana (strain ATCC 700345 / ANG-SQ1); OX = 398579 GN=tgt PE=3 SV=1
MKFELDTTQGRARRGRLIFERGTVETPAFMPVGTYGTVKGMTPEEVRETGADILLGNTFHLWLRPGEEIMRKHGDLHDFMNWQRPILTDSGGFQVFSLGDIRKITEEGVHFRSPINGEKIFLDPEKSMQIQDSLGSDVVMIFDECTPYPATEDEARKSMQMSLRWAQRSRDEFDRLENPNSLFGIIQGGVYEDLRDESLNGLVDIGFDGYAVGGLAVGEPKEDMHRILEHVCPKIPADKPRYLMGVGKPEDLVEGVRRGVDMFDCVMPTRNARNGHLFTSEGVIKIRNARHRDDTSPLDDKCDCYTCKNYSRAYLYHLDRCNEILGARLNTIHNLRYYQRLMEGLRGAIETGTLDAFVTEFYTSQGREVPEVPELSD

SEQ ID NO: 60775 - protein, 377 aa, Shewanella piezotolerans
  REGION 1..377: note = sp|B8CLC5|TGT_SHEPW Queuine tRNA-ribosyltransferase; OS = Shewanella piezotolerans (strain WP3 / JCM 13877); OX = 225849 GN=tgt PE=3 SV=1
MKFELDTTQGRARRGRLVFERGTVETPAFMPVGTYGTVKGMTPEEVRETGADILLGNTFHLWLRPGEEIMRKHGDLHDFMNWQRPILTDSGGFQVFSLGDIRKITEEGVHFRSPINGEKIFLDPEKSMQIQDSLGSDVVMIFDECTPYPATEDEARKSMQMSLRWAQRSRDEFDRLENPNSLFGIIQGGVYEGLRDESLKGLVDIGFDGYAVGGLAVGEPKEDMHRILEHTCPQIPADKPRYLMGVGKPEDLVEGVRRGVDMFDCVMPTRNARNGHLFTSEGVVKIRNARHRDDTSTLDDKCDCYTCKNYSRAYLYHLDRCNEILGARLNTIHNLRYYQRLMEGLRGAIETGTLDDFVTEFYTSQGREVPEVPELTD

SEQ ID NO: 60776 - protein, 374 aa, Shewanella psychrophila
  REGION 1..374: note = tr|A0A1S6HT85|A0A1S6HT85_9GAMM Queuine tRNA-ribosyltransferase OS=Shewanella psychrophila; OX = 225848 GN=tgt PE=3 SV=1
MKFELDTTDGRARRGRLIFERGTVETPAFMPVGTYGTVKGMTPEEVRETGADILLGNTFHLWLRPGEEIMRKHGDLHDFMNWQGPILTDSGGFQVFSLGDIRKITEEGVHFRSPINGEKIFLDPEKSMQIQNSLGSDVVMIFDECTPYPATEDEARKSMQMSLRWAQRSRDEFDKLENPNSLFGIIQGGVYEDLRDESLNGLVDIGFDGYAVGGLAVGEPKEDMHRILEHVCPQIPTDKPRYLMGVGKPEDLVEGVRRGVDMFDCVMPTRNARNGHLFTSEGVIKIRNARHRDDTATLDAKCDCYTCKNYSRAYLYHLDRCNEILGARLNTIHNLRYYQRLMEGLRGAIETGTLDAFVEEFYTSQGREVPKLSD

SEQ ID NO: 60777 - protein, 374 aa, Shewanella putrefaciens; identical to SEQ ID NO: 60751
  REGION 1..374: note = tr|A0A3S4Q7P6|A0A3S4Q7P6_SHEPU Queuine tRNA-ribosyltransferase OS=Shewanella putrefaciens OX=24; GN = tgt PE=3 SV=1

SEQ ID NO: 60778 - protein, 374 aa, Shewanella putrefaciens
  REGION 1..374: note = sp|A4Y8C2|TGT_SHEPC Queuine tRNA-ribosyltransferase; OS = Shewanella putrefaciens (strain CN-32 / ATCC BAA-453); OX = 319224 GN=tgt PE=3 SV=1
MKFELDTTDGRARRGRLIFDRGTVETPAFMPVGTYGTVKGMTPEEVRATGADILLGNTFHLWLRPGEEIMRKHGDLHDFMNWQRPILTDSGGFQVFSLGDIRKITEEGVHFRSPINGEKIFLDPEKSMQIQDALGSDVVMIFDECTPYPATEDEARKSMQMSLRWAKRSRDEFDRLKNPNSLFGIIQGGVYEDLRDESLKGLVEIGFDGYAVGGLAVGEPKADMHRILEHICPQIPADKPRYLMGVGKPEDLVEGVRRGVDMFDCVMPTRNARNGHLFTSEGVIKIRNARHRDDTSPLDTKCDCYTCKNYSRAYLYHLDRCNEILGARLNTIHNLRYYQMLMEGLRGAIETGTLDAFVADFYTSQGREVPELVD

SEQ ID NO: 60779 - protein, 377 aa, Shewanella sediminis
  REGION 1..377: note = sp|A8FXC6|TGT_SHESH Queuine tRNA-ribosyltransferase; OS = Shewanella sediminis (strain HAW-EB3) OX=425104 GN=tgt; PE = 3 SV=1
MKFELDTTQGRARRGRLVFERGTVETPAFMPVGTYGTVKGMTPEEVRATGADILLGNTFHLWLRPGEEIMRKHGDLHDFMNWQRPILTDSGGFQVFSLGDIRKITEEGVHFRSPINGEKIFLDPEKSMQIQNSLGSDVVMIFDECTPYPATEDEARKSMQMSLRWAQRSRDEFDKLENPNSLFGIIQGGVYEDLRDESLKGLVDIGFDGYAVGGLAVGEPKADMHRILEHTCPQIPTDKPRYLMGVGKPEDLVEGVRRGVDMFDCVMPTRNARNGHLFTTEGVIKIRNARHRDDTSPLDDKCDCYTCKNYSRAYLYHLDRCNEILGARLNTIHNLRYYQKLMEGLRGAIETGTLDAFVEEFYTSQGREVPEVPELTD

SEQ ID NO: 60780 - protein, 374 aa, Shewanella sp.; identical to SEQ ID NO: 60755
  REGION 1..374: note = sp|A0KV50|TGT_SHESA Queuine tRNA-ribosyltransferase; OS = Shewanella sp. (strain ANA-3) OX=94122 GN=tgt PE=3 SV=1

SEQ ID NO: 60781 - protein, 374 aa, Shewanella sp.; identical to SEQ ID NO: 60755
  REGION 1..374: note = sp|Q0HKF7|TGT_SHESM Queuine tRNA-ribosyltransferase; OS = Shewanella sp. (strain MR-4) OX=60480 GN=tgt PE=3 SV=1

SEQ ID NO: 60782 - protein, 377 aa, Shewanella violacea
  REGION 1..377: note = tr|D4ZIP6|D4ZIP6_SHEVD Queuine tRNA-ribosyltransferase OS=Shewanella violacea (strain JCM 10179 / CIP 106290 / LMG 19151 / DSS12) OX=637905 GN=tgt; PE = 3 SV=1
MKFELDTTDGRARRGRLIFDRGTVETPAFMPVGTYGTVKSMTPEEVRESGADILLGNTFHLWLRPGEEIMRKHGDLHDFMNWQRPILTDSGGFQVFSLGDIRKITEAGVHFRSPINGEKIFLDPEKSIQIQNSLGSDVVMIFDECTPYPATEDEARKSMQMSLRWAQRSRDEFDKLENPNSLFGIIQGGVYEDLRDESLQGLVDIGFDGYAVGGLAVGEPKEDMHRILEHVCPQIPADKPRYLMGVGKPEDLVEGVRRGVDMFDCVMPTRNARNGHLFTPEGVIKIRNARHRDDTATLDATCDCYTCKNYSRAYLYHLDRCNEILGARLNTIHNLRYYQRLMEGLRGAIETGTLDSFVEEFYANQGREVPEVPKLTD

SEQ ID NO: 60783 - protein, 374 aa, Shewanella xiamenensis; identical to SEQ ID NO: 60755
  REGION 1..374: note = tr|A0A1E3V4L5|A0A1E3V4L5_9GAMM Queuine tRNA-ribosyltransferase OS=Shewanella xiamenensis; OX = 332186 GN=tgt PE=3 SV=1

SEQ ID NO: 60784 - protein, 375 aa, Shewanella xiamenensis
  REGION 1..375: note = tr|A0A073KKH5|A0A073KKH5_9GAMM Queuine tRNA-ribosyltransferase OS=Shewanella xiamenensis; OX = 332186 GN=tgt PE=3 SV=1
MMKFELDTTDGRARRGRLIFERGTVETPAFMPVGTYGTVKGMTPEEVRATGADILLGNTFHLWLRPGEEIMRKHGDLHDFMNWQRPILTDSGGFQVFSLGDIRKITEEGVHFRSPINGEKIFLDPEKSMQIQHALGSDVVMIFDECTPYPATEDEARKSMQMSLRWAKRSRDEFDRLENPNSLFGIIQGSVYEDLRDESLKGLVEIGFDGYAVGGLAVGEPKEDMHRILEHVCPQIPADKPRYLMGVGKPEDLVEGVRRGIDMFDCVMPTRNARNGHLFTSEGVIKIRNARHRDDTSPLDPKCDCYTCKNYSRAYLYHLDRCNEILGARLNTIHNLRYYQMLMEGLRGAIETGTLDAFVKDFYTSQGREVPELVD

SEQ ID NO: 60785 - protein, 375 aa, Shigella boydii; identical to SEQ ID NO: 50999
  REGION 1..375: note = tr|F3WEI6|F3WEI6_9ENTR Queuine tRNA-ribosyltransferase OS=Shigella boydii 5216-82; OX = 766141 GN=tgt PE=3 SV=1

SEQ ID NO: 60786 - protein, 375 aa, Shigella boydii; identical to SEQ ID NO: 50999
  REGION 1..375: note = sp|B2U4K7|TGT_SHIB3 Queuine tRNA-ribosyltransferase; OS = Shigella boydii serotype 18 (strain CDC 3083-94 / BS512) OX=344609 GN=tgt PE=3 SV=1

SEQ ID NO: 60787 - protein, 375 aa, Shigella dysenteriae; identical to SEQ ID NO: 50999
  REGION 1..375: note = sp|Q32JG0|TGT_SHIDS Queuine tRNA-ribosyltransferase; OS = Shigella dysenteriae serotype 1 (strain Sd197); OX = 300267 GN=tgt PE=3 SV=1

SEQ ID NO: 60788 - protein, 375 aa, Shigella dysenteriae; identical to SEQ ID NO: 50999
  REGION 1..375: note = tr|A0A090NLX6|A0A090NLX6_SHIDY Queuine tRNA-ribosyltransferase OS=Shigella dysenteriae WRSd3; OX = 1401327 GN=tgt PE=3 SV=1

SEQ ID NO: 60789 - protein, 375 aa, Shigella flexneri
  REGION 1..375: note = tr|A0A2Y2P6G4|A0A2Y2P6G4_SHIFL Queuine tRNA-ribosyltransferase OS=Shigella flexneri 2a OX=42897; GN = tgt PE=3 SV=1
MKFELDTTDGRARRGRLVFDRGVVETPCFMPVGTYGTVKGMTPEEVEATGAQIILGNTFHLWLRPGQEIMKLHGDLHDFMQWKGPILTDSGGFQVFSLGDIRKITEQGVHFRNPINGDPIFLDPEKSMEIQYDLGSDIVMIFDECTPYPADWDYAKRSMEMSLRWAKRSRERFDSLGNKNALFGIIQGSIYEDLRDISVKGLVDIGFDGYAVGGLAVGEPKADMHRILEHVCPQIPADKPRYLMGVGKPEDLVEGVRRGIDMFDCVMPTRNARNGHLFVTDGVVKIRNAKYKSDTGPLDPECDCYTCRNYSRAYLHHLDRCNEILGARLNTIHNLRYYQRLMAGLRKAIEEGKLESFVTDFYQRQGREVPPLNVD

SEQ ID NO: 60790 - protein, 375 aa, Shigella flexneri; identical to SEQ ID NO: 60789
  REGION 1..375: note = sp|Q0T7I3|TGT_SHIF8 Queuine tRNA-ribosyltransferase; OS = Shigella flexneri serotype 5b (strain 8401) OX=373384; GN = tgt PE=3 SV=1

SEQ ID NO: 60791 - protein, 375 aa, Shigella sonnei; identical to SEQ ID NO: 60789
  REGION 1..375: note = tr|A0A200LH44|A0A200LH44_SHISO Queuine tRNA-ribosyltransferase OS=Shigella sonnei OX=624 GN=tgt; PE = 3 SV=1

SEQ ID NO: 60792 - protein, 375 aa, Shigella sonnei; identical to SEQ ID NO: 50999
  REGION 1..375: note = sp|Q3Z503|TGT_SHISS Queuine tRNA-ribosyltransferase; OS = Shigella sonnei (strain Ss046) OX=300269 GN=tgt PE=3; SV = 1

SEQ ID NO: 60793 - protein, 380 aa, Shigella sp.; identical to SEQ ID NO: 59426
  REGION 1..380: note = tr|A0A1D3DGE9|A0A1D3DGE9_9ENTR Queuine tRNA-ribosyltransferase OS=Shigella sp. FC1655 OX=1898038; GN = tgt PE=3 SV=1

SEQ ID NO: 60794 - protein, 375 aa, Shigella sp.; identical to SEQ ID NO: 50999
  REGION 1..375: note = tr|A0A1E3MZT7|A0A1E3MZT7_9ENTR Queuine tRNA-ribosyltransferase OS=Shigella sp. FC569 OX=1892897; GN = tgt PE=3 SV=1

SEQ ID NO: 60795 - protein, 376 aa, unidentified
  source 1..376: note = Shimia abyssi
  REGION 1..376: note = tr|A0A2P8FFH6|A0A2P8FFH6_9RHOB Queuine tRNA-ribosyltransferase OS=Shimia abyssi OX=1662395 GN=tgt; PE = 3 SV=1
MSSKVSFELKATDGAARTGVINTPRGDICTPAFMPVGTAATVKAMMPESVRATGADILLGNTYHLMLRPTAERIDRLGGLHKFMNWERPILTDSGGFQVMSLAGLRKLTEEGVTFKSHIDGSKHALTPERSMEIQRLLGSDIVMCFDECPALPADRARIAESMRLSMRWAKRSKDAFGDRPGHALFGIMQGGLESDLREESAEALKEIGFDGYAVGGLAVGEGQEAMFDCLDYAPGYLPEDKPRYLMGVGKPDDIVGAVKRGIDMMDCVLPSRSGRTGQVFTRHGVVNIKNARHSDDPRPLDEACNCPACTNYSRAYLHHVFRSNEMISGMLLTWHNLHYFQEIMDGMRTAIAAGSFAAWEADFHAGRASGDIEPV

SEQ ID NO: 60796 - protein, 376 aa, unidentified
  source 1..376: note = Shimia aestuarii
  REGION 1..376: note = tr|A0A1I4LEY8|A0A1I4LEY8_9RHOB Queuine tRNA-ribosyltransferase OS=Shimia aestuarii OX=254406; GN = tgt PE=3 SV=1
MSVKISFELKATDGKARTGVISTPRGEVRTPAFMPVGTAATVKAMMPESVRATGADILLGNTYHLMLRPTAERIDRLGGLHKFMNWERPILTDSGGFQVMSLAGLRKLTEKGVTFKSHIDGSKHELTPERSMEIQRLLGSDIVMCFDECPALPADRDRIADSMRLSMRWAERSREAFGDRPGHALFGIMQGGLEKDLREESAEALKAIGFEGYAVGGLAVGEGQAAMFDCLDYAPGFLPEDKPRYLMGVGKPDDIVGAVKRGIDMMDCVLPSRSGRTGQVFTRHGVVNIKNARHADDPRPLDAACTCPACANYSRAYLHHVFRANEMISGMLLTWHNLHYFQEIMAGMRAAIAAGTFDSWEADFHAQRAQGDIEPL

SEQ ID NO: 60797 - protein, 376 aa, unidentified
  source 1..376: note = Shimia haliotis
  REGION 1..376: note = tr|A0A1I4AI70|A0A1I4AI70_9RHOB Queuine tRNA-ribosyltransferase OS=Shimia haliotis OX=1280847; GN = tgt PE=3 SV=1
MTERFSFALNATDGKARTGVISTPRGDIRTPAFMPVGTAATVKAMMPESVRQTGADILLGNTYHLMLRPTAERIDRLGGLHKFMNWDRPILTDSGGFQVMSLAELRKLTEKGVTFKSHIDGSKHELTPERSMEIQKLLGSDIVMCFDECPALPADRDRIAESMRLSMRWAKRSRDAFGDRPGHALFGIQQGGLEKDFREESAEALKEVGFDGYAVGGLAVGEGQEGMFGCLDYAPDMLPVDKPRYLMGVGKPDDIVGAVKRGIDMMDCVLPSRSGRTGQVFTRHGVVNIKNARHQDDPRPLDEQCSCPACRDYSRAYLHHVFRSNEMISGMLLTWHNLHYFQEIMQGMRDAIAAGTFAVWEADFHAQRAQGDIEPI

SEQ ID NO: 60798 - protein, 376 aa, Shimia isoporae
  REGION 1..376: note = tr|A0A4R1NN46|A0A4R1NN46_9RHOB Queuine tRNA-ribosyltransferase OS=Shimia isoporae OX=647720; GN = tgt PE=3 SV=1
MTERFSFALNATDGKARTGVISTPRGEIRTPAFMPVGTAATVKAMMPESVRQTGADILLGNTYHLMLRPTAERIDRLGGLHKFMNWERPILTDSGGFQVMSLAGLRKLTERGVTFKSHIDGSKHELTPERSMEIQKLLGSDIVMCFDECPALPADRDRIAESMRLSMRWADRSKQAFGDRPGHALFGIQQGGLEQDFREESAEALREIGFDGYAVGGLAVGEGQEAMFGCLDFAPDMLPVDRPRYLMGVGKPDDIVGAVKRGIDMMDCVLPSRSGRTGQVFTRHGVVNIKNARHQDDPRPLDEQCSCPACQNYSRAYLHHVFRSNEMISGMLLTWHNLHYFQEIMQGMRDAIAAGSFDVWETEFHAQRAQGDIEPI

SEQ ID NO: 60799 - protein, 376 aa, Shimia marina
  REGION 1..376: note = tr|A0A0P1FDY9|A0A0P1FDY9_9RHOB Queuine tRNA-ribosyltransferase OS=Shimia marina OX=321267 GN=tgt; PE = 3 SV=1
MSQKFSFSLNATDGKARTGVISTPRGDIRTPAFMPVGTAATVKAMMPESVRATGADILLGNTYHLMLRPTAERIDRLGGLHKFMNWERPILTDSGGFQVMSLAGLRKLTEEGVTFKSHIDGSKHALTPERSMEIQKLLGSDIVMCFDECPALPADRDRIAESMRLSMRWAQRSRDAFGDRPGHALFGIQQGGLEQDFREESAEALKEIGFDGYAVGGLAVGEGQEAMFGCLDYAPDMLPVDKPRYLMGVGKPSDIVGAVKRGIDMMDCVLPSRSGRTGQVFTRRGVVNIKNARHADDPRPLDEACTCPACQNYSRAYLHHVFRSNEMISGMLLTWHNLHYFQQIMQEMRDAIAAGTFDAWEKQFQEMQAQGDIEPL

SEQ ID NO: 60800 - protein, 376 aa, Shimia sp.
  REGION 1..376: note = tr|A0A0M9EK56|A0A0M9EK56_9RHOB Queuine tRNA-ribosyltransferase OS=Shimia sp. SK013 OX=1389006; GN = tgt PE=3 SV=1
MTERFSFALNATDGKARTGVISTPRGEIRTPAFMPVGTAATVKAMMPESVRATGADILLGNTYHLMLRPTAERIDRLGGLHKFMNWDRPILTDSGGFQVMSLAELRKLTEKGVTFKSHIDGSKHELTPERSMEIQKLLGSDIVMCFDECPALPADRARIAESMRLSMRWAARSKQAFGDRPGHALFGIMQGGLEQDFREESAEALKEIGFDGYAVGGLAVGEGQKGMFACLDYAPDMLPVDRPRYLMGVGKPDDIVGAVKRGIDMMDCVLPSRSGRTGQVFTRYGVVNIKNARHQDDPRPLDEHCGCPACASYSRAYLHHVFRSNEMISGMLLTWHNLHYFQELMQGMRDAIAAGTFAAWEAEFHAQRAQGDIERV

SEQ ID NO: 60801 - protein, 375 aa, Shimwellia blattae
  REGION 1..375: note = tr|I2BBT2|I2BBT2_SHIBC Queuine tRNA-ribosyltransferase OS=Shimwellia blattae (strain ATCC 29907 / DSM 4481 / JCM 1650 / NBRC 105725 / CDC 9005-74); OX = 630626 GN=tgt P E=3 SV=1
MKFELDTTDGRARRGRLIFERGVVETPAFMPVGTYGTVKGMTPEEVEATGAQIILGNTFHLWLRPGQEIMKLHGDLHDFMQWKGPILTDSGGFQVFSLGDIRKITEEGVHFRNPINGDPIFLSPEKSMEIQYDLGSDIVMIFDECTPYPADWDYAKRSMEMSLRWAKRSRERFDSLGNKNALFGIIQGSVYEDLRDISVKGLVNIGFDGYAVGGLAVGEPKPDMHRILEHVCPQIPADKPRYLMGVGKPEDLVEGVRRGIDMFDCVMPTRNARNGHLFVTDGVVKIRNAKYKDDTSALDEACDCYTCRNYSRAYLHHLDRCNEILGARLNTIHNLRYYQRLMAGLRKAIEEGKLEHFVADFYTRTGKPVPPLNVN

SEQ ID NO: 60802 - protein, 376 aa, Shinella granuli
  REGION 1..376: note = tr|A0A4R2CJ10|A0A4R2CJ10_9RHIZ Queuine tRNA-ribosyltransferase OS=Shinella granuli OX=323621; GN = tgt PE=3 SV=1
MTETFQFKLLATDGKARRGEVSMPRGTIRTPAFMPVGTVGTVKAMYLDQVRDLGADIILGNTYHLMLRPGPERVARLGGLHELIRWPHPILTDSGGFQVMSLAGLRKLDEKGVTFKSHVDGALHHMSPERSIEIQGLLDSDIQMQLDECVALPASPKEIERAMEMSLRWAERCKTAFGDQPGKAMFGIVQGGDIPHLRVRSAQALAELNLKGYAIGGLAVGEPQEVMLDMIDTTVPHMPTEKPRYLMGVGTPDDMLKSVARGIDMFDCVMPTRSGRHGLAFTRRGRINLRNARHAEDMRPLDEESTCPAARDYSRAYLHHLIRANESLGGMLLTWNNLSYYQDLMAGIRTAIEEGRFADFMAETQENWARGDLAPL

SEQ ID NO: 60803 - protein, 376 aa, Shinella sp.
  REGION 1..376: note = tr|A0A4Q8MLC1|A0A4Q8MLC1_9RHIZ Queuine tRNA-ribosyltransferase OS=Shinella sp. JR1-6 OX=2527671; GN = tgt PE=3 SV=1
MTETFQFKLLATDGKARRGEVSMPRGVIRTPAFMPVGTVGTVKAMYLDQVRELGADIILGNTYHLMLRPGPERVARLGGLHELIRWPHPILTDSGGFQVMSLSGLRKLDEQGVTFKSHVDGALHHMSPERSIEIQGLLDSDIQMQLDECVALPASPKEIERAMEMSLRWAERCKVAFGDQPGKAMFGIVQGGDIPHLRVRSAQALAELNLKGYAIGGLAVGEPQEVMLDMIDTTIPHMPFEKPRYLMGVGTPDDMLKSVARGIDMFDCVMPTRSGRHGLAFTRRGRINLRNARHAEDMRPLDEESTCPAARDYSRAYLHHLIRANESLGGMLLTWNNLSYYQDLMAGIRKAIEEGRFADFMAETQETWARGDLAPL

SEQ ID NO: 60804 - protein, 376 aa, Shinella sp.; identical to SEQ ID NO: 60803
  REGION 1..376: note = tr|A0A021X3W8|A0A021X3W8_9RHIZ Queuine tRNA-ribosyltransferase OS=Shinella sp. DD12 OX=1410620; GN = tgt PE=3 SV=1

SEQ ID NO: 60805 - protein, 378 aa, Shuttleworthia satelles
  REGION 1..378: note = tr|C4GA79|C4GA79_9FIRM Queuine tRNA-ribosyltransferase OS=Shuttleworthia satelles DSM 14600 OX=626523 GN=tgt PE=3 SV=1
MYQLLKTEGRAKRAKFTTVHGTVETPLFMNVGTVGAIKGAVSTEDLKELGCQIQLSNTYHLHVRTGDETIRELGGLHRFMVWDRPILTDSGGFQVFSLAGLRRIREEGVTFRSHIDGHRIFMGPEESMRIQSNLGSTIAMAFDECPDALSERDYVQKSVDRTYRWLVRCKEEMARLNALEGRVNPQQILFGINQGAIFPDIRIEHARRIAELELPGYAIGGLAVGESHEQMYRILDEVVPYLPQDKPTYLMGVGTPQNILEAVERGVDFFDCVYPSRNARHGQLYTHRGKINIKNARYEKDMKPIEEGCRCPTCQTYSRAYIRHLMKANEMLGMRLCVMHNLYFYNHLMEEIRNALDQGRFAEFKRQTLADMDGNERK

SEQ ID NO: 60806 - protein, 381 aa, Shuttleworthia sp.
  REGION 1..381: note = tr|X8GN60|X8GN60_9FIRM Queuine tRNA-ribosyltransferase OS=Shuttleworthia sp. MSX8B; OX = 936574 GN=tgt PE=3 SV=1
MYQLLKTEGRAKRAKFTTVHGTVETPLFMNVGTVGAIKGAVSTEDLKELGCQIQLSNTYHLHVRTGDETIRELGGLHRFMVWDRPILTDSGGFQVFSLAGLRRIREEGVTFRSHIDGHRIFMGPEESMRIQSNLGSTIAMAFDECPDALSERDYVQKSVDRTYRWLVRCKEEMARLNALEGRVNPQQLLFGINQGAIFPDIRIEHARRIAELELPGYAIGGLAVGESHEQMYRILDEVVPYLPQDKPTYLMGVGTPQNILEAVERGVDFFDCVYPSRNARHGQLYTHRGKINIKNARYEKDMKPIEEGCRCPTCQTYSRAYIRHLMKANEMLGMRLCVMHNLYFYNHLMEEIRNALDQGRFAEFKRQTLADMDGNEREVTD

SEQ ID NO: 60807 - protein, 376 aa, unidentified
  source 1..376: note = Siansivirga zeaxanthinifaciens
  REGION 1..376: note = tr|A0A0C5WNV1|A0A0C5WNV1_9FLAO Queuine tRNA-ribosyltransferase OS=Siansivirga zeaxanthinifaciens CC-SAMT-1 OX=1454006 GN=tgt PE=3 SV=1
MQFELLTKDSQSKARAGKITTDHGVIETPIFMPVGTVATVKGVHQRELKEVINPDIILGNTYHLYLRPQTTIIEKAGGLHKFMNWDRNILTDSGGYQVYSLSSNRKIKEEGVKFKSHIDGSYHVFTPENVMEIQRKIGADIIMAFDECTPYPCDYNYAKRSMHMTHRWLDRCINHLEKTPLTYDYNQAFFPIVQGSTYKDLRKQSAEYIANAGAVGNAIGGLSVGEPAEEMYAMTDVVCEILPEDKPRYLMGVGTPINILENIALGVDMFDCVMPTRNARNGMLFTAHGSINIKNKKWEADFSPIDEMGITFVDTEYSKAYLRHLFTVNELLGKQIATIHNLGFYLWLVREARKHILAGDFAAWKNKMVKQMDNRL

SEQ ID NO: 60808 - protein, 428 aa, unidentified
  source 1..428: note = Siccationidurans arizonensis
  REGION 1..428: note = tr|A0A1I5ZX88|A0A1I5ZX88_9BACT Queuine tRNA-ribosyltransferase OS=Siccationidurans arizonensis; OX = 1227077 GN=tgt PE=3 SV=1
MLSLRSTLLDSNDLFSRDKVLRKLRMTDDWIYYYGRNSPHCLTFSCATYFSRMTFDLLAQDPATKARAGRLETAHGAIETPIFMPVGTAGTVKAVSQHTLKEDINAQIILGNTYHLYLRPGLDVLRAAGGLHKFNGWDRPILTDSGGYQVYSLSNTRKIKEEGVKFRSHIDGSQHLFSPEGVMDIQRVIGADIIMAFDECTPWPCEYDYAARSLDMTHRWLQRCIQRFDSTEGLYGYQQTLFPIVQGSTFRDLRIKSAEFIAAQGREGNAIGGLSVGEPAELMYEMTELVCDILPKDKPRYLMGVGTPADILENIALGVDMFDCVMPTRNARNGMLFTTQGIMNVTNKKWATDFSPIDAELGGHASTFYSRAYLRHLFQCQEMLGPQIASAHNLAFYLWLVKEARKQIVAGTFGPWKDRMVKQVMTRL

SEQ ID NO: 60809 - protein, 375 aa, unidentified
  source 1..375: note = Siccibacter turicensis
  REGION 1..375: note = tr|A0A2P8VNX3|A0A2P8VNX3_9ENTR Queuine tRNA-ribosyltransferase OS=Siccibacter turicensis; OX = 357233 GN=tgt PE=3 SV=1
MKFELDTTDGRARRGRLVFERGVVETPAFMPVGTYGTVKGMTPEEVEATGAQIILGNTFHLWLRPGQEIMKLHGDLHDFMQWKGPILTDSGGFQVFSLGDIRKITEAGVHFRNPINGDPIFLDPEKSMEIQYDLGSDIVMIFDECTPYPADWDYAKRSMEMSLRWAQRSRDRFDSLGNKNALFGIIQGSVYEDLRDISVKGLVEIGFDGYAVGGLAVGEPKEDMHRILEHVCPQIPADKPRYLMGVGKPEDLVEGVRRGIDMFDCVMPTRNARNGHLFVTTGVVKIRNAKYKSDTGPLDPECDCYTCRNYSLAYLHHLDRCNEILGARLNTIHNLRFYQRLMAGLRKAIEEGKLEHFVTEFYQRQGRPVPPLNVD

SEQ ID NO: 60810 - protein, 388 aa, unidentified
  source 1..388: note = Siculibacillus lacustris
  REGION 1..388: note = tr|A0A4Q9VTP8|A0A4Q9VTP8_9RHIZ Queuine tRNA-ribosyltransferase OS=Siculibacillus lacustris; OX = 1549641 GN=tgt PE=3 SV=1
MTELTRPDAAPSEAPAFGFALHATDGTARRGTVTTAHGEIRTPAFMPVGTLGTVKCLYPEQVRATGADILLGNTYHLMLRPGAERVAGQGGLHRFMNWPHPILTDSGGFQVMSLAKLRKITEKGVTFQSHVDGSRHELTPERSLEIQGLLGSDIQMQLDECVALPADRREMERAMELSLRWAARSKAAFFGRRGHGLFGIVQGGDDEELRARSAAGLVEIGFDGYALGGLAVGEPQEVMFRVIEATAPALPADRPRYLMGVGTPQDILGGVARGIDMFDCVMPTRAGRHGLAYTRYGKVNLRNARHADDPRPLDAASDCPAARDWSRAYLHHLVRTGEALGAMLLTHVNVAYYQSLMAELRVAIETGRFAEVKAQIEADWARGDIAAL

SEQ ID NO: 60811 - protein, 366 aa, unidentified
  source 1..366: note = Sideroxydans lithotrophicus
  REGION 1..366: note = tr|D5CQ33|D5CQ33_SIDLE Queuine tRNA-ribosyltransferase OS=Sideroxydans lithotrophicus (strain ES-1) OX=580332 GN=tgt PE=3 SV=1
MKFTLHNTSGAARRGTLDLAHGKLETPAFMPVGTYGTVKAMSPLELKDMGAQIVLGNTFHLWLRPGLEVIAAHGGLHRFMGWDGPILTDSGGFQVFSLGELRKITGGGVEFRSPVNGDKCFLSPEESMRIQQVLNSDIVMIFDECTPYPADEQAAGVSMRLSLSWAERSKKAHEGNPNALFGIVQGGMHEHLRDESLTGLKGIGFDGFAIGGLSVGEPKEDMLRILRHTAPQLPVDKPRYLMGVGTPEDLVEAVGNGIDMFDCVMPTRNARNGHLFTRFGDVRIKNAQYRLDTRPLDEQCSCYTCRHFTRAYLHHLHRLNEILGARLNSIHNLHYYQELMRDIRVSIEAGRYAEFQASFRHARAGL

SEQ ID NO: 60812 - protein, 344 aa, unidentified
  source 1..344: note = Sideroxydans sp.
  REGION 1..344: note = tr|A0A1G3INI0|A0A1G3INI0_9PROT Queuine tRNA-ribosyltransferase (Fragment) OS=Sideroxydans sp. RIFOXYD2_FULL_59_7 OX=1802156 GN=A3J99_01745 PE=3 SV=1
MKFTLHNTSGAARRGTLELAHGKVETPAFMPVGTYGTVKAMSPQELKDIDAHIVLGNTFHLWLRPGLEVIAAHGGLHKFMGWDGSILTDSGGFQVFSLGELRKITGGGVEFRSPVNGDKCFLSPEESMRIQRVLNSDIVMIFDECTPYPADEQVAGVSMRLSLDWAKRSKKAHEGNPNALFGIVQGGMHEHLRDESLAGLKEIGFDGFAIGGLSVGEPKEDMLRILRHTAPQLPTDKPRYLMGVGTPEDLVEAVANGVDMFDCVMPTRNARNGHLFTRNGDVRIKNAVHRLDTRSLDPQCTCYTCQNFSRAYLHHLHRLGEILGARLNTIHNLHYYQELMQGIR

SEQ ID NO: 60813 - protein, 372 aa, unidentified
  source 1..372: note = Sideroxydans sp.
  REGION 1..372: note = tr|A0A1G3JF15|A0A1G3JF15_9PROT Queuine tRNA-ribosyltransferase OS=Sideroxydans sp. RIFOXYB12_FULL_59_6 OX=1802155 GN=tgt PE=3 SV=1
MKFTLHNTSGAARRGTLELAHGKVETPAFMPVGTYGTVKAMSPQELKDIDAHIVLGNTFHLWLRPGLEVIAAHGGLHKFMGWDGPILTDSGGFQVFSLGELRKITGGGVEFRSPVNGDKCFLSPEESMRIQKVLNSDIVMIFDECTPYPADEQVAGVSMRLSLDWAKRSKKAHEGNPNALFGIVQGGMHEHLRDESLAGLKEIGFDGFAIGGLSVGEPKEDMLRILRHTAPQLPADKPRYLMGVGTPEDLVEAVANGVDMFDCVMPTRNARNGHLFTRHGDVRIKNAVHRMDTRSLDPQCTCYTCQNFSRAYLHHLHRLGEILGARLNTIHNLHYYQKLMQGIRAAIEAGRYDEFQAAFHAARAGGGALPGN

SEQ ID NO: 60814 - protein, 376 aa, unidentified
  source 1..376: note = Silicibacter sp.
  REGION 1..376: note = tr|C9D2T0|C9D2T0_9RHOB Queuine tRNA-ribosyltransferase OS=Silicibacter sp. TrichCH4B; OX = 644076 GN=tgt PE=3 SV=1
MAELFNFEMTATDGKARTGVIHTPRGDIRTPAFMPVGTAATVKAMMPESVRATGADILLGNTYHLMLRPTAERIDRLGGLHKFMNWDRPILTDSGGFQVMSLAGLRKLTEKGVTFKSHIDGSRHELTPERSMEIQALLGSDIVMCFDECPALPADRDRIAESMRLSMRWAERSREAFGDRPGHALFGIQQGGLEKDFREESAEALTKIGFDGYAVGGLAVGEGQEAMFGCLDYAPDMLPVDKPRYLMGVGKPDDIVGAVARGIDMMDCVLPSRSGRTGQAFTRHGVVNIKNARHQDDPRPLDENCSCPACSNYSRAYLHHVFRSNEMISGMLLTWHNLHYFQDIMAGMRESIAAGTFDAWQKTFHNMRAQGDIEPL

SEQ ID NO: 60815 - protein, 376 aa, unidentified
  source 1..376: note = Silicimonas algicola
  REGION 1..376: note = tr|A0A316GB07|A0A316GB07_9RHOB Queuine tRNA-ribosyltransferase OS=Silicimonas algicola OX=1826607; GN = tgt PE=3 SV=1
MTERFSFSLAATDGKARTGTIRTPRGEIRTPAFMPVGTAATVKAMLPESVAATGADILLGNTYHLMLRPGAERVARLGGLHRFMNWDRPILTDSGGFQVMSLAGLRKLTEEGVTFTSHIDGSKHELTPERSMEIQRLLGSDIVMCFDECPALPADAAAVEASMQLSMRWAERSKIAFGDRPGHALLGIQQGGVTRELRAESAEALKAIGFDGYAVGGLAVGEGQEAMFGVLDYAPDMLPEDRPRYLMGVGKPDDIVGAVKRGIDMMDCVLPSRSGRTGQAFTRRGVVNIKNARHADDPRPLDEACGCPACQGYSRAYLHHVFRAGEMISGMLLTWHNLRYYQDLMAAMRAAIAAGTFAEFETTFHADRAEGDIPPL

SEQ ID NO: 60816 - protein, 369 aa, unidentified
  source 1..369: note = Silvanigrella aquatica
  REGION 1..369: note = tr|A0A1L4D439|A0A1L4D439_9PROT Queuine tRNA-ribosyltransferase OS=Silvanigrella aquatica; OX = 1915309 GN=tgt PE=3 SV=1
MALKFDYLAKDPHSEARRGRIHTAHGIIETPVFMPVGTFGSVRTLDHTELEDIGVQIILGNTYHLYLRPGPEILKDLGGYHKLISWNKPILTDSGGFQIFSLPHQRVISEKGVTFKSYIDQSYKRLTPESDIAFQEVIGSDIMMVLDVCVPSTSSYDVCVEAMNRTHRWAKRCKQAKTREENSLFGIVQGAIFENLRTESAEALTSLNFDGYAIGGLAVGESDEERDHFTRFSAKLLPENKPRYLMGVGTPHDLVRSVLAGVDMFDCIIPTNHARQGVAYTFAGKVKLRRVFHAREDKPIDESCACYVCKRFSRAYLHQLTKCEEPTGWKLISYHNTWFYERLMEKVRETIVDGTFSTFAKNFLENAEE

SEQ ID NO: 60817 - protein, 424 aa, unidentified
  source 1..424: note = Silvanigrella aquatica
  REGION 1..424: note = tr|A0A1L4CYS4|A0A1L4CYS4_9PROT Queuine tRNA-ribosyltransferase OS=Silvanigrella aquatica; OX = 1915309 GN=tgt PE=3 SV=1
MLSNRNLIEFTKIKSLQLPLDFHKGKYDTENLKAHDLENEFSLLIEKGIARENEKSLLEQVGPRITKLKFGNVELETPIFMPVGTVGSVKSLSPEDVYSIGYRVILGNTYHLNLRPGMELMRDFGGLHEFMRWPGAILTDSGGFQVMSLAKIRKITEEGATFANHINGAKITLTPENVVEIQEDIDSDIQMVLDECTPYPATHAEALASMERSMRWAKRARQARKKLNRAQFGIVQGGMYGDLRVKSIKQLIENDFEGYAIGGLSVGESKREMRRLLSATIPWMPENKPRYLMGVGAPDDLIDAILLGIDMFDCVMPTRNARNGSVFVRSSAAPTGKIQIKNSAHKSSREPLDSQCLCYTCKNYSRAYLRHLFVAEELLVFRLMSIHNLQFLYDLTHEMREAIRSGELFHSLPDIRRKYAPGSV

SEQ ID NO: 60818 - protein, 369 aa, unidentified
  source 1..369: note = Silvanigrellales bacterium
  REGION 1..369: note = tr|A0A4V0P2V5|A0A4V0P2V5_9PROT Queuine tRNA-ribosyltransferase OS=Silvanigrellales bacterium RF1110005 OX=2493639 GN=tgt PE=3 SV=1
MPLKFDYIAKDPHSEARRGRVHTAHGTIETPVFMSVGTFGAVRTLDHTEIEEIGVQIILGNTYHLYLRPGPEILKDVGGYHKLIGWNKPILTDSGGFQIFSLPHQRVIGEKGVTFKSYIDQSYKRLTPESDIAFQETIGSDIMMVLDVCVPSTSPYEVCVDAMKRTHRWAKRCKLAKTRDENSLFGIVQGAIHENLRKESAETLVDLNFDGYAVGGLAVGETDEEREHFTNFTARLLPTQKPRYLMGVGTPHDLVRSVRAGIDMFDCIIPTNHARQGVAYTFSGKVKMRRVFHAREQSPIDPSCACYVCKRFTRAYLHQLTKCEEPTGWKLIAYHNTWFYERLMEKIRDTIVAGTFSQFAKDFLSHVEE

SEQ ID NO: 60819 - protein, 424 aa, unidentified
  source 1..424: note = Silvanigrellales bacterium
  REGION 1..424: note = tr|A0A4P2VI33|A0A4P2VI33_9PROT Queuine tRNA-ribosyltransferase OS=Silvanigrellales bacterium RF1110005 OX=2493639 GN=tgt PE=3 SV=1
MLANRNLIEFSLLKSIELDETFKSGAYDTVDLKAQDLENEFSVAVEKGAAQEEEKSLVQKVGPRITKLKFGNIELETPIFMPVGTVGSVKSLSPEDVYSIGYRLILGNTYHLNLRPGMELMREFGGLHEFMRWPGAILTDSGGFQVMSLAKIRKLNEDGATFANHINGAKITLTPENVVHIQEDIDSDIQMVLDECTSYPATHAEAKASMERSMRWAQRARTARKKQNRAQFGIVQGGMYADLRVKSIKELKKNDFEGYAIGGLSVGESKREMRRLLSATIPFMPHEKPRYLMGVGAPDDIIDSVLLGIDMFDCVMPTRNARNGSVFVRSKSAANGKIQIKNAAHKTNKGPLDTECSCYTCKNYSRAYLRHLFVAEELLVFRLLSIHNLQFLYDLTEEMREAIRQGKIFAELPHIRKKYAPGSV

SEQ ID NO: 60820 - protein, 375 aa, Simiduia agarivorans
  REGION 1..375: note = tr|K4KJ22|K4KJ22_SIMAS Queuine tRNA-ribosyltransferase OS=Simiduia agarivorans (strain DSM 21679 / JCM 13881 / BCRC 17597 / SA1) OX=1117647; GN = tgt PE=3 SV=1
MQFELDTTDGRARRGRLKFPRGTVETPAFMPVGTYGTVKGMLPRDIEDIGAEIILGNTFHLMLRPGTEVVKAHGDLHDFIQWQGPILTDSGGFQVFSLGKMRKITEEGVTFKSPINGSKVELNPEIAMQVQRDLGSDIVMIFDECTPYPASEKQARDSMELSLRWARRSKTAHGDNPSALFGIVQGGMYTDLRSESLKGLTDIGFDGYAIGGLSVGEPKEDMIRVLNHLAPEMPADKPRYLMGVGKPEDIVEAVRRGVDMFDCVMPTRNARNGHLFTTAGVIKIRNAVHRHDTGPLDPGCDCYTCTHFSRAYLHHLDKCNEILGAELNTIHNLRFYQRVMAELRDAIANHRLEDYVAEFYRRQGLPVPPGPDDAV

SEQ ID NO: 60821 - protein, 376 aa, Simkania negevensis
  REGION 1..376: note = tr|F8L752|F8L752_SIMNZ Queuine tRNA-ribosyltransferase OS=Simkania negevensis (strain ATCC VR-1471 / Z) OX=331113 GN=tgt PE=3 SV=1
MIPFTFEILHQSKKSRARVGRIHTPHGIIDTPNFVAVGTNGTLKALDNEMVKTIGLQLMFCNTYHLLLQPGTSVIREAGGIHKFINRNLPIITDSGGFQVFSLAYGGVADELKSKGTKKSEGSVLKITSDGVLFRSYRDGQKVLLTPETSVQAQKALGADIIIPFDELPPYHICPKALSRSLDRTHEWEKRSLEEHLKNPQGQAMYAVVHGGVDNKLREKSCKFLADLPFDGFAIGGSMGKTKEEMVTMLSATLPKLPETAPNHLLGIADLESLEACVPLGIDTFDSSYPTKAARHGTLLTHEGPLKITRGIFKNKFTSPVKGCSCYTCEHYTLAYLHHLFKAKEISGLTLASVHNLHFMVELMSQYKNKILNDII

SEQ ID NO: 60822 - protein, 371 aa, Simonsiella muelleri
  REGION 1..371: note = tr|V9H665|V9H665_9NEIS Queuine tRNA-ribosyltransferase OS=Simonsiella muelleri ATCC 29453; OX = 641147 GN=tgt PE=3 SV=1
MLNFTLHQKDGYARRGTLELNHGKIETPVFMPVGTYGSVKAMTPHNLHDIKAQIILGNTYHLWLRPGLEVIEQFGGLHDFIGWNKPILTDSGGFQVFSLSDMRKLTEDGCTFKSPINGDKLFLSPEISMKIQTVLNSDIVMQLDECTPGEATHEQARKSLQMSLRWAERSKKAFEDLNNPNALFGIIQGAMYEDLREESLRGLEDIGFKGIAIGGLSVGEPKPEMYRMLRAIAPMLPESKPHYLMGVGTPEDLVYGVAHGVDMFDCVMPTRNARNGWLFTRFGDLKIRNAKHRFDKRPLDESCTCYACQHFSRAYLHHLDKVGEILGAQLCTIHNLHFYQVIMAEMREAIEQGKFADWQAQFHENRARGVD

SEQ ID NO: 60823 - protein, 390 aa, Simplicispira metamorpha
  REGION 1..390: note = tr|A0A4R2N663|A0A4R2N663_9BURK Queuine tRNA-ribosyltransferase OS=Simplicispira metamorpha; OX = 80881 GN=tgt PE=3 SV=1
MLQFDILTTDASSHARRGQLTLNHGVVQTPIFMPVGTYGTVKGVMPQSLHDMGAQIILGNTFHLWMRPGLDVMQSFGGLHGFEQWHKPILTDSGGFQVWSLGAMRKITEEGVTFASPVNGDKLFMSPEVSMQIQTTLNSDIVMQLDECTPYETKGHLTTEAEARKSMEMSLRWAVRSKNEIERLQNPNALFGIVQGGMYLNLREESLQRLVEMDFPGYAIGGVSVGEPKDEMLSIMAHTPHRLPAHKPRYLMGVGTPEDLVEGVACGVDMFDCVMPTRNARNGTLFTRFGDLKIRNARHKTDHQPLDTTCTCHACAGAAGVSWDEGGRGGFSRAYLHHLDRCGEMLGPMLTTIHNLHYYLNLMREVREALEAGRFSAFRAQFKADRARGV

SEQ ID NO: 60824 - protein, 390 aa, Simplicispira sp.
  REGION 1..390: note = tr|A0A2U1C846|A0A2U1C846_9BURK Queuine tRNA-ribosyltransferase OS=Simplicispira sp. 125; OX = 2135643 GN=tgt PE=3 SV=1
MLQFQILTTDPSSHARRATLTLNHGVVQTPIFMPVGTYGTVKGVMPQSLHDMGAQIILGNTFHLWMRPGQDVMQSFGGLHAFEQWHKPILTDSGGFQVWSLGDMRKITEEGVTFASPVNGDKLFMSPEVSMQIQTTLNSDIVMQLDECTPYETKGHLTTEAEARKSMEMSRRWALRSKVEFERLGNPNALFGIVQGGMFEHLRQESLEALVEMDFPGYAIGGVSVGEPKEQMLQIMAHTPHRLPAHKPRYLMGVGTPEDLVQGVADGVDMFDCVMPTRNARNGTLFTRFGDLKIRNARHKTDHQPLDTSCTCHACAGASGVAWDAGGRGGFSRAYLHHLDRCGEMLGPMLTTVHNLHYYLNLMREVREALDAGRFGEFRAQFKADRARGV

SEQ ID NO: 60825 - protein, 390 aa, Simplicispira sp.
  REGION 1..390: note = tr|A0A398C8M0|A0A398C8M0_9BURK Queuine tRNA-ribosyltransferase OS=Simplicispira sp. NY-02; OX = 2315688 GN=tgt PE=3 SV=1
MLKFELLTTDPTSHARRAAMTLNHGVVQTPVFMPVGTYGTVKGVMPQSLLDMGAQIILGNTFHLWMRPGQDVMQSFGGLHAFEQWHKPILTDSGGFQVWSLGAMRKITEEGVHFASPVNGDKLFMSPEVSMQIQTTLNSDIVMQLDECTPYETKGQLTTEREARQSMEMSLRWARRSQEEFARLQSPNALFGIVQGGMFTNLREESLARLVEMDFPGYAIGGVSVGEPKEQMLHIMAHTPHQLPQHKPRYLMGVGTPEDLVQGVADGVDMFDCVMPTRNARNGTLFTRFGDLKIRNARHKTDHQPLDTTCTCHACAGQSGVAWDQGGRGGFSRAYLHHLDRCGEMLGPMLTTIHNLHYYLNLMHEVRNALDAGQFAQFRAQFKADRARGV

SEQ ID NO: 60826 - protein, 390 aa, unidentified
  source 1..390: note = Simplicispira suum
  REGION 1..390: note = tr|A0A2S0MYK2|A0A2S0MYK2_9BURK Queuine tRNA-ribosyltransferase OS=Simplicispira suum OX=2109915; GN = tgt PE=3 SV=1
MLKFELLTTDPTSHARRAAMTLNHGVVQTPVFMPVGTYGTVKGVMPQSLHDMGAQIILGNTFHLWMRPGQDVMQSFGGLHAFEQWHKPILTDSGGFQVWSLGAMRKITEEGVHFASPVNGDKLFMSPEVSMQIQTTLNSDIAMQLDECTPYETKGHITTESEARQSMEMSLRWARRSQDAFARLQNPNALFGIVQGGMFENLRQESLDALVAMDFPGYAIGGVSVGEPKEQMLQIMAHTPHRLPAHKPRYLMGVGTPEDLVQGVADGVDMFDCVMPTRNARNGTLFTRFGDLKIRNARHKTDHQPLDTTCTCHACAGSSGVAWDAGGRGGFSRAYLHHLDRCGEMLGPMLTTIHNLHYYLNLMREVRSALDAGQFAQFRAQFKADRARGV

SEQ ID NO: 60827 - protein, 371 aa, Singulisphaera acidiphila
  REGION 1..371: note = tr|L0DK50|L0DK50_SINAD Queuine tRNA-ribosyltransferase OS=Singulisphaera acidiphila (strain ATCC BAA-1392 / DSM 18658 / VKM B-2454 / MOB10); OX = 886293 GN=tgt PE=3 SV= 1
MSRPVEFQVLHRDPASLARRGRLSTPHGPVETPAFMPVGTQATVKGLTPDQLRATGTSMLLANTYHLALRPGEEVVAQLGGLHRFMGWDGPILTDSGGFQVFSLAARSKITEAGVAFRSHIDGRLLELSPESAVRIQEALGADVAMCFDECPALPASKETIASAVGRTVRWARRCKDAHTRSDQALFGIVQGGSHADLRGECAEALVALDFDGYAVGGVSVGESREQVREALRVTTPWLPEDRPRYLMGVGRPQDILDAVATGIDMFDCVLPTRNGRNATCLTGSGQVKLRNAAHRLDPRPIEEGCDCFACQSFSRAYVRHLFMAKEMLGPILASIHNVAYLHRLTRQIREAITEERFVQFRLEVLEALGP

SEQ ID NO: 60828 - protein, 371 aa, Singulisphaera sp.
  REGION 1..371: note = tr|A0A1N6F7U0|A0A1N6F7U0_9BACT Queuine tRNA-ribosyltransferase OS=Singulisphaera sp. GP187; OX = 1882752 GN=tgt PE=3 SV=1
MSRPVEFQVLHRDPASLARRGRLVTPHGSVETPAFMPVGTQATVKGLTPDQLRATGTSMLLANTYHLALRPGEAVVAQLGGLHRFMGWDGPILTDSGGFQVFSLAARSKITEAGVAFRSHIDGRLLELSPESAVKIQEALGADVAMCFDECPALPASKETIASAVGRTVRWARRCKEAHTRRDQALFGIVQGGSHADLRGECAEALVALDFDGYAVGGVSVGESREQVREALRVTTPWLPEDRPRYLMGVGRPQDILDAVATGIDMFDCVLPTRNGRNATCLTGSGQVKLRNAAHRLDPGPVEEGCDCFACRNFSRAYLRHLFMAKEMLGPILASIHNVAYLHRLTRQIREAITEERFVQFRLEVLEALGP

SEQ ID NO: 60829 - protein, 377 aa, unidentified
  source 1..377: note = Sinimarinibacterium flocculans
  REGION 1..377: note = tr|A0A318E971|A0A318E971_9GAMM Queuine tRNA-ribosyltransferase OS=Sinimarinibacterium flocculans; OX = 985250 GN=tgt PE=3 SV=1
MKFELLATSGAARRGRLLFERGTVETPAFMPVGTYGTVKAMTPEELRASGAQIVLGNTFHLMLRPGAETMRALGGLHRFMHWDGPILTDSGGFQVWSLSGLRKITEEGVKFASPVNGDRIFLTPERAIEVQHALGSDVVMQFDECTPYPATAKQARQSMELSARWAARCKTAHGANHGALFGIVQGGMHADLRRESLARLREIGFDGYAVGGLSVGEPEAERLQVLDAIGPELPSDHPHYLMGVGTPRDLVQAVARGIDMFDCVMPTRNARNGHLFTSEGVIKIRNAVHREDPRPLDPACDCPTCTNYSRAYLHHLDRCNEILGSRLNTIHNLHYYQNHMRRIREAIEQGRFEAFAEAFLAGPAGAPTRSRVAASGA

SEQ ID NO: 60830 - protein, 378 aa, unidentified
  source 1..378: note = Sinimarinibacterium sp.
  REGION 1..378: note = tr|A0A4U0GQF9|A0A4U0GQF9_9GAMM Queuine tRNA-ribosyltransferase OS=Sinimarinibacterium sp. CAU 1509 OX=2562283 GN=tgt PE=3 SV=1
MKFELLSTSAAARRGRLIFDRGSVETPAFMPVGTYGTVKAMTPEELRGVGAQIILGNTFHLMLRPGEQIIRELGGLHRFMHWDGPILTDSGGFQVWSLSELRKITEEGVKFASPINGDRIFLTPERAIEVQHALGSDIVMQFDECTPYPATEKQARKSMELSARWGARCKQAHADSPHALFGIVQGGMYPELRSESLQRLTEIGFHGYAVGGLSVGEPEVERLTVLDAIGPQLPAAHPHYLMGVGTPRDLVQAVARGIDMFDCVMPTRNARNGHLFTSQGVIKIRNAAHKADPNPLDPECDCYTCSHYSRAYLHHLDRCNEILGSRLNTIHNLRYYQNHMRRIREAIEEDRFETFAKAFLDSPAGAPSRSKQAPVQLA

SEQ ID NO: 60831 - protein, 376 aa, unidentified
  source 1..376: note = Sinirhodobacter ferrireducens
  REGION 1..376: note = tr|A0A443LVE6|A0A443LVE6_9RHOB Queuine tRNA-ribosyltransferase OS=Sinirhodobacter ferrireducens; OX = 1215032 GN=tgt PE=3 SV=1
MTEKFSFTLHATDGKARTGVIHTPRGEIRTPAFMPVGTAGTVKAMMPESVAATGADILLGNTYHLMLRPTAERIDRLGGLHRFMNWPKPILTDSGGFQVMSLSGLRKLTEEGVTFASHVDGSKHFLSPERSMEIQRLLGSDIVMAFDECPALPADETRVAESMRLSMRWAERSRDAFGDRPGHALFGIMQGGVTPELRAESAEKLTEIGFDGYAVGGLAVGEGQEAMFGVLDYAPGFLPEDRPRYLMGVGKPDDIVGAVERGIDMMDCVLPSRSGRTGQAWTRRGQVNIKNARHMDDPRPLDEHCSCPACRNYSRAYLHHVFRAGEMISGMLLTWHNLHYYQELMQGLRDAIAAGRLSAFVAEFHALRAEGDIEPL

SEQ ID NO: 60832 - protein, 376 aa, unidentified
  source 1..376: note = Sinirhodobacter hungdaonensis
  REGION 1..376: note = tr|A0A443LXK8|A0A443LXK8_9RHOB Queuine tRNA-ribosyltransferase OS=Sinirhodobacter hungdaonensis; OX = 2501515 GN=tgt PE=3 SV=1
MTEKFSFTLHATDGKARTGVISTPRGEIRTPAFMPVGTAGTVKAMMPESVAATGADILLGNTYHLMLRPTAERIDRLGGLHRFMNWPKPILTDSGGFQVMSLSGLRKLTEEGVTFASHVDGSKHFLSPERSMEIQRLLGSDIVMAFDECPALPADETRVAESMRLSMRWAKRSRDAFGDRPGHALFGIMQGGVTPELRAESAEKLTEIGFDGYAVGGLAVGEGQEAMFGVLDYAPGFLPEDRPRYLMGVGKPDDIVGAVERGIDMMDCVLPSRSGRTGQAWTRRGQVNIKNARHMDDPRPLDEHCTCPACRNYSRAYLHHVFRAGEMISGMLLTWHNLQYYQELMQGLRDAIAAGRLSAFVAEFHALRAEGDIEPL

SEQ ID NO: 60833 - protein, 376 aa, unidentified
  source 1..376: note = Sinirhodobacter populi
  REGION 1..376: note = tr|A0A443KAQ9|A0A443KAQ9_9RHOB Queuine tRNA-ribosyltransferase OS=Sinirhodobacter populi; OX = 2306993 GN=tgt PE=3 SV=1
MTDRFRFTLNATDGKARTGVIHTPRGEIRTPAFMPVGTAATVKAMMPESVAATGADILLGNTYHLMLRPTAERIDRLGGLHRFMNWEKPILTDSGGFQVMSLADLRKMSEDGVTFRSHVDGSKHFLSPERSMEIQRLLGSDIVMAFDECPALPATDEVVAKSMRLSMRWAQRSRDAFGDRPGHALFGIMQGGVNRELRAESAEALKAIGFEGYALGGLAVGEGQEAMFGVLDYAPGFLPEDRPRYLMGVGKPDDIVGAVERGIDMMDCVLPSRSGRTGQAWTRRGQVNIKNARHMDDPRPLDEDCTCPACRNYSRAYLHHVFKAQEIISAMLLTWHNLQYYQDLMQGLRDAIAAGRLAEFTAAFHAKRAEGDIEPL

SEQ ID NO: 60834 - protein, 376 aa, unidentified
  source 1..376: note = Sinirhodobacter populi
  REGION 1..376: note = tr|A0A443KMZ9|A0A443KMZ9_9RHOB Queuine tRNA-ribosyltransferase OS=Sinirhodobacter populi; OX = 2306993 GN=tgt PE=3 SV=1
MTDRFRFTLNATDGKARTGVIHTPRGDIRTPAFMPVGTAATVKAMMPESVASTGADILLGNTYHLMLRPTAERIDRLGGLHRFMNWEKPILTDSGGFQVMSLADLRKMSEDGVTFRSHVDGSKHFLSPERSMEIQRLLGSDIVMAFDECPALPATDEVVAKSMRLSMRWAQRSRDAFGDRPGHALFGIMQGGVNRELRAESAEALKAIGFEGYALGGLAVGEGQEAMFGVLDYAPGFLPEDRPRYLMGVGKPDDIVGAVERGIDMMDCVLPSRSGRTGQAWTRRGQVNIKNARHMDDPRPLDADCTCPACRNYSRAYLHHVFKAQEIISAMLLTWHNLQYYQDLMQGLRDAIAAGRLAEFTAAFHTKRAEGDIEPL

SEQ ID NO: 60835 - protein, 379 aa, Sinobaca qinghaiensis
  REGION 1..379: note = tr|A0A419V3Q0|A0A419V3Q0_9BACL Queuine tRNA-ribosyltransferase OS=Sinobaca qinghaiensis OX=342944; GN = tgt PE=3 SV=1
MSAIRYELIKTCKQSGARLGKLHTPHGVIETPIFMPVGTMATVKTISPDELEEMHAQIILSNTYHLWIRPGEDIIKEAGGLHKFMNWNKPILTDSGGFQVFSLSKLRDIKEEGVHFRNHISGEKLFLSPEKAMQIQNDLGPDIMMAFDECPPHPASEEYMKASVERTSRWAERCLGAHANPDTQGLFGIVQGGEYEHFRKQSAKELISLDFPGYAIGGLSVGEPKEIMNRVLEYTTPLLPDNKPRYLMGVGSADSLIDGAIRGIDMFDCVLPTRIARNGTCMTSSGRLVVRNAKFARDFRPIDEKCDCHVCKNYSRAYIRHLVKCNESFGFRLTSYHNLYFLLNLMEQVRQAIREDRLLDFREEYFEAYGFNKENAKNF

SEQ ID NO: 60836 - protein, 395 aa, unidentified
  source 1..395: note = Sinobacteraceae bacterium
  REGION 1..395: note = tr|A0A2T5MII5|A0A2T5MII5_9GAMM Queuine tRNA-ribosyltransferase OS=Sinobacteraceae bacterium GT1R17 OX=2029166 GN=tgt PE=3 SV=1
MKFELIKQDGHARRGRLVFERGTVETPAFMPVGTYGTVKAMKPEEVRDTGAHILLGNTFHLMMRPGEETIRGLGGLHRFMNWKGPILTDSGGFQVWSLSGLRKITEEGVKFASPVNGDRIMLTPERSIEVQHALGSDIIMQFDECTPYPATDKQARKSMEMSARWAARCKTAHAALPQETRGGGGEERSALFGIVQGGMYEDLRRESLQKLVDVGFDGYALGGLSVGETEEERLHVLDAIGHTLPADRPHYLMGVGTPRDLVQAVGRGIDMFDCVMPTRNARNGHLFTHEGVIKIRNSAHKNDSRPLDEKCDCYTCKNYSRAYLHHLDKCNEILGSQLNTLHNLHHYQNVMQRIRAAIEANDFQRFSADFLAGEGAERGAHKIAKKVAGPLDSAI

SEQ ID NO: 60837 - protein, 381 aa, unidentified
  source 1..381: note = Sinobacteraceae bacterium
  REGION 1..381: note = tr|A0A522ZMJ3|A0A522ZMJ3_9GAMM Queuine tRNA-ribosyltransferase OS=Sinobacteraceae bacterium; OX = 1969813 GN=tgt PE=3 SV=1
MPIPELLSAARYECVATDGDARRGRVHLPRGIIDTPQFMPVGTYGSVKGITPEELEAAGAQIILGNTFHLMLRPGSEIMQRLGGLHRFMHWERPILTDSGGFQVWSLAKLRKLTEEGVTFASPIDGSRVFLSPERATEVQHALGSDIIMQFDECTAWPATEEVAADSMRRSARWAQRCKDAHAGHPGALFGIVQGGTWPELRRESVQRLTEIDFPGYAIGGLAVGEPAPARLAMLETVNALLPTDRPRYLMGVGTPRDLVEGVARGVDLFDCVMPTRNARNGHLFTSQGVVRIRNARYRDDDTALDPACSCPTCQHYSRAYLHHLDRCNEMLGARLNTLHNLHYYLGLMHAVRKAIEAGQFAAFARNFLLGPQGAPKKPSS

SEQ ID NO: 60838 - protein, 402 aa, unidentified
  source 1..402: note = Sinobacterium caligoides
  REGION 1..402: note = tr|A0A3N2DZC2|A0A3N2DZC2_9GAMM Queuine tRNA-ribosyltransferase OS=Sinobacterium caligoides; OX = 933926 GN=tgt PE=3 SV=1
MSCQNDEKSCTCVEHRDSFEGFHTEGRDECFMSFEVDHQRGLSRRGRLKFPRGTVETPAFMPVGTYGTVKGMMARDIEEIGAEIILGNTFHLMLRPGTEIIAEHGDLHDFTGWNKPILTDSGGFQVFSLGKMRKITEEGVTFRSPVNGDKVVLTPERSMEVQRALGSDVVMIFDECTPHPATHKEAKDSMEMSMRWAKRSRTAHGDSPSALFGIIQGGMYEDLRLQSIKGLCEIGFDGLAIGGLSVGEPKEEMFKVLDFLAHKMPADKPRYLMGVGTPSDLVEGVRKGVDMFDCVMPTRNARNGHIFTSQGVLKIRNAKHKHSTEPLDPECDCYTCKHHTRGYLHHLDKCKEILGSTLNTIHNLRYYQKVMADIRQALDDDRFEEYRAEFYAAQGIDVPDYV

SEQ ID NO: 60839 - protein, 397 aa, unidentified
  source 1..397: note = Sinomicrobium oceani
  REGION 1..397: note = tr|A0A1K1LX92|A0A1K1LX92_9FLAO Queuine tRNA-ribosyltransferase OS=Sinomicrobium oceani OX=1150368; GN = tgt PE=3 SV=1
MVRVIPLLHYRYLCRRIDTVFMKFDLEAKDAASKARAGKITLGHGIVETPIFMPVGTVASVKGVHQRELKEDINPDIILGNTYHLYLRPQTDILEKAGGLHKFMGWDRNILTDSGGYQVYSLSANRKIKEEGVKFKSHIDGSYHFFSPERAMEIQRSIGADIIMAFDECTPYPCDYRYAQRSMHMTHRWLDRCVEHLKKVPEKYDYPQTLFPIVQGSVYKDLRKQSAEYIAGAGAAGNAIGGLSVGEPAEEMYAMTEVVCDILPEDKPRYLMGVGTPVNILENIALGVDMFDCVMPTRNARNGMLFTANGIINIKNKKWEDDFSPVDEMGITFVDTQYSKAYLRHLFAANEYLGKQIATIHNLGFYLWLVREARKHILAGDFYRWKNEMVPRLGQRL

SEQ ID NO: 60840 - protein, 376 aa, unidentified
  source 1..376: note = Sinomicrobium pectinilyticum
  REGION 1..376: note = tr|A0A3N0ET93|A0A3N0ET93_9FLAO Queuine tRNA-ribosyltransferase OS=Sinomicrobium pectinilyticum; OX = 1084421 GN=tgt PE=3 SV=1
MKFELQANDPASKARAGKISAGHGVIETPIFMPVGTVASVKGVHQRELREDINPDIILGNTYHLYLRPQTEILEKAGGLHKFMGWERNILTDSGGYQVYSLSANRKIKEEGVKFKSHIDGSYHFFSPESVMEIQRSIGADIIMAFDECTPYPCDYRYAQRSMHMTHRWLDRCVEHLKKVPAKYGYEQSLFPIVQGSVYKDLREQSAEYIAGVGADGNAIGGLSVGEPAEEMYAMTEVVCKILPEDKPRYLMGVGTPVNILENIALGVDMFDCVMPTRNARNGMLFTANGIINIKNKKWEDDFSPVDEMGVTFVDTQYSRAYLRHLFAANEYLGKQIATIHNLGFYLWLVREARKHILAGDFYAWKNAMVPKLGHRL

SEQ ID NO: 60841 - protein, 376 aa, unidentified
  source 1..376: note = Sinomicrobium sp.
  REGION 1..376: note = tr|A0A329MW24|A0A329MW24_9FLAO Queuine tRNA-ribosyltransferase OS=Sinomicrobium sp. N-1-3-6; OX = 2219864 GN=tgt PE=3 SV=1
MEFELLAKDPGSKARAGKITAAHGTIETPIFMPVGTVASVKGVHQRELREDINPDIILGNTYHLYLRPQTGILEKAGGLHKFMGWERNILTDSGGYQVYSLSANRKIREEGVKFKSHIDGSYHFFSPEKAMEIQRSIGADIIMAFDECTPYPCDYGYAKRSMHMTHRWLDRCVEHLGKVPEKYGYGQSLFPIVQGSVYKDLRMQSAEYIAGAGADGNAIGGLSVGEPAEEMYAMTEVVCDILPEDKPRYLMGVGTPVNILENIALGVDMFDCVMPTRNARNGMLFTAGGIINIKNKKWEDDFSPVDEMGITFVDTQYSKAYLRHLFAANEFLGKQIATIHNLGFYLWLVREARKHILQGDFHTWKNAMTGKLAQRL

SEQ ID NO: 60842 - protein, 436 aa, Sinomonas atrocyanea
  REGION 1..436: note = tr|A0A126ZWB5|A0A126ZWB5_9MICC Queuine tRNA-ribosyltransferase OS=Sinomonas atrocyanea OX=37927; GN = tgt PE=3 SV=1
MPDSVPVPEAPPVPSAQAGHPRQSEFGFEVGTRLAGPDGSPGLGRTGTITTPHGTIRTPAFIAVGTKATVKAVLPESMAELGAQALLANAYHLYLQPGADILDEAGGLGRFMNWPGPTFTDSGGFQVMSLGSGFKKVIDMKGPDAPHQAGADDAVAPGKERLAHIDDDGVWFKSHLNGDRHRFTPEISMQVQHQIGADIMFAFDELTTLHNSRGYQEEALERTRLWAQRCVDEHFRLTDERAGKPYQALFGVIQGAQYEDLRRKACTDLGAMPFDGYGIGGALEKENLGTIVGWCSEVLPEDRPRHLLGISEPDDIFVAIEAGADTFDCVSPTRVARNSAFYTAEGRLNLSGAKYRRDWGPLQDGCDCYTCANYSRAYIRHLYKASEMLSHTLISIHNERFVVRMVDDARRAIEDGTFAEFKAETLGRYYGSTPTV

SEQ ID NO: 60843 - protein, 424 aa, unidentified
  source 1..424: note = Sinomonas humi
  REGION 1..424: note = tr|A0A0B2ANN4|A0A0B2ANN4_9MICC Queuine tRNA-ribosyltransferase OS=Sinomonas humi OX=1338436; GN = tgt PE=3 SV=1
MDSPLMASDGARTLGRTGTITTPHGEIRTPAFIAVGTKATVKAVLPESVRDLGAQAVLANAYHLYLQPGPEILDEAGGLGKFMNWQGPTFTDSGGFQVMSLGSGFKKVIDMTAVDASGPDDPTRGHSAREQSALGHPDRDLAVAPGKERLAHIDEDGVWFTSHLNGDRHRFSPEISMNVQHQIGADIMFAFDELTTLQNSRGYQEESLERTRRWAERCVAEHFRLTDERSHRPYQALFGVIQGAQYEDLRRKACRDLGAMPFDGFGIGGALEKENLGTIVAWCSEELPEDKPRHLLGISEPDDIFAAIEAGADTFDCVSPTRVARNSAFYTSEGRFNLSGARYRKDWGPLQEGCDCYTCQNYSRAYIRHLFKAKEMLSHTLISIHNERFVVRMVDDARNAIEDGTFWDFKEETLGRYYPAAARR

SEQ ID NO: 60844 - protein, 434 aa, Sinomonas sp.
  REGION 1..434: note = tr|A0A221R1Y8|A0A221R1Y8_9MICC Queuine tRNA-ribosyltransferase OS=Sinomonas sp. R1AF57 OX=2020377; GN = tgt PE=3 SV=1
MPDSAPVAPEAAPAPSSAAASHPRQSEFSFAVGTRLEGGDGAPTLGRTGTITTPHGTIQTPAFIAVGTKATVKAVLPESMAELGAQALLANAYHLYLQPGADILDEAGGLGRFMNWSGPTFTDSGGFQVMSLGSGFKKVIDMTGPQRDATPGSDDAVAPGKERLAHIDDDGVWFKSHLNGDRHRFSPEISMQVQHQIGADIMFAFDELTTLHNSRRYQEEALERTRKWAERCVAEHFRLTDERVGKPYQALFGVIQGAQYEDLRRKACGDLGAMPFDGFGIGGALEKENLGTIVGWCSEALPEDRPRHLLGISEPDDIFVAIEAGADTFDCVSPTRVARNSAFYTAEGRLNLSGAKYKRDWGPLQDGCDCYTCANYSRAYIRHLFKASEMLSHTLISIHNERFVVRMVDDARRAIEEGTFHDFKAETLGRYYGP

SEQ ID NO: 60845 - protein, 376 aa, Sinorhizobium americanum
  REGION 1..376: note = tr|A0A1L3L3M2|A0A1L3L3M2_9RHIZ Queuine tRNA-ribosyltransferase OS=Sinorhizobium americanum CCGM7; OX = 1408224 GN=tgt PE=3 SV=1
MTETFQFKLLATDGKARRGEVSMPRGTIRTPAFMPVGTVGTVKAMYLDQVRELGADIILGNTYHLMLRPGAERVARLGGLHNFIRWERPILTDSGGFQVMSLSSLRKLNEQGVTFKSHVDGALYQMSPERSIEIQGLLDSDIQMQLDECVALPAEPGEIERAMEMSIRWAERCKVAFGDQPGKAMFAIVQGGDLPKLRERSALALKELDLKGYAVGGLAVGEPQEVMLEMLDVTCPILPAEKPRYLMGVGTPDDILKSVAHGIDMFDCVMPTRSGRHGLAFTRYGRINLRNARHAEDLRPLDEQSSCPATRDYSRAYLHHLIRSNESLGGMLLSWNNLAYYQELMAGIRKAIEEGRYADFMVETQEGWQRGDLPPV

SEQ ID NO: 60846 - protein, 376 aa, Sinorhizobium americanum
  REGION 1..376: note = tr|A0A2S3YP18|A0A2S3YP18_9RHIZ Queuine tRNA-ribosyltransferase OS=Sinorhizobium americanum; OX = 194963 GN=tgt PE=3 SV=1
MTETFQFKLLATDGKARRGEVSMPRGTIRTPAFMPVGTVGTVKAMYLDQVRELGADIILGNTYHLMLRPGAERVARLGGLHNFIRWERPILTDSGGFQVMSLSSLRKLNEQGVTFKSHVDGALYHMSPERSIEIQGLLDSDIQMQLDECVALPAEPGEIERAMEMSIRWAERCKVAFGDQPGKAMFAIVQGGDIPKLRERSALALKGLDLKGYAVGGLAVGEPQEVMLEMLDVTCPILPAEKPRYLMGVGTPDDILKSVAHGIDMFDCVMPTRSGRHGLAFTRYGRINLRNARHAEDLRPLDEQSSCPATRDYSRAYLHHLIRSNESLGGMLLSWNNLAYYQELMAGIRKAIEEGRYADFMAETQEGWQRGDLPPV

SEQ ID NO: 60847 - protein, 376 aa, unidentified; identical to SEQ ID NO: 60007
  source 1..376: note = Sinorhizobium fredii
  REGION 1..376: note = tr|A0A2U8G4I5|A0A2U8G4I5_RHIFR Queuine tRNA-ribosyltransferase OS=Sinorhizobium fredii CCBAU 45436 OX=1128331 GN=tgt PE=3 SV=1

SEQ ID NO: 60848 - protein, 376 aa, unidentified; identical to SEQ ID NO: 60007
  source 1..376: note = Sinorhizobium fredii
  REGION 1..376: note = tr|A0A249PTP2|A0A249PTP2_RHIFR Queuine tRNA-ribosyltransferase OS=Sinorhizobium fredii CCBAU 83666 OX=1128334 GN=tgt PE=3 SV=1

SEQ ID NO: 60849 - protein, 376 aa, unidentified
  source 1..376: note = Sinorhizobium medicae
  REGION 1..376: note = tr|A6U8Y8|A6U8Y8_SINMW Queuine tRNA-ribosyltransferase OS=Sinorhizobium medicae (strain WSM419) OX=366394 GN=tgt PE=3 SV=1
MTEAFQFKLLSSDGNARRGEVLTPRGTIRTPAFMPVGTVGTVKAMYLDQVRELGADIILGNTYHLMLRPGAERVARLGGLHKFIRWDRPILTDSGGFQVMSLSSLRKLNEQGVTFKSHVDGALYHMSPERSIEIQGLLGSDIQMQLDECVALPAEPGEIERAMEMSLRWAERCKVAFGDQPGKAMFGIVQGGDIPKLRERSASALNELDLKGYAVGGLAVGEPQEVMLDMLDVTCPVLPADKPRYLMGVGTPDDILKSVAHGVDMFDCVMPTRSGRHGLAFTRYGRINLRNARHAEDARPLDEQSSCPAARDYSRAYLHHLIRSNESLGGMLLSWNNLAYYQELMAGIRKAIEEGRYSDFMAETIEGWQRGDLAPV

SEQ ID NO: 60850 - protein, 376 aa, unidentified; identical to SEQ ID NO: 60849
  source 1..376: note = Sinorhizobium medicae
  REGION 1..376: note = tr|A0A508WSS7|A0A508WSS7_9RHIZ Queuine tRNA-ribosyltransferase OS=Sinorhizobium medicae OX=110321; GN = tgt PE=3 SV=1

SEQ ID NO: 60851 - protein, 376 aa, unidentified; identical to SEQ ID NO: 60024
  source 1..376: note = Sinorhizobium meliloti
  REGION 1..376: note = tr|F7X091|F7X091_SINMM Queuine tRNA-ribosyltransferase OS=Sinorhizobium meliloti (strain SM11) OX=707241 GN=tgt PE=3 SV=1

SEQ ID NO: 60852 - protein, 376 aa, unidentified; identical to SEQ ID NO: 60024
  source 1..376: note = Sinorhizobium meliloti
  REGION 1..376: note = tr|A0A0E0UD55|A0A0E0UD55_SINMB Queuine tRNA-ribosyltransferase OS=Sinorhizobium meliloti (strain BL225C) OX=698936 GN=tgt PE=3 SV=1

SEQ ID NO: 60853 - protein, 376 aa, unidentified
  source 1..376: note = Sinorhizobium saheli
  REGION 1..376: note = tr|A0A178YLS6|A0A178YLS6_SINSA Queuine tRNA-ribosyltransferase OS=Sinorhizobium saheli OX=36856; GN = tgt PE=3 SV=1
MNETFQFKLLATDGKARCGEISTPRGMIRTPAFMPVGTVGTVKAMYLDQVRELGADIILGNTYHLMLRPGAERVARLGGLHNLIRWQGPILTDSGGFQVMSLSALRKLDERGVTFKSHVDGAIHHMSPERSIEIQGLLDSDIQMQLDECIALPAEPNEIERAMEMSLRWAERCKLAFGDQPGKAMFGIVQGGDIPKLRERSALVLKELDLKGYAIGGLAVGEPQEVMLDMLDVTCPALPAEKPRYLMGVGTPDDILKSVAHGVDMFDCVMPTRSGRHGLAFTRYGRINLRNARHAEDLRPLDEQSSCPATRDYSRAYLHHLIRSNESLGGMLLSWSNLAYYQELMADIRKAIEEGRFADFMAETIEGWQRGDLPPV

SEQ ID NO: 60854 - protein, 376 aa, Sinorhizobium sp.
  REGION 1..376: note = tr|A0A0T6Y558|A0A0T6Y558_9RHIZ Queuine tRNA-ribosyltransferase OS=Sinorhizobium sp. Sb3; OX = 1358417 GN=tgt PE=3 SV=1
MTETFQFKLHKTDGKARRGEVSMPRGTIRTPAFMPVGTVGTVKAMYLDQVKDLGADIILGNTYHLMLRPGAERVARLGGLHGLIRWQGPILTDSGGFQVMSLAGLRKLDEQGVTFKSHVDGALFHMSPERSIEIQGLLDSDIQMQLDECVALPAEPKEIERAMEMSLRWAERCKVAFGDQPGKAMFGIVQGGDIPKLRERSAEALKGLDLKGYAVGGLAVGEPQEVMLRMLDITCPIMPVDKPRYLMGVGTPDDILRSVAEGIDMFDCVMPTRSGRHGLAFTRHGRINLRNARHAEDMRPLDEESSCPAARDYSRAYLHHLIRSNESLGGMLLSWNNLAYYQELMAGIRLAIDEGRFADFMAETQETWRRGDLPPV

SEQ ID NO: 60855 - protein, 376 aa, Sinorhizobium sp.
  REGION 1..376: note = tr|A0A2A6MKA4|A0A2A6MKA4_9RHIZ Queuine tRNA-ribosyltransferase OS=Sinorhizobium sp. NG07B; OX = 1538174 GN=tgt PE=3 SV=1
MTETFQFKLLATDGKARRGEVSMPRGTIRTPAFMPVGTVGTVKAMYLDQVRELGADIILGNTYHLMLRPGAERVARLGGLHNFIRWERPILTDSGGFQVMSLSSLRKLNEQGVTFKSHVDGALYHMSPERSIEIQGLLDSDIQMQLDECVALPAEPDEIERAMEMSIRWAERCKVAFGDQPGKAMFAIVQGGDIPKLRERSALALKGLDLKGYAVGGLAVGEPQEVMLEMLDVTCPILPAEKPRYLMGVGTPDDILKSVAHGIDMFDCVMPTRSGRHGLAFTRYGRINLRNARHAEDLRPLDEQSSCPATRDYSRAYLHHLIRSNESLGGMLLSWNNLAYYQELMAGIRKAIEEGRYADFMAETQEGWQRGDLPPV

SEQ ID NO: 60856 - protein, 377 aa, Siphonobacter aquaeclarae
  REGION 1..377: note = tr|A0A1G9MGC7|A0A1G9MGC7_9BACT Queuine tRNA-ribosyltransferase OS=Siphonobacter aquaeclarae; OX = 563176 GN=tgt PE=3 SV=1
MQFDLIKQDPGSKARAGRIQTDHGTIETPIFMPVGTVGTVKAVHQRELKDDIQAQIILGNTYHLYLRPGLEVLEKAGGLHGFNGWDRPILTDSGGFQVYSLAGTGRKIDEAGVKFKSHIDGSTHYFTPEGVMDIQRTIGADFVMAFDECTPYPCDYGYARRSMELTHRWLKRCCERFDATEPKYGHSQTLFPIVQGSTYKDLRAQSAEFIASMGREGNAIGGLSVGEPVEDMYEMTDLVCSILPADKPRYLMGVGTPANILESIALGVDMFDCVMPTRNARHGILYTTQGIINIKNEKWREDFSPVDEALGGYASTFYTKAYLRHLFKSDELLGPQIASVHNLTFYLWLVKQARERILDGTFAAWKDGMVRQVMQRL

SEQ ID NO: 60857 - protein, 375 aa, unidentified
  source 1..375: note = Siphonobacter curvatus
  REGION 1..375: note = tr|A0A2S7IEM2|A0A2S7IEM2_9BACT Queuine tRNA-ribosyltransferase OS=Siphonobacter curvatus; OX = 2094562 GN=tgt PE=3 SV=1
MQFEVIKQDQKARAGTIQTDHGTIETPIFMPVGTVASVKAVHQRELKEDIKAQIILGNTYHLYLRPGLEVLEQAGGLHKFNGWDRPILTDSGGFQVYSLAGTGRKIDEAGVKFKSHIDGSTHVFTPESVMDIQRTIGADFVMAFDECTPYPCDYGYARRSMELTHRWLQRCCDRFDTTEPKYGHSQALFPIVQGSTYPDLRRQSAEFIASLGREGNAIGGLSVGEPAEDMYEMTDLVCSILPQDKPRYLMGVGTPANILESIALGIDMMDCVLPTRNARHGILYTTQGIINIKNEKWRKDFSPIDEGLGGYTSTFYSKAYLRHLFKSDELLGPQIASVHNLTFYLWLVKEARLQILNGTYLPWKNQMVEQIMRRL

SEQ ID NO: 60858 - protein, 375 aa, Siphonobacter sp.
  REGION 1..375: note = tr|A0A2N7BA59|A0A2N7BA59_9BACT Queuine tRNA-ribosyltransferase OS=Siphonobacter sp. BAB-5405; OX = 1864825 GN=tgt PE=3 SV=1
MQFEVIKQDQKARAGTIQTDHGTIETPIFMPVGTVASVKAVHQRELKEDIKAEIILGNTYHLYLRPGLEVLEQAGGLHKFNGWDRPILTDSGGFQVYSLAGTGRKIDEAGVKFKSHIDGSTHVFTPEGVMDIQRAIGADFVMAFDECTPYPCDYGYARRSMELTHRWLQRCCDRFDTTEPKYGHSQALFPIVQGSTYPDLRRQSAEFIASLGREGNAIGGLSVGEPAEDMYEMTDLVCSILPQDKPRYLMGVGTPANILESIALGIDMMDCVLPTRNARHGILYTTQGIINIKNEKWRKDFSPIDEGLGGYTSTFYSKAYLRHLFKSDELLGPQIASVHNLTFYLWLVKEARQQILNGTYLPWKNQMVEQIMRRL

SEQ ID NO: 60859 - protein, 375 aa, Siphonobacter sp.
  REGION 1..375: note = tr|A0A261Q5Q4|A0A261Q5Q4_9BACT Queuine tRNA-ribosyltransferase OS=Siphonobacter sp. BAB-5385; OX = 1864822 GN=tgt PE=3 SV=1
MQFEVIKQDQKARAGTIQTDHGTIETPIFMPVGTVASVKAVHQRELKEDIKAQIILGNTYHLYLRPGLEVLEQAGGLHKFNGWDRPILTDSGGFQVYSLAGTGRKIDEAGVKFKSHIDGSTHVFTPEGVMDIQRAIGADFVMAFDECTPYPCDYGYARRSMELTHRWLQRCCDRFDTTEPKYGHSQALFPIVQGSTYPDLRRQSAEFIASLGREGNAIGGLSVGEPAEDMYEMTDLVCSILPQDKPRYLMGVGTPANILESIALGIDMMDCVLPTRNARHGILYTTQGIINIKNEKWRKDFSPIDEGLGGYTSTFYSKAYLRHLFKSDELLGPQIASVHNLTFYLWLVKEARQQILNGTYLPWKNQMVEQIMRRL

SEQ ID NO: 60860 - protein, 412 aa, Skermanella aerolata
  REGION 1..412: note = tr|A0A512DR44|A0A512DR44_9PROT Queuine tRNA-ribosyltransferase OS=Skermanella aerolata OX=393310; GN = tgt PE=3 SV=1
MGFDVHATDGMARRGTLTTAHGTVETPAFMPVGTAGTVKGMMPGSVKTTGAQIILGNTYHLMLRPTAERVAQLGGLHRFMNWHGPILTDSGGFQVMSLSDLRKMSEDGVTFKSHLDGKRHHLTPERSMQIQHLLDSNVTMCLDECTAFPATHEVAEKSMKLSMRWAQRSRDAFVERPGYGLFGIVQGSVYADLRAESVKALTDIGFDGYAVGGLAVGEGQQMMFDTLDVTTPLLPKDRPRYLMGVGKPSDIIGAVRRGIDMFDCVMPTRSGRTGQAFVRRGVLNIRNARHAHDDRPLDEKCGCPACRSYSRGYLHHLFKAGEMLGPMLLTWHNLSYYQDLMADLRRAIAQGCFEERAAELEAQLLLGDIPATPDPLAGTPAAEAEAEAAATEPDAKAGGAADEEIHSVPVDL

SEQ ID NO: 60861 - protein, 427 aa, Skermanella aerolata
  REGION 1..427: note = tr|A0A0D2VWR4|A0A0D2VWR4_9PROT Queuine tRNA-ribosyltransferase OS=Skermanella aerolata KACC 11604; OX = 1385368 GN=tgt PE=3 SV=1
MTATGSGFSGAGFRGLGFDVHATDGMARRGTLTTAHGTVETPAFMPVGTAGTVKGMMPGSVKTTGAQIILGNTYHLMLRPTAERVAQLGGLHRFMNWHGPILTDSGGFQVMSLSDLRKMSEDGVTFKSHLDGKRHHLTPERSMQIQHLLDSNVTMCLDECTAFPATHEVAEKSMKLSMRWAQRSRDAFVERPGYGLFGIVQGSVYADLRAESVKALTDIGFDGYAVGGLAVGEGQQMMFDTLDVTTPLLPKDRPRYLMGVGKPSDIIGAVRRGIDMFDCVMPTRSGRTGQAFVRRGVLNIRNARHAHDDRPLDEKCGCPACRSYSRGYLHHLFKAGEMLGPMLLTWHNLSYYQDLMADLRRAIAQGCFEERAAELEAQLLLGDIPATPDPLAGTPAAEAEAEAAATEPDAKAGGAADEEIHSVPVDL

SEQ ID NO: 60862 - protein, 407 aa, Skermanella stibiiresistens
  REGION 1..407: note = tr|W9GYC4|W9GYC4_9PROT Queuine tRNA-ribosyltransferase OS=Skermanella stibiiresistens SB22 OX=1385369 GN=tgt PE=3 SV=1
MTESSTTSTGLGFDLIKTDGMARRGRLSTAHGDVETPAFMPVGTVGTVKGMMPGSVRETGAQILLGNTYHLMLRPTAERVAQFGGLHKFMNWSGPILTDSGGFQVMSLSDLRTMNEDGVTFKSHLDGRRHHLTPERSMRIQHLLDSNVTMCLDECTPFPATHEVADKSMRMSMRWAQRSRDAFVERPGYGLFGIVQGGVYPDLRADSVKALTDIGFDGYAVGGLAVGEGQQMMFDVLDVTTPLLAADRPRYLMGVGRPGDIIGAVRRGVDMFDCVMPTRSGRTGQAFVRRGVLNIRNARHAHDPRPLDEDCRCPACREYSRGYLHHLFRAGEMLGPMLLTWHNLTYYQDLMADLRRAIEDGCFEQRAAELEAGLALGDHPALPDPLNLKAAPETDKSEEDSSVAIDL

SEQ ID NO: 60863 - protein, 410 aa, Skermania sp.
  REGION 1..410: note = tr|A0A554V609|A0A554V609_9ACTN Queuine tRNA-ribosyltransferase OS=Skermania sp. ID1734 OX=2597516; GN = tgt PE=3 SV=1
MTEGRAQFGFRIGARLPGRHGRTGTIATPHGEIQTPAFIPVGTKATVKAVLPETMKELGAQALLANAYHLYLQPSPEIIDAAGGLGRFMNWDRPTFTDSGGFQVMSLGVGFKKVLAMEAVGHQSDEVIAKGRERLAKVDDDGVTFTSHLNGSRHRFTPEISMQIQHQLGADIMFAFDELTTLFNTREYQETSLQRTHDWAVRCMDEHDRLTETRRHRPYQALFAVIQGAQYEDLRRKACRGLASITGPSGNVFDGYGIGGAIEKHNLGAIVGWCSDELPEDKPRHMLGISEPEDLFEAIANGADTFDCVNPSRTGRNGRVYTLDGRFNVDTSRFRRDFTPIDDACDCYTCGHYTKAYLHHLFKAKEMLAATLCTVHNERFTIRLVDAIRDSITDGTFDDFHEQAMARWKN

SEQ ID NO: 60864 - protein, 382 aa, Slackia equolifaciens
  REGION 1..382: note = tr|A0A3N0ASI8|A0A3N0ASI8_9ACTN Queuine tRNA-ribosyltransferase OS=Slackia equolifaciens OX=498718; GN = tgt PE=3 SV=1
MSLFDVTIDAHDGEARALTFETAHGTVHTPMFMPVGTHATVKGVTVDQLRGIGSQVVLANTYHLYMRPGVEIIEAAGGVQKFMNYDGPMLTDSGGFQLFSLDHMMKTDPDGVTFHARDYDGSKHRWTPEINMDIQQRIGADIVMQLDQCIGYPAAKEDVAASTKLSWEWAERCCAAHTREDQALFGIVQGGMHLDLRLESVRRLLDIDERSRAAGHKGFQGFGIGGYSVGEPHDVMFETLPQVCAALPDDRPRYLMGVGNPTTLVRAVRAGVDMFDCVLPTRTGRMGTAFSHEGRMNLRNAKYKADFTPLDPQCSCPVCTQYTRAYLRHLVKQNEMLGGILLSIHNLHFLIDLMAKAREAVLAGEYEAFYQDWMNSPAANDY

SEQ ID NO: 60865 - protein, 382 aa, Slackia exigua
  REGION 1..382: note = tr|D0WG60|D0WG60_SLAES Queuine tRNA-ribosyltransferase OS=Slackia exigua (strain ATCC 700122 / DSM 15923 / CIP 105133 / JCM 11022 / KCTC 5966 / S-7) OX=649764 GN=tgtPE=3 SV=1
MSLFDVTVEASCGAARALSFETAHGTVRTPMFMPVGTHATVKGITPDQLHALNSQIVLANTYHLYMRPGVDVVEEAGGIQRFMNYDGPMLTDSGGFQLFSLDHMMKADADGVTFHARDYDGSAHRWTPESNMDIQQRIGADICMQLDQCIGYPCEKEDVAASTALSWEWAKRCCDAHTRIDQALFAIVQGGMHLDLRLESVRRLLEIDAESRSSGGRGFQGFGIGGYSVGEPHDVMFETLGQVTRALPDDRPRYLMGVGNPTTLVRAVREGVDMFDCVLPTRTGRMGTAFSSQGRMNMRNAKYKRDFTPLDHACDCPVCRQYTRAYLRHLVMQKEMLGGILLSVHNLHFLISLMGRAREAILGGTYEEFYRAWMASPAANDY

SEQ ID NO: 60866 - protein, 382 aa, Slackia faecicanis
  REGION 1..382: note = tr|A0A3N0AF79|A0A3N0AF79_9ACTN Queuine tRNA-ribosyltransferase OS=Slackia faecicanis OX=255723; GN = tgt PE=3 SV=1
MALFDVTVDARDGNARAISFDTAHGTVHTPMFMPVGTHATVKGVTVDQLHDMKSQVVLANTYHLYMRPGVDIIERAGGVQKFMNYDGPMLTDSGGFQLFSLDHMMKTDPDGVSFHARDYDGSKHRWTPESNMDIQQRIGADIVMQLDQCIGYPAEKEAVAASTKLSWEWAERCCAAHTREDQALFAIVQGGMHRDLRLESARRLMEIDAASRAAGHKGFQGFGIGGYSVGEPHDVMFETLGAVCEALPQDKPRYLMGVGNPTTLVRAVREGVDMFDCVLPTRTGRMGTAFSHQGRMNLRNAKYKEDFTPLDPQCSCPVCTQYTRAYLRHLVMQKEMLGGILLSMHNLHFLIDLMAKAREAVLAGEYEAFYQDWMNSPAADDY

SEQ ID NO: 60867 - protein, 382 aa, Slackia heliotrinireducens
  REGION 1..382: note = tr|C7N4E0|C7N4E0_SLAHD Queuine tRNA-ribosyltransferase OS=Slackia heliotrinireducens (strain ATCC 29202 / DSM 20476 / NCTC 11029 / RHS 1); OX = 471855 GN=tgt PE=3 SV=1
MALFDVTIDATCGNARALTFETAHGQVHTPMFMPVGTHATVKGITVDQLHELKSQVVLANTYHLYMRPGVDIVEAAGGVQKFMNYDGPMLTDSGGFQLFSLDHMMKTDPDGVSFQARDYDGSKHRWTPESNMEIQQRIGADIAMQLDQCVGYPETRERVEASTKLSWEWAERCLAAHTREDQALFGIVQGGMHLDLRLESVRHLIEIEERSIAAGHKRFGGFGIGGYSVGEPHDVMFETLGTVAQACPEDRPRYLMGVGNPTTLVRAVREGVDMFDCVLPTRTGRMGTAFSSQGRMNLRNAKYKVDFTPLDHECSCPVCQNYTRAYLRHLVKQNEMLGGILLSMHNLHFLIDLMARARQAVLDGEYEAFYQEWMASPGANDY

SEQ ID NO: 60868 - protein, 382 aa, Slackia isoflavoniconvertens
  REGION 1..382: note = tr|A0A3N0IB23|A0A3N0IB23_9ACTN Queuine tRNA-ribosyltransferase OS=Slackia isoflavoniconvertens; OX = 572010 GN=tgt PE=3 SV=1
MPLFDVNIDATCGNARALTFETAHGTVHTPMFMPVGTHATVKGVTTPQLRELNSQVVLANTYHLYMRPGVDIIEKAGGVQKFMNYDGPMLTDSGGFQLFSLDHMMKTDPDGVTFHARDYDGSKHRWTPESNMDIQQRIGADIVMQLDQCIGYPSPKEAVAASTKLSWEWAERCCAAHTREDQALFAIVQGGMHLDLRLENVKRLIEIDAASRAAGHKGFQGYGIGGYSVGEPHDVMFETLGDVCQALPDNRPRYLMGVGNPTTLVRAVREGVDMFDCVLPTRTARMGTAFSHTGRMNMRNAKYKEDFTPLDPECSCPTCTHYTRAYLRHLVKQGEMLGGILLSIHNLHFLIDLMGKAREAVLAGEYETFYQDWMNSPAANDY

SEQ ID NO: 60869 - protein, 382 aa, Slackia isoflavoniconvertens
  REGION 1..382: note = tr|A0A369LGG0|A0A369LGG0_9ACTN Queuine tRNA-ribosyltransferase OS=Slackia isoflavoniconvertens; OX = 572010 GN=tgt PE=3 SV=1
MPLFDVNIDATCGNARALTFETAHGTVHTPMFMPVGTHATVKGVTTPQLRELNSQVVLANTYHLYMRPGVDIIEKAGGVQKFMNYDGPMLTDSGGFQLFSLDHMMKTDPDGVTFHARDYDGSKHRWTPESNMDIQQRIGADIVMQLDQCIGYPSPKEAVAASTKLSWEWAERCCAAHTREDQALFAIVQGGMHRDLRLESVKRLIEIDASSRAAGHKGFQGFGIGGYSVGEPHDVMFETLGDVCQALPDNRPRYLMGVGNPTTLVRAVREGVDMFDCVLPTRTARMGTAFSHTGRMNMRNAKYKEDFTPLDPECSCPTCTHYTRAYLRHLVKQGEMLGGILLSIHNLHFLIDLMGKAREAVLAGEYETFYQDWMNSPAANDY

SEQ ID NO: 60870 - protein, 382 aa, Slackia piriformis
  REGION 1..382: note = tr|K0YMD8|K0YMD8_9ACTN Queuine tRNA-ribosyltransferase OS=Slackia piriformis YIT 12062; OX = 742818 GN=tgt PE=3 SV=1
MALFDVTIDARDGNARALTFDTAHGAVHTPMFMPVGTHATVKGVTVDQLHDLGSQVVLANTYHLYMRPGVDIIERAGGVQKFMNYNGPMLTDSGGFQLFSLDHMMKTDPDGVSFHARDYDGSKHRWTPESNMDIQQRIGADIVMQLDQCIGYPAEKEAVAASTKLSWEWAERCCAAHTREDQALFAIVQGGMHRDLRLESARRLMEIDAASRAAGHKGFQGFGIGGYSVGEPHDVMFETLGAVCDALPQDRPRYLMGVGNPTTLVRAVREGVDMFDCVLPTRTGRMGTAFSHEGRMNLRNAKYKEDFTPLDPQCTCPVCTQYTRAYLRHLVMQKEMLGGILLSIHNLHFLIDLMAKAREAVLAGEYEAFYQDWMNSPAANDY

SEQ ID NO: 60871 - protein, 399 aa, Slackia sp.
  REGION 1..399: note = tr|J4XJT7|J4XJT7_9ACTN Queuine tRNA-ribosyltransferase OS=Slackia sp. CM382 OX=1111137; GN = tgt PE=3 SV=1
MVRAGRSGCIKKIRGGSMSLFDVTVEASCGAARALSFETAHGTVRTPMFMPVGTHATVKGITPDQLHALNSQVVLANTYHLYMRPGVDVVEEAGGIQRFMNYDGPMLTDSGGFQLFSLDHMMKTDADGVTFHARDYDGSAHRWTPESNMDIQQRIGADICMQLDQCIGYPCEKEDVAASTALSWEWAKRCCDAHSRIDQALFAIVQGGMHLDLRLESVRRLLEIDAESRSSGGRGFQGFGIGGYSVGEPHDVMFETLGQVTRALPDDRPRYLMGVGNPTTLVRAVREGVDMFDCVLPTRTGRMGTAFSSQGRMNMRNAKYKRDFTSLDHACDCPVCRQYTRAYLRHLVMQKEMLGGILLSVHNLHFLISLMGRAREAILDGIYEEFYRAWMASPAANDY

SEQ ID NO: 60872 - protein, 369 aa, Smithella sp.
  REGION 1..369: note = tr|A0A091AH39|A0A091AH39_9DELT Queuine tRNA-ribosyltransferase OS=Smithella sp. F21 OX=1538640; GN = tgt PE=3 SV=1
MPFSFELIKKDLQTSARLGKMVTPHGTVQTPAFMPVGTQGTVKSMRPEEIQNCGAQILLSNTYHLYLRPGHETIRRMGGLHSFMNWPGPILTDSGGFQVYSLAALRKIGPDGVMFQSHIDGSKHFLTPQKAVLIQEALGSDIMMCLDECTPYPATRKQTSDSLDLTVKWAGLCRKAKTNPEQALFGIVQGGTYMDLRRQALEQTVPIGFDGYALGGVSVGEPKEMMQAITDEITPLLPSEKPRYLMGVGTPADIVYGVSRGIDLFDCVIPTRSARHGLLFTNSEKIVIKNARWREDNNPLDETCDCYTCKNYSRGYLRHLYVAGEILAMILNTIHNIRHYMRLMEKIRAAISENHFGEFQKDFLSQEEK

SEQ ID NO: 60873 - protein, 366 aa, Smithella sp.
  REGION 1..366: note = tr|A0A0N8W7M2|A0A0N8W7M2_9DELT Queuine tRNA-ribosyltransferase OS=Smithella sp. SDB OX=1735324; GN = tgt PE=3 SV=1
MPLEFDLIKQDYSTAARLGKIVTSHGTVHTPAFMPVGTQGTVKSMLPEEIKNCGAEIILSNTYHLYLRPGYEIIKKIGGLHRFMNWAGPILTDSGGFQVYSLGALRKITPDGVVFHSHIDGSKHFLSPQKAIEIQEALNSDIMMCLDECTPYPATFLQAKESLALTVKWADLCIKSRNNTEQALFGIIQGGIYLDLRKEAVEQLRHLDFDGYALGGVSVGEPKEIMYKITDSITPLLPETKPRYLMGVGTPADIVFAVSRGIDMFDCVIPTRCARHGLLFTNTENVVIKNARWREDNNPIEQTCDCYTCRNYSRAYLRHLYVTGEILAMILNTIHNIRHYMRLMENIRLAISESRFEEFKKSYFNK

SEQ ID NO: 60874 - protein, 382 aa, unidentified
  source 1..382: note = Sneathia amnii
  REGION 1..382: note = tr|A0A0E3ZA70|A0A0E3ZA70_9FUSO Queuine tRNA-ribosyltransferase OS=Sneathia amnii OX=187101 GN=tgt; PE = 3 SV=1
MLPVRYELLYSDGNARCGIIHTPHGDIKTPIFMPVGTQATVKTMTPEELKEIGAEIILGNTYHLHLRPTDELINTFGGLHEFMHWDRPILTDSGGFQIFSLAVRRKLTEEGAYFSSHLDGSKHFISPEKSIEIQNNLGSDIMMVLDECPPGLSTREYLEPSINRTVRWARRCIDANRNKDKQGLFAIVQGGIYEDLRDYCFNELYKTNDDFSGYAIGGLAVGEPTEDMYRILKYITPKLPKDKPRYLMGVGEPLDMLEAIEHGVDMMDCVHPSRIGRHGTVFTKYGRLVIKNEKYSRDPRPLDISDNYVCKNYTRAYIRHLFKANEVLAQRLATYHNLWFLLNLVKEARKAIEEGRFKEYKEEFIKNYTMGSNSDWIKPIVK

SEQ ID NO: 60875 - protein, 377 aa, Sneathiella sp.
  REGION 1..377: note = tr|A0A2G1YZ13|A0A2G1YZ13_9PROT Queuine tRNA-ribosyltransferase OS=Sneathiella sp. OX=1964365; GN = tgt PE=3 SV=1
MINSDFTFNISATDGAARRGTISTAHGEIRTPAFMPVGTAATVKGMTPEAVRETGADILLGNTYHLMLRPGSERVAKLGGLHKFMNWERPILTDSGGFQVMSLNELRKIDEEGVTFKSHIDGKRFELTPERSMEIQNHLDATITMAFDECTPYPATHEVAVTSMQRSMRWAKRSRDAFEERTGYGLFGIVQGSTYEDLRQESIDALTGIGFDGYAIGGLAVGEGQEEMFRTLEFTVPALPQDKPRYLMGVGKPSDLVGSVMRGVDMFDCVLPTRSGRNAQAFTRHGTVNMRNARHADDSRPLDALCDCPACRNYCRGYLHHLFKAKEMLGSMLLTWHNLHYYQGLMAGMRSAIEDKRLSDFALDFFACQDHGDIDIL

SEQ ID NO: 60876 - protein, 376 aa, Sneathiella sp.
  REGION 1..376: note = tr|A0A2D8HKC4|A0A2D8HKC4_9PROT Queuine tRNA-ribosyltransferase OS=Sneathiella sp. OX=1964365; GN = tgt PE=3 SV=1
MTDDFHFTIHATDGAARRGTLKTAHGDIRTPAFMPVGTAATVKGMTVEAVRETGADILLGNTYHLMLRPGSERVKRLGGLHKFMNWPRPILTDSGGFQVMSLNELRKIDENGVTFKSHIDGKRFELTPERSMQIQNDLDATITMAFDECTPYPATHDVAASSMRRSMRWAARSRDAYELRPGYGLFGIVQGSTFEDLRLESVAALSETGFDGYAVGGLAVGEGQAEMFRTLEFTTPAMPQDRPRYLMGVGKPDDLVGAVMRGIDMFDCVLPTRSGRNAQAFTRYGTINMRNARHADDPRPLDENCGCPACRNYSRGYLNHLFKAKEMLGGMLLTWHNLHYYQDVMAGMRSAIAAGQLADFALDFYALQEQGDIEPV

SEQ ID NO: 60877 - protein, 385 aa, unidentified
  source 1..385: note = Snodgrassella alvi
  REGION 1..385: note = tr|X2HAV9|X2HAV9_9NEIS Queuine tRNA-ribosyltransferase OS=Snodgrassella alvi wkB2; OX = 1196094 GN=tgt PE=3 SV=1
MIYSVIIFASELFNMLKFSLKRTDGFARRGTLELNHGTVETPVFMPVGTYGSVKAMSPRNLEEIKAQIILGNTFHLWLRPGLDVIRDFGGLHDFIGWNRPILTDSGGFQVFSLAQMRKLTEEGCTFRSPINGDKLFLSPEISMQIQTVLNSDIVMQLDECPDGNVDAREAEKSLQMSLRWAERSKNEFERLNNPNALFGIVQGGMYEDLREQSLVGLEEIGFPGLSVGGLSVGEPKPEMYRILRAIGPKLPAHKPHYLMGVGTPEDLVYGVACGIDMFDCVMPTRNARNGWLFTRFGDVKIRNAIYRHDQRPLDESCDCYTCRNFSRAYLHHLQRVGEILGAQLNTIHNLRYYQILTAEMRLAIEAGKFEDFQTRFHAERARGVL

SEQ ID NO: 60878 - protein, 371 aa, unidentified
  source 1..371: note = Snodgrassella alvi
  REGION 1..371: note = tr|A0A2N9XP44|A0A2N9XP44_9NEIS Queuine tRNA-ribosyltransferase OS=Snodgrassella alvi OX=1196083; GN = tgt PE=3 SV=1
MLKFTLQCTDGFARRGTLELNHGTVETPVFMPVGTYGSVKAMSPRNLEEIKAQIILGNTFHLWLRPGLDVIRDFGGLHDFIGWNRPMLTDSGGFQVFSLAQMRKLTEEGCTFRSPINGDKLFLSPEISMQIQTVLNSDIVMQLDECPDGNVDAKEAEKSLQMSLRWAERSKNEFERLNNPNALFGIVQGGMYEDLREQSLAGLEEIGFPGLSVGGLSVGEPKPEMYRILRAIGPKLPAHKPHYLMGVGTPEDLVYGVAYGIDMFDCVMPTRNARNGWLFTRFGDVKIRNAIYRHDQRPLDESCDCYTCCNFSRAYLHHLQRVGEILGAQLNTIHNLRYYQILTAEMRLAIEAGKFSEFQTCFHADRARGVL

SEQ ID NO: 60879 - protein, 371 aa, unidentified
  source 1..371: note = Snodgrassella sp.
  REGION 1..371: note = tr|A0A1C4CEF9|A0A1C4CEF9_9NEIS Queuine tRNA-ribosyltransferase OS=Snodgrassella sp. R-53583; OX = 1798181 GN=tgt PE=3 SV=1
MLKFTLQRTDGFARRGTLELNHGTVETPVFMPVGTYGSVKAMSPRNLEEIKAQIILGNTFHLWLRPGLDVIRDFGGLHDFIGWNRPMLTDSGGFQVFSLAQMRKLTEEGCTFRSPINGDKLFLSPEISMQIQTVLNSDIVMQLDECPDGNVDAREAEKSLQMSLRWAERSKNEFERLNNPNALFGIVQGGMYEDLREQSLAGLEKIGFPGLSVGGLSVGEPKPEMYRILRAIGPKLPAHKPHYLMGVGTPEDLVYGVAYGIDMFDCVMPTRNARNGWLFTRFGDVKIRNAMYRHDQRPLDESCDCYTCRNFSRAYLHHLQRVGEILGAQLNTIHNLRYYQILTAEMRSAIEAGKFSEFQAHFHDDRARGVL

SEQ ID NO: 60880 - protein, 370 aa, unidentified
  source 1..370: note = Snowella sp.
  REGION 1..370: note = tr|A0A2W7B1W8|A0A2W7B1W8_9CYAN Queuine tRNA-ribosyltransferase OS=Snowella sp. OX=2164131 GN=tgt; PE = 3 SV=1
MKFSYQCHAKCSHTHARAGVWHTPHGIVETPRFMPVGTVATVKGITPAQLATTGAQMILANTYHLHLQPGESIIEKAGGLHSFMGWSGPILTDSGGFQVFSLSALRSLSEKGVIFRSPKDGRMIEITPEKSIQIQNALGADVIMAFDECPPGQASREHVQAATERTYRWLERCIEAHQRREDQALFGIVQGGTYLDLRFQAVEDLTKLDLPGYAIGGVSVGEAPELVHQIVRATTPLLPVNKPRYLMGVGTYREMAIAIASGIDLFDCVIPTRFGRHGTALVQGERWNLKNAPFREDFRPLDETCPCYTCQTFSRAYLNHLVRSREMLGYILLSLHNITELVRFTQRIREAIIGDRFLAEFGHWLTDEKV

SEQ ID NO: 60881 - protein, 382 aa, Sodalis glossinidius
  REGION 1..382: note = sp|Q2NVA4|TGT_SODGM Queuine tRNA-ribosyltransferase; OS = Sodalis glossinidius (strain morsitans) OX=343509; GN = tgt PE=3 SV=1
MEYQLLKTDGQARRGRLVFDRGVVETPAFMPVGTYGTVKGMTPEEVKETGAQILLGNTFHLWLRPGQAVMKLHGDLHDFMQWHGPILTDSGGFQVFSLGDIRKITEEGVYFRNPINGDTIFLSPEKSMEIQYDLGSDIVMIFDECTSYPSDWDYAKQSMEMSLRWAARSRQRFDELGNHNALFGIIQGSVYEDLRDVSVKRLVEIGFDGYAVGGLAVGEPKADMHRILAHLCPQIPADKPRYLMGVGKPEDLVEGVRRGIDMFDCVMPTRNARNGHLFVTDGVVKIRNARYKDDVAPLDAECDCYTCRNYSRAYLHHLDRCNEILGARLNTIHNLRYYQRLMAGLRQAIDEGKLEHFVGEFYRRTGKPAPPLVVELHNNEGI

SEQ ID NO: 60882 - protein, 382 aa, Sodalis glossinidius; identical to SEQ ID NO: 60881
  REGION 1..382: note = tr|A0A193QGS9|A0A193QGS9_SODGM Queuine tRNA-ribosyltransferase OS=Sodalis glossinidius (strain morsitans) OX=343509 GN=tgt PE=3 SV=1

SEQ ID NO: 60883 - protein, 382 aa, unidentified
  source 1..382: note = Sodalis praecaptivus
  REGION 1..382: note = tr|W0I0P3|W0I0P3_9GAMM Queuine tRNA-ribosyltransferase OS=Sodalis praecaptivus OX=1239307; GN = tgt PE=3 SV=1
MEYQLLKTDGQARRGRLVFDRGVVETPAFMPVGTYGTVKGMTPEEVKETGAQILLGNTFHLWLRPGQAVMKLHGDLHDFMQWHGPILTDSGGFQVFSLGDIRKITEEGVHFRNPINGDAIFLSPEKSMEIQYDLGSDIVMIFDECTPYPSDWDYAKRSMEMSLRWAARSRQRFDELENPNALFGIIQGGVYEDLRDVSVKRLVEIGFDGYAVGGLAVGEPKADMHRILAHLCPQIPADKPRYLMGVGKPEDLVEGVRRGIDMFDCVMPTRNARNGHLFVTDGVVKIRNARYKDDVAPLDAECDCYTCRNYSRAYLHHLDRCNEILGARLNTIHNLRYYQRLMAGLRQAIDEGKLEHFVGEFYRRTGKPVPPLVVELNNNEGI

SEQ ID NO: 60884 - protein, 382 aa, Sodalis sp.; identical to SEQ ID NO: 60883
  REGION 1..382: note = tr|A0A1J7CX16|A0A1J7CX16_9GAMM Queuine tRNA-ribosyltransferase OS=Sodalis sp. TME1 OX=1912097; GN = tgt PE=3 SV=1

SEQ ID NO: 60885 - protein, 382 aa, Sodalis sp.
  REGION 1..382: note = tr|A0A4R1N9W1|A0A4R1N9W1_9GAMM Queuine tRNA-ribosyltransferase OS=Sodalis sp. 159R OX=2529856; GN = tgt PE=3 SV=1
MKYELIKTDGRARRGRLVFERGVVETPAFMPVGTYGTVKGMTPEEVAETGAQIILGNTFHLWLRPGQEIMKLHGDLHDFMQWHGPILTDSGGFQVFSLGDIRKITEEGVHFRNPINGDAIFLSPEKSMEIQHDLGSDIVMIFDECTPFPAEHDYARKSMEMSLRWAERSRRRFDELGNKNALFGIIQGSVYEDLRDVSVKRLVEIGFDGYAVGGLAVGEPKADMHRILEHVLPQIPADKPRYLMGVGKPEDLVEGVRRGIDMFDCVMPTRNARNGHLFVTDGVVKIRNASNKSDTSPLDEHCDCYTCRNYSRAYLHHLDRCNEILGARLNTIHNLRYYQRLMAGLRHAIDEGKLEQFVDEFYGRVGKPVPPLVVELNYNEGI

SEQ ID NO: 60886 - protein, 371 aa, unidentified
  source 1..371: note = Unknown
  REGION 1..371: note = tr|A0A151UL29|A0A151UL29_9GAMM Queuine tRNA-ribosyltransferase OS=Sodalis-like endosymbiont of Proechinophthirus fluctus OX=1462730 GN=tgt PE=3 SV=1
MEYQLLKTDGPARRGRLVFDRGVVETPAFMPVGTYGTVKGMMPEEVKETGAQILLGNTFHLWLRPGQEVMKMHGDLHDFMQWHGPILTDSGGFQVFSLGDIRKITEEGVHFRNPINGTTIFLSPEKSMEIQYDIGSDIVMIFDECMPYPSDWDYAKCSMEMSLRWAARSRQRFDELGNPNAIFGIIQGSIYEDLRDVSVKRLVEIGFDGYAVGGLAVGEPKADMHRILAHLCPKIPVSKPRYLMGVGKPEDLVEGVRHGIDMFDCVMPTRNARNGHLFVTDGVVKIRNARYKDDVAPLDAECDCYTCRNYSRAYLHHLDRCNEILGARLNTIHNLRYYQRLMAGLRQAIDEGKLEHLVGEFYRRTSKPVHL

SEQ ID NO: 60887 - protein, 373 aa, Soehngenia sp.
  REGION 1..373: note = tr|A0A4Z0D4X0|A0A4Z0D4X0_9FIRM Queuine tRNA-ribosyltransferase OS=Soehngenia sp. 1933P OX=2562294; GN = tgt PE=3 SV=1
MAIRFELLKESNECMARLGKIETPHGTIETPIFMPVGTRATVKAMTPDELKYLGAQIILSNTYHLYLKPGHDLIEKAGGLHKFMNWDRPILTDSGGFQVFSLTDLRKIHEEGVEFRSHIDGSKHFISPEISIDIQNSLGSDIMMCFDECVAYPSEYEYTKESMERTTRWAARCRDHHHKWDTQGLFGIVQGGFFKDLRKESAKSLVDMDFSGYAVGGLSVGEPKDLMCDILEYTTPFLPKDKPRYLMGVGSPDFLFEAVERGIDMADCVLPTRIARNGTAMTSNGKVIIKNAKYADDFNPLDSECDCYTCKNYSRAYIRHLFNVNEILGLRLTTIHNLYFLLKLMENIRQSIREDNFYKYKESFYKKYGYIKE

SEQ ID NO: 60888 - protein, 365 aa, unidentified
  source 1..365: note = Solemya elarraichensis
  REGION 1..365: note = tr|A0A1T2KY35|A0A1T2KY35_9GAMM Queuine tRNA-ribosyltransferase OS=Solemya elarraichensis gill symbiont OX=1918949 GN=tgt PE=3 SV=1
MHQNIHNTDAGSRRGQLVFTRGTVETPAFMPVGTYGTVKAMTPEELRSVGAEMILGNTFHLWLRPGTDIVRLHGDLHDFMHWDGPILTDSGGFQVYSLGAMRKITEEGVHFRSPIDGDKVFMGPEESMQIQRELGSDVVMIFDECTPYPATQEVAEESMELSLRWAKRSKTTHGDNPSALFGIVQGGVYEDLRQRSLEGLMEIGFDGYAVGGLSVGEPPEDRWRILDFLSDKLPADKPRYLMGVGTPEDLVEAVQRGIDMFDCVMPTRNARNGDLFTHTGKVRIKNAKYAKDTGPLDPDCDCYTCQNYSRAYLRHLQRCNEILGARLNTIHNLHYYQSLMRGIRSAIEEQRLSSFVDDFYAMRRG

SEQ ID NO: 60889 - protein, 371 aa, unidentified
  source 1..371: note = Solemya pervernicosa
  REGION 1..371: note = tr|A0A1T2LAP7|A0A1T2LAP7_9GAMM Queuine tRNA-ribosyltransferase OS=Solemya pervernicosa gill symbiont OX=642797 GN=tgt PE=3 SV=1
MKFEKLGSDGQARRGRLEFPRGSVETPAFMPVGTYGTVKSMTPEEIEAIGAEIILGNTFHLMLRPGTDVIKAHGDLHDFMQWKGPILTDSGGFQVFSLGAMRKIKEEGVTFKSPVDGSKVFMGPEESMAVQRELGSDIVMIFDECTPYPATEREARSSMELSLRWAKRSKIAHSDNPNALFGIVQGGMYADLRRESLEGLVEIGFDGYAIGGLSVGEPKEEMLATLEAITPDMPEDRPRYLMGVGKPEDIVEAVRRGVDMFDCVMPTRNARNGHLFTREGVIRIRNSGYRFDTRPLDEQCSCYTCQNYSRAYLKHLDKCGEMLGPRLATIHNLHYYQDLMRGLRKAIEEQRLEQWVEAFYKARSQKAPGVS

SEQ ID NO: 60890 - protein, 369 aa, unidentified
  source 1..369: note = Solemya velesiana
  REGION 1..369: note = tr|A0A1T2KTL0|A0A1T2KTL0_9GAMM Queuine tRNA-ribosyltransferase OS=Solemya velesiana gill symbiont; OX = 1918948 GN=tgt PE=3 SV=1
MKFECITKEGFARRGRLTFERGSIETPAFMPVGTYGTVKAMTPEELEGLGAEIILGNTFHLMLRPGTEIITKHGDLHDFMHWQRPILTDSGGFQVFSLGQMRKITEEGVHFRSPVDGSRIFMGPEESMQVQRELGSDIVMIFDECTPYPATEKEARDSMELSLRWAECSKRAHGDNPSALFGIVQGGVYEVLRESSLNGLIEIGFDGYAVGGLSVGEPPEDRWRVLDFLSSRLPEEKPHYLMGVGTPEDIVEAVRRGIDMFDCVMPTRNARNGHLFTHEGVVRIRNAVHADDTGPLDPHCDCYTCRNYSRSYLRHLFRCNEILGSRLNTIHNVYYYQTLMRNIRESIEAGRFDEFVKTFYEMRGGKAQG

SEQ ID NO: 60891 - protein, 366 aa, Solemya velum
  REGION 1..366: note = tr|A0A0B0H9U6|A0A0B0H9U6_SOVGS Queuine tRNA-ribosyltransferase OS=Solemya velum gill symbiont; OX = 2340 GN=tgt PE=3 SV=1
MQQNIHARDAGSRRGQLVFERGSVETPAFMPVGTYGTVKAMTPEELRSVGAEMILGNTFHLWLRPGTEIVRLHGDLHDFMHWDGPILTDSGGFQVYSLGAMRKITEEGVHFRSPIDGDKVFMGPEESMQIQRELGSDVVMIFDECTPYPATHKVAEESMELSLRWAKRSKEAHGDNPSALFGIVQGGIYEDLRQRSLEGLMEIGFDGYAVGGLSVGEPPEDRWRILDFLSDKLPTDKPRYLMGVGTPEDLVEAVQRGIDMFDCVMPTRNARNGDLFTHTGKVRIKNAKYAKDTGPLDPDCDCYTCQNYSRAYLRHLHRCNEILGARLNTIHNLAYYQSLMHGIRSAIEEQRLASFVDDFYAMKRTG

SEQ ID NO: 60892 - protein, 385 aa, unidentified
  source 1..385: note = Solibacillus isronensis
  REGION 1..385: note = tr|K1KTM6|K1KTM6_9BACL Queuine tRNA-ribosyltransferase OS=Solibacillus isronensis B3W22; OX = 1224748 GN=tgt PE=3 SV=1
MTETTKQPPIRYELIKTCAQTGARLGIVHTPHGSFETPTFMPVGTQATVKAMSPEELKEMNAGIILSNTYHLWLRPGNDIVKEAGGLHKFMNWDRPILTDSGGFQVFSLSKFRKIEEEGVYFRNHLNGDKLFLSPEKAMEIQNDLGSDIMMAFDECPPFPATYEYMEASVDRTTRWAKRCKEAHQRPEEQGLFGIIQGGEYEELRRKSAEALVELDFPGYAIGGLSVGEPKDIMNKVLDFTAPMMPADKPRYLMGVGSPDSLIDGAMRGIDMFDCVLPTRIARNGTLMTSEGRMVIKNAKYAKDFTPIDENCDCYTCKNYTRAYVRHLLRTEETFGLRLTSYHNLRFLIKLMEDVRQAIREDRLGDFKEEFFEKYGYNKPNAKNF

SEQ ID NO: 60893 - protein, 385 aa, Solibacillus silvestris
  REGION 1..385: note = tr|F2F3G0|F2F3G0_SOLSS Queuine tRNA-ribosyltransferase OS=Solibacillus silvestris (strain StLB046) OX=1002809 GN=tgt PE=3 SV=1
MTETTKQPPIRYELIKTCAQTGARLGIVHTPHGSFETPTFMPVGTQATVKAMSPEELKEMNAGIILSNTYHLWLRPGNDIVKEAGGLHKFMNWDRPILTDSGGFQVFSLSKFRKIEEEGVYFRNHLNGDKLFLSPEKAMEIQNDLGSDIMMAFDECPPFPATYEYMEASVDRTTRWAKRCKEAHQRPEEQGLFGIIQGGEYEELRRKSAEALVELDFPGYAIGGLSVGEPKDIMNKVLEFTAPMMPADKPRYLMGVGSPDSLIDGAMRGIDMFDCVLPTRIARNGTLMTSEGRMVIKNAKYAKDFTPIDENCDCYTCKNYTRAYVRHLLRTEETFGLRLTSYHNLRFLIKLMEDVRQAIREDRLGDFKEEFFEKYGYNKPNAKNF

SEQ ID NO: 60894 - protein, 385 aa, Solibacillus silvestris
  REGION 1..385: note = tr|A0A1A7LZZ9|A0A1A7LZZ9_9BACL Queuine tRNA-ribosyltransferase OS=Solibacillus silvestris; OX = 76853 GN=tgt PE=3 SV=1
MTETTKQPPIRYELIKTCAQTGARLGIVHTPHGSFETPTFMPVGTQATVKAMSPEELKEMNAGIILSNTYHLWLRPGNDIVKEAGGLHKFMNWNRPILTDSGGFQVFSLSKFRKIEEEGVYFRNHLNGDKLFLSPEKAMEIQNDLGSDIMMAFDECPPFPATYEYMEASVDRTTRWAKRCKEAHQRPEEQGLFGIIQGGEYEELRRKSAEALVELDFPGYAIGGLSVGEPKDIMNKVLEFTAPMMPADKPRYLMGVGSPDSLIDGAMRGIDMFDCVLPTRIARNGTLMTSEGRMVIKNAKYAKDFTPIDENCDCYTCKNYTRAYVRHLLRTEETFGLRLTSYHNLRFLIKLMEDVRQAIREDRLGDFKEEFFEKYGYNKPNAKNF

SEQ ID NO: 60895 - protein, 383 aa, Solibacillus sp.
  REGION 1..383: note = tr|A0A2D1SVX9|A0A2D1SVX9_9BACL Queuine tRNA-ribosyltransferase OS=Solibacillus sp. R5-41; OX = 2048654 GN=tgt PE=3 SV=1
MTQSQPPIRYELIKTCAQTGARLGIVHTPHGSFETPTFMPVGTQATVKAMSPEELKEMDAGIILSNTYHLWLRPGNDIVKEAGGLHKFMNWDRPILTDSGGFQVFSLSKFRKIEEEGVHFRNHLNGDKLFLSPEKAMEIQNDLGSDIMMAFDECPPFPATYEYMLASVDRTTRWAKRCKEAHQRSEEQGLFGIIQGGEYEELRRRSAEALVELDFPGYAIGGLSVGEPKDIMNRVLDFTAPLMPADKPRYLMGVGSPDSLIDGAMRGIDMFDCVLPTRIARNGTLMTSEGRMVIKNAKYAKDFTPIDENCDCYTCKNYTRAYVRHLMRTEETFGLRLTSYHNLRFLIKLMEDVRQAIREDRLGDFKEEFFEKYGYNKPNAKNF

SEQ ID NO: 60896 - protein, 379 aa, unidentified
  source 1..379: note = Solibacter usitatus
  REGION 1..379: note = sp|Q029K6|TGT_SOLUE Queuine tRNA-ribosyltransferase; OS = Solibacter usitatus (strain Ellin6076) OX=234267 GN=tgt; PE = 3 SV=1
MPQISFEVVAECPHTRARAGVLHTAHGDIETPVFMPVGTQATVKGLTQRDLAEDLGVKILLSNTYHLYLRPGHELIRQMGGLHKFMSWPNAILTDSGGFQVFSLSGLRKIHEHGVVFQSHLNGDTHKFTPESTVDVQLAYGSDILMVLDECPEYPVSHEYARESMQRTVRWAREANEHFLERMKQMPTRHALFPIVQGSMFTDLRRECATALVDLDTDGYAIGGLSVGEPRPLSLEVVEATEAILPRTKPRYAMGVGMPAELPEYVARGIDMMDCVLPSRNARNGYLFTSEGRVIIKHARYKDDEGPLDPRCACYTCKSYSRAYLRHLFQSGEILFSVLATRHNIQRYLDIMREIRHAIISGSFPDYLRCVQSSLHDAG

SEQ ID NO: 60897 - protein, 377 aa, unidentified
  source 1..377: note = Solimicrobium silvestre
  REGION 1..377: note = tr|A0A2S9H119|A0A2S9H119_9BURK Queuine tRNA-ribosyltransferase OS=Solimicrobium silvestre; OX = 2099400 GN=tgt PE=3 SV=1
MLDFKLIKKDPNSAARRGQVTVNHGVIQTPIFMPVGTYGSVKAMSPLELKEIQAQIILGNTFHLWLRPGLEVVKKFGGLHKFMGWDQPILTDSGGFQVFSLGAMRKITEEGVKFASPISGERLFLSPEISMQIQKVLNSDIVMQFDECTPYEIDGRPATNDEAARSMRMSLRWAKRSMNEFNREENPNALFGIVQGGMFEHLRDESLAGLEELDFHGVAIGGLSVGEPKEDMLRVLQHVGPRLPANKPHYLMGVGTPEDLVAGVTNGIDMFDCVMPTRNARNGWLFTRFGDIKIKNARYKEDTAPLDSTCGCYACQNFSRAYLHHLHRTGEILGARLNTIHNLHYYLELMQEMRNALDVDAFSAFVVQFHADRARGV

SEQ ID NO: 60898 - protein, 383 aa, Solimonas aquatica
  REGION 1..383: note = tr|A0A1H9H5G2|A0A1H9H5G2_9GAMM Queuine tRNA-ribosyltransferase OS=Solimonas aquatica OX=489703; GN = tgt PE=3 SV=1
MNNSNTRMKFELLKTDGGARRGRLSFARGVVETPIFMPVGTYGTVKALSPEELLAVGSQIILGNTFHLMLRPGEQLIQQRFGSLHGFMHWDKPILTDSGGFQVWSLSGLRKITEEGVKFASPINGDRIFLSPERSIEVQHGLGSDIIMQFDECTPYPATEKQARKSMELSARWAARCKTAHGEAPGALFGIVQGGMHAPLRLESLQRLREIGFDGYAVGGLSVGEPEAERLQVLDAVGPQLPADRPHYLMGVGTPRDIVQGVARGIDMFDCVMPTRNARNGHLFTSQGVLKLRNAQYRDDPAPLDPACDCYTCQNYSRAYLHHLDRCDEMLGPRLNTIHNLHYYLKLMQRIRSAIEAGCFEAFASDFIASAEGKPAKSKAAPV

SEQ ID NO: 60899 - protein, 386 aa, unidentified
  source 1..386: note = Solimonas fluminis
  REGION 1..386: note = tr|A0A2S5TL42|A0A2S5TL42_9GAMM Queuine tRNA-ribosyltransferase OS=Solimonas fluminis OX=2086571; GN = tgt PE=3 SV=1
MKFELLHTDGQARRGRLQLQHGTVETPVFMPVGTYGTVKAMTPEDLRGIGAQIILGNTFHLMLRPGPEIIRAHGGLHGFMNWSGPILTDSGGFQVWSLSGLRKITEEGVKFQSPVNGDRIFLTPERSIEVQHALNSDIVMQFDECTPHPATEKQVRASMELSARWGQRCKLAHGDNPNALFGIVQGGMSAELRRESLQRLLDIGFDGYALGGLSVGETEAERLEVLDAIGPALPAGHPHYLMGVGTPRDLVQAVGRGIDMFDCVMPTRNARNGHLFTSEGVIKIRNARHRADQGPLDPKCGCYTCRHYTRAYLHHLDKCEEMLGGQLNTIHNLHYYQELARRMREAIEQNRFAAFSADFLASPEGAPSRTAAGEAGAPVEPRPAAE

SEQ ID NO: 60900 - protein, 375 aa, Solimonas sp.
  REGION 1..375: note = tr|A0A346N863|A0A346N863_9GAMM Queuine tRNA-ribosyltransferase OS=Solimonas sp. K1W22B-7; OX = 2303331 GN=tgt PE=3 SV=1
MKFELLHTDGGARRGRLQLQHGTVETPVFMPVGTYGTVKAMTPEDLRAIGAQIILGNTFHLMLRPGPEIIQAHGGLHGFMNWSGPILTDSGGFQVWSLSGLRKITEEGVKFQSPVNGDRIFLTPERSIEVQHALNADIVMQFDECTPHPATEKEVRASMELSARWAIRCKTAHGDNPNALFGIVQGGMSAELRRESLQRLRETGFDGYALGGLSVGETEAERLGVLDAIGPELPAGHPHYLMGVGTPRDLVQAVGRGIDMFDCVMPTRNARNGHMFTSEGVVKIRNAKYRADQGPLDPKCGCYTCRNYTRSYLYHLDKCEEMLGGQLNTIHNLHYYQELTRRMRAAIEEGRFAAFSADFLASPEGAASRTAAAAG

SEQ ID NO: 60901 - protein, 399 aa, unidentified
  source 1..399: note = Solirubrobacterales bacterium
  REGION 1..399: note = tr|A0A1M3BJI2|A0A1M3BJI2_9ACTN Queuine tRNA-ribosyltransferase OS=Solirubrobacterales bacterium 70-9 OX=1895833 GN=tgt PE=3 SV=1
MREDPRRLTFAIEARDGTARAGTIGTAHGPIETPTFIPLATKGSVRGLDGDEVAALGYQLILGNTYHLFVNPGPERIAAAGDLHGFMNWNRALITDSGGFQVFSLAHGGVANEVKGSGRSGGHDSSVEITEEGARFSSPRDGRELFISPEVSMEVQAALGADIALAFDECTPFHADRDYTARSTERTHRWLDRCIAWHDENGPERQALFGIVQGGTHADLRRESAEFISAADVDGLAIGGTLGRDKEEMAAVLAMTAPLLPEAAAKHLLGIGEVDDLLGGIALGLDVFDCAVPTRLARHGVALAPSPETRWRLDLRKGRWVGDKGPLVEGCPCPACTRHTRDYISYLSRAEELTAVRLIVLHNLTYMRELTTHARRAIQEGRFEAYRAAVLGGAAPWGA

SEQ ID NO: 60902 - protein, 401 aa, unidentified
  source 1..401: note = Solirubrobacterales bacterium
  REGION 1..401: note = tr|A0A1Q3NIC8|A0A1Q3NIC8_9ACTN Queuine tRNA-ribosyltransferase OS=Solirubrobacterales bacterium 67-14 OX=1895832 GN=tgt PE=3 SV=1
MRHDPARLTFEIHARDGDARRGTLQTPHGPVETPAFIPLATKGSVRGMSSREIEGMGYELVLGNTYHLLVAPGPERIAAAGGLHEFMGWEKAIITDSGGFQVFSLAHGGVSQEIKGSGRKMYGLAKTLGIEEEGVRFRSYKDGSELMLSPEESMRVQAALGSDIALVFDECTPFHADREYTARSTERTHRWLKRCLDWHEANGPAGQAVFGIIQGGTHADLREESCAAVSASAVDGISIGGTLGRDKEEMAEVLGFTVPHLPVEAPKHLLGIGEVDDLMRGIAIGLDGFDCAVPTRLARHGMALAPLPDKRFRIDVRKPGEVGNREPLVPGCPCIACADYDRDYLNYISKSEELTAVRLLVDHNLTYMERLMRGAREAISAGGFADYSEKILAGAAPWSAR

SEQ ID NO: 60903 - protein, 376 aa, unidentified
  source 1..376: note = Solirubrum puertoriconensis
  REGION 1..376: note = tr|A0A0W8EL53|A0A0W8EL53_9BACT Queuine tRNA-ribosyltransferase OS=Solirubrum puertoriconensis; OX = 1751427 GN=tgt PE=3 SV=1
MTFDLVAHDPQSKARAGVLTTDHGTIQTPIFMPVGTAGSVKAVHQREIKEDINAQIILGNTYHLYLRPGLDTLQKAGGLHKFNGWDRPILTDSGGYQVYSLSETRKIKEEGVKFRSHIDGSHHLFTPEGVMDIQRVIGADIIMAFDECTPWPCEYDYARRSMEMTHRWLKRCIERIDSTEPLYGYEQQLFPIVQGSTFRDLRKQSAEFIAEQGRAGNAIGGLSVGEPADLMYEMTELCCDILPVDKPRYLMGVGTPANILENIALGVDMFDCVLPTRNARNGMLFTTQGIINIKNKKWEQDFSPIDEELGGYASTFYSKSYVRHLFHASEYLAGMVASVHNLTFYLWLVRNAREQILAGTFREWKEKMVKQLMVRL

SEQ ID NO: 60904 - protein, 376 aa, Solitalea canadensis
  REGION 1..376: note = tr|H8KUE9|H8KUE9_SOLCM Queuine tRNA-ribosyltransferase OS=Solitalea canadensis (strain ATCC 29591 / DSM 3403 / NBRC 15130 / NCIMB 12057 / USAM 9D) OX=929556 GN=tgt P E=3 SV=1
MKFDLVVTDNSSSARAGLMQTDHGTIETPIFMPVGTAGTVKAVHQRELKDDIEAQIILGNTYHLYLRPGLDTIQKAGGLHKFNGWEHPILTDSGGYQVYSLSDIRKIKEEGATFQSHIDGSKHLFTPENVMDIQRVIGADIIMAFDECTPYPCEYTYARKSMEMTHRWLKRCCDRFDSTEGLYGYNQTLFPIVQGSTFKDLRKQSAETIASFEREGNAIGGLSVGEPAPEMYEMTELVCNILPKAKPRYLMGVGTPMNILECIALGVDMFDCVMPTRNARNGMLFTQHGIINIKNEKWKNDFSPIDETSDLYADQVYTKAYLRHLLQSKEILGAQIATLHNLHFYLWLVKEARKHIIQGDFIQWKNKMVVDMGKRL

SEQ ID NO: 60905 - protein, 376 aa, Solitalea koreensis
  REGION 1..376: note = tr|A0A521D940|A0A521D940_9SPHI Queuine tRNA-ribosyltransferase OS=Solitalea koreensis OX=543615; GN = tgt PE=3 SV=1
MDFKLLTTDKGSKARAGELTTDHGTVQTPIFMPVGTAGTVKGVHQRELKDDVQAQIILGNTYHLYLRPGLDTIQKAGGLHKFNGWDGPILTDSGGYQVYSLSEIRKIKEEGATFKSHIDGSKHLFTPENVMDIQRIIGADIIMAFDECAPYPCDYSYARKSMDMTHRWLKRCCDQFDKTEGLYGYNQTLFPIIQGSTYKDLRVRSAETIASFEREGNAIGGLSVGEPAEEMYEMTDIVCNILPKDKPRYLMGVGTPVNLLECIALGIDMFDCVMPTRNARNGMLFTKNGIINIRNEKWKNDFSPIDASSDLYSDQVYTKAYLRHLMHAKELLGAQIASLHNLHFYLWLVKEARKKIIEGEFIQWKNKMVVELGKRL

SEQ ID NO: 60906 - protein, 376 aa, unidentified
  source 1..376: note = Solitalea longa
  REGION 1..376: note = tr|A0A2S5A0D0|A0A2S5A0D0_9SPHI Queuine tRNA-ribosyltransferase OS=Solitalea longa OX=2079460; GN = tgt PE=3 SV=1
MKFELVATDNGSSARAGLMQTDHGTIETPIFMPVGTAGTVKAVHQRELRDDIQAQIILGNTYHLYLRPGLDTIQKAGGLHKFNGWERPILTDSGGYQVYSLSDIRKIKEDGATFQSHIDGSKHLFTPENVMDIQRIIGADIIMAFDECTPYPCDYTYARKSMEMTHRWLKRCCDRFDSTEGLYGYNQTLFPIVQGSTYKDLRIRSAETIASFEREGNAIGGLSVGEPAEEMYAMTEVVTNILPKSKPRYLMGVGTPMNILECIALGIDMFDCVMPTRNARNGMLFTKNGIINIKNEKWKNDFSPIDETSDLYADQVYTKAYLRHLMQSKEILAAQIASLHNLNFYLWLVKEARMHIIQGDFIQWKNKMVVDMAKRL

SEQ ID NO: 60907 - protein, 377 aa, Solobacterium moorei
  REGION 1..377: note = tr|A0A412PIY8|A0A412PIY8_9FIRM Queuine tRNA-ribosyltransferase OS=Solobacterium moorei OX=102148; GN = tgt PE=3 SV=1
MKQPVTFEITHICKQSGARTGILHTPHGDVETPMFMPVGTQATVKFVSPEELKNLGSGVVLANTYHLWLRPGEDIVDQAGGVQKFMNYKGPMLTDSGGFQVFSLADQRKITEEGVTFKNTLNGDTLFLSPEKSIQIQNKIGADIMMSFDECIPYPATREYVEKSTERTLRWALRGKQAHSRPEEQALFGIVQGGDYEDLRRYCAEKLIEMDFPGYAIGGTSVGEDKETMYRMVKWASDALPFDKPRYLMGVGAVNDLLEAVSRNVDMCDCVLPTRIARHGTLMTSEGRISIRKAIYKNDFTPLDPECDCYTCRNYTKAYLNHLQRTNEGFGTRLMSIHNLRFLVKLMEDARKAIKEDRFNDFKEETLAKMKFDHRGF

SEQ ID NO: 60908 - protein, 377 aa, Solobacterium moorei; identical to SEQ ID NO: 60907
  REGION 1..377: note = tr|E7MPH1|E7MPH1_9FIRM Queuine tRNA-ribosyltransferase OS=Solobacterium moorei F0204; OX = 706433 GN=tgt PE=3 SV=1

SEQ ID NO: 60909 - protein, 377 aa, Soonwooa buanensis
  REGION 1..377: note = tr|A0A1T5G1Z4|A0A1T5G1Z4_9FLAO Queuine tRNA-ribosyltransferase OS=Soonwooa buanensis OX=619805; GN = tgt PE=3 SV=1
MSKFFEIEKTSQSKARAGVLHTDHGDIQTPIFMPVGTVASVKTVHQRELKDDINAQIILGNTYHLMLRPGMDIMQQAGGLHKFMNWDRPILTDSGGYQVFSLSKSRKMTEEGVKFKSHIDGSYHFISPEKSMEIQRQIGADIFMAFDECTPYPCEYNQAKLSMELTHRWLKRCVDWTKENEELYGHKQRLFPIVQGSTYSDLRKISAEVISEAGAEGNAIGGLSVGEPEEEMYRITNEVTDILPKDKPRYLMGVGTPWNILESIGLGVDMMDCVMPTRNARNAMLFTWQGVINMKNEKWKNDFSALDEFGTSFVDRDYSKAYVRHLFVAKEYLAKQIASIHNLAFYLDLVKVAREHIVAGDFYEWKDSIIPQLKQRL

SEQ ID NO: 60910 - protein, 366 aa, unidentified
  source 1..366: note = Sorangiineae bacterium
  REGION 1..366: note = tr|A0A1W9QHE9|A0A1W9QHE9_9DELT Queuine tRNA-ribosyltransferase OS=Sorangiineae bacterium NIC37A_2; OX = 1970199 GN=tgt PE=3 SV=1
MSPVHFRTIQTSGAARAGVLETRSGEVLTPAFMPVGTQAAVKALDRDEVLATGARAVIMNTYHLWLRPGADEVESLGGLHEFSRLPCTLVTDSGGFQAFSLAERTKVSEDGFEFSSHIDGRRMALSPERAMQVQGQLGADIAMQLDVCPPGDAPRGEVALAVERTTRWAERCLAARRPEQAVFGIVQGGIHVDLRVRHAEALGAMPFDGLALGGFSVGEDPAEMHRVLPLVVPSVDPARIRYLMGVGTPKDLLIAVRAGVDLFDCVMPTRNARNGHIFVRGGRLNIKNAAHRLDRQVLEAGCDCFTCREGYCRAYLRHLYIAGEILALRLLSIHNLRFYARLLEGAREAILEGRFERYFEAWFPST

SEQ ID NO: 60911 - protein, 394 aa, Sorangium cellulosum
  REGION 1..394: note = sp|A9FI06|TGT_SORC5 Queuine tRNA-ribosyltransferase; OS = Sorangium cellulosum (strain So ce56) OX=448385 GN=tgt; PE = 3 SV=1
MSRTPGFSFSELARDGHARTGVLSTPHGDVLTPTFMPVGTQGSVKTLTPAEVAATGARIVLGNTYHLWLRPGPELVAQLGGLHAFTRWPHAMLTDSGGFQAFSLAERRTLVEDGFVFRSHLDGARKALTPEVAMEVQGLLGADIAMQLDVCPPGGAPRPEVEEACRLTTRWGKRCLAAKRPSQALFGIVQGGTSVALRMAHADELGALPFDGLALGGFSVGEPIAMMHEVVAQIGPHLDPTRPRYLMGVGTPIDLVHAIGAGVDMFDCVLPTRNARNGQALTQHGKIVIKQARYKEDRSPLDPTCACPTCTGGYSRAYLRHLYMAGEILVLRLLTEHNLHLYGRLMREARAAIAEGRYAAFARAWLGASDAGNANDANETVGATESTESTESTE

SEQ ID NO: 60912 - protein, 373 aa, Sorangium cellulosum
  REGION 1..373: note = tr|S4XGF8|S4XGF8_SORCE Queuine tRNA-ribosyltransferase OS=Sorangium cellulosum So0157-2; OX = 1254432 GN=tgt PE=3 SV=1
MSRTPGFAFSELARDGHARTGVLSTPHGDVPTPTFMPVGTQGSVKTLTPAEVAATGARIVLGNTYHLWLRPGPELVAQLGGLHAFTRWPHAMLTDSGGFQAFSLAERRTLVEDGFVFRSHLDGARKALTPEVAMEVQGLLGADIAMQLDVCPPGGAPLAEVEEACRLTTRWGKRCLAAKRPTQALFGIVQGGTSVALRTAHADELAALPFDGLALGGFSVGEPIALMHEVVAQIAPRLDPSRPRYLMGVGTPLDLVHAIGAGVDMFDCVLPTRNARNGQALTQHGKIVIKQARYKDDRSPLDPTCACPTCAGGYSRAYLRHLYMAGEILVLRLLTEHNLHLYGRLMREARAAIAEGRYAAFARAWLGARDATE

SEQ ID NO: 60913 - protein, 375 aa, unidentified
  source 1..375: note = Spartobacteria bacterium
  REGION 1..375: note = tr|A0A2A2RGS3|A0A2A2RGS3_9BACT Queuine tRNA-ribosyltransferase OS=Spartobacteria bacterium Tous-C9RFEB OX=1982327 GN=tgt PE=3 SV=1
MSSSFTLEATDSAARAGTLQTRRGPVQTPVFMPVGTQATVKAMTPEELREVGAQIILGNTYHLHVRPGEKLISRLGGLHRFMHWDGPILTDSGGFQVFSLAKLRKISEEGVRFQNHLDGTPTFIGPETSMEIQRDLGSDIVMLFDECPPHPCAHEEADKSLDLTLRWARRCKDWWATQPQESRPLLFGITQGSSYPDLREKSARALVDIGFDGYAIGGVSVGEPEKEMFCAVESAIPFLPHDHARYAMGLGTPPQIIEMIARGVDMFDCVLPTRLARNGTAFTASGTINLKNAPYAEDSSPIEEGCRCYACKNFTRAYLRHLVKAEEILGLRLISIHNLHFYIGLARTAREHILAGTFQDFRKDFVANYAVRSTE

SEQ ID NO: 60914 - protein, 114 aa, unidentified
  source 1..114: note = Spartobacteria bacterium
  REGION 1..114: note = tr|A0A3C0R6H4|A0A3C0R6H4_9BACT tRNA guanosine(34) transglycosylase Tgt (Fragment) OS=Spartobacteria bacterium OX=2052183 GN=tgt PE=4 SV=1
DMFDCVLPTRLARNGTAFTASGTLNLKNAEFAMQKGPIENGCICAACCEFSRSYIRHLIKAEEILGLRLITLHNLHFYLDLMKRTRAAIAFGNFSEFQRHFISGYRVRPIIAGE

SEQ ID NO: 60915 - protein, 414 aa, Sphaerobacter thermophilus
  REGION 1..414: note = tr|D1C314|D1C314_SPHTD Queuine tRNA-ribosyltransferase OS=Sphaerobacter thermophilus (strain DSM 20745 / S 6022) OX=479434 GN=tgt PE=3 SV=1
MIERDNAASHSGGKQPHHFEIQASDPTTRARVGILRTRRGEVRTPAFMPVGTQASVKSLTPDEVRASGTDIILANTYHLMLRPGLAVLEAAGGVQRFMAWDGPILTDSGGFQVFSLAQRREVREEGVTFRSHLDGSLWELTPESAIDLQLGFGSDIIMPLDELVGYGSDDAAQAAAMERTHRWLRRAIERFAARQADVAPDSRPMLFGIAQGGFDPDRRRESASFLRDLPLDGSAIGGLSVGEPKEVMAEMLDASIDGLPPERPRYLMGVGSPEDLWRGVAAGVDMFDCVHPTRVARRGALFTPDGRVDVTAARFRTHFGPVDETCNCPTCTTFSAAYLHHLFRARELLAYRLGTIHNLWFIQREMARIRDAIARGTFVEEMRSFLDRYRPADSAAAARQRQRHRGLRAEAGTA

SEQ ID NO: 60916 - protein, 379 aa, unidentified
  source 1..379: note = Sphaerochaeta coccoides
  REGION 1..379: note = tr|F4GK59|F4GK59_SPHCD Queuine tRNA-ribosyltransferase OS=Sphaerochaeta coccoides (strain ATCC BAA-1237 / DSM 17374 / SPN1) OX=760011 GN=tgt PE=3; SV = 1
MSHPIHTVTHIDAGSHARCGLLSLPHGTIETPAFMPVGTNGTVKGIYHEKVEQMGYRLILGNTYHLYLRPGCDVLESFGGLHAFSSWKHNILTDSGGFQVFSLSKLRKIKDAGVTFQSHIDGSRHAFTPEKVVDIQTIIGSDIAMVLDVCTPPDIDYRAAQEAWRVTKLWAERSLIRRDENGEKFRGCLFGIVQGNFFKELRKESAETISAMDFPGIAIGGLSVGETPDRFSDFLAYTTEMVTPEKPRYVMGIGSPDYILDAVANGIDLFDCVLATRTARHGLLFSDDGPVNITKAIHEFSSEPVEPTCGCTACTQYSRGYIRHLFKAGEMLGPMLATEHNLMYLHTLMERIKNAIKNNSFSVFRKEYLARYYGEKKNV

SEQ ID NO: 60917 - protein, 373 aa, unidentified
  source 1..373: note = Sphaerochaeta dissipatitropha
  REGION 1..373: note = tr|A0A375AMN0|A0A375AMN0_9SPIO Queuine tRNA-ribosyltransferase OS=Sphaerochaeta dissipatitropha; OX = 1945881 GN=tgt PE=3 SV=1
MKIFQQLHQDTTSKARLGLLTLGHGQVETPVFMPVGTNGTVKGMFHEDVKKIGYSLILGNTYHLYLRPGLEVLSQFGGLHSFSNWDGNLLTDSGGFQVFSLSGLRKIGEKGVTFQSHIDGSKHVFTPESVVDTQKIIGSDIAMCLDVCTPPEINHRAATEAMHITHSWAKRALTHRKELGESFKGNLFGIVQGNFYEDLRKQSAEFFNEMDFPGIAIGGLSVGETSEQFVHYLQYTADLVTREKPRYVMGIGSPDYILEAVENGIDMFDCVLATRMARNGAVFTDDGVVTLKKAMHKFDQRPIEERCNCRACTQYSRAYMHHMVKTGEMLGGMLATEHNLTYFYRLMQQVRQAIRENRFASFKRDYLARFYAK

SEQ ID NO: 60918 - protein, 373 aa, Sphaerochaeta globosa
  REGION 1..373: note = tr|F0RZ04|F0RZ04_SPHGB Queuine tRNA-ribosyltransferase OS=Sphaerochaeta globosa (strain ATCC BAA-1886 / DSM 22777 / Buddy) OX=158189 GN=tgt PE=3; SV = 1
MKIFQEIHQDTTSKARLGLLTLGHGQVETPVFMPVGTNGTVKGMFHEDVKKIGYTLILGNTYHLYLRPGLEVLSQFGGLHSFSNWDGNLLTDSGGFQVFSLSGLRKIGEKGVTFQSHIDGSKHIFTPESVVDTQRVIGSDIAMCLDVCTPPEIDHRAATEAMHITHAWAKRALDHRTQLAGDFKGNLFGIVQGNFYEDLRKQSAEFFNEMDFPGIAIGGLSVGETSEQFTHFLQYTADLVTREKPRYVMGIGSPDYILEAVENGIDMFDCVLATRMARNGAVFTDDGVVTLKKAIHKFDQHPIEEGCTCRACTQYSRAYMHHMVKTGEMLGGMLATEHNLTYFYRLMQQIRLAIRENRFASFKRDYLARFYAK

SEQ ID NO: 60919 - protein, 373 aa, unidentified
  source 1..373: note = Sphaerochaeta halotolerans
  REGION 1..373: note = tr|A0A372MFQ1|A0A372MFQ1_9SPIO Queuine tRNA-ribosyltransferase OS=Sphaerochaeta halotolerans; OX = 2293840 GN=tgt PE=3 SV=1
MALFRTIHQDTSSNARLGILSLGHGEVETPVFMPVGTKGTVKAMFHEDVKKIGYKLILGNTYHLYLKPGLEVLSQFGGLHNFSHWDGNLLTDSGGFQVFSLSGLRKIGEKGVTFQSHIDGSKHIFTPENVVDTQNVIGSDIAMCLDVCTPPDIDYRAATEAMQITHAWAQRAIEHRQHLGESFKGNLFGIVQGNFYEDLRKQSAEFFNEMDFPGIAIGGLSVGESREQFSHFLGYTAELVTKEKPRYVMGIGSPDYILEAVENGIDMFDCVLATRMGRNGGIFTDDGIITLKKAIHTFDHGPLEEGCTCRACTQYSRAYMHHLIKTGEMLGGMLATEHNLTYFYRLMERVRQAIRENRFASFKREYLARFYAK

SEQ ID NO: 60920 - protein, 374 aa, Sphaerochaeta pleomorpha
  REGION 1..374: note = tr|G8QW33|G8QW33_SPHPG Queuine tRNA-ribosyltransferase OS=Sphaerochaeta pleomorpha (strain ATCC BAA-1885 / DSM 22778 / Grapes) OX=158190; GN = tgt PE=3 SV=1
MQTIFTETHKDAHSNARLGILSLPHGDVQTPAFMPVGTNGTVKGIYHDKIEEIGYNLILGNTYHLYLRPGLEVLEKFGGLHNFSHWNHNLLTDSGGFQVFSLSGLRKISEKGVAFQSHIDGSRHIFTPEKVVDIQKVIGSDIAMCLDVCTPPNIEYRAAKEAMHITHNWAERALNHRKELGDAFKGNLFGIVQGNFYKDLRKESAEVLSAMDFPGIAIGGLSVGETTDQFNEFLAYTADIVTKEKPRYVMGIGSPDYILEAVENGIDMFDCVLATRMARNGAVFTDDGIVTLKKAMHKFDQGPIESECHCTACTEYSRAYMHHMVKTNEMLGGMLATEHNLTYFYRLMEKIRLAIAEDRFSSFKKDYLARFYKR

SEQ ID NO: 60921 - protein, 386 aa, Sphaerochaeta sp.
  REGION 1..386: note = tr|A0A3C1LQR8|A0A3C1LQR8_9SPIO Queuine tRNA-ribosyltransferase OS=Sphaerochaeta sp. OX=1972642; GN = tgt PE=3 SV=1
MENRIFTLHHKDSHCNARTGEIRLPHGVVQTPAFMPVGTNGTVKGIHHDDVAKIGYNLILGNTYHLYLRPGIEVLKTFDGLHNFSHWNGNILTDSGGFQVFSLSQLRKIHEEGVKFQSHIDGSRHIFTPEKVVDIQQVIGSDIAMMLDVCSAPGISWKETLNAMDITHLWAERAIVRRDSLKDLTGRAFRGNLFGIVQGGFYEDLRIKSAQTISSMDFPGIAIGGLSVGESKEDFCRFLAITADNITESKPRYVMGIGTPDYILEAIENGIDLFDCVLATRTARNGSVFTDDGMLTLSRSFNEFDHGPIQEGCTCRACTEYSLAYMRHMFKCNEMLGGMLATEHNLTYLYNLVLKARKAIEENRFQSFKEDYLKRFYANGGRCIRG

SEQ ID NO: 60922 - protein, 373 aa, Sphaerochaeta sp.
  REGION 1..373: note = tr|A0A3D4N308|A0A3D4N308_9SPIO Queuine tRNA-ribosyltransferase OS=Sphaerochaeta sp. OX=1972642; GN = tgt PE=3 SV=1
MDRIFTKTHQDENSLARCGIVSLPHGDVVTPTFMPVGTNGTVKGMYHDAVADIGYNLILGNTYHLYLRPGIEVLKQYGGLHNFSNWKHNILTDSGGFQIFSLSQLRKIKEDGVVFQSHIDGSKHHLTPEKVVDIQQVIGSDILMCLDVCTAPDITYRKAREAWEITRSWAKRSYDHWNSLEGFEGKLFGIVQGNFFKDLRKESALAIAEIDFPGIAIGGLSVGETPEVFSEFLAYTTEYIPTDRPRYVMGIGSPDYILDAVANGIDLFDCVLATRSARNGSVFTDDGMIQMKKAVHEFDTGPLSEGCTCTACTKYSRGYVRHMFKAGEMLGGMLATEHNLTYLYHLMEKTRQAILEDRFLEFKRSYLARYYGK

SEQ ID NO: 60923 - protein, 376 aa, unidentified
  source 1..376: note = Sphaerospermopsis kisseleviana
  REGION 1..376: note = tr|A0A1Z4UHX1|A0A1Z4UHX1_9CYAN Queuine tRNA-ribosyltransferase OS=Sphaerospermopsis kisseleviana NIES-73 OX=1973480 GN=tgt PE=3 SV=1
MSKFSFQLLATCSQTKARVGVFSTPHGIVETPRFMPVGTLATVKTITPAQLKDTGAQMVLSNTYHLHLQPGENIVAGGGGLHKFMGWNSPMLTDSGGFQVFSLSEMRKITEEGVTFRSPHDGKIIKLTPERSIEIQNTLGADVIMAFDECPPYPATRQEVEAATDRTYRWLERCIAAHQRTDQALFPIVQGGVYLDLRARAASELAKLDMPGFAIGGVSVGEPPELMAQIVKATTPLLPANKPRYLMGVGTYKEMAIAIASGIDLFDCVIPTRWARHGTAIVNGERWNLKNAKFREDFTPLDENCPCYACTNFTRAYISHLVRSQEILAYTLLSIHNITELIRFTQKIRESILSDRFVEDFGHWLKDDGEEVTGDR

SEQ ID NO: 60924 - protein, 376 aa, unidentified
  source 1..376: note = Sphaerospermopsis reniformis
  REGION 1..376: note = tr|A0A480A831|A0A480A831_9CYAN Queuine tRNA-ribosyltransferase OS=Sphaerospermopsis reniformis; OX = 531300 GN=tgt PE=3 SV=1
MSKFSFQLLATCSQTKARVGVFSTPHGIVETPRFMPVGTLATVKTITPAQLKDTGAQMVLSNTYHLHLQPGENIVAGGGGLHKFMGWNNPMLTDSGGFQVFSLSEMRKITEEGVTFRSPHDGKIIKLTPERSIEIQNTLGADVIMAFDECPPYPATRQEVEAATDRTYRWLERCIAAHQRTDQALFPIVQGGVYLDLRARAASELAKLDMPGFAIGGVSVGEPPELMAQIVKATTPLLPANKPRYLMGVGTYKEMAIAIASGIDLFDCVIPTRWARHGTAIVNGERWNLKNAKFREDFTPLDETCPCYACTNFTRAYISHLVRSQEILAYTLLSIHNITELIRFTQKIRESILSDRFVEDFGHWLKDDGEEVTGDR

SEQ ID NO: 60925 - protein, 379 aa, Sphaerotilus hippei
  REGION 1..379: note = tr|A0A318H0E4|A0A318H0E4_9BURK Queuine tRNA-ribosyltransferase OS=Sphaerotilus hippei OX=744406; GN = tgt PE=3 SV=1
MLKFDLLGTDGHARRGRLTLNHGIVETPIFMPVGTYGTVKGVMPRDLEAMGAQIILGNTFHLWMRPGLDVMAQFGGLHRFENWHKPILTDSGGFQVWSLGEMRKISEEGVRFASPVNGDKLFLTPETSVQIQTVLNSDIVMQFDECTPYWQGVKGSGHITTEAEARVSMELSLRWARRSQAEFERLENPNALFGIVQGGMFESLRQESLDALVELDLPGYAIGGVSVGEPKDLMLQIMAHTPHRLPAHKPRYLMGVGTPEDLVEGVACGVDMFDCVMPTRNARNGHLFTRYGDLKIRNARHKSDERPLDETCGCHTCQNFSRAYLHHLDRCGEMLGPMLTSIHNLHYYLNLMKEVRAALDAGTFGAFVQQFKADRARGV

SEQ ID NO: 60926 - protein, 379 aa, Sphaerotilus natans
  REGION 1..379: note = tr|A0A059KQJ0|A0A059KQJ0_9BURK Queuine tRNA-ribosyltransferase OS=Sphaerotilus natans subsp. natans DSM 6575 OX=1286631 GN=tgt PE=3 SV=1
MLQFDLLATEGHARRGRLTLNHGVIQTPIFMPVGTYGTVKGVMPRDLEAMGAQIILGNTFHLWMRPGLDVMKQFGGLHRFENWNKPILTDSGGFQVWSLGDMRKISEEGVKFASPVNGDKLFMTPEVSMQIQTVLNSDIVMQFDECTPYWQGAKGSGHITSEKEARSSMELSMRWAKRSKAEFERLGNPNALFGIVQGGMFENLREESLAGLVEMDFPGYAIGGVSVGEPKDEMLRIMNHTPHRLPAHKPRYLMGVGTPEDLVDGVAAGVDMFDCVMPTRNARNGHLFTRFGDLKIRNARHRSDERPLDETCACHTCQNFSRAYLHHLDRCGEMLGPMLTSIHNLHYYLNLMQEVRDALDAGRFEAFRAQFKADRARGV

SEQ ID NO: 60927 - protein, 379 aa, Sphaerotilus natans
  REGION 1..379: note = tr|A0A5C1Q285|A0A5C1Q285_9BURK Queuine tRNA-ribosyltransferase OS=Sphaerotilus natans subsp. sulfidivorans OX=639200 GN=tgt PE=3 SV=1
MLQFDLLATEGHARRGRLTLNHGVIQTPIFMPVGTYGTVKGVMPRDLEAMGAQIILGNTFHLWMRPGLDVMKQFGGLHKFENWNKPILTDSGGFQVWSLGDMRKISEEGVKFASPVNGDKLFMTPEVSMQIQTVLNSDIVMQFDECTPYWQGAKGSGHITSEKEARSSMELSMRWAKRSKAEFERLGNPNALFGIVQGGMFENLREESLAGLVEMDFPGYAIGGVSVGEPKDEMLRIMNHTPHRLPAHKPRYLMGVGTPEDLVDGVAAGVDMFDCVMPTRNARNGHLFTRFGDLKIRNARHRSDERPIDETCSCHTCQNFSRAYLHHLDRCGEMLGPMLTSIHNLHYYLNLMQEVRDALDAGRFEAFRAQFKADRARGV

SEQ ID NO: 60928 - protein, 376 aa, unidentified
  source 1..376: note = Sphingobacteriaceae bacterium
  REGION 1..376: note = tr|A0A4Q5SKX8|A0A4Q5SKX8_9SPHI Queuine tRNA-ribosyltransferase OS=Sphingobacteriaceae bacterium; OX = 2021370 GN=tgt PE=3 SV=1
MKFSLTAQDKLSKARAGEITTDHGTIQTPIFMPVGTAGTVKAVHQRELNDDIKAQIILGNTYHLYLRPGLDIIEGAGGLHKFNGWDKPILTDSGGYQVYSLTEVRKIKEEGVTFRSHIDGSKHLFTPENVMDIQRVIGADIIMAFDECTPYPCDYSYAKRSIEMTHRWLKRCCDRFDSTEPKYGYNQTLFPIVQGSVYKDLRVRSAEVIASFEREGNAIGGLSVGEPAEEMYAMTEIVCDILPPQKPRYLMGVGTPVNILENIALGIDMFDCVMPTRNARNGMLFTKNGVINMRNKKWENDFSPIETDSDLFADKAYSKAYLRHLIHSGEILGAQIATLHNLHFYLWLVNEAREKIIAGEFYHWKEKMVKQLGQKL

SEQ ID NO: 60929 - protein, 376 aa, unidentified
  source 1..376: note = Sphingobacteriaceae bacterium
  REGION 1..376: note = tr|A0A1X9Z6M7|A0A1X9Z6M7_9SPHI Queuine tRNA-ribosyltransferase OS=Sphingobacteriaceae bacterium GW460-11-11-14-LB5 OX=1986952 GN=tgt PE=3 SV=1
MKFSLQANDPLSKARAGTVTTAHGEIQTPIFMPVGTAGTVKAVHQRELKDDIDAKIILGNTYHLYLRPGLDILEKAGGLHQFIGWDRPILTDSGGYQVYSLSKVRKIKEEGVTFHSHIDGSKHLFTPEYAMDIQRTIGADIIMAFDECTPYPCDYTYAAQSIKMTHRWLKRCCARFDSTEPKYGFDQTLFPIVQGSVYKDLRIKSAEFIASMDREGNAIGGLSVGEPAEEMYAMTEVVCNILSEEKPRYLMGVGTPINILENIALGIDMFDCVMPTRNARNGMLFTRNGIINIRNKKWENDFSPLDAESDLHADLVTSKAYLRHLVHSKEMLGAQIATLHNLHFYLWLVKQAREKIIAGEFYEWKNKMVKVLGNKL

SEQ ID NO: 60930 - protein, 376 aa, unidentified
  source 1..376: note = Sphingobacteriales bacterium
  REGION 1..376: note = tr|A0A258WYC7|A0A258WYC7_9SPHI Queuine tRNA-ribosyltransferase OS=Sphingobacteriales bacterium 16-39-50 OX=1970581 GN=tgt PE=3 SV=1
MKFKLEASDKSSKARAGEIITDHGIIKTPIFMPVGTAGSVKAVHQHELSEDIKAQIILGNTYHLYLRPGLETLQLAGGLHKFNGWDKPLLTDSGGYQVYSLSGVRKIKEEGVTFRSHIDGSKHLFTPESVMDTQRVIGADIIMAFDECTPYPCEYGYARRSMEMTHRWLKRCCERFDTTLPLYGFDQTLFPIVQGSVYKDLRKQSAEVIASFEREGNAIGGLSVGEPAEEMYEMTDIVTDILPKDKPRYLMGVGTPVNILENIALGIDMFDCVMPTRNARNGMLFTKNGIINIRNERWKNDFSPLEEDSDLFADRNYSKAYLRHLAHSKEILGAQIATLHNLHFYLWLVNEAREKIIAGDFYDWKNKMVVQLAQRL

SEQ ID NO: 60931 - protein, 379 aa, unidentified
  source 1..379: note = Sphingobacteriales bacterium
  REGION 1..379: note = tr|A0A1M3HCJ5|A0A1M3HCJ5_9SPHI Queuine tRNA-ribosyltransferase OS=Sphingobacteriales bacterium 50-39 OX=1895841 GN=tgt PE=3 SV=1
MAALTFDLERQCPHSAARAGRIVTDHGEIPTPIFMPVGTVGSVKAVSQQQLKEDVKARIILGNTYHLYLRPGLEVLEAAGGIHRFNGWDRPILTDSGGYQVFSLAGTRKIQEDGVVFQSHIDGSRHLFSPEKVMDIQRVIGGDIIMAFDECPPYPSEYAYAEKSMHLTHRWLDRCFERFNGTPDKYGYTQNLFPIVQGSVFPDLRKASCAYVSGKGAVGNAIGGLSVGEPEAQLYEICEACCTDLPADKPRYLMGVGTPWNILECIARGVDMFDCVMPTRNGRNAMLFTSKGVINIDNKKWEKDFSPIDDGIDSEWSQYYSKAYLRHLVKSKEILGLTIASVHNLAFYLHLVTEARKHIQAGDFVSWKNEQVPLLQTRL

SEQ ID NO: 60932 - protein, 377 aa, unidentified
  source 1..377: note = Sphingobacteriia bacterium
  REGION 1..377: note = tr|A0A258MYX3|A0A258MYX3_9BACT Queuine tRNA-ribosyltransferase OS=Sphingobacteriia bacterium 35-40-8 OX=1970576 GN=tgt PE=3 SV=1
MAALRFNLEASAGKARAGTIQTDHGTIQTPIFMPVGTVGTVKAVTQQQLKLDVQAQIILGNTYHLYLRPGTEVLEAAGGLHKFMGWDRPILTDSGGYQVFSLAANRKIKEEGVVFQSHIDGSKHLFSPESVMDIQRNIGADIIMAFDECPPYPSDYAYAKKSMELTHRWLTRCVNRLAETPDKYRYTQNLFPIVQGSTFPDLRKASCEFIASKGAVGNAIGGLSVGEPIEMMYEFTNLCCEILPADKPRYLMGVGTPWNLLECIDIGIDMFDCVMPTRNGRNGMLFTTQGVINIRNKKWYQDFSPIDPGLPSETSQYYTKAYLRHLFVGEEILGLQLASIHNLSFYLWLVGEARRNILEGNYVSWKQQILPILQQRL

SEQ ID NO: 60933 - protein, 379 aa, unidentified
  source 1..379: note = Sphingobacteriia bacterium
  REGION 1..379: note = tr|A0A1G3J6J5|A0A1G3J6J5_9BACT Queuine tRNA-ribosyltransferase OS=Sphingobacteriia bacterium RIFOXYD2_FULL_35_12 OX=1802167 GN=tgt PE=3 SV=1
MAALSFTLNNTANGSAARAGVIETDHGTIQTPIFMPVGTVGSVKAVTQQQLKLDVQAQIILGNTYHLYLRPGTEVLEAAGGLHRFNGWDRPILTDSGGYQVFSLAANRKIKEEGVIFQSHIDGSKHLFSPESVMDIQRSIGADIIMAFDECPPYPSTYEYAKKSMELTHRWLNRCIARLAETPDKYGYTQNLFPIVQGSTYKDLRKASCEFIASRGAVGNAIGGLSVGEPEDMMYEFTALCTEHLPLDKPRYLMGVGTPWNLLECIDLGIDMFDCVMPTRNGRNGMLFTTQGVINIRNKKWYKDFSPIDPGLPSETSQYYTKAYLRHLFVAEEILGLQIASIHNLSFYLWLVGEARKHILDNTFSSWKKEMLEILKRRL

SEQ ID NO: 60934 - protein, 376 aa, unidentified
  source 1..376: note = Sphingobacterium alimentarium
  REGION 1..376: note = tr|A0A4R3W2Z8|A0A4R3W2Z8_9SPHI Queuine tRNA-ribosyltransferase OS=Sphingobacterium alimentarium; OX = 797292 GN=tgt PE=3 SV=1
MKFTLQVQDKLSQARAGVLETAHGKIETPIFMPVGTAGTVKAVHQHELVNDIQAQIILGNTYHLYLRPGLDVLNKAGGLHKFNGWDKPILTDSGGYQVYSLTEVRKIREEGVTFRSHVDGSKHLFTPENVMDTQRIIGADIIMAFDECTPYPCDYNYARRSLDMTHRWLKRCCDRFDSTEPLYGYDQTLFPIVQGSVYKDLRAKSAEVIASFEREGNAIGGLSVGEPAEEMYAMTEVVTNILPKDKPRYLMGVGTPINILENIALGIDMFDCVMPTRNARNGMLFTRNGIINIKNEKWKDDFSPIEAESDLMMDQVYSKAYLRHLIRSQEILGAQIASLHNLHFYLWLVKQAREKIIEGTFYEWKEKMVKILGQRL

SEQ ID NO: 60935 - protein, 376 aa, unidentified
  source 1..376: note = Sphingobacterium alkalisoli
  REGION 1..376: note = tr|A0A4U0GYP5|A0A4U0GYP5_9SPHI Queuine tRNA-ribosyltransferase OS=Sphingobacterium alkalisoli; OX = 1874115 GN=tgt PE=3 SV=1
MIFTLQAQDKLSQARAGVMETAHGKIETPIFMPVGTAGTVKAVHQHELVNDIQAQIILGNTYHLYLRPGLDVLNKAGGLHKFNGWDKPILTDSGGYQVYSLTEVRKIKEEGVTFRSHIDGSKHLFTPENVMDTQRVIGADIIMAFDECTPYPCDYNYARRSLDMTHRWLKRCCDRFDCTDPLYGYDQTLFPIVQGSVYKDLREKSAEVIASFEREGNAIGGLSVGEPAEEMYAMTEVVTKILPYEKPRYLMGVGTPINILENIALGIDMFDCVMPTRNARNGMLFTRNGIINIKNEKWKDDFSAIEAESDLMMDQVYSKAYLRHLIRSQEILGAQIASLHNLHFYLWLVKQAREKILEGTFYDWKEKMVKVLGQRL

SEQ ID NO: 60936 - protein, 376 aa, unidentified
  source 1..376: note = Sphingobacterium cellulitidis
  REGION 1..376: note = tr|A0A235E4N3|A0A235E4N3_9SPHI Queuine tRNA-ribosyltransferase OS=Sphingobacterium cellulitidis; OX = 1768011 GN=tgt PE=3 SV=1
MNFTLQAQDKFSRARAGEIETAHGKIQTPIFMPVGTAGTVKAVHQHELVNDIQAQIILGNTYHLYLRPGLDVLNKAGGLHKFINWDRPILTDSGGYQVYSLTEVRKIKEEGVTFRSHIDGSKHLFTPENVMDTQRIIGADIIMAFDECTPYPCDYRYARRSMEMTHRWLKRCCDRFDSTDPLYGYDQTLFPIVQGSVYKDLREKSAETIASFNREGNAIGGLSVGEPAEEMYAMTEVVTNILPHDKPRYLMGVGTPVNLLENIALGIDMFDCVMPTRNARNGMLFTQNGIINIKNEKWKDDFSPIEAESDLLVDQIHSKAYLRHLIRSQEILGAQIASLHNLHFYLWLVNQAREKIIDGTFYDWKNKMVPVLGQRL

SEQ ID NO: 60937 - protein, 376 aa, Sphingobacterium daejeonense
  REGION 1..376: note = tr|A0A4U9JJH8|A0A4U9JJH8_9SPHI Queuine tRNA-ribosyltransferase OS=Sphingobacterium daejeonense; OX = 371142 GN=tgt PE=3 SV=1
MNFTLQAQDKFSKARAGEIETAHGKIQTPIFMPVGTAGTVKAVHQHELVNDIQAQIILGNTYHLYLRPGLDVLNKAGGLHKFINWERPILTDSGGYQVYSLTEVRKIKEEGVTFRSHIDGSKHLFTPENVMDTQRIIGADIIMAFDECTPYPCDYRYARKSMEMTHRWLKRCCDRFDSTEPLYGYDQTLFPIVQGSVYKDLREKSAETIASFNREGNAIGGLSVGEPAEEMYAMTEVVTNILPHDKPRYLMGVGTPVNLLENIALGIDMFDCVMPTRNARNGMLFTQNGIINIKNEKWKDDFSPIEAESDLLVDQIHSKAYLRHLIKSQEILGAQIASLHNLHFYLWLMEQARAKILDGTFYDWKNKMVKVLDQRL

SEQ ID NO: 60938 - protein, 376 aa, unidentified
  source 1..376: note = Sphingobacterium deserti
  REGION 1..376: note = tr|A0A0B8T2Q0|A0A0B8T2Q0_9SPHI Queuine tRNA-ribosyltransferase OS=Sphingobacterium deserti; OX = 1229276 GN=tgt PE=3 SV=1
MKFTLEAKDKGSNARAGVVETAHGNIQTPIFMPVGTAGTVKAVHQHELVQDIQAQIILGNTYHLYLRPGLDVLQKAGGLHKFNHWDGPILTDSGGYQVYSLTEVRKIREEGVTFRSHIDGSKHLFTPENVMDTQRVIGADIIMAFDECTPYPCEYSYARKSLDMTHRWLKRCVDRFDSTQPLYGYEQTLFPIVQGSVYKDLREKSAEVIASFNRDGNAIGGLSVGEPAEEMYAMTEVVTNILPQDKPRYLMGVGTPINILENIALGIDMFDCVMPTRNARNGMLFTQNGIINIKNEKWKDDFSPIEAESDLLVDQIHTKAYLRHLIRSQEILGAQIASLHNLHFYLWLVKQAREKIIAGTFYDWKEKMVKVLGQRL

SEQ ID NO: 60939 - protein, 376 aa, unidentified
  source 1..376: note = Sphingobacterium detergens
  REGION 1..376: note = tr|A0A420AJB5|A0A420AJB5_9SPHI Queuine tRNA-ribosyltransferase OS=Sphingobacterium detergens; OX = 1145106 GN=tgt PE=3 SV=1
MKFTLQAQDTLSKARAGVVETAHGPIQTPIFMPVGTAGTVKAIHQHELKNDIEAQIILGNTYHLYLRPGLDVLNKAGGLHKFNGWDRPILTDSGGYQVYSLTEVRKIKEEGVTFRSHIDGSKHLFTPENVMDTQRIIGADIIMAFDECTPYPCDYGYARRSLDMTHRWLKRCVDRFDSTDPLYGYDQTLFPIVQGSVYKDLRIKSAETIASFNRDGNAIGGLSVGEPAEEMYAMTEVVCDILPQEKPRYLMGVGTPVNILENIALGVDMFDCVMPTRNARNGMLFTQNGIINIKNEKWKDDFSPIEAESDLHTDQFYSKAYLRHLIKSQEILGAQIASLHNLHFYLWLVNQAREKIIDGTFYDWKNKMVKILDQRL

SEQ ID NO: 60940 - protein, 376 aa, Sphingobacterium faecium
  REGION 1..376: note = tr|A0A2T5XZW9|A0A2T5XZW9_9SPHI Queuine tRNA-ribosyltransferase OS=Sphingobacterium faecium; OX = 34087 GN=tgt PE=3 SV=1
MKFTLQVQDKFSKARAGVVETAHGKIQTPIFMPVGTAGTVKGVHQHELRNDIKAQIILGNTYHLYLRPGLDVLNKAGGLHKFNGWDRPILTDSGGYQVYSLSDNRKIREEGVTFRSHIDGSKHLFTPENVMDTQRVIGADIIMAFDECTPYPCDYGYARRSIEMTHRWLKRCCDRFDSTEPLYGYDQTLFPIVQGSVYKDLRERSAEKIASFNREGNAIGGLSVGEPAEEMYAMTEVVCNILPEDKPRYLMGVGTPINLLENIALGIDMFDCVMPTRNARNGMIFTRHGTINIKNEKWKDDFSPIDPDSDLYSDQVYTKAYLRHLIRSQELLGAQIASLHNLHFYLWLVNEAREKIVDGTFYDWKNKMVKVLGQRL

SEQ ID NO: 60941 - protein, 376 aa, unidentified
  source 1..376: note = Sphingobacterium gobiense
  REGION 1..376: note = tr|A0A2S9JI79|A0A2S9JI79_9SPHI Queuine tRNA-ribosyltransferase OS=Sphingobacterium gobiense; OX = 1382456 GN=tgt PE=3 SV=1
MRFTLQAEDIASKARAGVLETAHGNIQTPIFMPVGTAGTVKAVHQHELVQDIQAQIILGNTYHLYLRPGLDVLRKAGGLHKFNHWDGPILTDSGGYQVYSLTEVRKIREEGVTFRSHIDGSKHLFTPENVMDTQRVIGADIIMAFDECTPYPCEYSYARKSLDMTHRWLKRCIDRFDSTEPLYGYEQTLFPIVQGSVYKDLREKSAEVIASFNRDGNAIGGLSVGEPAEEMYAMTEVVTNILPQDKPRYLMGVGTPINILENIALGIDMFDCVMPTRNARNGMLFTQNGIINIKNEKWKDDFSPIEAESDLLVDQIHTKAYLRHLIRSQEILGAQIASLHNLHFYLWLVKQARDKIIEGTFYEWKEKMVKILGQRL

SEQ ID NO: 60942 - protein, 376 aa, unidentified
  source 1..376: note = Sphingobacterium haloxyli
  REGION 1..376: note = tr|A0A2S9J3B7|A0A2S9J3B7_9SPHI Queuine tRNA-ribosyltransferase OS=Sphingobacterium haloxyli; OX = 2100533 GN=tgt PE=3 SV=1
MRFTLQAEDIASKARAGVLETAHGNIQTPIFMPVGTAGTVKAVHQHELVQDIQAQIILGNTYHLYLRPGLDVLHKAGGLHKFNHWNGPILTDSGGYQVYSLTEVRKIREEGVTFRSHIDGSKHLFTPENVMDTQRVIGADIIMAFDECTPYPCEYSYARKSLDMTHRWLKRCIDQFDSTEPLYGYEQTLFPIVQGSVYKDLREKSAEVIASFNRDGNAIGGLSVGEPAEEMYAMTEVVTNILPQDKPRYLMGVGTPINILENIALGIDMFDCVMPTRNARNGMLFTQNGIINIKNEKWKDDFSPIEAESDLLVDQVHTKAYLRHLIRSQEILGAQIASLHNLHFYLWLVKQAREKIIEGTFYDWKEKMVKILGQRL

SEQ ID NO: 60943 - protein, 376 aa, unidentified
  source 1..376: note = Sphingobacterium lactis
  REGION 1..376: note = tr|A0A1H5S7H9|A0A1H5S7H9_9SPHI Queuine tRNA-ribosyltransferase OS=Sphingobacterium lactis; OX = 797291 GN=tgt PE=3 SV=1
MKFTLQAQDKFSRARAGEIETAHGTIQTPIFMPVGTAGTVKAVHQQELVNDIQAQIILGNTYHLYLRPGLDVLNKAGGLHKFINWDRPILTDSGGYQVYSLTEVRKIKEEGVTFRSHIDGSKHLFTPENVMDTQRIIGADIIMAFDECTPYPCDYRYARRSLDMTHRWLKRCCDRFDSTEPLYGYDQTLFPIVQGSVYKDLREKSAETIASFGREGNAIGGLSVGEPAEEMYAMTEVVTNILPHDKPRYLMGVGTPVNILENIALGIDMFDCVMPTRNARNGMLFTQNGIINIKNEKWKDDFSPIEAESDLLVDQIHTKAYLRHLIRSQEILGAQIASLHNLHFYLWLVKQAREKIVDGTFYDWKEKMVKILGQRL

SEQ ID NO: 60944 - protein, 376 aa, Sphingobacterium mizutaii
  REGION 1..376: note = tr|A0A239X5V5|A0A239X5V5_9SPHI Queuine tRNA-ribosyltransferase OS=Sphingobacterium mizutaii; OX = 1010 GN=tgt PE=3 SV=1
MNFTLQAQDKFSKARAGEIETAHGKIQTPIFMPVGTAGTVKAVHQHELVNDIQAQIILGNTYHLYLRPGLDVLNKAGGLHKFINWDRPILTDSGGYQVYSLTEVRKIKEEGVTFRSHIDGSKHLFTPENVMDTQRIIGADIIMAFDECTPYPCDYRYARRSMEMTHRWLKRCCDRFDSTDPLYGYDQTLFPIVQGSVYKDLREKSAETIASFNREGNAIGGLSVGEPAEEMYAMTEVVTNILPHDKPRYLMGVGTPVNLLENIALGIDMFDCVMPTRNARNGMLFTQNGIINIKNEKWKDDFSPIEAESDLLVDQIHTKAYLRHLIRSQEILGAQIASLHNLHFYLWLVNQAREKIIDGTFYDWKNKMVPVLGQRL

SEQ ID NO: 60945 - protein, 376 aa, Sphingobacterium multivorum
  REGION 1..376: note = tr|A0A380C2J4|A0A380C2J4_SPHMU Queuine tRNA-ribosyltransferase OS=Sphingobacterium multivorum; OX = 28454 GN=tgt PE=3 SV=1
MKFTLQAQDKLSKARAGVVETAHGPIQTPIFMPVGTAGTVKAIHQHELKNDIEAQIILGNTYHLYLRPGLNVLNKAGGLHKFNGWDRPILTDSGGYQVYSLTEVRKIKEEGVTFRSHIDGSKHLFTPENVMDTQRIIGADIIMAFDECTPYPCDYGYARRSLDMTHRWLKRCVDRFDSTDPLYGYDQTLFPIVQGSVYKDLRIKSAETIASFNREGNAIGGLSVGEPAEEMYTMTEVVCDILPHDKPRYLMGVGTPVNILENIALGVDMFDCVMPTRNARNGMLFTQNGIINIKNEKWKDDFSPIEAESDLQADQFYSKAYLRHLIKSQEILGAQIASLHNLHFYLWLVNQARERIIDGTFYDWKNKMVKILDQRL

SEQ ID NO: 60946 - protein, 376 aa, Sphingobacterium multivorum
  REGION 1..376: note = tr|A0A2X2IVH0|A0A2X2IVH0_SPHMU Queuine tRNA-ribosyltransferase OS=Sphingobacterium multivorum; OX = 28454 GN=tgt PE=3 SV=1
MKFTLQAQDKLSKARAGVVETAHGPIQTPIFMPVGTAGTVKAIHQHELKNDIEAQIILGNTYHLYLRPGLNVLNKAGGLHKFNGWDRPILTDSGGYQVYSLTEVRKIKEEGVTFRSHIDGSKHLFTPENVMDTQRIIGADIIMAFDECTPYPCDYGYARRSLDMTHRWLKRCVDRFDSTDPLYGYDQTLFPIVQGSVYKDLRIKSAETIASFNREGNAIGGLSVGEPAEEMYAMTEVVCDILPHDKPRYLMGVGTPVNILENIALGVDMFDCVMPTRNARNGMLFTQNGIINIKNEKWKDDFSPIEAESDLQADQFYSKAYLRHLIKSQEILGAQIASLHNLHFYLWLVNQARERIIDGTFYDWKNKMVKILDQRL

SEQ ID NO: 60947 - protein, 376 aa, unidentified
  source 1..376: note = Sphingobacterium nematocida
  REGION 1..376: note = tr|A0A1T5BC10|A0A1T5BC10_9SPHI Queuine tRNA-ribosyltransferase OS=Sphingobacterium nematocida; OX = 1513896 GN=tgt PE=3 SV=1
MKFTLQAQDKLSQARAGVMETAHGKIETPIFMPVGTAGTVKAVHQHELVNDIQAQIILGNTYHLYLRPGLDVLNKAGGLHKFNGWDKPILTDSGGYQVYSLTEVRKIREEGVTFRSHVDGSKHLFTPENVMDTQRVIGADIIMAFDECTPYPCDYQYARRSLDMTHRWLKRCCNRFDSTEPLYGYDQTLFPIVQGSVYKDLRAKSAEVIASFEREGNAIGGLSVGEPADEMYAMTEVVTAILPKEKPRYLMGVGTPINILENIALGIDMFDCVMPTRNARNGMLFTRNGIINIKNEKWKADFSPIEAESDLMMDQFYTKAYLRHLIRSQEILGAQIASLHNLHFYLWLVKQAREKIIEGTFYDWKEKMVKVLGQRL

SEQ ID NO: 60948 - protein, 376 aa, unidentified
  source 1..376: note = Sphingobacterium paludis
  REGION 1..376: note = tr|A0A4R7D6L7|A0A4R7D6L7_9SPHI Queuine tRNA-ribosyltransferase OS=Sphingobacterium paludis; OX = 1476465 GN=tgt PE=3 SV=1
MKFTLQAKDKGSSARAGVVETAHGNIQTPIFMPVGTAGTVKAVHQHELVQDIQAQIILGNTYHLYLRPGLDVLQKAGGLHKFNHWDGPILTDSGGYQVYSLTEVRKIREEGVTFRSHIDGSKHLFTPENVMDTQRVIGADIIMAFDECTPYPCEYSYARKSLDMTHRWLKRCVDRFDSTQPLYGYDQTLFPIVQGSVYKDLREKSAEVIASFNRDGNAIGGLSVGEPAEEMYAMTEVVTNILPQDKPRYLMGVGTPINILENIALGIDMFDCVMPTRNARNGMLFTQNGIINIKNEKWKDDFSPIEAESDLLVDQIHTKAYLRHLIRSQEILGAQIASLHNLHFYLWLVKQAREQIIAGTFYDWKEKMVKVLGQRL

SEQ ID NO: 60949 - protein, 376 aa, unidentified
  source 1..376: note = Sphingobacterium paucimobilis
  REGION 1..376: note = tr|U2J6Q9|U2J6Q9_9SPHI Queuine tRNA-ribosyltransferase OS=Sphingobacterium paucimobilis HER1398 OX=1346330 GN=tgt PE=3 SV=1
MKFTLQAQDKLSQARAGVMETAHGKIETPIFMPVGTAGTVKAVHQHELVNDIQAQIILGNTYHLYLRPGLDVLQKAGGLHKFNGWDKPILTDSGGYQVYSLTEVRKIREEGVTFRSHVDGSKHLFTPENVMDTQRVIGADIIMAFDECTPYPCDYNYARRSLDMTHRWLKRCCDRFDSTKPLYGYDQTLFPIVQGSVYKDLRAKSAEVIASFEREGNAIGGLSVGEPAEEMYAMTEVVTAILPKEKPRYLMGVGTPINILENIALGIDMFDCVMPTRNARNGMLFTRNGIINIKNEKWKADFSPIEAESDLMMDQFYTKAYLRHLIRSQEILGAQIASLHNLHFYLWLVKQAREKIIDGTFYEWKEKMVKVLGQRL

SEQ ID NO: 60950 - protein, 376 aa, unidentified
  source 1..376: note = Sphingobacterium psychroaquaticum
  REGION 1..376: note = tr|A0A1X7K2W5|A0A1X7K2W5_9SPHI Queuine tRNA-ribosyltransferase OS=Sphingobacterium psychroaquaticum OX=561061 GN=tgt PE=3 SV=1
MKFTLQAQDKGSRARAGVLETAHGNIQTPIFMPVGTAGTVKAVHQQELVNDIQAQIILGNTYHLYLRPGLDVLNKAGGLHKFINWDRPILTDSGGYQVYSLTEVRKIREEGVTFRSHVDGSKHLFTPENVMDTQRIIGADIIMAFDECTPYPCEYNYARRSMDMTHRWLKRCVDRFDSTEPLYGYEQTLFPIVQGSVYKDLRAKSAEAIASFNRDGNAIGGLSVGEPAEEMYAMTEVVTNILPYEKPRYLMGVGTPINILENIALGIDMFDCVMPTRNARNGMLFTRNGIINIKNEKWKDDFSPIEAESDLLVDQIHTKAYLRHLIRSQEILGAQIASLHNLHFYLWLVGQAREKIIDGTFYDWKEKMVKVLGQRL

SEQ ID NO: 60951 - protein, 376 aa, Sphingobacterium siyangense
  REGION 1..376: note = tr|A0A420G3D5|A0A420G3D5_9SPHI Queuine tRNA-ribosyltransferase OS=Sphingobacterium siyangense; OX = 459529 GN=tgt PE=3 SV=1
MKFTLQAQDKLSKARAGVVETAHGPIQTPIFMPVGTAGTVKAIHQHELKNDIEAQIILGNTYHLYLRPGLNVLNKAGGLHKFNGWDRPILTDSGGYQVYSLTEVRKIKEEGVTFRSHIDGSKHLFTPENVMDTQRIIGADIIMAFDECTPYPCDYGYARRSLDMTHRWLKRCVDRFDSTDPLYGYDQTLFPIVQGSVYKDLRIKSAETIASFNREGNAIGGLSVGEPAEEMYAMTEVVCDILPHDKPRYLMGVGTPVNILENIALGVDMFDCVMPTRNARNGMLFTQNGIINIKNEKWKDDFSPIEAESDLHADQFYSKAYLRHLIKSQEILGAQIASLHNLHFYLWLVNQARERIIDGTFYDWKNKMVKILDQRL

SEQ ID NO: 60952 - protein, 376 aa, Sphingobacterium sp.
  REGION 1..376: note = tr|A0A4P7DUY4|A0A4P7DUY4_9SPHI Queuine tRNA-ribosyltransferase OS=Sphingobacterium sp. CZ-2; OX = 2557994 GN=tgt PE=3 SV=1
MKFTLQAQDKNSRARAGEIETAHGTIKTPIFMPVGTAGTVKAVHQHELVNDIQAQIILGNTYHLYLRPGLEVLNKAGGLHKFINWDRPILTDSGGYQVYSLTEVRKIKEEGVTFRSHIDGSKHLFTPENVMDTQRVIGADIIMAFDECTPYPCDYRYARRSLDMTHRWLKRCCDRFDSTEPLYGYEQTLFPIVQGSVYKDLREKSAEVIASFEREGNAIGGLSVGEPAEEMYAMTEVVTNILPKEKPRYLMGVGTPVNILENIALGIDMFDCVMPTRNARNGMLFTREGIINIKNEKWKDDFTPIEAESDLLVDQIHTKAYLRHLIRSQEILGAQIASLHNLHFYLWLVNEARERILDGTFYEWKNKMVVKLGQRL

SEQ ID NO: 60953 - protein, 376 aa, Sphingobacterium sp.
  REGION 1..376: note = tr|F4CEX1|F4CEX1_SPHS2 Queuine tRNA-ribosyltransferase OS=Sphingobacterium sp. (strain 21) OX=743722 GN=tgt PE=3 SV=1
MKFTLQSTDKNSKARAGELVTAHGTIQTPIFMPVGTAGSVKGVHQHELKQDIQAQIILGNTYHLYLRPGLDVIQAAGGLHKFNGWDKPILTDSGGYQVYSLTEVRKIKEEGVTFRSHIDGSKHLFTPENVMDTQRIIGADIIMAFDECTPYPCDYRYAKRSLDMTHRWLKRCCDRFDNTDPLYGYEQTLFPIVQGSVYRDLREKSAETIASFGRDGNAIGGLSVGEPAEEMYAMTEVVNAILPLDKPRYLMGVGTPINILENIALGIDMFDCVMPTRNARNGMLFTRNGIINIKNKKWEADFSPIDPDSDLHTDLFYSKAYLRHLIHSKELLGAQIATLHNLHFYLWLVQEARTKILEGTFYEWKNKMVKQLGERL

SEQ ID NO: 60954 - protein, 376 aa, Sphingobacterium spiritivorum
  REGION 1..376: note = tr|C2FZE3|C2FZE3_9SPHI Queuine tRNA-ribosyltransferase OS=Sphingobacterium spiritivorum ATCC 33300 OX=525372 GN=tgt PE=3 SV=1
MKFTLQANDKFSKARAGEIETAHGKIQTPIFMPVGTAGTVKAVHQHELKQDIEAQIILGNTYHLYLRPGLDVLNKAGGLHKFIGWDLPILTDSGGYQVYSLTEVRKIKEEGVTFRSHVDGSKHLFTPENVMDTQRVIGADIIMAFDECTPYPCDYGYARRSLDMTHRWLKRCCDRFDTTDPLYGYDQTLFPIVQGSVYKDLREKSAEVIASFNREGNAIGGLSVGEPAEEMYAMTEVVCNILPTEKPRYLMGVGTPINLLENIALGIDMFDCVMPTRNARNGMLFTQNGIINIKNEKWKDDFSPIEPESDLMADQVYTKAYLRHLIRSQEILGAQIASLHNLHFYLWLVNQAREKIVDGTFYEWKNKMVKVLGQRL

SEQ ID NO: 60955 - protein, 376 aa, Sphingobacterium spiritivorum
  REGION 1..376: note = tr|A0A380BUJ2|A0A380BUJ2_9SPHI Queuine tRNA-ribosyltransferase OS=Sphingobacterium spiritivorum; OX = 258 GN=tgt PE=3 SV=1
MKFTLQANDKFSKARAGEIETAHGKIQTPIFMPVGTAGTVKAVHQHELKEDIEAQIILGNTYHLYLRPGLDVLNKAGGLHKFIGWDLPILTDSGGYQVYSLTEVRKIKEEGVTFRSHVDGSKHLFTPENVMDTQRVIGADIIMAFDECTPYPCDYGYARRSLDMTHRWLKRCCDRFDTTDPLYGYDQTLFPIVQGSVYKDLREKSAEVIASFNREGNAIGGLSVGEPAEEMYAMTEVVCNILPTEKPRYLMGVGTPINLLENIALGIDMFDCVMPTRNARNGMLFTQNGIINIKNEKWKDDFSPIEPESDLMADQVYTKAYLRHLIRSQEILGAQIASLHNLHFYLWLVNQAREKIVDGTFYEWKNKMVKVLGQRL

SEQ ID NO: 60956 - protein, 376 aa, Sphingobacterium thalpophilum
  REGION 1..376: note = tr|A0A4U9UP13|A0A4U9UP13_9SPHI Queuine tRNA-ribosyltransferase OS=Sphingobacterium thalpophilum; OX = 259 GN=tgt PE=3 SV=1
MKFTLQAQDKLSKARAGVVETAHGPIQTPIFMPVGTAGTVKAIHQHELKNDIEAQIILGNTYHLYLRPGLKVLNKAGGLHKFNGWDRPILTDSGGYQVYSLTEVRKIKEEGVTFRSHIDGSKHLFTPENVMDTQRIIGADIIMAFDECTPYPCDYSYARRSLDMTHRWLKRCVDRFDSTDPLYGYEQTLFPIVQGSVYKDLRIKSAETIASFNREGNAIGGLSVGEPAEEMYAMTEVVCDILPKDKPRYLMGVGTPVNILENIALGVDMFDCVMPTRNARNGMLFTQNGIINIKNEKWKDDFSPIEAESDLHADQFYTKAYLRHLIKSQEILGAQIASLHNLHFYLWLVNQAREKIIAGTFYDWKNKMVKILDQRL

SEQ ID NO: 60957 - protein, 376 aa, Sphingobacterium wenxiniae
  REGION 1..376: note = tr|A0A1I6RBF6|A0A1I6RBF6_9SPHI Queuine tRNA-ribosyltransferase OS=Sphingobacterium wenxiniae; OX = 683125 GN=tgt PE=3 SV=1
MKFTLQAQDTGSRARAGVLHTAHGDIQTPIFMPVGTAGTVKAVHQHELVNDIQAQIILGNTYHLYLRPGLDVLHKAGGLHKFNNWQGPILTDSGGYQVYSLTEVRKIREEGVTFRSHIDGSKHLFTPENVMDTQRVIGADIIMAFDECTPYPCEYSYARKSLDMTHRWLKRCVDRFDSTEPLYGYEQTLFPIVQGSVYKDLREKSAEVIASFNRDGNAIGGLSVGEPAEEMYAMTDVVTNILPKDKPRYLMGVGTPVNILENIALGIDMFDCVMPTRNARNGMLFTQNGIINIKNEKWKDDFSPIEAESDLLVDQIHTKAYLRHLIRSQEILGAQIASLHNLHFYLWLVKQARDKIIEGTFYTWKEKMIKILGQRL

SEQ ID NO: 60958 - protein, 376 aa, unidentified
  source 1..376: note = Sphingobacterium yanglingense
  REGION 1..376: note = tr|A0A4R6WBB7|A0A4R6WBB7_9SPHI Queuine tRNA-ribosyltransferase OS=Sphingobacterium yanglingense; OX = 1437280 GN=tgt PE=3 SV=1
MKFTLQAQDKLSQARAGVMETAHGKIETPIFMPVGTAGTVKAVHQHELVNDIQAQIILGNTYHLYLRPGLDVLQKAGGLHKFNGWDKPILTDSGGYQVYSLTEVRKIREEGVTFRSHVDGSKHLFTPENVMDTQRVIGADIIMAFDECTPYPCDYNYARRSLDMTHRWLKRCCNRFDSTEPLYGYNQTLFPIVQGSVYKDLRAKSAEVIASFEREGNAIGGLSVGEPAEEMYAMTEVVTAILPKEKPRYLMGVGTPINILENIALGIDMFDCVMPTRNARNGMLFTRNGIINIKNEKWKADFSPIEAESDLMMDQFYTKAYLRHLIRSQEILGAQIASLHNLHFYLWLVKQAREKIIDGTFYEWKEKMVKVLGQRL

SEQ ID NO: 60959 - protein, 376 aa, unidentified
  source 1..376: note = Sphingobium algicola
  REGION 1..376: note = tr|A0A5J5H588|A0A5J5H588_9SPHN tRNA guanosine(34) transglycosylase Tgt OS=Sphingobium algicola OX=2048546; GN = tgt PE=4 SV=1
MTKARFSFSIHATDGKARTGAIQMRRGEIRTPAFMPVGTAATVKAMRPAEVRAAGADIILGNTYHLMLRPGAERMARLGGLHGFMGWDRPILTDSGGYQVMSLSALTKMSEEGVAFSSHIDGSKHMLTPERSMEIQRLLDSDIVMAFDECTKNGCTHDEAARSMERSMRWAKRSRDGFDAGGDHADRAALFGIQQGSLDQGLRRISAEKLIEVGFDGYAVGGLAVGEGQEAMFATLDFAPDMLPQDKPRYLMGVGKPDDIVGAVERGIDMFDCVLPTRSGRNGQAFTWAGPLNIRNAKFNEDQGPLDPRCGCPVCATWSRAYLHHLVKAGEMLGAMLMTQHNIHFYQELMQGLRDNIAAGTLASFTADFRRDYRKV

SEQ ID NO: 60960 - protein, 376 aa, unidentified
  source 1..376: note = Sphingobium algorifonticola
  REGION 1..376: note = tr|A0A437J9Z3|A0A437J9Z3_9SPHN Queuine tRNA-ribosyltransferase OS=Sphingobium algorifonticola; OX = 2008318 GN=tgt PE=3 SV=1
MTRPRFSFSIAATDGKARTGTLAMRRGDIRTPAFMPVGTAATVKAMRPAEVRTAGADIILGNTYHLMLRPGAERMARLGGLHDFMGWDRPILTDSGGYQVMSLSALTKMSEEGVAFSSHIDGSKHMLSAERSMEIQRLLGSDIVMAFDECTKNGATRDEAALSMERSMRWARRSRDGFDAGADHAERSALFGIQQGALDEDLRLRSAQMLTEIGFDGYAVGGLAVGEGQEAMFATLDFAPNQLPADRPRYLMGVGKPDDIVGAVERGIDMFDCVLPTRSGRNGQAFTWAGPLNIRNARFAEDRAPLDPRCPCPVCTTWSRAYLHHLVKAGEMLGAMLMTQHNIHFYQALMQTMRDAIGEGRFAAFVRAFRADYRRA

SEQ ID NO: 60961 - protein, 376 aa, Sphingobium amiense
  REGION 1..376: note = tr|A0A494W130|A0A494W130_9SPHN Queuine tRNA-ribosyltransferase OS=Sphingobium amiense OX=135719; GN = tgt PE=3 SV=1
MSSPRFAFSVHATDGKARTGVVRMQRGDIRTPAFMPVGTAATVKAMRPAEVRATGADIILGNTYHLMLRPGAERMARLGGLHGFMGWDRPILTDSGGYQVMSLSALTRMSEEGVAFSSHIDGSKHMLSPERSMEIQRLLDSDIVMAFDECTKNGCTHDEAAQSMERSMRWARRSREAFDAGGAHADRAALFGIQQGSLNEDLRRVSAQKLIDIGFDGYAVGGLAVGEGQEAMFATLDFAPAMLPEDRPRYLMGVGKPDDIVGAVERGIDMFDCVLPTRSGRNGQAFTWAGPLNIRNARFAEDREPLDPRCGCPVCATWGRAYLHHLVKAGEMLGAMLMTQHNIHFYQELMQGLRDSIAAGTLRDFAADFRRDYRKA

SEQ ID NO: 60962 - protein, 376 aa, unidentified
  source 1..376: note = Sphingobium baderi
  REGION 1..376: note = tr|T0GWU3|T0GWU3_9SPHN Queuine tRNA-ribosyltransferase OS=Sphingobium baderi LL03; OX = 1114964 GN=tgt PE=3 SV=1
MTQPRFSFSVSATDGKARTGVISMRRGEIRTPAFMPVGTAATVKAMRPAEVRAAGADIILGNTYHLMLRPGAERMARLGGLHGFMGWDRPILTDSGGYQVMSLSALTRMSEEGVAFSSHIDGSKHMLSPERSMEIQRLLDSDIVMAFDECTRNGCTHDEAAQSMERSMRWAKRSRDAFDAGGAHADRAALFGIQQGSLDEGLRRVSADRLIDIGFDGYAVGGLAVGEGQEAMFGCLDFAPDMLPPDRPRYLMGVGKPDDIVGAVERGIDMFDCVLPTRSGRNGQAFTWNGPLNIRNARFAEDREPLDPRCACPVCSTWSRAYLHHLVKAGEMLGAMLMTQHNIHFYQDLMRNIRDSIAQGRFAIFAAGFRNEYKRA

SEQ ID NO: 60963 - protein, 376 aa, unidentified
  source 1..376: note = Sphingobium baderi
  REGION 1..376: note = tr|A0A0S3EZA0|A0A0S3EZA0_9SPHN Queuine tRNA-ribosyltransferase OS=Sphingobium baderi OX=1332080; GN = tgt PE=3 SV=1
MTQSRFSFSVAATDGKARTGVISMRRGDIRTPAFMPVGTAATVKAMRPAEVRAAGADIILGNTYHLMLRPGAERMARLGGLHGFMGWDRPILTDSGGYQVMSLSALTKMSEEGVSFSSHIDGSKHMLSPERSMEIQRLLDSDIVMAFDECTKNGCTHDEAARSMERSMRWAKRSRDAFDAGEAHAERAALFGIQQGSLDEGLRRISADRLIDIGFDGYAVGGLAVGEGQEAMFGCLDSAPDMLPADRPRYLMGVGKPDDIVGAVERGIDMFDCVLPTRSGRNGQAFTWNGPLNIRNARFAEDQGPLDPRCACPVCSTWSRAYLHHLVKAGEMLGAMAMTQHNIHFYQDLMQNIRGSIAEGRFAAFAAGFRSGYKRA

SEQ ID NO: 60964 - protein, 395 aa, unidentified
  source 1..395: note = Sphingobium barthaii
  REGION 1..395: note = tr|A0A4R6FT45|A0A4R6FT45_9SPHN Queuine tRNA-ribosyltransferase OS=Sphingobium barthaii OX=1054037; GN = tgt PE=3 SV=1
MNPRFAALSGASLDRTARVVTHSRFSFSIAATNGKARTGAIQMRRGEIRTPAFMPVGTAATVKAMRPAEVRATGADIILGNTYHLMLRPGAERVARLGGLHGFMGWDRPILTDSGGYQVMSLSALTKMSEDGVAFSSHIDGSRHMLTPERSMEIQRLLDSDIVMAFDECTRNGCTHDEAAKSMERSMRWAKRSRDGFDAGGEHAERAALFGIQQGSLDEGLRRISAEKLIDIGFDGYAVGGLAVGEGQEAMFATLDFAPGMLPVDKPRYLMGVGKPDDIVGAVERGIDMFDCVLPTRSGRNGQAFTWAGPLNIRNARFAEDRGPLDPRCACPVCATWSRAYLHHLVKAGEMLGAMLMTQHNIHFYQALMQEIRDSIAAGRFARFAADFRRDYQRA

SEQ ID NO: 60965 - protein, 388 aa, Sphingobium chinhatense
  REGION 1..388: note = tr|W1KUX7|W1KUX7_9SPHN Queuine tRNA-ribosyltransferase OS=Sphingobium chinhatense IP26; OX = 1346790 GN=tgt PE=3 SV=1
MSGAPFDPTARSVTNPRFSFSIAATDGKARTGAIQMRRGEIRTPAFMPVGTAATVKAMRPAEVRAAGADIILGNTYHLMLRPGAERVARLGGLHGFMGWDRPILTDSGGYQVMSLSALTKMSEEGVAFSSHIDGSRHMLTPERSMEIQRLLDSDIVMAFDECTRNGCTHDEAAKSMERSMRWAKRSRDGFDAGGEHAERAALFGIQQGSLDEGLRRISAERLIDIGFDGYAVGGLAVGEGQEAMFATLDFAPAMLPADKPRYLMGVGKPDDIVGAVERGIDMFDCVLPTRSGRNGQAFTWAGPLNIRNARFAEDMGPLDPRCACPVCATWSRAYLHHLVKAGEMLGAMLMTQHNIHFYQALMQEIRDSIAAGRFASFAADFRRDYQRA

SEQ ID NO: 60966 - protein, 376 aa, Sphingobium chlorophenolicum
  REGION 1..376: note = tr|A0A081RBD3|A0A081RBD3_SPHCR Queuine tRNA-ribosyltransferase OS=Sphingobium chlorophenolicum; OX = 46429 GN=tgt PE=3 SV=1
MTHPRFSFSIAATDGRARTGVIQMRRGDIRTPAFMPVGTAATVKAMRPAEVRAAGADIILGNTYHLMLRPGAERMARLGGLHGFMGWDRPILTDSGGYQVMSLSALTKMSEEGVAFSSHIDGSKHMLTPERSMEIQRLLDSDIVMAFDECTKNGCTHDEAARSMERSMRWAKRSRDGFDAGGEHADRAALFGIQQGSLNEGLRRISAEKLIEIGFDGYAVGGLAVGEGQEAMFATLDFAPDMLPSDKPRYLMGVGKPDDIVGAVERGIDMFDCVLPTRSGRNGQAFTWAGPLNIRNARFAEDMGPLDPRCGCPVCSTWSRAYLHHLVKAGEMLGAMLMTQHNIHFYQALMQEMRDSIAEGRFAHFATDFRRDYQRA

SEQ ID NO: 60967 - protein, 376 aa, Sphingobium chlorophenolicum
  REGION 1..376: note = tr|F6EVL8|F6EVL8_SPHCR Queuine tRNA-ribosyltransferase OS=Sphingobium chlorophenolicum L-1 OX=690566 GN=tgt PE=3 SV=1
MIHPRFSFSIAATDGKARTGAIQMRRGDIRTPAFMPVGTAATVKAMRPAEVRAAGADIILGNTYHLMLRPGAERMARLGGLHGFMGWDRPILTDSGGYQVMSLSALTKMSEEGVAFSSHIDGSKHMLTPERSMEIQRLLDSDIVMAFDECTKNGCTHDEAARSMERSMRWAKRSRDGFDAGGEHAERAALFGIQQGSLNENLRRISAERLIEIGFDGYAVGGLAVGEGQEAMFATLDFAPDMLPSDKPRYLMGVGKPDDIVGAVERGIDMFDCVLPTRSGRNGQAFTWAGPLNIRNARFAEDMGPLDPRCGCPVCSTWSRAYLHHLVKAGEMLGAMLMTQHNIHFYQALMQEMRDSIAEGRFAHFATDFRRDYRRA

SEQ ID NO: 60968 - protein, 376 aa, Sphingobium chungbukense
  REGION 1..376: note = tr|A0A0M3APU6|A0A0M3APU6_9SPHN Queuine tRNA-ribosyltransferase OS=Sphingobium chungbukense; OX = 56193 GN=tgt PE=3 SV=1
MTNSRFSFSIAATDGKARAGTIRMRRGDIRTPAFMPVGTAATVKAMRPAEVRATGADIILGNTYHLMLRPGAERMARLGGLHGFMGWDRPILTDSGGYQVMSLSALTRMSEEGVAFSSHIDGSKHMLTPERSMEIQRLLDSDIVMAFDECTKNGCTHDEAAKSMERSMRWARRSREGFDAGGEHAERAALFGIQQGSLDEGLRRISAEKLIDIGFDGYAVGGLAVGEGQEAMFATLDFAPGMLPVDKPRYLMGVGKPDDIVGAVERGIDMFDCVLPTRSGRNGQAFTWAGPLNIRNARFAEDMGPLDPRCGCPVCATWSRAYLHHLVKAGEMLGAMLMTQHNIHFYQALMQAIRDSIAEGRFAGFAADFRRDYQRA

SEQ ID NO: 60969 - protein, 376 aa, Sphingobium cloacae
  REGION 1..376: note = tr|A0A1E1F1M0|A0A1E1F1M0_9SPHN Queuine tRNA-ribosyltransferase OS=Sphingobium cloacae OX=120107; GN = tgt PE=3 SV=1
MTQSRFSFSIAATEGKARTGVIAMRRGDIRTPAFMPVGTAATVKAMRPAEVRAAGADIILGNTYHLMLRPGAERMARLGGLHGFMGWERPILTDSGGYQVMSLSALTRMSEEGVSFSSHIDGSKHMLSPERSMEIQRLLDSDIVMAFDECTKNGCTHDEAARSMERSMRWAKRSRDAFDAGGGHAERAALFGIQQGSLDEELRRVSADKLMDIGFDGYAVGGLAVGEGQEAMFGCLDFAPDMLPANRPRYLMGVGKPDDIVGAVERGIDMFDCVLPTRSGRNGQAFTWNGPLNIRNARFAEDQGPLDPRCACPVCSTWSRAYLHHLVKAGEMLGAMLMTQHNIHFYQDLMQNIRDSIAEGRFAAFAAGFRNDYRRA

SEQ ID NO: 60970 - protein, 376 aa, unidentified
  source 1..376: note = Sphingobium cupriresistens
  REGION 1..376: note = tr|A0A4Q4JRX0|A0A4Q4JRX0_9SPHN Queuine tRNA-ribosyltransferase OS=Sphingobium cupriresistens; OX = 1132417 GN=tgt PE=3 SV=1
MTKPRFSFAISATDGKARTGAIQMRRGEIRTPAFMPVGTAATVKAMRPAEVRATGADIILGNTYHLMLRPGAERMARLGGLHGFMGWDRPILTDSGGYQVMSLSALTKMSEEGVAFSSHIDGSKHMLTPERSMEIQRLLDSDIVMAFDECTKNGCTHDEAGRSMERSMRWAKRSREGFDAGGDHAERAALFGIQQGSLDEGLRRISAEKLIEIGFDGYAVGGLAVGEGQEAMFATLDFAPAMLPQDKPRYLMGVGKPDDIVGAVERGIDMFDCVLPTRSGRNGQAFTWAGPLNIRNAKFNEDIGPIDPRCGCPVCATWSRAYLHHLVKAGEMLGAMLMTQHNIHFYQELMQGLRDNIAAGTLSRFTADFRRDYQRV

SEQ ID NO: 60971 - protein, 376 aa, unidentified; identical to SEQ ID NO: 60970
  source 1..376: note = Sphingobium czechense
  REGION 1..376: note = tr|A0A0J8AWR4|A0A0J8AWR4_9SPHN Queuine tRNA-ribosyltransferase OS=Sphingobium czechense LL01; OX = 1420583 GN=tgt PE=3 SV=1

SEQ ID NO: 60972 - protein, 376 aa, Sphingobium faniae
  REGION 1..376: note = tr|A0A1G4U4X0|A0A1G4U4X0_9SPHN Queuine tRNA-ribosyltransferase OS=Sphingobium faniae OX=570446; GN = tgt PE=3 SV=1
MTQSRFSFSIAATDGKARTGVISMRRGDIRTPAFMPVGTAATVKAMRPAEVRAAGADIILGNTYHLMLRPGAERMARLGGLHGFMGWERPILTDSGGYQVMSLSALTKMSEEGVAFSSHIDGSKHMLSPERSMEIQRLLDSDIVMAFDECTKNGCTRDEAARSMERSMRWAKRSRDAFDAGGDHAERAALFGIQQGSLDEGLRRMSADKLTDIGFDGYAVGGLAVGEGQEAMFGCLDFAPDMLPSDKPRYLMGVGKPDDIVGAVERGIDMFDCVLPTRSGRNGQAFTWNGPLNIRNARFAEDQGPLDPRCGCPVCSTWGRAYLHHLVKAGEMLGAMLMTQHNIHFYQDLMQNIRDSIAEQRFAAFAAGFRSDYKRA

SEQ ID NO: 60973 - protein, 376 aa, Sphingobium francense
  REGION 1..376: note = tr|A0A4Q4JCA0|A0A4Q4JCA0_9SPHN Queuine tRNA-ribosyltransferase OS=Sphingobium francense OX=332057; GN = tgt PE=3 SV=1
MTNPRFSFSIAATDGKARTGAIQMRRGEIRTPAFMPVGTAATVKAMRPAEVRAAGADIILGNTYHLMLRPGAERVARLGGLHGFMGWDRPILTDSGGYQVMSLSALTKMSEEGVAFSSHIDGSRHMLTPERSMEIQRLLDSDIVMAFDECTRNGCTHDEAAKSMERSMRWAKRSRDGFDAGGEHAERAALFGIQQGSLDEGLRRISAERLIDIGFDGYAVGGLAVGEGQEAMFATLDFAPDMLPADKPRYLMGVGKPDDIVGAVERGIDMFDCVLPTRSGRNGQAFTWAGPLNIRNARFAEDMGPLDPRCACPVCATWSRAYLHHLVKAGEMLGAMLMTQHNIHFYQALMQEIRDSIAAGRFASFAADFRRDYQRA

SEQ ID NO: 60974 - protein, 376 aa, Sphingobium fuliginis
  REGION 1..376: note = tr|A0A5B8CEX4|A0A5B8CEX4_SPHSA Queuine tRNA-ribosyltransferase OS=Sphingobium fuliginis ATCC 27551 OX=1208342 GN=tgt PE=3 SV=1
MTNSRFSFSIAATDGKARTGAIQMRRGEIRTPAFMPVGTAATVKAMRPAEVRAAGADIILGNTYHLMLRPGAERVARLGGLHAFMGWDRPILTDSGGYQVMSLSALTKMSEEGVAFSSHIDGSRHMLTPERSMEIQRLLDSDIVMAFDECTRNGCTHDEAAKSMERSMRWAKRSRDGFDAGAEHAERAALFGIQQGSLDEGLRRISAEKLIDIGFDGYAVGGLAVGEGQEAMFATLDFAPGMLPADKPRYLMGVGKPDDIVGAVERGIDMFDCVLPTRSGRNGQAFTWAGPLNIRNARFAEDKGPLDPRCGCPVCTTWSRAYLHHLVKAGEMLGAMLMTQHNIHFYQALMQGIRDSIAIGRFQGFAADFRRDYQRA

SEQ ID NO: 60975 - protein, 376 aa, Sphingobium fuliginis
  REGION 1..376: note = tr|A0A292ZDW8|A0A292ZDW8_SPHSA Queuine tRNA-ribosyltransferase OS=Sphingobium fuliginis (strain ATCC 27551) OX=336203 GN=tgt PE=3 SV=1
MTNPRFSFSIAATDGKARTGAIQMRRGEIRTPAFMPVGTAATVKAMRPAEVRAAGADIILGNTYHLMLRPGAERVARLGGLHAFMGWDRPILTDSGGYQVMSLSALTKMSEEGVAFSSHIDGSRHMLTPERSMEIQRLLDSDIVMAFDECTRNGCTHDEAAKSMERSMRWAKRSRDGFDAGAEHAERAALFGIQQGSLDEGLRRISAEKLIDIGFDGYAVGGLAVGEGQEAMFATLDFAPGMLPADKPRYLMGVGKPDDIVGAVERGIDMFDCVLPTRSGRNGQAFTWAGPLNIRNARFAEDKGPLDPRCGCPVCTTWSRAYLHHLVKAGEMLGAMLMTQHNIHFYQALMQGIRDSIAIGRFQGFAADFRRDYQRA

SEQ ID NO: 60976 - protein, 376 aa, Sphingobium herbicidovorans
  REGION 1..376: note = tr|A0A086PFC2|A0A086PFC2_SPHHM Queuine tRNA-ribosyltransferase OS=Sphingobium herbicidovorans (strain ATCC 700291 / DSM 11019 / NBRC 16415 / MH); OX = 1219045 GN=tgt PE =3 SV=1
MTQSRFSFAIAATDGKARTGTIQMRRGEIRTPAFMPVGTAATVKAMRPAEVRATGADIILGNTYHLMLRPGAERVARLGGLHSFMGWDRPILTDSGGYQVMSLSALTKLSEEGVAFASHIDGSRHMLTPERSMEIQRLLDSDIVMAFDECTKNGCTHDEAAHSMERSMRWAKRSRDGFDGGGEHAERAALFGIQQGSLNEDLRRVSAEKLIEIGFDGYAVGGLAVGEGQEAMFGCLDYAPDMLPQDKPRYLMGVGKPDDIVGAVERGIDMFDCVLPTRSGRNGQAFTWAGPLNIRNARFAEDMSPLDPRCTCPVCGTWSRAYLHHLVKSGEMLGAMLMTQHNIHFYQSMMQAIRDSIAQGRFAAFAADFRRDYQRV

SEQ ID NO: 60977 - protein, 376 aa, unidentified
  source 1..376: note = Sphingobium hydrophobicum
  REGION 1..376: note = tr|A0A249MPD1|A0A249MPD1_9SPHN Queuine tRNA-ribosyltransferase OS=Sphingobium hydrophobicum; OX = 1673076 GN=tgt PE=3 SV=1
MTQPRFSFSIAATDGKARTGAIQMRRGEIRTPAFMPVGTAATVKAMRPAEVRATGADIILGNTYHLMLRPGAERMARLGGLHGFMGWDRPILTDSGGYQVMSLSALTKMSEQGVAFSSHIDGSKHMLTPERSMEIQRLLDSDIVMAFDECTKNGCTHDEAARSMERSMRWAKRSRDGFDAGGDHAERAALFGIQQGSLDEGLRRQSAQQLIDIGFDGYAVGGLAVGEGQQAMFATLDFAPDMLPQDKPRYLMGVGKPDDIVGAVERGIDMFDCVLPTRSGRNGQAFTWAGPLNIRNARFAEDTGPLDPRCTCPVCTTWSRAYLHHLVKAGEMLGAMLMTQHNIHFYQSLMQAIRDAIAAGQFAAFAADFRRDYQRA

SEQ ID NO: 60978 - protein, 376 aa, Sphingobium indicum; identical to SEQ ID NO: 60973
  REGION 1..376: note = tr|A0A1L5BTU6|A0A1L5BTU6_SPHIB Queuine tRNA-ribosyltransferase OS=Sphingobium indicum (strain DSM 16412 / CCM 7286 / MTCC 6364 / B90A) OX=861109 GN=tgt PE=3; SV = 1

SEQ ID NO: 60979 - protein, 376 aa, Sphingobium japonicum
  REGION 1..376: note = tr|D4Z0P7|D4Z0P7_SPHJU Queuine tRNA-ribosyltransferase OS=Sphingobium japonicum (strain DSM 16413 / CCM 7287 / MTCC 6362 / UT26 / NBRC 101211 / UT26S) OX=452662 GN=t gt PE=3 SV=1
MTNPRFSFSIAATDGKARTGAIQMRRGEIRTPAFMPVGTAATVKAMRPAEVRAAGADIILGNTYHLMLRPGAERVARLGGLHGFMGWDRPILTDSGGYQVMSLSALMKMSEEGVAFSSHIDGSRHMLTPERSMEIQRLLDSDIVMAFDECTRNGCTHHEAAKSMERSMRWAKRSRDGFDAGGEHAERAALFGIQQGSLDEGLRRISAERLIDIGFDGYAVGGLAVGEGQEAMFATLDFAPAMLPADKPRYLMGVGKPDDIVGAVERGIDMFDCVLPTRSGRNGQAFTWAGPLNIRNARFAEDMGPLDPRCACPVCATWSRAYLHHLVKAGEMLGAMLMTQHNIHFYQALMQEIRDSIAAGRFASFAADFRRDYQRA

SEQ ID NO: 60980 - protein, 376 aa, Sphingobium japonicum
  REGION 1..376: note = tr|N1MXQ1|N1MXQ1_9SPHN Queuine tRNA-ribosyltransferase OS=Sphingobium japonicum BiD32; OX = 1301087 GN=tgt PE=3 SV=1
MTQTRFSFSIAATDGKARTGAIQMQRGEIRTPAFMPVGTAATVKAMRPAEVRATGADIILGNTYHLMLRPGAERMARLGGLHGFMGWDRPILTDSGGYQVMSLSELTKMSEQGVAFSSHIDGSKHMLTPERSMEIQRLLDSDIVMAFDECTKNGCTHDEAARSMERSMRWARRSRDGFDAGGDHAERAALFGIQQGSLDEGLRRQSAQQLIDIGFDGYAVGGLAVGEGQEAMFATLDFAPDMLPIDKPRYLMGVGKPDDIVGAVERGIDMFDCVLPTRSGRNGQAFTWAGPLNIRNARFAEDTGPLDPRCTCSVCATWGRAYLHHLVKAGEMLGAMLMTQHNIHFYQSLMQAIRDAIAAGQFAAFAADFRRDYQRA

SEQ ID NO: 60981 - protein, 376 aa, Sphingobium lactosutens
  REGION 1..376: note = tr|T0J5L4|T0J5L4_9SPHN Queuine tRNA-ribosyltransferase OS=Sphingobium lactosutens DS20; OX = 1331060 GN=tgt PE=3 SV=1
MTKPRFSFSLSAVDGKARTGTIQMRRGDIRTPAFMPVGTAATVKAMRPAEVRATGADIILGNTYHLMLRPGAERMARLGGLHGFMGWDRPILTDSGGYQVMSLSALTKMSEEGVAFSSHIDGSKHLLTPERSMEIQRLLDTDIVMAFDECTKNGCTHDEAAKSMERSMRWAKRSRDGFDAGGEHAERAALFGIQQGSLNEELRRVSAEKLIDIGFDGYAVGGLAVGEGQEAMFATLDFAPDMLPLDKPRYLMGVGKPDDIVGAVERGIDMFDCVLPTRSGRNGQAFTWGGPLNIRNAKFNEDMGPLDARCGCPVCATWSRAYLHHLVKAGEMLGAMLMTQHNIHFYQEMMEAIRDAIGAGRFAAFAAEFRRNYQRV

SEQ ID NO: 60982 - protein, 376 aa, unidentified
  source 1..376: note = Sphingobium limneticum
  REGION 1..376: note = tr|A0A5J5GWB0|A0A5J5GWB0_9SPHN tRNA guanosine(34) transglycosylase Tgt OS=Sphingobium limneticum OX=1007511; GN = tgt PE=4 SV=1
MTKARFSFSIHATDGKARTGAIQMRRGEIRTPAFMPVGTAATVKAMRPAEVRATGADIILGNTYHLMLRPGAERMARLGGLHGFMGWDRPILTDSGGYQVMSLSALTKMSEEGVAFSSHIDGSKHMLTPERSMEIQRLLDSDIVMAFDECTKNGCTHDEAARSMERSMRWAKRSRDGFDAGGDHAARAALFGIQQGSLDEGLRRISAEKLIEVGFDGYAVGGLAVGEGQEAMFATLDFAPDMLPQDKPRYLMGVGKPDDIVGAVERGIDMFDCVLPTRSGRNGQAFTWAGPLNIRNAKFNEDQGPLDPRCGCPVCATWSRAYLHHLVKAGEMLGAMLMTQHNIHFYQELMQGLRDNIAAGTLASFTADFRRDYRKV

SEQ ID NO: 60983 - protein, 376 aa, Sphingobium lucknowense
  REGION 1..376: note = tr|A0A081T047|A0A081T047_9SPHN Queuine tRNA-ribosyltransferase OS=Sphingobium lucknowense F2; OX = 1450518 GN=tgt PE=3 SV=1
MTNPRFSFSIAATDGKARTGAIQMRRGEIRTPAFMPVGTAATVKAMRPAEVRAAGADIILGNTYHLMLRPGAERVARLGGLHGFMGWDRPILTDSGGYQVMSLSALTKMSEEGVAFSSHIDGSRHMLTPERSMEIQRLLDSDIVMAFDECTRNGCTHDEAAKSMERSMRWAKRSRDGFDAGGEHAERAALFGIQQGSLDEGLRRISAERLIDIGFDGYAVGGLAVGEGQEAMFATLDFAPAMLPADKPRYLMGVGKPDDIVGAVERGIDMFDCVLPTRSGRNGQAFTWAGPLNIRNARFAEDMGPLDPRCACPVCATWSRAYLHHLVKAGEMLGAMLMTQHNIHFYQALMQEIRDSIAAGRFASFAADFRRDYQRA

SEQ ID NO: 60984 - protein, 376 aa, unidentified; identical to SEQ ID NO: 60959
  source 1..376: note = Sphingobium paulinellae
  REGION 1..376: note = tr|A0A5J5HZA8|A0A5J5HZA8_9SPHN tRNA guanosine(34) transglycosylase Tgt OS=Sphingobium paulinellae OX=2048545; GN = tgt PE=4 SV=1

SEQ ID NO: 60985 - protein, 376 aa, Sphingobium quisquiliarum
  REGION 1..376: note = tr|T0IGH4|T0IGH4_9SPHN Queuine tRNA-ribosyltransferase OS=Sphingobium quisquiliarum P25; OX = 1329909 GN=tgt PE=3 SV=1
MTQNRFSFTIAATDGKARTGSIQMRRGDIRTPAFMPVGTAATVKAMRPAEVRAAGADIILGNTYHLMLRPGAERVARLGGLHGFMGWDRPILTDSGGYQVMSLSALTKMSEEGVAFASHIDGSRHMLTPERSMEIQRLLDSDIVMAFDECTRNGCTHEEAAHSMERSMRWAKRSRDAFDQGGDHAERAALFGIQQGSLNEDLRRVSAEKLIEIGFDGYAVGGLAVGEGQEAMFACLDYAPGMLPAGKPRYLMGVGKPDDIVGAVERGIDMFDCVLPTRSGRNGQAFTWAGPLNIRNARFAEDLSPLDPRCGCPVCATWSRAYLHHLVKAGEMLGAMLMTQHNISFYQALMQAIRDSIAQGRFAAFAAEFREGYRRA

SEQ ID NO: 60986 - protein, 380 aa, Sphingobium sp.
  REGION 1..380: note = tr|A0A2A3MW77|A0A2A3MW77_9SPHN Queuine tRNA-ribosyltransferase OS=Sphingobium sp. D43FB; OX = 2017595 GN=tgt PE=3 SV=1
MTQPRFSFSIAATDGKARTGAISMRRGEIRTPAFMPVGTAATVKAMRPAEVRAAGADIILGNTYHLMLRPGAERMARLGGLHGFMGWDRPILTDSGGYQVMSLSALTKMSEQGVAFSSHIDGSKHMLTPERSMEIQRLLDSDIVMAFDECTKNGCTHEEATKSMERSMRWAKRSRDGFDAGGDHADRAALFGIQQGSLDEGLRRESAQQLIDIGFDGYAVGGLAVGEGQQAMFATLDFAPDMLPADKPRYLMGVGKPDDIVGAVERGIDMFDCVLPTRSGRNGQAFTWAGPLNIRNARFAEDQGPLDPRCACPVCTTWSRAYLHHLVKAGEMLGAMLMTQHNIHFYQALMQGMRDAIAAGQFTAFTAAFRRDYQRVTSKE

SEQ ID NO: 60987 - protein, 376 aa, Sphingobium sp.
  REGION 1..376: note = tr|A0A197C1X6|A0A197C1X6_9SPHN Queuine tRNA-ribosyltransferase OS=Sphingobium sp. 20006FA; OX = 2056888 GN=tgt PE=3 SV=1
MTNPRFSFSIAATDGKARTGAIQMRRGEIRTPAFMPVGTAATVKAMRPAEVRAAGADIILGNTYHLMLRPGAERVARLGGLHAFMGWDRPILTDSGGYQVMSLSALTKMSEEGVAFSSHIDGSRHMLTPERSMEIQRLLDSDIVMAFDECTRNGCTHDEAAKSMERSMRWAKRSRDGFDAGAEHAERAALFGIQQGSLDEGLRRISAEKLIDISFDGYAVGGLAVGEGQEAMFATLDFAPGMLPADKPRYLMGVGKPDDIVGAVERGIDMFDCVLPTRSGRNGQAFTWAGPLNIRNARFAEDKGPLDPRCGCPVCTTWSRAYLHHLVKAGEMLGAMLMTQHNIHFYQALMQGIRDSIAIGRFQGFAADFRRDYQRA

SEQ ID NO: 60988 - protein, 381 aa, Sphingobium ummariense
  REGION 1..381: note = tr|T0IY71|T0IY71_9SPHN Queuine tRNA-ribosyltransferase OS=Sphingobium ummariense RL-3; OX = 1346791 GN=tgt PE=3 SV=1
MTNPRFSFSIAATDGKARTGAIAMRRGEIRTPAFMPVGTAATVKAMRPAEVRAAGADIILGNTYHLMLRPGAERVARLGGLHGFMGWDRPILTDSGGYQVMSLSALTKLSEEGVAFSSHIDGSKHMLTPERSMEIQRLLDSDIVMAFDECTRNGCTRDEAAKSMERSMRWAKRSRDAFDAGGKHAAQDHPERAALFGIQQGSLDEGLRRESAQKLIEIGFDGYAVGGLAVGEGQDAMFATLDFAPDMLPADRPRYLMGVGKPDDIVGAVERGIDMFDCVLPTRSGRNGQAFTWQGPLNIRNAKFAEDKAPLDPRCDCPVCVTWGRAYLHHLVKAGEMLGAMLMTQHNIHFYQALMQATRSAIEQGRFASFVSEFRRDYLRR

SEQ ID NO: 60989 - protein, 376 aa, Sphingobium wenxiniae
  REGION 1..376: note = tr|A0A562K4U5|A0A562K4U5_SPHWJ Queuine tRNA-ribosyltransferase OS=Sphingobium wenxiniae (strain DSM 21828 / JZ-1) OX=595605 GN=tgt PE=3 SV=1
MTQPRFSFSVSATDGKARTGVISMRRGEIRTPAFMPVGTAATVKAMRPAEVRAAGADIILGNTYHLMLRPGAERMARLGGLHGFMGWDRPILTDSGGYQVMSLSALTRMSEEGVAFSSHIDGSKHMLSPERSMEIQRLLDSDIVMAFDECTRNGCTHDEAAQSMERSMRWAKRSRDAFDAGGAHADRAALFGIQQGSLDEGLRRVSADRLIDIGFDGYAVGGLAVGEGQEAMFGCLDFAPDMLPPDRPRYLMGVGKPDDIVGAVERGIDMFDCVLPTRSGRNGQAFTWNGPLNIRNARFAEDREPLDPRCACPVCSTWSRAYLHHLVKAGEMLGAMLMTQHNIHFYQDLMRNIRDSIAQGRFAVFAAGFRNEYKRA

SEQ ID NO: 60990 - protein, 376 aa, Sphingobium xenophagum; identical to SEQ ID NO: 60977
  REGION 1..376: note = tr|A0A401J0Z2|A0A401J0Z2_SPHXE Queuine tRNA-ribosyltransferase OS=Sphingobium xenophagum; OX = 121428 GN=tgt PE=3 SV=1

SEQ ID NO: 60991 - protein, 376 aa, Sphingobium yanoikuyae
  REGION 1..376: note = tr|K9CMX4|K9CMX4_SPHYA Queuine tRNA-ribosyltransferase OS=Sphingobium yanoikuyae ATCC 51230 OX=883163 GN=tgt PE=3 SV=1
MTKPRFSFSIAATDGKARTGAIQMRRGEIRTPAFMPVGTAATVKAMRPAEVRATGADIILGNTYHLMLRPGAERMARLGGLHGFMGWDRPILTDSGGYQVMSLSALTKMSEEGVAFSSHLDGSKHMLSPERSMEIQRLLDSDIVMAFDECTKNGCTHDEAARSMERSMRWAKRSRDGFDAGGDHADRAALFGIQQGSLDEGLRKISAEKLIEIGFDGYAVGGLAVGEGQEAMFATLDFAPDMLPQDKPRYLMGVGKPDDIVGAVERGIDMFDCVLPTRSGRNGQAFTWAGPLNIRNAKFNEDLGPLDPRCGCPVCATWSRAYLHHLVKSGEMLGAMLMTQHNIHFYQELMQGLRDNIAAGTLSTFTADFRRDYQRV

SEQ ID NO: 60992 - protein, 376 aa, Sphingobium yanoikuyae
  REGION 1..376: note = tr|A0A0J9CVM4|A0A0J9CVM4_SPHYA Queuine tRNA-ribosyltransferase OS=Sphingobium yanoikuyae OX=13690; GN = tgt PE=3 SV=1
MTKPRFSFSIAATDGKARTGAIQMRRGEIRTPAFMPVGTAATVKAMRPAEVRATGADIILGNTYHLMLRPGAERMARLGGLHGFMGWDRPILTDSGGYQVMSLSALTKMSEEGVAFSSHLDGSKHMLSPERSMEIQRLLDSDIVMAFDECTKNGCTHDEAAKSMERSMRWAKRSRDGFDAGGDHAERAALFGIQQGSLNEGLRKISAEKLIEIGFDGYAVGGLAVGEGQEAMFATLDFAPDMLPQDKPRYLMGVGKPDDIVGAVERGIDMFDCVLPTRSGRNGQAFTWAGPLNIRNAKFNEDLGPLDPRCGCPVCATWSRAYLHHLVKSGEMLGAMLMTQHNIHFYQELMQGLRDNIAAGTLSTFTADFRRDYQRV

SEQ ID NO: 60993 - protein, 379 aa, unidentified
  source 1..379: note = Sphingomonadaceae bacterium
  REGION 1..379: note = tr|A0A257DKV1|A0A257DKV1_9SPHN Queuine tRNA-ribosyltransferase OS=Sphingomonadaceae bacterium PASS1 OX=2015579 GN=tgt PE=3 SV=1
MTTRFQFSISATDGKARTGSIQMMRGEIRTPAFMPVGTAATVKAMRPAEVRATGADIILGNTYHLMLRPGAERVARLGGLHQFSGWDRPILTDSGGYQVMSLSALRKITEEGVAFQSHLDGSKHMLSPERSMEIQRLLGSDIVMAFDECPANGVSRDEAIKSMELSMRWAKRSRDGFDSGGEHAARAALFGIQQGSLNEELRKRSADALIDIGFDGYAVGGLAVGEGQEAMFGCLDYAPDQLPAERPRYLMGVGKPDDLLGAVERGIDMFDCVLPTRSGRNGQAFTHHGPINIRNAKFAEDQGPIDDQCTCPVCATWTRAYVHHLIRSGEILGAMLMTQHNLHYYQMLMAGMRAAISQGRFTAFASDFRRDYVRGKDQG

SEQ ID NO: 60994 - protein, 374 aa, unidentified
  source 1..374: note = Sphingomonadaceae bacterium
  REGION 1..374: note = tr|A0A2D6UQ15|A0A2D6UQ15_9SPHN Queuine tRNA-ribosyltransferase OS=Sphingomonadaceae bacterium; OX = 1930536 GN=tgt PE=3 SV=1
MSERFAFTIDATDGAARTGSIAMRRGTIRTPAFMPVGTAATVKAMKPETVRKTGADIILGNTYHLMLRPGAERVARLGGLHQFMNWDRPILTDSGGYQGMSLSDLRKLTEKGVEFRSHIDGSKHMLTPERSMEIQRLLGSDIVMAFDECPRADRPRDEIAASMEMSMRWAKRSRDGFDSGGDHAGRSALFGIQQGALDEDLRQISAEKLTEIGFDGYAIGGLAVGEGQEAMFATLDFAPRQLPHDRPRYLMGVGKPDDLVGAVERGVDMFDCVLPSRSGRNGQAFTWNGPINLRNARFAEDQELLDSRCACDTCGTYTRAYLHHLIKSQEILGAMLMTEHNIAFYQQLMQAMRDAIAEGRFAAFAAQFRSDYLG

SEQ ID NO: 60995 - protein, 379 aa, unidentified
  source 1..379: note = Sphingomonadales bacterium
  REGION 1..379: note = tr|A0A258J8N0|A0A258J8N0_9SPHN Queuine tRNA-ribosyltransferase OS=Sphingomonadales bacterium 32-65-25 OX=1970594 GN=tgt PE=3 SV=1
MTRFAFSIHARDGKARTGTITMRRGEIRTPAFMPVGTAATVKAMRASEVRAAGADIILGNTYHLMLRPTAERIHRLGGLHSFMGWNRPILTDSGGYQVMSLSSLTKRTEEGVTFASHLDGSRHLMSPERSMEIQRLLGSDIVMAFDELVALPAPREVVKDAMDRSMRWAARSRAAFDAGGEHAAGAALFGIQQGGLDERLRAESATALRAIGFDGYAIGGLAVGEGQPAMFGVLDYATGQLPEDAPRYLMGVGKPDDIVGAVVRGVDMFDCVLPTRSGRNGQAFTHDGPLNLRNAVHGEDLSPLDADCRCPVCHGPEAASRAYLHHLIKAGEMLGAMLLTQHNIGFYQQLMAGLRAAIAEQQLGDFAAAFLARYHANRR

SEQ ID NO: 60996 - protein, 374 aa, unidentified
  source 1..374: note = Sphingomonadales bacterium
  REGION 1..374: note = tr|A0A1B6ZD74|A0A1B6ZD74_9SPHN Queuine tRNA-ribosyltransferase OS=Sphingomonadales bacterium EhC05 OX=1849171 GN=tgt PE=3 SV=1
MTDRFRFSISATDGKARTGKITMQRGDIRTPAFMPVGTAATVKAMKPETVRATGADIILGNTYHLMLRPGAERVARLGGLHRFMNWDRPILTDSGGYQVMSLSDLTKLTEDGVEFRSHLDGSRHMLTPERSMEIQRLLGSDIVMAFDECTKNGASRDEALASMERSMRWAKRSRDGFDSDAVHASKAALFGIQQGSLDQEIRSASAAALIDIGFDGYAIGGLAVGEGQEAMFDVLDYAPDQLPSDKPRYLMGVGKPDDLVGAVERGVDMFDCVLPSRSGRNGQAFTARGPLNIRNAKFAEDMEPLDGSCACPVCEKYSRAYLHHLIRAKEILGAMLMTEHNIAYYQSLMAGMRAAIAAGTFGSFAKSFRADYLP

SEQ ID NO: 60997 - protein, 383 aa, Sphingomonas adhaesiva
  REGION 1..383: note = tr|A0A2A4I746|A0A2A4I746_9SPHN Queuine tRNA-ribosyltransferase OS=Sphingomonas adhaesiva OX=28212; GN = tgt PE=3 SV=1
MSAPRFAFTIAATDGAARTGTIAMERGTIRTPAFMPVGTAATVKAMKPADVERAGADIILGNTYHLMLRPGAERVARLGGLHAFMGWERPILTDSGGYQVMSLSELTKRSEEGVAFASHLDGTRHLITPERSIEIQRLLGSNITMAFDELVPTTSTREVQAAAMERSMRWARRSRDAFHDADGGVHAAHNAIFGIQQGALDEGLRRASADALIDIGFDGYAIGGLAVGEGQEAMFGCLDYAPGQLPADRPRYLMGVGKPDDIVGAVERGVDMFDCVMPTRSGRTGQAFTRTGPINIRNARFNEDQGPLDPECGCAVCATWSRAYLHHLVRSGEILGAMLMTEHNIAFYEALMADLRGAIAEQRLAAFASGFRARYGAGKGGQG

SEQ ID NO: 60998 - protein, 381 aa, Sphingomonas aerolata
  REGION 1..381: note = tr|A0A2T4YQI3|A0A2T4YQI3_9SPHN Queuine tRNA-ribosyltransferase OS=Sphingomonas aerolata OX=185951; GN = tgt PE=3 SV=1
MDHPVSPRFDFTISSTDGAARTGQIAMQRGVIRTPAFMPVGTAATVKAMKPDDVAAAGADIILGNTYHLMLRPGAERVARLGGLHGFMGWSKPILTDSGGYQVMSLADLTKRSEEGVSFKSHLDGTRHLLSPERSIEIQRLLGSNIVMAFDELVPTTSTREVQAAAMERSMRWAKRSRDAFDAGGAHADNNAIFGIQQGALNESFRKSSADALINIGFDGYAVGGLAVGEGQEAMFGCLDFAPGQLPADKPRYLMGVGKPDDIVGAVERGIDMFDCVMPTRSGRTGQAFTRNGPINIRNARFAEDQLPLAADCACPVCATWSRAYLHHLVRAGEMLGAMLMTEHNIWFYETLMADLRAAIAAGTLTKFANDFRAEYGRKSS

SEQ ID NO: 60999 - protein, 378 aa, Sphingomonas aquatilis
  REGION 1..378: note = tr|A0A511Q7L0|A0A511Q7L0_9SPHN Queuine tRNA-ribosyltransferase OS=Sphingomonas aquatilis NBRC 16722 OX=1219039 GN=tgt PE=3 SV=1
MSSRFAFTIAATDGRARTGTIQMQRGVIRTPAFMPVGTAATVKAMKPADVANAGADIILGNTYHLMLRPGAERVARLGGLHGFMGWDKPILTDSGGYQVMSLADLTKRSEEGVSFKSHLDGTRHLLSPERSIEIQRLLGSNIVMAFDELVPTTSTREVQAAAMERSMRWAKRSRDAFNGGGEHAENNAIFGIQQGALDESLRKASADALIDIGFDGYAVGGLAVGEGQEAMFGCLDFAPGQLPQDKPRYLMGVGKPDDIVGAVERGIDMFDCVMPTRSGRTGQAFTRNGPINLRNAKFGEDQAPLDPTCGCPVCATWSRAYIHHLVRAGEILGAMLMTEHNIWFYEALMADLRAAIAAGELTSFANGFRAAYQRGKGE

SEQ ID NO: 61000 - protein, 382 aa, Sphingomonas aurantiaca
  REGION 1..382: note = tr|A0A2T5GMA0|A0A2T5GMA0_9SPHN Queuine tRNA-ribosyltransferase OS=Sphingomonas aurantiaca; OX = 185949 GN=tgt PE=3 SV=1
MTRPRFDFTISATDGKARTGVIAMQRGDIRTPAFMPVGTAATVKGMKPADVVGAGADIILGNTYHLMLRPGAERVARLGGLHAFSGWSKPILTDSGGYQVMSLADLTKRSEEGVSFKSHLDGTRHLLSPERSIEIQRLLGSNIVMAFDELVPTTSTREVQAAAMERSMRWARRSRAAFDSGEAHAENNAIFGIQQGALNEGFRKSSADALIDIGFDGYAVGGLAVGEGQEAMFGCLDFAPDQLPVDKPRYLMGVGKPDDIVGAVERGIDMFDCVMPTRSGRTGQAFTRTGPINIRNAKFGEDTGPLDPACPCPVCATWSRAYLHHLVRSGEMLGAMLMTEHNIWFYETLMADLRAAIAASALTQFANAFRAQYVRKSEGEQT

SEQ ID NO: 61001 - protein, 296 aa, unidentified
  source 1..296: note = Sphingomonas bacterium
  REGION 1..296: note = tr|A0A3D0W9X7|A0A3D0W9X7_9SPHN Queuine tRNA-ribosyltransferase (Fragment) OS=Sphingomonas bacterium OX=1895847 GN=DEP91_04130 PE=3 SV=1
ILTDSGGYQVMSLAELTKRSEEGVAFKSHLDGSRHLISPERSMEIQRLLGSDIVMAFDELVPTTSTREVQAAAMERSMRWAQRSREGFDAGGDHAERAALFGIQQGALDEGLRRESADALKHIGFDGYAVGGLAVGEGQEAMFGVLDYAPGQLDPAKPRYLMGVGKPDDIVGAVERGIDMFDCVLPTRSGRTGQAFTRGGPINIRNARFAEDQGPLDPACPCPVCGTWSRAYLHHLVRAGEILGAMLMTEHNLWFYQTLMADLRAAIGAGTLADFAATFRTNYYAERPAAAGVSKA

SEQ ID NO: 61002 - protein, 380 aa, unidentified
  source 1..380: note = Sphingomonas carotinifaciens
  REGION 1..380: note = tr|A0A1G7L3L3|A0A1G7L3L3_9SPHN Queuine tRNA-ribosyltransferase OS=Sphingomonas carotinifaciens; OX = 1166323 GN=tgt PE=3 SV=1
MTRFAFSIHATDGPARTGAIAMERGTIRTPAFMPVGTAATVKAMKPGDVAASGADIILGNTYHLMLRPGAERVARLGGLHDFMGWDKPILTDSGGYQVMSLAELTKRSEDGVAFKSHLDGTRHLLSPERSIEIQRLLGSNIVMAFDELVPTTSTREVQAAAMERSMRWAKRSRDAFDGGGAHAEHNAIFGIQQGALDEGLRKASADALIDIGFDGYAVGGLAVGEGQEAMFGCLDFAPGQLPVDKPRYLMGVGKPTDIVGAVERGIDMFDCVLPTRSGRTGQAFTRTGPLNLRNARHGEDQGPLDPSCGCPVCRTWSRAYLHHLVRAGEILGAMLMTEHNIWFYETLMADLRAAISEGRLRAFANAFRARYAGNPTGEMQ

SEQ ID NO: 61003 - protein, 376 aa, Sphingomonas changbaiensis
  REGION 1..376: note = tr|A0A0E9MKB1|A0A0E9MKB1_9SPHN Queuine tRNA-ribosyltransferase OS=Sphingomonas changbaiensis NBRC 104936 OX=1219043 GN=tgt PE=3 SV=1
MADRFAFSIHATDGAARTGTIHMLRGEIRTPAFMPVGTAATVKAMKPADVRAAGADIILGNTYHLMLRPGAERVARLGGLHGFMGWERPILTDSGGYQVMSLAELTKRSEEGVAFKSHLDGARHLITPERSTEIQRLLGSDIVMAFDELVPTTSPRDVQAAAMERSMRWARRSRDAFLGGGDHAARAAQFGIQQGALDRDLRQVSAERLIEIGFDGYAVGGLAVGEGQDAMFGVLDYAPGQLPVDRPRYLMGVGKPDDIVGAVERGIDMFDCVLPTRSGRTGQAFTWDGPINIRNARFGEDQDPLDPECGCSVCATWSRAYLHHLVRAGEILGAMLMTEHNLSFYQQLMERLRQAIGAGQLAPFAATFRDRYHRAG

SEQ ID NO: 61004 - protein, 376 aa, Sphingomonas desiccabilis
  REGION 1..376: note = tr|A0A4Q2IQF5|A0A4Q2IQF5_9SPHN Queuine tRNA-ribosyltransferase OS=Sphingomonas desiccabilis; OX = 429134 GN=tgt PE=3 SV=1
MSPRFDFTIHATDGRARTGAIAMRRGTIRTPAFMPVGTAATVKAVKPADVRASGADILLGNTYHLMLRPGAERVHRLGGLHGFMGWDRPILTDSGGYQVMSLSDLTKRSEDGVEFKSHLDGSRHLLSPERSMEIQRLLGSDIVMAFDELVPTTATRDVQARAMERSMRWAKRSRDGFDSGGAHAEGAALFGIQQGALDQVLRRESADALKDIGFDGYAIGGLAVGEGQEAMFGVLDYAPGQLDAARPRYLMGVGKPDDIVGAVERGVDMFDCVLPTRSGRTGQAFTRTGPINIRNARFAEDTGPLDPECPCPSCTGWSRAYIHHLVRAGEILGAMLMTEHNLWFYQRLMADLRAAIAAGSLSMFANDFRTRYSSRG

SEQ ID NO: 61005 - protein, 378 aa, Sphingomonas dokdonensis
  REGION 1..378: note = tr|A0A245ZIA1|A0A245ZIA1_9SPHN Queuine tRNA-ribosyltransferase OS=Sphingomonas dokdonensis; OX = 344880 GN=tgt PE=3 SV=1
MTSRFAFTIAATDGAARTGSIAMQRGTIRTPAFMPVGTAATVKAMKPADVEAAGADIILGNTYHLMLRPGAERVARLGGLHRFMGWDKPILTDSGGYQVMSLSDLTKRSEEGITFKSHLDGTRHLLSPERSIEIQRLLGSNIIMAFDELVPTTSTREVQAAAMERSMRWAKRSRDAFDGGGDHAANNAIFGIQQGALDEGFRKASADALIDIGFDGYAIGGLAVGEGQEAMFGCLDFAPGQLPADKPRYLMGVGKPDDIVGAVERGVDMFDCVLPTRSGRTGQAFTRTGPINIRNARFNEDQGPLDPECTCPTCTTWSRAYLHHLVRAGEILGAMLMTEHNIFFYEMLMADLRAAIAERRLKAFADAFRSRYQRGKGE

SEQ ID NO: 61006 - protein, 378 aa, unidentified
  source 1..378: note = Sphingomonas edaphi
  REGION 1..378: note = tr|A0A418Q1T5|A0A418Q1T5_9SPHN Queuine tRNA-ribosyltransferase OS=Sphingomonas edaphi OX=2315689; GN = tgt PE=3 SV=1
MTRFQFQIAATDGAARTGTIQMQRGEIRTPAFMPVGTAATVKAMKPESVRATGADIILGNTYHLMLRPGAERVAKLGGLHKFMNWQRPILTDSGGYQVMSLSELTKVTDQGVSFRSHLDGSRHMLSPERSIEVQRLLGSDIVMQFDELVRPDVPPKKQREAMDRSIRWARRSRDEFDRGGEHAERSAIFGIQQGVLDMALRKESADALVDIGFDGYAVGGLAVGEGQEAMLGCLDFAPGQLPADKPRYLMGVGKPDDIVEAVRRGIDMFDCVLPTRSGRTGQAFTADGPINIRNARFAEDQEPLDPDCSCPTCTTYSRAYVHHLVRSGEILGAMLMTEHNLWFYQQMMKGLRDAIAEARFTAHASAFLDRYLRGRKGA

SEQ ID NO: 61007 - protein, 376 aa, unidentified
  source 1..376: note = Sphingomonas elodea
  REGION 1..376: note = tr|A0A495EXJ4|A0A495EXJ4_SPHEL Queuine tRNA-ribosyltransferase OS=Sphingomonas elodea OX=179878; GN = tgt PE=3 SV=1
MPRFQFTIHATDGKARRGTIAMQRGEIRTPAFMPVGTAATVKAVKPQDVRASGADILLGNTYHLMLRPTAERVARLGGLHKFMGWDRPILTDSGGYQVMSLSELTKRSEEGVAFASHLDGSRHMMSPERSMEIQRLLGSDIVMAFDELVPTTSTREVQAKAMERSMRWAKRSRAGFDSGEEHAARAALFGIQQGALDEGLRKASADALKDIGFDGYAVGGLAVGEGQEAMFGVLDYAPGQLDETKPRYLMGVGKPDDIVGAVERGIDMFDCVLPTRSGRTGQAFTRTGPINIRNAKFAEDQGPLDPACPCPVCGTWSRAYIHHLVRAGEILGAMLMTEHNLWFYQALMADLRAAIEEQRLTAFANDFRAKYQAAKG

SEQ ID NO: 61008 - protein, 377 aa, unidentified
  source 1..377: note = Sphingomonas endophytica
  REGION 1..377: note = tr|A0A147I9W9|A0A147I9W9_9SPHN Queuine tRNA-ribosyltransferase OS=Sphingomonas endophytica; OX = 869719 GN=tgt PE=3 SV=1
MTRFAFSIAATDGAARTGTITMQRGVIRTPAFMPVGTAATVKAMKPADVERAGADIILGNTYHLMLRPGAERVARLGGLHGFMGWNKPILTDSGGYQVMSLSALTKRSEEGVAFASHLDGTRHMITPERSIEIQRLLGSNIVMAFDELVPTTSTREVQAAAMERSMRWAKRSRDAFDGGGDHAADNAIFGIQQGALDEGLRKASADALIDIGFDGYAIGGLAVGEGQAAMFGCLDYAPGQLPADKPRYLMGVGKPTDIVGAVERGIDMFDCVMPTRSGRTGQAFTRTGPINIRNARFAEDQGPLDPECACAVCSTWSRAYVHHLVRAGEMLGAMLMTEHNIAFYEALMADLRAAIADGRLAAFANDFRARYDAPKGE

SEQ ID NO: 61009 - protein, 382 aa, Sphingomonas faeni
  REGION 1..382: note = tr|A0A2T5UBU2|A0A2T5UBU2_9SPHN Queuine tRNA-ribosyltransferase OS=Sphingomonas faeni OX=185950; GN = tgt PE=3 SV=1
MTRPRFDFTISATDGKARTGVIAMQRGDIRTPAFMPVGTAATVKGMKPADVVGAGADIILGNTYHLMLRPGAERVARLGGLHAFSGWSKPILTDSGGYQVMSLADLTKRSEEGVSFKSHLDGTRHLLSPERSIEIQRLLGSNIVMAFDELVPTTSTREVQAAAMERSMRWAKRSRAAFDAGEDHAENNAIFGIQQGALNEGFRKSSADALIDIGFDGYAVGGLAVGEGQEAMLGCLDFAPDQLPVDKPRYLMGVGKPDDIVGAVERGIDMFDCVMPTRSGRTGQAFTRTGPINIRNAKFAEDMGPLDPACPCPVCATWGRAYLHHLVRSGEMLGAMLMTEHNIWFYETLMADLRAAIASGTLTQFANDFRGVYARKSEGEPK

SEQ ID NO: 61010 - protein, 376 aa, Sphingomonas fennica
  REGION 1..376: note = tr|A0A2T4HPC2|A0A2T4HPC2_9SPHN Queuine tRNA-ribosyltransferase OS=Sphingomonas fennica OX=114404; GN = tgt PE=3 SV=1
MTDRPRFQFSVAATDGAARTGTLAMRRGDIRTPAFMPVGTAATVKGMKPEGVRAIGADIILGNTYHLMLRPGAERMARLGGLHDFMQWDRPILTDSGGYQVMSLSDLAKITEEGVAFKSHLDGSRHMLTPERSMEIQRLLGADIVMAFDECTPFPATRDRAESSMERSMRWAKRSRDAFDAGGDHAASSALFGIQQGSMEEDLRRRSSEALTGIGFDGYAIGGLAVGEGQAEMFRVLDFAVDMLPADRPRYLMGVGKPDDIVGAVERGIDMFDCVLPTRSGRNGQAFTWDGPINIRNAKYAEDLAPIDPESPIAPWSRAYLHHLVKSGEMLGAMLMTEHNLWFYQRLMAELRAAIAEGRLTAFADGFRARYKGNKA

SEQ ID NO: 61011 - protein, 383 aa, unidentified
  source 1..383: note = Sphingomonas gei
  REGION 1..383: note = tr|A0A4S1XDZ0|A0A4S1XDZ0_9SPHN Queuine tRNA-ribosyltransferase OS=Sphingomonas gei OX=1395960; GN = tgt PE=3 SV=1
MASSAPRFQFTIHATDGKARLGTITMQRGEIRTPAFMPVGTAATVKAVKPQDVRASGADILLGNTYHLMLRPTAERVHKLGGLHKFMGWDRPILTDSGGYQVMSLSELTKRSEEGIVFKSHLDGSRHMLSPERSMEIQRLLGSNIVMAFDELVPTTSPREVQAAAMERSMRWARRSRAGFDAGGDHAENNALFGIQQGALDESFRKASADALLDIGFDGYAIGGLAVGEGQEAMFGVLDYAPGQLDPVKPRYLMGVGKPDDVVGAVERGVDMFDCVLPTRSGRTGQAFTRTGPINIRNAKFAEDQGPLDPACACATCAGWSRAYVHHLVRAGEILGAMLMTEHNLWFYQQLMADLRSAIGDGRLTDFANAFRRDYRAVPKPLA

SEQ ID NO: 61012 - protein, 383 aa, Sphingomonas ginsenosidimutans
  REGION 1..383: note = tr|A0A2A4HZ22|A0A2A4HZ22_9SPHN Queuine tRNA-ribosyltransferase OS=Sphingomonas ginsenosidimutans; OX = 862134 GN=tgt PE=3 SV=1
MSAPRFAFTIAATDGAARTGAIAMERGTIRTPAFMPVGTAATVKAMKPADVARAGADIILGNTYHLMLRPGAERVARLGGLHAFMGWERPILTDSGGYQVMSLSELTKRSEEGVAFASHLDGTRHLITPERSIEIQRLLGSNITMAFDELVPTTSTREVQAAAMERSMRWAKRSRDAFHDADGGVHAAHNAIFGIQQGALDEGLRKASADALIDIGFDGYAIGGLAVGEGQEAMFACLDYAPGQLPADRPRYLMGVGKPDDIVGAVERGVDMFDCVMPTRSGRTGQAFTRSGPINIRNARFNEDQGPLDPECGCAVCATWSRAYLHHLVRSGEILGAMLMTEHNIAFYEALMADLRAAIAEQRLAAFASGFRARYGAGKGGQG

SEQ ID NO: 61013 - protein, 377 aa, unidentified
  source 1..377: note = Sphingomonas ginsenosidivorax
  REGION 1..377: note = tr|A0A5C6UI68|A0A5C6UI68_9SPHN Queuine tRNA-ribosyltransferase OS=Sphingomonas ginsenosidivorax; OX = 862135 GN=tgt PE=3 SV=1
MTPRFAFTIAATDGAARTGAIEMHRGTIRTPAFMPVGTAATVKAMKPRDVEAAGADIILGNTYHLMLRPGAERVARMGGLHGFMGWNRPILTDSGGYQVMSLADLTKRSEEGVAFKSHLDGTRHLLSPERSIEIQRLLGSDIVMAFDELVPTTSTREVQAAAMERSMRWARRSRAAFDSGAEHAAGAAIFGIQQGALDRTLRGDSAAALTDIGFDGYAVGGLAVGEGQDAMFGCLDFAPAQLPADKPRYLMGVGKPDDIVGAVERGIDMFDCVMPTRSGRTGQAFTRDGPINIRNAKFNEDPAPIDAACGCPTCATWSRAYLHHLVRAGEMLGAMLMTEHNIWFYETLMADLRAAIASGTLKTYADEFRLRYKRPAL

SEQ ID NO: 61014 - protein, 385 aa, Sphingomonas glacialis
  REGION 1..385: note = tr|A0A502G370|A0A502G370_9SPHN Queuine tRNA-ribosyltransferase OS=Sphingomonas glacialis; OX = 658225 GN=tgt PE=3 SV=1
MNDKPRFDFTIHATDGKARTGEIAMRRGTIRTPAFMPVGTAATVKGVKPADVRATGADIILGNTYHLMLRPGAERVARLGGLHGFMGWDRPILTDSGGYQVMSLSDLTKRDENGVTFKSHLDGSRHTLSPERSIEIQRLLGSDIVMAFDELVPTTSTPEVQAAAMARSMRWAKRSRDAFDAGGVHAEGAAIFGIQQGALDQTLRGDSAGALIDIGFDGYAVGGLAVGEGQEAMFACLDFAPGQLPADKPRYLMGVGKPTDIVGAVERGIDMFDCVLPTRSGRTGQAFTRNGPLNIRNAKFAEDTGPLDPACGCPTCAHPEHGGSRAYLHHLVRSGEILGAMLMTEHNLWFYQAMMADLRAAIGEGRLKAFADAFRQAYDSHAERV

SEQ ID NO: 61015 - protein, 375 aa, unidentified
  source 1..375: note = Sphingomonas guangdongensis
  REGION 1..375: note = tr|A0A285R749|A0A285R749_9SPHN Queuine tRNA-ribosyltransferase OS=Sphingomonas guangdongensis; OX = 1141890 GN=tgt PE=3 SV=1
MPPRFDFTITASDGRARTGIIATRRGEIRTPAFMPVGTAATVKAMKPADVRAGGADIILGNTYHLMLRPGAERVARLGGLHAFMRWDRPILTDSGGYQVMSLSELTTRSENGVAFRSHLDGSRHLLTPERSIEIQRLLGSTITMAFDELVPTTSPREVQAAAMERSMRWAKRSHDAFFGAEAHAADNAIFGIQQGALDEGLRRASADALTDIGFDGYAIGGLAVGEGQEAMFACLDYAPAQLPTGQPRYLMGVGKPDDIVGAVERGVDMFDCVLPTRSGRTGQAFTRNGPINIRNARFAEDQAPLDPASPTAGWSKGYLHHLVKSGEMLGAMLMTEHNLWFYQQLMADLRAAISAGRLAAFASAFRAAYRGGQGE

SEQ ID NO: 61016 - protein, 376 aa, Sphingomonas haloaromaticamans
  REGION 1..376: note = tr|A0A1S1HGY1|A0A1S1HGY1_9SPHN Queuine tRNA-ribosyltransferase OS=Sphingomonas haloaromaticamans; OX = 653954 GN=tgt PE=3 SV=1
MTDRPRFQFSVAATDGAARTGTLAMRRGDIRTPAFMPVGTAATVKGMKPEGVRAIGADIILGNTYHLMLRPGAERMARLGGLHDFMQWDRPILTDSGGYQVMSLSDLAKITEEGVAFKSHLDGSRHMLTPERSMEIQRLLGSDIVMAFDECTPFPATRDRAESSMERSMRWAKRSRDAFDAGGDHAASSALFGIQQGSMEEDLRRRSSEALTGIGFDGYAIGGLAVGEGQAEMFRVLDFAVDMLPADRPRYLMGVGKPDDIVGAVERGIDMFDCVLPTRSGRNGQAFTWDGPINIRNAKYAEDLAPIDPESPIAPWSRAYLHHLVKSGEMLGAMLMTEHNLWFYQRLMAELRAAIAEGRLTAFADGFRARYKGNKA

SEQ ID NO: 61017 - protein, 377 aa, unidentified
  source 1..377: note = Sphingomonas hengshuiensis
  REGION 1..377: note = tr|A0A2W4Z8N3|A0A2W4Z8N3_9SPHN Queuine tRNA-ribosyltransferase OS=Sphingomonas hengshuiensis; OX = 1609977 GN=tgt PE=3 SV=1
MAPRFAFTVTATSGRARTGTIAMRRGEIRTPAFMPVGTAATVKAMKPGDVRATGADILLGNTYHLMLRPSAERVARLGGLHAFMGWDRPILTDSGGYQVMSLSELTRRSEDGVEFKSHLDGTRHLMSPERSMEIQRLLDSDIVMAFDELVPTTATREVQARAMERSMRWARRSRAGFDSGGEHASRAALFGIQQGALDKGLRKASADALVDIGFDGYAVGGLAVGEGQEAMFGVLDYAPQQLPSDRPRYLMGVGKPDDIVGAVERGIDMFDCVLPTRSGRTGQAFTRHGPINIRNARFAEDVGPVDPDCACPVCHDHSRAYLHHLVRAGEILGAMLMTEHNLYFYQALMADLRAAIAGDTLTAFADDFRARYAGPAR

SEQ ID NO: 61018 - protein, 402 aa, Sphingomonas histidinilytica
  REGION 1..402: note = tr|A0A1T5A063|A0A1T5A063_9SPHN Queuine tRNA-ribosyltransferase OS=Sphingomonas histidinilytica; OX = 439228 GN=tgt PE=3 SV=1
MPQGATERKPWQYGAAPLWPAAMTAPRFHFSIAATDGKARTGTIRMQRGDIRTPAFMPVGTAATVKAMKPADVRATGADIILGNTYHLMLRPGAERVARLGGLHRFMRWDRPILTDSGGYQVMSLSALTRRSEEGVSFKSHLDGSAHMLSPERSIEIQRLLGSDIVMAFDELVPTTTTVQQQAEAMERSMRWAKRSRDAFDAGGEHAGRAALFGIQQGALDEKLRKASADALLAIGFDGYAVGGLAVGEGQEAMFATLDFAPGQLDPDKPRYLMGVGKPDDIVGAVERGIDMFDCVLPTRSGRNGQAFTRRGPINLRNARFGEDERPLDESCACAVCGQFSRAYLHHLIRAGEILGAMLMTEHNLSFYQGLMEDLRAAIATGTLSSFAADFRAAYHGGGTGD

SEQ ID NO: 61019 - protein, 394 aa, unidentified
  source 1..394: note = Sphingomonas indica
  REGION 1..394: note = tr|A0A1X7FZH6|A0A1X7FZH6_9SPHN Queuine tRNA-ribosyltransferase OS=Sphingomonas indica OX=941907; GN = tgt PE=3 SV=1
MRTFRCITHQGDSGLGRKDESLAERFSFSIRATDGAARTGTIAMRRGEIRTPAFMPVGTAATVKAMKPADVRAAGADIILGNTYHLMLRPGAERVAKLGGLHRFMGWDRPILTDSGGYQVMSLSELTKVSEEGVAFASHLDGSRYMLSPERSMEIQTLLGSDIVMAFDQLVKTTDTADAQQAAMERSTRWARRSRVAFDALGNEGALFGIQQGGLDEGWRRASADALIDIGFDGYAVGGLAVGEGQEAMFGCLDFAPGQLPADRPRYLMGVGKPDDIVGAVERGIDMFDCVLPTRSGRTGQAFTWSGPINIRNAKFAEDAAPIDADCACPVCATWSRAYLHHLVRSGEILGAMLMTEHNISFYQQLMAGLRDAIAESRLTAWADQFRARYRGGR

SEQ ID NO: 61020 - protein, 381 aa, unidentified
  source 1..381: note = Sphingomonas jatrophae
  REGION 1..381: note = tr|A0A1I6LCR3|A0A1I6LCR3_9SPHN Queuine tRNA-ribosyltransferase OS=Sphingomonas jatrophae; OX = 1166337 GN=tgt PE=3 SV=1
MTPDRPRFEFRLHKTDGKARLGTLALKRGDIRTPAFMPVGTAATVKAMKPQDVRATGADIILGNTYHLMLRPGAERVARLGGLHGFMGWDRPILTDSGGYQVMSLSELTKRSEEGVSFASHLDGSRHMMSPERSMEIQRLLGSDIVMAFDELVPTTSTREVQDAAMERSMRWAVRSREAFLSGHDHAQQAAQFGIQQGALDPELRGRSAEALLKLGFDGYAVGGLAVGEGQAAMFGVLDYAPDMLPADRPRYLMGVGKPDDIVGAVERGIDMFDCVLPTRSGRTGQAFTREGPINIRNARFAEDQGPLDPECACPVCKGWSRAYLHHLVRAGEILGAMLMTEHNLAFYQALMADLRAAIGAGTLTAFATTFRARYGAARGS

SEQ ID NO: 61021 - protein, 374 aa, unidentified
  source 1..374: note = Sphingomonas jeddahensis
  REGION 1..374: note = tr|A0A1V2ES01|A0A1V2ES01_9SPHN Queuine tRNA-ribosyltransferase OS=Sphingomonas jeddahensis; OX = 1915074 GN=tgt PE=3 SV=1
MSTRFVFTIAATDGAARTGSIAMHRGTIRTPAFMPVGTAATVKAMKPKDVEAAGADIILGNTYHLMLRPGAERVARLGGLHRFMGWDRPILTDSGGYQVMSLSDLTKRSEEGITFKSHLDGTRHLLSPERSIEIQRLLGSNIVMAFDELVPTTSTREVQAAAMERSMRWAKRSRDAFDGGGDHAAQNAIFGIQQGALDQGFRKASADALIDIGFDGYAIGGLAVGEGQEAMFICLDFAPGQLPADKPRYLMGVGKPDDIVGAVERGVDMFDCVLPTRSGRTGQAFTRDGPINIRNARFNEDQGPLDPECGCPTCATWSRAYLHHLVRAGEILGAMLMTEHNIFFYEKLMADLRAAIAEGRLKAFADAFRARYQR

SEQ ID NO: 61022 - protein, 375 aa, Sphingomonas koreensis
  REGION 1..375: note = tr|A0A1L6J9Z3|A0A1L6J9Z3_9SPHN Queuine tRNA-ribosyltransferase OS=Sphingomonas koreensis OX=93064; GN = tgt PE=3 SV=1
MPRFDFTIHATDGKARTGTIAMQRGEIRTPAFMPVGTAATVKAMKPQDVRASGADILLGNTYHLMLRPGAERVDRLGGLHGFMGWDRPILTDSGGYQVMSLSELTKRSEEGIVFKSHLDGTRHMLSPERSMEIQRLLGSNIVMAFDELVPTTSTREVQAAAMERSMRWARRSRQGFDAGGAHAQNNALFGIQQGALDEGLRKASADALLDIGFDGYAVGGLAVGEGQEAMFACLDYAPGQLDPAKPRYLMGVGKPDDIVGAVERGIDMFDCVLPTRSGRTGQAFTRQGPINIRNAKFAEDQGPLDPACACPTCGTFTRAYVHHLVRAGEILGAMLMTEHNLWFYQALMADLRAAIAQGRLTPFANDFRATYYGKG

SEQ ID NO: 61023 - protein, 375 aa, Sphingomonas koreensis
  REGION 1..375: note = tr|A0A2M8WA65|A0A2M8WA65_9SPHN Queuine tRNA-ribosyltransferase OS=Sphingomonas koreensis OX=93064; GN = tgt PE=3 SV=1
MPRFDFTIHATDGKARTGTIAMQRGEIRTPAFMPVGTAATVKAMKPQDVRASGADILLGNTYHLMLRPGAERVDRLGGLHGFMGWDRPILTDSGGYQVMSLSELTKRSEEGIVFKSHLDGTRHMLSPERSMEIQRLLGSNIVMAFDELVPTTSTREVQAAAMERSMRWARRSRQGFDAGGAHAQNNALFGIQQGALDEGLRKASADALLDIGFDGYAVGGLAVGEGQEAMFACLDYAPGQLDPAKPRYLMGVGKPDDIVGAVERGIDMFDCVLPTRSGRTGQAFTRQGPINIRNAKFAEDQGPLDPACACPTCGTFTRAYVHHLVRAGEILGAMLMTEHNLWFYQALMADLRAAIGQGRLTAFANDFRATYYGKG

SEQ ID NO: 61024 - protein, 376 aa, unidentified
  source 1..376: note = Sphingomonas laterariae
  REGION 1..376: note = tr|A0A239EBF0|A0A239EBF0_9SPHN Queuine tRNA-ribosyltransferase OS=Sphingomonas laterariae; OX = 861865 GN=tgt PE=3 SV=1
MTDRPRFQFSVAATDGAARTGTISMRRGDIRTPAFMPVGTAGTVKGMKPADVRGIGADIILGNTYHLMLRPGAERMARLGGLHGFMRWERPILTDSGGYQVMSLSDLAKITEDGVAFKSHLDGSRHMITPERSMEIQRLLGSDIVMAFDECTPFPATRDRAASSMERSMRWAKRSRDGFDSGVDHAAGAALFGIQQGSMEEDLRRQSSQALLDIGFDGYAVGGLAVGEGQDEMFRVLDFAVDMLPTDKPRYLMGVGKPDDIVGAVERGIDMFDCVLPTRSGRNGQAFTWDGPINIRNAKFAEDLAPIDPESPIAPWSRAYLHHLVKSGEMLGAMLMTEHNLWFYQQLMAELRAAIAEGRLKAFADGFRARYKGNKA

SEQ ID NO: 61025 - protein, 378 aa, Sphingomonas melonis
  REGION 1..378: note = tr|A0A175Y2E3|A0A175Y2E3_9SPHN Queuine tRNA-ribosyltransferase OS=Sphingomonas melonis TY; OX = 621456 GN=tgt PE=3 SV=1
MSSRFAFTIAATDGRARTGTIQMQRGVIRTPAFMPVGTAATVKAMKPADVANAGADIILGNTYHLMLRPGAERVARLGGLHGFMGWDKPILTDSGGYQVMSLADLTKRSEEGVSFKSHLDGTRHLLSPERSIEIQRLLGSNIVMAFDELVPTTSTREVQAAAMERSMRWAKRSRDAFNSGGEHAENNAIFGIQQGALDEGLRKASADALIDIGFDGYAVGGLAVGEGQEAMFGCLDFAPGQLSQDKPRYLMGVGKPDDIVGAVERGIDMFDCVMPTRSGRTGQAFTRNGPINLRNAKFGEDQAPLDPTCGCPVCATWSRAYIHHLVRAGEILGAMLMTEHNIWFYEALMADLRAAIAAGELTSFANGFRAAYQRGKGE

SEQ ID NO: 61026 - protein, 378 aa, Sphingomonas melonis
  REGION 1..378: note = tr|A0A0D1JY87|A0A0D1JY87_9SPHN Queuine tRNA-ribosyltransferase OS=Sphingomonas melonis OX=152682; GN = tgt PE=3 SV=1
MSSRFAFTIAATDGRARTGTIQMQRGVIRTPAFMPVGTAATVKAMKPADVANAGADIILGNTYHLMLRPGAERVARLGGLHGFMGWDKPILTDSGGYQVMSLADLTKRSEEGVSFKSHLDGTRHLLSPERSIEIQRLLGSNIVMAFDELVPTISTREVQAAAMERSMRWAKRSRDAFNSGGEHAENNAIFGIQQGALDESLRKASADALIDIGFDGYAVGGLAVGEGQEAMFGCLDFAPGQLPQDKPRYLMGVGKPDDIVGAVERGIDMFDCVMPTRSGRTGQAFTRNGPINLRNAKFGEDQAPLDPTCGCPVCATWSRAYIHHLVRAGEILGAMLMTEHNIWFYEALMADLRAAIAAGELTSFANGFRAAYQRGKGE

SEQ ID NO: 61027 - protein, 378 aa, Sphingomonas mucosissima
  REGION 1..378: note = tr|A0A245ZRN2|A0A245ZRN2_9SPHN Queuine tRNA-ribosyltransferase OS=Sphingomonas mucosissima; OX = 370959 GN=tgt PE=3 SV=1
MTDRFAFTIAATDGAARTGSIAMHRGTIRTPAFMPVGTAATVKAMKPADVEAAGADIILGNTYHLMLRPGAERVARLGGLHRFMGWDKPILTDSGGYQVMSLSDLTKRSEEGITFKSHLDGTRHLLSPERSIEIQRLLGSNIIMAFDELVPTTSTREVQAAAMERSMRWAKRSRDAFDSGGEHAANNAIFGIQQGALDEGLRRTSADALIDIGFDGYAIGGLAVGEGQEAMFACLDFAPNQLPADRPRYLMGVGKPDDIVGAVERGVDMFDCVLPTRSGRTGQAFTRSGPINIRNARFNEDEGPLDPECACPTCATWSRAYLHHLVRAGEILGAMLMTEHNIFFYEKLMADLRAAIAEQRLKAFADAFRARYQRAKGE

SEQ ID NO: 61028 - protein, 382 aa, unidentified
  source 1..382: note = Sphingomonas naasensis
  REGION 1..382: note = tr|A0A4S1WKD6|A0A4S1WKD6_9SPHN Queuine tRNA-ribosyltransferase OS=Sphingomonas naasensis; OX = 1344951 GN=tgt PE=3 SV=1
MSLPRFQFTIHATDGKARLGTIAMQRGEIRTPAFMPVGTAATVKAVKPQDVRASGADILLGNTYHLMLRPSAERVHRLGGLHKFMGWDRPILTDSGGYQVMSLSELTKRSEEGIVFKSHLDGSRHMLSPERSMEIQRLLGSNIVMAFDELVPTTSTREVQAAAMERSMRWAKRSRAGFDAGGAHAESNALFGIQQGALDEGLRKASADALLDIGFDGYAIGGLAVGEGQEAMFGVLDYAPGQLDAARPRYLMGVGKPDDIVGAVERGVDMFDCVLPTRSGRTGQAFTRSGPINIRNAKFAEDQGPLDPACACPTCAGWSRAYVHHLVRAGEILGAMLMTEHNLYFYQQLMADLRAAIGEGRLAAFADAFRAAYRAAGDAPKA

SEQ ID NO: 61029 - protein, 378 aa, unidentified
  source 1..378: note = Sphingomonas olei
  REGION 1..378: note = tr|A0A4S4G438|A0A4S4G438_9SPHN Queuine tRNA-ribosyltransferase OS=Sphingomonas olei OX=1886787; GN = tgt PE=3 SV=1
MTDRFAFTIAATDGAARTGSIAMHRGTIRTPAFMPVGTAATVKAMKPADVEAAGADIILGNTYHLMLRPGAERVARLGGLHRFMGWNKPILTDSGGYQVMSLSDLTKRSEEGITFKSHLDGTRHLLSPERSIEIQRLLGSNIVMAFDELVPTTSTREVQAAAMERSMRWARRSRDAFDSGSDHAAQNAIFGIQQGALDEGLRRTSADALIDIGFDGYAIGGLAVGEGQEAMFACLDFAPGQLPPDRPRYLMGVGKPDDIVGAVERGIDMFDCVLPTRSGRTGQAFTRAGPINIRNARFNEDQGPLDPECGCPTCATWSRAYLHHLVRAGEILGAMLMTEHNIFFYETLMADLRSAIAEQRLKAFADAFRSRYQRGKGE

SEQ ID NO: 61030 - protein, 374 aa, unidentified
  source 1..374: note = Sphingomonas oleivorans
  REGION 1..374: note = tr|A0A2T5G010|A0A2T5G010_9SPHN Queuine tRNA-ribosyltransferase OS=Sphingomonas oleivorans; OX = 1735121 GN=tgt PE=3 SV=1
MTDRPRFSYAISATDGRARTGVVSMKRGDIRTPAFMPVGTAATVKAMKPAEVRATGADIILGNTYHLMLRPGAERVARLGGLHDFMQWKRPILTDSGGYQVMSLSALTKTSEEGVAFKSHLDGSRHMLSPERSMEIQRLLGSDIVMAFDECTAYPCTRDKAAKSMERSMRWAKRSRDGFDAGGDHAACSALFGIQQGSMEEDLRRQSSDALRAIGFDGYAVGGLAVGEGQEEMFRVLDFAVDMLPADRPRYLMGVGKPDDIVGAVERGIDMFDCVLPTRSGRNGQAFTREGPLNIRNARFAEDQRPLEPDSPTANWSRAYLHHLVRSGEMLGAMLMTEHNLWFYQRLMEDLRAAIAEGRLAAFADDFRARYRRA

SEQ ID NO: 61031 - protein, 378 aa, Sphingomonas oligophenolica
  REGION 1..378: note = tr|A0A502CU90|A0A502CU90_9SPHN Queuine tRNA-ribosyltransferase OS=Sphingomonas oligophenolica; OX = 301154 GN=tgt PE=3 SV=1
MTADRFAFTIAATDGAARTGSIAMRRGTIRTPAFMPVGTAATVKAMKPADVAAAGADIILGNTYHLMLRPGAERVARLGGLHDFMGWSKPILTDSGGYQVMSLADLTKRSEAGVSFKSHLDGSRHLLSPERSIEIQRLLDSDIVMAFDELVPTTSTRDVRAAAMERSMRWARRSRDAFDGGGEHPTRTAIFGIQQGALDEDLRRSSADALIEIGFDGYAVGGLAVGEGQEAMFACLDFAPGQLPADKPRYLMGVGKPDDIVGAVERGIDMFDCVMPTRSGRTGQAFTRTGPINIRNAKFAEDQIPLDPACDCPVCSTWTRAYLHHLVRAGEMLGAMLMTEHNVWFYEALMADLRHAIAAQALSSFANMFRERYRGTKE

SEQ ID NO: 61032 - protein, 381 aa, unidentified
  source 1..381: note = Sphingomonas panacis
  REGION 1..381: note = tr|A0A1B3Z5Y7|A0A1B3Z5Y7_9SPHN Queuine tRNA-ribosyltransferase OS=Sphingomonas panacis OX=1560345; GN = tgt PE=3 SV=1
MTAPRFEFTISATDGKARTGTIQMRRGEIRTPAFMPVGTAATVKAMKPADVRAAGADIILGNTYHLMLRPGAERVARLGGLHRFMGWDRPILTDSGGYQVMSLSDLTKRDENGVTFKSHLDGTRHTLSPERSIEIQRLLGSDIVMAFDELVPTTSTPEVQAAAMARSMRWAKRSRDAFDGGGEHAENAAIFGIQQGALDQTLRGDSAATLIDIGFDGYAVGGLAVGEGQEAMFGCLDFAPGQLPADKPRYLMGVGKPDDIVGAVERGIDMFDCVLPTRSGRTGQAFTREGPINLRNAKFAEDTGPLDPACACPVCATWNRAYIHHLVRAGEILGAMLMTEHNLYFYQALMADLRDATAAGTLTAFADRFRSEYGRHKERVT

SEQ ID NO: 61033 - protein, 376 aa, Sphingomonas parapaucimobilis
  REGION 1..376: note = tr|A0A0A1WBQ4|A0A0A1WBQ4_9SPHN Queuine tRNA-ribosyltransferase OS=Sphingomonas parapaucimobilis NBRC 15100 OX=1219049 GN=tgt PE=3 SV=1
MTARFSFSIHATDGRARTGTITMKRGEIRTPAFMPVGTAATVKAMKPGDVRASGADIILGNTYHLMLRPGAERVNRLGGLHGFMGWDRPILTDSGGYQVMSLAELTKRSEDGVAFKSHLDGTRHLLSPERSIEIQRLLGSNIVMAFDELVPTTSTREVQASAMERSMRWAKRSRDAFDAGGQHAEDNAIFGIQQGALDEGFRKASADALIDIGFDGYAIGGLAVGEGQEAMFGCLDFAPGQLPVEKPRYLMGVGKPTDIVGAVERGVDMFDCVLPTRSGRTGQAFTRQGPINIRNARFTEDQGPLDPACGCPVCSTWSRAYLHHLVRAGEILGAMLMTEHNIWFYQQMMADLRAAIVEGRLTAFADDFRARYAAGQ

SEQ ID NO: 61034 - protein, 376 aa, Sphingomonas paucimobilis
  REGION 1..376: note = tr|A0A0C9MMQ1|A0A0C9MMQ1_SPHPI Queuine tRNA-ribosyltransferase OS=Sphingomonas paucimobilis NBRC 13935 OX=1219050 GN=tgt PE=3 SV=1
MTARFSFAIHATDGRARTGTITMKRGEIRTPAFMPVGTAATVKAMKPGDVRASGADIILGNTYHLMLRPGAERVNRLGGLHGFMGWDRPILTDSGGYQVMSLAELTKRSEDGVAFKSHLDGTRHLLSPERSIEIQRLLGSNIVMAFDELVPTTSTREVQASAMERSMRWAKRSRDAFDAGGQHAEDNAIFGIQQGALDEGFRKASADALIDIGFDGYAIGGLAVGEGQEAMFGCLDFAPGQLPASKPRYLMGVGKPTDIVGAVERGVDMFDCVLPTRSGRTGQAFTRQGPINIRNARFAEDQGPLDPACGCPVCATWSRAYLHHLVRAGEILGAMLMTEHNIWFYQQMMADLRAAIGEGRLTAFADDFRARYAAGH

SEQ ID NO: 61035 - protein, 376 aa, Sphingomonas paucimobilis
  REGION 1..376: note = tr|A0A031JIH7|A0A031JIH7_SPHPI Queuine tRNA-ribosyltransferase OS=Sphingomonas paucimobilis; OX = 13689 GN=tgt PE=3 SV=1
MTQNRFSFTIAATDGKARTGSIQMRRGDIRTPAFMPVGTAATVKAMRPAEVRAAGADIILGNTYHLMLRPGAERVARLGGLHGFMGWDRPILTDSGGYQVMSLSALTKMSEEGVAFASHIDGSRHMLTPERSMEIQRLLDSDIVMAFDECTRNGCTHEEAGHSMERSMRWAKRSRDAFDQGGDHAERAALFGIQQGSLNEDLRRVSAEKLIEIGFDGYAVGGLAVGEGQEAMFACLDYAPGMLPAGKPRYLMGVGKPDDIVGAVERGIDMFDCVLPTRSGRNGQAFTWAGPLNIRNARFAEDLSPLDPRCGCPVCATWSRAYLHHLVKAGEMLGAMLMTQHNISFYQALMQAIRDSIAQGRFAAFAAEFREGYRRA

SEQ ID NO: 61036 - protein, 376 aa, unidentified
  source 1..376: note = Sphingomonas pokkalii
  REGION 1..376: note = tr|A0A2U0SEY0|A0A2U0SEY0_9SPHN Queuine tRNA-ribosyltransferase OS=Sphingomonas pokkalii; OX = 2175090 GN=tgt PE=3 SV=1
MPRFQFTIHATDGKARRGTIAMQRGEIRTPAFMPVGTAATVKAVKPQDVRASGADILLGNTYHLMLRPTAERVARLGGLHKFMGWDRPILTDSGGYQVMSLSELTKRSEEGVAFASHLDGSRHMMSPERSMEIQRLLGSDIVMAFDELVPTTSTREVQAKAMERSMRWAKRSRAGFDSGEEHAARAALFGIQQGALDEGLRKASADALKDIGFDGYAVGGLAVGEGQEAMFGVLDYAPGQLDETKPRYLMGVGKPDDIVGAVERGIDMFDCVLPTRSGRTGQAFTRGGPINIRNAKFAEDQGPLDPACSCPVCSTWSRAYLHHLVRAGEILGAMLMTEHNLWFYQNLMADLRAAIEEQRLTAFANDFRAKYQVKQG

SEQ ID NO: 61037 - protein, 379 aa, Sphingomonas rubra
  REGION 1..379: note = tr|A0A1I5QIP8|A0A1I5QIP8_9SPHN Queuine tRNA-ribosyltransferase OS=Sphingomonas rubra OX=634430; GN = tgt PE=3 SV=1
MTRFGFRIDATDGRARTGVIDTLRGAIRTPAFMPVGTAATVKAMKPADVRASGADIILGNTYHLMLRPGAERVAKLGGLHRLMGWDRPILTDSGGYQVMSLADLTKRSEEGVSFKSHLDGSRHLLSPERSIEIQRLLGSTIVMAFDELVPTTSSREVQAAAMERSMRWARRSRAAFDAGGDHAANNAIFGIQQGALDEGLRKSSADALIDIGFDGYAVGGLAVGEGQEAMFACLDFAPGQLPADKPRYLMGVGKPTDIVGAVERGIDMFDCVLPTRSGRTGQAFTRAGPLNLRNARFAEDDGPLDPACPCPVCATWSRAYLHHLVRSQEILGAMLMTEHNIWFYQVMMADLRAAIAEGRLAAFADAFRASYAGEQGERR

SEQ ID NO: 61038 - protein, 376 aa, Sphingomonas sanguinis
  REGION 1..376: note = tr|A0A147I9L6|A0A147I9L6_9SPHN Queuine tRNA-ribosyltransferase OS=Sphingomonas sanguinis OX=33051; GN = tgt PE=3 SV=1
MTARFSFAIHATDGRARTGTITMKRGEIRTPAFMPVGTAATVKAMKPGDVRASGADIILGNTYHLMLRPGAERVNRLGGLHGFMGWDRPILTDSGGYQVMSLAELTKRSEDGVAFKSHLDGTRHLLSPERSIEIQRLLGSNIVMAFDELVPTTSTREVQASAMERSMRWAKRSRDAFNAGGQHAEDNAIFGIQQGALDEGFRKSSADALIDIGFDGYAIGGLAVGEGQEAMFGCLDFAPSQLPVEKPRYLMGVGKPTDIVGAVERGVDMFDCVLPTRSGRTGQAFTRQGPINIRNARFAEDQGPLDPACGCPVCATWSRAYLHHLVRAGEILGAMLMTEHNIWFYQQMMADLRAAIAEGRLTAFADDFRSRYAAGQ

SEQ ID NO: 61039 - protein, 383 aa, Sphingomonas sanguinis
  REGION 1..383: note = tr|A0A147J5J9|A0A147J5J9_9SPHN Queuine tRNA-ribosyltransferase OS=Sphingomonas sanguinis OX=33051; GN = tgt PE=3 SV=1
MTARFSFAIHATDGRARTGTITMKRGEIRTPAFMPVGTAATVKAMKPGDVRASGADIILGNTYHLMLRPGAERVNRLGGLHGFMGWDRPILTDSGGYQVMSLAELTKRSEDGVAFKSHLDGTRHLLSPERSIEIQRLLGSNIVMAFDELVPTTSTREVQASAMERSMRWAKRSRDAFNAGGQHAEDNAIFGIQQGALDEGFRKSSADALIDIGFDGYAIGGLAVGEGQEAMFGCLDFAPGQLPVEKPRYLMGVGKPTDIVGAVERGVDMFDCVLPTRSGRTGQAFTRQGPINIRNARFAEDQGPLDPACGCPVCATWSRAYLHHLVRAGEILGAMLMTEHNIWFYQQMMADLRAAITEGRLTAFADDFRARYAAREQSGRVGE

SEQ ID NO: 61040 - protein, 373 aa, Sphingomonas sanxanigenens
  REGION 1..373: note = tr|A0A2W5C7E7|A0A2W5C7E7_9SPHN Queuine tRNA-ribosyltransferase OS=Sphingomonas sanxanigenens; OX = 397260 GN=tgt PE=3 SV=1
MTDRFSFSIAATDGAARTGVISMRRGDIRTPAFMPVGTAGTVKAVKPADVRAAGADIILGNTYHLMLRPGAERVARLGGLHGFMGWDRPILTDSGGYQVMSLSDLTKVSEEGVSFKSHLDGSRHMLSPERSMEIQRLLGSDIVMAFDELVPTTATREVQAAAMERSMRWARRSREGFDAGGAHAEGAALFGIQQGALDEGLRRASADALRDIGFDGYAIGGLAVGEGQEAMFGVLDYAPAMLPVDRPRYLMGVGKPDDIVGAVERGVDMFDCVMPTRSGRTGQAFTWDGPINIRNARFAEDQSPLDPESPVAGWSKAYIHHLVRSNEILGAMLMTEHNLWFYQRLMQHLRDAIAEGGLKAFADSFRARYLGGR

SEQ ID NO: 61041 - protein, 373 aa, Sphingomonas sanxanigenens
  REGION 1..373: note = tr|W0ANS5|W0ANS5_9SPHN Queuine tRNA-ribosyltransferase OS=Sphingomonas sanxanigenens DSM 19645 = NX02 OX=1123269 GN=tgt PE=3 SV=1
MTERFSFSITATDGAARTGSIQMLRGEIRTPAFMPVGTAATVKAMKPEAVRAIGADIILGNTYHLMLRPGAERMDRLGGLHDFMQWDRPILTDSGGYQVMSLSALTKKTEEGVAFRSHLDGSRHMLTPERSMEIQRLLGSDIVMAFDECTSFPATWEEAKASMERSMRWAQRSRDGFDSGGAHAARSALFGIQQGSMFRDLRQISSDALMAVGFDGYAVGGLAVGEGQETMFGVLDYAPAMLPADRPRYLMGVGKPDDIVGAVERGIDMFDCVLPTRSGRNGQAFTWDGPVNIRNAKYAEDRTPIDPDSPIGGWSRAYLHHLVKSGEMLGAMLMTEHNLWFYQQVMAGLRGAIAEGRLTAWADAFRRRYRGGK

SEQ ID NO: 61042 - protein, 379 aa, Sphingomonas sp.
  REGION 1..379: note = tr|A0A2U1G318|A0A2U1G318_9SPHN Queuine tRNA-ribosyltransferase OS=Sphingomonas sp. URHD0007; OX = 1298856 GN=tgt PE=3 SV=1
MAREVTRFAFTIAATDGAARTGKIAMERGEICTPAFMPVGTAATVKAMRPEEVRASGADIILGNTYHLMLRPGAERVAKLGGLHAFMGWERLILTDSGGYQVMSLSELTKVSEDGVAFASHLDGSRHMLSPERSIEVQRLLGSDVVMAFDQLVPTTSTAEQQREAMERSMRWAKRSKDEFDRGGEHAERSALFGIQQGALDQPLRRASADALIDIGFDGYAVGGLAVGEGQEAMLGCLDFAVPMLPADKARYLMGVGKPDDVVEAVVRGIDMFDCVLPTRSGRTGQAFTADGPLNLRNARFAEDADPIESGCTCPACTTFSRAYVHHLVKSGEILGAMLMTQHNLWFYQRLMQGLREAIAEQRLSAFATTFLDRYRGAR

SEQ ID NO: 61043 - protein, 375 aa, Sphingomonas sp.
  REGION 1..375: note = tr|A0A258RGE4|A0A258RGE4_9SPHN Queuine tRNA-ribosyltransferase OS=Sphingomonas sp. 28-62-11; OX = 1970432 GN=tgt PE=3 SV=1
MNERFAFTIAATDGRARTGQIAMQRGIIRTPAFMPVGTAATVKAMKPADVRASGADIILGNTYHLMLRPGAERVAKLGGLHGFMGWDRPILTDSGGYQVMSLSDLTTRSEDGVTFKSHLDGSRHTLSPERSIEIQRLLGSDIVMAFDELVPTTSTPEVQQAAMARSMRWAKRSRAAFDGGGAHAERAAIFGIQQGALDERLRKASADALIEIGFDGYAVGGLAVGEGQPAMFACLDFAPGQLPEDKPRYLMGVGKPDDIVGAVERGIDMFDCVLPTRSGRTGQAFTRHGAINICNAKFAEDLGPIDPSCACPVCKGWSRAYLHHLVRSAEILGAMLMTEHNLWFYETLMDDLRRAIAEQRLTSFAQGFRTDYAGA

SEQ ID NO: 61044 - protein, 386 aa, unidentified
  source 1..386: note = Sphingomonas spermidinifaciens
  REGION 1..386: note = tr|A0A2A4B333|A0A2A4B333_9SPHN Queuine tRNA-ribosyltransferase OS=Sphingomonas spermidinifaciens; OX = 1141889 GN=tgt PE=3 SV=1
MTPPRFTFTIHATDGRARLGEIAMRRGTIRTPAFMPVGTAATVKAMKPADVRASGADILLGNTYHLMLRPSAERVARLGGLHGFMGWDRPILTDSGGYQVMSLAELTSRSEEGVAFKSHLDGSRHLISPERSMEIQRLLGSDIVMAFDELVPTTSTREVQAAAMERSMRWAQRSRDAFDAGGDHAAGAALFGIQQGALDEGLRKASADALKAIEFDGYAVGGLAVGEGQEAMFGVLDYAPGQLDAARPRYLMGVGKPDDIVGAVERGIDMFDCVLPTRSGRTGQAFTRAGPINIRNARFAEDQGPLDPACPCPVCATWSRAYLHHLVRAGEILGAMLMTEHNLWFYQTLMADLRAAIGAGTLRDFASAFRATYYAERPATAGVSKG

SEQ ID NO: 61045 - protein, 383 aa, unidentified
  source 1..383: note = Sphingomonas taxi
  REGION 1..383: note = tr|A0A2W4YZJ0|A0A2W4YZJ0_9SPHN Queuine tRNA-ribosyltransferase OS=Sphingomonas taxi OX=1549858; GN = tgt PE=3 SV=1
MTTRPRFDFTISATDGKARTGVIAMQRGDIRTPAFMPVGTAATVKGMKPADVVGAGADIILGNTYHLMLRPGAERVARLGGLHAFSGWSKPILTDSGGYQVMSLADLTKRSEEGVSFKSHLDGTRHLLSPERSIEIQRLLGSNIVMAFDELVPTTSTREVQAAAMERSMRWAKRSRAAFDGGEEHAENNAIFGIQQGALNEDFRKSSADALIDIGFDGYAVGGLAVGEGQEAMFGCLDFAPDQLPVDKPRYLMGVGKPDDIVGAVERGIDMFDCVMPTRSGRTGQAFTRTGPINIRNAKFAEDMGPLDPACPCPVCATWGRAYLHHLVRSGEMLGAMLMTEHNIWFYETLMADLRAAIAAGTLTQFANDFRAVYARKSEGEPK

SEQ ID NO: 61046 - protein, 381 aa, unidentified
  source 1..381: note = Sphingomonas taxi
  REGION 1..381: note = tr|A0A2W5PB60|A0A2W5PB60_9SPHN Queuine tRNA-ribosyltransferase OS=Sphingomonas taxi OX=1549858; GN = tgt PE=3 SV=1
MTAPRFAFAIHATDGAARTGAITMQRGVIRTPAFMPVGTAATVKAMKPADVERAGADIILGNTYHLMLRPGAERVARLGGLHRFMGWNRPILTDSGGYQVMSLSALTKRSEEGVAFASHLDGTRHLITPERSIEIQRLLGSNIVMAFDELVPTTSTREVQAAAMERSMRWARRSRDAFDAGGDHAAANAIFGIQQGALDEGLRRVSADALVDIGFDGYAIGGLAVGEGQAAMFGCLDYAPAQLPADRPRYLMGVGKPDDIVGAVERGVDMFDCVMPTRSGRTGQAFTRTGPINIRNARFAEDQGPLDPECACAVCATWTRAYVHHLVRAGEMLGAMLMTEHNIAFYEALMADLRAAIADGRLTAFANGFRGRYAGGKGETM

SEQ ID NO: 61047 - protein, 376 aa, Sphingomonas trueperi
  REGION 1..376: note = tr|A0A543LVH5|A0A543LVH5_9SPHN Queuine tRNA-ribosyltransferase OS=Sphingomonas trueperi OX=53317; GN = tgt PE=3 SV=1
MPRFQFTIHATDGKARRGTIAMQRGEIRTPAFMPVGTAATVKAVKPQDVRASGADILLGNTYHLMLRPTAERVARLGGLHKFMGWDRPILTDSGGYQVMSLSELTKRSEEGVAFASHLDGSRHMMSPERSMEIQRLLGSDIVMAFDELVPTTSTREVQAKAMERSMRWAKRSRAGFDSGEEHAARAALFGIQQGALDEGLRKASADALKDIGFDGYAVGGLAVGEGQEAMFGVLDYAPGQLDETKPRYLMGVGKPDDIVGAVERGIDMFDCVLPTRSGRTGQAFTRTGPINIRNAKFAEDQGPLDPTCACPVCSTWSRAYMHHLVRAGEILGAMLMTEHNLWFYQTLMADLRAAIEEQRLTAFANDFRAKYQATKA

SEQ ID NO: 61048 - protein, 377 aa, unidentified
  source 1..377: note = Sphingomonas turrisvirgatae
  REGION 1..377: note = tr|A0A1E3LZY9|A0A1E3LZY9_9SPHN Queuine tRNA-ribosyltransferase OS=Sphingomonas turrisvirgatae; OX = 1888892 GN=tgt PE=3 SV=1
MLPRFDFTIAATDGKARTGVIAMRRGEIRTPAFMPVGTAATVKAMKQQDVRASGADIILGNTYHLMLRPGAERVHRLGGLHGFMGWDRPILTDSGGYQVMSLSELTKRSEDGIVFKSHLDGSRHLLSPERSMEIQRLLGSNIVMAFDELVPTTSTREVQAAAMERSMRWARRSRAGFDAGGEHAEHNAIFGIQQGALDEGLRQWSADALLDIGFDGYAVGGLAVGEGQEAMFACLDYAPGQLDAAKPRYLMGVGKPDDIVGAVERGIDMFDCVLPTRSGRTGQAFTARGPVNIRNARHAEDQGPLDPSCPCPTCSTYSRAYLHHLVRAGEILGAMLMTEHNLWFYQQLMAGLRGAIAAGRLTEHANAFRAAYYGGEG

SEQ ID NO: 61049 - protein, 414 aa, Sphingomonas wittichii
  REGION 1..414: note = tr|A0A1X9UM10|A0A1X9UM10_SPHSD Queuine tRNA-ribosyltransferase OS=Sphingomonas wittichii (strain DC-6 / KACC 16600) OX=1283312 GN=tgt PE=3 SV=1
MDRPCRRARRSASPRAQALPGPWQCGAAPLWPAAMTAPRFHFSIAATDGKARTGTIRMQRGDIRTPAFMPVGTAATVKAMKPADVRATGADIILGNTYHLMLRPGAERVARLGGLHRFMRWDRPILTDSGGYQVMSLSALTRRSEEGVSFKSHLDGSAHMLSPERSIEIQRLLGSDIVMAFDELVPTTTTMQQQAEAMERSMRWAKRSRDAFDAGGEHAQRAALFGIQQGALDERLRKASADALLAIGFDGYAVGGLAVGEGQEAMFATLDFAPGQLDPAKPRYLMGVGKPDDIVGAVERGIDMFDCVLPTRSGRNGQAFTRRGPINLRNARFGEDERPLDESCACPVCGQFSRAYIHHLIRAGEILGAMLMTEHNLSFYQALMADLRAAIAAGTLSAFAADFRAAYHGGGAGD

SEQ ID NO: 61050 - protein, 414 aa, Sphingomonas wittichii
  REGION 1..414: note = tr|A5V2I8|A5V2I8_SPHWW Queuine tRNA-ribosyltransferase OS=Sphingomonas wittichii (strain RW1 / DSM 6014 / JCM 10273) OX=392499 GN=tgt PE=3 SV=1
MDRPCRRARRSASPRARALPGPWQCGAAPLWPAAMTAPRFHFSIAATDGKARTGTIRMQRGDIRTPAFMPVGTAATVKAMKPADVRATGADIILGNTYHLMLRPGAERVARLGGLHRFMRWDRPILTDSGGYQVMSLSALTRRSEEGVSFKSHLDGSAHMLSPERSIEIQRLLGSDIVMAFDELVPTTTTMQQQAEAMERSMRWAKRSRDAFDAGGEHAQRAALFGIQQGALDERLRKASADALLAIGFDGYAVGGLAVGEGQEAMFATLDFAPGQLDPAKPRYLMGVGKPDDIVGAVERGIDMFDCVLPTRSGRNGQAFTRRGPINLRNARFGEDERPLDESCACPVCGQFSRAYIHHLIRAGEILGAMLMTEHNLSFYQALMADLRAAIAAGTLSAFAADFRAAYHGGGAGD

SEQ ID NO: 61051 - protein, 376 aa, Sphingomonas yabuuchiae
  REGION 1..376: note = tr|A0A147ILJ3|A0A147ILJ3_9SPHN Queuine tRNA-ribosyltransferase OS=Sphingomonas yabuuchiae; OX = 172044 GN=tgt PE=3 SV=1
MTARFSFAIHATDGRARTGTITMKRGEIRTPAFMPVGTAATVKAMKPGDVRASGADIILGNTYHLMLRPGAERVDRLGGLHGFMGWDRPILTDSGGYQVMSLAELTKRSEDGVAFKSHLDGTRHLLSPERSIEIQRLLGSNIVMAFDELVPTTSTREVQASAMERSMRWAKRSRDAFDAGGQHAEDNAIFGIQQGALDEGFRKSSADALIDIGFDGYAIGGLAVGEGQEAMFGCLDFAPGQLPVEKPRYLMGVGKPTDIVGAVERGVDMFDCVLPTRSGRTGQAFTRQGPINIRNARFAEDQGPLDPACGCPVCGTWSRAYLHHLVRAGEILGAMLMTEHNIWFYQQMMADLRAAIGEGRLTAFADDFRSRYAAGQ

SEQ ID NO: 61052 - protein, 375 aa, Sphingopyxis alaskensis
  REGION 1..375: note = sp|Q1GR26|TGT_SPHAL Queuine tRNA-ribosyltransferase; OS = Sphingopyxis alaskensis (strain DSM 13593 / LMG 18877 / RB2256) OX=317655 GN=tgt PE=3 SV=1
MKPRFAFSISATDGAARAGVIAMQRGEIRTPAFMPVGTAATVKAMRPAEVRAAGADIILGNTYHLMLRPTAERMARFGGLHKFMGWDRPILTDSGGYQVMSLSALTKQSEEGVAFKSHLDGSRHMLTPERSMEIQRLLGSDIVMAFDECPPAGVDARRAEASMERSMRWAARSRAGFDAGEEHAARSALFGIQQGSLDEKLRARSAATLIDIGFDGYAIGGLAVGEGQAAMFGVLDFAPAQLPADRPRYLMGVGKPDDLVGAVARGVDMFDCVLPTRSGRNGQAFTWDGPLNIRNAKFADDQEPLDASCGCPVCTIWSRGYLHHLVRAGEMLGAMLMTQHNIHFYQDLMQAMRDAITTGRFAAFRSDFAARYRRA

SEQ ID NO: 61053 - protein, 374 aa, Sphingopyxis bauzanensis
  REGION 1..374: note = tr|A0A246K3T3|A0A246K3T3_9SPHN Queuine tRNA-ribosyltransferase OS=Sphingopyxis bauzanensis; OX = 651663 GN=tgt PE=3 SV=1
MTDRFTFSIAATDGAARTGTIAMQRGEIRTPAFMPVGTAATVKAMRPAEVRATGADIILGNTYHLMLRPTAERMARLGGLHNFMGWDRPILTDSGGYQVMSLSALTKQSEEGVAFKSHLDGSKHMLTPERSMEIQRLLGSDIVMAFDECPPNGVDAKRAEASMERSMRWAARSRAGFDAGGEHAARSALFGIQQGSLDEKLRARSAAALIDIGFDGYAIGGLAVGEGQAAMFGVLDYAPAQLPADRPRYLMGVGKPDDLVGAVARGVDMFDCVLPTRSGRNGQAFTWDGPINIRNAKFAEDQAPLDVSCDCPVCTTWSRAYLHHLVRSGEMLGAMLMTQHNLHFYQALMQAMRDAIGAGTFAAFQRGFEARYQR

SEQ ID NO: 61054 - protein, 374 aa, unidentified
  source 1..374: note = Sphingopyxis flava
  REGION 1..374: note = tr|A0A1T5DH56|A0A1T5DH56_9SPHN Queuine tRNA-ribosyltransferase OS=Sphingopyxis flava OX=1507287; GN = tgt PE=3 SV=1
MTDRFAFQLAATDGAARTGVIRMMRGEIRTPAFMPVGTAATVKAMRPAEVRATGADIILGNTYHLMLRPGAERMARLGGLHGFMGWDRPILTDSGGYQVMSLAALTKQSEEGVTFKSHLDGSRHMLTAERSMEIQRLLGSDIVMAFDECPPAGVDAKRAEASMERSMRWAARSRAGFEAGEEHASRSALFGIQQGSLDEKLRARSAAALVDIGFDGYAIGGLAVGEGQEAMFAVLDFAPAQLPADKPRYLMGVGKPDDLVGAVARGVDMFDCVLPTRSGRNGQAFTWEGPVNIRNAKHAEDPGPLDASCACPVCTTWSRAYLHHLVRAGEMLGAMLMTEHNLHFYQALMQAMRDSIAAGRFSAFQADFETRYRR

SEQ ID NO: 61055 - protein, 373 aa, unidentified
  source 1..373: note = Sphingopyxis fribergensis
  REGION 1..373: note = tr|A0A0A7PI97|A0A0A7PI97_9SPHN Queuine tRNA-ribosyltransferase OS=Sphingopyxis fribergensis; OX = 1515612 GN=tgt PE=3 SV=1
MTRFAFSIAAADGAARTGVIRMQRGEIRTPAFMPVGTAATVKAMRPAEVRATGADIILGNTYHLMLRPTAERMARLGGLHKFMGWDRPILTDSGGYQVMSLSALTKQSEEGVAFQSHLDGSRHMLTPERSMEIQRLLGSDIVMAFDECPPNGVDAKRAEASMERSMRWAARSRAGFDTGEEHAERSALFGIQQGSLDETLRGRSAAALTDIGFDGYAIGGLAVGEGQEAMFGVLDYAPAQLPADKPRYLMGVGKPDDLVGAVARGVDMFDCVLPTRSGRNGQAFTRDGPLNIRNAKFAEDEAPLDADCHCPVCTTWSRAYLHHLVRSGEMLGAMLMTQHNLHFYQDLMQGMRDAIGAGTFAVFQRDFEARYKR

SEQ ID NO: 61056 - protein, 374 aa, Sphingopyxis granuli
  REGION 1..374: note = tr|A0A120LTY7|A0A120LTY7_9SPHN Queuine tRNA-ribosyltransferase OS=Sphingopyxis granuli OX=267128; GN = tgt PE=3 SV=1
MTDRFAFTVAATDGPARTGVIRMARGEIRTPAFMPVGTAATVKAMRPAEVRASGADIILGNTYHLMLRPGAERMARLGGLHDFMDWERPILTDSGGYQVMSLSALTKQSEEGVAFKSHLDGSRHLLTPERSMEIQRLLGSDIVMAFDECPPAGVDAKRAEASMERSMRWAARSRAGFDAGEAHAARAALFGIQQGSLDERLRKRSAEALIDIGFDGYAIGGLAVGEGQAAMFGVLDFAPAQLPADRPRYLMGVGKPDDLVGAVARGVDMFDCVLPTRSGRNGQAFTWDGPVNIRNAKHAEDLGPLDTSCGCPVCTTWSRAYLHHLVRAGEMLGAMLMTQHNLHFYQALMQAMRDAIAAGRFAAFQTGFTARYRK

SEQ ID NO: 61057 - protein, 374 aa, unidentified
  source 1..374: note = Sphingopyxis indica
  REGION 1..374: note = tr|A0A239H3P3|A0A239H3P3_9SPHN Queuine tRNA-ribosyltransferase OS=Sphingopyxis indica OX=436663; GN = tgt PE=3 SV=1
MTTRFAFSIAATDGAARTGTIRMMRGDIRTPAFMPVGTAATVKAMRPDEVRATGADIILGNTYHLMLRPGAERVARLGGLHGFMGWERPILTDSGGYQVMSLSALTRQSEEGVAFQSHLDGSRHMLTPERSMEIQRLLGSDIVMAFDECPPNGVDAKRAEASMERSMRWAARSRAGFDAGEDHAARSALFGIQQGSLDEALRQRSADALIDIGFDGYAIGGLAVGEGQEAMFGVLDYAPAQLPAGKPRYLMGVGKPDDLVGAVARGVDMFDCVLPTRSGRNGQAFTWNGPVNIRNARHAEDPGPLDAACDCPVCSSWSRAYLHHLVRSGEMLGAMLMTQHNLHFYQALMQAMREAIAAGRFKEFQSDFAARYRR

SEQ ID NO: 61058 - protein, 374 aa, unidentified
  source 1..374: note = Sphingopyxis lindanitolerans
  REGION 1..374: note = tr|A0A2S8B6X1|A0A2S8B6X1_9SPHN Queuine tRNA-ribosyltransferase OS=Sphingopyxis lindanitolerans; OX = 2054227 GN=tgt PE=3 SV=1
MTDRFTFQLAATDGAARTGVIRMARGDIRTPAFMPVGTAATVKAMRPADVRATGADIILGNTYHLMLRPGAERMARLGGLHDFMGWDRPILTDSGGYQVMSLSALTKQSEEGVTFKSHLDGSRHVLTPERSMEIQRLLGSDIVMAFDECPPNGVDAKRAEASMERSMRWAARSRAGFDAGGEHASRAALFGIQQGSLDERLRARSAAALTDIGFDGYAIGGLAVGEGQEAMFAVLDYAPGQLPADRPRYLMGVGKPDDLVGAVARGVDMFDCVLPTRSGRNGQAFTWDGPVNIRNAKHAEDLGPLDAACDCPVCTIWSRAYLHHLVRAGEMLGAMLMTQHNLHFYQALMQAMRDAITTGRFAAFQKDFAARYRK

SEQ ID NO: 61059 - protein, 374 aa, Sphingopyxis macrogoltabida
  REGION 1..374: note = tr|A0A0N9URI2|A0A0N9URI2_SPHMC Queuine tRNA-ribosyltransferase OS=Sphingopyxis macrogoltabida; OX = 33050 GN=tgt PE=3 SV=1
MTDRFAFRVAATDGAARTGVIAMRRGEIRTPAFMPVGTAATVKAMRPAEVRATGADIILGNTYHLMLRPGAERMARLGGLHNFMGWDRPILTDSGGYQVMSLSALTKQSEEGVAFKSHLDGSRHMLTPERSMEIQRLLGSDIVMAFDECPPNGVDAKRAEASMERSMRWAARSRAGFDAGVEHAERAALFGIQQGSLDETLRARSAAALTDIGFDGYAIGGLAVGEGQEAMFGVLDYAPGQLPADKPRYLMGVGKPDDLVGAVARGVDMFDCVLPTRSGRNGQAFTWDGPVNIRNAKHAEDMAPLDADCYCPVCMTWSRAYLHHLVRAGEMLGAMLMTQHNLHFYQALMQRMRDAIAAGSFAAFRQDFEARYRR

SEQ ID NO: 61060 - protein, 374 aa, Sphingopyxis macrogoltabida
  REGION 1..374: note = tr|A0A0P0CX63|A0A0P0CX63_SPHMC Queuine tRNA-ribosyltransferase OS=Sphingopyxis macrogoltabida; OX = 33050 GN=tgt PE=3 SV=1
MTDRFAFRVAATDGAARTGVIAMQRGEIRTPAFMPVGTAATVKAMRPAEVRATGADIILGNTYHLMLRPGAERMARLGGLHNFMGWDRPILTDSGGYQVMSLSALTKQSEEGVAFKSHLDGSRHMLTPERSMEIQRLLGSDIVMAFDECPPNGVDAKRAEASMERSMRWAARSRAGFDAGGEHAERAALFGIQQGSLDETLRARSAAALTDIGFDGYAIGGLAVGEGQDAMFGVLDYAPGQLPADKPRYLMGVGKPDDLVGAVARGVDMFDCVLPTRSGRNGQAFTWDGPVNIRNAKHAEDMAPLDADCSCPVCTTWSRAYLHHLVRAGEMLGAMLMTQHNLHFYQVLMQRMRDAIAAGSFAAFRSDFEARYRR

SEQ ID NO: 61061 - protein, 374 aa, Sphingopyxis sp.
  REGION 1..374: note = tr|A0A2L0VL82|A0A2L0VL82_9SPHN Queuine tRNA-ribosyltransferase OS=Sphingopyxis sp. MG OX=1866325; GN = tgt PE=3 SV=1
MTDRFAFTVAATDGPARTGVIRMARGEIRTPAFMPVGTAATVKAMRPAEVRASGADIILGNTYHLMLRPGAERMARLGGLHDFMGWDRPILTDSGGYQVMSLSALTKQSEEGVAFKSHLDGSRHLLTPERSMEIQRLLGSDIVMAFDECPPAGVDAKRAEASMERSMRWAARSRAGFDAGEAHAARAALFGIQQGSLDERLRKRSAEALIEIGFDGYAIGGLAVGEGQAAMFGVLDFAPAQLPADRPRYLMGVGKPDDLVGAVARGVDMFDCVLPTRSGRNGQAFTWDGPVNIRNAKHAEDLGSLDASCGCPVCTTWSRAYLHHLVRAGEMLGAMLMTQHNLHFYQALMQAMRDAIAAGRFAAFRTDFTARYRK

SEQ ID NO: 61062 - protein, 374 aa, Sphingopyxis sp.
  REGION 1..374: note = tr|A0A0W1DLS8|A0A0W1DLS8_9SPHN Queuine tRNA-ribosyltransferase OS=Sphingopyxis sp. H050; OX = 1759072 GN=tgt PE=3 SV=1
MTDRFAFQVAATDGDARTGVIRMERGEIRTPAFMPVGTAATVKAMRPAEVRATGADIILGNTYHLMLRPGAERMARLGGLHSFMGWDRPILTDSGGYQVMSLSALTKQSEEGVSFKSHLDGSRHMLTPERSMEIQRLLGSDIVMAFDECPPNGVDAKRAAASMERSMRWAARSRAGFDAGEDHAARSALFGIQQGSLDERLRARSAEALIDLGFDGYAIGGLAVGEGQEAMFGVLDYAPGQLPADKPRYLMGVGKPDDLVGAVARGVDMFDCVLPTRSGRNGQAFTWDGPVNIRNAKHAEDMGPLDASCDCPVCTTWSRAYLHHLVRAGEMLGAMLMTQHNLHFYQALMQRMREAIAGGGFAAFQSDFADRYKK

SEQ ID NO: 61063 - protein, 374 aa, Sphingopyxis terrae
  REGION 1..374: note = tr|A0A142VUX2|A0A142VUX2_9SPHN Queuine tRNA-ribosyltransferase OS=Sphingopyxis terrae subsp. terrae NBRC 15098 OX=1219058 GN=tgt PE=3 SV=1
MTDRFAFQVAATDGAARTGVIRMQRGDIRTPAFMPVGTAATVKAMRPAEVRATGADIILGNTYHLMLRPGAERMARLGGLHDFMGWDRPILTDSGGYQVMSLSALTKQSEEGVAFKSHLDGSRHMLTPERSMEIQRLLGSDIVMAFDECPPNGVDAKRAEASMERSMRWAARSRVGFDAGEAHAARSALFGIQQGSLDEKLRARSAEALIDIGFDGYAIGGLAVGEGQEAMFGVLDFAPGQLPADKPRYLMGVGKPDDLVGAVARGIDMFDCVLPTRSGRNGQAFTWDGPLNIRNAKYAEDLGPLDASCDCPVCTTWSRAYLHHLVRSGEMLGAMLMTQHNLHFYQALMQAMRDAIAEGCFAAFQSDFAARYHR

SEQ ID NO: 61064 - protein, 374 aa, Sphingopyxis terrae
  REGION 1..374: note = tr|A0A1Y6FQ93|A0A1Y6FQ93_9SPHN Queuine tRNA-ribosyltransferase OS=Sphingopyxis terrae subsp. ummariensis OX=429001 GN=tgt PE=3 SV=1
MTDRFAFQVAATDGAARTGVIRMQRGDIRTPAFMPVGTAATVKAMRPAEVRATGADIILGNTYHLMLRPGAERMARLGGLHDFMGWDRPILTDSGGYQVMSLSALTKQSEEGVAFKSHLDGSRHMLTPERSMEIQRLLGSDIVMAFDECPPNGVDAKRAEASMERSMRWAARSRAGFDAGEAHAARSALFGIQQGSLDEKLRARSAEALIDIGFDGYAIGGLAVGEGQEAMFGVLDFAPGQLPADKPRYLMGVGKPDDLVGAVARGVDMFDCVLPTRSGRNGQTFTWDGPLNIRNAKYAEDLGPLDASCDCPVCTTWSRAYLHHLVRSGEMLGAMLMTQHNLHFYQALMQAMRDAIAEGRFAAFQNDFAARYRR

SEQ ID NO: 61065 - protein, 374 aa, Sphingopyxis witflariensis
  REGION 1..374: note = tr|A0A2D0AMW0|A0A2D0AMW0_9SPHN Queuine tRNA-ribosyltransferase OS=Sphingopyxis witflariensis; OX = 173675 GN=tgt PE=3 SV=1
MTDRFTFSIAATDGAARTGTIAMKRGEIRTPAFMPVGTAATVKAMRPAEVRATGADIILGNTYHLMLRPTAERMARLGGLHNFMGWDRPILTDSGGYQVMSLSALTKQSEEGVAFKSHLDGSRHMLTPERSMEIQRLLGSDIVMAFDECPPNGVDAKRAEASMDRSMRWAARSRAGFDAGGEHAERSALFGIQQGSLDETLRARSAAALTDIGFDGYAIGGLAVGEGQEAMFGVLDFAPAQLPADKPRYLMGVGKPDDLVGAVARGVDMFDCVLPTRSGRNGQAFTWDGPVNIRNAKHAEDMGPLDASCACPVCTTWSRAYLHHLVRSGEMLGAMLMTQHNLHFYQDLMQGMRDAIAAGRFTSFQSDFDARYKR

SEQ ID NO: 61066 - protein, 375 aa, unidentified
  source 1..375: note = Sphingorhabdus contaminans
  REGION 1..375: note = tr|A0A553WAL8|A0A553WAL8_9SPHN Queuine tRNA-ribosyltransferase OS=Sphingorhabdus contaminans; OX = 1343899 GN=tgt PE=3 SV=1
MKSRFQFSISATSGKARTGTIQMMRGEIRTPAFMPVGTAATVKAMRPAEVRATGADIILGNTYHLMLRPGAERVARLGGLHKFSGWDRPILTDSGGYQVMSLSALRKITEEGVAFSSHLDGSKHMLSPERSMEIQRLLGSDIVMAFDECPANGVSRDEAIKSMELSMRWAKRSRDAFDAGGEHAGVAALFGIQQGSLDEELRKRSADALIDIGFDGYAVGGLAVGEGQEAMFACLDYAPDQLPADRPRYLMGVGKPDDLVGAVERGIDMFDCVLPTRSGRNGQAFTHSGPINIRNAKFAEDQGPIDDRCTCPVCATWTRAYVHHLIRSGEILGAMLMTQHNLHYYQMLMADMRGAIAEDRFAAFASDFRRDYLGS

SEQ ID NO: 61067 - protein, 374 aa, unidentified
  source 1..374: note = Sphingorhabdus marina
  REGION 1..374: note = tr|A0A1N6CLT4|A0A1N6CLT4_9SPHN Queuine tRNA-ribosyltransferase OS=Sphingorhabdus marina DSM 22363; OX = 1123272 GN=tgt PE=3 SV=1
MTDRFRFSISATDGRSRLGTIHMQRGEIRTPAFMPVGTAATVKAMKPESVRAAGADIILGNTYHLMLRPGAERVARLGGLHSFMNWDRPILTDSGGYQVMSLSELTRMSEDGVEFQSHLDGSRHMLTPERSMEIQRLLGSDIVMAFDECTKNGATRDEALESMERSMRWAKRSRGGFDSGEEHAARSALFGIQQGALDPDIRAASAEALIDIGFDGYAIGGLAVGEGQEAMFGVLDYAPDQLPQDKPRYLMGVGKPDDLVGAVERGVDMFDCVLPSRSGRNGQAFTADGALNIRNARFAEDLEPLDSECPCPVCQTYSRAYLHHLIKAKEILGAMLMTEHNIAWYQALMANMRSAIGEGRFAAFASAFRSRYLG

SEQ ID NO: 61068 - protein, 375 aa, unidentified
  source 1..375: note = Sphingorhabdus sp.
  REGION 1..375: note = tr|A0A220W734|A0A220W734_9SPHN Queuine tRNA-ribosyltransferase OS=Sphingorhabdus sp. SMR4y; OX = 2584094 GN=tgt PE=3 SV=1
MAERFSFSIAATDGKARTGTISMLRGDIRTPAFMPVGTAATVKALKPETVRATGADIILGNTYHLMLRPGAERVARLGGLHKFMNWDRPILTDSGGYQVMSLSELTKLSEDGVEFQSHLDGSRHMLTPERSMEIQRLLGSDIVMAFDECTKNGATREEALASMERSMRWAKRSRDGFDSGEEHAARAALFGIQQGSLDKDMRAASAEALIDIGFDGYAIGGLAVGEGQEAMFDVLDYAPGQLPADKPRYLMGVGKPDDLVGAVERGVDMFDCVLPSRSGRNGQAFTAQGPINIRNAKFAEDLAPLDENCACSVCQNHSRAYLHHLIRAKEILGAMLMTEHNIAYYQSLMAGMREAIAAGTFADFAKNFRSAYLKS

SEQ ID NO: 61069 - protein, 377 aa, unidentified
  source 1..377: note = Sphingorhabdus sp.
  REGION 1..377: note = tr|A0A5C6U6F4|A0A5C6U6F4_9SPHN Queuine tRNA-ribosyltransferase OS=Sphingorhabdus sp. D-2Q-5-6; OX = 2601267 GN=tgt PE=3 SV=1
MTHSPPFAFSIAATDGAARTGTIGMARGDIRTPAFMPVGTAATVKAMRPAEVRASGADIILGNTYHLMLRPGAERIARLGGLHAFMAWDRPILTDSGGYQVMSLSDLAKVTEDGVSFKSHLDGARHMITPERSIEIQRLLGSDIVMAFDELVRTDSSREAQAAAMERSMRWARRSREAFDTIDTGLPRGAIFGIQQGALDEGLRRASADALTAIGFDGYAIGGLAVGEGQEAMFGVLDYAPGQLPADAPRYLMGVGKPDDIVGAVLRGVDMFDCVLPTRSGRNGQAFTWGGPVNIRNARHAEDQAPLDARCNCPVCTTWSRAYLHHLVKSGEMLGAMLMTQHNLHFYQALMQALRDAIAQARIGEFARSFVADYRGG

SEQ ID NO: 61070 - protein, 375 aa, unidentified
  source 1..375: note = Sphingorhabdus wooponensis
  REGION 1..375: note = tr|A0A3R8Q2U0|A0A3R8Q2U0_9SPHN Queuine tRNA-ribosyltransferase OS=Sphingorhabdus wooponensis; OX = 940136 GN=tgt PE=3 SV=1
MTTRFKFSISATDGKARTGSIQMLRGEIRTPAFMPVGTAATVKAMRPAEVRATGADIILGNTYHLMLRPGAERVARLGGLHQFSGWDRPILTDSGGYQVMSLSALRKITEEGVSFQSHLDGSKHMLSPERSMEIQRLLGSDIVMAFDECPANGVSRDAAIKSMELSMRWAKRSRDGFDSGGEHAARAALFGIQQGSLDEELRKRSADALIDIGFDGYAVGGLAVGEGQEAMFGCLDYAPDQLPADRPRYLMGVGKPDDLVGAVERGIDMFDCVLPTRSGRNGQAFTHHGPINIRNAKFAEDQGPIDDRCTCPVCATWTRAYVHHLIRSGEILGAMLMTQHNLHYYQMLMADMRAAIAQGRFAAFAQEFRRDYLKA

SEQ ID NO: 61071 - protein, 370 aa, unidentified
  source 1..370: note = Sphingosinicella ginsenosidimutans
  REGION 1..370: note = tr|A0A5C6TPT0|A0A5C6TPT0_9SPHN Queuine tRNA-ribosyltransferase OS=Sphingosinicella ginsenosidimutans OX=1176539 GN=tgt PE=3 SV=1
MTSPRFEFSISATDGKARTGTIRMRRGEIRTPAFMPVGTAATVKAVKPADVRASGADILLGNTYHLMLRPGAERVARLGGLHALMGWDRPILTDSGGYQVMSLSELTKVSEEGVAFASHLDGSRHMLSPERSMEVQTLLGSDIVMAFDQLVKTTDTAAAQRAAMERSMRWAKRSRAAFDALGNEGALFGIQQGGLDEGMRAASAAALREIGFDGYAVGGLAVGEGQAAMFACLDFAPGQLPEDAPRYLMGVGKPDDIVGAVERGIDMFDCVLPTRSGRTGQAFTWDGPINIRNAKFAEDPAPIDPESPAGGWSKAYLHHLVRSGEILGAMLMTEHNLWFYQQLMERLRAAIAEGRLADFAEAFRARYRGR

SEQ ID NO: 61072 - protein, 374 aa, Sphingosinicella microcystinivorans
  REGION 1..374: note = tr|A0A495RN90|A0A495RN90_SPHMI Queuine tRNA-ribosyltransferase OS=Sphingosinicella microcystinivorans OX=335406 GN=tgt PE=3 SV=1
MTRFDFSIHARDGKARTGTIRMMRGDIRTPAFMPVGTAATVKAMKPADVRAGGADIILGNTYHLMLRPGDERMARLGGLHRFMGWDRPILTDSGGYQVMSLSDLTKVTEEGVRFASHLDGSRHLLTPERSMEIQRNLGSDIVMAFDECTAFPAPHAVAAKSMEMSMRWAKRSRDGFDGHEHAGRAALFGIQQGSMFEDLRRASSQALTEIGFDGYAIGGLAVGEGQPQMFEVLDYAPGLLPEDRPRYLMGVGKPDDIVGAVQRGIDMFDCVLPTRSGRNGQAFTHDGPINLRNARFAEDTGPLDPDCACPVCHGWSRAYIHHLIRSGEILGAMLMTEHNLSFYQQLMAGLREAIGEGRLETFARAFVGRYRKDG

SEQ ID NO: 61073 - protein, 376 aa, Sphingosinicella sp.
  REGION 1..376: note = tr|A0A2P7QYN0|A0A2P7QYN0_9SPHN Queuine tRNA-ribosyltransferase OS=Sphingosinicella sp. GL-C-18; OX = 2116704 GN=tgt PE=3 SV=1
MTSSRFSFSIAATDGAARTGTISMLRGDIRTPAFMPVGTAATVKAMKPADVRAAGADIILGNTYHLMLRPGAERVARLGGLHKFMQWDRPILTDSGGYQVMSLSELTKKSEDGVRFKSHIDGSAHMITPERSMEIQRLLGSDIVMAFDECTSYPSTRDSAAASMERSMRWARRSRDGFDSGGEHAARSALFGIQQGAMEEDLRKISAEKLIEIGFDGYAVGGLAVGEGQEIMFRTLDFAAPMLPADRPRYLMGVGKPDDIVGAVERGIDMFDCVLPTRSGRTGQAFTRSGPINIKNAKFGEDERPLDPDCACPVCAIWSRAYIHHLVRAGEILGAMLMTEHNIQFYQALMADLRAAIAGGRLTPFADDFRARYLGR

SEQ ID NO: 61074 - protein, 377 aa, Sphingosinicella sp.
  REGION 1..377: note = tr|A0A2U2J0A0|A0A2U2J0A0_9SPHN Queuine tRNA-ribosyltransferase OS=Sphingosinicella sp. QZX222; OX = 2068657 GN=tgt PE=3 SV=1
MSDRPRFSFSISATDGAGRTGVIAMKRGDIRTPAFMPVGTAATVKAMKPQDVRASGADIILGNTYHLMLRPGAERVARLGGLHAFMGWERPILTDSGGYQVMSLSDLRKMSEEGVSFKSHLDGSAHMLTPERSMEIQRLLGSDIVMAFDECTPFPATRDEAALSMERSMRWARRSRDGFDAGQDHASVSALFGIQQGSMHEDLRRISADRLTDIGFDGYAVGGLAVGEGQDEMFRVLDFAVGMLPADRPRYLMGVGKPDDIVGAVERGIDMFDCVLPTRSGRTGQAFTRDGPINIKNAKHAEDPEPLDPDCHCPVCGQWSRAYLHHLIRSGEILGAMLMTEHNLNFYQALMADLRAAIAEGRLRAFADDFRARYLRG

SEQ ID NO: 61075 - protein, 369 aa, unidentified
  source 1..369: note = Spiribacter aquaticus
  REGION 1..369: note = tr|A0A557RJY8|A0A557RJY8_9GAMM Queuine tRNA-ribosyltransferase OS=Spiribacter aquaticus; OX = 1935996 GN=tgt PE=3 SV=1
MTLRLTLSAADGWARRGRLEFARGTIDTPAFMPVGTYGTVKGMTPEEVAGSGAQILLGNTFHLMLRPGTSIIAEHGDLHDFMHWPSPILTDSGGFQVFSLAEGRRLTEAGVEFRSPVDGSRVFLDAERSMAVQRALGSDIVMIFDECTAWPAEWSEAKRSMERSLRWAERSREAHGDSEAALFGIVQGGMYDDLRAASLAGLESIGFDGMAVGGLSVGEPPAERLRVLDALAPQLPTDKPRYLMGVGRPEDLVDCVARGIDMFDCVLPTRNARNGYLFTDTGTLRLRNARFAHDTRPIEADCDCYTCRHYSRAYLRHLDRCGEMLGGRLNTIHNLRYFQRLMQAIREAIEAQAFNEFARAFHARRADMT

SEQ ID NO: 61076 - protein, 369 aa, unidentified
  source 1..369: note = Spiribacter curvatus
  REGION 1..369: note = tr|U5T634|U5T634_9GAMM Queuine tRNA-ribosyltransferase OS=Spiribacter curvatus OX=1335757; GN = tgt PE=3 SV=1
MTMQFETLASDGWARRGRLHFPRGVIDTPAFMPVGTYGTIKGMTPDEVAGSGAQILLGNTFHLMLRPGTEIIAAHGDLHDFMNWQAPILTDSGGFQVFSLAEGRRLTEAGVEFRSPVDGSRVFLDAERSMAVQRALGSDIVMIFDECTAWPAAWSEAKRSMERSLRWAERSRAAHGDSDAALFGIVQGGMYNDLRAESLAGLEAIGFDGMAIGGLSVGEPPEERLRVLDALAPQLPADKPHYLMGVGRPEDLVDCVARGVDMFDCVLPTRNARNGYLYTDTGTLRLRNARFADDTRPIEPGCDCYTCQHYSRAYLRHLDRCREMLGARLNTVHNLRYFQRLMARIRAAIETQAFDEFAQSFHARRADMT

SEQ ID NO: 61077 - protein, 376 aa, unidentified
  source 1..376: note = Spiribacter salinus
  REGION 1..376: note = tr|A0A540VVQ9|A0A540VVQ9_9GAMM Queuine tRNA-ribosyltransferase OS=Spiribacter salinus OX=1335746; GN = tgt PE=3 SV=1
MAKDFGFQLKATSGAARSGKISTPRGEIRTPAFMPVGTAATVKAMLPESVRETGADILLGNTYHLMLRPTAERIAALGGLHRFMNWERPILTDSGGFQVMSLAGLRKLTEEGVSFKSHIDGSKHMLSPERSMEIQALLGSDIVMCFDECPALPATRDEIARSMELSMRWARRSRVAFGARPGHALFGIQQGGLEEDLRRESAEALQDIGFEGYAVGGLAVGEGQEAMFGVLDFAPGQLPQDKPRYLMGVGKPDDIVGAVARGIDMMDCVLPSRSGRTGQVFTRRGVLNIKNARHQDDPRPLDEDCTCPACTSYSRAYLHHVFRSQEIISSMLLTWHNLHYYQELMQQMREAIAEDRFAAFERSFHAAREQGDIDPL

SEQ ID NO: 61078 - protein, 369 aa, unidentified
  source 1..369: note = Spiribacter salinus
  REGION 1..369: note = tr|A0A540VN47|A0A540VN47_9GAMM Queuine tRNA-ribosyltransferase OS=Spiribacter salinus OX=1335746; GN = tgt PE=3 SV=1
MTLRFESLAHDGLARRGQLHFGRGVVDTPAFMPVGTYGTVKGVTPEEVAASGAQILLGNTFHLMLRPGTEIITEHGDLHDFMHWPNPILTDSGGFQVFSLTEGRRITEAGVRFRSPVDGSEVFLDPERSMAVQRALGSDVVMIFDECTPWPIDHQGAQESMALSLRWAERSKEAHGDNPAALFGIVQGGMYEDLRAESLAGLMDIGFDGFAVGGLSVGEPPEDRLRVLDALAPSLPADKPRYLMGVGRPEDLVECVARGIDMFDCVMPTRNARNGFLFTDAGTLRLRNARFAHDTRPIEPGCDCTTCAHYSRAYLRHLDRCGEMLGSRLNTLHNLRYFQRLMASLREAIAAGCLEEFTREFYARRTGVT

SEQ ID NO: 61079 - protein, 367 aa, unidentified
  source 1..367: note = Spiribacter sp.
  REGION 1..367: note = tr|A0A2U2N519|A0A2U2N519_9GAMM Queuine tRNA-ribosyltransferase OS=Spiribacter sp. E85 OX=2182432; GN = tgt PE=3 SV=1
MRFETLARSGAARRGRLHFSRGTVETPAFMPVGTYGTVKGVTPEEVRASGAEILLGNTFHLMLRPGPEIIAAHGDLHDFMHWDGPILTDSGGFQVFSLAEGRRITEEGVSFRSPVDGSRVFLDPERSMAVQRALGSDIVMVFDECTPYPVDEATAEASMALSLRWAARSREAHGDSPAALFGIVQGGMYPGLREASLEGLQAIGFEGYAIGGLSVGEPPEERLRVLEHIVPRLPAERPRYLMGVGRPEDLVDSVCRGVDMFDCVLPTRNARNAFLYTPQGTLRLRNARFADDTRPVDPDCDCYTCRHYSRAYLRHLDRCREMLGARLNTLHNLRYFQRLMAELRDAIAEDRLAEYAEAFRRRRTGVT

SEQ ID NO: 61080 - protein, 423 aa, unidentified
  source 1..423: note = Spirobacillus cienkowskii
  REGION 1..423: note = tr|A0A369KWU0|A0A369KWU0_9PROT Queuine tRNA-ribosyltransferase OS=Spirobacillus cienkowskii; OX = 495820 GN=tgt PE=3 SV=1
MFSQRNLINFKKIKSLPLSPEFWSGHFDTENLKSSDFEQEFNQVLSKGIARNEDLQRVKQVGPRITKMTFGDIEIETPIFMPVGTLGSVKSLSPEDVYGIGYKIILGNTYHLNLRPGMELMKEFNGLHEFMRWPGAILTDSGGFQVMSLAKIRKLTEEGVTFANHINGAKVTLTPEKVVAIQEDIDSDIQMVLDECTPYPATYEEALSSMQRSMRWAKRARLARSKQNRAQFGIVQGGMYGDLRVQSVLQLIENDFEGYAIGGLSVGESKREMRRLLSATIPWMPDNKPRYLMGVGAPDDLIDAILLGVDMFDCVMPTRNARNGSVFVRSSASATGKIQIKNAIHKMSKAPLDSLCSCYTCKNYSRAYLRHLFVAEELLVFRLLSIHNLQFLYDLTSELREAIRSGDIFDQVKRIRGDYAPGS

SEQ ID NO: 61081 - protein, 369 aa, unidentified
  source 1..369: note = Spirobacillus cienkowskii
  REGION 1..369: note = tr|A0A369KRX6|A0A369KRX6_9PROT Queuine tRNA-ribosyltransferase OS=Spirobacillus cienkowskii; OX = 495820 GN=tgt PE=3 SV=1
MGLKFEYIAKDKHSEARRTRLHTSHGIIETPVFMPVGTFGAVRTLDHIELENMGVQIILGNTYHLYLRPGPEILKELKGYHKFICWDKPILTDSGGFQIFSLPHQRIISEKGVTFKSYVDQSYKKMTPESTIAFQEIIGSDIMMALDVCVPSTSKYDACASAMERTHRWAKRCKLSKSKDENSLFGIVQGAVFENLRKESAETLINLDFDGYAIGGLAVGETDEERIHFTEFTAKLLPNNKPRYLMGVGTPHDLVRGVMSGVDMFDCIIPTNHARQGVAYTFIGKQKLRRTIYAKDTNPIDENCSCYVCNKFTRAYLHQLCKCEEPTGWKLISYHNTWFYEKLMQKMRKTIEEGTFSNFANDFLKNVKE

SEQ ID NO: 61082 - protein, 375 aa, Spirochaeta africana
  REGION 1..375: note = tr|H9UJ97|H9UJ97_SPIAZ Queuine tRNA-ribosyltransferase OS=Spirochaeta africana (strain ATCC 700263 / DSM 8902 / Z-7692) OX=889378 GN=tgt PE=3 SV=1
MITIEHNDRGSAARTGRLKLPHGDVATPAFMPVGTAATVKGMYPGQVADLGYSLILANTYHLLLRPGIDTVYSLGGIRGFSTWKGNILTDSGGYQVFSLSGLRKIEETGVYFRSHIDGSPHTLTPELVVQAQARLGSDIQMVLDVCTPPDIPLQDARDAMDRTTRWLKRAIAEWQGTRDWYPGQLFSIVQGNFYPDLRREHAETLAEMETPGIAIGGLSVGETYSQFADILAHTAQYLPADRPRYVMGIGTPDFILAAVANGIDMFDCVLPTRVARNGSIFTRHGLVSLKRAAHRGSDQPIDPAGDTAPDLQGFSRGYLHHLFNAREMLGPMIATRHNLYFMQQFMNEVRASIRKDRFREYAAGFMEKFATGEQR

SEQ ID NO: 61083 - protein, 370 aa, unidentified
  source 1..370: note = Spirochaeta lutea
  REGION 1..370: note = tr|A0A098R5E5|A0A098R5E5_9SPIO Queuine tRNA-ribosyltransferase OS=Spirochaeta lutea OX=1480694; GN = tgt PE=3 SV=1
MKHRDEFCQARRGEIQLPHGRVQTPVFMPVGTQGTVKALSHQMVEDIGFEIILGNTYHLYLRPGTEVIADFGGLHEFSTWNRNILTDSGGFQVFSLSPFRKITDEGVQFRSHIDGSKHMLTPESVVEIQRVLGSDIQMVLDVCTEHGIDKKSAHKALTTTTRWAKRAKDAWQQSLGDYRGAAFGIVQGNFFEDLRAQSAQELSELDFPGYAIGGLSVGEPPEVFEHFLHYTAPLLPTGKPKYVMGIGTPDYILSAVEAGIDMFDCVFPTRVARNGYFFSRDGRINIKNERYRRDTQPIDLDSPISMYSRAYLRHLFKAGEMLGPMLATRHNLWFLHTFMTEIRTAIEENRFLEYKNTFLERYGRGMGNTI

SEQ ID NO: 61084 - protein, 371 aa, Spirochaeta perfilievii
  REGION 1..371: note = tr|A0A5C1QDT2|A0A5C1QDT2_9SPIO Queuine tRNA-ribosyltransferase OS=Spirochaeta perfilievii; OX = 252967 GN=tgt PE=3 SV=1
MFTQLERDKNTNARNGIMHLPHGDVLTPAFMPVGTNGAVKALHHKSLKEMGYDLILGNTYHLYLRPGLDVIRNAGSLHDFTTWDKNILTDSGGFQVFSLSEFRKISEEGVKFRSHIDGSYHMFTPENVIEKQEVFRSDILMMLDVCTPPGIGEREAREALDITTRWAKRGTKRWHERIDGYDGKLFAIVQGNFYKELRKRSALELLELDTPGIAIGGLSVGETPAEFHEYLSYTAEFLPLEKPKYVMGIGTPDYILSAVENGIDIFDCVYPTRIARNGTAFTRDGLIMLKNAKHELSLLPLDPECNCPVCKKYTRSYIRHLVKAKEILAPMLVTEHNLYFLANMMEEIRESIKVGNFYLYKQNFLKRYKGL

SEQ ID NO: 61085 - protein, 373 aa, Spirochaeta sp.
  REGION 1..373: note = tr|A0A1W9NA13|A0A1W9NA13_9SPIO Queuine tRNA-ribosyltransferase OS=Spirochaeta sp. LUC14_002_19_P3; OX = 1940821 GN=tgt PE=3 SV=1
MLTVIHRDNTTQARSGFLKLPHGKVEIPAFMPVGTNGTVKAILHSALSEIGFNLILGNTYHLYLRPGMDVIERYQSLHRFSSWKGNILTDSGGYQIFSLAQFRKIREEGAEFRSHIDGSLHQLSPESAVDIQCTLNSDIQMQLDVCTAPGISEKEAAQAMELSSRWALRAKRRWMEKEDYRGVLFAIVQGNFFRNLREESAHQLVDMSLPGYAIGGLSVGEEPEVFKEFLHFTAPLLPDNKPKYVMGIGTPDYMLEAIEAGIDLFDCVHPTRAARNGSCFTPDGMLNLRNARFQNDTSPLVENCPCPACRLYSRGYLRHLFTAREILGTLLATHHNLQFVYSLIQNARTAISKGSFSPFKKDFLARFGTQLHE

SEQ ID NO: 61086 - protein, 379 aa, Spirochaeta sp.
  REGION 1..379: note = tr|A0A3C0T3W9|A0A3C0T3W9_9SPIO Queuine tRNA-ribosyltransferase OS=Spirochaeta sp. OX=28185 GN=tgt; PE = 3 SV=1
MKFKITAKDKDSAARNAVLELPHGDLETPVFMPVGTNAAVKGVHHESLDRTGFKIILANTYHLYLRPGMDIIDEFGGIHKFSNWKHNILTDSGGFQVFSLAPFRKIKEEGVYFRSHIDGSYHTLTPEKVVQLQKAFRSDIMMQLDVCTPPEITYRKALEALELTTRWAQRSKTEWIKETPGYEGVLFGIVQGNFYKDLRKRSAEEITALNLPGIAIGGLSVGEEYNAFTDFLSYTAEFLPEEKPRYLMGIGTPEYILDAVENGIDLFDCVLPTRIARNGTVFTPEGTIQLKKAKHASSHEAIVDGCGCHACQNYSRAYLRHLFKAGEMLGPMLASEHNLFFLNKLILEIRESIKENRFTEYKKDFLKQYNSAGSTGKAG

SEQ ID NO: 61087 - protein, 381 aa, Spirochaeta thermophila
  REGION 1..381: note = tr|E0RSR8|E0RSR8_SPITD Queuine tRNA-ribosyltransferase OS=Spirochaeta thermophila (strain ATCC 49972 / DSM 6192 / RI 19.B1) OX=665571 GN=tgt PE=3; SV = 1
MHGIFSITHRDPSCLARTGRLLLPHGEVETPVFMPVGTNGSVKAVDFSVLDEMGIRLILSNTYHLFLRPGVDIIREAGGLHSFIGWQGNILTDSGGYQVFSLAPFRKIREEGIYFRSHIDGSYHTLTPEGVVDIQTAFGSDVMMPLDVCTPPGISKKEAEEALEITTAWARRSKERWESLREETGGLLFGIVQGNFFHDLRRRSVEEICALDLPGTAIGGLSVGESFPVFQEFLAFTAALLPPEVPHYLMGIGTPEYILEAVEQGIDMFDCVFPTRTARNASVFTRSGRISLRRERFTRDFSPLDPECSCYTCRRYTRAYLRHLFKTQEIMGPVLATIHNLHFLFTMVEEIRESIREGNFSRYKRAFLARYQEGTRADENE

SEQ ID NO: 61088 - protein, 382 aa, Spirochaeta thermophila
  REGION 1..382: note = tr|G0GE58|G0GE58_SPITZ Queuine tRNA-ribosyltransferase OS=Spirochaeta thermophila (strain ATCC 700085 / DSM 6578 / Z-1203) OX=869211 GN=tgt PE=3 SV=1
MMHGIFSITHRDPSCLARTGRLLLPHGEVETPVFMPVGTNGSVKAVDFSVLDDMGIRLILSNTYHLFLRPGVDIIREAGGLHSFIGWQGNILTDSGGYQVFSLAPFRKIREEGVYFRSHIDGSYHTLTPEGVVDIQTAFGSDVMMPLDVCTPPGISKKEAEEALEITTAWARRSKERWESLREESGGLLFGIVQGNFFHDLRRRSVEEICALELPGTAIGGLSVGESFPVFQEFLAFTAALLPSEVPHYLMGIGTPEYILEAVEQGIDMFDCVFPTRTARNASVFTRSGRISLRRERFTRDFGPLDPECTCYTCRRYTRAYLRHLFKAQEIMGPVLATIHNLHFLFTMVEEIRESIREGRFSRYKRAFLARYQEGTRADENE

SEQ ID NO: 61089 - protein, 374 aa, unidentified; identical to SEQ ID NO: 56930
  source 1..374: note = Spirochaetaceae bacterium
  REGION 1..374: note = tr|A0A2E8PTD3|A0A2E8PTD3_9SPIO Queuine tRNA-ribosyltransferase OS=Spirochaetaceae bacterium; OX = 1898206 GN=tgt PE=3 SV=1

SEQ ID NO: 61090 - protein, 372 aa, unidentified
  source 1..372: note = Spirochaetaceae bacterium
  REGION 1..372: note = tr|A0A1W9VEC0|A0A1W9VEC0_9SPIO Queuine tRNA-ribosyltransferase OS=Spirochaetaceae bacterium 4572_59 OX=1971727 GN=tgt PE=3 SV=1
MISIQYKDSETNARTGILSLPHGDVEIPAFMPVGTNGTVKAIKHNSVDDMGYKLILANTYHLYLRPGMEVMENAGGLHKFSGWKHNILTDSGGFQVFSLAPFRKIREEGVRFRSHIDGAYHVFTPEKVVEIQQIIGSDIQMVLDVCTPPDISHKEALEALNLTTNWARRARKRWDKRNEGYEGLLFGIIQGNFYEDLRKQSAEEILALDTPGIAIGGLSVGEPPEMFRDYLHYTAQFLPEDKPRYVMGIGTPDYMLEAVEAGIDMFDCVYPTRIARNGTCFTKDGLIALKNQRFGMDNLPIDPECDCPVCKQYSRSYLRHLFKAKEILGPMLVTEHNLHFLYRFMAEIRLSIREDRFKAFKRDFMKRYNKEI

SEQ ID NO: 61091 - protein, 373 aa, unidentified
  source 1..373: note = Spirochaetae bacterium
  REGION 1..373: note = tr|A0A2N1T8T5|A0A2N1T8T5_9SPIR Queuine tRNA-ribosyltransferase OS=Spirochaetae bacterium HGW-Spirochaetae-1 OX=2013832 GN=tgt PE=3 SV=1
MYRMKFTVMHNDYTSAARTGEITTSRGCIRTPVFMPVATRGAIRALTNRDIEEIGFDIILSNTYHLYIRPGTQVLEEAGGLHAFMNYKNPILTDSGGFQVFSLSDLCKVYDHGVEFRSHLDGSKHLFTPEKVLDIQGVIGSDIMMVLDQCTEYPIEKKDARAALIRTVDWAGKSFRYWKEHFNPEKQSLFAIVQGSVFGDLRRECVERLTEMDFPGFAIGGLSVGEPKELYQEITGFTMQYMPVEKPRYMMGVGSPLEIIFAIKNGVDMFDCVMPTRIARNGTLYTSQGRINIKAARFEKEYGPLDPNCSCYVCRNFSRAYLRHIFRAGEIASLIYNTYHNLFFMKTFMEEIRQSIAADTFLDTEKKWTGIFG

SEQ ID NO: 61092 - protein, 373 aa, unidentified
  source 1..373: note = Spirochaetae bacterium
  REGION 1..373: note = tr|A0A2N1RJZ7|A0A2N1RJZ7_9SPIR Queuine tRNA-ribosyltransferase OS=Spirochaetae bacterium HGW-Spirochaetae-8 OX=2013840 GN=tgt PE=3 SV=1
MQKIHHLTHQDAHSLARCGTLSLPHGEVLTPTFMPVGTNGTVKGMYHDDVSAIGYNLILGNTYHLYLRPGMAVMEKFGGLHKFSNWNHNILTDSGGFQVFSLAHFRKIKEEGVTFQSHIDGSKHHLTPEKVVDIQRIIGSDILMCLDVCTPPDLEYKKAREAWEITKRWAERSLKRRSELEDFKGNLFGIVQGNFYQDLRKESAETISSMDFPGIAIGGLSVGEEPQVFSDFLAYTTQFISLEKPRYVMGIGSPDYILDAVANGIDLFDCVLATRTARNGSVFTNEGMIQLKRAEHEFKDEPLVPGCTCTACTKYSKGYMRHLFKAGEMLGGMMATEHNLTFLYRMMEQVRQAINEDRFLDYKREFLSRYYGR

SEQ ID NO: 61093 - protein, 369 aa, unidentified
  source 1..369: note = Spirochaetales bacterium
  REGION 1..369: note = tr|A0A2E9KUU6|A0A2E9KUU6_9SPIR Queuine tRNA-ribosyltransferase OS=Spirochaetales bacterium; OX = 2026792 GN=tgt PE=3 SV=1
MSFIVKYKDSNSNARVGTLRTSSGEIKTPVFMPVCTGGVPKALRIDALSSIGFNLIVVNAYHLFLRPGHKEIKDFGGLHSFLNWKDTILTDSGGFQIFSLSSSATIKDEGVSFKSFIDGSTNLITPELSIEIQESLGSDLMMILDDCPKSDSEYSRILSSIKRTQQWALRSKKAKKTKNQLFGIVQGGIYKDLRKLSINHMLDIDFDGYAIGGLGLGEGQDTTYEITDYVCSFLPTNKPRYSMGIGKPEDIINSVEKGVDIFDCVVPTRNARNGTLYTSNGKINIKNSIYSMSDEPIDSDCDCYICKNYSIGYIRYLYMSGEIAALSLMSSSNLYFYKQLIDSIRKSIKDGSFMDFKKTFLERYKDEEN

SEQ ID NO: 61094 - protein, 380 aa, unidentified
  source 1..380: note = Spirochaetales bacterium
  REGION 1..380: note = tr|A0A524KE80|A0A524KE80_9SPIR Queuine tRNA-ribosyltransferase OS=Spirochaetales bacterium; OX = 2026792 GN=tgt PE=3 SV=1
MSETSRSIFTLGVRDATTRARTGVIDLPHGRVHTPVFMPVGTNATVKAVSKDSLEEIGFEIILANTYHLYLRPGHDLIHEAGGLHGFTGWKGNFLTDSGGFQVFSLAPFRKISEEGVKFQSHIDGSRHMLTPELAVDIQTAFRSDIFMQLDVCSSYGVERKEAINALRLTTAWAARSRRRWMDTRGEFEGKLFGIVQGNFFEDLRDQSAQEIIALDLPGIAIGGLSVGEPFNVFSDFLAFTAGLLPEGKPRYVMGIGTPEYILEAVEQGIDMFDCVFPTRTARNGLLFTSYGPISIKQAQYTRDFSPTDPECSCRVCTDYSRAYLRHLYKNNEILFSMLASYHNLAFLHEFIHKIRYSIEERRFSEFKREYLAKYRSRAG

SEQ ID NO: 61095 - protein, 324 aa, unidentified
  source 1..324: note = Spirochaetes bacterium
  REGION 1..324: note = tr|A0A1G3QW30|A0A1G3QW30_9SPIR Queuine tRNA-ribosyltransferase (Fragment) OS=Spirochaetes bacterium RBG_13_68_11 OX=1802194 GN=A2177_09380 PE=3 SV=1
  VARIANT 291..293: note = Xaa can be any naturally occurring amino acid
MAFTIAAVDRGSAARAGSLSLNHGTVETPCFMPVGTNATVKAMSVADLEDLGVRLILGNAYHLLLRPGPDVIRAAGGLHRFMGWPHDILTDSGGYQVFSLAQFRRLEEGGVSFRSHLDGSSRRLTPEDVIDLEVLACGSDVLMPLDVCTAPGITRGEAEEALALTTRWLARSRDRWRSLEAPLKGELFGIMQGNFHRDLREASAAGIASLDLPGYAIGGLSVGEEFAVFREFTHLSAGLLPADKPRYLMGIGTPAYVLEAVEAGVDLFDCVFPTRTARNALVFTPDGPLNXXXEANREDFGPIDPACRCTACRAHSKAYLRHLF

SEQ ID NO: 61096 - protein, 372 aa, unidentified
  source 1..372: note = Spirochaetes bacterium
  REGION 1..372: note = tr|A0A1V5W581|A0A1V5W581_9SPIR Queuine tRNA-ribosyltransferase OS=Spirochaetes bacterium ADurb.Bin218 OX=1852906 GN=tgt PE=3 SV=1
MNFKLIKKDNNSAARACEITTGHSVIKTPVFMPVATRAAIRAMTLSDLQSIGFDIILSNTYHLYMRPGMDVIAAAGGLHNFMNYHGSFLTDSGGFQVFSLSNLCKVRDDGVDFNSHLDGSKHFFTPEKVLDIQRIIGSDIMMVLDQCSDYPIEKAQARAAMERTIDWAKKSARYYKETFDTESQACFAIIQGSVYSDLRKECAERLAELDLPGYAIGGLSVGEPKELYREITEYLLPFMPYDRPRYMMGVGSPMEILFAIKQGVDMFDCVMPTRIARNGTLYTSQGRVNIKASQYEKDFTSLDPLCDCYVCKNFTKAYLRHIFKAGEIASLIYNTYHNLYFMKTFMDEIRTSILSDTFNETYCKWSKVFASE

SEQ ID NO: 61097 - protein, 368 aa, unidentified
  source 1..368: note = Spirochaetia bacterium
  REGION 1..368: note = tr|A0A352VV19|A0A352VV19_9SPIR Queuine tRNA-ribosyltransferase OS=Spirochaetia bacterium; OX = 2053615 GN=tgt PE=3 SV=1
MSFSLLAQDGAARAGILSVPHGNIAAPVFMPVGTQSAVKAVTFDKLAECGASIMLANTYHLYLRPGLATIKAMGGLHEFSNWRLPILTDSGGFQIFSLSSLAKISDEGFSFQSHIDGSRHFLSPEDVIDCQCIFGSDIIMQLDQCVPFRSDEQKIRESSRRSYAWAERSLLHFQKHESDSLLFGIVQGASNREYRRESAEKLVALEFPGYAIGGLSVGESREEMIDMTGFCASLLPENKPRYLMGVGTPEDIINAVAAGVDMFDCVLPTRNARNATVYNRRGKLLLRNRANKNDKGPIDPECTCYTCTNFSRAYLRHLFKAGEINALILASIHNLHFYIDFINRIRQSILAKKFEAFRRKYFSDAVIS

SEQ ID NO: 61098 - protein, 372 aa, unidentified
  source 1..372: note = Spirochaetia bacterium
  REGION 1..372: note = tr|A0A354G9I7|A0A354G9I7_9SPIR Queuine tRNA-ribosyltransferase OS=Spirochaetia bacterium; OX = 2053615 GN=tgt PE=3 SV=1
MFIIEKKDSSSHGRAGKLSLYHGEVLTPVFMPVGTNGPVKSFLPYEIKEMGIKIMLSNSYHLYLRPGMDVMEKLGGLHNFTGFDGNILTDSGGFQIFSLSSLTKIKKDGIEFRSHIDGSKHFLSPENVVSVQKSIGSDIMMVLDQCTSPDISYNDAVKALETTTRWAAKSREFYKQTIDTEKQKQFGIIQGNIFKDLRKKSTEEIVSIGFDGYAIGGLSVGETKDVFKDILSYTAPLLPEDKPRYLMGVGTPEDLFTGVESGIDMFDCVFPTRIARNGTVFTNHGRINLKNEKFKYDNLPLDPECDCYMCKNFSRSYIRHLFKAKEISGARITSYHNVYYMKKIMDRIRLSIFNNDFQYLKKDFLKTYKDEN

SEQ ID NO: 61099 - protein, 376 aa, unidentified
  source 1..376: note = Spirosoma endophyticum
  REGION 1..376: note = tr|A0A1I2FYX0|A0A1I2FYX0_9BACT Queuine tRNA-ribosyltransferase OS=Spirosoma endophyticum; OX = 662367 GN=tgt PE=3 SV=1
MTFSITAHDPQSKARTGTLTTDHGPIQTPIFMPVGTAGTVKAVHQRELETDINAEIILGNTYHLYLRPGLDVLSQAGGLHGFNGWRRPILTDSGGYQVYSLSNTRKIKEEGVTFKSHIDGSKHTFTPEGVMDIQRIIGADIIMAFDECTPYPCEYGYARQSMDMTHRWLGRCIDRFDQAEGHYGYQQTLFPIVQGSTYADLRRQSAEVIASKEREGNAIGGLAVGEPAEEMYAMIELVNGILPADKPRYLMGVGTPANILEAIALGVDMFDCVMPTRNARHGLLFTTEGIINIKNEKWNKDFSPIDAGLGGYASTFYSKAYLRHLVKSEELLGGQIASLHNLTFYLWLVRQAREHIVVGDFIAWKNEMVIKLMQRL

SEQ ID NO: 61100 - protein, 376 aa, unidentified
  source 1..376: note = Spirosoma fluviale
  REGION 1..376: note = tr|A0A286G3V0|A0A286G3V0_9BACT Queuine tRNA-ribosyltransferase OS=Spirosoma fluviale OX=1597977; GN = tgt PE=3 SV=1
MTFSISAQDTQSKARTGTLTTDHGPIQTPIFMPVGTAGTVKAVHQRELETDINAEIILGNTYHLYLRPGLDVLGQAGGLHAFNGWRRPILTDSGGYQVYSLSQTRKIKEEGVTFKSHIDGSKHTFTPEGVMDIQRIIGADIIMAFDECTPYPCDYGYARQSMEMTHRWLGRCIDRFDATEGHYGYRQTLFPIVQGSTYADLRRQSAEVIASKEREGNAIGGLAVGEPAEEMYAMIELVNGILPVDKPRYLMGVGTPANILEAIALGVDMFDCVMPTRNARHGLLFTTEGIINIKNEKWNRDFSPIDAGLGGYASTFYSKAYLRHLIKSEELLGGQIASLHNLTFYLWLVRQARTHIAAGDFVAWKNEMVVRLMQRL

SEQ ID NO: 61101 - protein, 376 aa, Spirosoma linguale
  REGION 1..376: note = tr|D2QJM0|D2QJM0_SPILD Queuine tRNA-ribosyltransferase OS=Spirosoma linguale (strain ATCC 33905 / DSM 74 / LMG 10896) OX=504472 GN=tgt PE=3 SV=1
MTFSISAHDPQSKARTGTLTTDHGPIQTPIFMPVGTAGTVKAVHQRELETDINAEIILGNTYHLYLRPGLEVLSQAGGLHAFNGWRRPILTDSGGYQVYSLSQTRKIKEEGVTFKSHIDGSKHTFTPEGVMDIQRIIGADIIMAFDECTPYPCDYGYARQSMEMTHRWLGRCIDRFDATEGHYGYRQTLFPIVQGSTYADLRRQSAEVIASKEREGNAIGGLAVGEPAEEMYAMIDLVNAILPADKPRYLMGVGTPANILEAIALGVDMFDCVMPTRNARHGLLFTTEGIINIKNEKWSRDFSPIDAGLGGYASTFYSKAYLRHLIKSEELLGGQIASLHNLTFYLWLVRQARMHIATGDFVSWKNEMVVRLMQRL

SEQ ID NO: 61102 - protein, 376 aa, unidentified
  source 1..376: note = Spirosoma montaniterrae
  REGION 1..376: note = tr|A0A1P9WRP7|A0A1P9WRP7_9BACT Queuine tRNA-ribosyltransferase OS=Spirosoma montaniterrae; OX = 1178516 GN=tgt PE=3 SV=1
MTFSITAHDPQSKARTGTLTTDHGPIQTPIFMPVGTAGTVKAVHQRELETDVNAEIILGNTYHLYLRPGLDVLNGAGGLHGFNGWQRPILTDSGGYQVYSLSNTRKIKEEGVTFKSHIDGSSHRFTPEGVMDIQRTIGADIIMAFDECTPYPCEYGYARQSMEMTHRWLDRCIARFDGTDGYYGYRQTLFPIVQGSTYPDLRRQSAEVIASKEREGNAIGGLAVGEPAEEMYAMIELVNEILPADKPRYLMGVGTPANILEAIARGVDMFDCVMPTRNARHGLLFTTAGIINIKNEKWSRDYSPIDAELGGYASTFYSKSYLRHLFKADELLGGQIASLQNLTFYLWLVRQARTHIAAGDFISWKNEMVVRLMQRL

SEQ ID NO: 61103 - protein, 376 aa, unidentified
  source 1..376: note = Spirosoma oryzae
  REGION 1..376: note = tr|A0A2T0T8P6|A0A2T0T8P6_9BACT Queuine tRNA-ribosyltransferase OS=Spirosoma oryzae OX=1469603; GN = tgt PE=3 SV=1
MTFSITARDTESQARTGVFTTDHGPVQTPIFMPVGTAGTVKAVHQRELETDVNAEIILGNTYHLYLRPGLDVLQRAGGLHAFNGWRRPILTDSGGYQVYSLSNTRKIKEEGVTFKSHIDGSKHTFTPEGVMDIQRVIGADIMMAFDECTPYPCDYTYARQSMEMTHRWLDRCIARFDATEGAYGYRQTLFPIVQGSTYADLRRQSAETIASKEREGNAIGGLAVGEPAEEMYETIELVNGILPADKPRYLMGVGTPANILEAIGLGVDMFDCVMPTRNARHGLLFTTAGIINIKNEKWSRDFSPIDAGLGGYASTFYTKAYLRHLFKADELLGGQIASLQNLTFYLWLVRQARIHIEAGDYVSWKNGIVGQLMQRL

SEQ ID NO: 61104 - protein, 376 aa, unidentified
  source 1..376: note = Spirosoma pollinicola
  REGION 1..376: note = tr|A0A2K8Z6Q4|A0A2K8Z6Q4_9BACT Queuine tRNA-ribosyltransferase OS=Spirosoma pollinicola; OX = 2057025 GN=tgt PE=3 SV=1
MTFSITAQDPQSKARTGTLITDHGPIQTPIFMPVGTAGTVKAVHQRELETDVNAEIILGNTYHLYMRPGLDVLSQAGGLHAFNGWKRPILTDSGGYQVYSLSGTRKIKEEGVTFKSHIDGSKHTFTPEGVMDIQRTIGADIVMAFDECTPYPCDYEYARKSMDMTHRWLDRCINRFDATEGHYGFNQTLFPIVQGSTYADLRRQSAEMIASKEREGNAIGGLAVGEPAEEMYAMIELVNGILPVDKPRYLMGVGTPANILEAIALGVDMFDCVMPTRNARHGLLFTTEGIINIKNEKWNRDFSPIDAGLGGYASTFYSKAYLRHLIKSEELLGGQIASLHNLTFYLWLVRQARAHIAVGDFVSWKNEMVVHLMQRL

SEQ ID NO: 61105 - protein, 376 aa, unidentified
  source 1..376: note = Spirosoma radiotolerans
  REGION 1..376: note = tr|A0A0E3V8P7|A0A0E3V8P7_9BACT Queuine tRNA-ribosyltransferase OS=Spirosoma radiotolerans; OX = 1379870 GN=tgt PE=3 SV=1
MTFSITANDPQSKARTGTLTTEHGPIQTPIFMPVGTAGTVKAVHQRELETDIDAEIILGNTYHLYMRPGLEVLNQAGGLHGFNGWRRPILTDSGGYQVYSLSNTRKIKEEGVTFKSHIDGSKHTFTPEGVMDIQRTIGADIIMAFDECTPYPCEYGYARQSMEMTHRWLGRCIDRFDSTEGLYGYKQTLFPIVQGSTYADLRRQSAEVIASKEREGNAIGGLAVGEPAEEMYAMIELVNEILPADKPRYLMGVGTPANILEAIALGVDMFDCVMPTRNARHGLLFTTEGIMNIKNEKWSRDFSPIDAGLGGYASTFYSKAYLRHLVKSEELLGGQIASLHNLTFYLWLVRQAREHIAAGDFVAWKNEMVVRLMQRL

SEQ ID NO: 61106 - protein, 376 aa, Spirosoma sp.
  REGION 1..376: note = tr|A0A4Q2UW77|A0A4Q2UW77_9BACT Queuine tRNA-ribosyltransferase OS=Spirosoma sp. TY50 OX=2502893; GN = tgt PE=3 SV=1
MNFSITAHDPQSKARTGLLTTDHGPIQTPIFMPVGTAGTVKAVHQRELETDINAEIILGNTYHLYLRPGLDVLGQAGGLHAFNGWRRPILTDSGGYQVYSLSGTRKIKEEGVTFMSHIDGSKHHFSPEGVMDIQRTIGADIIMAFDECTPYPCEYGYARASMEMTHRWLDRCIDRFDSTEGHYGYKQTLFPIVQGSTYPDLRKQSATFIASKEREGNAIGGLAVGEPAEAMYETIELVNEILPADKPRYLMGVGTPANILEAIARGVDMFDCVMPTRNARHGLLFTTEGIMNIKNEKWSRDFSPIDAGLGGYASTFYSKAYLRHLFKADELLSGQIASLHNLTFYLWLVRQARAHIEAGDFLSWKNEMVVRLMQRM

SEQ ID NO: 61107 - protein, 376 aa, Spirosoma sp.
  REGION 1..376: note = tr|A0A515A714|A0A515A714_9BACT Queuine tRNA-ribosyltransferase OS=Spirosoma sp. KCTC 42546; OX = 2520506 GN=tgt PE=3 SV=1
MTFSITAHDPQSKARTGTLTTDHGPIQTPIFMPVGTAGTVKAVHQRELEADINADIILGNTYHLYLRPGLEVLSQAGGLHGFNGWKRPILTDSGGYQVYSLSNTRKIKEEGVTFKSHIDGSKHTFTPEVVMDIQRVIGADIMMAFDECTPYPCEYGYARQSMEMTHRWLDRCIGRFDATEGHYGYRQTLFPIVQGSTYKDLRRQSAETIASKEREGNAIGGLAVGEPAEEMYTTIELVNSILPADKPRYLMGVGTPANILEAIALGVDMFDCVMPTRNARHGLLFTTEGIINIKNEKWSRDFSPIDAGLGGYASTFYSKAYLRHLVKSEELLGGQIASLHNLTFYLWLVRQARAHIEAGDFVSWKNEMVVRLMQRL

SEQ ID NO: 61108 - protein, 369 aa, Spongiibacter sp.
  REGION 1..369: note = tr|A0A2D7WFE2|A0A2D7WFE2_9GAMM Queuine tRNA-ribosyltransferase OS=Spongiibacter sp. OX=2024860; GN = tgt PE=3 SV=1
MQFSRSAQDGLARRGELSFPRGKVQTPAFMPVGTYGTVKGMLPRDIHEIGAEIILGNTFHLMLRPGTEVVKAHGDLHDFIGWEGPILTDSGGFQVWSLGKLRKISEEGVSFQSPVDGSKVYMDPERSMEVQRELGSDIVMIFDECTPYPATEAEARSSMELSLRWAGRSKSAHEGNDAALFGIIQGGMYPELRRESLAGLQDIGFDGYAIGGLSVGEPKEEMLKVLDSLADHLPEQQPRYLMGVGKPSDILEAVMRGVDMFDCVMPTRNARNGHLFTSTGVIKIRNAVHRHSDQPLDANCDCYTCQNFSRAYLHHLDKCREILGAQLNTIHNLRYYQNHMAAIRQAIEQGRLAEFAEEFYASQDGRADV

SEQ ID NO: 61109 - protein, 369 aa, Spongiibacter sp.
  REGION 1..369: note = tr|A0A2E2KBQ7|A0A2E2KBQ7_9GAMM Queuine tRNA-ribosyltransferase OS=Spongiibacter sp. OX=2024860; GN = tgt PE=3 SV=1
MSFTLSGQDGLARRGELDFPRGKVQTPAFMPVGTYGTVKGMLPRDIHEIGAEIILGNTFHLMLRPGTEVVKAHGDLHDFIGWEGPILTDSGGFQVWSLGKLRKISEEGVSFQSPVDGSKVYMDPERSMEVQRELGSDIVMIFDECTPYPATEDEARKSMELSLRWAARSKAAHAGNDAALFGIIQGGMYPNLRSESLAGLREIGFDGYAIGGLSVGEPKDEMLKVLDGLAPELPQDRPRYLMGVGKPSDILEAVMRGVDMFDCVMPTRNARNGHLFTSTGVIKIRNAVHRYSDQPLDANCDCYTCQNFSRAYLHHLDKCREILGAQLNTIHNLRYYQNHMAGIRKAIEENRLGAFADEFYASQDGRADV

SEQ ID NO: 61110 - protein, 371 aa, unidentified
  source 1..371: note = Spongiibacteraceae bacterium
  REGION 1..371: note = tr|A0A2E2JZY5|A0A2E2JZY5_9GAMM Queuine tRNA-ribosyltransferase OS=Spongiibacteraceae bacterium; OX = 2026793 GN=tgt PE=3 SV=1
MSFSVSGSDGEARRGELTFSRGTVQTPAFMPVGTYGTVKGMLPRDIKEIGAEIILGNTFHLMLRPGTEVVKAHGDLHDFSGWQGPILTDSGGFQVWSLGKLRKITEEGVSFQSPVDGSKVYLDPETSIDVQHELGADIVMIFDECTPYPATEKQARDSMELSQRWARRSRDAHGDHPSALFGIVQGGMYPNLREESLKGLAEIGFDGYAIGGLSVGEPKEDMLNVLDHLAHAMPADKPRYLMGVGKPEDILEAVRRGVDMFDCVMPTRNARNGHLFTSGGVVKIRNSRHKHSTAPLDENCDCYTCENFSRAYLHHLDRCKEILGAQLNTIHNLRFYQTHMAGICSAIENNSLDAFADQFYQSQQREERCTS

SEQ ID NO: 61111 - protein, 371 aa, unidentified
  source 1..371: note = Spongiibacteraceae bacterium
  REGION 1..371: note = tr|A0A2E7INX2|A0A2E7INX2_9GAMM Queuine tRNA-ribosyltransferase OS=Spongiibacteraceae bacterium; OX = 2026793 GN=tgt PE=3 SV=1
MQFSLASTDGEARRGELSFPRGKVQTPAFMPVGTYGTVKGMLPRDIHEIGAEIILGNTFHLMLRPGTEVVKAHGDLHDFSGWQGPILTDSGGFQVWSLGKLRKITEEGVRFQSPVDGSPVYLDPETSIGVQHDLGADIVMIFDECTPYPATEQQARESMELSQRWAGRSRAAHGDHPSALFGIVQGGMYPALRTESLNALVNIGFDGYAIGGLSVGEPKDDMLNVLDHLANTMPADKPRYLMGVGKPEDILEAVRRGVDMFDCVMPTRNARNGHLFTSGGVIKIRNARHRHSTVPLDAECDCYTCQNFSRSYLHHLDRCKEILGAQLNTIHNLRYYQNHMAAIREAIEAGRLDAFADDFYEAQKREEQCTN

SEQ ID NO: 61112 - protein, 371 aa, Sporanaerobacter acetigenes
  REGION 1..371: note = tr|A0A1M5XTY7|A0A1M5XTY7_9FIRM Queuine tRNA-ribosyltransferase OS=Sporanaerobacter acetigenes DSM 13106 OX=1123281 GN=tgt PE=3 SV=1
MAVRFELLKESSECNARLGKLYTPHGVIETPIFMPVGTRATVKAMTPEEVKDLGAQIILSNTYHLYLKPGHKLIEEAGGLHKFMNWDKPILTDSGGFQVFSLGKLRKISEEGVEFRSHIDGSKHFISPEKSIEIQNSLGSDIMMALDECTPYPSDYEYTKESLERTTRWAKRCKEYHKDWDRQALFGIVQGGMYKDLREQSIKEITDLDLPGYAIGGLSVGEPKELYRDMLSFTAPKLPKNKARYLMGVGSPDYLFDAVISGIDMADCVLPTRIARNGTVLTSHGKLVIKNAEYKRDFGKLDPECDCYTCKNYSRAYIRHLFNVDEILAARLATIHNLYFLIKLMENIRTAIKEDRLLEYREQFYKKYGYI

SEQ ID NO: 61113 - protein, 371 aa, Sporanaerobacter sp.
  REGION 1..371: note = tr|A0A410QC16|A0A410QC16_9FIRM Queuine tRNA-ribosyltransferase OS=Sporanaerobacter sp. JN28; OX = 2507161 GN=tgt PE=3 SV=1
MAAKFEVIKESQECKARLGKLYTPHGIVETPVFMPVGTQATVKAMTPEEVKTLGAQIILANTYHLYLRPGHELIREAGGIHKFMNWNGPILTDSGGFQVFSLGDLRKITEEGVEFRSYIDGSKHFLRPEDSIEIQNCLGSDIIMAFDECTPYPSTWEYTKESMERTGRWAERCKEYHEDWDKQSLFGIVQGGMYKDLREKSAEQITSLNLPGYAIGGLSVGEPKELMYDILEFTTLLLPENKPRYLMGVGSPDYLFESVIRGVDMADCVLPTRIGRNGTVLTSRGKIIIKNGIYKRDFGKLDEECDCYTCTHYSRAYIRHLFNVHEILGARLTTIHNLYFLLKLMENIREAIKQDRLLEYRDEFYKKFGYV

SEQ ID NO: 61114 - protein, 371 aa, Sporanaerobacter sp.
  REGION 1..371: note = tr|A0A1G4FPQ2|A0A1G4FPQ2_9FIRM Queuine tRNA-ribosyltransferase OS=Sporanaerobacter sp. PP17-6a; OX = 1891289 GN=tgt PE=3 SV=1
MAAKFEVIKESQECKARLGKLYTPHGIVETPVFMPVGTQATVKAMTPEEVKALGAQIILANTYHLYLRPGHELIKEAGGIHKFMNWNGPILTDSGGFQVFSLGDLRKITEEGVEFRSYIDGSKHFLRPEDSIEIQNCLGSDIIMAFDECTPYPSTWEYTKESMERTGRWAERCKEYHEDWDKQSLFGIVQGGMYKDLREKSAEQITSLNLPGYAIGGLSVGEPKELMYDILEFTTLLLPENKPRYLMGVGSPDYLFESVIRGVDMADCVLPTRIGRNGTVLTSRGKIIIKNGIYKRDFGKLDEECDCYTCTHYSRAYIRHLFNVHEILGARLTTIHNLYFLLKLMENIREAIKQDRLLEYRDEFYKKFGYV

SEQ ID NO: 61115 - protein, 376 aa, Sporobacter termitidis
  REGION 1..376: note = tr|A0A1M5TF60|A0A1M5TF60_9FIRM Queuine tRNA-ribosyltransferase OS=Sporobacter termitidis DSM 10068 OX=1123282 GN=tgt PE=3 SV=1
MFRLIAKEGRARRGEFTTAHGVVQTPVFMNVGTQAAIKGALSSEDLERIGCQIELSNTYHLHLRPGDMLIRAQGGLHKFMSWDRPILTDSGGFQIFSLAGLRKISEEGVTFSSHIDGRRIFMSPEDCMRIQANLGSDIAMAFDECVEIPSPRDYVEKSCDRTYRWLVRCRDEMRRQMEQPDAVNRGELLFGINQGAVFPELRIRHMRQIAELDLPGYAIGGLAVGETVGEMYDIIETVEEHMPADKPRYLMGVGTPANILEGVARGVDFFDCVMPARNGRHGHLYTWSGVINMNNEKHAGDSRPIDETCACPVCQRYSRAYLRHLFKAEEMLALRLAVMHNLYFYNALMQKIRDALDCGEFHAFRARHAEILSNRI

SEQ ID NO: 61116 - protein, 376 aa, Sporocytophaga myxococcoides
  REGION 1..376: note = tr|A0A098LCB3|A0A098LCB3_9BACT Queuine tRNA-ribosyltransferase OS=Sporocytophaga myxococcoides; OX = 153721 GN=tgt PE=3 SV=1
MVFKIQSTDKKSKARTGTIQTDHGEIKTPIFMPVGTAGTVKSIHQRELESDINAQIILGNTYHLYLRPGLDVLSQAGGIHKFNGWNRPILTDSGGYQVYSLSGTRKIKEEGVTFASHIDGSKHTFTPENVMDIQRTIGADIIMAFDECTPYPCEYKYARKSMEMTHRWLKRCCDRFDSTEPKYGYGQTLFPIVQGSCFKDLRLASAEKIASFNREGNAIGGLSVGEPAEIMYEMTEIVCSVLPWEKPRYLMGVGTPANLLESIALGIDMFDCVMPTRNARNGMIFTTEGIINIKNEKWKSDFSEIDPGLPSFLKNYYSKAYLRHLVASKEILGAQIATLQNLTFYLWLMNEARTKIEEGTFSEWKDLTVKKIMTRL

SEQ ID NO: 61117 - protein, 381 aa, Sporolactobacillus inulinus
  REGION 1..381: note = tr|A0A0U1QRV8|A0A0U1QRV8_9BACL Queuine tRNA-ribosyltransferase OS=Sporolactobacillus inulinus CASD OX=1069536 GN=tgt PE=3 SV=1
MSQPAVTYELIKTDKKTGARLGKLHTPHGTFDTPMFMPVGTQATVKTMSPEELKEMGAGVILSNTYHLWLRPGEDIVQEAGGLHPFMNWDQGILTDSGGFQVFSLSKLRDISEEGVRFRNHLNGEKLFLSPEKSIAIQNALGSDIMMAFDECPPFDSSFDYMKTSVERTSRWAARCLEANANPDRQALFGIVQGGGNKELRMQSARDLTSLDFPGYAIGGLSVGEPKEKMNEMLTYTTPLLPADKPRYLMGVGSPDSLIDGVIRGIDMFDCVLPTRIARNGTCMTEHGRIVIRNAKFAHDFRPIDESCDCKVCRNYSRAYIRHLVKANETFGFRLTTYHNLYFLIKLMKRVRSAIREDRLLEFKASFFESYGFNKPGAKNF

SEQ ID NO: 61118 - protein, 381 aa, Sporolactobacillus inulinus; identical to SEQ ID NO: 61117
  REGION 1..381: note = tr|A0A4Y1ZJ48|A0A4Y1ZJ48_9BACL Queuine tRNA-ribosyltransferase OS=Sporolactobacillus inulinus; OX = 2078 GN=tgt PE=3 SV=1

SEQ ID NO: 61119 - protein, 381 aa, Sporolactobacillus laevolacticus
  REGION 1..381: note = tr|V6J0J6|V6J0J6_9BACL Queuine tRNA-ribosyltransferase OS=Sporolactobacillus laevolacticus DSM 442 OX=1395513 GN=tgt PE=3 SV=1
MSNAAVTYELIKTDKQTGARLGKLHTPHGTFDTPMFMPVGTQATVKTMSPEELKEMGAGVILSNTYHLWLRPGEEIVEEAGGLHKFMNWDQGILTDSGGFQVFSLSKLRDISEEGVHFRNHLNGAKLFLTPEKSIAIQNALGSDIMMAFDECPPFDSSFDYMKTSVERTSRWAERCLAANSHPDRQALFGIVQGGGFKELREQSARDLTSLDFPGYAIGGLSVGEPKDKMNEMLSYTTPLLPSGKPRYLMGVGSPDSLIDGAIRGIDMFDCVLPTRIARNGTCMTEHGRLVIRNAKYAHDFGPIDESCDCKVCRTYSRAYIRHLVKANETFGFRLTTYHNLYFLIKLMERVRSAIKEDRLLEFRESFFESYGFNKPDAKNF

SEQ ID NO: 61120 - protein, 381 aa, unidentified
  source 1..381: note = Sporolactobacillus nakayamae
  REGION 1..381: note = tr|A0A1I2NS14|A0A1I2NS14_9BACL Queuine tRNA-ribosyltransferase OS=Sporolactobacillus nakayamae; OX = 269670 GN=tgt PE=3 SV=1
MSHAAVTYELIKTDKQTGARLGKLHTPHGTFDTPMFMPVGTQATVKTMSPEELKEMGAGVILSNTYHLWLRPGEDIVQEAGGLHHFMNWDQGILTDSGGYQVFSLSKLRDISEEGVHFRNHLNGEKLFLSPEKSIAIQNALGSDIIMAFDECPPFDSTFDYMKASVERTSRWAERCLAANVNPDRQALFGIVQGGGYKELRELSARTLTSLDFPGYAIGGLSVGEPKDKMNEMLTYTTPLLPSDKPRYLMGVGSPDSLIDGAIRGIDMFDCVLPTRIARNGTCMTEHGRLVIRNAKYAHDFGPIDESCDCKVCRNYSRAYIRHLVKANETFGFRLTTYHNLYFLIKLMERVRSAIKEDRLLEFREAFFEAYGFNKPGAKNF

SEQ ID NO: 61121 - protein, 380 aa, unidentified
  source 1..380: note = Sporolactobacillus shoreae
  REGION 1..380: note = tr|A0A4Z0GS82|A0A4Z0GS82_9BACL Queuine tRNA-ribosyltransferase OS=Sporolactobacillus shoreae; OX = 1465501 GN=tgt PE=3 SV=1
MTVPVTYELIKTDRQTGARLGRLHTPHGVFDTPMFMPVGTQATVKTMSPRELKEMGAGVILSNTYHLWLRPGEDIIEEAGGLHQFMNWDQGILTDSGGFQVFSLSKLRDITEEGVHFRNHLNGAKMFLTPEKSIAIQNALGSDIMMSFDECPPYPATYEYMKQSVERTSRWAERCLAANSHPDRQALFGIVQGGVFKELRKQSAQELTSLDFPGYSIGGLSVGEPKPAMNEMLAYTTPFLPADKPRYLMGVGSPDSLIDGAIRGIDMFDCVLPTRIARNGTCMTSHGRLVIKNAEFARDFGPIDDQCDCEVCRNYSRAYIRHLVKANETFGFRLTSYHNLYFLIKLMEHVRSAIREDRLLEFREQFFESYGFNKPDAKNF

SEQ ID NO: 61122 - protein, 380 aa, Sporolactobacillus sp.
  REGION 1..380: note = tr|A0A4Q4IN35|A0A4Q4IN35_9BACL Queuine tRNA-ribosyltransferase OS=Sporolactobacillus sp. THM19-2; OX = 2511171 GN=tgt PE=3 SV=1
MSDPVTYELIKTDRRTGARLGRLHTPHGTFDTPMFMPVGTQATVKTMSPRELKEIGAGVILSNTYHLWLRPGEDIVREAGGLHRFMNWDRGILTDSGGFQVFSLSKIRDITEEGVHFRNHLNGAKMFLSPEKAIAIQNALGSDIMMSLDECPPYPSTWDYMKKSVERTSRWAERGLNANRNPETQALFGIVQGGVFKDLRKQSAEELTSLDFPGYSIGGLSVGEPKADMNQMLEFTVPLLPSGKPRYLMGVGSPDSLIDGVIRGIDMFDCVLPTRIARNGTCMTEHGRLVIKNAQYAHDFGPIDADCDCAVCRNYSRAYIRHLIKANETFGFRLTTYHNLYFLLKLMRRVRSAIKADRLLDFREDFFESYGFNKPDAKNF

SEQ ID NO: 61123 - protein, 380 aa, Sporolactobacillus sp.
  REGION 1..380: note = tr|A0A4Q4JIU9|A0A4Q4JIU9_9BACL Queuine tRNA-ribosyltransferase OS=Sporolactobacillus sp. THM7-7; OX = 2511172 GN=tgt PE=3 SV=1
MTDAVTYELVKKEKHTGARLGRLRTPHGTFATPMFMPVGTQATVKTMSPRELKEMGAGVILSNTYHLWLRPGEDIVKEAGGLHRFMNWDRGILTDSGGFQVFSLSKLRDITEEGVHFRNHLNGAKLFLTPEKSVAIQQALGSDIMMAFDECPPYPCAYDYMKESTERTSRWAERCLSANSRPDRQSLFGIVQGGTFKDLRQQSARDLTALDFPGYAVGGLSVGEPKQEMNEMLEETTPLLPENKPRYLMGVGSPDSLIDGAIRGIDMFDCVLPTRIARNGTCMTEHGRLVIRNAQYARDFRPIDEHCDCLVCRTYSRAYIRHLVKANETFGFRLTTYHNLYFLLKLMERVRSAIMEDRLLDFREQFFESYGFNKPNAKNF

SEQ ID NO: 61124 - protein, 381 aa, Sporolactobacillus terrae
  REGION 1..381: note = tr|A0A410D9W6|A0A410D9W6_9BACL Queuine tRNA-ribosyltransferase OS=Sporolactobacillus terrae; OX = 269673 GN=tgt PE=3 SV=1
MSQPAVTYELIKTDKKTGARLGKLHTPHGTFDTPMFMPVGTQATVKTMSPEELKEMGAGVILSNTYHLWLRPGEDIVQEAGGLHPFMNWDQGILTDSGGFQVFSLSKLRDISEEGVHFRNHLNGEKLFLSPEKSIAIQNALGSDIMMAFDECPPFDSSFDYMKASVERTSRWAARCLEANVNPDRQSLFGIVQGGGFKALRMQSARDLTSLDFPGYAIGGLSVGEPKEKMNEMLTYTTPLLPADKPRYLMGVGSPDSLIDGVIRGIDMFDCVLPTRIARNGTCMTEHGRLVIRNAKFAHDFRPIDESCDCKVCRNYSRAYIRHLVKANETFGFRLTTYHNLYFLIKLMKRVRSAIREDRLLELKASFFESYGFNKPGAKNF

SEQ ID NO: 61125 - protein, 370 aa, Sporolituus thermophilus
  REGION 1..370: note = tr|A0A1G7IFF8|A0A1G7IFF8_9FIRM Queuine tRNA-ribosyltransferase OS=Sporolituus thermophilus DSM 23256 OX=1123285 GN=tgt PE=3 SV=1
MAITFELIKQCSKTGARAGRLYTPHGVFETPIFMPVGTQATVKAMSPDELKAMGAGIILSNTYHLYLRPGHELVAEAGGLHGFMHWDRGILTDSGGFQVFSLGPLRKITEEGVAFRSHIDGSKHFLSPEKATEIQMALGADIIMAFDECVPYPAEYDYAKASTERTTRWAERCKKAHTRKDQALFGIVQGGMYKDLRAMSARDLVAMDFPGYAVGGLSVGEPKPLMYEMLEHTVPLLPANKPRYLMGVGTPDCLVEGVMYGIDMFDCVFPTRVARNGTVMTSRGKLVVKNAEYARDFRPIDPDCDCYTCRNFSRAYIRHLLKAEEIFGLRLTTIHNLHFLLNFMRNMRKAILEDRFLAFRQEFRAQYQLH

SEQ ID NO: 61126 - protein, 369 aa, Sporomusa acidovorans
  REGION 1..369: note = tr|A0A259US00|A0A259US00_9FIRM Queuine tRNA-ribosyltransferase OS=Sporomusa acidovorans DSM 3132; OX = 1123286 GN=tgt PE=3 SV=1
MAVTYELIKRCSKTGARAGRLYTPHGVFDTPIFMPVGTQATVKAMSPDELKAMGAGIILSNTYHLYLRPGHDLVAEAGGLHKFMQWDRGILTDSGGFQVFSLGPLRKITEDGVTFRSHIDGSKHFLSPEKATEVQMALGSDIIMAFDECVPFPADHEYARESTERTTRWAERCREAHTRNDQALFGIVQGGMYKDLRAMSAKDLVSLDFPGYAIGGLSVGEPKTLMYEMLEHTVPLLPENKPRYLMGVGTPDCLVEGVMRGIDMFDCVFPTRVARNGTVMTTHGRLVVKNAEFARDFRPIDPECGCYACKNFSRAYIRHLLKTEEIFGLRLTTTHNLHFLLNFMREMRNSILEDRFLAFQEEFWAHYRK

SEQ ID NO: 61127 - protein, 369 aa, Sporomusa malonica
  REGION 1..369: note = tr|A0A1W2AGX6|A0A1W2AGX6_9FIRM Queuine tRNA-ribosyltransferase OS=Sporomusa malonica OX=112901; GN = tgt PE=3 SV=1
MAITYELIKRCSKTGARVGRLYTPHGVFDTPIFMPVGTQATVKAMSPDELKAMGAGIILSNTYHLYLRPGHDLVAEAGGLHKFMQWDRGILTDSGGFQVFSLGPLRKITEDGVTFRSHIDGSKHFLSPEKATEVQMALGADIIMAFDECVPYPADHEYARQSTERTTRWAERCKKAHTRKDQALFGIVQGGMYRDLRAMSAKDLISLDFPGYAVGGLSVGEPKPLMYEMLEHTVPLLPENKPRYLMGVGTPDCLVEGVMYGIDMFDCVFPTRVARNGTVMTSRGRLVVKNAEFARDFRPIDPDCGCYACRNFSRAYIRHLLKTEEIFGMRLTTTHNLHFLLNFMKDMRKAILEDRFLAFREEFWAHYRK

SEQ ID NO: 61128 - protein, 369 aa, Sporomusa silvacetica
  REGION 1..369: note = tr|A0A259UVC4|A0A259UVC4_9FIRM Queuine tRNA-ribosyltransferase OS=Sporomusa silvacetica DSM 10669; OX = 1123289 GN=tgt PE=3 SV=1
MAITYELIKQCSKTGARVGRLYTPHGVFDTPIFMPVGTQATVKAMSPDELKDMGAGIILSNTYHLYLRPGHDLVAEAGGLHKFMQWDRGILTDSGGFQVFSLGPLRKITEEGVTFHSHIDGSKHFLSPEKATEVQMALGADIIMAFDECVPYPADHEYARQSTQRTTRWAERCKKAHTRKDQALFGIVQGGMYKDLRTMSAQDLISLDFSGYAIGGLSVGEPKPLMYEMLDHTVPLLPSNKPRYLMGVGTPDCLLEGVMYGIDMFDCVFPTRVARNGTVMTNRGRLIIKNAEFSRDFRPIDPECGCYTCRNFSRAYIRHLLKTEEIFGLRLTTTHNLYFLLNFMKEMRKAILDDRFLAFREEFWAHYRK

SEQ ID NO: 61129 - protein, 369 aa, Sporomusa sp.
  REGION 1..369: note = tr|A0A0U1L2X4|A0A0U1L2X4_9FIRM Queuine tRNA-ribosyltransferase OS=Sporomusa sp. An4 OX=411922; GN = tgt PE=3 SV=1
MAITYELIKQCSKTGARVGRLYTPHGVFDTPIFMPVGTQATVKAMSPDELKEMGAGIILSNTYHLYLRPGHDLVAEAGGLHKFMQWDRGILTDSGGFQVFSLGPLRKITEEGVTFRSHIDGSKHFLSPEKATEVQMALGADIIMAFDECVPYPADHEYARQSTQRTTRWAERCKKAHTRKDQALFGIVQGGMYKDLRTMSVQDLIALDFSGYAIGGLSVGEPKPLMYEMLDHTVPLLPSNKPRYLMGVGTPDCLLEGVMYGIDMFDCVFPTRVARNGTVMTSRGRLVIKNAEFSRDFRPIDPECGCYTCRNFSRAYIRHLLKTEEIFGLRLTTTHNLHFLLNFMKEMRKAILDDRFLAFREEFWTHYRK

SEQ ID NO: 61130 - protein, 369 aa, Sporomusa sp.
  REGION 1..369: note = tr|A0A562GRC3|A0A562GRC3_9FIRM Queuine tRNA-ribosyltransferase OS=Sporomusa sp. KB1 OX=943346; GN = tgt PE=3 SV=1
MAITYELIKQCSKTGARVGRLYTPHGVFDTPIFMPVGTQATVKAMSPDELKDMGAGIILSNTYHLYLRPGHDLVAEAGGLHKFMQWDRGILTDSGGFQVFSLGPLRKITEEGVTFRSHIDGSKHFLSPEKATEVQMALGADIIMAFDECVPYPADHEYARQSTQRTTRWAERCKKAHTRKDQALFGIVQGGMYKDLRTMSAQDLIALDFSGYAIGGLSVGEPKPLMYEMLDHTVPLLPANKPRYLMGVGTPDCLLEGVMYGIDMFDCVFPTRVARNGTVMTNRGRLVIKNAEFSRDFRPIDPECGCYTCRNFSRAYIRHLLKTEEIFGLRLTTTHNLYFLLNFMKEMRKAILDDRFLAFREEFWAHYRK

SEQ ID NO: 61131 - protein, 369 aa, Sporomusa sphaeroides
  REGION 1..369: note = tr|A0A1U7MLK8|A0A1U7MLK8_9FIRM Queuine tRNA-ribosyltransferase OS=Sporomusa sphaeroides DSM 2875; OX = 1337886 GN=tgt PE=3 SV=1
MAITYELIKRCSKTGARAGRIHTPHGVFDTPIFMPVGTQATVKAMSPDELKAMGAGIILSNTYHLYLRPGHDLVAEAGGLHKFMQWDRAILTDSGGFQVFSLGPLRKITEDGVTFRSHIDGSKHFLSPEKATEVQMALGADIIMAFDECVPYPAEHEYARQSTERTTRWAERCRKAHTRKDQALFGIVQGGMYKDLRTMSARDLVSLDFPGYAIGGLSVGEPKPLMYEMLEHTVPLLPQNKPRYLMGVGTPDCLLEGVMYGIDMFDCVFPTRVARNGTVMTNKGRLVVKNAEFARDFRPIDPDCNCYTCRNFSRAYIRHLLKTEEIFGLRLTTTHNLHFLVNFMKEMRQSILDERFLEFREEFWAYYHK

SEQ ID NO: 61132 - protein, 369 aa, Sporomusa termitida
  REGION 1..369: note = tr|A0A517DU77|A0A517DU77_9FIRM Queuine tRNA-ribosyltransferase OS=Sporomusa termitida OX=2377; GN = tgt PE=3 SV=1
MAITYELIKRCPQTGARAGRLYTPHGVFDTPIFMPVGTQATVKAMSPDELKAMGAGIILSNTYHLYLRPGHDLVAEAGGLHKFMQWDRGILTDSGGFQVFSLGPLRKITEEGVTFRSHIDGSKHFLSPEKAVEVQMALGADIIMAFDECVPYPADHAYARQSTERTTRWAERCRQAHTRKDQALFGIVQGGMYKDLRSLSVTDLISLNFPGYAVGGLSVGEPKPLMYEMLEHTVPLLPANKPRYLMGVGTPDCLLEGVMYGIDMFDCVFPTRVARNGTVMTSRGRLVVKNAEFARDFQPLDPDCGCYTCRNFSRAYIRHLLKTEEIFGLRLTTTHNLHFLLNFMQDMRKSILEDRFLAFREEFWSHYRK

SEQ ID NO: 61133 - protein, 370 aa, unidentified
  source 1..370: note = Sporomusaceae bacterium
  REGION 1..370: note = tr|A0A402BPI1|A0A402BPI1_9FIRM Queuine tRNA-ribosyltransferase OS=Sporomusaceae bacterium; OX = 1917525 GN=tgt PE=3 SV=1
MAITFELVKRCSKTGARAGRLYTPHGVFDTPIFMPVGTQATVKAMSPDELKAMGAGIILSNTYHLYLRPGHDLVAEAGGLHNFMQWDRGILTDSGGFQVFSLGPLRKITEDGVTFRSHLDGSKHFLSPEKAIEVQMALGADIIMAFDECVPHPAEHDYARQSTERTTRWAERCKKAHTRKDQALFGIVQGGMYKDLRSMSVRDLVSLDFPGYAVGGLSVGEPKPLMYEMLEHTVPQLPINKPRYLMGVGTPDCLVEGVMYGIDMFDCVFPTRVARNGTVMTSRGRLVVKNAEYARDFRPIDPECGCYTCRNFSRAYVRHLLKTEEIFGLRLTTMHNLHFLLDFMKRMRQAIIEDRFVAFRQEFLAHYQLR

SEQ ID NO: 61134 - protein, 379 aa, Sporosarcina globispora
  REGION 1..379: note = tr|A0A0M0GBL9|A0A0M0GBL9_SPOGL Queuine tRNA-ribosyltransferase OS=Sporosarcina globispora OX=1459; GN = tgt PE=3 SV=1
MTAIRYELIKTCKQTGARLGRVHTPHGSFETPVFMPVGTLATVKTMSPEELVEMGAGIILSNTYHLWLRPGQEIVEEAGGLHKFMNWDRAILTDSGGFQVFSLSEFRKIEEEGVHFRNHLNGDKLFLSPEKAMAIQNSLGSDIMMAFDECPPYPASFDYMKKSVERTSRWAERCLQAHKRQNDQGLFGIVQGGEYEELRKQSARDLTSLDFPGYAVGGLSVGEPKDVMNRVLEFTTPLLPSDKPRYLMGVGSPDSLIDGSIRGIDMFDCVLPTRIARNGTLMTSNGRLVVKNAKFARDFGPIDENCDCYTCRNYSRAYIRHLIRCDETFGIRLTTYHNLYFLLKLMEQVRQAIREDRLGDFREEFFERYGFNKPNAKNF

SEQ ID NO: 61135 - protein, 379 aa, Sporosarcina luteola
  REGION 1..379: note = tr|A0A511Z4J6|A0A511Z4J6_9BACL Queuine tRNA-ribosyltransferase OS=Sporosarcina luteola OX=582850; GN = tgt PE=3 SV=1
MAAITYEHIKTCKQTGARLGIVHTPHGSFETPAFMPVGTQATVKTMSPEELKEMGAGIILSNTYHLWLRPGHDIIKEAGGLHKFMNWDRPILTDSGGFQVFSLSDFRKIEEEGVHFRHHLNGSKLFLSPEKAMEIQNALGSDIMMAFDECPPYPATYEYMKASVERTSRWAERCLKAHARPEDQGLFGIVQGGEFEELRKQSAKDLVSLDFPGYAIGGLSVGEPKDVMNRALEFTTPLLPENKPRYLMGVGSPDSLIDGAIRGVDMFDCVLPTRIARNGTLMTSEGRLVVKNAKYERDFGPLDPNCDCYACKNYSRAYIRHLIRANETFGIRLTSYHNLHFLLRLMEQIRDAIRNDRLGDFREEFFEQYGFNKPNAKNF

SEQ ID NO: 61136 - protein, 379 aa, Sporosarcina newyorkensis
  REGION 1..379: note = tr|F9DVG8|F9DVG8_9BACL Queuine tRNA-ribosyltransferase OS=Sporosarcina newyorkensis 2681; OX = 1027292 GN=tgt PE=3 SV=1
MAAITYEHIKTCKQTGARLGIVHTPHGSFETPAFMPVGTQASVKTMAPEELKEMGAGIILSNTYHLWLRPGHEIVKEAGGLHKFMNWDRPILTDSGGFQVFSLSKFRDIKEEGVHFRNHINGDKLFLSPEKAMEIQNALGSDIMMAFDECPPFPATHEYMKASVERTSRWAERCLEAHQRSGDQGLFGIVQGGEYEDLRKQSAKDLVSLDFPGYAIGGLSVGEPKDVMNRALEFTTPLLPENKPRYLMGVGSPDSLIDGAIRGIDMFDCVLPTRIARNGTLMTSEGRLVVKNAKYERDFGPLDPNCDCYACKNYSRAYIRHLIRAGETFGIRLTSYHNLHFLLNLMEQVRQAIREDRLGDFREEFFEQYGFNKPNAKNF

SEQ ID NO: 61137 - protein, 379 aa, Sporosarcina newyorkensis; identical to SEQ ID NO: 61136
  REGION 1..379: note = tr|A0A1T4XM53|A0A1T4XM53_9BACL Queuine tRNA-ribosyltransferase OS=Sporosarcina newyorkensis; OX = 759851 GN=tgt PE=3 SV=1

SEQ ID NO: 61138 - protein, 379 aa, Sporosarcina pasteurii
  REGION 1..379: note = tr|A0A380BTZ5|A0A380BTZ5_SPOPA Queuine tRNA-ribosyltransferase OS=Sporosarcina pasteurii OX=1474; GN = tgt PE=3 SV=1
MTAIRYEHIKTCKQTGARLGIVHTPHGSFETPAFMPVGTQATVKTMSPEELKAMDAGIILSNTYHLWLRPGHDIVKEAGGLHKFMNWDRPILTDSGGFQVFSLSKFRTIEEEGVHFRHHLNGSKLFLSPEKATEIQNALGADIMMAFDECPPYPATYDYMKASVERTSRWAERCLNAHGRPHDQALFGIVQGGEFEALRKQSAKDLISMDFPGYAIGGLSVGESKEVMNEVLEFTTPLLPEDKPRYLMGVGSPRSLIDGAIRGVDMFDCVLPTRIARNGTLMTSKGRLVVRNATYKRDYGPIDENCTCYTCQNYSRAYIHHLIRADETFGLRLTSYHNLHFLLNMMEQVREAIRQDRLGDFRDEFFEQYGFNKPNAKNF

SEQ ID NO: 61139 - protein, 379 aa, Sporosarcina psychrophila
  REGION 1..379: note = tr|A0A127VXL7|A0A127VXL7_SPOPS Queuine tRNA-ribosyltransferase OS=Sporosarcina psychrophila; OX = 1476 GN=tgt PE=3 SV=1
MTAVTYEHIKTCKQTGARLGIVHTPHGSFETPAFMPVGTQATVKTLSPEELKEVGAGIILSNTYHLWLRPGQDIIEEAGGLHKFMNWDRPILTDSGGFQVFSLSEFRKIEEEGVHFRHHLNGSKLFLSPEKAMEIQNSLGADIMMAFDECPPFPATREYMKASVERTSRWAERCLGAHARPADQALFGIIQGGEFEDLRAQSAKDLVSLDFPGYAIGGLSVGEPKDIMNRILEHTTPLLPQDKPRYLMGVGSPDSLIDGAIRGIDMFDCVLPTRIARNGTLMTSEGRLNIRNAKFERDFRPLDEKCSCHVCKTYSRAYIRHLIRADETFGIRLTSYHNLHFLLNLMEQVRDAIRHDRLGDFREEFFESYGFNKPNAKNF

SEQ ID NO: 61140 - protein, 379 aa, Sporosarcina sp.
  REGION 1..379: note = tr|A0A3D8YUZ3|A0A3D8YUZ3_9BACL Queuine tRNA-ribosyltransferase OS=Sporosarcina sp. BI001-red; OX = 2282866 GN=tgt PE=3 SV=1
MPAVTYEHIKTCKQTGARLGIVHTPHGSFETPAFMPVGTMATVKTMSPEELKEIGAGIILSNTYHLWLRPGHEIIREAGGLHKFMNWDRPILTDSGGFQVFSLSDMRKIEEEGVHFRHHLNGSKLFLSPEKAMDIQNALGSDIMMAFDECPPFPATYEYMKSSVERTSRWAERCLNAHQRPNDQGLFGIVQGGEFEELRKQSAKDLTSLDFPGYAIGGLSVGEPKDIMNRVLEFTTPLLPADKPRYLMGVGSADSLIDGAIRGVDMFDCVLPTRIARNGTLMTSNGRVVIKNAKYERDFGPIDENCDCHTCKNYSRAYIRHLIKCNETFGLRLASYHNLYFLLNLMEQIRDAIRNDRLGDFREEFFEQYGFNKPNAKNF

SEQ ID NO: 61141 - protein, 379 aa, Sporosarcina sp.
  REGION 1..379: note = tr|A0A5B0DER3|A0A5B0DER3_9BACL Queuine tRNA-ribosyltransferase OS=Sporosarcina sp. ANT_H38; OX = 2597358 GN=tgt PE=3 SV=1
MTAVTYEHIKTCKQTGARLGIVHTPHGSFETPAFMPVGTQATVKTLSPEELKEVGAGIILSNTYHLWLRPGQDIIEEAGGLHKFMNWDRPILTDSGGFQVFSLSEFRKIEEEGVHFRHHLNGSKLFLSPEKAMEIQNSLGADIMMAFDECPPFPATREYMKASVERTSRWAERCLGAHARPADQALFGIIQGGEFEELRAQSAKDLVSLDFPGYAIGGLSVGEPKDIMNRILEHTTPLLPQDKPRYLMGVGSPDSLIDGAIRGIDMFDCVLPTRIARNGTLMTSEGRLNIRNAKFERDFRPLDEKCSCHVCKTYSRAYIRHLIKADETFGIRLTSYHNLHFLLNLMEQVRDAIRHDRLGDFREEFFESYGFNKPNAKNF

SEQ ID NO: 61142 - protein, 381 aa, unidentified
  source 1..381: note = Unknown
  REGION 1..381: note = tr|A0A328EFR6|A0A328EFR6_9BACT Queuine tRNA-ribosyltransferase OS=SR1 bacterium human oral taxon HOT-345 OX=1540874 GN=tgt PE=3 SV=1
MSKLNFKILKQKGKARVGEITLNGISLKTPIFMPVGTKATIKGLILDLLQDSHYIGNQIEPIKLILANTFHLYLRPGSKIVQAAGGLHQFENWKDGLILTDSGGFQVFSLGLANQKFNDQKHTHKVGIKLTEEGVKFRSPYDGSKHIFTPENVVDTQCELGSDIMMVLDVCSPTGSDKKTIEKHIAMTHRRAKRAFEHFKPKYEEARGVLFPIVQGGTYLDLRTQSAEYLSQFARDGIAIGGVSVGESRELIEQVIAHTAPLLPNEKPRYLMGVGTPEDLRFAIEQGVDMFDCVAATRLGRHGIAFSDQGNIKITNSDFRTDFSPLTENCDCYTCRNFSKAYLCHLIREQETLGGSLVGLHNIVYLNRILEGRKKRFLEEN

SEQ ID NO: 61143 - protein, 378 aa, Stakelama pacifica
  REGION 1..378: note = tr|A0A4V3BTK2|A0A4V3BTK2_9SPHN Queuine tRNA-ribosyltransferase OS=Stakelama pacifica OX=517720; GN = tgt PE=3 SV=1
MTSRFDFQIAATDGAARTGTITMQRGTIRTPAFMPVGTAATVKAMKPADVRAGGADIILGNTYHLMLRPTAERIDRLGGLHKFMGWDRPILTDSGGYQVMSLSELTKRSEEGVVFKSHLDGSRHLMSPERSMEIQRLLGSDIVMAFDELVPTDTTRDIQAKAMERSMRWAKRSREGFDSGEAHAARAALFGIQQGALDEGLRKTSADALIDIGFDGYAIGGLAVGEGQEAMFGVLDYAPGQLPADKPRYLMGVGKPDDIVGAVERGVDMFDCVMPTRSGRTGQAFTREGPINIRNARFAEDTGPLDPECRCPACQGWSRAYIHHLVRAGEILGAMLMTEHNLFFYQALMADLRDAIAGGALKTFANDFRARYIREKQQ

SEQ ID NO: 61144 - protein, 368 aa, unidentified
  source 1..368: note = Stanieria cyanosphaera
  REGION 1..368: note = tr|K9XW52|K9XW52_STAC7 Queuine tRNA-ribosyltransferase OS=Stanieria cyanosphaera (strain ATCC 29371 / PCC 7437) OX=111780 GN=tgt PE=3 SV=1
MGFSFECQASCSHTQARVGLFHTPHGVVETPRFMPVGTLATVKGITPRQLKDAQAQMILANTYHLHLQPGEKIIEQAGGLHRFMAWKRPILTDSGGFQVFSLSQLRKITETGVVFRSPRDGSMIELTPEKSIQIQNALGADVIMAFDECPPADASKSELEASTDRTYRWLERCIQAHQRPQEQALFGIVQGGIHLDLRAKSARKLVALDLPGYAIGGVSVGEAPELINATVKYTTPLLPKEKPRYLMGVGTYREMVNAIASGVDLFDCVIPTRFGRHGTALVNGTRINIKNAQYREDFTPLDPTCPCYTCQNFSRAYLNHLVRSREMLGYILLSLHNITELIRFTQRIRDAIKSDRFVAEFSYWLNDY

SEQ ID NO: 61145 - protein, 368 aa, unidentified
  source 1..368: note = Stanieria sp.
  REGION 1..368: note = tr|A0A140KAM4|A0A140KAM4_9CYAN Queuine tRNA-ribosyltransferase OS=Stanieria sp. NIES-3757; OX = 1807358 GN=tgt PE=3 SV=1
MGFSFECQASCSHTQARVGLFHTPHGVVETPRFMPVGTLATVKGITPRQLKDAQAQMILANTYHLHLQPGENIVAQAGGLHRFMAWDRPILTDSGGFQVFSLSQLRKITEAGVVFRSPRDGSIIELTPEKSIQIQNALGADVIMAFDECPPGNASKSEIETSTERTYRWLERCIQAHQRPQEQALFGIVQGGVHLDLRAKSASQLVALDLPGYAIGGVSVGEAPELINATVRHTTPLLPKEKPRYLMGVGTYREMVNAIAFGVDLFDCVIPTRFGRHGTALVNGTRINIKNAQYREDFTPLDSTCPCYACQNFSRAYLNHLVRSREMLGYILLSLHNVNELIRFTQRIRDAIKSDRFVAEFSNWLDDC

SEQ ID NO: 61146 - protein, 379 aa, Staphylococcus agnetis
  REGION 1..379: note = tr|A0A2T4MJB4|A0A2T4MJB4_9STAP Queuine tRNA-ribosyltransferase OS=Staphylococcus agnetis; OX = 985762 GN=tgt PE=3 SV=1
MPAVTYEHIKTCKQSGARLGIVHTPHGSFETPMFMPVGTKATVKTMSPEDLKAMEAKIILSNTYHLWLQPGNDIVKKAGGLHKFMNWDGPILTDSGGFQVFSLSDLRKISEEGVEFRHHANGSKLFLSPEDSIKIQNDLGSDIIMAFDECPPMPAEYQYVKDSIERTTRWAKRCKDAHQRPEDQALFGIIQGGEYKDLRQQSAEDLVKLDFPGYAIGGLSVGEPKPVMYDMVEHTVQFMPENKPRYLMGVGSPDALIECSIRGMDMFDCVLPTRIARNGTCMTSHGRLVVKNAKFKDDFRPLDENCDCYTCKNYTRAYLRHLIKADETFGIRLTTYHNLHFLLKLMENIRQAIREDRLLDFKEEFFEQYGLNVENPKNF

SEQ ID NO: 61147 - protein, 379 aa, Staphylococcus agnetis
  REGION 1..379: note = tr|A0A2T4MNN3|A0A2T4MNN3_9STAP Queuine tRNA-ribosyltransferase OS=Staphylococcus agnetis; OX = 985762 GN=tgt PE=3 SV=1
MPAVTYEHIKTCKQSGARLGIVHTPHGSFETPMFMPVGTKATVKTMSPEDLKAMEAKIILSNTYHLWLQPGNDIVKKAGGLHKFMNWDGPILTDSGGFQVFSLSDLRKISEEGVEFRHHANGSKLFLSPEDSIKIQNDLGSDIIMAFDECPPMPAEYQYVKDSIERTTRWAKRCKDAHQRPEDQALFGIIQGGEYKDLRQQSAEELVKLDFPGYAIGGLSVGEPKPVMYDMVEHTVQFMPKNKPRYLMGVGSPDALIECSIRGMDMFDCVLPTRIARNGTCMTSHGRLVVKNAKFKDDFSPLDENCDCYTCKNYTRAYLRHLIKADETFGIRLTTYHNLHFLLKLMENIRQAIREDRLLDFKEEFFEQYGLNVENPKNF

SEQ ID NO: 61148 - protein, 379 aa, unidentified
  source 1..379: note = Staphylococcus argensis
  REGION 1..379: note = tr|A0A2K4FFM9|A0A2K4FFM9_9STAP Queuine tRNA-ribosyltransferase OS=Staphylococcus argensis; OX = 1607738 GN=tgt PE=3 SV=1
MPAVTYEHIKTCKQSGARLGIVHTPHGSFETPMFMPVGTKATVKTMSPEELHQMEAKIILGNTYHLWLQPGNDIIRKSGGLHQFMNWDGPILTDSGGYQVFSLSNLRQISEEGVAFRHHKNGSKLFLSPEKSMAIQNDLGSDIMMAFDECPPMPAEYQYVKDSIERTSRWAKRCLEAHQRPEEQALFGIIQGGEYKDLRKQSAEELVALDFPGYAIGGLSVGEPKPTMYEMVEYTEQFMPFDKPRYLMGVGSPDALIECSIRGMDMFDCVLPTRIARNGTCMTSEGRLVIKNAKYKDDLGSLDSNCDCYTCRNYSRAYIRHLVKAEETFGIRLTTYHNLHFLLKLMEQIRQAIREDRLLDFKEEFFEQYGLNVDNPKNF

SEQ ID NO: 61149 - protein, 379 aa, unidentified
  source 1..379: note = Staphylococcus argenteus
  REGION 1..379: note = tr|A0A5B8LB35|A0A5B8LB35_9STAP Queuine tRNA-ribosyltransferase OS=Staphylococcus argenteus; OX = 985002 GN=tgt PE=3 SV=1
MPAVTYEHIKTCKQSGARLGIVHTPHGSFETPMFMPVGTKATVKTMSPEELRQIEAKIILGNTYHLWLQPGNDIIKHAGGLHKFMNWDGPILTDSGGFQVFSLSNLRKITEEGVEFRHHTNGSKLFLSPEKSMQIQNDLGSDIMMAFDECPPMPAEYNYVKKSIERTTRWAKRCLDAHQRPEDQALFGIIQGGEYEDLREQSAKDLVELDFPGYAIGGLSVGEPKPVMYKMVEHTEQFMPKDKPRYLMGVGSPDALIECSIRGMDMFDCVLPTRIARNGTCMTSQGRLVIKNAKFADDLRPLDENCDCYTCQNYSRAYIRHLIKAEETFGIRLTTIHNLHFLLKLMEDIRQAIREDRLLDFKDEFFEQYGLNVENPKNF

SEQ ID NO: 61150 - protein, 379 aa, unidentified
  source 1..379: note = Staphylococcus argenteus
  REGION 1..379: note = tr|A0A380CC12|A0A380CC12_9STAP Queuine tRNA-ribosyltransferase OS=Staphylococcus argenteus; OX = 985002 GN=tgt PE=3 SV=1
MPAVTYEHIKTCKQSGARLGIVHTPHGSFETPMFMPVGTKATVKTMSPEELRQIEAKIILGNTYHLWLQPGNDIIKHAGGLHKFMNWDGPILTDSGGFQVFSLSNLRKITEEGVEFRHHTNGSKLFLSPEKSMQIQNDLGSDIMMAFDECPPMPAEYDYVKKSIERTTRWAKRCLDAHQRPEDQALFGIIQGGEYEDLREQSAKDLVELDFPGYAIGGLSVGEPKPVMYKMVEHTEQFMPKDKPRYLMGVGSPDALIECSIRGMDMFDCVLPTRIARNGTCMTSQGRLVIKNAKFADDLRPLDENCDCYTCQNYSRAYIRHLIKAEETFGIRLTTIHNLHFLLKLMEDIRQAIREDRLLDFKDEFFEQYGLNVENPKNF

SEQ ID NO: 61151 - protein, 379 aa, Staphylococcus arlettae
  REGION 1..379: note = tr|A0A2T7BWZ8|A0A2T7BWZ8_9STAP Queuine tRNA-ribosyltransferase OS=Staphylococcus arlettae; OX = 29378 GN=tgt PE=3 SV=1
MPAVTYEHIKTCKQSGARLGIVHTPHGSFETPMFMPVGTKATVKTMSPEELHNMEAKIILGNTYHLWLQPGNDIIRKSGGLHQFMNWNGPILTDSGGFQVFSLSNLRNISEEGVEFRHHTNGSKLFLSPEKAMQIQNDLGSDIMMAFDECPPMPAEYKYVKDSIERTTRWAERCLQAHSRPEDQALFGIIQGGEYKDLRQQSAEELVALDFPGYAIGGLSVGEPKPVMYDMVEHTEQFMPKDKPRYLMGVGSPDALIECSIRGMDMFDCVLPTRIARNGTCMTSEGRVVIKNAKYAEDFGPLDPDCDCYTCKNYSRAYLRHLIKAEETFGIRLTTYHNLHFLLKLMENVRQAIREDRLLDFKEEFFEQYGLNVDNPKNF

SEQ ID NO: 61152 - protein, 379 aa, Staphylococcus aureus
  REGION 1..379: note = sp|Q2FXT6|TGT_STAA8 Queuine tRNA-ribosyltransferase; OS = Staphylococcus aureus (strain NCTC 8325) OX=93061; GN = tgt PE=3 SV=1
MPAVTYEHIKTCKQSGARLGIVHTPHGSFETPMFMPVGTKATVKTMSPEELRQIEAKIILGNTYHLWLQPGNDIIKHAGGLHKFMNWDGPILTDSGGFQVFSLSNLRKITEEGVEFRHHTNGSKLFLSPEKSMQIQNDLGSDIMMAFDECPPMPAEYDYVKKSIERTTRWAKRCLDAHQRPEDQALFGIIQGGEYEDLREQSAKDLVELDFPGYAIGGLSVGEPKPVMYKMVEHTEQFMPKDKPRYLMGVGSPDALIECSIRGMDMFDCVLPTRIARNGTCMTSQGRLVIKNAKFADDLRPLDENCDCYTCQNYSRAYIRHLIKAEETFGIRLTTIHNLHFLLKLMEDIRQAIREDRLLDFKEEFFEQYGLNVENPKNF

SEQ ID NO: 61153 - protein, 379 aa, Staphylococcus aureus; identical to SEQ ID NO: 61152
  REGION 1..379: note = sp|Q6GG65|TGT_STAAR Queuine tRNA-ribosyltransferase; OS = Staphylococcus aureus (strain MRSA252) OX=282458 GN=tgt; PE = 3 SV=1

SEQ ID NO: 61154 - protein, 379 aa, Staphylococcus auricularis
  REGION 1..379: note = tr|A0A2T4M6C4|A0A2T4M6C4_9STAP Queuine tRNA-ribosyltransferase OS=Staphylococcus auricularis; OX = 29379 GN=tgt PE=3 SV=1
MPAVTYEHIKTCKQSGARLGIVHTPHGSFETPMFMPVGTQATVKTMSPEELHEMNTKIILGNTYHLWLQPGNDIVRKSGGLHQFMNWDGPILTDSGGFQVFSLSNLRKISEKGVEFRHHKNGSKLFLSPEKSMQIQNDLGSDIMMAFDECPPMPSEYQYVKDSLERTTRWAKRCLEAHQRPEDQALFGIIQGGEYKDLRKQSAEELVALDFPGYAIGGLSVGEPKPVMYDMVEYTQQFMPKDKPRYLMGVGSPDALIECSIRGMDMFDCVLPTRIARNGTCMTSHGRVVIKNAKYADDLGPLDDNCDCYTCRNYSRAYLRHLIKAEETFGIRLTTYHNLYFLLKLMENIRQAIREDRLLDFKETFFEQYGLNVDNPKNF

SEQ ID NO: 61155 - protein, 379 aa, Staphylococcus auricularis
  REGION 1..379: note = tr|A0A2T4MG44|A0A2T4MG44_9STAP Queuine tRNA-ribosyltransferase OS=Staphylococcus auricularis; OX = 29379 GN=tgt PE=3 SV=1
MPAVTYEHIKTCKQSGARLGIVHTPHGSFETPMFMPVGTQATVKTMSPEELHEMNTKIILGNTYHLWLQPGNDIVTKSGGLHQFMNWDGPILTDSGGFQVFSLSNLRKISEKGVEFRHHKNGSKLFLSPEKSMQIQNDLGSDIMMAFDECPPMPSEYQYVKDSLERTTRWAKRCLEAHQRPEDQALFGIIQGGEYKDLRKQSAEELVALDFPGYAIGGLSVGEPKPVMYDMVEYTQQFMPKDKPRYLMGVGSPDALIECSIRGMDMFDCVLPTRIARNGTCMTSHGRVVIKNAKYADDLGPLDDNCDCYTCRNYSRAYLRHLIKAEETFGIRLTTYHNLYFLLKLMENIRQAIREDRLLDFKETFFEQYGLNVDNPKNF

SEQ ID NO: 61156 - protein, 379 aa, Staphylococcus capitis
  REGION 1..379: note = tr|A0A341EQ25|A0A341EQ25_STACP Queuine tRNA-ribosyltransferase OS=Staphylococcus capitis subsp. capitis OX=72758 GN=tgt PE=3 SV=1
MPAVTYEHIKTCKQSGARLCIVHTPHGSFETPMFMPVGTKATVKTMSPEELKDIEAKIILGNTYHLWLQPGNDIIKQAGGLHQFMNWDGPILTDSGGFQVFSLSNLRKITEEGVEFRHHTNGSKLFLSPEKSMQIQNDLGSDIMMAFDECPPMPSEYDYVKNSIERTTRWAERCLKAHQRPEEQALFGIIQGGEYKDLREQSAKELVDLDFPGYAIGGLSVGEPKPVMYDMVEHTEQFMPKDKPRYLMGVGSPDALIECSIRGMDMFDCVLPTRIARNGTCMTSKGRVVIKNAKYADDLGPLDDNCDCYTCRNYSRAYIRHLIKAEETFGIRLTTIHNLHFLLKLMEDIRQAIREDRLLDFKDAFFEQYGLNVENPKNF

SEQ ID NO: 61157 - protein, 379 aa, Staphylococcus capitis
  REGION 1..379: note = tr|A0A0S4MH24|A0A0S4MH24_STACP Queuine tRNA-ribosyltransferase OS=Staphylococcus capitis OX=29388; GN = tgt PE=3 SV=1
MPAVTYEHIKTCKQSGARLGIVHTPHGSFETPMFMPVGTKATVKTMSPEELKDIEAKIILGNTYHLWLQPGNDIIKHAGGLHQFMNWDGPILTDSGGFQVFSLSNLRKITEEGVEFRHHTNGSKLFLSPEKSMQIQNDLGSDIMMAFDECPPMPSEYDYVKNSIERTTRWAERCLKAHQRPEDQALFGIIQGGEYKDLREQSAKELVDLDFPGYAIGGLSVGEPKPVMYDMVEHTEQFMPKDKPRYLMGVGSPDALIECSIRGMDMFDCVLPTRIARNGTCMTSKGRVVIKNAKYADDLGPLDDNCDCYTCRNYSRAYIRHLIKAEETFGIRLTTIHNLHFLLKLMEDIRQAIREDRLLDFKDAFFEQYGLNVENPKNF

SEQ ID NO: 61158 - protein, 379 aa, Staphylococcus caprae
  REGION 1..379: note = tr|C5QT25|C5QT25_9STAP Queuine tRNA-ribosyltransferase OS=Staphylococcus caprae M23864:W1; OX = 525378 GN=tgt PE=3 SV=1
MPAVTYEHIKTCKQSGARLGIVHTPHGSFETPMFMPVGTKATVKTMSPEELRDIEAKIILGNTYHLWLQPGNDIIKRAGGLHQFMNWDGPILTDSGGFQVFSLSNLRKITEEGVEFRHHTNGSKLFLSPEKSMQIQNDLGSDIMMAFDECPPMPSEYDYVKNSIERTTRWAERCLKAHQRPEDQALFGIIQGGEYKDLREQSARELVDLDFPGYAIGGLSVGEPKPVMYEMVEHTEQFMPKDKPRYLMGVGSPDALIECSIRGMDMFDCVLPTRIARNGTCMTTKGRVVIKNAKYADDLGPLDEHCDCYTCRNYTRAYIRHLIKAEETFGIRLTTIHNLHFLLKLMEDIRQAIREDRLLDFKDEFFEQYGLNVENPKNF

SEQ ID NO: 61159 - protein, 380 aa, Staphylococcus carnosus
  REGION 1..380: note = sp|B9DNG7|TGT_STACT Queuine tRNA-ribosyltransferase; OS = Staphylococcus carnosus (strain TM300) OX=396513 GN=tgt; PE = 3 SV=1
MKPAVTYEHIKTCKQSGARLGIVHTPHGSFETPMFMPVGTKATVKTMSPEELHDINAKIILGNTYHLWLQPGNELIKRAGGLHQFMNWDGPILTDSGGFQVFSLSNLRKITEEGVYFRHHKNGSKLFLSPEKSMEIQNDLGSDIMMAFDECPPMPAEYKYVKDSIERTTRWAERCLKAHARPEDQALFGIIQGGEYKDLRQQSAEELVKLDFPGYAIGGLSVGEPKPVMYDMVEHTEQFMPKDKPRYLMGVGSPDALIECSIRGMDMFDCVLPTRIARNGTCMTSEGRVVIKNAKYADDLGPLDPNCDCYTCRNYSRAYLRHLIKAEETFGIRLTTYHNLYFLLKLMEDIRQAIREDRLLDFKEEFFEQYGLNVENPKNF

SEQ ID NO: 61160 - protein, 380 aa, Staphylococcus carnosus; identical to SEQ ID NO: 61159
  REGION 1..380: note = tr|A0A380F4Y6|A0A380F4Y6_STACA Queuine tRNA-ribosyltransferase OS=Staphylococcus carnosus subsp. utilis OX=147449 GN=tgt PE=3 SV=1

SEQ ID NO: 61161 - protein, 379 aa, Staphylococcus chromogenes
  REGION 1..379: note = tr|A0A4U0DKX5|A0A4U0DKX5_STACR Queuine tRNA-ribosyltransferase OS=Staphylococcus chromogenes; OX = 46126 GN=tgt PE=3 SV=1
MSAVTYEHIKTCKQSGARLGIVHTPHGSFETPMFMPVGTKATVKTMSPEELKQMEAKIILGNTYHLWLQPGNDIVKKAGGLHQFMNWDGPILTDSGGFQVFSLSDLRKITEEGVEFRHHANGSKLFLSPEDSIRIQNDLGSDIIMAFDECPPMPAEYKYVKDSIERTTRWAERCKKAHQRPEDQALFGIIQGGEYKDLRQQSAEDLVKLDFPGYAIGGLSVGEPKPVMYDMVEHTVQFMPENKPRYLMGVGSPDALIECSIRGMDMFDCVLPTRIARNGTCMTSEGRLVVKNAKFKDDFRPLDENCDCYTCKNYTRAYLRHLIKADETFGIRLTTYHNLHFLLKLMENIRQAIREDRLLDFKEEFFEQYGLNVENPKNF

SEQ ID NO: 61162 - protein, 379 aa, Staphylococcus chromogenes
  REGION 1..379: note = tr|A0A2T4M1T7|A0A2T4M1T7_STACR Queuine tRNA-ribosyltransferase OS=Staphylococcus chromogenes; OX = 46126 GN=tgt PE=3 SV=1
MPAVTYEHIKTCKQSGARLGIVHTPHGSFETPMFMPVGTKATVKTMSPEELKQMEAKIILGNTYHLWLQPGNDIVKKAGGLHQFMNWDGPILTDSGGFQVFSLSDLRKITEEGVEFRHHANGSKLFLSPEDSIRIQNDLGSDIIMAFDECPPMPAEYKYVKDSIERTTRWAERCKKAHQRPEDQALFGIIQGGEYKDLRQQSAEDLVKLDFPGYAIGGLSVGEPKPVMYDMVEHTVQFMPENKPRYLMGVGSPDALIECSIRGMDMFDCVLPTRIARNGTCMTSEGRLVVKNAKFKDDFRPLDENCDCYTCKNYTRAYLRHLIKADETFGIRLTTYHNLHFLLKLMENIRQAIREDRLLDFKEEFFEQYGLNVKNPKNF

SEQ ID NO: 61163 - protein, 379 aa, Staphylococcus cohnii; identical to SEQ ID NO: 52313
  REGION 1..379: note = tr|A0A3A0JDK4|A0A3A0JDK4_9STAP Queuine tRNA-ribosyltransferase OS=Staphylococcus cohnii OX=29382; GN = tgt PE=3 SV=1

SEQ ID NO: 61164 - protein, 379 aa, Staphylococcus cohnii; identical to SEQ ID NO: 52313
  REGION 1..379: note = tr|A0A0M2NUY9|A0A0M2NUY9_STACC Queuine tRNA-ribosyltransferase OS=Staphylococcus cohnii subsp. cohnii OX=74704 GN=tgt PE=3 SV=1

SEQ ID NO: 61165 - protein, 380 aa, Staphylococcus condimenti; identical to SEQ ID NO: 61159
  REGION 1..380: note = tr|A0A143P7Y6|A0A143P7Y6_9STAP Queuine tRNA-ribosyltransferase OS=Staphylococcus condimenti; OX = 70255 GN=tgt PE=3 SV=1

SEQ ID NO: 61166 - protein, 379 aa, Staphylococcus delphini
  REGION 1..379: note = tr|A0A2A4GWR5|A0A2A4GWR5_9STAP Queuine tRNA-ribosyltransferase OS=Staphylococcus delphini; OX = 53344 GN=tgt PE=3 SV=1
MPAVTYEHIKTCKQSGARLGIVHTPHGSFETPMFMPVGTKATVKTMSPEELKQMNTKILLGNTYHLWLQPGNDIVKQAGGLHKFMNWDGPILTDSGGFQVFSLSNLRKITEEGVEFRHHTNGSKLFLSPEDSIKIQNDLGSDIIMAFDECPPMPAEYDYVKNSLERTTRWAERCLAAHQRPEDQALFGIIQGGEYKDLRQQSAEELVKLDFPGYAIGGLSVGEPKPVMYEMVEHTEQFMPKDKPRYLMGVGSPDALIECSIRGMDMFDCVLPTRIARNGTCMTSTGRLVVKNAQFKDDFRPLDENCDCYTCQNYTRAYLRHLIKADETFGIRLTTYHNLHFLLKLMENIRQAIREDRLLDFKEEFFEQYGLNVDNPKNF

SEQ ID NO: 61167 - protein, 379 aa, Staphylococcus delphini
  REGION 1..379: note = tr|A0A2A4HE35|A0A2A4HE35_9STAP Queuine tRNA-ribosyltransferase OS=Staphylococcus delphini; OX = 53344 GN=tgt PE=3 SV=1
MPAVTYEHIKTCKQSGARLGIVHTPHGSFETPMFMPVGTKATVKTMSPEELKQMNTKILLGNTYHLWLQPGNDIVKQAGGLHKFMNWDGPILTDSGGFQVFSLSNLRKITEEGVEFRHHTNGSKLFLSPEDSIKIQNDLGSDIIMAFDECPPMPAEYDYVKNSLERTTRWAERCLAAHQRPEDQALFGIIQGGEYKDLRQQSAEELVKLDFPGYAIGGLSVGEPKPVMYEMVEHTEKFMPKDKPRYLMGVGSPDALIECSIRGMDMFDCVLPTRIARNGTCMTSTGRLVVKNAQFKDDFRPLDENCDCYTCQNYTRAYLRHLIKADETFGIRLTTYHNLHFLLKLMENIRQAIREDRLLDFKEEFFEQYGLNVDNPKNF

SEQ ID NO: 61168 - protein, 379 aa, Staphylococcus devriesei
  REGION 1..379: note = tr|A0A2K4DMK0|A0A2K4DMK0_9STAP Queuine tRNA-ribosyltransferase OS=Staphylococcus devriesei; OX = 586733 GN=tgt PE=3 SV=1
MPAVTYEHIKTCKQSGARLGIVHTPHGSFETPMFMPVGTKATVKTMSPEELRQMEAQIILGNTYHLWLQPGNDIIKQAGGLHKFMNWNGPILTDSGGFQVFSLSNLRKISEEGVEFRHHTNGSKLFLSPEKSMEIQNDLGSDIMMAFDECPPMPSEYNYVKDSIERTTRWAARCLKAHKRPEDQALFGIIQGGEYKDLREQSAKELVDLDFPGYAIGGLSVGEPKPVMYDMVEHTVQYMPEDKPRYLMGVGSPDALIECSIRGMDMFDCVLPTRIARNGTCMTSSGRLVIKNAKYANDFGPLDENCDCYTCKNYSRAYIRHLIKAEETFGIRLTTIHNLHFLLKLMENIRQAIREDRLLDFKEEFFEQYGLNVDNPKNF

SEQ ID NO: 61169 - protein, 379 aa, Staphylococcus devriesei
  REGION 1..379: note = tr|A0A2T4KA18|A0A2T4KA18_9STAP Queuine tRNA-ribosyltransferase OS=Staphylococcus devriesei; OX = 586733 GN=tgt PE=3 SV=1
MPAVTYEHIKTCKQSGARLGIVHTPHGSFETPMFMPVGTKATVKTMSPEELRQMEAQIILGNTYHLWLQPGNDIIKQAGGLHKFMNWNGPILTDSGGFQVFSLSNLRKISEEGVEFRHHTNGSKLFLSPEKSMEIQNDLGSDIMMAFDECPPMPSEYKYVKDSIERTTRWAARCLKAHKRPEDQALFGIIQGGEYKDLREQSAKELVDLDFPGYAIGGLSVGEPKPVMYDMVEHTVQYMPEDKPRYLMGVGSPDALIECSIRGMDMFDCVLPTRIARNGTCMTSSGRLVIKNAKFANDFGPLDENCDCYTCKNYSRAYIRHLIKAEETFGIRLTTIHNLHFLLKLMENIRQAIREDRLLDFKEEFFEQYGLNVDNPKNF

SEQ ID NO: 61170 - protein, 379 aa, unidentified
  source 1..379: note = Staphylococcus edaphicus
  REGION 1..379: note = tr|A0A2C6WSA3|A0A2C6WSA3_9STAP Queuine tRNA-ribosyltransferase OS=Staphylococcus edaphicus; OX = 1955013 GN=tgt PE=3 SV=1
MPAVTYEHIKTCKQSGARLGIVHTPHGSFETPMFMPVGTKATVKTMSPEELHQMETKIILGNTYHLWLQPGNDIIRKSGGLHQFMNWNGPILTDSGGFQVFSLSNLRKITEEGVEFRHHTNGSKLFLSPEKSMQIQNDLGSDIMMAFDECPPMPAEYKYVKDSIERTTRWAARCLKAHERPEDQALFGIIQGGEYKDLRKQSAEELVALDFPGYAIGGLSVGEPKPVMYDMVHHTEQFMPKDKPRYLMGVGSPDALIECSIRGMDMFDCVLPTRIARNGTCMTSHGRVIIKNAKYADDLGPLDDNCDCYTCKNYSRAYIRHLIKAEETFGIRLTTYHNLHFLLKLMENIRQAIREDRLLDFKETFFEQYGLNVENPKNF

SEQ ID NO: 61171 - protein, 379 aa, Staphylococcus epidermidis
  REGION 1..379: note = sp|Q5HNR2|TGT_STAEQ Queuine tRNA-ribosyltransferase; OS = Staphylococcus epidermidis (strain ATCC 35984 / RP62A); OX = 176279 GN=tgt PE=3 SV=1
MPAVTYEHIKTCKQSGARLGIVHTPHGSFETPMFMPVGTKATVKTMSPEELRNIEAKIILGNTYHLWLQPGNDIIKHAGGLHKFMNWDGPILTDSGGFQVFSLSNLRKISEEGVEFRHHTNGSKLFLSPEKSMQIQNDLGSDIMMAFDECPPMPAEYDYVKDSIERTTRWAARCLKAHQRPGDQALFGIIQGGEYKDLREQSAKELVSLDFPGYAIGGLSVGEPKPVMYDMVEHTEQFMPKDKPRYLMGVGSPDALIECSIRGMDMFDCVLPTRIARNGTCMTSNGRLVVKNAKYADDLRPLDEQCDCYTCQHYTRAYIRHLVKAEETFGIRLTTIHNLHFLLKLMEDIRQAIREDRLLDFKDEFFEQYGLNVENPKNF

SEQ ID NO: 61172 - protein, 379 aa, Staphylococcus epidermidis; identical to SEQ ID NO: 51997
  REGION 1..379: note = tr|A0A3S4K9P4|A0A3S4K9P4_STAEP Queuine tRNA-ribosyltransferase OS=Staphylococcus epidermidis; OX = 1282 GN=tgt PE=3 SV=1

SEQ ID NO: 61173 - protein, 379 aa, Staphylococcus equorum
  REGION 1..379: note = tr|A0A1B1G7C4|A0A1B1G7C4_9STAP Queuine tRNA-ribosyltransferase OS=Staphylococcus equorum; OX = 246432 GN=tgt PE=3 SV=1
MPAVTYEHIKTCKQSGARLGIVHTPHGSFETPMFMPVGTKATVKTMSPEELHQMEAKIILGNTYHLWLQPGNDIIKKSGGLHQFMNWNGPILTDSGGFQVFSLSNLRNITEKGVEFRHHKNGSKLFLSPEKATEIQNDLGSDIMMAFDECPPMPAEYKYVKDSIERTTRWAERCLKAHKRPEDQALFGIIQGGEYKDLRKQSAEELVALDFPGYAIGGLSVGEPKPVMYDMVTHTEQFMPKDKPRYLMGVGSPDALIECSIRGIDMFDCVLPTRIARNGTCMTSHGRVTIKNAKYAEDLGPLDENCDCYTCKNYSRAYIRHLIKAEETFGIRLTTYHNLHFLLKLMENVRQAIREDRLLDFKGEFFEQYGLNVDNPKNF

SEQ ID NO: 61174 - protein, 379 aa, Staphylococcus equorum
  REGION 1..379: note = tr|A0A1E5TJI5|A0A1E5TJI5_9STAP Queuine tRNA-ribosyltransferase OS=Staphylococcus equorum; OX = 246432 GN=tgt PE=3 SV=1
MPAVTYEHIKTCKQSGARLGIVHTPHGSFETPMFMPVGTKATVKTMSPEELHQMEAKIILGNTYHLWLQPGNDIIKKSGGLHQFMNWNGPILTDSGGFQVFSLSNLRNITEKGVEFRHHKNGSKLFLSPEKATEIQNDLGSDIMMAFDECPPMPAEYKYVKDSIERTTRWAERCLKAHKRPEDQALFGIIQGGEYKDLRKQSAEELVALDFPGYAIGGLSVGEPKPVMYDMVTHTEQFMPKDKPRYLMGVGSPDALIECSIRGIDMFDCVLPTRIARNGTCMTSHGRVTIKNAKYAEDLGPLDENCDCYTCKNYSRAYIRHLIKAEETFGIRLTTYHNLHFLLKLMENVRQAIREDRLLDFKEEFFEQYGLNVDNPKNF

SEQ ID NO: 61175 - protein, 379 aa, Staphylococcus felis
  REGION 1..379: note = tr|A0A2K3ZI47|A0A2K3ZI47_9STAP Queuine tRNA-ribosyltransferase OS=Staphylococcus felis OX=46127; GN = tgt PE=3 SV=1
MPAVTYEHIKTCKQSGARLGIVHTPHGSFETPMFMPVGTKATVKTMSPEELKAMNTKILLGNTYHLWLQPGNDIVKKAGGLHQFMNWDGPILTDSGGFQVFSLSNLRKISEEGVEFRHHTNGSKLFMSPEDSIQIQNDLGSDIIMAFDECPPMPAEYDYVKDSLERTTRWAKRCLKAHQRPDEQALFGIIQGGEYKDLRKQSAQELVELDFPGYAIGGLSVGEPKPVMYEMVKYTEQFMPKDKPRYLMGVGSPDALIECSILGMDMFDCVLPTRIARNGTCMTSKGRLVVKNAQFKDDFRPLDENCDCYTCRHYTRAYLRHLIKADETFGIRLTTYHNLHFLLKLMEDVRQAIREDRLLDFKEAFYEQYGLNVENPKNF

SEQ ID NO: 61176 - protein, 379 aa, Staphylococcus fleurettii
  REGION 1..379: note = tr|A0A3S0KHF0|A0A3S0KHF0_9STAP Queuine tRNA-ribosyltransferase OS=Staphylococcus fleurettii; OX = 150056 GN=tgt PE=3 SV=1
MPAVTYEHIKTCKQSGARLGIVHTPHGSFETPMFMPVGTKATVKTMSPEELKQMNTKILLGNTYHLWLQPGNDIVKKAGGLHQFMNWDGPILTDSGGFQVFSLSNLRKITEEGVEFRHHTNGSKLFLSPEDSIKIQNDLGSDIIMAFDECPPMPAEYDYVKNSIERTTRWAERCLQAHQRPNDQALFGIIQGGEYKDLRQQSAEELVKLDFPGYAIGGLSVGEPKPVMYEMVEFTEQFMPKDKPRYLMGVGSPDALIECSIRGMDMFDCVLPTRIARNGTCMTSHGRVVVKNAQYKEDFRPLDENCDCYTCKNYSRAYLRHLIKADETFGIRLTTYHNLHFLLKLMENIRQAIREDRLLDFKEEFFEQYGLNVDNPKNF

SEQ ID NO: 61177 - protein, 379 aa, Staphylococcus fleurettii
  REGION 1..379: note = tr|A0A380FQE4|A0A380FQE4_9STAP Queuine tRNA-ribosyltransferase OS=Staphylococcus fleurettii; OX = 150056 GN=tgt PE=3 SV=1
MPAVTYEHIKTCKQSGARLGIVHTPHGSFETPMFMPVGTKATVKTMSPEELKQMEAKIILSNTYHLWLQPGSDIISKVGGLHKFMNWDGPILTDSGGFQVFSLSDMRKIEEEGVHFRHHLNGSKLFLSPEKAMHIQNDLGSDIMMAFDECPPMPSEYEYVKNSIERTSRWAERCLEAHQRPEDQALFGIIQGGEYKDLREQSAKDLVSLDFPGYAIGGLSVGEPKPVMYRMVEHTAPLMPFNKPRYLMGVGSPDALIECSIRGIDMFDCVLPTRIARNGTCMTSQGRVVIKNAKYQQDLSPLDPECDCYTCRNYTKAYLRHLIKADETFGIRLTTYHNLYFLLKLMENIRQAIREDRLLDFKDEFFEQYGLNVDNPKNF

SEQ ID NO: 61178 - protein, 65 aa, Staphylococcus gallinarum
  REGION 1..65: note = tr|A0A380FGR9|A0A380FGR9_STAGA Queuine tRNA-ribosyltransferase OS=Staphylococcus gallinarum; OX = 1293 GN=tgt_2 PE=4 SV=1
MSPEELKQMEAKIILGNTYHLWLQPGNDIIRKSGGLHQFMNWDGPILTDSGGFQVFSLSNLRKYY

SEQ ID NO: 61179 - protein, 379 aa, Staphylococcus gallinarum
  REGION 1..379: note = tr|A0A3A0W2L9|A0A3A0W2L9_STAGA Queuine tRNA-ribosyltransferase OS=Staphylococcus gallinarum; OX = 1293 GN=tgt PE=3 SV=1
MPAVTYEHIKTCKQSGARLGIVHTPHGSFETPMFMPVGTKATVKTMSPEELKQMEAKIILGNTYHLWLQPGNDIIRKSGGLHQFMNWDGPILTDSGGFQVFSLSNLRNITEKGVEFRHHTNGSKLFLSPEKSMEIQNDLGSDIMMAFDECPPMPAEYQYVKDSIERTTRWAERCLKAHKRPEDQALFGIIQGGEYKDLRQQSAEELVALDFPGYAIGGLSVGEPKPVMYDMVEHTEQFMPEDKPRYLMGVGSPDALIECSIRGMDMFDCVLPTRIARNGTCMTSEGRLIIKNAKYAEDLRPLDENCDCYTCKNYSRAYIRHLIKAEETFGIRLTTYHNLHFLLKLMENIRQAIREDRLLDFKEEFFEQYGLNVENPKNF

SEQ ID NO: 61180 - protein, 379 aa, Staphylococcus haemolyticus
  REGION 1..379: note = sp|Q4L6Y4|TGT_STAHJ Queuine tRNA-ribosyltransferase; OS = Staphylococcus haemolyticus (strain JCSC1435) OX=279808; GN = tgt PE=3 SV=1
MPAVTYEHIKTCKQSGARLGIVHTPHGSFETPMFMPVGTKATVKTMSPEELRQIEAKIILGNTYHLWLQPGNDIIKQVGGLHNFMNWDGPILTDSGGFQVFSLSNLRKITEESVEFRHHTNGLKLFLSPEKSMEIQNDLGSDIMMAFDECPPMPSEYKYVKDSIERTTRWAERCLNAHKRPEDQALFGIIQGGEYKDLREQSAKELVALDFPGYAIGGLSVGEPKPVMYEMVEHTVQYMPDDKPRYLMGVGSPDALIECSIRGMDMFDCVLPTRIARNGTCMTSNGRLVIKNAKYANDFKPLDENCDCYTCKNYSRAYIRHLIKAEETFGIRLTTIHNLHFLLKLMEDIRQAIREDRLLDFKDEFFEQYGLNVENPKNF

SEQ ID NO: 61181 - protein, 379 aa, Staphylococcus haemolyticus
  REGION 1..379: note = tr|A0A2K0A7J4|A0A2K0A7J4_STAHA Queuine tRNA-ribosyltransferase OS=Staphylococcus haemolyticus; OX = 1283 GN=tgt PE=3 SV=1
MPAVTYEHIKTCKQSGARLGIVHTPHGSFETPMFMPVGTKATVKTMSPEELRQIEAKIILGNTYHLWLQPGNDIIKQAGGLHKFMNWDGPILTDSGGFQVFSLSNLRKITEEGVEFRHHTNGSKLFLSPEKSMEIQNDLGSDIMMAFDECPPMPSEYKYVKDSIERTTRWAERCLNAHKRPEDQALFGIIQGGEYKDLREQSAKELVALDFPGYAIGGLSVGEPKPVMYEMVEHTVQYMPDDKPRYLMGVGSPDALIECSIRGMDMFDCVLPTRIARNGTCMTSNGRLVIKNAKYANDFKPLDENCDCYTCKNYSRAYIRHLIKAEETFGIRLTTIHNLHFLLKLMEDIRQAIREDRLLDFKDEFFEQYGLNVENPKNF

SEQ ID NO: 61182 - protein, 379 aa, Staphylococcus hominis
  REGION 1..379: note = tr|A0A4Q9WR46|A0A4Q9WR46_STAHO Queuine tRNA-ribosyltransferase OS=Staphylococcus hominis OX=1290; GN = tgt PE=3 SV=1
MPAVTYEHIKTCKQSGARLGIVHTPHGSFETPMFMPVGTKATVKTMSPEELRQIEARIILGNTYHLWLQPGNDIIKQAGGLHKFMNWDGPILTDSGGFQVFSLSNLRKISEEGVEFRHHTNGSKLFLSPEKSMQIQNDLGSDIMMAFDECPPMPAEYKYVKDSIERTTRWAKRCLEAHQRPEDQALFGIIQGGEYKDLREQSAKELVSLDFPGYAIGGLSVGEPKPVMYDMVEHTVQFMPEDKPRYLMGVGSPDALIECSIRGMDMFDCVLPTRIARNGTCMTSQGRLVIKNAKYADDFSPIDANCDCYTCKNYTRAYIRHLIKAEETFGIRLTTIHNLHFLLKLMEDIRQAIREDRLLDFKEEFFEQYGLNVENPKNF

SEQ ID NO: 61183 - protein, 379 aa, Staphylococcus hominis
  REGION 1..379: note = tr|A0A533IYG3|A0A533IYG3_STAHO Queuine tRNA-ribosyltransferase OS=Staphylococcus hominis OX=1290; GN = tgt PE=3 SV=1
MPAVTYEHIKTCKQSGARLGIIHTPHGSFETPMFMPVGTKATVKTMSPEELRQIEARIILGNTYHLWLQPGNDIIKQAGGLHKFMNWDGPILTDSGGFQVFSLSNLRKISEEGVEFRHHTNGSKLFLSPEKSMQIQNDLGSDIMMAFDECPPMPAEYKYVKDSIERTTRWAKRCLEAHQRPEDQALFGIIQGGEYKDLREQSAKELVSLDFPGYAIGGLSVGEPKPVMYDMVDHTVQFMPEDKPRYLMGVGSPDALIECSIRGMDMFDCVLPTRIARNGTCMTSQGRLVIKNAKYADDFSPIDANCDCYTCKNYTRAYIRHLIKAEETFGIRLTTIHNLHFLLKLMEDIRQAIREDRLLDFKEEFFEQYGLNVENPKNF

SEQ ID NO: 61184 - protein, 379 aa, Staphylococcus hyicus
  REGION 1..379: note = tr|A0A0A8HPP7|A0A0A8HPP7_STAHY Queuine tRNA-ribosyltransferase OS=Staphylococcus hyicus OX=1284; GN = tgt PE=3 SV=1
MPAVTYEHIKTCKQSGARLGIVHTPHGSFETPMFMPVGTKATVKTMSPEDLKAMEAKIILSNTYHLWLQPGNDIVKKAGGLHKFMNWDGPILTDSGGFQVFSLSDLRKITEEGVEFRHHANGSKLFLSPEDSIKIQNDLGSDIIMAFDECPPMPAEYQYVKDSIERTTRWAKRCKEAHQRPDDQALFGIIQGGEYKDLRQQSAEDLVKLDFPGYAIGGLSVGEPKPVMYDMVEHTVQFMPENKPRYLMGVGSPDALIECSIRGMDMFDCVLPTRIARNGTCMTSHGRLVVKNAKFKDDFRPLDENCDCYTCKNYTRAYLRHLIKADETFGIRLTTYHNLHFLLKLMENIRQAIREDRLLDFKEEFFEQYGLNVENPKNF

SEQ ID NO: 61185 - protein, 379 aa, Staphylococcus hyicus; identical to SEQ ID NO: 61152
  REGION 1..379: note = tr|A0A4U9YNZ5|A0A4U9YNZ5_STAHY Queuine tRNA-ribosyltransferase OS=Staphylococcus hyicus OX=1284; GN = tgt PE=3 SV=1

SEQ ID NO: 61186 - protein, 379 aa, Staphylococcus intermedius
  REGION 1..379: note = tr|A0A380G8G1|A0A380G8G1_STAIN Queuine tRNA-ribosyltransferase OS=Staphylococcus intermedius NCTC 11048 OX=1141106 GN=tgt PE=3 SV=1
MPAVTYEHIKTCKQSGARLGIVHTPHGSFETPMFMPVGTKATVKTMSPEELKQMNTKILLGNTYHLWLQPGNEIVKKAGGLHKFMNWDGPILTDSGGFQVFSLSNLRKITEEGVEFRHHTNGSKLFLSPEDSIKIQNDLGSDIIMAFDECPPMPAEYDYVKNSLERTTRWAERCLAAHQRPEDQALFGIIQGGEYKDLRQQSAEELVKLDFPGYAIGGLSVGEPKPVMYEMVEHTEQFMPKDKPRYLMGVGSPDALIECSIRGMDMFDCVLPTRIARNGTCMTSTGRLVVKNAQFKDDFRPLDENCDCYTCQNYTRAYLRHLIKADETFGIRLTTYHNLHFLLKLMENIRQAIREDRLLDFKEEFFEQYGLNVDNPKNF

SEQ ID NO: 61187 - protein, 379 aa, Staphylococcus kloosii
  REGION 1..379: note = tr|A0A151A4P1|A0A151A4P1_9STAP Queuine tRNA-ribosyltransferase OS=Staphylococcus kloosii OX=29384; GN = tgt PE=3 SV=1
MPAVTYEHIKTCKQSGARLGIVHTPHGSFETPMFMPVGTKATVKTMSPEELHQMEAKIILGNTYHLWLQPGNDIIRKSGGLHQFMNWDGPILTDSGGFQVFSLSNLRKISEEGVEFRHHTNGSKLFLSPEKAMQIQNDLGSDIMMAFDECPPMPSEYKYVKDSIERTTRWAERCLKAHNRKEDQALFGIIQGGEYKDLRQQSAEELVALDFPGYAIGGLSVGEPKPVMYDMVEHTEQYMPKDKPRYLMGVGSPDALIECSIRGMDMFDCVLPTRIARNGTCMTSEGRVVIKNAKYAEDFGPLDPNCDCYTCKNYSRAYLRHLIKAEETFGIRLTTYHNLQFLLKLMENIRQAIREDRLLDFKEEFFEQYGLNVDNPKNF

SEQ ID NO: 61188 - protein, 379 aa, Staphylococcus lentus
  REGION 1..379: note = tr|A0A4Y9KDR2|A0A4Y9KDR2_STALE Queuine tRNA-ribosyltransferase OS=Staphylococcus lentus OX=42858; GN = tgt PE=3 SV=1
MPAVTYEHIKTCKQSGARLGIVHTPHGSFETPMFMPVGTKATVKTMSPEELKQMEAKIILSNTYHLWLQPGSDIISKVGGLHKFMNWDGPILTDSGGFQVFSLSDMRKIEEEGVHFRHHLNGSKLFLSPEKATHIQNDLGSDIMMAFDECPPMPSEYDYVKKSIERTSRWAERCLEAHKHPEDQALFGIIQGGEYNDLREQSAKDLVSLDFPGYAIGGLSVGEPKPVMYRMVEHTTPLMPFNKPRYLMGVGSPDALIECSIRGIDMFDCVLPTRIARNGTCMTSQGRVVIKNAKYQTDLSPLDPECDCYTCRNYTKAYLRHLIKADETFGIRLTTYHNLYFLLKLMENVRQAIREDRLLDFKDEFFEQYGLNVDNPKNF

SEQ ID NO: 61189 - protein, 379 aa, Staphylococcus lentus
  REGION 1..379: note = tr|A0A178PIW0|A0A178PIW0_STALE Queuine tRNA-ribosyltransferase OS=Staphylococcus lentus OX=42858; GN = tgt PE=3 SV=1
MPAVTYEHIKTCKQSGARLGIVHTPHGSFETPMFMPVGTKATVKTMSPEELKQMEAKIILSNTYHLWLQPGSDIISKVGGLHKFMNWDGPILTDSGGFQVFSLSDMRKIEEEGVHFRHHLNGSKLFLSPEKATHIQNDLGSDIMMAFDECPPMPSEYDYVKKSIERTSRWAERCLEAHKRPEDQALFGIIQGGEYNDLREQSAKDLVSLDFPGYAIGGLSVGEPKPVMYRMVEHTTPLMPFNKPRYLMGVGSPDALIECSIRGIDMFDCVLPTRIARNGTCMTSQGRVVIKNAKYQTDLSPLDPECDCYTCRNYTKAYLRHLIKADETFGIRLTTYHNLYFLLKLMENVRQAIREDRLLDFKDEFFEQYGLNVDNPKNF

SEQ ID NO: 61190 - protein, 380 aa, Staphylococcus lugdunensis
  REGION 1..380: note = tr|A0A133Q2E6|A0A133Q2E6_STALU Queuine tRNA-ribosyltransferase OS=Staphylococcus lugdunensis; OX = 28035 GN=tgt PE=3 SV=1
MPAVTYEHIKTCKQSGARLGIVHTPHGSFETPMFMPVGTKATVKTMSPEELTDNIEAKIILGNTYHLWLQPGNDIIKQAGGLHKFMNWNGPILTDSGGFQVFSLSNLRKISEEGVEFRHHTNGSKLFLSPEKSMEIQNDLGSDIMMAFDECPPMPSEYKYVKDSIERTSRWAERCLKAHKRPDDQALFGIIQGGEYKDLREQSAKELVALDFPGYAIGGLSVGEPKPVMYDMVKHTEQFMPKDKPRYLMGVGSPDALIECSIRGMDMFDCVLPTRIARNGTCMTSIGRLVIKNAQFANDFRPLDENCDCYTCKNYSRAYIRHLIKAEETFGIRLTTIHNLHFLLKLMEDIRQAIREDRLLDFKEAFFEQYGLNVENPKNF

SEQ ID NO: 61191 - protein, 379 aa, Staphylococcus lugdunensis
  REGION 1..379: note = tr|A0A4Q9W9Z3|A0A4Q9W9Z3_STALU Queuine tRNA-ribosyltransferase OS=Staphylococcus lugdunensis; OX = 28035 GN=tgt PE=3 SV=1
MPAVTYEHIKTCKQSGARLGIVHTPHGSFETPMFMPVGTKATVKTMSPEELTDIEAKIILGNTYHLWLQPGNDIIKQAGGLHKFMNWNGPILTDSGGFQVFSLSNLRKISEEGVEFRHHTNGSKLFLSPEKSMEIQNDLGSDIMMAFDECPPMPSEYKYVKDSIERTSRWAERCLKAHKRPDDQALFGIIQGGEYKDLREQSAKELVALDFPGYAIGGLSVGEPKPVMYDMVKHTEQFMPKDKPRYLMGVGSPDALIECSIRGMDMFDCVLPTRIARNGTCMTSIGRLVIKNAQFANDFRPLDENCDCYTCKNYSRAYIRHLIKAEETFGIRLTTIHNLHFLLKLMEDIRQAIREDRLLDFKEAFFEQYGLNVENPKNF

SEQ ID NO: 61192 - protein, 379 aa, Staphylococcus lutrae
  REGION 1..379: note = tr|A0A1W6BJE8|A0A1W6BJE8_9STAP Queuine tRNA-ribosyltransferase OS=Staphylococcus lutrae OX=155085; GN = tgt PE=3 SV=1
MPAVTYEHIKTCKQSGARLGIVHTPHGSFETPMFMPVGTKATVKTMSPEELKQMHTQILLGNTYHLWLQPGNDIIKQAGGLHKFMNWDGPILTDSGGFQVFSLSNLRKITEEGVEFRHHTNGSKLFLSPEDSIKIQNDLGSDIIMAFDECPPMPAEYDYVKQSLERTTRWAERCLNAHQRPHDQALFGIIQGGEYKDLRQQSAEALVKLDFPGYAIGGLSVGEPKPVMYDMVEHTVQFMPENKPRYLMGVGSPDALIECSIRGMDMFDCVLPTRIARNGTCMTSTGRLVVKNAQYKNDFRPLDANCDCYTCRNYSRAYLRHLIKADETFGIRLTTYHNLHFLLKLMENIRQAIREDRLLDFKEEFFEQYGLNVDNPKNF

SEQ ID NO: 61193 - protein, 379 aa, Staphylococcus massiliensis
  REGION 1..379: note = tr|K9B583|K9B583_9STAP Queuine tRNA-ribosyltransferase OS=Staphylococcus massiliensis S46; OX = 1229783 GN=tgt PE=3 SV=1
MPAVTYEHIKTCKQSGARLGIVHTPHGSFETPMFMPVGTKATVKTMSPEDLTNMEAKIILGNTYHLWLQPGNDIIKKAGGLHKFMNWDKPILTDSGGFQVFSLSNLREIKEEGVHFRHHANGSKLFLSPEKSMEIQNDLGSDIMMAFDECPPMPAEYEYVKKSIERTTRWAERCLKAHKRPEDQALFGIIQGGEYKDLREQSAKELVALDFPGYAIGGLSVGEPKPVMYDMVEHTVKYMPHDKPRYLMGVGSPDALIECSIRGMDMYDCVLPTRIARNGTCMTSNGRLVIKNAKFQDDLRPLDENCDCYTCRNYSRAYIRHLIKAEETFGIRLTTYHNLHFLLKLMENIRQAIRDDRLLDFKEEFFEQYGLNKENPKNF

SEQ ID NO: 61194 - protein, 379 aa, Staphylococcus microti
  REGION 1..379: note = tr|A0A0D6XPN5|A0A0D6XPN5_9STAP Queuine tRNA-ribosyltransferase OS=Staphylococcus microti; OX = 569857 GN=tgt PE=3 SV=1
MPAVTYEHIKTCKQSGARLGIVHTPHGSFETPMFMPVGTKATVKTMSPEELKQMNTKILLGNTYHLWLQPGNDIVKQAGGLHKFMNWDGPILTDSGGFQVFSLSNLRKITEEGVEFRHHTNGSKLFLSPEDSIKIQNDLGSDIIMAFDECPPMPAEYKYVKDSLERTTRWAERCKKAHQRPEDQALFGIIQGGEYKDLRQQSAEALVALDFPGYAIGGLSVGEPKPVMYDMVSHTVQFMPEDKPRYLMGVGSPDALIECSIRGMDMFDCVLPTRIARNGTCMTSHGRLVVKNAQFKDDFRPLDENCDCYTCKNYTRAYLRHLIKADETFGIRLTTYHNLHFLLKLMENIRQAIREDRLLDFKEEFFEQYGLNVENPKNF

SEQ ID NO: 61195 - protein, 379 aa, Staphylococcus muscae
  REGION 1..379: note = tr|A0A240C2Y4|A0A240C2Y4_9STAP Queuine tRNA-ribosyltransferase OS=Staphylococcus muscae OX=1294; GN = tgt PE=3 SV=1
MPAVTYEHIKTCKQSGARLGIVHTPHGSFETPMFMPVGTKATVKTMSPEELKQMNTKILLGNTYHLWLQPGNDIVKQAGGLHKFMNWDGPILTDSGGFQVFSLSNLRKITEEGVEFRHHTNGSKLFLSPEDSIKIQNDLGSDIIMAFDECPPMPAEYDYVKNSLERTTRWAERCKKAHQRPEDQALFGIIQGGEYKDLRQQSAEALVALDFPGYAIGGLSVGEPKPVMYDMVEHTVQYMPEDKPRYLMGVGSPDALIECSIRGMDMFDCVLPTRIARNGTCMTSHGRLVVKNAQFKDDFRPLDENCDCYTCKNYTRAYLRHLIKADETFGIRLTTYHNLHFLLKLMEDIRQAIREDRLLDFKEEFFEQYGLNVENPKNF

SEQ ID NO: 61196 - protein, 379 aa, Staphylococcus nepalensis; identical to SEQ ID NO: 53995
  REGION 1..379: note = tr|A0A291JK28|A0A291JK28_9STAP Queuine tRNA-ribosyltransferase OS=Staphylococcus nepalensis; OX = 214473 GN=tgt PE=3 SV=1

SEQ ID NO: 61197 - protein, 379 aa, Staphylococcus pasteuri; identical to SEQ ID NO: 51997
  REGION 1..379: note = tr|A0A269XLD4|A0A269XLD4_9STAP Queuine tRNA-ribosyltransferase OS=Staphylococcus pasteuri; OX = 45972 GN=tgt PE=3 SV=1

SEQ ID NO: 61198 - protein, 379 aa, Staphylococcus pasteuri
  REGION 1..379: note = tr|A0A0M2NWX5|A0A0M2NWX5_9STAP Queuine tRNA-ribosyltransferase OS=Staphylococcus pasteuri; OX = 45972 GN=tgt PE=3 SV=1
MPAVTYEHIKTCKQSGARLGIVHTPHGSFETPMFMPVGTKATVKTMSPEELRQIEAQIILGNTYHLWLQPGNDIIKHAGGLHKFMNWNGPILTDSGGFQVFSLSNLRKISEEGVEFRHHTNGSKLFLSPEKSMQIQNDLGSDIMMAFDECPPMPSEYEYVKNSIERTTRWAERCLKAHARPEEQSLFGIIQGGEYKDLREQSAKELVELDFPGYAIGGLSVGEPKPVMYEMVEHTEQFMPKDKPRYLMGVGSPDALIECSIRGMDMFDCVLPTRIARNGTCMTSNGRLVIKNAKFADDLRPLDENCDCYTCKNYSRAYIRHLIKAEETFGIRLTTIHNLHFLLKLMEDIRQAIREDRLLDFKAEFFEQYGLNVDNPKNF

SEQ ID NO: 61199 - protein, 379 aa, unidentified
  source 1..379: note = Staphylococcus petrasii
  REGION 1..379: note = tr|A0A5F1B623|A0A5F1B623_9STAP Queuine tRNA-ribosyltransferase OS=Staphylococcus petrasii subsp. petrasii OX=1276937 GN=tgt PE=3 SV=1
MPAVTYEHIKTCKQSGARLGIVHTPHGSFETPMFMPVGTKATVKTMSPEELREIEAKIILGNTYHLWLQPGNDIIKQAGGLHKFMNWNGPILTDSGGFQVFSLSNLRKITEEGVEFRHHTNGSKLFLSPEKSMEIQNDLGSDIMMAFDECPPMPSEYKYVKDSIERTTRWAERCLKAHKRPEDQALFGIIQGGEYKDLREQSAKDLVKLDFPGYAIGGLSVGEPKPVMYDMVEHTVQYMPEDKPRYLMGVGSPDALIECSIRGMDMFDCVLPTRIARNGTCMTSNGRLVIKNAKFTEDFRPLDENCDCYTCKNYTRAYIRHLIKAEETFGIRLTTIHNLHFLLKLMEDIRQAIREDRLLDFKEEFFEQYGLNVENPKNF

SEQ ID NO: 61200 - protein, 379 aa, unidentified
  source 1..379: note = Staphylococcus petrasii
  REGION 1..379: note = tr|A0A380FZR2|A0A380FZR2_9STAP Queuine tRNA-ribosyltransferase OS=Staphylococcus petrasii subsp. jettensis OX=1077965 GN=tgt PE=3 SV=1
MPAVTYEHIKTCKQSGARLGIVHTPHGSFETPMFMPVGTKATVKTMSPEELREIEAKIILGNTYHLWLQPGNDIIKQAGGLHKFMNWNGPILTDSGGFQVFSLSNLRKITEEGVEFRHHTNGSKLFLSPEKSMEIQNDLGSDIMMAFDECPPMPSEYKYVKDSIERTTRWAERCLKAHKRPEDQALFGIIQGGEYKDLREQSAKDLVKLDFPGYAIGGLSVGEPKPVMYDMVEHTVQYMPEDKPRYLMGVGSPDALIECSIRGMDMFDCVLPTRIARNGTCMTSNGRLVIKNAKFAEDFRPLDENCDCYTCKNYTRAYIRHLIKVEETFGIRLTTIHNLHFLLKLMEDIRQAIREDRLLDFKEEFFEQYGLNVENPKNF

SEQ ID NO: 61201 - protein, 379 aa, Staphylococcus pettenkoferi
  REGION 1..379: note = tr|A0A1Z3TZ96|A0A1Z3TZ96_9STAP Queuine tRNA-ribosyltransferase OS=Staphylococcus pettenkoferi; OX = 170573 GN=tgt PE=3 SV=1
MPAVTYEHIKTCKQSGARLGIVHTPHGSFETPMFMPVGTKATVKTMSPEELHQMEAKIILGNTYHLWLQPGNDIIRKSGGLHQFMNWDGPILTDSGGYQVFSLSNLRQISEEGVAFRHHKNGSKLFLSPEKSMAIQNDLGSDIMMAFDECPPMPAEYQYVKDSIERTSRWAKRCLEAHQRPEDQALFGIIQGGEYKDLRKQSAEELVALDFPGYAIGGLSVGEPKPTMYEMVEYTEQFMPFDKPRYLMGVGSPDALIECSIRGMDMFDCVLPTRIARNGTCMTSNGRLVIKNAKYKDDLGPLDSNCDCYTCRNYSRAYIRHLVKAEETFGIRLTTYHNLHFLLKLMEQIRQAIREDRLLDFKEEFFEQYGLNVDNPKNF

SEQ ID NO: 61202 - protein, 379 aa, Staphylococcus piscifermentans; identical to SEQ ID NO: 61174
  REGION 1..379: note = tr|A0A431Z2Z7|A0A431Z2Z7_9STAP Queuine tRNA-ribosyltransferase OS=Staphylococcus piscifermentans; OX = 70258 GN=tgt PE=3 SV=1

SEQ ID NO: 61203 - protein, 379 aa, Staphylococcus piscifermentans
  REGION 1..379: note = tr|A0A239U370|A0A239U370_9STAP Queuine tRNA-ribosyltransferase OS=Staphylococcus piscifermentans; OX = 70258 GN=tgt PE=3 SV=1
MPAVTYEHIKTCKQSGARLGIVHTPHGSFETPMFMPVGTKATVKTMSPEELHDINAKIILGNTYHLWLQPGNELIKRAGGLHRFMNWDGPILTDSGGFQVFSLSNLRKITEEGVYFRHHKNGSKLFLSPEKSMEIQNDLGSDIMMAFDECPPMPAEYKYVKDSIERTTRWAERCLKAHARPEDQALFGIIQGGEYKDLRQQSAEELVKLDFPGYAIGGLSVGEPKPVMYDMVKHTEQFMPKDKPRYLMGVGSPDALIECSIRGMDMFDCVLPTRIARNGTCMTSEGRVVIKNAKYADDLGPLDPNCDCYTCRNYSRAYLRHLIKAEETFGIRLTTYHNLYFLLKLMEDIRQAIREDRLLDFKEEFFEQYGLNVENPKNF

SEQ ID NO: 61204 - protein, 255 aa, Staphylococcus pseudintermedius
  REGION 1..255: note = tr|A0A317Z9H8|A0A317Z9H8_STAPS Queuine tRNA-ribosyltransferase (Fragment) OS=Staphylococcus pseudintermedius OX=283734 GN=DD924_06565 PE=3 SV=1
MPAVTYEHIKTCKQSGARLGIVHTPHGSFETPMFMPVGTKATVKTMSPEELKQMNTKILLGNTYHLWLQPGNDIVKQAGGLHKFMNWDGPILTDSGGFQVFSLSNLRKITEEGVEFRHHTNGSKLFLSPEDSIKIQNDLGSDIIMAFDECPPMPAEYDYVKNSLERTTRWAERCLAAHQRPEDQALFGIIQGGEYKDLRQQSAEELVKLDFPGYAIGGLSVGEPKPVMYEMVEHTEQFMPKDKPRYLMGVGSPDA

SEQ ID NO: 61205 - protein, 379 aa, Staphylococcus pseudintermedius; identical to SEQ ID NO: 61166
  REGION 1..379: note = tr|A0A166PAU7|A0A166PAU7_STAPS Queuine tRNA-ribosyltransferase OS=Staphylococcus pseudintermedius; OX = 283734 GN=tgt PE=3 SV=1

SEQ ID NO: 61206 - protein, 379 aa, Staphylococcus rostri
  REGION 1..379: note = tr|A0A2K3YHR9|A0A2K3YHR9_9STAP Queuine tRNA-ribosyltransferase OS=Staphylococcus rostri OX=522262; GN = tgt PE=3 SV=1
MPAVTYEHIKTCKQSGARLGIVHTPHGSFETPMFMPVGTKATVKTMSPEELKQMNTKILLGNTYHLWLQPGNDIVKQAGGLHKFMNWDGPILTDSGGFQVFSLSNLRKITEEGVEFRHHTNGSKLFLSPEDSIKIQNDLGSDIIMAFDECPPMPAEYDYVKKSLERTTRWAERCKKAHQRPEDQALFGIIQGGEYKDLRQQSAEALVDLDFPGYAIGGLSVGEPKPVMYEMVEHTVQYMPEDKPRYLMGVGSPDALIECSIRGMDMFDCVLPTRIARNGTCMTSHGRLVVKNAQFKDDFRPLDENCDCYTCKNYTRAYLRHLIKADETFGIRLTTYHNLHFLLKLMENIRQAIREDRLLDFKEEFFEQYGLNVENPKNF

SEQ ID NO: 61207 - protein, 379 aa, Staphylococcus saccharolyticus; identical to SEQ ID NO: 61198
  REGION 1..379: note = tr|A0A431YL56|A0A431YL56_9STAP Queuine tRNA-ribosyltransferase OS=Staphylococcus saccharolyticus; OX = 33028 GN=tgt PE=3 SV=1

SEQ ID NO: 61208 - protein, 379 aa, Staphylococcus saccharolyticus
  REGION 1..379: note = tr|A0A4Q8N110|A0A4Q8N110_9STAP Queuine tRNA-ribosyltransferase OS=Staphylococcus saccharolyticus; OX = 33028 GN=tgt PE=3 SV=1
MPAVTYEYIKTCKQSGARLGIVHTSHGSFETPIFMPVGTKATVKTMSPEELKDIQAKIILGNTYHLWLQPGNDIIKHAGGLHQFMNWDGPILTDSGGFQVFSLSNLRKITEEGVEFRHHTNGSKLFLSPEKSMQIQNDLGSDIMMAFDECPPMPSEYNYVKNSIERTTRWAERCLKAHQRPEDQALFGIIQGGEYKDLREQSVKELVSLDFPGYAIGGLSVGEPKPVMYDMVEHTEQFMPKDKPRYLMGVGSPDVLIECSVRGMDMFDCVLPTRIARNGTCMTSTGRLVVKNAKYADDLRPLDEHCECYTCRNYTRAYIRHLVKAEETFGIRLTTIHNLHFLLKLMEDIRQAIREDRLLDFKDEFFEQYGLNVENPKNF

SEQ ID NO: 61209 - protein, 381 aa, Staphylococcus saprophyticus
  REGION 1..381: note = tr|Q49Y77|Q49Y77_STAS1 Queuine tRNA-ribosyltransferase OS=Staphylococcus saprophyticus subsp. saprophyticus (strain ATCC 15305 / DSM 20229 / NCIMB 8711 / NCTC 7292 /S-41) OX=342451 GN=tgt PE=3 SV=1
MPTPAVTYEHIKTCKQSGARLGIVHTPHGSFETPMFMPVGTKATVKTMSPEELHQMETKIILGNTYHLWLQPGNDIIRKSGGLHQFMNWNGPILTDSGGFQVFSLSNLRKITEEGVEFRHHTNGSKLFLSPEKSMQIQNDLGSDIMMAFDECPPMPAEYKYVKDSIERTTRWAERCLKAHSRPEDQALFGIIQGGEYKDLRKQSAEELVALDFPGYAIGGLSVGEPKPVMYDMVHHTEQFMPKDKPRYLMGVGSPDALIECSIRGMDMFDCVLPTRIARNGTCMTSHGRVIIKNAKYAEDLGPLDDNCDCYTCKNYSRAYIRHLIKAEETFGIRLTTYHNLHFLLKLMENIRQAIREDRLLDFKEEFFEQYGLNVENPKNF

SEQ ID NO: 61210 - protein, 381 aa, Staphylococcus saprophyticus
  REGION 1..381: note = tr|A0A380HMK2|A0A380HMK2_STASA Queuine tRNA-ribosyltransferase OS=Staphylococcus saprophyticus subsp. saprophyticus OX=147452 GN=tgt PE=3 SV=1
MPTPAVTYEHIKTCKQSGARLGIVHTPHGSFETPMFMPVGTKATVKTMSPEELHQMETKIILGNTYHLWLQPGNDIIRMSGGLHQFMNWNGPILTDSGGFQVFSLSNLRKITEEGVEFRHHTNGSKLFLSPEKSMQIQNDLGSDIMMAFDECPPMPAEYKYVKDSIERTTRWAERCLKAHSRPEDQALFGIIQGGEYKDLRKQSAEELVALNFPGYAIGGLSVGEPKPVMYDMVHHTEQFMPKDKPRYLMGVGSPDALIECSIRGMDMFDCVLPTRIARNGTCMTSHGRVIIKNAKYAEDLGPLDDNCDCYTCKNYSRAYIRHLIKAEETFGIRLTTYHNLHFLLKLMENIRQAIREDRLLDFKEEFFELYGLNVENPKNF

SEQ ID NO: 61211 - protein, 379 aa, Staphylococcus schleiferi
  REGION 1..379: note = tr|A0A3S0LVV7|A0A3S0LVV7_9STAP Queuine tRNA-ribosyltransferase OS=Staphylococcus schleiferi subsp. schleiferi OX=74707 GN=tgt PE=3 SV=1
MPAVTYEHIKTCKQSGARLGIVHTPHGSFETPMFMPVGTKATVKTMSPEELKQMEAKIILSNTYHLWLQPGSDIISKVGGLHKFMNWDGPILTDSGGFQVFSLSDMRKIEEEGVHFRHHLNGSKLFLSPEKAMHIQNDLGSDIMMAFDECPPMPSEYEYVKNSIERTSRWAERCLEAHRRPEDQALFGIIQGGEYKDLREQSAKDLVSLDFPGYAIGGLSVGEPKPVMYRMVEHTTPLMPFNKPRYLMGVGSPDALIECSIRGIDMFDCVLPTRIARNGTCMTSQGRVVIKNAKYQQDLSPLDPECDCYTCRNYTKAYLRHLIKADETFGIRLTTYHNLYFLLKLMENIRQAIREDRLLDFKDEFFEQYGLNVDNPKNF

SEQ ID NO: 61212 - protein, 379 aa, Staphylococcus schleiferi
  REGION 1..379: note = tr|A0A0M5MYU6|A0A0M5MYU6_9STAP Queuine tRNA-ribosyltransferase OS=Staphylococcus schleiferi; OX = 1295 GN=tgt PE=3 SV=1
MPAVTYEHIKTCKQSGARLGIVHTPHGSFETPMFMPVGTKATVKTMSPEELKQMNTKILLGNTYHLWLQPGNDIVKKAGGLHQFMNWDGPILTDSGGFQVFSLSNLRKITEEGVEFRHHTNGSKLFLSPEDSIKIQNDLGSDIIMAFDECPPMPAEYDYVKNSIERTTRWAERCLQAHQRPNDQALFGIIQGGEYKDLRQQSAEELVKLDFPGYAIGGLSVGEPKPVMYDMVEFTEQFMPKDKPRYLMGVGSPDALIECSIRGMDMFDCVLPTRIARNGTCMTSHGRVVVKNAQYKDDFRPLDENCDCYTCKNYSRAYLRHLIKADETFGIRLTTYHNLHFLLKLMENIRQAIREDRLLDFKEEFFEQYGLNVDNPKNF

SEQ ID NO: 61213 - protein, 379 aa, unidentified; identical to SEQ ID NO: 61150
  source 1..379: note = Staphylococcus schweitzeri
  REGION 1..379: note = tr|A0A2K4AHL8|A0A2K4AHL8_9STAP Queuine tRNA-ribosyltransferase OS=Staphylococcus schweitzeri; OX = 1654388 GN=tgt PE=3 SV=1

SEQ ID NO: 61214 - protein, 379 aa, Staphylococcus sciuri; identical to SEQ ID NO: 61184
  REGION 1..379: note = tr|A0A3S0K0P9|A0A3S0K0P9_STASR Queuine tRNA-ribosyltransferase OS=Staphylococcus sciuri subsp. rodentium OX=147469 GN=tgt PE=3 SV=1

SEQ ID NO: 61215 - protein, 379 aa, Staphylococcus sciuri
  REGION 1..379: note = tr|A0A1X0TU10|A0A1X0TU10_STASC Queuine tRNA-ribosyltransferase OS=Staphylococcus sciuri OX=1296; GN = tgt PE=3 SV=1
MPAVTYEHIKTCKQSGARLGIVHTPHGSFETPMFMPVGTKATVKTMSPEELKQMEAKIILSNTYHLWLQPGSDIISKVGGLHKFMNWDGPILTDSGGFQVFSLSDMRKIEEEGVHFRHHLNGSKLFLSPEKAMHIQNDLGSDIMMAFDECPPMPSEYEYVKNSIERTSRWAERCLEAHRRPEDQALFGIIQGGEYKDLREQSAKDLVSLDFPGYAIGGLSVGEPKPVMYRMVEHTAPLMPFNKPRYLMGVGSPDALIECSIRGIDMFDCVLPTRIARNGTCMTSQGRVVIKNAKYQQDLSPLDPECDCYTCRNYTKAYLRHLIKADETFGIRLTTYHNLYFLLKLMENIRQAIREDRLLDFKDEFFEQYGLNVDNPKNF

SEQ ID NO: 61216 - protein, 379 aa, Staphylococcus simiae
  REGION 1..379: note = tr|G5JHN7|G5JHN7_9STAP Queuine tRNA-ribosyltransferase OS=Staphylococcus simiae CCM 7213 = CCUG 51256 OX=911238 GN=tgt PE=3 SV=1
MPAVTYEHIKTCKQSGARLGIVHTPHGSFETPMFMPVGTKATVKTLSPEELRQINAKIILGNTYHLWLQPGNDIIKHAGGLHKFMNWDGPILTDSGGFQVFSLSNLRKITEEGVEFRHHTNGSKLFLSPEKSMQIQNDLGSDIMMAFDECPPMPAEYDYVKKSIERTTRWAERCLKAHQRPEDQALFGIIQGGEYEDLREQSAKDLVELDFPGYAIGGLSVGEPKPVMYKMVEHTEQFMPKDKPRYLMGVGSPDALIECSIRGMDMFDCVLPTRIARNGTCMTSNGRLVIKNAKFADDLRPLDENCDCYTCQNYSRAYIRHLIKAEETFGIRLTTIHNLHFLLKLMEDVRQAIREDRLLDFKEEFFEQYGLNVENPKNF

SEQ ID NO: 61217 - protein, 379 aa, Staphylococcus simulans
  REGION 1..379: note = tr|A0A2T4QQ84|A0A2T4QQ84_STASI Queuine tRNA-ribosyltransferase OS=Staphylococcus simulans OX=1286; GN = tgt PE=3 SV=1
MPAVTYEHIKTCKQSGARLGIVHTPHGSFETPMFMPVGTQATVKTMSPEELRDINAQIILGNTYHLWLQPGNDIIKRAGGLHKFMNWNGPILTDSGGFQVFSLSNLRKITEEGVHFRHHKNGSKLFLSPEKATEIQNDLGSDIMMAFDECPPMPAEYEYVKDSIERTTRWAERCLKAHKRPEDQALFGIIQGGEYKDLRQQSAEELVKLDFPGYAIGGLSVGEPKPVMYDMVEFTEQFMPKDKPRYLMGVGSPDALIECSIRGMDMFDCVLPTRIARNGTCMTSKGRVVIKNAKYADDLSPLDENCDCYTCRNYTKAYLRHLIKAEETFGIRLTTYHNLYFLLKLMEDIRQAIREDRLLDFKEEFFEQYGLNEENPKNF

SEQ ID NO: 61218 - protein, 379 aa, Staphylococcus simulans
  REGION 1..379: note = tr|A0A133QDW8|A0A133QDW8_STASI Queuine tRNA-ribosyltransferase OS=Staphylococcus simulans OX=1286; GN = tgt PE=3 SV=1
MPAVTYEHIKTCKQSGARLGIVHTPHGSFETPMFMPVGTQATVKTMSPEELREINAQIILGNTYHLWLQPGNDIIKRAGGLHKFMNWNGPILTDSGGFQVFSLSNLRKITEEGVHFRHHKNGSKLFLSPEKATEIQNDLGSDIMMAFDECPPMPAEYKYVKDSIERTTRWAERCLKAHKRPEDQALFGIIQGGEYKDLRQQSAEELVKLDFPGYAIGGLSVGEPKPVMYDMVEFTEQFMPKDKPRYLMGVGSPDALIECSIRGMDMFDCVLPTRIARNGTCMTSNGRVVIKNAKYADDLSPLDENCDCYTCRNYTKAYLRHLIKAEETFGIRLTTYHNLYFLLKLMEDIRQAIREDRLLDFKEEFFEQYGLNEENPKNF

SEQ ID NO: 61219 - protein, 377 aa, Staphylococcus sp.
  REGION 1..377: note = tr|R6TFV3|R6TFV3_9STAP Queuine tRNA-ribosyltransferase OS=Staphylococcus sp. CAG:324; OX = 1262969 GN=tgt PE=3 SV=1
MVIKYELIKKDENSMARVGKITTPHSIIDTPCFMPVGTQATIKALSKEEVVATGAQIILGNTYHLWNQPGHKLIEKAGGLHKFMNWDQSILTDSGGFQVFSLAKLRDIKEEGVYFKHHKSGKPLFLSPELAIEIQNSLGSDIMMSFDECPPYPSTRDYMEKSVERTIRWAKRGLEAHQNKDSQGVFGIIQGGDFEDIRIYCANELTKLPFDGFSIGGLSVGEPKYIQNKVLSYTTPHLPPNKPRYLMGVGSPGAILDGVERGIDMFDCVLPTRIARHSCAMTSRGRMILKNQEFEDDFRPLDEECDCYTCKNYTRAYLRHLVKANEILGARLISIHNIQFLENLMKNIRFSIMENKFLEFKQKFYDKYGLNESDKDF

SEQ ID NO: 61220 - protein, 379 aa, Staphylococcus sp.
  REGION 1..379: note = tr|A0A1F2L291|A0A1F2L291_9STAP Queuine tRNA-ribosyltransferase OS=Staphylococcus sp. HMSC14D01; OX = 1581101 GN=tgt PE=3 SV=1
MPAVTYEHIKTCKQSGARLGIVHTPHGSFETPMFMPVGTKATVKTMSPEELRQIEAKIILGNTYHLWLQPGNDIIKQVGGLHNFMNWDGPILTDSGGFQVFSLSNLRKITEEGVEFRHHTNGSKLFLSPEKSMEIQNDLGSDIMMAFDECPPMPSEYKYVKDSIERTTRWAERCLNAHKRPEDQALFGIIQGGEYKDLREQSAKELVALDFPGYAIGGLSVGEPKPVMYEMVEHTVQYMPDDKPRYLMGVGSPDALIECSIRGMDMFDCVLPTRIARNGTCMTSNGRLVIKNAKYANDFKPLDENCDCYTCKNYSRAYIRHLIKAEETFGIRLTTIHNLHFLLKLMEDIRQAIREDRLLDFKDEFFEQYGLNVENPKNF

SEQ ID NO: 61221 - protein, 379 aa, unidentified
  source 1..379: note = Staphylococcus stepanovicii
  REGION 1..379: note = tr|A0A239Z3G7|A0A239Z3G7_9STAP Queuine tRNA-ribosyltransferase OS=Staphylococcus stepanovicii; OX = 643214 GN=tgt PE=3 SV=1
MPAVTYEHIKTCKQSGARLGIVHTPHGSFETPMFMPVGTKATVKTMSPEELKEMEAKIILSNTYHLWLQPGSDIISKVGGLHKFMNWDGPILTDSGGFQVFSLSDMRKIEEEGVHFRHHLNGSKLFLSPEKATHIQNDLGSDIMMAFDECPPMPSEYEYVKKSIERTSRWAERCLKAHKRPEDQALFGIIQGGEYNDLREQSAKDLVSLDFPGYAIGGLSVGEPKPVMYRMVEHTAPLMPFNKPRYLMGVGSPDALIECSIRGIDMFDCVLPTRIARNGTCMTSQGRVVIKNAKYQQDLSPLDPECDCYTCRNYTKAYLRHLIKADETFGIRLTTYHNLYFLLKLMENIRQAIREDRLLDFKDEFFEQYGLNVDNPKNF

SEQ ID NO: 61222 - protein, 379 aa, Staphylococcus succinus
  REGION 1..379: note = tr|A0A2T4Q5W8|A0A2T4Q5W8_9STAP Queuine tRNA-ribosyltransferase OS=Staphylococcus succinus; OX = 61015 GN=tgt PE=3 SV=1
MPAVTYEHIKTCKQSGARLGIVHTPHGSFETPMFMPVGTKATVKTMSPEELHQMESKIILGNTYHLWLQPGNDIIKKSGGLHQFMNWNGPILTDSGGFQVFSLSNLRNITEKGVEFRHHTNGSKLFLSPEKSMQIQNDLGSDIMMAFDECPPMPAEYKYVKDSIERTTRWAERCLEAHKRPEDQALFGIIQGGEYKDLRQQSAEDLVALDFPGYAIGGLSVGEPKPVMYDMVQHTEQFMPKDKPRYLMGVGSPDALIECSIRGMDMFDCVLPTRIARNGTCMTSHGRLTVKNAKYADDLRPIDDNCDCYACKNYSRAYIRHLIKAEETFGIRLTTYHNLHFLLKLMENIRQAIREDRLLDFKEEFFEQYGLNVENPKNF

SEQ ID NO: 61223 - protein, 379 aa, Staphylococcus vitulinus
  REGION 1..379: note = tr|A0A2T4PV26|A0A2T4PV26_9STAP Queuine tRNA-ribosyltransferase OS=Staphylococcus vitulinus; OX = 71237 GN=tgt PE=3 SV=1
MPAVTYEHIKTCKQSGARLGIVHTPHGSFETPMFMPVGTKATVKTMSPEELKQMEAKIILSNTYHLWLQPGSDIISKVGGLHKFMNWDGPILTDSGGFQVFSLSDMRKIEEEGVHFRHHLNGSKLFLSPEKAMHIQNDLGSDIMMAFDECPPMPAEYEYVKNSIERTSRWAERCLEAHQRPEDQALFGIIQGGEYKDLREQSAKDLVSLDFPGYAIGGLSVGEPKPVMYKMVEHTAPLMPFNKPRYLMGVGSPDALIECSIRGIDMFDCVLPTRIARNGTCMTSQGRVVIKNAKYQQDLSPLDPECDCYTCRNYTKAYLRHLIKADETFGIRLTTYHNLYFLLKLMENVRQAIREDRLLDFKDEFFEQYGLNVDNPKNF

SEQ ID NO: 61224 - protein, 379 aa, Staphylococcus warneri; identical to SEQ ID NO: 51997
  REGION 1..379: note = tr|A0A5F0TZF6|A0A5F0TZF6_STAWA Queuine tRNA-ribosyltransferase OS=Staphylococcus warneri OX=1292; GN = tgt PE=3 SV=1

SEQ ID NO: 61225 - protein, 379 aa, Staphylococcus warneri
  REGION 1..379: note = tr|A0A2T4PZK9|A0A2T4PZK9_STAWA Queuine tRNA-ribosyltransferase OS=Staphylococcus warneri OX=1292; GN = tgt PE=3 SV=1
MPAVTYEHIKTCKQSGARLGIVHTPHGSFETPMFMPVGTKATVKTMSPEELSQIEAKIILGNTYHLWLQPGNDIIKHAGGLHKFMNWNGPILTDSGGFQVFSLSNLRKISEEGVEFRHHTNGSKLFLSPEKSMEIQNDLGSDIMMAFDECPPMPSEYKYVKDSIERTTRWAERCLKAHARPEDQALFGIIQGGEYKDLREQSAKELVELDFPGYAIGGLSVGEPKPVMYEMVEHTEQFMPKDKPRYLMGVGSPDALIECSIRGMDMFDCVLPTRIARNGTCMTSNGRLVIKNAKFADDLRPLDENCDCYTCKNYSRAYIRHLIKAEETFGIRLTTIHNLHFLLKLMEDIRQAIREDRLLDFKAEFFEQYGLNVDNPKNF

SEQ ID NO: 61226 - protein, 379 aa, Staphylococcus xylosus
  REGION 1..379: note = tr|A0A418IAA9|A0A418IAA9_STAXY Queuine tRNA-ribosyltransferase OS=Staphylococcus xylosus OX=1288; GN = tgt PE=3 SV=1
MPAVTYEHIKTCKQSGARLGIVHTPHGSFETPMFMPVGTKATVKTMSPEELNQMEAKIILGNTYHLWLQPGNDIIKKSGGLHQFMNWNGPILTDSGGFQVFSLSNLRKISEKGVEFRHHTNGSKLFLSPEKAMQIQNDLGSDIMMAFDECPPMPAEYKYVKDSIERTTRWAERCLKAHKRPDDQALFGIIQGGEYKDLRKQSAEELVALDFPGYAIGGLSVGEPKPVMYDMVKHTEQFMPKDKPRYLMGVGSPDALIECSIRGMDMFDCVLPTRIARNGTCMTSHGRVTIKNAKYAEDLGPLDENCDCYTCKNYSRAYIRHLIKAEETFGIRLTTYHNLHFLLKLMENIRQAIREDRLLDFKEEFFEQYGLNVENPKNF

SEQ ID NO: 61227 - protein, 379 aa, Staphylococcus xylosus
  REGION 1..379: note = tr|A0A418IEF4|A0A418IEF4_STAXY Queuine tRNA-ribosyltransferase OS=Staphylococcus xylosus OX=1288; GN = tgt PE=3 SV=1
MPAVTYEHIKTCKQSGARLGIVHTPHGSFETPMFMPVGTKATVKTMSPEELNQMEAKIILGNTYHLWLQPGNDIIRKSGGLHQFMNWNGPILTDSGGFQVFSLSNLRKISEKGVEFRHHTNGSKLFLSPEKAMEIQNDLGSDIMMAFDECPPMPAEYKYVKDSIERTTRWAERCLKAHKRPEDQALFGIIQGGEYKDLRKQSAEELVALDFPGYAIGGLSVGEPKPVMYDMVKHTEQFMPKDKPRYLMGVGSPDALIECSIRGMDMFDCVLPTRIARNGTCMTSHGRVTIKNAKYAEDLGPLDENCDCYTCKNYSRAYIRHLIKAEETFGIRLTTYHNLHFLLKLMENIRQAIREDRLLDFKEEFFEQYGLNVENPKNF

SEQ ID NO: 61228 - protein, 381 aa, Stappia indica
  REGION 1..381: note = tr|A0A285S7N7|A0A285S7N7_9RHOB Queuine tRNA-ribosyltransferase OS=Stappia indica OX=538381 GN=tgt; PE = 3 SV=1
MTAPFSFRLLANDGMARRGEIVTPHGRVATPAFMPVGTQATVKAMYPGQVRELGADVVLGNTYHLMLRPGAERIARLGGLHTFMNWPHTILTDSGGFQVMSLAQLRKLTEEGVTFQSHIDGSRHVMTPERSVEIQQLLGSDIQMQLDECIALPAPREDVERAMRLSLRWAERSRAQFETMGGPGRGQALYGIVQGGDVPDLRIASAQALGEMPFEGYSVGGLAVGEPQDVMLAMLDVTTPAMPVDKPRYLMGVGTPEDILESVARGIDQFDCVMPTRAGRHGLAYTRYGKVNLKNARHADDPRPLDEASDCPAARDYSRAYLHHLVKAGEGLAAMLLTWTNLAYYQTLMREMRAAIEEGRFEDFRAKTREDWARGDLAPLD

SEQ ID NO: 61229 - protein, 380 aa, Stappia sp.
  REGION 1..380: note = tr|A0A2E6Y7V5|A0A2E6Y7V5_9RHOB Queuine tRNA-ribosyltransferase OS=Stappia sp. OX=1870903 GN=tgt; PE = 3 SV=1
MTAPFSFRLLATDGMARRGEITTPHGTVATPAFMPVGTQATVKAMYPEQVRELGADVVLGNTYHLMLRPGAERIARLGGLHKFMNWNHTILTDSGGFQVMSLAQLRKLTEEGVTFQSHVDGSRHVMSPERSVEIQQLLGSDIQMQLDECIALPAPREDVERAMRLSLRWAERSRAKFEDMGGPGRGQALYGIVQGGDVPDLRVASAQALGEMPFEGYSVGGLAVGEPQDVMLKMLEVTTPAMPVDKPRYLMGVGTPEDILESVARGIDQFDCVMPTRAGRHGLAYTRYGKVNLKNARHAEDHRPLDEAADCPAARDYSRAYLHHLVKAGEGLAAMLLTWTNLAYYQTLMREMRGAIKEGRFEDFRARTREDWARGDIAPL

SEQ ID NO: 61230 - protein, 369 aa, Stappia sp.
  REGION 1..369: note = tr|A0A1Y1STQ6|A0A1Y1STQ6_9RHOB Queuine tRNA-ribosyltransferase OS=Stappia sp. 22II-S9-Z10; OX = 1317123 GN=tgt PE=3 SV=1
MSFQLLTTDGGARRGRLVTPHGLVETPAFMPVGTQATVKTMLMRDVESTGAQVVLGNTYHLMLRPGADRVASFGGLHEFMRWPHTILTDSGGFQVMSLSALRKIDDDGVTFKSHVDGSMHRLTPESAVEIQLKLGSDIQMQLDECVRLPATPEEIARSVTISLEWGARARRTFLEAQSGRLQFGIVQGGTDPSERQRSAEGLVGIGFDGYAIGGLAVGEPQDEMFATIDVTAPHLPATHARYLMGVGTPGDLIGAVARGIDMFDCVMPTRAGRHGLAYTTTGKVNLKNARFATDDAPLDPDLDCHASRDFSRGYLHHLVKVGEPLAATLISWNNIAFYQRLMADLRAAITAGRFAEERARLAEIWGGGA

SEQ ID NO: 61231 - protein, 381 aa, Starkeya novella
  REGION 1..381: note = tr|A0A2W5QSA7|A0A2W5QSA7_STANO Queuine tRNA-ribosyltransferase OS=Starkeya novella OX=921 GN=tgt; PE = 3 SV=1
MTELDPTDFHYRLKATDGAARLGEVVTPRGIVNTPAFMPVGTAATVKGMYPQQVRELGADIVLGNTYHLMLRPTAERVAELGGLHEFMRWPHPILTDSGGFQIMSLASLRKMNEKGVTFRSHIDGSYHELSPERSVEIQGLLGSDIQMQLDECVRLPASREEIARALRLSLRWAERSKKAFELQPKGRALFGIVQGGDDPELREESARGLIDIDFPGYSIGGLAVGEPQAVMLGMIDVVAPILPAHKPRYLMGVGTPDDIIESVARGVDMFDCVMPTRAGRHAQAFTRFGKINLKNARHANDPRPLDEESDCPAARDYSRAYLHHLIRCDEMLGSMLLTWVNLAYYQSLMKGIRTAIGEGRFEAHKAEVKEGWAKGDIPAR

SEQ ID NO: 61232 - protein, 371 aa, Starkeya novella
  REGION 1..371: note = tr|A0A2W5MKE0|A0A2W5MKE0_STANO Queuine tRNA-ribosyltransferase OS=Starkeya novella OX=921 GN=tgt; PE = 3 SV=1
MSKIPFNLLATDGAARTGELVFPRGTIRTPAFMPVGTAGTVKALYADQVAATGADVVLGNVYHLMLRPGAERVAALGGLHAFMRWDKPILTDSGGFQVMSLSALRKLDRDGVTFQSHIDGSTHRLTPERSIEIQRLLGADVSMQFDECVRLPAPREDVERAMRLSLDWAERSKAAFGAPEGRALFGIVQGGDLPDLRRVSARALVDIGFDGYAVGGLAVGEPQDVMLATLAETTPELPAGRPRYLMGVGTPDDILKSIALGIDMFDCVMPTRAGRHGQAFTRFGRMNLKNARFAEDPRPLDETSDCPAARDYSRAYLHHLVKSGEILGMMLLSWANVAYYQSLTAGARAAVTEERYADYMAETTERWNAGG

SEQ ID NO: 61233 - protein, 379 aa, Starkeya sp.
  REGION 1..379: note = tr|A0A556PAZ6|A0A556PAZ6_9RHIZ Queuine tRNA-ribosyltransferase OS=Starkeya sp. 3C OX=2597768; GN = tgt PE=3 SV=1
MIEQTEFQYRLKATDGAARLGEVLTPRGVIRTPAFMPVGTAGTVKGMYPSQVRELGADILLGNTYHLMLRPGAERVAKLGGLHELMRWPHPILTDSGGFQVMSLAALRKMSENGVTFRSHIDGSYYELTPERSVEIQGLLGSDIQMQLDECVRLPASREEIARALRLSLRWAERSKKAFESQPKGRALFGIVQGGDDPALREESARGLVDIDFPGYSIGGLAVGEPQDVMLRMLEVVNPILPADKPRYLMGVGTPDDIIESVARGVDMFDCVMPTRAGRHAQAFTRFGKINLKNARHAEDSRPLDEESDCPAARDYSRAYLHHLIRSDEMLGSMLLTWVNLAYYQSLTAGIRAAIAEGRFEDFKAGVKEGWARGDIPAL

SEQ ID NO: 61234 - protein, 383 aa, Stella humosa
  REGION 1..383: note = tr|A0A3N1M1J7|A0A3N1M1J7_9PROT Queuine tRNA-ribosyltransferase OS=Stella humosa OX=94 GN=tgt PE=3; SV = 1
MTGLSFALLATDGAARRGRISTAHGTVETPAFMPVGTAGTVKAMTADAVRSTGAEIVLGNTYHLMLRPGAERVGRLGGLHRFMGWQGPILTDSGGFQVMSLAGLRKIDENGVTFRSHIDGSAHALTPERSIQIQHLLDADITMAFDECTPFPATEEQAAASMRLSMRWAARSRDAFVERPGYGLFGIVQGSTFRDLRAESAAALQEIGFHGYAIGGLAVGEGQAAMFETVGFTTPMLPADRPRYLMGVGRPEDIVGAVQRGIDMFDCVMPTRSGRTAQGFTRHGTVNIRNARHAEDPRPLDAACGCPACCDHSRAYLHHLFKANEILGSMLLTWHNIQYYQDLMAGLRQAIADGRLDAHVGELQQGWVAGDIAALPPSSTDAP

SEQ ID NO: 61235 - protein, 376 aa, Stenotrophomonas acidaminiphila
  REGION 1..376: note = tr|A0A0S1AZB8|A0A0S1AZB8_9GAMM Queuine tRNA-ribosyltransferase OS=Stenotrophomonas acidaminiphila; OX = 128780 GN=tgt PE=3 SV=1
MSRLQFTLQATDGNARRGQLSFPRGTVQTPAFMPVGTYGSVKGVLPEQIRALGAEIILGNTFHLYLRPGLEVIGDHGGLHGFCRWNGPILTDSGGFQVFSLAHRRKITEQGVTFASPTDGARVFLGPEESMKIQKVLDSDVVMIFDECTPYPATEDVARRSMELSLRWARRSRDAHDALGNDAALFGIVQGGVHTDLRSRSAEGLQQIGFDGYAIGGLAVGEPEHERNAMLEHMHPILPADRPRYLMGVGRPEDLVEGVARGVDMFDCVMPTRNARNGHYFTSTGTVRIRNARYERDMDTIEPGCGCHACSSGYTRAYLRHLDRCNEMLAPMLGTLHNLYYYEKLMADMRAAIEAGTFLAFRESFYAARGAVAPAL

SEQ ID NO: 61236 - protein, 376 aa, Stenotrophomonas acidaminiphila
  REGION 1..376: note = tr|A0A0R0DRW0|A0A0R0DRW0_9GAMM Queuine tRNA-ribosyltransferase OS=Stenotrophomonas acidaminiphila; OX = 128780 GN=tgt PE=3 SV=1
MSRLQFTLQATDGNARRGQLSFPRGIVQTPAFMPVGTYGSVKGVLPEQIRALGAEIILGNTFHLYLRPGLEVIGDHGGLHGFCRWNGPILTDSGGFQVFSLAHRRKITEQGVTFASPTDGARVFLGPEESMKIQKVLDSDVVMIFDECTPYPATEDVARRSMELSLRWARRSRDAHDALGNDAALFGIVQGGVHTDLRSRSAEGLQQIGFDGYAIGGLAVGEPEHERNAMLEHMHPILPADRPRYLMGVGRPEDLVEGVARGVDMFDCVMPTRNARNGHYFTSTGTVRIRNARYERDMDTIEPGCGCHACSSGYTRAYLRHLDRCNEMLAPMLGTLHNLYYYEKLMADMRAAIEAGTFLAFRESFYAARGAVAPAL

SEQ ID NO: 61237 - protein, 376 aa, Stenotrophomonas chelatiphaga
  REGION 1..376: note = tr|A0A0R0CUQ4|A0A0R0CUQ4_9GAMM Queuine tRNA-ribosyltransferase OS=Stenotrophomonas chelatiphaga; OX = 517011 GN=tgt PE=3 SV=1
MSRLQFQLQTTDGRARRGRLTFPRGTVETPAFMPVGTYGSVKGIFPDQVRALGAEIILGNTFHLYLRPGLDVIADHGGLHGFARWDGPILTDSGGFQVFSLAHRRKITEQGVTFASPTDGARVFLGPEESMKIQKVLDSDVVMIFDECTPYPATEDVARRSMELSLRWAQRSRDAHDALGNDAALFGIVQGGVHTDLRSRSADALQQIGFDGYAIGGLAVGEPEHERNAMLDHLNPVLPADRPRYLMGVGRPEDLVEGVARGVDMFDCVMPTRNARNGHYFTSFGTVRIRNARYERDMDPIEPGCGCFACSGGYTRSYLRHLDRCNEMLAPMLGTLHNLFYYEKLMADMRAAIAAGTFEAFRGSFYAARGAAVPPL

SEQ ID NO: 61238 - protein, 375 aa, Stenotrophomonas daejeonensis
  REGION 1..375: note = tr|A0A0R0DP76|A0A0R0DP76_9GAMM Queuine tRNA-ribosyltransferase OS=Stenotrophomonas daejeonensis; OX = 659018 GN=tgt PE=3 SV=1
MSRLQFTLQTTDGNARRGQLSFPRGTVQTPAFMPVGTYGSVKGVLPEQVRALGAEIILGNTFHLYLRPGLDVIADHGGLHGFCRWNGPILTDSGGFQVFSLAHRRKITEQGVTFASPTDGARVFLGPEESMKIQKVLDSDVVMIFDECTPYPATEDVARRSMELSLRWAQRSRDAHDALGNDAALFGIVQGGVHTDLRSRSAEGLQQIGFDGYAIGGLAVGEPEHERNAMLEHMHPILPADRPRYLMGVGRPEDLVEGVARGVDMFDCVMPTRNARNGHYFTSFGTVRIRNARYERDMDPIEPGCGCHACSSGYTRSYLRHLDRCNEMLAPMLGTLHNLYYYEKLMADMRAAIEAGTFGAFRESFYAARGATAPA

SEQ ID NO: 61239 - protein, 377 aa, Stenotrophomonas ginsengisoli
  REGION 1..377: note = tr|A0A0R0DIZ6|A0A0R0DIZ6_9GAMM Queuine tRNA-ribosyltransferase OS=Stenotrophomonas ginsengisoli; OX = 336566 GN=tgt PE=3 SV=1
MSRLTFSLFSRDGRARRGQLSFPRGTVQTPAFMPVGTYGTVKGVLPEQIRALGAEIILGNTFHLWLRPGLDVIGDHGGLHGFCQWNGPILTDSGGFQVFSLAHRRKITEEGVTFAAPTDGARVFLSPEVSMHIQKVLDSDVVMIFDECTPYPATEQVARTSMELSLRWAQRSRNEHDRLGNDAALFGIVQGGVHPELRTRSIDGLREIGFDGYAIGGLAVGEPEHERNAMLEHLDPQLPEERPRYLMGVGRPEDLVEGVARGVDMFDCVMPTRNARNGHFFTSTGTIRIRNAQYARDMDPIEPGCGCHACTGGYTRSYIRHLDRCNEMLAPMLGTLHNLFYYEKLMADIRAAIEAGNFQQFRAEFYAKRGGIAPELP

SEQ ID NO: 61240 - protein, 379 aa, Stenotrophomonas humi
  REGION 1..379: note = tr|A0A0R0CM88|A0A0R0CM88_9GAMM Queuine tRNA-ribosyltransferase OS=Stenotrophomonas humi OX=405444; GN = tgt PE=3 SV=1
MSRLQFKLQNTDGRARRGQLSFPRGTVQTPAFMPVGTYGSVKGILPEQVRALGAEIILGNTFHLYLRPGLDVIADHGGLHGFCRWDGPILTDSGGFQVFSLAHRRKITEEGVTFASPTDGARVFLGPEESMKIQKVLDSDIVMIFDECTPYPATEPVARTSMELSLRWAQRSRNAHEALGNDAALFGIVQGGVHTDLRSRSAEGLQQIGFDGYAIGGLAVGEPEHERNAMLDHMHPILPADRPRYLMGVGRPEDLVEGVARGVDMFDCVMPTRNARNGHYFTSFGTVRIRNAKYERDMNPIEPGCGCHACTSGYTRSYLRHLDRCNEMLAPMLGTMHNLFYYEKLMADMRAAIESGTFLAFRESFYAARGASVPALSGE

SEQ ID NO: 61241 - protein, 377 aa, Stenotrophomonas koreensis
  REGION 1..377: note = tr|A0A0R0BZG0|A0A0R0BZG0_9GAMM Queuine tRNA-ribosyltransferase OS=Stenotrophomonas koreensis; OX = 266128 GN=tgt PE=3 SV=1
MSRLTFSLYSRDGRARRGQLSFPRGTVQTPAFMPVGTYGSVKGVLPEQIRALGAEIILGNTFHLYLRPGLEVIADHGGLHGFCQWNGPILTDSGGFQVFSLAHRRKITEQGVTFNAPTDGSKVFLGPEESMKIQKVLDSDIVMIFDECTPYPASEEVARKSMELSLRWARRSRDAHDALGNDAALFGIVQGGVHPELRSRSIDGLQAIGFDGYAIGGLAVGEPEHERNAMLEHLDPQLPADRPRYLMGVGRPEDLVEGVARGVDMFDCVMPTRNARNGHYFTSTGTVRIRNARYERDMDPIEPGCGCHACTGGYTRSYLRHLDRCNEMLAPMLGTLHNLFYYEKLMADIRAAIEDGRFLQFRADFYARRGAVAPPLP

SEQ ID NO: 61242 - protein, 376 aa, unidentified
  source 1..376: note = Stenotrophomonas lactitubi
  REGION 1..376: note = tr|A0A2M9QVA1|A0A2M9QVA1_9GAMM Queuine tRNA-ribosyltransferase OS=Stenotrophomonas lactitubi; OX = 2045214 GN=tgt PE=3 SV=1
MSRLQFQLQTRDGRARRGRLTFPRGTVETPAFMPVGTYGSVKGILPDHVRALGAEIILGNTFHLYLRPGLDVIADHGGLHGFCRWDGPILTDSGGFQVFSLAHRRKITEQGVTFASPTDGARVFLGPEESMKIQKVLDSDVVMIFDECTPYPATEDVARRSMELSLRWAQRSRNAHDELGNDAALFGIVQGGVHTDLRSRSAEALQGIGFDGYAIGGLAVGEPEDERNAMLDHLDPELPADRPRYLMGVGRPEDLVEGVARGVDMFDCVMPTRNARNGHYFTSFGTVRIRNSQYARDMDPIEPGCGCVACAGGYTRSYLRHLDRCNEMLAPMLGTQHNLFYYEKLMADIRAAIEAGTFLAFRESFYAARGAVAPPL

SEQ ID NO: 61243 - protein, 376 aa, Stenotrophomonas maltophilia
  REGION 1..376: note = sp|B2FN00|TGT_STRMK Queuine tRNA-ribosyltransferase; OS = Stenotrophomonas maltophilia (strain K279a) OX=522373; GN = tgt PE=3 SV=1
MSRLQFQLQTRDGRARRGRLTFPRGTVETPAFMPVGTYGSVKGILPDDVRALGAEIILGNTFHLYLRPGLDIIADHGGLHGFCRWDGPILTDSGGFQVFSLAHRRKITEQGVTFASPTDGARVFLGPEESMKIQKVLDSDVVMIFDECTPYPATEDVARRSMELSLRWAQRSRNAHDELGNDAALFGIVQGGVHTDLRSRSAEALQAIGFDGYAVGGLAVGEPEHERNAMLDHLDPELPSDRPRYLMGVGRPEDLVEGVARGVDMFDCVMPTRNARNGHYFTSFGTVRIRNSQYARDMDPIEPGCGCVACTGGYTRSYLRHLDRCNEMLAPMLGTLHNLFYYEKLMADIRAAIEAGTFLAFRESFYAARGAVAPPL

SEQ ID NO: 61244 - protein, 376 aa, Stenotrophomonas maltophilia
  REGION 1..376: note = tr|T5KZE7|T5KZE7_STEMA Queuine tRNA-ribosyltransferase OS=Stenotrophomonas maltophilia MF89 OX=1333853 GN=tgt PE=3 SV=1
MSRLQFQLQTRDGRARRGRLTFPRGTVETPAFMPVGTYGSVKGILPDQVRALGAEIILGNTFHLYLRPGLDIIADHGGLHGFCRWDGPILTDSGGFQVFSLAHRRKITEQGVTFASPTDGARVFLGPEESMKIQKVLDSDVVMIFDECTPYPATEDVARRSMELSLRWAQRSRNAHDELGNDAALFGIVQGGVHTDLRSRSAEALQAIGFDGYAIGGLAVGEPEHERNAMLDHLDPELPSDRPRYLMGVGRPEDLVEGVARGVDMFDCVMPTRNARNGHYFTSFGTVRIRNSQYARDMDPIEPGCGCVACTGGYTRSYLRHLDRCNEMLAPMLGTLHNLFYYEKLMADIRAAIEAGTFLAFRESFYAARGAVAPPL

SEQ ID NO: 61245 - protein, 381 aa, unidentified
  source 1..381: note = Stenotrophomonas panacihumi
  REGION 1..381: note = tr|A0A0R0AMI5|A0A0R0AMI5_9GAMM Queuine tRNA-ribosyltransferase OS=Stenotrophomonas panacihumi; OX = 676599 GN=tgt PE=3 SV=1
MSRLQFQLQTTDGHARRGRLTFPRGTVETPAFMPVGTYGSVKGVLPHQIRELGAEIILGNTFHLYLRPGLDVIADHGGLHGFTRWNGPILTDSGGFQVFSLAHRRKITEQGVTFASPTDGARVFLGPEESMKIQKVLDSDVVMIFDECTPYPATEDVARRSMELSLRWARRSRDAHDALGNDAALFGIVQGGVHPGLRSRSLDGLQQIGFDGYAIGGLAVGEPEHERNAMLEHLHPLLPADRPRYLMGVGRPEDLVEGVARGVDMFDCVMPTRNARNGHYFTAFGTVRIRNAKYERDQDPIEPGCGCPACAGGFTRAYLRHLDRCNEMLAPMLGTLHNLWYYEKLMADMRAAIAAGTFAAFRQSFYAARGAQAPALPGQGG

SEQ ID NO: 61246 - protein, 376 aa, Stenotrophomonas pavanii; identical to SEQ ID NO: 52298
  REGION 1..376: note = tr|A0A246L1G6|A0A246L1G6_9GAMM Queuine tRNA-ribosyltransferase OS=Stenotrophomonas pavanii; OX = 487698 GN=tgt PE=3 SV=1

SEQ ID NO: 61247 - protein, 379 aa, unidentified
  source 1..379: note = Stenotrophomonas pictorum
  REGION 1..379: note = tr|A0A0R0AP52|A0A0R0AP52_9GAMM Queuine tRNA-ribosyltransferase OS=Stenotrophomonas pictorum JCM 9942 OX=1236960 GN=tgt PE=3 SV=1
MSRLQFKLQTSDGRARRGQLSFPRGTVETPAFMPVGTYGSVKGILPEQVRALGAEIILGNTFHLYLRPGLEVIADHGGLHGFCQWSGPILTDSGGFQVFSLAHRRKITEEGVTFASPTDGARVFLGPEESMKIQKVLDSDVVMIFDECTPYPATEEVARKSMELSLRWAQRSRNAHDALGKDAALFGIVQGGVHTDLRSRSAEGLQQIGFDGYAIGGLAVGEPEHERNAMLDHMHPILPADRPRYLMGVGRPEDLVEGVARGVDMFDCVMPTRNARNGHYFTSFGTVRIRNARYERDMDVIEPGCGCHACTSGYTRSYLRHLDRCNEMLAPMLGTIHNLFYYEKLMADMRAAIEAGTFMAFRESFYAARGLAVPALSGE

SEQ ID NO: 61248 - protein, 376 aa, Stenotrophomonas rhizophila
  REGION 1..376: note = tr|A0A4U3GP66|A0A4U3GP66_9GAMM Queuine tRNA-ribosyltransferase OS=Stenotrophomonas rhizophila; OX = 216778 GN=tgt PE=3 SV=1
MSRLQFQLQTTDGRARRGRLTFPRGTVETPAFMPVGTYGSVKGILPEQIRALGAEIILGNTFHLYLRPGLDVIADHGGLHGFARWDGPILTDSGGFQVFSLAHRRKITEQGVTFSSPNDGARVFLGPEESMRIQKVLDSDVVMIFDECTPYPATEPVARTSMELSLRWAQRSRNAHDELGNDAALFGIVQGGVHHDLRSRSAEGLQKIGFDGYAIGGLAVGEPEHERNAMLDHMHPILPADRPRYLMGVGRPEDLVEGVARGVDMFDCVMPTRNARNGHYFTSAGTIRIRNARYQRDMDTIEPGCGCHACTSGYTRSYLRHLDRCNEMLAPMLGTIHNLYYYEKLMADMRAAIEAGTFAAFRESFYAARGMATPAL

SEQ ID NO: 61249 - protein, 376 aa, Stenotrophomonas rhizophila
  REGION 1..376: note = tr|A0A3N1KHG8|A0A3N1KHG8_9GAMM Queuine tRNA-ribosyltransferase OS=Stenotrophomonas rhizophila; OX = 216778 GN=tgt PE=3 SV=1
MSRLQFQLQTTDGRARRGRLTFPRGTVETPAFMPVGTYGSVKGILPEQIRALGAEIILGNTFHLYLRPGLDVIADHGGLHGFARWNGPILTDSGGFQVFSLAHRRKITEQGVTFSSPTDGARVFLGPEESMRIQKVLDSDVVMIFDECTPYPATEPVARTSMELSLRWAQRSRNAHDELGNDAALFGIVQGGVHHDLRSRSAEGLQQIGFDGYAIGGLAVGEPEHERNAMLDHMHPILPADRPRYLMGVGRPEDLVEGVARGVDMFDCVMPTRNARNGHYFTSFGTVRIRNARYERDMDTIEPGCGCHACTSGYTRSYLRHLDRCNEMLAPMLGTIHNLYYYEKLMADMRAAIAAGTFTAFRESFYAARGAVTPAL

SEQ ID NO: 61250 - protein, 379 aa, Stenotrophomonas sp.
  REGION 1..379: note = tr|A0A4R4IDB6|A0A4R4IDB6_9GAMM Queuine tRNA-ribosyltransferase OS=Stenotrophomonas sp. ATCM1_4; OX = 2259330 GN=tgt PE=3 SV=1
MSRLHFKLQTTDGRARRGQLSFPRGTVQTPAFMPVGTYGSVKGVLPEQVRALGAEIILGNTFHLYLRPGLDVIADHGGLHGFCRWDGPILTDSGGFQVFSLAHRRKITEEGVTFASPTDGARVFLGPEESMKIQKVLDSDIVMIFDECTPYPATEAVAQKSMELSLRWAQRSRNAHDAMGNDAALFGIVQGGVHTDLRSRSAEGLQKIGFDGYAIGGLAVGEPEHERNAMLDHMHPILPADHPRYLMGVGRPEDLVEGVARGVDMFDCVMPTRNARNGHYFTSFGTVRIRNARYERDMDPIEPGCGCHACTSGYTRAYLRHLDRCNEMLAPMLGTLHNLFYYEKLMADMRAAIEAGTFLAFRESFYVARGVSAPALSGE

SEQ ID NO: 61251 - protein, 380 aa, Stenotrophomonas sp.
  REGION 1..380: note = tr|A0A3R8TYM9|A0A3R8TYM9_9GAMM Queuine tRNA-ribosyltransferase OS=Stenotrophomonas sp. 278; OX = 2479851 GN=tgt PE=3 SV=1
MSRLQFQLQTTDGRARRGRLTFPRGTVETPAFMPVGTYGSVKGVLPEQIRALGAEIILGNTFHLYLRPGLDVIADHGGLHGFARWNGPILTDSGGFQVFSLAHRRKITEQGVTFASPTDGAKVFLGPEESMKIQKVLDSDIVMIFDECTPYPATEQVARTSMELSLRWAQRSRNAHDELGNDAALFGIVQGGVHHDLRTRSAEGLQQIGFDGYAIGGLAVGEPEHERNAMLEHLNPILPADRPRYLMGVGRPEDLVEGVARGVDMFDCVMPTRNARNGHYFTSTGTVRIRNARYERDMDTIEPGCGCHACSSGYTRSYLRHLDRCNEMLAPMLGTLHNLYYYEKLMADMRAAIAAGTFTAFRESFYAARGMATPALDGHA

SEQ ID NO: 61252 - protein, 214 aa, Stenotrophomonas terrae
  REGION 1..214: note = tr|A0A0R0CHY6|A0A0R0CHY6_9GAMM Queuine tRNA-ribosyltransferase (Fragment) OS=Stenotrophomonas terrae OX=405446 GN=tgt PE=4 SV=1
LRWAQRSRNAHDAMGNDAALFGIVQGGVHTELRSRSAEGLQQIGFDGYAIGGLAVGEPEHERNAMLDHMHPILPADRPRYLMGVGRPEDLVEGVARGVDMFDCVMPTRNARNGHYFTSFGTVRIRNARYERDMDVIEPGCGCHACTGGYTRSYLRHLDRCNEMLAPMLGTLHNLFYYEKLMADMRAAIEAGTFLAFRESFYAARGLSVPALSGE

SEQ ID NO: 61253 - protein, 372 aa, Steroidobacter denitrificans
  REGION 1..372: note = tr|A0A127F8K0|A0A127F8K0_STEDE Queuine tRNA-ribosyltransferase OS=Steroidobacter denitrificans; OX = 465721 GN=tgt PE=3 SV=1
MKYELIKSDGRARRGRIIFPRGIVETPAFMPVGTYGTVKAMTPEELTGIGAQIILGNTFHLMLRPGMEVVRAHGGLHGFMHWQGPILTDSGGFQVFSLATLRKITEDGVSFRSPVNGDTVMLTPERSMQVQRDLNADVVMIFDDCTPYPATPEQARRSMELSLRWAARSRAEFDRLANPHSLFGIVQGGMYPQLREASLEGLLRIGFDGYAIGGLAVGEPRLEREHILETLEPRLPVDRPRYLMGVGTPEDLVECVRRGVDMFDCVMPTRHARNGHLFTSTGVIKIRNARYQSDTRPLDESCDCYTCSHYSRAYLRHLDKCGEILAARLGTIHNLYHYLSLMRAMREAIEAQRFEAFVADFRARAEPLNIPP

SEQ ID NO: 61254 - protein, 389 aa, Stigmatella aurantiaca
  REGION 1..389: note = tr|A0A1H7VB74|A0A1H7VB74_STIAU Queuine tRNA-ribosyltransferase OS=Stigmatella aurantiaca OX=41; GN = tgt PE=3 SV=1
MAVRFELLTTDPTGARAGVLHTRRGSFPTPMFMPVATHAAFRHLGTEEVWETGSRILLANTYHLMLRPGADVFRKFGGIHPFMQWDGAILTDSGGFQIFSLPEDRLITEKGAQFRSFYDNSRQMLSPETSIAMQQAINSEIMMVLDVCIDSRTDEAGTREAMERTHRWAVRSLAAKDKVPTGQALFGIVQGGVYPRLRDESSAFLTQLPFDGFAIGGLAVGETKEERETMTARATASLPTDKPRYLMGVGTPTDLLEAVMRGVDMFDCIIPTKMAQQGYAYTFEGLVRITRMVYRLDDAPLDAACDCMVCTRYTRGYLQHLMRGKHHLGSRMLSIHNVRHYQKLMGKLREAILQGSYAQTYRELKAAIAPPKDLRGEVSPEAVTLKDVG

SEQ ID NO: 61255 - protein, 392 aa, Stigmatella aurantiaca
  REGION 1..392: note = tr|Q08P81|Q08P81_STIAD Queuine tRNA-ribosyltransferase OS=Stigmatella aurantiaca (strain DW4/3-1) OX=378806 GN=tgt PE=3 SV=1
MGEPKQKGDTRVAPGAVRFELLHEDPITRARRGRLHTPHGPIETPIFMPVGTVGSVKGVGPDDLLTLDAQIILGNTYHLMLRPGEALVGELGGLHRFISWNRPMLTDSGGFQVFSLSEKRKITEEGAAFQSHLDGSRHLLTPERSIDIQETLGADIIMAFDECPPATSERAYLEQSLARTTRWLHRCAKAWSRERSSLFGIVQGGLHEDLRKSHAEEVCAVDLPGYALGGYSVGESPEAMHDGVAFSAPLLPRGKPRYLMGVGTPVDLVTCVAAGVDMFDCVLPTRCARNGLLFTSEGKVVIRNAVYAKDPRPVDPTCTCYTCRTFSRAYLRHLFVAGEILAMRLNTLHNLHYFLGLMAEVRRAIAEDRYGAFVQEFRAKAAAQETERTRSR

SEQ ID NO: 61256 - protein, 392 aa, Stigmatella erecta
  REGION 1..392: note = tr|A0A1I0K4K3|A0A1I0K4K3_9DELT Queuine tRNA-ribosyltransferase OS=Stigmatella erecta OX=83460; GN = tgt PE=3 SV=1
MGEPKQKGDTRVAPGQVRFELLHEDPDTKARRGRLHTPHGPIETPIFMPVGTVGSVKGVGPDDLLTLEAQIILGNTYHLMLRPGEALVGEMGGLHRFISWDRPMLTDSGGFQVFSLSEKRKITEEGAAFQSHLDGSRHLLTPERSIDIQETLGADIIMAFDECPPATSERPYLEQSLARTTRWLHRCAQAWSRERSSLFGIVQGGLHEDLRKSHAEEVCAVDLPGYALGGYSVGESPEAMHAGVAFSAPLLPRNKPRYLMGVGTPVDLVTCVAAGVDMFDCVLPTRCARNGLLFTSEGKVVIRNAVYAKDPRPVDPTCTCYTCRTFSRAYLRHLFVAGEILAMRLNTLHNLHYFLGLMGQVRRAIAENRYAAFVREFRAQAAAQEAERTRAR

SEQ ID NO: 61257 - protein, 389 aa, Stigmatella erecta
  REGION 1..389: note = tr|A0A1I0K5Q9|A0A1I0K5Q9_9DELT Queuine tRNA-ribosyltransferase OS=Stigmatella erecta OX=83460; GN = tgt PE=3 SV=1
MAVRFELVTTDPTGARAGVLHTRRGSFPTPMFMPVATHAAFRHLGTEEVWETGSRILLANTYHLMLRPGADVFRKFGGIHPFMQWDGAILTDSGGFQIFSLPEDRLITEKGAQFRSFYDNSRQMLSPETSIAMQQAINSEIMMVLDVCIDSRTDEAGTREAMERTHRWAVRSLAAKDKVPTGQALFGIVQGGVHPRLRDESAAFLTQLPFDGFAIGGLAVGETKEERETMTVRATASLPTDKPRYLMGVGTPTDLLEAVMRGVDMFDCIIPTKMAQQGYAYTFEGLVRITRMVYRLDDAPLDAACDCLVCKRYTRGYLQHLMRGKHHLGSRMLSIHNVRHYQKLMGKLREAILQGSYAQTYRELKAAIAPPKDLRGEVSPEAVTLKDVG

SEQ ID NO: 61258 - protein, 383 aa, unidentified
  source 1..383: note = Stomatobaculum longum
  REGION 1..383: note = tr|H1HVJ8|H1HVJ8_9FIRM Queuine tRNA-ribosyltransferase OS=Stomatobaculum longum OX=796942; GN = tgt PE=3 SV=1
MKYKILASEGRAKRAHMETVHGSIETPVFMNVGTVAAIKGAVSTDDLKEIGTQVQLSNTYHLHVRPGDGKVSGDRLIHEFGGLHRFMHWDRPILTDSGGFQVFSLSGMRKIKEEGVTFRSHIDGRKIFMGPEESMQIQSNLGSTIAMAFDECPPSLAERSYIEQSVDRTTRWLKRCKAEMARLNALPDRVNPEQFLFGINQGGILEDVRIRHAREIGELDLDGYAVGGLAVGESAEEMYRILDAVVPELPREKPTYLMGVGTPQNILEAVERGVDFFDCVYPSRNGRHGHAYTNSGKINLFNKKYELDPRPIEEGCGCPACRSYSRAYIRHLLKAGEMLGMRLCVLHNLYFYNTMMQEIRDAIEKGEFRAYKERKIKGMEAKA

SEQ ID NO: 61259 - protein, 387 aa, Streptobacillus moniliformis
  REGION 1..387: note = tr|D1AYB2|D1AYB2_STRM9 Queuine tRNA-ribosyltransferase OS=Streptobacillus moniliformis (strain ATCC 14647 / DSM 12112 / NCTC 10651 / 9901); OX = 519441 GN=tgt PE=3 SV=1
MEKPVIYNLEKKDGMARAGVIKTPHGIIHTPVFMPVGTQATVKTMTPEELEEIGAEIILGNTYHLYLRPGDELIAKFNHLHNFMNWKKPILTDSGGFQIFSLGDLRKIKEEGAHFRSHHDGSKHFISPEKSIEIQNNLGSDIMMVLDECPPGLSTREYLIPSIERTTRWAKRCIEANKNPENQGLFAIVQGGIYEDLREKSLNELLVMDDSFSGYAIGGLAVGEPREDMYRILAHTTPLLPETKPRYLMGVGEPLDMLEAIENGIDMMDCVHPSRIGRHGTVFTKYGRLIIKNKEYEYDDRPLDVSDNYVCRNYTRAYIRHLFKTNEILGQRLATYQNIWFLINMIKEARQAILEGRFKEFKEEFIKNYTQGKNSEWIRPKDIRKGE

SEQ ID NO: 61260 - protein, 380 aa, Streptococcus acidominimus
  REGION 1..380: note = tr|A0A239WE50|A0A239WE50_STRAI Queuine tRNA-ribosyltransferase OS=Streptococcus acidominimus; OX = 1326 GN=tgt PE=3 SV=1
MTEHPIKYRLIKTEKHTGARLGEIETPHGTFSTPMFMPVGTQATVKTQSPEELKQMGSGIILSNTYHLWLRPGDELIARAGGLHKFMNWDQAILTDSGGFQVYSLADSRNITEEGVTFKNHLNGSKMFLSPEKAISIQNNLGSDIMMSFDECPQFYQPYDYVKNSIERTSRWAERGLKAHRRPNDQGLFGIVQGAGFEDLRRQSAQDLVSMDFAGYSIGGLAVGETHEEMNAVLDFTTPMLPENKPRYLMGVGAPDSLIDGVIRGVDMFDCVLPTRIARNGTCMTSEGRLVVKNAKYAEDFTPLDHDCDCYTCQNYTRAYLRHLLKADETFGMRLTSYHNLYFLVNLMKKVRQAIMDDNLLEFREDFVERYGYNQSKRNF

SEQ ID NO: 61261 - protein, 379 aa, Streptococcus acidominimus
  REGION 1..379: note = tr|A0A1Q8EC14|A0A1Q8EC14_STRAI Queuine tRNA-ribosyltransferase OS=Streptococcus acidominimus; OX = 1326 GN=tgt PE=3 SV=1
MTSPIQYRLIKKEKHTGARLGEIITPHGTFPTPMFMPVGTQATVKTQSPEELKEMGSGIILSNTYHLWLRPGDELIAQAGGLHKFMNWDQAILTDSGGFQVYSLADSRNITEEGVTFKNHLNGSKMFLSPEKAISIQNNLGSDIMMSFDECPQFYQPYDYVKKSIERTSRWAERGLKAHRRPQDQGLFGIVQGAGFEDLRRQSARDLVSMDFPGYSIGGLAVGESHEEMNAVLDFTTPLLPETKPRYLMGVGAPDSLIDGVIRGVDMFDCVLPTRIARNGTCMTSEGRLVVKNAQFAEDFTPLDHDCDCYTCRNYTRAYLRHLLKADETFGIRLTSYHNLYFLLKLMRNVRQAIMEDNLLEFREDFVERYGYNSSKRNF

SEQ ID NO: 61262 - protein, 380 aa, Streptococcus agalactiae
  REGION 1..380: note = sp|Q8E6X6|TGT_STRA3 Queuine tRNA-ribosyltransferase; OS = Streptococcus agalactiae serotype III (strain NEM316); OX = 211110 GN=tgt PE=3 SV=1
MTDHPIKYRLIKQEKHTGARLGEIITPHGTFPTPMFMPVGTQATVKTQSPEELKEMGSGIILSNTYHLWLRPGDELIAKAGGLHKFMNWDQAILTDSGGFQVYSLADSRNITEEGVTFKNHLNGAKMFLSPEKAISIQNNLGSDIMMSFDECPQFYQPYDYVKKSIERTSRWAERGLNAHRRPHDQGLFGIVQGAGFEDLRRQSARDLVSMDFPGYSIGGLAVGETHDEMNAVLDFTVPMLPNDKPRYLMGVGAPDSLIDAVIRGVDMFDCVLPTRIARNGTCMTSQGRLVVKNAKFAEDFTPLDPNCDCYTCKNYTRAYIRHLLKADETFGIRLTSYHNLYFLVNLMKDVRQAIMDDNLLEFRQDFMERYGYGMNNRNF

SEQ ID NO: 61263 - protein, 380 aa, Streptococcus agalactiae; identical to SEQ ID NO: 61262
  REGION 1..380: note = sp|Q3K2Y7|TGT_STRA1 Queuine tRNA-ribosyltransferase; OS = Streptococcus agalactiae serotype Ia (strain ATCC 27591 / A909 / CDC SS700) OX=205921 GN=tgt PE=3 SV=1

SEQ ID NO: 61264 - protein, 380 aa, Streptococcus anginosus
  REGION 1..380: note = tr|I0SIF9|I0SIF9_STRAP Queuine tRNA-ribosyltransferase OS=Streptococcus anginosus subsp. whileyi CCUG 39159 OX=1095729 GN=tgt PE=3 SV=1
MSDSPIQYRLIKKEKHTGARLGEIITPHGTFPTPMFMPVGTQATVKTQSPEELKEMGSGIILSNTYHLWLRPSDELIARAGGLHKFMNWDQAILTDSGGFQVYSLADSRNITEEGVTFKNHLNGAKMFLSPEKAISIQNNLGSDIMMSFDECPQFYQPYDYVKKSIERTSRWAERGLKAHRHPHDQGLFGIVQGAGFEDLRRQSAHDLVSMDFPGYSIGGLAVGESHKEMNAVLDFTTPMLPENKPRYLMGVGAPDSLIDGVIRGVDMFDCVLPTRIARNGTCMTSEGRLVIKNAQYAEDFTPLDHNCDCYTCKNYTRAYLRHLLKADETFGLRLTSYHNLYFLINLMKNVRQAILDDNLLEFREDFVEKYGYNYSKRNF

SEQ ID NO: 61265 - protein, 380 aa, Streptococcus anginosus
  REGION 1..380: note = tr|E6J2U6|E6J2U6_STRAP Queuine tRNA-ribosyltransferase OS=Streptococcus anginosus F0211; OX = 706437 GN=tgt PE=3 SV=1
MSDSPIQYRLIKKEKHTGARLGEIITPHGTFPTPMFMPVGTQATVKTQSPEELKEMGSGVILSNTYHLWLRPGDELIARAGGLHKFMNWDQAILTDSGGFQVYSLADSRNITEEGVTFKNHLNGSKMFLSPEKAISIQNNLGSDIMMSFDECPQFYQPYDYVKKSIERTSRWAERGLKAHRRPHDQGLFGIVQGAGFEDLRRQSAQDLVSMDFPGYSIGGLAVGESHEEMNAVLDFTTPMLPENKPRYLMGVGAPDSLIDGVIRGIDMFDCVLPTRIARNGTCMTSEGRLVIKNAQYAEDFTALDHDCDCYTCQNYSRAYIRHLLKADETFGLRLTSYHNLYFLVNLMKKVRQAILDDNLLEFREDFVERYGYNSSKRNF

SEQ ID NO: 61266 - protein, 380 aa, Streptococcus australis
  REGION 1..380: note = tr|A0A4Q1ZDR9|A0A4Q1ZDR9_9STRE Queuine tRNA-ribosyltransferase OS=Streptococcus australis; OX = 113107 GN=tgt PE=3 SV=1
MTDSPIQYRLIKKEKHTGARLGEIITPHGTFPTPMFMPVGTQATVKTQSPEELKEMGSGIILANTYHLWLRPGDDLVAKAGGLHQFMNWDQPILTDSGGFQVYSLADTRNITEEGVTFKNHLNGSKMFLSPEKAISIQNNLGSDIMMSFDECPQFYQPYDYVKKSIERTSRWAERGLKAHRRPHDQGLFGIVQGAGFEDLRRQSAQDLVSMDFPGYSIGGLAVGESHEEMNAVLDFTTPLLPENKPRYLMGVGAPDSLIDGVIRGVDMFDCVLPTRIARNGTCMTSQGRLVVKNAQFAEDFTPLDHECDCYTCKNYTRAYLRHLLKADETFGIRLTSYHNLYFLINLMKQVRQAIMDDNLLEFREHFVEKYGYNKSGRNF

SEQ ID NO: 61267 - protein, 426 aa, Streptococcus australis
  REGION 1..426: note = tr|E7S882|E7S882_9STRE Queuine tRNA-ribosyltransferase OS=Streptococcus australis ATCC 700641 OX=888833 GN=tgt PE=3 SV=1
MVVVPFIITQVRDRAGKIWYNRTGAHRRSCDRNKKAGTVFPSTEVTMTDSPIQYRLIKKEKHTGARLGEIITPHGTFPTPMFMPVGTQATVKTQSPEELKEMGSGIILANTYHLWLRPGDDLVAKAGGLHQFMNWDQPILTDSGGFQVYSLADTRNITEEGVTFKNHLNGSKMFLSPEKAISIQNNLGSDIMMSFDECPQFYQPYDYVKKSIERTSRWAERGLKAHRRPHDQGLFGIVQGAGFEDLRRQSAQDLVSMDFPGYSIGGLAVGESHEEMNAVLDFTTPLLPENKPRYLMGVGAPDSLIDGVIRGVDMFDCVLPTRIARNGTCMTSQGRLVVKNAQFAEDFTPLDHECDCYTCKNYTRAYLRHLLKADETFGIRLTSYHNLYFLINLMKQVRQAIMDDNLLEFREHFVEKYGYNKSGRNF

SEQ ID NO: 61268 - protein, 379 aa, unidentified
  source 1..379: note = Streptococcus azizii
  REGION 1..379: note = tr|A0A1V2SQS8|A0A1V2SQS8_9STRE Queuine tRNA-ribosyltransferase OS=Streptococcus azizii OX=1579424; GN = tgt PE=3 SV=1
MTSPIQYRLIKKEKHTGARLGEIVTPHGTFPTPMFMPVGTQATVKTQSPEELKEMGSGIILSNTYHLWLRPGDELIARGGGLHQFMNWNQAILTDSGGFQVYSLADSRNITEEGVTFKNHLNGSKMFLSPEKAIAIQNNLGSDIMMSFDECPQFYQPYGYVKKSIERTSRWAERGLKVHQRPHDQGLFGIVQGAGFEDLRRQSAQDLVSMDFSGYSIGGLAVGESHEEMNAVLDFTTPLLPETKPRYLMGVGAPDSLIDGVIRGVDMFDCVLPTRIARNGTCMTSQGRLVVKNAQFAEDFTPLDHDCDCYTCRHYTRAYLRHLLKADETFGIRLTSYHNLYFLLKLMRNVRQAIMDDNLLEFREDFVERYGYNSSKRNF

SEQ ID NO: 61269 - protein, 380 aa, unidentified
  source 1..380: note = Streptococcus bovimastitidis
  REGION 1..380: note = tr|A0A1L8MM27|A0A1L8MM27_9STRE Queuine tRNA-ribosyltransferase OS=Streptococcus bovimastitidis; OX = 1856638 GN=tgt PE=3 SV=1
MTDHPIKYRLIKKEKYTGARLGEIITPHGTFPTPMFMPVGTQATVKTQSPEELKSIGSGIILSNTYHLWLRPGDELIARAGGLHKFMNWDQPILTDSGGFQVYSLADSRNITEEGVTFKNHLNGSKMFLSPEKAISIQNNLGSDIMMSFDECPQFYQPYDYVKNSIERTSRWAERGLNAHRRPHDQGLFGIVQGAGFEDLRRQSAADLVGMDFAGYSVGGLAVGETHEEMNAVLDFTTPLLPENKPRYLMGVGAPDSLIDGVIRGIDMFDCVLPTRIARNGTCMTSEGRLVVKNAKFAEDFTSLDHDCDCYTCQNYTRAYIRHLLKADETFGIRLTSYHNLYFLVNLMKKVRQAIMDDNLLEFREDFLERYGYKTSSRNF

SEQ ID NO: 61270 - protein, 380 aa, Streptococcus canis
  REGION 1..380: note = tr|A0A2D4DRB9|A0A2D4DRB9_STRCB Queuine tRNA-ribosyltransferase OS=Streptococcus canis OX=1329; GN = tgt PE=3 SV=1
MTDYPIKYRLIKKEKHTGARLGEIITPHGTFPTPMFMPVGTQATVKTQSPEELKAIGSGIILSNTYHLWLRPGDELIARAGGLHKFMNWDQPILTDSGGFQVYSLADSRNITEEGVTFKNHLNGSKMFLSPEKAISIQNNLGSDIMMSFDECPQFYQPYDYVKKSIERTSRWAERGLKAHRRPHDQGLFGIVQGAGFEDLRRQSAADLVAMDFPGYSIGGLAVGESHEEMNAVLDFTTPLLPENKPRYLMGVGAPDSLIDGVIRGVDMFDCVLPTRIARNGTCMTSEGRLVVKNAKFAEDFTPLDHDCDCYTCQHYTRAYIRHLLKADETFGIRLTSYHNLYFLVNLMKKVRQAIVDDNLLEFRQDFLERYGYNTSNRNF

SEQ ID NO: 61271 - protein, 417 aa, Streptococcus canis
  REGION 1..417: note = tr|A0A3P5Y815|A0A3P5Y815_STRCB Queuine tRNA-ribosyltransferase OS=Streptococcus canis OX=1329; GN = tgt PE=3 SV=1
MIGAGTTCHLEALHYDGNSGRLKTLKTVYLDSKEKKNMTDYPIKYRLIKKEKHTGARLGEIITPHGTFPTPMFMPVGTQATVKTQSPEELKAIGSGIILSNTYHLWLRPGDELIARAGGLHKFMNWDQPILTDSGGFQVYSLADSRNITEEGVTFKNHLNGSKMFLSPEKAISIQNNLGSDIMMSFDECPQFYQPYDYVKKSIERTSRWAERGLKAHRRPHDQGLFGIVQGAGFEDLRRQSAADLVAMDFPGYSIGGLAVGESHEEMNAVLDFTTPLLPENKPRYLMGVGAPDSLIDGVIRGVDMFDCVLPTRIARNGTCMTSEGRLVVKNAKFAEDFTPLDHDCDCYTCQHYTRAYIRHLLKADETFGIRLTSYHNLYFLVNLMKKVRQAIVDDYLLEFRQDFLERYGYNTSNRNF

SEQ ID NO: 61272 - protein, 380 aa, Streptococcus constellatus
  REGION 1..380: note = tr|A0A139QEQ1|A0A139QEQ1_STRCV Queuine tRNA-ribosyltransferase OS=Streptococcus constellatus; OX = 76860 GN=tgt PE=3 SV=1
MSDSPIQYRLIKKEKHTGARLGEIITPHGTFPTPMFMPVGTQATVKTQSPEELKQMGSGIILANTYHLWLRPGDELIARAGGLHKFMNWDQAILTDSGGFQVYSLADSRNITEEGVTFKNHLNGSKMFLSPEKAISIQNNLGSDIMMSFDECPQFYQPYDYVKKSIERTSRWAERGLEAHSRPHDQGLFGIVQGAGFEDLRRQSAHDLVSMDFPGYSIGGLAVGESHEEMNAVLDFTTPMLPESKPRYLMGVGAPDSLIDGVIRGVDMFDCVLPTRIARNGTCMTSEGRLVIKNAQFAEDFTPLDHDCDCYTCKNYTRAYIRHLLKADETFGLRLTSYHNLYFLVNLMKKVRQAILDDNLLEFREDFVERYGYNRSKRNF

SEQ ID NO: 61273 - protein, 380 aa, Streptococcus constellatus
  REGION 1..380: note = tr|F9PA54|F9PA54_STRCV Queuine tRNA-ribosyltransferase OS=Streptococcus constellatus subsp. pharyngis SK1060 = CCUG 46377 OX=1035184 GN=tgt; PE = 3 SV=1
MSDSPIQYRLIKKEKHTGARLGEIITPHGTFPTPMFMPVGTQATVKTQSPEELKEMGSGIILSNTYHLWLRPSDELIARAGGLHKFMNWDQAILTDSGGFQVYSLADSRNITEEGVTFKNHLNGAKMFLSPEKAISIQNNLGSDIMMSFDECPQFYQPYDYVKKSIERTSRWAERGLKAHCRPHDQGLFGIVQGAGFEDLRRQSAHDLVSMDFPGYSIGGLAVGESHEEMNAVLDFTTPMLPESKPRYLMGVGAPDSLIDGVIRGVDMFDCVLPTRIARNGTCMTSEGRLVIKNAQFAEDFTPLDHDCDCYTCKNYTRAYIRHLLKADETFGLRLTSYHNLYFLVNLMKKVRQAILDDNLLEFREDFVERYGYNRSKRNF

SEQ ID NO: 61274 - protein, 380 aa, Streptococcus criceti
  REGION 1..380: note = tr|G5JN85|G5JN85_STRCG Queuine tRNA-ribosyltransferase OS=Streptococcus criceti HS-6; OX = 873449 GN=tgt PE=3 SV=1
MTDVPIKYRLIKKEKHTGARLGEIITPHGTFPTPMFMPVGTQATVKTQSPEELKEMGSGIILSNTYHLWLRPGDELIAEAGGLHKFMNWDQAILTDSGGFQVYSLADSRNITEEGVTFKNHLNGAKMFLSPEKAISIQNNLGSDIMMSFDECPQFYQPYDYVKKSIERTSRWAERGLKAHRRPHDQGLFGIVQGAGFEDLRRQSAADLVSMDFPGYSIGGLAVGESHEEMNAVLDFTTQLLPENKPRYLMGVGAPDSLIDGVIRGVDMFDCVLPTRIARNGTCMTSQGRLVVKNAAFAKDFGPLDPACDCYTCRHYSRAYIRHLLKADETFGLRLTSYHNLYFLVNLMKKVRQAIKDDNLLEFRQDFMDRYGYGKNGRNF

SEQ ID NO: 61275 - protein, 380 aa, Streptococcus cristatus
  REGION 1..380: note = tr|A0A512ACM3|A0A512ACM3_STRCR Queuine tRNA-ribosyltransferase OS=Streptococcus cristatus; OX = 45634 GN=tgt PE=3 SV=1
MSTSPIQYRLIKKEKHTGARLGEIITPHGTFPTPMFMPVGTQATVKTQSPEELKQMGSGIILANTYHLWLRPGDELIARAGGLHKFMNWDQPILTDSGGFQVYSLADSRNITEEGVTFKNHLNGSKMFLSPEKAISIQNNLGSDIMMSFDECPQFYQPYDYIKKSIERTSRWAERGLKAHTRPHDQGLFGIVQGAGFEDLRRQSAQDLVSMDFPGYSIGGLAVGESHEEMNAVLDFTTPLLPENKPRYLMGVGAPDSLIDGVIRGVDMFDCVLPTRIARNGTCMTSEGRLVVKNAQFEEDFTPLDHDCDCYTCTNYTRAYIRHLLKADETFGLRLTSYHNLYFLVNLMKKVRQAIMDDNLLEFREDFVERYGYNRSKRNF

SEQ ID NO: 61276 - protein, 380 aa, Streptococcus cristatus
  REGION 1..380: note = tr|A0A5B0DA34|A0A5B0DA34_STRCR Queuine tRNA-ribosyltransferase OS=Streptococcus cristatus; OX = 45634 GN=tgt PE=3 SV=1
MSDSPIQYRLIKKEKHTGARLGEIITPHGTFPTPMFMPVGTQATVKTQSPEELKQMGSGIILANTYHLWLRPGDELIARAGGLHKFMNWDQPILTDSGGFQVYSLADSRNITEEGVTFKNHLNGSKMFLSPEKAISIQNNLGSDIMMSFDECPQFYQPYDYVKKSIERTSRWAERGLKAHRRPHDQGLFGIVQGAGFEDLRRQSAQDLVSMDFPGYSIGGLAVGESHEEMNAVLDFTTPLLPENKPRYLMGVGAPDSLIDGVIRGVDMFDCVLPTRIARNGTCMTSEGRLVVKNAQFEEDFTPLDHDCDCYTCTNYTRAYIRHLLKADETFGLRLTSYHNLYFLVNLMKKVRQAIMDDNLLEFREDFVERYGYNRSKRNF

SEQ ID NO: 61277 - protein, 379 aa, unidentified
  source 1..379: note = Streptococcus cuniculi
  REGION 1..379: note = tr|A0A4Y9JCV2|A0A4Y9JCV2_9STRE Queuine tRNA-ribosyltransferase OS=Streptococcus cuniculi; OX = 1432788 GN=tgt PE=3 SV=1
MTSPIHYRLIKKEKHTGARLGEIITPHGTFPTPMFMPVGTQATVKTQSPEELKEMGTGIILSNTYHLWLRPGDELIARAGGLHKFMNWDQAILTDSGGFQVYSLADSRNITEEGVTFKNHLNGSKMFLSPEKAISIQNNLGSDIMMSFDECPQFYQPYDYVKKSIERTSRWAERGLKAHRRPHEQGLFGIVQGAGFEDLRRQSAHDLVSMDFPGYSIGGLAVGESHEEMNAVLDFTTPLLPENKPRYLMGVGAPDSLIDGVIRGVDMFDCVLPTRIARNGTCMTSEGRLVVKNAQFAEDFTPLDHDCDCYTCRNYTRAYLRHLLKADETFGIRLTSYHNLYFLLKLIRNIRQAIMDDNLLEFREDFIERYGYNSSKRNF

SEQ ID NO: 61278 - protein, 379 aa, unidentified
  source 1..379: note = Streptococcus cuniculi
  REGION 1..379: note = tr|A0A1Q8E8K1|A0A1Q8E8K1_9STRE Queuine tRNA-ribosyltransferase OS=Streptococcus cuniculi; OX = 1432788 GN=tgt PE=3 SV=1
MTSPIQYRLIKKEKHTGARLGEIITPHGTFPTPMFMPVGTQATVKTQSPEELKEMGSGIILSNTYHLWLRPGDELIARAGGLHKFMNWDQAILTDSGGFQVYSLADSRNITEEGVTFKNHLNGSKMFLSPEKAISIQNNLGSDIMMSFDECPQFYQPYDYVKKSIERTSRWAERGLKAHRRPHDQGLFGIVQGAGFEDLRRQSAHDLVSMDFPGYSIGGLAVGESHEEMNAVLDFTTPLLPENKPRYLMGVGAPDSLIDGVIRGVDMFDCVLPTRIARNGTCMTSEGRLVVKNAQFAEDFTPLDHDCDCYTCRNYTRAYLRHLLKADETFGIRLTSYHNLYFLLKLMRNVRQAIMDDNLLEFREDFVERYGYNSSKRNF

SEQ ID NO: 61279 - protein, 380 aa, Streptococcus downei
  REGION 1..380: note = tr|A0A380JCR2|A0A380JCR2_STRDO Queuine tRNA-ribosyltransferase OS=Streptococcus downei MFe28; OX = 764290 GN=tgt PE=3 SV=1
MTDVPIKYRLIKKEKHTGARLGEIITPHGTFSTPMFMPVGTQATVKTQSPEELKEMGSGIILANTYHLWLRPGDDLVAEAGGLHKFMNWDQAILTDSGGFQVYSLADSRNITEEGVTFKNHLNGAKMFLSPEKAISIQNNLGSDIMMSFDECPQFYQPYDYVKKSIERTSRWAERGLKAHRRPQDQGLFGIVQGAGYEDLRRQSAADLVSMDFPGYSIGGLAVGESHEEMNAVLDFTTPLLPENKPRYLMGVGAPDSLIDGVIRGIDMFDCVLPTRIARNGTCMTSQGRLVVKNAAFARDFGPLDPVCDCYTCRNYSRAYIRHLLKADETFGLRLTSYHNLYFLVNLMNKVRQAILDDNLLEFRQDFLERYGYGKNSRNF

SEQ ID NO: 61280 - protein, 380 aa, Streptococcus dysgalactiae
  REGION 1..380: note = tr|K4QB86|K4QB86_STREQ Queuine tRNA-ribosyltransferase OS=Streptococcus dysgalactiae subsp. equisimilis AC-2713 OX=759913 GN=tgt PE=3 SV=1
MTDYPIKYRLIKKEKHTGARLGEIITPHGTFPTPMFMPVGTQATVKTQSPEELKAIGSGIILSNTYHLWLRPGDDLIARAGGLHKFMNWDQPILTDSGGFQVYSLADSRNITEEGVTFKNHLNGSKMFLSPEKAISIQNNLGSDIMMSFDECPQFYQPYDYVKKSIERTSRWAERGLKAHRRPHDQGLFGIVQGAGFEDLRRQSAADLVAMDFPGYSIGGLAVGESHEEMNAVLDFTTPLLPENKPRYLMGVGAPDSLIDGVIRGVDMFDCVLPTRIARNGTCMTSEGRLVIKNAKFAEDFTPLDHDCDCYTCQNYSRAYIRHLLKADETFGIRLTSYHNLYFLVNLMKKVRQAIMDDNLLEFRQDFLERYGYNKSNRNF

SEQ ID NO: 61281 - protein, 380 aa, Streptococcus dysgalactiae
  REGION 1..380: note = tr|M4YZR3|M4YZR3_STREQ Queuine tRNA-ribosyltransferase OS=Streptococcus dysgalactiae subsp. equisimilis RE378 OX=617121 GN=tgt PE=3 SV=1
MTDYPIKYRLIKKEKHTGARLGEIITPHGTFPTPMFMPVGTQATVKTQSPEELKAIGSGIILSNTYHLWLRPGDDLIARAGGLHKFMNWDQPILTDSGGFQVYSLADSRNITEEGVTFKNHLNGSKMFLSPEKAISIQNNLGSDIMMSFDECPQFYQPYDYVKKSIERTSRWAERGLKAHRRPHDQGLFGIVQGAGFEDLRRQSAADLVAMDFPGYSIGGLAVGESHEEMNAVLDFTTPLLPENKPRYLMGVGAPDSLIDGVIRGVDMFDCVLPTRIARNGTCMTSEGRLVVKNAKFAEDFTPLDHDCDCYTCQNYSRAYIRHLLKADETFGIRLTSYHNLYFLVNLMKKVRQAIMDDNLLEFRQDFLERYGYNKSNRNF

SEQ ID NO: 61282 - protein, 380 aa, Streptococcus equi
  REGION 1..380: note = tr|A0A380JP48|A0A380JP48_9STRE Queuine tRNA-ribosyltransferase OS=Streptococcus equi subsp. equi; OX = 148942 GN=tgt PE=3 SV=1
MTNYPITYRLIKKEKHTGARLGEIITPHGTFPTPMFMPVGTQATVKTQSPEELKEIGSGIILSNTYHLWLRPGDELIARAGGLHKFMNWDQAILTDSGGFQVYSLADSRNITEEGVTFKNHLNGSKMFLSPEKAISIQNNLGSDIMMSFDECPQFYQPYDYVKKSIERTSRWAERGLKAHRRPHDQGLFGIVQGAGFEDLRRQSAADLVAMDFPGYSIGGLAVGESHVEMNAVLDFTTPLLPENKPRYLMGVGAPDSLIDGVIRGVDMFDCVLPTRIARNGTCMTSEGRLVVKNAKFAEDFTPLDHHCDCYTCQHYTRAYLRHLLKADETFGMRLTSYHNLYFLVNLMKQVRQAILDDNLLEFRQDFLERYGYNSSSRNF

SEQ ID NO: 61283 - protein, 380 aa, Streptococcus equi
  REGION 1..380: note = sp|C0MAH5|TGT_STRE4 Queuine tRNA-ribosyltransferase; OS = Streptococcus equi subsp. equi (strain 4047) OX=553482; GN = tgt PE=3 SV=1
MTNYPITYRLIKKEKHTGARLGEIITPHGTFPTPMFMPVGTQATVKTQSPEELKEIGSGIILSNTYHLWLRPGDELIARAGGLHKFMNWDQAILTDSGGFQVYSLADSRNITEEGVTFKNHLNGSKMFLSPEKAISIQNNLGSDIMMSFDECPQFYQPYDYVKKSIERTSRWAERGLKAHRRPHDQGLFGIVQGAGFEDLRRQSAADLVSMDFPGYSIGGLAVGESHAEMNAVLDFTTPLLPENKPRYLMGVGAPDSLIDGVIRGVDMFDCVLPTRIARNGTCMTSEGRLVVKNAKFAEDFTPLDHHCDCYTCQHYTRAYLRHLLKADETFGMRLTSYHNLYFLVNLMKQVRQAILDDNLLEFRQDFLERYGYNSSSRNF

SEQ ID NO: 61284 - protein, 380 aa, Streptococcus equinus
  REGION 1..380: note = tr|A0A447UB27|A0A447UB27_STREI Queuine tRNA-ribosyltransferase OS=Streptococcus equinus OX=1335; GN = tgt PE=3 SV=1
MTDYPIKYRLIKKEKHTGARLGEIITPHGTFPTPMFMPVGTQATVKTQSPEELKEMGSGIILSNTYHLWLRPGDELIARAGGLHKFMNWDQAILTDSGGFQVYSLAETRNITEEGVTFKNHLNGQKMFLSPEKAISIQNNLGSDIMMSFDECPQFYQPYDYVKKSIERTSRWAERGLKAHRRPHDQGLFGIVQGAGFKDLRRQSANDLVSMDFPGYSIGGLAVGESHKEMNAVLDFTVPMLPENKPRYLMGVGAPDSLIDGVIRGVDMFDCVLPTRIARNGTCMTSEGRLVVKNAAYAEDFTPLDHDCDCYTCRNYTRAYIRHLLKADETFGLRLTSYHNLYFLVNLMKKVRQAIMDDNLLEFREDFFERYGYNRSARNF

SEQ ID NO: 61285 - protein, 380 aa, Streptococcus equinus
  REGION 1..380: note = tr|A0A1H0ZR96|A0A1H0ZR96_STREI Queuine tRNA-ribosyltransferase OS=Streptococcus equinus OX=1335; GN = tgt PE=3 SV=1
MTDYPIKYRLIKKEKHTGARLGEIITPHGTFPTPMFMPVGTQATVKTQSPEELKEMGSGIILSNTYHLWLRPGDELIARAGGLHKFMNWDQAILTDSGGFQVYSLAETRNITEEGVTFKNHLNGQKMFLSPEKAISIQNNLGSDIMMSFDECPQFYQPYDYVKKSIERTSRWAERGLKAHRRPHDQGLFGIVQGAGFKDLRRQSANDLVSMDFPGYSIGGLAVGESHKEMNAVLDFTVPMLPENKPRYLMGVGAPDSLIDGVIRGVDMFDCVLPTRIARNGTCMTSEGRLVVKNAAYAEDFTPLDHDCDCYTCRNYTRAYIRHLLKADETFGLRLTSYHNLYFLVNLMKKVRQAIMDDNLLEFREDFFERYGYNKSDRNF

SEQ ID NO: 61286 - protein, 380 aa, Streptococcus ferus
  REGION 1..380: note = tr|A0A2X3VP23|A0A2X3VP23_9STRE Queuine tRNA-ribosyltransferase OS=Streptococcus ferus OX=1345; GN = tgt PE=3 SV=1
MTDSPIQYRLIKKEKHTGARLGEIITPHGTFPTPMFMPVGTQATVKTQSPEELKEMGSGIILANTYHLWLRPGDDLVAKAGGLHQFMNWDQPILTDSGGFQVYSLAEKRNITEEGVTFKNHLNGAKMFLTPEKAISIQNNLGSDIMMSFDECPQFYQPYDYVKKSIERTSRWAERGLKAHRRPHDQGLFGIVQGAGFEDLRRQSARDLVGMDFPGYSIGGLAVGESHEEMNAVLDFTTPLLPEDKPRYLMGVGAPDSLIDGVIRGIDMFDCVLPTRIARNGTCMTSEGRLVVKNAQYEEDFSPLDHDCDCYTCRNYTRAYIRHLIKADETFGLRLTSYHNLYFLINLMKKVRQAIMDDNLLEFREDFLERYGYNRTNRNF

SEQ ID NO: 61287 - protein, 380 aa, Streptococcus gallolyticus
  REGION 1..380: note = tr|A0A368UF21|A0A368UF21_9STRE Queuine tRNA-ribosyltransferase OS=Streptococcus gallolyticus; OX = 315405 GN=tgt PE=3 SV=1
MTDYPIKYRLIKKEKHTGARLGEIITPHGTFPTPMFMPVGTQATVKTQSPEELKEMGSGIILSNTYHLWLRPGDDLIARAGGLHKFMNWDQAILTDSGGFQVYSLADTRNITEEGVTFKNHLNGAKMFLSPEKAISIQNNLGSDIMMSFDECPQFYQPYDYVKKSIERTSRWAERGLKAHRRPHDQGLFGIVQGAGFKDLRRQSASDLVSMDFPGYSIGGLAVGESHKEMNEVLDFTVPMLPENKPRYLMGVGAPDSLIDGVIRGVDMFDCVLPTRIARNGTCMTSRGRLVVKNAAYAEDFTPLDHDCDCYTCRNYTRAYIRHLLKADETFGLRLTSYHNLYFLVNLMKKVRQAIMDDNLLEFREDFFERYGYNKSDRNF

SEQ ID NO: 61288 - protein, 380 aa, Streptococcus gallolyticus
  REGION 1..380: note = tr|A0A0E1XDL2|A0A0E1XDL2_STRGY Queuine tRNA-ribosyltransferase OS=Streptococcus gallolyticus subsp. gallolyticus TX20005 OX=545774 GN=tgt PE=3 SV=1
MTDYPIKYRLIKKEKHTGARLGEIITPHGTFPTPMFMPVGTQATVKTQSPEELKEMGSGIILSNTYHLWLRPGDELIARAGGLHKFMNWDQAILTDSGGFQVYSLADTRNITEEGVTFKNHLNGAKMFLSPEKAISIQNNLGSDIMMSFDECPQFYQPYDYVKKSIERTSRWAERGLKAHRRPHDQGLFGIVQGAGFKDLRRQSASDLVSMDFPGYSIGGLAVGESHKEMNEVLDFTVPMLPENKPRYLMGVGAPDSLIDGVIRGVDMFDCVLPTRIARNGTCMTSEGRLVVKNAAYAEDFTPLDHDCDCYTCRNYTRAYIRHLLKADETFGLRLTSYHNLYFLVNLMKKVRQAIMDDNLLEFREDFFERYGYNKSDRNF

SEQ ID NO: 61289 - protein, 380 aa, Streptococcus gordonii
  REGION 1..380: note = sp|A8AUL3|TGT_STRGC Queuine tRNA-ribosyltransferase; OS = Streptococcus gordonii (strain Challis / ATCC 35105 / BCRC 15272 / CH1 / DL1 / V288) OX=467705 GN=tgt PE=3 SV= 1
MSDSPIQYRLIKKEKHTGARLGEIITPHGTFPTPMFMPVGTQATVKTQSPEELKQMGSGIILANTYHLWLRPGDELIARAGGLHKFMNWDQPILTDSGGFQVYSLADSRNITEEGVTFKNHLNGSKMFLSPEKAISIQNNLGSDIMMSFDECPQFYQPYDYVKKSIERTSRWAERGLKAHSRPHDQGLFGIVQGAGFEDLRRQSAQDLVSMDFPGYSIGGLAVGESHEEMNAVLDFTTPLLPENKPRYLMGVGAPDSLIDGVIRGVDMFDCVLPTRIARNGTCMTSEGRLVVKNAQFEEDFTPLDHNCDCYTCTNYTRAYIRHLLKADETFGLRLTSYHNLYFLVNLMKKVRQAIMDDNLLEFREDFMERYGYNRSNRNF

SEQ ID NO: 61290 - protein, 380 aa, Streptococcus gordonii
  REGION 1..380: note = tr|A0A0F5MMA5|A0A0F5MMA5_STRGN Queuine tRNA-ribosyltransferase OS=Streptococcus gordonii OX=1302; GN = tgt PE=3 SV=1
MSDSPIQYRLIKKEKHTGARLGEIITPHGTFPTPMFMPVGTQATVKTQSPEELKQMGSGIILANTYHLWLRPGDELIARAGGLHKFMNWDQPILTDSGGFQVYSLADSRNITEEGVTFKNHLNGSKMFLSPEKAISIQNNLGSDIMMSFDECPQFYQPYDYVKKSIERTSRWAERGLKAHSRPHDQGLFGIVQGAGFEDLRRQSAQDLVSMDFPGYSIGGLAVGESHEEMNAVLDFTTPMLPENKPRYLMGVGAPDSLIDGVIRGVDMFDCVLPTRIARNGTCMTSEGRLVVKNAQFEEDFTPLDHNCDCYTCTNYTRAYIRHLLKADETFGLRLTSYHNLYFLVNLMKKVRQAIMDDNLLEFREDFMERYGYNRSNRNF

SEQ ID NO: 61291 - protein, 380 aa, unidentified
  source 1..380: note = Streptococcus halitosis
  REGION 1..380: note = tr|A0A426FUD7|A0A426FUD7_9STRE Queuine tRNA-ribosyltransferase OS=Streptococcus halitosis; OX = 2172545 GN=tgt PE=3 SV=1
MSDSPIKYRLIKKEKHTGARLGEIITPHGTFPTPMFMPVGTQATVKTQSPEELKEMGSGIILSNTYHLWLRPGDELIARAGGLHKFMNWDQPILTDSGGFQVYSLADSRNITEEGVTFKNHLNGSKMFLSPEKAISIQNNLGSDIMMSFDECPQFYQPYDYVKKSIERTSRWAERGLKAHRRPEDQGLFGIVQGAGFEDLRRQSAHDLVSMDFPGYSIGGLAVGETHEEMNAVLDFTTQLLPENKPRYLMGVGAPDSLIDGVIRGVDMFDCVLPTRIARNGTCMTSQGRLVVKNAQFAEDFTPLDPECDCYTCKNYTRAYLRHLLKADETFGIRLTSYHNLYFLLNLMKQVRQAIVDDNLLEFREYFVEKYGYNKSGRNF

SEQ ID NO: 61292 - protein, 381 aa, Streptococcus henryi
  REGION 1..381: note = tr|A0A1G6AQ02|A0A1G6AQ02_9STRE Queuine tRNA-ribosyltransferase OS=Streptococcus henryi OX=439219; GN = tgt PE=3 SV=1
MTTDYPIKYRLIKKEKHTGARLGEIITPHGTFPTPMFMPVGTQATVKTQSPEELKEMGSGIILANTYHLWLRPGDELIARAGGLHKFMNWDQPILTDSGGFQVYSLADSRNITEEGVTFKNHLNGSKMFLSPEKAISIQNNLGSDIMMSFDECPQFYQPYDYVKKSIERTSRWAERGLKAHSRPHDQGLFGIVQGAGFEDLRRQSAADLVGMDFPGYSIGGLAVGETHEEMNAVLDFTTPLLPENKPRYLMGVGAPDSLIDGVIRGVDMFDCVLPTRIARNGTCMTSQGRLVVKNAQYAEDFTPLDHDCDCYTCKNYTRAYLRHLLKADETFGLRLTSYHNLYFLVNLMKKVRQAIMDDNLLEFRQDFMERYGYGKNGRNF

SEQ ID NO: 61293 - protein, 380 aa, Streptococcus hyointestinalis
  REGION 1..380: note = tr|A0A380KEP9|A0A380KEP9_9STRE Queuine tRNA-ribosyltransferase OS=Streptococcus hyointestinalis; OX = 1337 GN=tgt PE=3 SV=1
MTEHPIKYRLIKQEKHTGARLGEIITPHGTFPTPMFMPVGTQATVKTQSPEELKEMGSGIILSNTYHLWLRPGDELIARAGGLHKFMNWDQAILTDSGGFQVYSLAENRNITEEGVTFKNHLNGAKMFLSPEKAISIQNNLGSDIMMSFDECPQFYQPYDYVKKSIERTSRWAERGLKAHRRPHDQGLFGIVQGAGFEDLRRQSAQDLVSMDFPGYSIGGLAVGESHEEMNAVLDFTVPMLPQDKPRYLMGVGAPDSLIDGVIRGIDMFDCVLPTRIARNGTCMTSMGRLVVKNAQYAEDFTPLDPNCDCYTCTNYTRAYIRHLIKADETFGLRLTSYHNLYFLVNLMKQVRQAIMDDNLLEFREDFVERYGYNNSKRNF

SEQ ID NO: 61294 - protein, 380 aa, Streptococcus ictaluri
  REGION 1..380: note = tr|G5JZI2|G5JZI2_9STRE Queuine tRNA-ribosyltransferase OS=Streptococcus ictaluri 707-05; OX = 764299 GN=tgt PE=3 SV=1
MTDYPIKYRLIKKEKHTGARLGEIITPHGTFPTPMFMPVGTQATVKTQSPEELKAMGSGIILSNTYHLWLRPGDELIARAGGLHKFMNWDQPILTDSGGFQVYSLADSRNITEEGVTFKNHLNGSKMFLSPEKAISIQNNLGSDIMMSFDECPQFYQPYDYVKKSIERTSRWAERGLKAHRRPHDQGLFGIVQGAGFEDLRRQSAADLVSMDFPGYSIGGLAVGETHDEMNAVLDFTTPLLPENKPRYLMGVGAPDSLIDGVIRGVDMFDCVLPTRIARNGTCMTSEGRLVVKNAKFAEDFTPLDHDCDCYTCQNYTRAYIRHLLKADETFGIRLTSYHNLYFLVNLMKKVRQAIMDDNLLEFREDFLERYGYNKSSRNF

SEQ ID NO: 61295 - protein, 380 aa, Streptococcus infantarius
  REGION 1..380: note = tr|A0A380KRA3|A0A380KRA3_9STRE Queuine tRNA-ribosyltransferase OS=Streptococcus infantarius; OX = 102684 GN=tgt PE=3 SV=1
MTDYPIKYRLIKKEKHTGARLGEIITPHGTFPTPMFMPVGTQATVKTQSPEELKEMGSGIILSNTYHLWLRPGDELIARAGGLHKFMNWDQAILTDSGGFQVYSLAETRNITEEGVTFKNHLNGQKMFLSPEKAISIQNNLGSDIMMSFDECPQFYQPYDYVKKSIERTSRWAERGLKAHRRPHDQGLFGIVQGAGFKDLRRQSANDLVSMDFPGYSIGGLAVGESHKEMNAVLDFTVPMLPESKPRYLMGVGAPDSLIDGVIHGVDMFDCVLPTRIARNGTCMTSEGRLVVKNAAYAEDFTPLDHDCDCYTCRNYTRAYIRHLLKADETFGLRLTSYHNLYFLVNLMKKVRQAIMDDNLLEFREDFFERYGYNKSDRNF

SEQ ID NO: 61296 - protein, 360 aa, Streptococcus infantis
  REGION 1..360: note = tr|F9PY37|F9PY37_9STRE Queuine tRNA-ribosyltransferase OS=Streptococcus infantis SK970; OX = 1035189 GN=tgt PE=3 SV=1
MGEIITPHGTFPTPMFMPVGTQATVKTQSPEELKEMGSGIILSNTYHLWLRPGDELIARAGGLHKFMNWDQPILTDSGGFQVYSLADSRNITEEGVTFKNHLNGSKMFLSPEKAISIQNNLGSDIMMSFDECPQFYQPYDYVKKSIERTSRWAERGLKAHRRPHDQGLFGIVQGAGFEDLRRQSAQDLVSMDFPGYSIGGLAVGETHEEMNAVLDFTTQLLPENKPRYLMGVGAPDSLIDGVIRGVDMFDCVLPTRIARNGTCMTSQGRLVVKNAQFAEDFTPLDPECDCYTCKNYTRAYLRHLLKADETFGIRLTSYHNLYFLLNLMKQVHQAIMDDNLLEFREHFVEKYGYNKSGRNF

SEQ ID NO: 61297 - protein, 380 aa, Streptococcus infantis
  REGION 1..380: note = tr|E8K2E6|E8K2E6_9STRE Queuine tRNA-ribosyltransferase OS=Streptococcus infantis ATCC 700779 OX=889204 GN=tgt PE=3 SV=1
MSDSPIKYRLIKKEKHTGARLGEIITPHGTFPTPMFMPVGTQATVKTQSPEELKDMGSGIILSNTYHLWLRPGDELIARAGGLHKFMNWDQPILTDSGGFQVYSLADSRNITEEGVTFKNHLNGSKMFLSPEKAISIQNNLGSDIMMSFDECPQFYQPYDYVKKSIERTSRWAERGLKAHRRPHDQGLFGIVQGAGFEDLRRQSAQDLVSMDFPGYSIGGLAVGETHEEMNAVLDFTTQLLPENKPRYLMGVGAPDSLIDGVIRGVDMFDCVLPTRIARNGTCMTSQGRLVVKNAQFAEDFTPLDPECDCYTCKNYTRAYLRHLLKADETFGIRLTSYHNLYFLLNLMKQVRQAIMDDNLLEFREHFVEKYGYNKSGRNF

SEQ ID NO: 61298 - protein, 380 aa, Streptococcus iniae
  REGION 1..380: note = tr|A0A1J0N1C9|A0A1J0N1C9_STRIN Queuine tRNA-ribosyltransferase OS=Streptococcus iniae OX=1346; GN = tgt PE=3 SV=1
MTDYPIKYRLIKKDKRTGARLGEIITPHGTFPTPMFMPVGTQATVKTQSPEELKEMGSGIILSNTYHLWLRPGDDLIARAGGLHKFMNWDQPILTDSGGFQVYSLADSRNITEEGVTFKNHLNGSKMFLSPEKAISIQNNLGSDIMMSFDECPQFYQPYDYVKKSIERTSRWAERGLKAHRRPHDQGLFGIVQGAGFEDLRRQSAADLVAMDFPGYSIGGLAVGETHDEMNAVLDFTTPLLPENKPRYLMGVGAPDSLIDGVIRGVDMFDCVLPTRIARNGTCMTSQGRLVVKNAKFAEDFTPLDHDCDCYTCQNYTRAYIRHLLKADETFGIRLTSYHNLYFLVNLMKKVRQAIMDDNLLEFREDFLERYGYNKSSRNF

SEQ ID NO: 61299 - protein, 380 aa, Streptococcus intermedius
  REGION 1..380: note = tr|A0A428EUS0|A0A428EUS0_STRIT Queuine tRNA-ribosyltransferase OS=Streptococcus intermedius; OX = 1338 GN=tgt PE=3 SV=1
MSDSPIQYRLIKKEKHTGARLGEIITPHGTFPTPMFMPVGTQATVKTQSPEELKQMGSGIILANTYHLWLRPGDELIARAGGLHKFMNWDQAILTDSGGFQVYSLADSRNITEEGVTFKNHLNGSKMFLSPEKAISIQNNLGSDIMMSFDECPQFYQPYDYVKKSIERTSRWAERGLKAHRRPQDQGLFGIVQGAGFEDLRRQSAQDLVSMDFPGYSIGGLAVGESHEEMNAVLDFTTPMLPENKPRYLMGVGAPDSLIDGVIRGVDMFDCVLPTRIARNGTCMTSEGRLVVKNAQFEEDFTPLDHDCDCYTCSNYTRAYIRHLLKADETFGLRLTSYHNLYFLLNLMKKVRQAIMDDNLLEFREDFVERYGYNKSSRNF

SEQ ID NO: 61300 - protein, 380 aa, Streptococcus intermedius
  REGION 1..380: note = tr|T1ZGL7|T1ZGL7_STRIT Queuine tRNA-ribosyltransferase OS=Streptococcus intermedius B196; OX = 862967 GN=tgt PE=3 SV=1
MSDSPIQYRLIKKEKHTGARLGEIITPHGTFPTPMFMPVGTQATVKTQSPEELKQMGSGIILANTYHLWLRPGDELIARAGGLHKFMNWDQAILTDSGGFQVYSLADSRNITEEGVTFKNHLNGSKMFLSPEKAISIQNNLGSDIMMSFDECPQFYQPYDYVKKSIERTSRWAERGLKAHRRPQDQGLFGIVQGAGFEDLRRQSAQDLVSMDFPGYSIGGLAVGESHEEMNAVLDFTTPMLPENKPRYLMGVGAPDSLIDGVIRGVDMFDCVLPTRIARNGTCMTSEGRLVVKNAQFEEDFTPLDHDCDCYTCSNYTRAYIRHLLKADETFGLRLTSYHNLYFLLNLMKKVRQAIMDDNLLEFREDFIERYGYNKSSRNF

SEQ ID NO: 61301 - protein, 380 aa, Streptococcus lutetiensis; identical to SEQ ID NO: 61284
  REGION 1..380: note = tr|S5RNG6|S5RNG6_9STRE Queuine tRNA-ribosyltransferase OS=Streptococcus lutetiensis 033; OX = 1076934 GN=tgt PE=3 SV=1

SEQ ID NO: 61302 - protein, 380 aa, Streptococcus lutetiensis; identical to SEQ ID NO: 61284
  REGION 1..380: note = tr|A0A2X4FEW6|A0A2X4FEW6_9STRE Queuine tRNA-ribosyltransferase OS=Streptococcus lutetiensis; OX = 150055 GN=tgt PE=3 SV=1

SEQ ID NO: 61303 - protein, 380 aa, Streptococcus macacae
  REGION 1..380: note = tr|G5JW36|G5JW36_9STRE Queuine tRNA-ribosyltransferase OS=Streptococcus macacae NCTC 11558 OX=764298 GN=tgt PE=3 SV=1
MTYSPIQYRLIKREKHTGARLGEIITPHGTFPTPMFMPVGTQATVKTQSPEELKEMGSGIILANTYHLWLRPGDDLVAKAGGLHTFMNWDQAILTDSGGFQVYSLAEKRNITEEGVTFKNHLNGAKMFLTPEKAISIQNNLGSDIMMSFDECPQFYQPYDYVKASIERTSRWAERGLNAHRRPQDQGLFGIVQGAGFKDLRRQSAADLVSMDFPGYSIGGLAVGESHAEMNAVLDFTAPLLPANKPRYLMGVGAPDSLIDGVIRGIDMFDCVLPTRIARNGTCMTSQGRLVVKNAQYAEDFTPLDHDCDCYTCQHYTRAYIRHLIKADETFGLRLTSYHNLYFLLNLMSNIRQAIMDDNLLEFREDFIEKYGYNHSQRNF

SEQ ID NO: 61304 - protein, 380 aa, unidentified
  source 1..380: note = Streptococcus macedonicus
  REGION 1..380: note = tr|A0A2G3NZ68|A0A2G3NZ68_STRMC Queuine tRNA-ribosyltransferase OS=Streptococcus macedonicus; OX = 59310 GN=tgt PE=3 SV=1
MTDYPIKYRLIKKEKHTGARLGEIITPHGTFPTPMFMPVGTQATVKTQSPEELKEMGSGIILSNTYHLWLRPGDELIARAGGLHKFMNWDQAILTDSGGFQVYSLADTRNITEEGVTFKNHLNGAKMFLSPEKAISIQNNLGSDIMMSFDECPQFYQPYDYVKKSIERTSRWAERGLKAHRRPHDQGLFGIVQGAGFKDLRRQSASDLVSMDFPGYSIGGLAVGESHKEMNEVLDFTVPMLPENKPRYLMGVGAPDSLIDGVIRGVDMFDCVLPTRIARNGTCMTSEGRLVVKNAAYAEDFTPLDHDCDCHTCHNYTRAYIRHLLKADETFGLRLTSYHNLYFLVNLMKKVRQAIMDDNLLEFREDFFERYGYNKSDRNF

SEQ ID NO: 61305 - protein, 380 aa, unidentified
  source 1..380: note = Streptococcus macedonicus
  REGION 1..380: note = tr|A0A081JF24|A0A081JF24_STRMC Queuine tRNA-ribosyltransferase OS=Streptococcus macedonicus; OX = 59310 GN=tgt PE=3 SV=1
MTDYPIKYRLIKKEKHTGARLGEIITPHGTFPTPMFMPVGTQATVKTQSPEELKEMGSGIILSNTYHLWLRPGDELIARAGGLHKFMNWDQAILTDSGGFQVYSLADTRNITEEGVTFKNHLNGAKMFLSPEKAISIQNNLGSDIMMSFDECPQFYQPYDYVKKSIERTSRWAERGLKAHRRPHDQGLFGIVQGAGFKDLRRQSASDLVSMDFPGYSIGGLAVGESHKEMNEVLDFTVPMLPENKPRYLMGVGAPDSLIDGVIRGVDMFDCVLPTRIARNGTCMTSEGRLVVKNAAYAEDFTPLDHDCDCHTCRNYTRAYIRHLLKADETFGLRLTSYHNLYFLVNLMKKVRQAIMDDNLLEFREDFFERYGYNKSDRNF

SEQ ID NO: 61306 - protein, 380 aa, Streptococcus massiliensis
  REGION 1..380: note = tr|A0A380KZ18|A0A380KZ18_9STRE Queuine tRNA-ribosyltransferase OS=Streptococcus massiliensis; OX = 313439 GN=tgt PE=3 SV=1
MSDSPIQYRLIKKEKHTGARLGEIITLHGTFPTPMFMPVGTQATVKTQSPEELKEMGSGIILSNTYHLWLRPGDELIARAGGLHKFMNWDQAILTDSGGFQVYSLADSRNITEEGVTFKNHLNGSKMFLSPEKAISIQNNLGSDIMMSFDECPQFYQPYDYVKKSIERTSRWAERGLKAHRRPHDQGLFGIVQGAGFEDLRRQSAQDLVSMNFPGYSIGGLAVGESHEEMNAVLDFTTPMLPENKPRYLMGVGAPDSLINGVIRGIDMFDCVLPTRIARNGTCMTSEGRLVIKNAQYAEDFTALDHDCDCYTCQHYSRAYIRHLLKADETFGLRLTSYHNLYFLVNLMKKVRQAILNDNLLEFREDFVERYGYNSSKRNF

SEQ ID NO: 61307 - protein, 380 aa, Streptococcus merionis
  REGION 1..380: note = tr|A0A239SUW6|A0A239SUW6_9STRE Queuine tRNA-ribosyltransferase OS=Streptococcus merionis; OX = 400065 GN=tgt PE=3 SV=1
MTDSPIQYRLIKKEKHTGARLGEIITPHGTFPTPMFMPVGTQATVKTQSPEELKQMGAGIILANTYHLWLRPGDELVAKAGGLHTFMNWDQPILTDSGGFQVYSLADSRNITEEGVTFKNHLNGSKMFLSPEKAIAIQNNLGSDIMMSFDECPQFYQPYDYVKNSIERTSRWAERGLKAHRRPHDQGLFGIVQGAGFEDLRRQSARDLVSMDFPGYSIGGLAVGESHEEMNAVLDFTTQLLPENKPRYLMGVGAPDSLIDGVIRGVDMFDCVLPTRIARNGTTMTSRGRLVVKNAQFAEDFGPLDPECDCYTCQNYSRAYLRHLLKADETFGIRLTSYHNLYFLINLMKNVRQAIMDDNLLEFRQDFMEKYGYGKNGRNF

SEQ ID NO: 61308 - protein, 380 aa, unidentified
  source 1..380: note = Streptococcus milleri
  REGION 1..380: note = tr|A0A380L7Q9|A0A380L7Q9_9STRE Queuine tRNA-ribosyltransferase OS=Streptococcus milleri OX=33040; GN = tgt PE=3 SV=1
MSDSPIQYRLIKKEKHTGARLGEIITPHGTFPTPMFMPVGTQATVKTQSPEELKQMGSGIILANTYHLWLRPGDELIARAGGLHKFMNWDQAILTDSGGFQVYSLADSRNITEEGVTFKNHLNGSKMFLSPEKAISIQNNLGSDIMMSFDECPQFYQPYDYVKKSIERTSRWAERGLKAHSRPHDQGLFGIVQGAGFEDLRRQSAHDLVSMDFPGYSIGGLAVGESHEEMNAVLDFTTPMLPESKPRYLMGVGAPDSLIDGVIRGVDMFDCVLPTRIARNGTCMTSEGRLVIKNAQFAEDFTPLDHDCDCYTCKNYTRAYIRHLLKADETFGLRLTSYHNLYFLVNLMKKVRQAILDDNLLEFREDFVERYGYNRSKRNF

SEQ ID NO: 61309 - protein, 380 aa, unidentified
  source 1..380: note = Streptococcus milleri
  REGION 1..380: note = tr|A0A448D4E7|A0A448D4E7_9STRE Queuine tRNA-ribosyltransferase OS=Streptococcus milleri OX=33040; GN = tgt PE=3 SV=1
MSDSPIQYRLIKKEKHTGARLGEIITPHGTFPTPMFMPVGTQATVKTQSPEELKQMGSGIILANTYHLWLRPGDELIARAGGLHKFMNWDQAILTDSGGFQVYSLADSRNITEEGVTFKNHLNGSKMFLSPEKAISIQNNLGSDIMMSFDECPQFYQPYDYVKKSIERTSRWAERGLKAHSRPHDQGLFGIVQGAGFEDLRRQSAHDLVSMDFPGYSIGGLAVGESHEEMNAVLDFTTPMLPESKPRYLMGVGAPDSLIDGVIRGVDMFDCVLPTRIARNGTCMTSEGRLVIKNAQFAEDFTPLDHDCDCYTCKNYTRAYIRHLLKADETFGLRLTSYHNLYFLVNLMKKVRQAILGDNLLEFREDFVERYGYNRSKRNF

SEQ ID NO: 61310 - protein, 380 aa, Streptococcus minor
  REGION 1..380: note = tr|A0A3P1VEQ1|A0A3P1VEQ1_9STRE Queuine tRNA-ribosyltransferase OS=Streptococcus minor OX=229549; GN = tgt PE=3 SV=1
MTDYPIKYRLIKKEKHTGARLGEIITPHGTFPTPMFMPVGTQATVKTQSPEELKEMGSGIILSNTYHLWLRPGDELIARAGGLHKFMNWDQAILTDSGGFQVYSLADSRNITEEGVTFKNHLNGSKMFLSPEKAISIQNNLGSDIMMSFDECPQFYQPYDYVKKSIERTSRWAERGLKAHRRPHDQGLFGIVQGAGFEDLRRQSAADLVSMDFPGYSIGGLAVGETHDEMNAVLDFTTPLLPENKPRYLMGVGAPDSLIDGIIRGVDMFDCVLPTRIARNGTCMTSEGRLVVKNAKYEEDFTPLDHDCDCYTCKNYTRAYIRHLLKADETFGIRLTSYHNLYFLINLMNKVRQAILDDNLLEFRQDFMERYGYGKNGRNF

SEQ ID NO: 61311 - protein, 380 aa, Streptococcus mitis
  REGION 1..380: note = tr|D3H6J2|D3H6J2_STRM6 Queuine tRNA-ribosyltransferase OS=Streptococcus mitis (strain B6); OX = 365659 GN=tgt PE=3 SV=1
MSDSPIKYRLIKKEKHTGARLGEIITPHGTFPTPMFMPVGTQATVKTQSPEELKEMGSGIILSNTYHLWLRPGDELIARAGGLHKFMNWDQPILTDSGGFQVYSLADSRNITEEGVTFKNHLNGSKMFLSPEKAISIQNNLGSDIMMSFDECPQFYQPYDYVKKSIERTSRWAERGLKAHRRPHDQGLFGIVQGAGFEDLRRQSAHDLVSMDFPGYSIGGLAVGETHEEMNAVLDFTTQLLPETKPRYLMGVGAPDSLIDGVIRGVDMFDCVLPTRIARNGTCMTSQGRLVVKNAQFAEDFTPLDPECDCYTCKNYTRAYLRHLLKADETFGIRLTSYHNLYFLLNLMKQVRQAIMDDNLLEFREYFVEKYGYNKSGRNF

SEQ ID NO: 61312 - protein, 380 aa, Streptococcus mitis
  REGION 1..380: note = tr|A0A1X1KBP1|A0A1X1KBP1_STRMT Queuine tRNA-ribosyltransferase OS=Streptococcus mitis OX=28037; GN = tgt PE=3 SV=1
MSDSPIKYRLIKKEKHTGARLGEIITPHGTFPTPMFMPVGTQATVKTQSPEELKEMGSGIILSNTYHLWLRPGDELIARAGGLHKFMNWDQPILTDSGGFQVYSLADSRNITEEGVTFKNHLNGSKMFLSPEKAISIQNNLGSDIMMSFDECPQFYQPYDYVKKSIERTSRWAERGLKAHRRPHDQGLFGIVQGAGFEDLRRQSAHDLVSMAFPGYSIGGLAVGETHEEMNAVLDFTTQLLPENKPRYLMGVGAPDSLIDGVIRGVDMFDCVLPTRIARNGTCMTSQGRLVVKNAQFAEDFTPLDPECDCYTCKNYTRAYLRHLLKADETFGIRLTSYHNLYFLLNLMKQVRQAIMDDNLLEFREYFVEKYGYNKSGRNF

SEQ ID NO: 61313 - protein, 380 aa, Streptococcus mutans
  REGION 1..380: note = sp|Q8DVZ3|TGT_STRMU Queuine tRNA-ribosyltransferase; OS = Streptococcus mutans serotype c (strain ATCC 700610 / UA159) OX=210007 GN=tgt PE=3 SV=1
MTHSPIQYRLIKKEKHTGARLGEIITPHGVFPTPMFMPVGTQATVKTQSPEELKEMKAGIILANTYHLWLRPGDDLVARAGGLHKFMNWDQPILTDSGGFQVYSLAEKRNITEEGVTFKNHLNGARMFLTPEKAISIQNNLGSDIMMSFDECPQFYQPYDYVKASIERTSRWAERGLKAHRRPQDQGLFGIVQGAGFEDLRRQSTADLVSMDFPGYSIGGLAVGESHEEMNAVLDFTTPLLPENKPRYLMGVGAPDSLIDGVIRGVDMFDCVLPTRIARNGTCMTSRGRLVVKNAQYAEDFTPLDHDCDCYTCQNYTRAYIRHLIKADETFGLRLTSYHNLYFLLNLMEKIRQAIMDDNILEFREDFIEKYGYGRSERNF

SEQ ID NO: 61314 - protein, 380 aa, Streptococcus mutans
  REGION 1..380: note = tr|A0A2J9QH27|A0A2J9QH27_STRMG Queuine tRNA-ribosyltransferase OS=Streptococcus mutans OX=1309; GN = tgt PE=3 SV=1
MTHSPIQYRLIKKEKHTGARLGEIITPHGVFPTPMFMPVGTQATVKTQSPEELKEMKAGIILANTYHLWLRLGDDLVARAGGLHKFMNWDQPILTDSGGFQVYSLAEKRNITEEGVTFKNHLNGARMFLTPEKAISIQNNLGSDIMMSFDECPQFYQPYDYVKASIERTSRWAERGLKAHRRPQDQGLFGIVQGAGFEDLRRQSTADLVSMDFPGYSIGGLAVGESHEEMNAVLDFTTPLLPENKPRYLMGVGAPDSLIDGVIRGVDMFDCVLPTRIARNGTCMTSRGRLVVKNAQYAEDFTPLDHDCDCYTCQNYTRAYIRHLIKADETFGLRLTSYHNLYFLLNLMEKIRQAIMDDNILEFREDFIEKYGYGRSERNF

SEQ ID NO: 61315 - protein, 380 aa, Streptococcus oralis
  REGION 1..380: note = tr|A0A139PTM2|A0A139PTM2_STROR Queuine tRNA-ribosyltransferase OS=Streptococcus oralis OX=1303; GN = tgt PE=3 SV=1
MSDSPIKYRLIKKEKHTGARLGEIITPHGTFPTPMFMPVGTQATVKTQSPEELKEMGSGIILSNTYHLWLRPGDELIARAGGLHKFMNWDQPILTDSGGFQVYSLADSRNITEEGVTFKNHLNGSKMFLSPEKAISIQNNLGSDIMMSFDECPQFYQPYDYVKKSIERTSRWAERGLKAHRRPHDQGLFGIVQGAGFEELRRQSAHDLVSMDFPGYSIGGLAVGETHEEMNAVLDFTTQLLPENKPRYLMGVGAPDSLIDGVIRGVDMFDCVLPTRIARNGTCMTSQGRLVVKNAQFAEDFTPLDPECDCYTCKNYTRAYLRHLLKADETFGIRLTSYHNLYFLLNLMKQVRQAIMDDNLLEFREYFVEKYGYNKSGRNF

SEQ ID NO: 61316 - protein, 380 aa, Streptococcus oralis
  REGION 1..380: note = tr|A0A1X1HAX6|A0A1X1HAX6_STROR Queuine tRNA-ribosyltransferase OS=Streptococcus oralis subsp. oralis OX=1891914 GN=tgt PE=3 SV=1
MSDSPIKYRLIKKEKHTGARLGEIITPHGTFPTPMFMPVGTQATVKTQSPEELKEMGSGIILSNTYHLWLRPGDELIARAGGLHKFMNWDQPILTDSGGFQVYSLADSRNITEEGVTFKNHLNGSKMFLSPEKAISIQNNLGSDIMMSFDECPQFYQPYDYVKKSIERTSRWAERGLKAHRRPHDQGLFGIVQGAGFEDLRRQSAHDLVSMDFPGYSIGGLAVGETHEEMNAVLDFTTQLLPENKPRYLMGVGAPDSLIDGVIRGVDMFDCVLPTRIARNGTCMTSRGRLVVKNAQFAEDFTPLDPECDCYTCKNYTRAYLRHLLKADETFGIRLTSYHNLYFLLNLMKQVRQAIMDDNLLEFREYFVEKYGYNKSGRNF

SEQ ID NO: 61317 - protein, 380 aa, unidentified
  source 1..380: note = Streptococcus pantholopis
  REGION 1..380: note = tr|A0A172Q943|A0A172Q943_9STRE Queuine tRNA-ribosyltransferase OS=Streptococcus pantholopis; OX = 1811193 GN=tgt PE=3 SV=1
MSVQPIQYRLIKKEKHTGARLGEIITPHGTFPTPMFMPVGTQATVKTQSPEELKEMGAGIILANTYHLWLRPGDDLIAKAGGLHQFMNWDQPILTDSGGFQVYSLADSRNITEKGVTFKNHLNGAKMFLSPEKAMAIQNHLGSDIMMSFDECPQFYQPYDYVKQSIERTSRWAERGLKAHSRPQEQGLFGIVQGAGFEDLRRQSAKDLISLDFPGYAVGGLAVGESHEEMNAVLDFTTPLLPENKPRYLMGVGASDSLIDGVIRGIDMFDCVLPTRIARNGTCMTSQGRLVVKNAQYAEDFGPLDPNCDCYTCQNYSRAYIRHLHKADETFGLRLTSYHNLYFLVQLMKKVRQAIIDDSLLEFRADFMEKYGYNRSKRNF

SEQ ID NO: 61318 - protein, 380 aa, Streptococcus parasanguinis
  REGION 1..380: note = tr|A0A414CEV5|A0A414CEV5_STRPA Queuine tRNA-ribosyltransferase OS=Streptococcus parasanguinis; OX = 1318 GN=tgt PE=3 SV=1
MTDSPIQYRLIKKEKHTGARLGEIITPHGTFPTPMFMPVGTQATVKTQSPEELKEMGSGIILANTYHLWLRPGDDLVAKAGGLHQFMNWDQPILTDSGGFQVYSLADTRNITEEGVTFKNHLNGSKMFLSPEKAISIQNNLGSDIMMSFDECPQFYQPYDYVKKSIERTSRWAERGLKAHRRPHDQGLFGIVQGAGFEDLRRQSAQDLVGMDFPGYSIGGLAVGESHEEMNAVLDFTTPLLPENKPRYLMGVGAPDSLIDGVIRGVDMFDCVLPTRIARNGTCMTSQGRLVVKNAQFAEDFTPLDPECDCYTCKNYTRAYLRHLLKADETFGIRLTSYHNLYFLINLMKQVRKAIMDDNLLEFREHFVEKYGYNKSGRNF

SEQ ID NO: 61319 - protein, 380 aa, Streptococcus parasanguinis
  REGION 1..380: note = tr|A0A4V1Y7X8|A0A4V1Y7X8_STRPA Queuine tRNA-ribosyltransferase OS=Streptococcus parasanguinis; OX = 1318 GN=tgt PE=3 SV=1
MTDSPIQYRLIKKEKHTGARLGEIITPHGTFPTPMFMPVGTQATVKTQSPEELKEMGSGIILANTYHLWLRPGDDLVAKAGGLHQFMNWDQSILTDSGGFQVYSLADTRNITEEGVTFKNHLNGSKMFLSPEKAISIQNNLGSDIMMSFDECPQFYQPYDYVKKSIERTSRWAERGLKAHRRPHDQGLFGIVQGAGFEDLRRQSAQDLVSMDFPGYSIGGLAVGESHEEMNAVLDFTTPLLPENKPRYLMGVGAPDSLIDGVIRGVDMFDCVLPTRIARNGTCMTSQGRLVVKNAQFAEDFTPLDPECDCYTCKNYTRAYLRHLLKADETFGIRLTSYHNLYFLINLMKQVRQAIMDDNLLEFREHFVEKYGYNKSGRNF

SEQ ID NO: 61320 - protein, 380 aa, unidentified
  source 1..380: note = Streptococcus parasuis
  REGION 1..380: note = tr|A0A4Q8L3B8|A0A4Q8L3B8_9STRE Queuine tRNA-ribosyltransferase OS=Streptococcus parasuis; OX = 1501662 GN=tgt PE=3 SV=1
MTDVPIKYRLIKKEKHTGARLGEIITPHGTFPTPMFMPVGTQATVKTMSPEELKEMGSGIILSNTYHLWLRPGDDLVARAGGLHKFMNWDQPILTDSGGFQVYSLADSRNITEEGVTFKNHLNGSKMFLSPEKAISIQNNLGSDIMMSFDECPQFYQPYDYVKKSIERTSRWAERGLKAHLRPHDQGLFGIVQGAGFEDLRRQSAHDLVSMDFPGYSIGGLAVGETHDEMNAVLDFTTPLLPENKPRYLMGVGAPDSLIDGVIRGVDMFDCVLPTRIARNGTCMTSQGRLVVKNAQFAEDFTPLDPECDCYTCKNYTRAYLRHLLKADETFGIRLTSYHNLFFLINLMKNVRQAIMDDNLLEFRQDFMEKYGYGKNGRNF

SEQ ID NO: 61321 - protein, 380 aa, Streptococcus parauberis
  REGION 1..380: note = tr|A0A2I8AHT3|A0A2I8AHT3_9STRE Queuine tRNA-ribosyltransferase OS=Streptococcus parauberis; OX = 1348 GN=tgt PE=3 SV=1
MTDYPIKYRLIKKDKRTGARLGEIITPHGTFPTPMFMPVGTQATVKTQSPEELKQMSSGIILSNTYHLWLRPGDELIARAGGLHKFMNWDQPILTDSGGFQVYSLADSRNITEEGVTFKNHLNGSKMFLSPEKAISIQNNLGSDIMMSFDECPQFYQPYDYVKKSIERTSRWAERGLNAHRRPHDQGLFGIVQGAGFEDLRRQSAADLVSMDFPGYSIGGLAVGETHDEMNAVLDFTTQLLPENKPRYLMGVGAPDSLIDGVIRGVDMFDCVLPTRIARNGTCMTSEGRLVVKNAKFAEDFTPLDHDCDCYTCQNYTRAYIRHLLKADETFGIRLTSYHNLYFLVNLMKKVRQAIMDDNLLEFREDFLERYGYNKSSRNF

SEQ ID NO: 61322 - protein, 392 aa, Streptococcus parauberis
  REGION 1..392: note = tr|F1Z249|F1Z249_9STRE Queuine tRNA-ribosyltransferase OS=Streptococcus parauberis NCFD 2020 OX=873447 GN=tgt PE=3 SV=1
MLKTVYLESEETMTDYPIKYRLIKKDKRTGARLGEIITPHGTFPTPMFMPVGTQATVKTQSPEELKQMGSGIILSNTYHLWLRPGDELIARAGGLHKFMNWDQPILTDSGGFQVYSLADSRNITEEGVTFKNHLNGSKMFLSPEKAISIQNNLGSDIMMSFDECPQFYQPYDYVKKSIERTSRWAERGLNAHRRPHDQGLFGIVQGAGFEDLRRQSAADLVSMDFPGYSIGGLAVGETHDEMNAVLDFTTQLLPENKPRYLMGVGAPDSLIDGVIRGVDMFDCVLPTRIARNGTCMTSEGRLVVKNAKFAEDFTPLDHDCDCYTCQNYTRAYIRHLLKADETFGIRLTSYHNLYFLVNLMKKVRQAIMDDNLLEFREDFLERYGYNKSSRNF

SEQ ID NO: 61323 - protein, 380 aa, unidentified; identical to SEQ ID NO: 61288
  source 1..380: note = Streptococcus pasteurianus
  REGION 1..380: note = tr|F5X3N4|F5X3N4_STRPX Queuine tRNA-ribosyltransferase OS=Streptococcus pasteurianus (strain ATCC 43144 / JCM 5346 / CDC 1723-81) OX=981540; GN = tgt PE=3 SV=1

SEQ ID NO: 61324 - protein, 380 aa, unidentified; identical to SEQ ID NO: 61288
  source 1..380: note = Streptococcus pasteurianus
  REGION 1..380: note = tr|A0A135YVA3|A0A135YVA3_9STRE Queuine tRNA-ribosyltransferase OS=Streptococcus pasteurianus; OX = 197614 GN=tgt PE=3 SV=1

SEQ ID NO: 61325 - protein, 380 aa, unidentified
  source 1..380: note = Streptococcus penaeicida
  REGION 1..380: note = tr|A0A2N8LAH3|A0A2N8LAH3_9STRE Queuine tRNA-ribosyltransferase OS=Streptococcus penaeicida; OX = 1765960 GN=tgt PE=3 SV=1
MTDHPIKYRLIKKEKHTGARLGEIITPHGTFPTPMFMPVGTQATVKTQSPEELKSMGSGIILSNTYHLWLRPGDELIARAGGLHKFMNWDQPILTDSGGFQVYSLADSRNITEEGVTFKNHLNGSKMFLSPEKAISIQNNLGSDIMMSFDECPQFYQPYDYVKNSIERTSRWAERGLNAHRRPHDQGLFGIVQGAGFEDLRRQSAADLVGMDFAGYSVGGLAVGETHEEMNAVLDFTTPLLPENKPRYLMGVGAPDSLIDGVIRGIDMFDCVLPTRIARNGTCMTSEGRLVVKNAKFAEDFTPLDHECDCYTCQNYTRAYIRHLLKADETFGIRLTSYHNLYFLVNLMKKVRQAIMDDNLLEFREDFLERYGYKTSSRNF

SEQ ID NO: 61326 - protein, 380 aa, Streptococcus peroris
  REGION 1..380: note = tr|E8KDB2|E8KDB2_9STRE Queuine tRNA-ribosyltransferase OS=Streptococcus peroris ATCC 700780 OX=888746 GN=tgt PE=3 SV=1
MSDSPIKYRLIKKEKHTGARLGEIITPHGTFPTPMFMPVGTQATVKTQSPEELKEMGSGIILSNTYHLWLRPGDELIARAGGLHKFMNWDQPILTDSGGFQVYSLADSRNITEEGVTFKNHLNGSKMFLSPEKAISIQNNLGSDIMMSFDECPQFYQPYDYVKKSIERTSRWAERGLKAHRRPHDQGLFGIVQGAGFEDLRRQSAHDLVSMDFPGYSIGGLAVGETHEEMNAVLDFTTQLLPENKPRYLMGVGAPDSLIDGVIRGVDMFDCVLPTRIARNGTCMTSQGRLVVKNAQFAEDFTPLDPECDCYTCKNYTRAYLRHLLKADETFGIRLTSYHNLYFLLNLMKQVRQAIMDDNLLEFREHFVEKYGYNKSGRNF

SEQ ID NO: 61327 - protein, 380 aa, unidentified
  source 1..380: note = Streptococcus pharyngis
  REGION 1..380: note = tr|A0A5C5SBL0|A0A5C5SBL0_9STRE Queuine tRNA-ribosyltransferase OS=Streptococcus pharyngis; OX = 1562651 GN=tgt PE=3 SV=1
MTEHPIQYRLIKKEKHTGARLGEIVTPHGTFPTPMFMPVGTQATVKTQSPEELKEMGSGIILSNTYHLWLRPGDELVAQAGGLHKFMNWDQAILTDSGGFQVYSLADSRQITEEGVTFKNHLNGAKMFLSPEKAISIQNNLGSDIMMSFDECPQFYQPYDYVKKSIERTSRWAERGLKAHRRPQDQGLFGIVQGAGFEDLRRQSAQDLVSMDFSGYSIGGLAVGETHEEMNAVLDFTVPLLPENKPRYLMGVGAPDSLIDGVIRGVDMFDCVLPTRIARNGTCMTSQGRLVVKNAQFTEDFSPLDPNCDCYTCQNYTRAYIRHLLKADETFGIRLTSYHNLYFLVNLMKQVRQAILDDNLLDFRADFVERYGYNKSKRNF

SEQ ID NO: 61328 - protein, 380 aa, Streptococcus phocae
  REGION 1..380: note = tr|A0A0P6S713|A0A0P6S713_9STRE Queuine tRNA-ribosyltransferase OS=Streptococcus phocae OX=119224; GN = tgt PE=3 SV=1
MTDYPITYRLIKKEKHTGARLGEIITPHGTFPTPMFMPVGTQATVKTQSPEELKQMGSGIILSNTYHLWLRPGDELIARAGGLHKFMNWDQPILTDSGGFQVYSLADSRNITEEGVTFKNHLNGSKMFLSPEKAISIQNNLGSDIMMSFDECPQFYQPYDYVKKSIERTSRWAERGLNAHQRPHDQGLFGIVQGAGFKDLRRQSASDLVGMDFPGYSVGGLAVGETHEEMNAVLDFTTPLLPENKPRYLMGVGAPDSLIDGVIRGIDMFDCVLPTRIARNGTCMTSEGRLVIKNAKFAEDFTPLDHNCDCYTCQNYTRAYIRHLLKADETFGIRLTSYHNLYFLINLMKQVRQAIMDDQLLEFRQDFLERYGYNRSTRNF

SEQ ID NO: 61329 - protein, 380 aa, Streptococcus pluranimalium
  REGION 1..380: note = tr|A0A345VMS3|A0A345VMS3_9STRE Queuine tRNA-ribosyltransferase OS=Streptococcus pluranimalium; OX = 82348 GN=tgt PE=3 SV=1
MTEHAIKYRLIKTEKHTGARLGEIETPHGTFSTPMFMPVGTQATVKTQSPEELKQMGSGIILSNTYHLWLRPGDELIARAGGLHKFMNWDQAILTDSGGFQVYSLADSRNITEEGVTFKNHLNGSKMFLSPEKAISIQNNLGSDIMMSFDECPQFYQPYDYVKNSIERTSRWAERGLKAHRRPHDQGLFGIVQGAGFEDLRRQSAQDLVSMDFAGYSIGGLAVGETHEEMNAVLDFTTPMLPENKPRYLMGVGAPDSLIDAVIRGVDMFDCVLPTRIARNGTCMTSEGRLVVKNAKYAEDFTPLDHDCDCYTCQNYTRAYLRHLLKADETFGMRLTSYHNLYFLVNLMKKVRQAIVDDNLLEFREDFVERYGYNHSKRNF

SEQ ID NO: 61330 - protein, 380 aa, Streptococcus pluranimalium
  REGION 1..380: note = tr|A0A2L0D680|A0A2L0D680_9STRE Queuine tRNA-ribosyltransferase OS=Streptococcus pluranimalium; OX = 82348 GN=tgt PE=3 SV=1
MTEHAIKYRLIKTEKHTGARLGEIETPHGTFSTPMFMPVGTQATVKTQSPEELKQMGSGIILSNTYHLWLRPGDELIARAGGLHKFMNWDQAILTDSGGFQVYSLADSRNITEEGVTFKNHLNGSKMFLSPEKAISIQNNLGSDIMMSFDECPQFYQPYDYVKNSIERTSRWAERGLKAHRRPQDQGLFGIVQGAGFEDLRRQSAQDLVSMDFAGYSIGGLAVGETHEEMNAVLDFTTPMLPENKPRYLMGVGAPDSLIDAVIRGVDMFDCVLPTRIARNGTCMTSEGRLVVKNAKYAEDFTPLDHDCDCYTCQNYTRAYLRHLLKADETFGMRLTSYHNLYFLVNLMKKVRQAIVDDNLLEFREDFVERYGYNHSKRNF

SEQ ID NO: 61331 - protein, 380 aa, Streptococcus pneumoniae
  REGION 1..380: note = sp|P66908|TGT_STRR6 Queuine tRNA-ribosyltransferase; OS = Streptococcus pneumoniae (strain ATCC BAA-255 / R6); OX = 171101 GN=tgt PE=3 SV=1
MSDSPIKYRLIKKEKHTGARLGEIITPHGTFPTPMFMPVGTQATVKTQSPEELKEMGSGIILSNTYHLWLRPGDELIARAGGLHKFMNWDQPILTDSGGFQVYSLADSRNITEEGVTFKNHLNGSKMFLSPEKAISIQNNLGSDIMMSFDECPQFYQPYDYVKKSIERTSRWAERGLKAHRRPHDQGLFGIVQGAGFEDLRRQSAHDLVSMDFSGYSIGGLAVGETHEEMNAVLDFTTQLLPENKPRYLMGVGAPDSLIDGVIRGVDMFDCVLPTRIARNGTCMTSQGRLVVKNAQFAEDFTPLDPECDCYTCNNYTRAYLRHLLKADETFGIRLTSYHNLYFLLNLMKQVRQAIMDDNLLEFREYFVEKYGYNKSGRNF

SEQ ID NO: 61332 - protein, 380 aa, Streptococcus pneumoniae; identical to SEQ ID NO: 61331
  REGION 1..380: note = sp|B5E2X9|TGT_STRP4 Queuine tRNA-ribosyltransferase; OS = Streptococcus pneumoniae serotype 19F (strain G54); OX = 512566 GN=tgt PE=3 SV=1

SEQ ID NO: 61333 - protein, 380 aa, Streptococcus porcinus
  REGION 1..380: note = tr|A0A4U9YFB8|A0A4U9YFB8_STRPO Queuine tRNA-ribosyltransferase OS=Streptococcus porcinus OX=1340; GN = tgt PE=3 SV=1
MTDYPIKYRLIKKEKHTGARLGEIITPHGTFPTPMFMPVGTQATVKTQSPEELKQMGSGIILSNTYHLWLRPGDELIAKAGGLHKFMNWDQPILTDSGGFQVYSLADSRNITEEGVTFKNHLNGSKMFLSPEKAISIQNNLGSDIMMSFDECPQFYQPYDYVKKSIERTSRWAERGLKAHRRPHDQGLFGIVQGAGFEDLRRQSAADLVAMDFPGYSVGGLAVGESHEEMNAVLDFTTPLLPENKPRYLMGVGAPDSLIDGVIRGIDMFDCVLPTRIARNGTCMTSQGRLVVKNAKFAEDFTPLDHDCDCYTCQNYSRAYIRHLLKADETFGIRLTSYHNLYFLVNLMKKVRQAIIDDNLLDFREDFLERYGYNASSRNF

SEQ ID NO: 61334 - protein, 380 aa, Streptococcus porcinus
  REGION 1..380: note = tr|A0A4V0HBP1|A0A4V0HBP1_STRPO Queuine tRNA-ribosyltransferase OS=Streptococcus porcinus OX=1340; GN = tgt PE=3 SV=1
MTDYPIKYRLIKKEKHTGARLGEIITPHGTFPTPMFMPVGTQATVKTQSPEELKQMGSGIILSNTYHLWLRPGDELIAKAGGLHKFMNWDQPILTDSGGFQVYSLADSRNITEEGVTFKNHLNGSKMFLSPEKAISIQNNLGSDIMMSFDECPQFYQPYDYVKKSIERTSRWAERGLKAHRRPHDQGLFGIVQGAGFEDLRRQSAADLVAMDFPGYSVGGLAVGESHEEMNAVLDFTTPLLPENKPRYLMGVGAPDSLIDGVIRGIDMFDCVLPTRIARNGTCMTSQGRLVVKNAKFAEDFTPLDHDCDCYTCQNYSRAYIRHLLKADETFGIRLTSYHNLYFLVNLMRKVRQAIMDDNLLEFREDFLERYGYNVSNRNF

SEQ ID NO: 61335 - protein, 380 aa, Streptococcus pseudopneumoniae
  REGION 1..380: note = tr|G0ID32|G0ID32_STRES Queuine tRNA-ribosyltransferase OS=Streptococcus pseudopneumoniae (strain IS7493) OX=1054460 GN=tgt PE=3 SV=1
MSDSPIKYRLIKKEKHTGARLGEIITPHSTFPTPMFMPVGTQATVKTQSPEELKEMGSGIILSNTYHLWLRPGDELIARAGGLHKFMNWDQPILTDSGGFQVYSLADSRNITEEGVTFKNHLNGSKMFLSPEKAISIQNNLGSDIMMSFDECPQFYQPYDYVKKSIERTSRWAERGLKAHRRPHDQGLFGIVQGAGFEDLRRQSAHDLVSMDFPGYSIGGLAVGETHEEMNAVLDFTTQLLPENKPRYLMGVGAPDSLIDGVIRGVDMFDCVLPTRIARNGTCMTSQGRLVVKNAQFAEDFTPLDPECDCYTCKNYTRAYLRHLLKADETFGIRLTSYHNLYFLLNLMKQVRQAIMDDNLLEFREYFVEKYGYNKSGRNF

SEQ ID NO: 61336 - protein, 380 aa, Streptococcus pseudopneumoniae
  REGION 1..380: note = tr|A0A3A4SDE1|A0A3A4SDE1_9STRE Queuine tRNA-ribosyltransferase OS=Streptococcus pseudopneumoniae; OX = 257758 GN=tgt PE=3 SV=1
MSDSPIKYRLIKKEKHTGARLGEIITPHGTFPTPMFMPVGTQATVKTQSPEELKEMGSGIILSNTYHLWLRPGDELIARAGGLHKFMNWDQPILTDSGGFQVYSLADSRNITEEGVTFKNHLNGSKMFLSPEKAISIQNNLGSDIMMSFDECPQFYQPYDYVKKSIERTSRWAERGLKAHRRPHDQGLFGIVQGAGFEDLRRQSAHDLVSMDFPGYSIGGLAVGETHEEMNAVLDFTTQLLPENKPRYLMGVGAPDSLIDGVIRGIDMFDCVLPTRIARNGTCMTSQGRLVVKNTQFAEDFTPLDPECDCYTCKNYTRAYLRHLLKADETFGIRLTSYHNLYFLLNLMKQVRQAIMDDNLLEFREYFVEKYGYNKSGRNF

SEQ ID NO: 61337 - protein, 380 aa, Streptococcus pseudoporcinus; identical to SEQ ID NO: 61333
  REGION 1..380: note = tr|G5K791|G5K791_9STRE Queuine tRNA-ribosyltransferase OS=Streptococcus pseudoporcinus LQ 940-04 OX=875093 GN=tgt PE=3 SV=1

SEQ ID NO: 61338 - protein, 380 aa, Streptococcus pyogenes
  REGION 1..380: note = sp|Q9A1L6|TGT_STRP1 Queuine tRNA-ribosyltransferase; OS = Streptococcus pyogenes serotype M1 OX=301447 GN=tgt; PE = 3 SV=1
MTDYPIKYRLIKAEKHTGARLGEIITPHGTFPTPMFMPVGTQATVKTQSPEELKAIGSGIILSNTYHLWLRPGDELIARSGGLHKFMNWDQPILTDSGGFQVYSLADSRNITEEGVTFKNHLNGSKMFLSPEKAISIQNNLGSDIMMSFDECPQFYQPYDYVKKSIERTSRWAERGLKAHRRPHDQGLFGIVQGAGFEDLRRQSAADLVAMDFPGYSIGGLAVGESHEEMNAVLDFTTPLLPENKPRYLMGVGAPDSLIDGVIRGVDMFDCVLPTRIARNGTCMTSEGRLVIKNAKFAEDFTPLDHDCDCYTCQNYSRAYIRHLLKADETFGIRLTSYHNLYFLVNLMKKVRQAIMDDNLLEFRQDFLERYGYNKSNRNF

SEQ ID NO: 61339 - protein, 380 aa, Streptococcus pyogenes
  REGION 1..380: note = sp|Q48VG9|TGT_STRPM Queuine tRNA-ribosyltransferase; OS = Streptococcus pyogenes serotype M28 (strain MGAS6180); OX = 319701 GN=tgt PE=3 SV=1
MTDYPIKYRLIKTEKHTGARLGEIITPHGTFPTPMFMPVGTQATVKTQSPEELKAIGSGIILSNTYHLWLRPGDELIARSGGLHKFMNWDQPILTDSGGFQVYSLADSRNITEEGVTFKNHLNGSKMFLSPEKAISIQNNLGSDIMMSFDECPQFYQPYDYVKKSIERTSRWAERGLKAHRRPHDQGLFGIVQGAGFEDLRRQSAADLVAMDFPGYSIGGLAVGESHEEMNAVLDFTTPLLPENKPRYLMGVGAPDSLIDGVIRGVDMFDCVLPTRIARNGTCMTSEGRLVIKNAKFAEDFTPLDHDCDCYTCQNYSRAYIRHLLKADETFGIRLTSYHNLYFLVNLMKKVRQAIMDDNLLEFRQDFLERYGYNKSNRNF

SEQ ID NO: 61340 - protein, 380 aa, Streptococcus ratti
  REGION 1..380: note = tr|J3AKV8|J3AKV8_STRRT Queuine tRNA-ribosyltransferase OS=Streptococcus ratti FA-1 = DSM 20564 OX=699248 GN=tgt PE=3 SV=1
MTHSPIQYRLIKKEKHTGARLGEIITPHGTFPTPMFMPVGTQATVKTQSPEELKEMGSGVILANTYHLWLRPGDDLIARAGGLHQFMNWDQPILTDSGGFQVYSLADSRNITEEGVTFKNHLNGAKMFLSPEKAISIQNNLGSDIMMSFDECPQFYQPYDYVKNSIERTSRWAERGLKAHHRPQDQGLFGIVQGAGFEDLRRQSAADLVSMDFPGYSIGGLAVGESHEEMNAVLDFTTPLLPENKPRYLMGVGAPDSLIDGVIRGVDMFDCVLPTRIARNGTCMTSQGRLVVKNAQYAEDFTPLDHDCDCYTCQNYTRAYLRHLLKADETFGLRLTSYHNLYFLLNLMRKVHQAIMDDNLLEFRADFIERYGYNKSKRNF

SEQ ID NO: 61341 - protein, 380 aa, Streptococcus ratti; identical to SEQ ID NO: 61340
  REGION 1..380: note = tr|A0A5J6NQL8|A0A5J6NQL8_STRRT tRNA guanosine(34) transglycosylase Tgt OS=Streptococcus ratti OX=1341 GN=tgt; PE = 4 SV=1

SEQ ID NO: 61342 - protein, 380 aa, unidentified
  source 1..380: note = Streptococcus rubneri
  REGION 1..380: note = tr|A0A4Z1DRH5|A0A4Z1DRH5_9STRE Queuine tRNA-ribosyltransferase OS=Streptococcus rubneri; OX = 1234680 GN=tgt PE=3 SV=1
MTDSPIQYRLIKKEKHTGARLGEIITPHGTFPTPMFMPVGTQATVKTQSPEELKEMGSGIILANTYHLWLRPGDDLVAKAGGLHQFMNWDQPILTDSGGFQVYSLADTRNITEEGVTFKNHLNGSKMFLSPEKAISIQNNLGSDIMMSFDECPQFYQPYDYVKKSIERTSRWAERGLKAHRRPHDQGLFGIVQGAGFEDLRRQSARDLVSMDFPGYSIGGLAVGESHEEMNAVLDFTTPLLPENKPRYLMGVGAPDSLIDGVIRGVDMFDCVLPTRIARNGTCMTSQGRLVVKNAQFAEDFTPLDHECDCYTCKNYTRAYLRHLLKADETFGIRLTSYHNLYFLINLMKQVRQAIMDDNLLEFREHFVEKYGYNKSGRNF

SEQ ID NO: 61343 - protein, 380 aa, unidentified
  source 1..380: note = Streptococcus ruminantium
  REGION 1..380: note = tr|A0A2Z5TXT3|A0A2Z5TXT3_9STRE Queuine tRNA-ribosyltransferase OS=Streptococcus ruminantium; OX = 1917441 GN=tgt PE=3 SV=1
MTDVPIKYRLIKKEKHTGARLGEIITPHGTFPTPMFMPVGTQATVKTMSPEELKEMGSGIILSNTYHLWLRPGDELVARAGGLHTFMNWDQPILTDSGGFQVYSLADSRNISEEGVTFKNHLNGSKMFLSPEKAISIQNNLGSDIMMSFDECPQFYQPYDYVKKSIERTSRWAERGLKAHRRPHDQGLFGIVQGAGFEDLRRQSAHDLVSMDFPGYSIGGLAVGETHAEMNAVLDFTTPLLPENKPRYLMGVGAPDSLIDGVIRGVDMFDCVLPTRIARNGTCMTSRGRLVVKNAQFAEDFTPLDPECDCYTCRNYTRAYLRHLLKADETFGIRLTSYHNLYFLINLMKNVRQAIMDDNLLEFRQDFMDKYGYGKNGRNF

SEQ ID NO: 61344 - protein, 380 aa, Streptococcus salivarius
  REGION 1..380: note = tr|J7TUV8|J7TUV8_STRSL Queuine tRNA-ribosyltransferase OS=Streptococcus salivarius K12; OX = 1200793 GN=tgt PE=3 SV=1
MTDFPIKYRLIKKEKHTGARLGEIITPHGTFPTPMFMPVGTQATVKTQSPEELKQMGSGIILANTYHLWLRPGDELVAKAGGLHKFMNWDQAILTDSGGFQVYSLAEKRNISEEGVTFKNHLNGSKMFLSPEKAISIQNNLGSDIMMSFDECPQFYQPYDYVKNSIERTSRWAERGLKAHRRPHDQGLFGIVQGAGFEDLRRQSAQDLVSMDFPGYSIGGLAVGETHEEMNAVLDFTVPLLPENKPRYLMGVGAPDSLIDGVIRGVDMYDCVLPTRIARNGTCMTSQGRLVVKNASYAEDFSPIDPECDCYTCKNYTRAYVRHLLKADETFGIRLTSYHNLYFLVNLMAKVREAIIDDNLLEFRQDFIEKYGYNASKRNF

SEQ ID NO: 61345 - protein, 380 aa, Streptococcus salivarius
  REGION 1..380: note = tr|A0A074JI26|A0A074JI26_STRSL Queuine tRNA-ribosyltransferase OS=Streptococcus salivarius; OX = 1304 GN=tgt PE=3 SV=1
MTDFPIKYRLIKKEKHTGARLGEIITPHGTFPTPMFMPVGTQATVKTQSPEELKQMGSGIILANTYHLWLRPGDELVAKAGGLHKFMNWDQAILTDSGGFQVYSLAEKRNISEEGVTFKNHLNGSKMFLSPEKAISIQNNLGSDIMMSFDECPQFYQPYDYVKNSIERTSRWAERGLKAHRRPHDQGLFGIVQGAGFEDLRRQSAQDLVSMDFPGYSIGGLAVGETHEEMNAVLDFTVPLLPENKPRYLMGVGAPDSLIDGVIRGVDMYDCVLPTRIARNGTCMTSQGRLVVKNAAYAEDFSPIDPECDCYTCKNYTRAYVRHLLKADETFGIRLTSYHNLYFLVNLMAKVRQAIIDDNLLEFRQDFIEKYGYNASKRNF

SEQ ID NO: 61346 - protein, 380 aa, Streptococcus sanguinis
  REGION 1..380: note = sp|A3CK60|TGT_STRSV Queuine tRNA-ribosyltransferase; OS = Streptococcus sanguinis (strain SK36) OX=388919 GN=tgt; PE = 3 SV=1
MSTSPIQYRLIKKEKHTGARLGEIITPHGTFPTPMFMPVGTQATVKTQSPEELKQMGSGIILANTYHLWLRPGDELIARAGGLHTFMNWDQPILTDSGGFQVYSLADSRNITEEGVTFKNHLNGSKMFLSPEKAISIQNNLGSDIMMSFDECPQFYQPYDYVKKSIERTSRWAERGLKAHSRPHDQGLFGIVQGAGFEDLRRQSAQDLVSMDFPGYSIGGLAVGESHEEMNAVLDFTTPMLPENKPRYLMGVGAPDSLIDGVIRGVDMFDCVLPTRIARNGTCMTSEGRLVVKNAQFEEDFTPLDHDCDCYTCSNYTRAYIRHLLKADETFGIRLTSYHNLYFLVNLMKKVRQAIMDDNLLEFREDFIERYGYNKSSRNF

SEQ ID NO: 61347 - protein, 380 aa, Streptococcus sanguinis
  REGION 1..380: note = tr|F3UPA1|F3UPA1_STRSA Queuine tRNA-ribosyltransferase OS=Streptococcus sanguinis SK355; OX = 888816 GN=tgt PE=3 SV=1
MSTSPIQYRLIKKEKHTGARLGEIITPHGTFPTPMFMPVGTQATVKTQSPEELKQMGSGIILSNTYHLWLRPGDELIARAGGLHKFMNWDQPILTDSGGFQVYSLADSRNITEEGVTFKNHLNGSKMFLSPEKAISIQNNLGSDIMMSFDECPQFYQPYDYVKKSIERTSRWAERGLKAHSRPHDQGLFGIVQGAGFEDLRRQSAQDLVSMDFPGYSIGGLAVGESHEEMNAVLDFTTPMLPESKPRYLMGVGAPDSLIDGVIRGVDMFDCVLPTRIARNGTCMTSEGRLVVKNAQFEEDFTPLDHDCDCYTCSNYTRAYIRHLLKADETFGIRLTSYHNLYFLVNLMKKVRQAIMDDNLLEFREDFIERYGYNKSSRNF

SEQ ID NO: 61348 - protein, 380 aa, Streptococcus sinensis
  REGION 1..380: note = tr|A0A0A0DGF5|A0A0A0DGF5_9STRE Queuine tRNA-ribosyltransferase OS=Streptococcus sinensis; OX = 176090 GN=tgt PE=3 SV=1
MSTSPIQYRLIKKEKHTGARLGEIITPHGTFPTPMFMPVGTQATVKTQSPEELKQMGSGIILANTYHLWLRPGDELIARAGGLHKFMNWDQPILTDSGGFQVYSLADSRNITEEGVTFKNHLNGSKMFLSPEKAIAIQNNLGSDIMMSFDECPQFYQPYDYVKKSIERTSRWAERGLKAHSRPHDQGLFGIVQGAGFEDLRRQSAQDLVSMDFPGYSIGGLAVGESHEEMNAVLDFTTPLLPENKPRYLMGVGAPDSLIDGVIRGVDMFDCVLPTRIARNGTCMTSEGRLVVKNAQFEEDFTPLDHDCDCYTCTNYTRAYIRHLLKADETFGLRLTSYHNLYFLVNLMKKVRQAIMDDNLLEFREDFVERYGYNRSKRNF

SEQ ID NO: 61349 - protein, 380 aa, Streptococcus sobrinus
  REGION 1..380: note = tr|U2IJJ0|U2IJJ0_9STRE Queuine tRNA-ribosyltransferase OS=Streptococcus sobrinus W1703; OX = 1227275 GN=tgt PE=3 SV=1
MTDVPIKYRLIKKEKHTGARLGEIITPHGTFSTPMFMPVGTQATVKTQSPEELKEMGSGIILANTYHLWLRPGDDLVADAGGLHRFMNWDQAILTDSGGFQVYSLADSRNITEEGVTFKNHLNGAKMFLSPEKAISIQNNLGSDIMMSFDECPQFYQPYDYVKKSIERTSRWAERGLKAHRRPHDQGLFGIVQGAGYEDLRRQSAADLVSMDFPGYSIGGLAVGESHEEMNAVLDFTTPLLPENKPRYLMGVGAPDSLIDGVIRGVDMFDCVLPTRIARNGTCMTSQGRLVVKNAAFARDFSPLDPDCDCYTCCNYSRAYIRHLLKADETFGLRLTSYHNLYFLVNLMKKVRQAIVDDNLLEFRQDFLDRYGYGKNGRNF

SEQ ID NO: 61350 - protein, 380 aa, Streptococcus sp.
  REGION 1..380: note = tr|A0A5C5TDF3|A0A5C5TDF3_9STRE Queuine tRNA-ribosyltransferase OS=Streptococcus sp. sy004; OX = 2600149 GN=tgt PE=3 SV=1
MTQHPIQYRLIKKEKHTGARLGEIITPHGTFPTPMFMPVGTLATVKTQSPEELKEMGSGIILSNTYHLWLRPGDELVAQAGGLHKFMNWDQAILTDSGGFQVYSLADSRQITEEGVTFKNHLNGSKMFLSPEKAIAIQNNLGSDIMMSFDECPQFYQPYDYVKKSIERTSRWAERGLNAHRRPHDQGIFGIVQGAGFEDLRRQSAQDLVSMDFSGYSIGGLAVGETHEEMNAVLDFTTPLLPENKPRYLMGVGAPDSLIDGVIRGVDMFDCVLPTRIARNGTCMTSQGRLVVKNAQFTEDFSPLDPNCDCYTCQNYTRAYIRHLLKADETFGIRLTSYHNLYFLVNLMKRVRQAILDDNLLEFREDFIEQYGYNRSKRNF

SEQ ID NO: 61351 - protein, 380 aa, Streptococcus sp.
  REGION 1..380: note = tr|A0A1F0BP76|A0A1F0BP76_9STRE Queuine tRNA-ribosyltransferase OS=Streptococcus sp. HMSC070B10; OX = 1715092 GN=tgt PE=3 SV=1
MSDSPIKYRLIKKEKHTGARLGEIITPHGTFPTPMFMPVGTQATVKTQSPEELKEMGSGIILSNTYHLWLRPGDELIARAGGLHKFMNWDQPILTDSGGFQVYSLADSRNITEEGVTFKNHLNGSKMFLSPEKAISIQNNLGSDIMMSFDECPQFYQPYDYVKKSIERTSRWAERGLKAHRRPHDQGLFGIVQGAGFEDLRRQSAHDLVSMDFPGYSIGGLAVGETHEEMNAVLDFTTQLLPENKPRYLMGVGAPDSLIDGVIRGVDMFDCVLPTRIARNGTCMTSQGRLVVKNAQFAEDFTPLDPECDCYTCKNYTRAYLRHLLKADETFGIRLTSYHNIYFLLNLMKQVRQAIMDDNLLEFREYFVEKYGYNKSGRNF

SEQ ID NO: 61352 - protein, 380 aa, Streptococcus suis
  REGION 1..380: note = tr|A0A0Z8XIC8|A0A0Z8XIC8_STRSU Queuine tRNA-ribosyltransferase OS=Streptococcus suis OX=1307; GN = tgt PE=3 SV=1
MTDVPIKYRLIKKEKHTGARLGEIITPHGTFPTPMFMPVGTQATVKTMSPEELKAMGSGIILSNTYHLWLRPGDELVARAGGLHKFMNWDQPILTDSGGFQVYSLADSRNISEEGVTFKNHLNGSKMFLSPEKAISIQNNLGSDIMMSFDECPQFYQPYDYVKKSIERTSRWAERGLNAHRRPHDQGLFGIVQGAGFEDLRRQSAHDLVSMDFPGYSIGGLAVGETHDEMNAVLDFTTPLLPENKPRYLMGVGAPDSLIDGVIRGVDMFDCVLPTRIARNGTCMTSRGRLVVKNAQFAEDFTPLDPECDCYTCKNYTRAYLRHLLKADETFGIRLTSYHNLYFLINLMKNVRQAIMDDNLLEFRQDFMEKYGYGKNGRNF

SEQ ID NO: 61353 - protein, 380 aa, Streptococcus suis
  REGION 1..380: note = sp|A4W2F8|TGT_STRS2 Queuine tRNA-ribosyltransferase; OS = Streptococcus suis (strain 98HAH33) OX=391296 GN=tgt; PE = 3 SV=1
MTDVPIKYRLIKKEKHTGARLGEIITPHGTFPTPMFMPVGTQATVKTMSPEELKAMGSGIILSNTYHLWLRPGDELVARAGGLHKFMNWDQPILTDSGGFQVYSLADSRNISEEGVTFKNHLNGSKMFLSPEKAISIQNNLGSDIMMSFDECPQFYQPYDYVKKSIERTSRWAERGLKAHRRPHDQGLFGIVQGAGFEDLRRQSAHDLVSMDFPGYSIGGLAVGETHDEMNAVLDFTTPLLPENKPRYLMGVGAPDSLIDGVIRGVDMFDCVLPTRIARNGTCMTNRGRLVVKNAQFAEDFTPLDPECDCYTCKNYTRAYLRHLLKADETFGIRLTSYHNLYFLINLMKNVRQAIMDDNLLEFRQDFMEKYGYGKNGRNF

SEQ ID NO: 61354 - protein, 380 aa, Streptococcus thermophilus
  REGION 1..380: note = sp|Q5M2K9|TGT_STRT2 Queuine tRNA-ribosyltransferase; OS = Streptococcus thermophilus (strain ATCC BAA-250 / LMG 18311) OX=264199 GN=tgt PE=3 SV=1
MIDFPIKYRLIKKEKYTGARLGEIITPHGTFPTPMFMPVGTQATVKTQSPEELQQMGSGIILANTYHLWLRPGDELIAKAGGLHKFMNWDQAILTDSGGFQVYSLAEKRDISEEGVTFKNHLNGSKMFLSPEKAISVQNNLGSDIMMSFDECPQFYQPYDYVKKSIERTSRWAERGLKAHRRPHDQGLFGIVQGAGFEDLRRQSSHDLVSMDFPGYSIGGLAVGETHEEMNAVLDFTVPLLPENKPRYLMGVGAPDSLIDGVIRGVDMYDCVLPTRIARNGTCMTSNGRLVVKNAAYAEDFSPIDPECDCYTCKNYTRAYVRHLLKADETFGIRLTSYHNLYFLVNLMAKVRQAIVDDNLLEFRQDFIEKYGYNASNRNF

SEQ ID NO: 61355 - protein, 380 aa, Streptococcus thermophilus
  REGION 1..380: note = sp|Q5LY05|TGT_STRT1 Queuine tRNA-ribosyltransferase; OS = Streptococcus thermophilus (strain CNRZ 1066) OX=299768; GN = tgt PE=3 SV=1
MIDFPIKYRLIKKEKYTGARLGEIITPHGTFPTPMFMPVGTQATVKTQSPEELQQMGSGIILANTYHLWLRPGDELIAKAGGLHKFMNWDQAILTDSGGFQVYSLAEKRDISEEGVTFKNHLNGSKMFLSPEKAISVQNNLGSDIMMSFDECPQFYQPYDYVKKSIERTSRWAERGLKAHRRPHDQGLFGIVQGAGFEDLRRQSSHDLVSMDFPGYSIGGLAVGETHEEMNAVLDFTVPLLPENKPRYLMGVGAPDSLIDGVIRGVDMYDCVLPTRIARNGTCMTSNGRLVVKNAAYAEDFSPIDPECDCYTCKNYTRAYVRHLLKADETFGIRLTSYHNLYFLVNLMARVRQAIVDDNLLEFRQDFIEKYGYNASNRNF

SEQ ID NO: 61356 - protein, 380 aa, unidentified
  source 1..380: note = Streptococcus troglodytae
  REGION 1..380: note = tr|A0A1L7LLM1|A0A1L7LLM1_9STRE Queuine tRNA-ribosyltransferase OS=Streptococcus troglodytae; OX = 1111760 GN=tgt PE=3 SV=1
MTHSPIQYRLIKKEKHTGARLGEIITPHGVFPTPMFMPVGTQATVKTQAPEELKEMKAGIILANTYHLWLRPGDDLVTRAGGLHKFMNWDQPILTDSGGFQVYSLAEKRNITEEGVTFKNHLNGAKMFLTPEKAISIQNNLGSDIMMSFDECPQFYQPYDYVKASIERTSRWAERGLKAHRRPQEQGLFGIVQGAGFEDLRRQSAADLVSMDFPGYSIGGLAVGESHKEMNAVLDFTTPLLPENKPRYLMGVGAPDSLIDGVIRGIDMFDCVLPTRIARNGTCMTSRGRLVVKNAQYAEDFTPLDHDCDCYTCQNYTRAYIRHLIKADETFGLRLTSYHNLYFLLNLMKKIRQAIMDDNLLEFRKDFVEKYGYGRSERNF

SEQ ID NO: 61357 - protein, 380 aa, Streptococcus uberis
  REGION 1..380: note = sp|B9DVZ9|TGT_STRU0 Queuine tRNA-ribosyltransferase; OS = Streptococcus uberis (strain ATCC BAA-854 / 0140J); OX = 218495 GN=tgt PE=3 SV=1
MTDYPIKYRLIKKEKHTGARLGEIITPHGTFPTPMFMPVGTQATVKTQSPEELKAMGSGIILSNTYHLWLRPGDELIAKAGGLHKFMNWDQPILTDSGGFQVYSLADSRNITEEGVTFKNHLNGSKMFLSPEKAISIQNNLGSDIMMSFDECPQFYQPYDYVKKSIERTSRWAERGLKAHRRPHDQGLFGIVQGAGFEDLRRQSAADLVSMDFPGYSVGGLAVGESHEEMNAVLDFTTPLLPENKPRYLMGVGAPDSLIDGVIRGIDMFDCVLPTRIARNGTCMTSEGRLVVKNAKFAEDFTPLDHDCDCYTCQNYTRAYIRHLLKADETFGIRLTSYHNLYFLVNLMKKVRQAIMDDNLLEFREDFLERYGYNTSNRNF

SEQ ID NO: 61358 - protein, 380 aa, Streptococcus uberis
  REGION 1..380: note = tr|A0A0A6S135|A0A0A6S135_STRUB Queuine tRNA-ribosyltransferase OS=Streptococcus uberis OX=1349; GN = tgt PE=3 SV=1
MTDYPITYRLIKKDKRTGARLGEIITPHGTFPTPMFMPVGTQATVKTQSPEELKQMGSGIILSNTYHLWLRPGDELIARAGGLHKFMNWDQPILTDSGGFQVYSLADSRNITEEGVTFKNHLNGSKMFLSPEKAISIQNNLGSDIMMSFDECPQFYQPYDYVKKSIERTSRWAERGLNAHRRPHDQGLFGIVQGAGFEDLRRQSAADLVSMDFPGYSIGGLAVGETHDEMNAVLDFTTPLLPENKPRYLMGVGAPDSLIDGVIRGVDMFDCVLPTRIARNGTCMTSEGRLVVKNAKFAEDFTPLDHDCDCYTCQNYTRAYIRHLLKADETFGIRLTSYHNLYFLVNLMKKVRQAIMDDNLLEFREDFLERYGYNKSSRNF

SEQ ID NO: 61359 - protein, 380 aa, Streptococcus urinalis
  REGION 1..380: note = tr|G5KH65|G5KH65_9STRE Queuine tRNA-ribosyltransferase OS=Streptococcus urinalis 2285-97; OX = 764291 GN=tgt PE=3 SV=1
MADYPIKYRLIKKEKHTGARLGEIITPHGTFPTPMFMPVGTQATVKTQSPEELKEMGSGIILSNTYHLWLRPGDELVAKAGGLHKFMNWDQAILTDSGGFQVYSLADSRNITEEGVTFKNHLNGSKMFLSPEKAISIQNNLGSDIMMSFDECPQFYQPYDYVKKSIERTSRWAERGLKAHRRPNDQGLFGIVQGAGFEDLRRQSAHDLVGMDFPGYSIGGLAVGESHEEMNAVLDFTTPLLPENKPRYLMGVGAPDSLIDGVIRGVDMFDCVLPTRIARNGTCMTSEGRLVVKNAKFAEDFTPLDHDCDCYTCRNYTRAYIRHLLKADETFGIRLTSYHNLYFLLNLMKKVRQAIVEDNLLEFRADFLERYGYNQSSRNF

SEQ ID NO: 61360 - protein, 404 aa, unidentified
  source 1..404: note = Streptococcus varani
  REGION 1..404: note = tr|A0A0E4CSR7|A0A0E4CSR7_9STRE Queuine tRNA-ribosyltransferase OS=Streptococcus varani OX=1608583; GN = tgt PE=3 SV=1
MHPKSGYQVVTIFIRFLFGLSNLKMTDYPIKYRLIKKEKHTGARLGEIITPHGTFPTPMFMPVGTQATVKTQSPEELKEMGSGIILSNTYHLWLRPGDELIARAGGLHKFMNWDQPILTDSGGFQVYSLADSRNITEEGVTFKNHLNGSKMFLSPEKAISIQNNLGSDIMMSFDECPQFYQPYDYVKKSIERTTRWAERGLKAHSRPHDQGLFGIVQGAGFEDLRRQSAQNLVSMDFPGYSIGGLAVGETHDEMNAVLDFTTPLLPENKPRYLMGVGAPDSLIDGVIRGVDMFDCVLPTRIARNGTCMTSEGRLVVKNAKFEEDFTPLDYDCDCYTCKNYTRAYIRHLLKADETFGIRLTSYHNLYFLINLMKNVRQAIMDDNLLEFRQDFMERYGYGKNGRNF

SEQ ID NO: 61361 - protein, 380 aa, Streptococcus vestibularis
  REGION 1..380: note = tr|A0A3S4MRT3|A0A3S4MRT3_STRVE Queuine tRNA-ribosyltransferase OS=Streptococcus vestibularis; OX = 1343 GN=tgt PE=3 SV=1
MTDFPIKYRLIKKEKYTGARLGEIITPHGTFPTPMFMPVGTQATVKTQSPEELKQMGSGIILANTYHLWLRPGDELVAKAGGLHKFMNWDQAILTDSGGFQVYSLAEKRNISEEGVTFKNHLNGSKMFLSPEKAISIQNNLGSDIMMSFDECPQFYQPYDYVKKSIERTSRWAERGLKAHRRPHDQGLFGIVQGAGFEDLRRQSAHDLVSMDFPGYSIGGLAVGETHEEMNAVLDFTVPLLPENKPRYLMGVGAPDSLIDGVIRGVDMYDCVLPTRIARNGTCMTSNGRLVVKNAAYAEDFSSIDPECDCYTCKNYTRAYVRHLLKADETFGIRLTSYHNLYFLVNLMAKVRQAIVDDNLLEFRQDFIEKYGYNASNRNF

SEQ ID NO: 61362 - protein, 380 aa, Streptococcus vestibularis
  REGION 1..380: note = tr|E8KSW1|E8KSW1_STRVE Queuine tRNA-ribosyltransferase OS=Streptococcus vestibularis ATCC 49124 OX=889206 GN=tgt PE=3 SV=1
MTDFPIKYRLIKKEKYTGARLGEIITPHGTFPTPMFMPVGTQATVKTQSPEELKQMGSGIILANTYHLWLRPGDELVAKAGGLHKFMNWDQAILTDSGGFQVYSLAEKRNISEEGVTFKNHLNGSKMFLSPEKAISIQNNLGSDIMMSFDECPQFYQPYDYVKKSIERTSRWAERGLKAHRRPHDQGLFGIVQGAGFEDLRRQSAHDLVSMDFPGYSIGGLAVGETHEEMNAVLDFTVPLLPENKPRYLMGVGAPDSLIDGVIRGVDMYDCVLPTRIARNGTCITSNGRLVVKNAAYAEDFSSIDPECDCYTCKNYTRAYVRHLLKADETFGIRLTSYHNLYFLVNLMAKVRQAIVDDNLLEFRQDFIEKYGYNASNRNF

SEQ ID NO: 61363 - protein, 380 aa, unidentified; identical to SEQ ID NO: 61265
  source 1..380: note = Streptococcus viridans
  REGION 1..380: note = tr|A0A380MAI6|A0A380MAI6_9STRE Queuine tRNA-ribosyltransferase OS=Streptococcus viridans OX=78535; GN = tgt PE=3 SV=1

SEQ ID NO: 61364 - protein, 380 aa, unidentified
  source 1..380: note = Streptococcus viridans
  REGION 1..380: note = tr|A0A3S4PYJ9|A0A3S4PYJ9_9STRE Queuine tRNA-ribosyltransferase OS=Streptococcus viridans OX=78535; GN = tgt PE=3 SV=1
MTDSPIQYRLIKKEKHTGARLGEIITPHGTFPTPMFMPVGTQATVKTQSPEELKEMGSGIILANTYHLWLRPGDDLVAKAGGLHQFMNWDQPILTDSGGFQVYSLADTRNITEEGVTFKNHLNGSKMFLSPEKAISIQNNLGSDIMMSFDECPQFYQPYDYVKKSIERTSRWAERGLKAHRRPHDQGLFGIVQGAGFEDLRRQSARDLVSMDFPGYSIGGLAVGESHEEMNAVLDFTTPLLPENKPRYLMGVGAPDSLIDGVIRGVDMFDCVLPTRIARNGTCMTSQGRLVVKNAQFAEDFTPLDPECDCYTCKNYTRAYLRHLLKADETFGIRLTSYHNLYFLINLMKQVRQAIMDDNLLEFREHFVEKYGYNKSGRNF

SEQ ID NO: 61365 - protein, 379 aa, Streptohalobacillus salinus
  REGION 1..379: note = tr|A0A2V3W6R7|A0A2V3W6R7_9BACI Queuine tRNA-ribosyltransferase OS=Streptohalobacillus salinus; OX = 621096 GN=tgt PE=3 SV=1
MTAIRYELIKTCKQTGARLGRVHTPHGSFETPVFMPVGTLATVKTMSPEELTEIGAGIILSNTYHLWLRPGEDIIEEAGGLHKFMNWNGSILTDSGGFQVFSLSDLRKIEEEGVHFRNHISGEKLFLSPEKAMHIQNSLGSDIMMAFDECPPYPAEHKYMKSSVERTSRWAERCLSAHQRQNDQGLFGIIQGGEYEDLRRQSARDLTSLDFPGYAIGGLSVGEPKDVMNRVLEFTTPLLPNDKPRYLMGVGSPDSLIDGAIRGVDMFDCVLPTRIARNGTCMTSEGRVVVRNAKYARDFGPLDPNCDCYTCKNYSRAYIRHLIKADETFGLRLTSYHNLYFLVNLMEQVRQAIREDRLGDFREAFFEQYGFNKPNAKNF

SEQ ID NO: 61366 - protein, 377 aa, Subdoligranulum sp.; identical to SEQ ID NO: 55586
  REGION 1..377: note = tr|A0A1Q6SYQ6|A0A1Q6SYQ6_9FIRM Queuine tRNA-ribosyltransferase OS=Subdoligranulum sp. 60_17; OX = 1897022 GN=tgt PE=3 SV=1

SEQ ID NO: 61367 - protein, 376 aa, Subdoligranulum sp.
  REGION 1..376: note = tr|G9RYH6|G9RYH6_9FIRM Queuine tRNA-ribosyltransferase OS=Subdoligranulum sp. 4_3_54A2FAA; OX = 665956 GN=tgt PE=3 SV=1
MYKLLKNEGSARRGEFSTVHGTVQTPAFMNVATAAAIKGGLSAFDLKANDCQVMLCNTYHLHLRPGDKNVARLGGLHKFTRWDGPILTDSGGFQVFSLSKLRKITEEGVTFNSHLDGHRIFMGPEESMQIQANLGSTIAMAFDECMENPAEYQYAKASCDRTVRWLKRCKAELSRLKGEGLAVNPHQLLFGINQGCCYDDLRVGHMQEIAALDLDGYAIGGLAVGEPKEEMYGVISVVEEHMPKDKIRYLMGVGTPGNILEGVRRGVDLFDCVMPSRNARHGHLNTWKGIINIKNAKYELDEQPLDEACSCECCRNFSRAYLRHLFKADEMLGMRLAVMHNLHFYNNLMLRIREALDNGTFDAFYRRYVNLLDTRI

SEQ ID NO: 61368 - protein, 377 aa, Subdoligranulum variabile
  REGION 1..377: note = tr|D1PKT7|D1PKT7_9FIRM Queuine tRNA-ribosyltransferase OS=Subdoligranulum variabile DSM 15176 OX=411471 GN=tgt PE=3 SV=1
MPYRLIKQEGAARRGEFVTVHGTVQTPAFQNVATAAAIKGGLSALDLKEIRAQVMLCNTYHLHLRPGDQIVADMGGLHKFTRWDGPILTDSGGFQVFSLAKLRQITEEGVTFNSHLDGHRIFMGPEQSMQIQANLGSTIAMAFDECVENPATYEYAKNSCARTARWLLRCKAEMARLKHEEKAVNPDQLLFGINQGCTFKDLRVEHMKQIAEYDLDGYAIGGLAVGEPAEVMYDIISAVEPYAPKDKIRYLMGVGTPGNIIEGVYRGVDLFDCVMPSRNARHGHLFTWNGIINIKNLKYERDESPIDPHCDCPVCRNFSRAYIRHLQKADEMLGMRLAVMHNLYFYNHLMERIREALDNGTFQQFHDTYVHRLDTRI

SEQ ID NO: 61369 - protein, 377 aa, Subdoligranulum variabile
  REGION 1..377: note = tr|A0A2V2FJQ9|A0A2V2FJQ9_9FIRM Queuine tRNA-ribosyltransferase OS=Subdoligranulum variabile; OX = 214851 GN=tgt PE=3 SV=1
MPYRLIKQEGAARRGEFKTVHGTVQTPAFQNVATAAAIKGGLSALDLKEIRAQVMLCNTYHLHLRPGDQVVAQMGGLHKFTRWDGPILTDSGGFQVFSLAKLRQITEEGVTFNSHLDGHRIFMGPEQSMQIQANLGSTIAMAFDECVENPATYEYAKNSCARTARWLLRCKQEMARLKNEGKAVNPDQLLFGINQGCTFPELRVEHMKQIAEYDLDGYAIGGLAVGEPAEVMYEIISAVEPFAPKDKIRYLMGVGTPGNIIEAVYRGVDLFDCVMPSRNARHGHLFTWDGIINIKNLKYERDESPIDPNCDCPVCRNFSRAYIRHLQKADEMLGMRLAVMHNLYFYNRLMERIREALDNGTFQQFHDTYVRRLDTRI

SEQ ID NO: 61370 - protein, 376 aa, Subsaximicrobium wynnwilliamsii
  REGION 1..376: note = tr|A0A5C6ZCU8|A0A5C6ZCU8_9FLAO Queuine tRNA-ribosyltransferase OS=Subsaximicrobium wynnwilliamsii; OX = 291179 GN=tgt PE=3 SV=1
MIFELKAKDAQTKARAGVITTDHGSIETPIFMPVGTVASVKGVHQRELKNDINPDIILGNTYHLYLRPQTHILEKAGGLHKFMNWDRNILTDSGGYQVYSLSANRKIKEEGVKFKSHIDGSTHVFTPENVMEIQRTIGADIIMAFDECTPYPCDYKYAKRSMHMTHRWLDRCIGHLDKLPFKYGYEQTFFPIVQGSTYKDLRQESAEYIANAGAQGNAIGGLSVGEPAEEMYAMTEVVCDILPSEKPRYLMGVGTPINILENIALGVDMFDCVMPTRNARNGMLFTAHGSINIKNLKWADDFSPVDEMGITFVDTEYSKAYLRHLFTVNELLGKQIATIHNLGFYMWLVREARKHIIAGDFRTWKEKMVKQMDKRL

SEQ ID NO: 61371 - protein, 369 aa, Succinatimonas hippei
  REGION 1..369: note = tr|E8LK26|E8LK26_SUCHY Queuine tRNA-ribosyltransferase OS=Succinatimonas hippei (strain DSM 22608 / JCM 16073 / KCTC 15190 / YIT 12066) OX=762983; GN = tgt PE=3 SV=1
MEFKILAKDGKARRGELHFKRGIVRTPAFMPVGTLGTVKGIRPEQVEELGADILLGNTFHLWLRPGTDVIKLHGDLHDFMHWNKPILTDSGGFQVFSLSGIRKVTEEGVKFQHPINGSKLFLSPEISMQVQHALGSDIVMQFDECIGLPADYRRMEQAMELSLRWARRCKDEFLRLENPNSLFGIIQGGTDEGLRERSLEGLTNIGFDGYAIGGLAVGEPKDVMYKALGHIAPLMPDDKPRYLMGVGRPEDILQGVLNGVDMFDCVMPTRNARNGHLFTSQGVVKIRNAKYATDTTPLDPNCSCYTCRHFSRAYLHHLDKCGEMLGAHLNTIHNLWYYEHLMQGIRDAIESGTLESFAENFYKTACKTV

SEQ ID NO: 61372 - protein, 373 aa, Succinatimonas sp.
  REGION 1..373: note = tr|R5EVB5|R5EVB5_9GAMM Queuine tRNA-ribosyltransferase OS=Succinatimonas sp. CAG:777; OX = 1262974 GN=tgt PE=3 SV=1
MKLKFELKKRCGKARLGQMVFERGVVRTPAFMPVGTLGTVKGVRPEDVEELGADILLGNTFHLWLRPGCDVIKAHGDLHDFMNWHKPILTDSGGFQVFSLSEIRKVTEEGVHFRNPINGSKLFLSPEVSMQIQYALGSDIVMQFDECIGLPASREEMARAMRLSLRWAKRSKDEFERLGNQNSLFGIIQGGSDEALREESLKGLTEIGFEGYAIGGLAVGEPKPVMYKALSHIAPNMPEDKPRYLMGVGTPADILQGVLNGVDMFDCVMPSRNARNAHLFTSKGVVRIRNSKYAMDTSPLDENCSCYTCRHYSKAYLHHLDKCHELLGAQLNTIHNLHFYEHFMADIRKAIEDDRLEQFAEEFYKVYGYPELV

SEQ ID NO: 61373 - protein, 379 aa, Succiniclasticum ruminis
  REGION 1..379: note = tr|A0A1I1YXC2|A0A1I1YXC2_9FIRM Queuine tRNA-ribosyltransferase OS=Succiniclasticum ruminis DSM 9236 OX=1123323 GN=tgt PE=3 SV=1
MHAVTYELIKEAKQGKARRGRLHTPHGTFETPMFMPVGTQATVKTLSPEELYDMESQVILANTYHLFLRPGSGLVKKAGGLHKFMNYNRGMLTDSGGFQVFSLGEMRKITEEGVMFRSHIDGSKQFLSPEVSVRVQEELGADIAMAFDECIPYPSDFNYTKKSTERTTRWAERCLKAHTRPDQALFGIVQGGMFPELRKMSAESLLEMDFAGYGIGGLSVGEPKPVMYDMLDQTTDWMDKQKARYLMGVGTPDCIVEGVNLGVDMYDCVFPTRVARNGTAMTARGRLVIRNAVYAEDFRPIDEHCNCYTCRNFSRAYIRHLFKAEETFGLRLLSIHNLHFLLDFAKKIRDAIEQDRFAEFRKEFWNNWEEKDKRPEDLN

SEQ ID NO: 61374 - protein, 379 aa, Succiniclasticum ruminis
  REGION 1..379: note = tr|A0A1G6MW58|A0A1G6MW58_9FIRM Queuine tRNA-ribosyltransferase OS=Succiniclasticum ruminis; OX = 40841 GN=tgt PE=3 SV=1
MHAVTYELIKEATKGKARRGRLHTPYGTFETPMFMPVGTQATVKTLSPEELYDMESQVILANTYHLFLRPGSELVKKAGGLHRFMNYSRGMLTDSGGFQVFSLGEMRKISEEGVMFRSHIDGSKQFLSPEVSVRVQEELGADIAMAFDECIPYPSDFAYTKKSTERTTRWAERCLKAHTREDQALFGIVQGGMFPELRKMSAQSLQDMDFAGYGIGGLSVGEPKPMMYEVLDQTTDWMDKQKARYLMGVGTPDCLVEGINLGVDMFDCVFPTRVARNGTAMTWRGRLVVRNAMYAEDFRPIDEHCDCYACRNFSRAYIRHLFKAEEIFGLRLLSIHNLHFLLHFTKKIREAIEQDRFQEFRKAFWDNWEEKDQRPADLA

SEQ ID NO: 61375 - protein, 371 aa, Succinivibrio dextrinosolvens
  REGION 1..371: note = tr|A0A1T4VJK0|A0A1T4VJK0_9GAMM Queuine tRNA-ribosyltransferase OS=Succinivibrio dextrinosolvens DSM 3072 OX=1123324 GN=tgt PE=3 SV=1
MKFELKKKCGKARLGQMVFDRGVVRTPAFMPVGTCGTVKGLRPENVEEIGADILLGNTFHLWLRPGTDVIRAHGDLHDFMNWKKPILTDSGGFQVFSLSDIRKVTEEGVKFRHPINGSKLFLSPEISMQIQYDLGSDIVMQFDECIGLPAPREEMARAMRLSLRWAKRSKDEFNRLGNKNSLFGIIQGGSDEALREESLKGLTDIGFDGYAIGGLAVGEPKPVMYKALSHIAPIMPEDRPRYLMGVGTPMDILQGVLNGVDMFDCVMPSRNARNAHLFTSNGIVRIRNSKYAMDTSPLDEKCTCYTCRNYSKAYLHHLDKCHEILGAHLNTIHNLHFYEHFMADIRKAIEEDRLEQFAEEFYKVYGYPEKV

SEQ ID NO: 61376 - protein, 250 aa, Succinivibrio sp.
  REGION 1..250: note = tr|A0A3C1W2V3|A0A3C1W2V3_9GAMM Queuine tRNA-ribosyltransferase (Fragment) OS=Succinivibrio sp.; OX = 2053619 GN=DCQ86_07170 PE=3 SV=1
MKFEIKKRCNKARLGQMIFDRGIVRTPAFMPVGTLGTVKGLRPEHVEELGADILLGNTFHLWLRPGTEVIKAHGDLHDFMNWHKPILTDSGGFQVFSLSDIRKVKEEGVHFRNPINGSKLFLSPEISMQIQYDLGSDIVMQFDECIGLPATSEEMARAMRLSLRWAQRSKDEFQRLGNKNSLFGIIQGGSDEKLREESLEGLTKIGFDGYAIGGLAVGEPKPVMYKALRHIAPLMPEDKPRYLMGVGTPA

SEQ ID NO: 61377 - protein, 373 aa, Succinivibrio sp.
  REGION 1..373: note = tr|A0A316SGG6|A0A316SGG6_9GAMM Queuine tRNA-ribosyltransferase OS=Succinivibrio sp. OX=2053619; GN = tgt PE=3 SV=1
MKLKFELKKRCGKARLGQMVFERGVVRTPAFMPVGTLGTVKGVRPEDVEELGADILLGNTFHLWLRPGCDVIKAHGDLHDFMNWHKPILTDSGGFQVFSLSDIRKVTEEGVHFRNPINGSKLFLSPEVSMQIQYALGSDIVMQFDECIGLPATREEMARAMRLSLRWAKRSKDEFERLGNQNSLFGIIQGGSDEALREESLKGLTEIGFEGYAIGGLAVGEPKPVMYKALSHIAPNMPEDKPRYLMGVGTPADILQGVLNGVDMFDCVMPSRNARNAHLFTSKGVVRIRNSKYAMDTSPLDENCSCYTCRHYSKAYLHHLDKCHELLGAQLNTIHNLHFYEHFMADIRKAIEEDRLEQFAEEFYNVYGYPELV

SEQ ID NO: 61378 - protein, 370 aa, unidentified
  source 1..370: note = Succinivibrionaceae bacterium
  REGION 1..370: note = tr|A0A3C0C9I8|A0A3C0C9I8_9GAMM Queuine tRNA-ribosyltransferase OS=Succinivibrionaceae bacterium; OX = 2053620 GN=tgt PE=3 SV=1
MKFTVKKKSGRARLGSLELPHGVVRTPAFMPVGTQATVKGMRPEHIKELGADILLGNTFHLWLRPGPEVIRAHGGLHQFMNWQGPILTDSGGFQVFSLSGLRKVTEEGVNFRHPINGSKLFLSPEISMQIQHALNSDIVMQFDECIALPAPRDEMKRAMELSLRWARRCHDEFVRLENHNALFGIIQGGTDKSLREASLRGLTDIGFDGYAIGGLAVGEPKKDMYGELDHITPMMPDDHPRYLMGVGTPMDILQGVLNGVDMFDCVMPSRNARNGHLFTTQGVVRIRNARYATDTSPLDPNCGCYTCQNYTKAYLHHLDKCNEILGAHLNTLHNLWFYEHFMADIRKAIEEDRLEQFAEDFYKVWGRPEI

SEQ ID NO: 61379 - protein, 372 aa, unidentified
  source 1..372: note = Succinivibrionaceae bacterium
  REGION 1..372: note = tr|A0A348YLI3|A0A348YLI3_9GAMM Queuine tRNA-ribosyltransferase OS=Succinivibrionaceae bacterium; OX = 2053620 GN=tgt PE=3 SV=1
MAFKFEVHKKCGKARLGSLKFARGTVRTPAFMPVGTQATVKGMRPEHIEELGADILLGNTFHLWLRPGCEVIRAHGGLHEFMNWDKPILTDSGGFQVFSLSGIRKVTEEGVKFVSPINGSRLFLSPEVSMQIQKDLDSDIVMQFDECIGLPAERKEMERAMKLSLRWAARCKDEFERLGNKNSLFGIIQGGTDKALREESLQGLMDIGFDGYAIGGLAVGESKESMYTELRHIGPIMPEDKPHYLMGVGTPMDILQGVLNGVDMFDCVMPSRNARNGHLFTSQGVVRIRNAVHAMDTGPLDPACGCYTCRNYSRAYLHHLDKTKELLGAHLNTLHNLWFYEHFMADIRQAIAEDRLEQFAEDFYKVWGRPEA

SEQ ID NO: 61380 - protein, 375 aa, Sulfitobacter brevis
  REGION 1..375: note = tr|A0A1I1ZVT2|A0A1I1ZVT2_9RHOB Queuine tRNA-ribosyltransferase OS=Sulfitobacter brevis OX=74348; GN = tgt PE=3 SV=1
MTAFSFEKHGQDGKARTGVIHTARGDIRTPAFMPVGTAATVKAMMPESVAATGADILLGNTYHLMLRPTAERIQSLGGLHKFMNWSGPILTDSGGFQVMSLAALRKLTERGVTFKSHIDGSRHEITPERSMEIQAMLGSDIVMCFDECPALPADRDRIASSMEMSMRWAKRSKEAFGDRPGHALFGIQQGGLEQDLRGQSAESLREIGFDGYAVGGLAVGEGQAAMFDCLDFAADQLPQDRPRYLMGVGKPDDIVGAVARGIDMMDCVLPSRSGRTGQVFTRRGVLNIKNARHQDDPRPLDEDCGCPACSNYSRAYLHHVYRSQEIISSMLLTWHNLRFYQDLMAGMRDAIAAGEFTQWQAKFHTDRAEGDIEPL

SEQ ID NO: 61381 - protein, 375 aa, Sulfitobacter delicatus
  REGION 1..375: note = tr|A0A1G7KME3|A0A1G7KME3_9RHOB Queuine tRNA-ribosyltransferase OS=Sulfitobacter delicatus; OX = 218672 GN=tgt PE=3 SV=1
MTSTGFTKHAQDGMARSGVITTPRGEIRTPAFMPVGTAATVKAMMPESVASTGADILLGNTYHLMLRPTAERVAKLGGLHKFMNWDKPILTDSGGFQVMSLAGLRKLTERGVTFKSHIDGSKHEITPERSMEIQELLGSDIVMCFDECPALPADRARIAESMRLSMRWAKRSREAFGDRPGHMLFGIQQGGLEQDFRQESAEALREIGFDGYAVGGLAVGEGQEAMFSTLDFATDMLPEDKPRYLMGVGKPDDIVGAVARGIDVMDCVLPSRSGRTGQVFTRMGVLNIKNARHMDDPRPLDENCSCPACQNYSRAYLHHVFRSQEIISSMLLTWHNLQYYQDIMAGMREAIAAGRFTQWQADFHAGRAQGDIDPL

SEQ ID NO: 61382 - protein, 379 aa, Sulfitobacter donghicola
  REGION 1..379: note = tr|A0A410XZ87|A0A410XZ87_9RHOB Queuine tRNA-ribosyltransferase OS=Sulfitobacter donghicola; OX = 421000 GN=tgt PE=3 SV=1
MPAVTYEHIKTCKQSGARLGIVHTPHGSFETPMFMPVGTKATVKTMSPEELRQIEAKIILGNTYHLWLQPGNDIIKHAGGLHKFMNWNGPILTDSGGFQVFSLSNLRKISEEGVEFRHHTNGSKLFLSPEKSMEIQNDLGSDIMMAFDECPPMPSEYKYVKDSIDRTTRWAERCLKAHARPEDQALFGIIQGGEYKDLREQSAKELVELDFPGYAIGGLSVGEPKPVMYEMVEHTEQFMPKDKPRYLMGVGSPDALIECSIRGMDMFDCVLPTRIARNGTCMTSNGRLVIKNAKFADDLRPLDENCDCYTCKNYSRAYIRHLIKAEETFGIRLTTIHNLHFLLKLMEDIRQAIREDRLLDFKAEFFEQYGLNVDNPKNF

SEQ ID NO: 61383 - protein, 375 aa, Sulfitobacter donghicola
  REGION 1..375: note = tr|A0A073IKI7|A0A073IKI7_9RHOB Queuine tRNA-ribosyltransferase OS=Sulfitobacter donghicola DSW-25 = KCTC 12864 = JCM 14565 OX=1300350 GN=tgt PE=3 SV=1
MTEISYQINATDGRARTGVINTPRGEIRTPAFMPVGTAATVKAMMPESVRQTGADILLGNTYHLMLRPTAERVDRLGGLHKFMNWDRPILTDSGGFQVMSLASLRKLTERGVTFKSHIDGSKHEITPERSMEIQKLLGSDIVMCFDECPALPADRDRIASSMELSMRWAKRSKDAFGDRPGHALFGIQQGGLEEDLRQQSADALRDIGFGGYAIGGLAVGEGQEAMFGCLDYAPEQLPQDKPRYLMGVGKPDDIVGAVARGIDMMDCVLPSRSGRTGQVFTRKGVLNIKNARHMDDPRPLDEDCGCPACQNYSRAYLHHVFRSQEMISSMLLTWHNLHYYQDLMAGMRDAITAGTFEAWQRDFHANRAQGDIDPL

SEQ ID NO: 61384 - protein, 375 aa, Sulfitobacter dubius
  REGION 1..375: note = tr|A0A1I2S3B5|A0A1I2S3B5_9RHOB Queuine tRNA-ribosyltransferase OS=Sulfitobacter dubius OX=218673; GN = tgt PE=3 SV=1
MTSTGFTKHAQDGKARSGVIQTPRGEIRTPAFMPVGTAATVKAMMPESVASTGADILLGNTYHLMLRPTAERIAKLGGLHKFMNWDKPILTDSGGFQVMSLAGLRKLTERGVTFKSHIDGSKHEITPERSMEIQELLGSDIVMCFDECPALPADRDRIASSMRMSMRWAKRSREAFGDRPGHMLFGIQQGGLEEDFRKESAEALCEIGFDGYAVGGLAVGEGQQAMFSTLDFSNDMLPEDKPRYLMGVGKPDDIVGAVARGIDMMDCVLPSRSGRTGQVFTRMGVLNIKNARHMDDPRPLDENCSCPACQNYSRAYLHHVFRSQEIISSMLLTWHNLQYYQDIMAGMREAIAAGRFAQWQADFHAGREQGDIDPL

SEQ ID NO: 61385 - protein, 375 aa, unidentified
  source 1..375: note = Sulfitobacter geojensis
  REGION 1..375: note = tr|A0A196QRX9|A0A196QRX9_9RHOB Queuine tRNA-ribosyltransferase OS=Sulfitobacter geojensis; OX = 1342299 GN=tgt PE=3 SV=1
MSRITFEKHAQDGKARAGVIHTTRGDIRTPAFMPVGTAATVKAMMPESVAATGADILLGNTYHLMLRPTAERIARLGGLHKFMNWDKPILTDSGGFQVMSLADLRKLTERGVTFKSHIDGSKHEITPERSMEIQALLGSDIVMCFDECPALPADRDRIATSMELSMRWAKRSKEAFGDRPGHALFGIQQGGLEQDLRGQSAEALREIGFDGYAVGGLAVGEGQEAMFGCLDYAPDQLPEDKPRYLMGVGKPDDIVGAVKRGIDMMDCVLPSRSGRTGQVFTRAGVLNIKNARHADDPRPLDENCACPACTKYSRAYLHHVFRSQEMISGMLLTWHNLRYFQDIMDGMRTAIAAGTFEAWERDFHAGRAQGDIDPL

SEQ ID NO: 61386 - protein, 375 aa, Sulfitobacter guttiformis
  REGION 1..375: note = tr|A0A420DIJ4|A0A420DIJ4_9RHOB Queuine tRNA-ribosyltransferase OS=Sulfitobacter guttiformis; OX = 74349 GN=tgt PE=3 SV=1
MTGFSYQINATDGQARTGVINTPRGEIRTPAFMPVGTAATVKAMMPSSVRETGADILLGNTYHLMLRPTAERIDRLGGLHKFMNWDRPILTDSGGFQVMSLANLRKLTERGVTFKSHIDGSKHEITPERSMEIQALLGSDIVMCFDECPALPADRDRIAQSMELSMRWAKRSREAFGDRPGHALFGIQQGGLEEDLRKVSAEALREIGFDGYAVGGLAVGEGQEAMFGCLDYAADQLPVEKPRYLMGVGKPDDIVGAVARGIDMMDCVLPSRSGRTGQVFTRQGVLNIKNARHADDPRPLDEGCGCPACSHYSRAYLHHVFRSQEMISSMLLTWHNLRYYQDIMAGMRETIAAGTFQKWQSDFHSTRAQGDIDPL

SEQ ID NO: 61387 - protein, 375 aa, unidentified
  source 1..375: note = Sulfitobacter indolifex
  REGION 1..375: note = tr|A9E963|A9E963_9RHOB Queuine tRNA-ribosyltransferase OS=Sulfitobacter indolifex HEL-45; OX = 391624 GN=tgt PE=3 SV=1
MTSTGFTKHAQDGKARSGVIQTTRGEIRTPAFMPVGTAATVKAMMPESVASTGADILLGNTYHLMLRPTAERIAKLGGLHKFMNWDKPILTDSGGFQVMSLAGLRKLTERGVTFKSHIDGSKHEITPERSMEIQELLGSDIVMCFDECPALPADRDRIASSMRMSMRWAKRSREAFGDRPGHMLFGIQQGGLEQDFRQESAEALREIGFDGYAVGGLAVGEGQEAMFSTLDFSTDMLPEDKPRYLMGVGKPDDIVGAVARGIDMMDCVLPSRSGRTGQVFTRMGVLNIKNARHMDDPRPLDENCSCPACQNYSRAYLHHVFRSQEIISSMLLTWHNLQYYQDIMAGMREAIAAGRFTQWQADFHAGREQGDIDPL

SEQ ID NO: 61388 - protein, 375 aa, Sulfitobacter litoralis
  REGION 1..375: note = tr|A0A1H0PPZ1|A0A1H0PPZ1_9RHOB Queuine tRNA-ribosyltransferase OS=Sulfitobacter litoralis; OX = 335975 GN=tgt PE=3 SV=1
MKKFSFDLQARDGAARTGVISTPRGDIRTPAFMPVGTAATVKAMMPESVAATGADILLGNTYHLMLRPTAERIDRLGGLHKFMNWDKPILTDSGGFQVMSLSDLRKLTEKGVTFKSHIDGSKHELTPERSMEIQKLLGSDIVMCFDECPALPADRARIAESMRLSMRWAKRSRDAFGDRPGYALFGIQQGGLEQDFREESAKALMEVGFDGYAVGGLAVGEGQEAMFGCLDFATDMLPVDRPRYLMGVGKPDDIVGAVARGIDMMDCVLPSRSGRTGQVFTRHGVVNIKNARHADDPRPLDEACTCPACSNYSRAYLHHVFRSQEMISGMLLTWHNLHYFQEIMAGMRGAIAAGTFDAWQADFHSQRAQGDIDPL

SEQ ID NO: 61389 - protein, 375 aa, Sulfitobacter marinus
  REGION 1..375: note = tr|A0A1I6Q9V1|A0A1I6Q9V1_9RHOB Queuine tRNA-ribosyltransferase OS=Sulfitobacter marinus OX=394264; GN = tgt PE=3 SV=1
MEKFSFDLQARDGSARTGVISTPRGDIRTPAFMPVGTAATVKAMMPESVVATGADILLGNTYHLMLRPTAERIDRLGGLHKFMNWDKPILTDSGGFQVMSLADLRKLTEKGVTFKSHIDGSKHELTPERSMEIQKLLGSDIVMCFDECPALPADRDRIAESMRLSMRWAARSRDAFGDRPGHALFGIQQGGLEQDFREESAKALIDVGFDGYAVGGLAVGEGQEAMFGCLDFATDMLPVDRPRYLMGVGKPDDIVGAVARGIDMMDCVLPSRSGRTGQVFTRHGVVNIKNARHADDPRPLDEDCTCPACSNYSRAYLHHVFRSQEMISGMLLTWHNLHYFQEIMAGMRGAIAAGTFDTWQADFHAQRAQGDIEPL

SEQ ID NO: 61390 - protein, 375 aa, Sulfitobacter mediterraneus
  REGION 1..375: note = tr|A0A2T6CH06|A0A2T6CH06_9RHOB Queuine tRNA-ribosyltransferase OS=Sulfitobacter mediterraneus; OX = 83219 GN=tgt PE=3 SV=1
MTRITFEKQAQDGKARRGVIRTTRGDIQTPAFMPVGTAATVKAMMPESVAATGADILLGNTYHLMLRPTAERVAALGGLHKFMNWSGPILTDSGGFQVMSLAGLRKLTEKGVTFKSHIDGSKHEITPERSMEIQALLGSDIVMCFDECPALPADRDRIASSMELSMRWAQRSKDAFGDRPGHALFGIQQGGLEEDLRAQSAQALREIEFDGYAVGGLAVGEGQEAMFGCLDFAPDQLPEDKPRYLMGVGKPDDIVGAVARGIDMMDCVLPSRSGRTGQVFTRHGVLNIKNARHQDDPRPLDENCSCPACRNYSRAYLHHVFRSQEIISSMLLTWHNLHYYQDIMSGMREAIASGTFAAWQSDFHAGRAQGDIDPL

SEQ ID NO: 61391 - protein, 375 aa, Sulfitobacter mediterraneus
  REGION 1..375: note = tr|A0A061SQZ0|A0A061SQZ0_9RHOB Queuine tRNA-ribosyltransferase OS=Sulfitobacter mediterraneus; OX = 83219 GN=tgt PE=3 SV=1
MTRITFEKQAQDGKARRGVIRTTRGDIQTPAFMPVGTAATVKAMMPESVAATGADILLGNTYHLMLRPTAERVAALGGLHKFMNWSGPILTDSGGFQVMSLAGLRKLTEKGVTFKSHIDGSKHEITPERSMEIQALLGSDIVMCFDECPALPADRDRIASSMELSMRWAQRSKDAFGDRPGHALFGIQQGGLEEDLRAQSAQALREIEFDGYAVGGLAVGEGQEAMFGCLDFAPDQLPENKPRYLMGVGKPDDIVGAVARGIDMMDCVLPSRSGRTGQVFTRHGVLNIKNARHQDDPRPLDENCSCPACRNYSRAYLHHVFRSQEIISSMLLTWHNLHYYQDIMSGMREAIASGTFAAWQSDFHSGRAQGDIDPL

SEQ ID NO: 61392 - protein, 375 aa, Sulfitobacter pontiacus
  REGION 1..375: note = tr|A0A1H2UAS1|A0A1H2UAS1_9RHOB Queuine tRNA-ribosyltransferase OS=Sulfitobacter pontiacus; OX = 60137 GN=tgt PE=3 SV=1
MKKFSFDLQARDGAARTGVISTPRGDIRTPAFMPVGTAATVKAMMPESVAATGADILLGNTYHLMLRPTAERIDRLGGLHKFMNWDKPILTDSGGFQVMSLSGLRKLTEKGVTFKSHVDGSKHELTPERSMEIQKLLGSDIVMCFDECPALPADRARIADSMRMSMRWAKRSREAFGDRPGHALFGIQQGGLERDFREESAKALIDVGFDGYAVGGLAVGEGQEAMFGCLDFATDMLPVDRPRYLMGVGKPDDIVGAVARGIDMMDCVLPSRSGRTGQVFTRHGVVNIKNARHADDPRPLDEACTCPACSNYSRAYLHHVFRSQEMISGMLLTWHNLHYFQEIMAGMRDAIAAGTFDAWQADFHSQRAQGDIDPL

SEQ ID NO: 61393 - protein, 375 aa, unidentified
  source 1..375: note = Sulfitobacter pseudonitzschiae
  REGION 1..375: note = tr|A0A221JZI9|A0A221JZI9_9RHOB Queuine tRNA-ribosyltransferase OS=Sulfitobacter pseudonitzschiae; OX = 1402135 GN=tgt PE=3 SV=1
MTLITFRKDATDGKARTGVLSTPRGDIRTPAFMPVGTAATVKAMLPESVAATGADILLGNTYHLMLRPTAERIDRLGGLHRFMNWDKPILTDSGGFQVMSLAALRKLTEKGVTFKSHIDGSRHEITPERSMEIQKLLGSDIVMCFDECPALPADKTRIAQSMRLSMRWAQRSRDAFGDRPGHALFGIQQGGLEQDLRAESAAALTEIGFDGYAVGGLAVGEGQEAMFGCLDFASDQLPQDKPRYLMGVGKPDDIVGAVARGIDMMDCVLPSRSGRTGQVFTRHGVLNIKNARHQDDPRPIDDACTCPACTKYSRAYLHHVFRSQEMISSMLLTWHNLHYFQQIMDGMRKAIAAGTFTRWQADFHANRAGGDIEQL

SEQ ID NO: 61394 - protein, 375 aa, unidentified
  source 1..375: note = Sulfitobacter pseudonitzschiae
  REGION 1..375: note = tr|A0A073JJB5|A0A073JJB5_9RHOB Queuine tRNA-ribosyltransferase OS=Sulfitobacter pseudonitzschiae; OX = 1402135 GN=tgt PE=3 SV=1
MTRFSFELAATDGRARTGTIHTPRGDIRTPAFMPVGTAATVKAMMPESVAATGADILLGNTYHLMLRPTAERIDRLGGLHKFMNWDKPILTDSGGFQVMSLAALRKLTEKGVTFKSHIDGSRHEITPERSMEIQKLLGSDIVMCFDECPALPADKARIAESMRLSMRWAERSRDAFGDRPGHALFGIQQGGLEEDLRAESAEALTQIGFDGYAVGGLAVGEGQEAMFGCLDFAPEQLPQDKPRYLMGVGKPDDIVGAVARGIDMMDCVLPSRSGRTGQVFTRHGVLNIKNARHQDDPRPIDDACTCPACTNYSRAYLHHVFRSQEMISSMLLTWHNLHYFQQIMGEMRAAIAAGSFTQWQADFHANRANGDIEQL

SEQ ID NO: 61395 - protein, 374 aa, Sulfitobacter sp.
  REGION 1..374: note = tr|A0A345QNT0|A0A345QNT0_9RHOB Queuine tRNA-ribosyltransferase OS=Sulfitobacter sp. SK012; OX = 1389005 GN=tgt PE=3 SV=1
MSFGFEITATDGKARTGAISTTRGDIRTPAFMPVGTAATVKAMMPDSVAATGADILLGNTYHLMLRPTAERIASLGGLHKFMNWSGPILTDSGGFQVMSLADLRKLTERGVTFKSHIDGSKHEITPERSMEIQALLGSDIVMCFDECPALPADRARINESMQLSMRWAARSKEAFGDRPGHALFGIQQGGLERDLRGESAEALASIGFDGYAVGGLAVGEGQEAMFDCLDYAPDQLPQDKPRYLMGVGKPDDIVGAVARGIDMMDCVLPSRSGRTGQVFTRRGVLNIKNARHMDDPRPLDEACTCPACSNYSRAYLHHVFRSQEIISSMLLTWHNLHYYQDLMAGMREAIAAGSFTTWQSEFHATRVQGDIDPL

SEQ ID NO: 61396 - protein, 378 aa, Sulfitobacter sp.
  REGION 1..378: note = tr|A0A196P9I6|A0A196P9I6_9RHOB Queuine tRNA-ribosyltransferase OS=Sulfitobacter sp. EhC04; OX = 1849168 GN=tgt PE=3 SV=1
MNKTDKVAFDLTATDGKARSGVIHTTRGDIRTPAFMPVGTAATVKAMMPESVAATGADILLGNTYHLMLRPTAERVARLGGLHRFMNWSGPILTDSGGFQVMSLADLRKLTERGVTFKSHIDGSRHEITPERSMEIQALLGSDIVMCFDECPALPASRDRIAESMELSMRWAKRSKEAFGDRPGHALFGIQQGGLERDLRQQSAEALREIGFDGYAVGGLAVGEGQAAMFDCLDHAAGQLPEDKPRYLMGVGKPDDIVGAVARGIDMMDCVLPSRSGRTGQVFTRLGVLNIKNARHADDPRPLDENCTCPACRNYSRAYLHHVFRSQEIISSMLLTWHNLHYFQDIMAGMRGAIAAGSFAAWQADFHATRAQGDIDPL

SEQ ID NO: 61397 - protein, 373 aa, unidentified
  source 1..373: note = Sulfuricaulis limicola
  REGION 1..373: note = tr|A0A1B4XF57|A0A1B4XF57_9GAMM Queuine tRNA-ribosyltransferase OS=Sulfuricaulis limicola; OX = 1620215 GN=tgt PE=3 SV=1
MKFELLANDGAARRGRMVFERGTVETPAFMPVGTYGTVKGMTPEELRETGAEIILGNTFHLMLRPGTEVIKAHGGLHRFMHWDGPILTDSGGFQVWSLGQLRKLSEKGVLFQSPVDGAKIFLGPEESMAVQQALDADIIMIFDECTHHPATEPEARASMELSLRWAERSKIAHADHPSALFGIVQGGMYEHLRDISLIGLKQIGFDGYAIGGLSVGETKEEMLRILDHLAPQMPADKPRYLMGVGTPEDLVEAVRRGMDMFDCVLPTRNARNGWLFTHDGAVKIKNSRYARDTGPVDPLCDCYTCRHYSRAYLRHLQQANEILGARLATIHNLHYYQCLMRGLRQAIAEKELDDFVEKFYRMRRPEPPDGPEN

SEQ ID NO: 61398 - protein, 367 aa, Sulfuricella denitrificans
  REGION 1..367: note = tr|S6AMI3|S6AMI3_SULDS Queuine tRNA-ribosyltransferase OS=Sulfuricella denitrificans (strain DSM 22764 / NBRC 105220 / skB26) OX=1163617 GN=tgt; PE = 3 SV=1
MKFDLHATDGPARRGTLTLAHGTVETPAFMPVGTYGTVKAMSPAELKEIGAHIVLGNTFHLWLRPGLEVIEAHGGLHRFMGWDGPILTDSGGFQVFSLGELRKITEEGVKFQSPVNGDRCFLTPEESMRIQKVLNSDIVMIFDECTPHPADLQQAGDSMRLSLRWAERSKRAHEGNPNALFGIVQGGMHESLRDESLAGLVNIGFDGYAIGGLSVGEPKEDMLRILDHVGPQMPAEKPRYLMGVGTPEDLVDAVSRGVDMFDCVMPTRNARNGWLFTRFGTVRIKNAQYRLDMRPLDEACGCYTCRNFTRAYLHHLHRIGEILGARLNTIHNLYYYQELMQGIRRAIEEGRFADFVREFKQARVAGS

SEQ ID NO: 61399 - protein, 367 aa, Sulfuricella sp.
  REGION 1..367: note = tr|A0A0E9MD16|A0A0E9MD16_9PROT Queuine tRNA-ribosyltransferase OS=Sulfuricella sp. T08 OX=1632857; GN = tgt PE=3 SV=1
MKFELLATDGPARRGTLTLAHGTVETPAFMPVGTYGTVKAMSPAELKEIGAHIVLGNTFHLWLRPGLEVIAAHGGLHRFMGWDGPILTDSGGFQVFSLGDLRKITEEGVKFQSPVNGDRCFLTPEESMRIQKVLNSDIVMIFDECTPHPADLQQAGDSMRLSLRWAERSKRAHEGNPNALFGIVQGGMHESLRDESLAGLVNIGFDGYAIGGLSVGEPKEDMLRILDHVAPQMPADKPRYLMGVGTPEDIVDAVSRGVDMFDCVMPTRNARNGWLFTRFGTVRIKNAQYRLDMRPLDEVCGCYTCRNFTRAYLHHLHRIGEILGARLNTIHNLHYYQELMQGIRRAIEEGRLAEFVQEFRQARVAGS

SEQ ID NO: 61400 - protein, 373 aa, Sulfuricurvum kujiense
  REGION 1..373: note = tr|A0A2D3WA69|A0A2D3WA69_9HELI Queuine tRNA-ribosyltransferase OS=Sulfuricurvum kujiense; OX = 148813 GN=tgt PE=3 SV=1
MQFHVDATCGNARACTITTAHSTIQTPIFMPVGTVGSVKSLDMADMTELLDTQIILANTYHTYLRPGDETIAKLGGLHEFTTYPKSFLTDSGGFQAFSLSDISKPTERGIEFRSHIDGSKHFFTPEKVIDIQNNLNSDIMMILDDLVALPATQERIKTSIQRTTQWAQQSIDYHRNNQTKGIGINQNIFAIIQGGTDFNFRTQSAQELCAMDYDGFAIGGLSVGEANNLMYDTVEHTTPLMPSDKPRYLMGVGTPEDLVENIERGVDMFDCVMPTRNARNGTLFTTFGKVNIKGSRYKFDSEPIDPACTCYTCRRYSRAYLNHLFRSRELTYFRLASLHNLHYYLWLVRQAREAILAGKFVEFKKDFYARRQS

SEQ ID NO: 61401 - protein, 373 aa, Sulfuricurvum kujiense
  REGION 1..373: note = tr|E4U2Q6|E4U2Q6_SULKY Queuine tRNA-ribosyltransferase OS=Sulfuricurvum kujiense (strain ATCC BAA-921 / DSM 16994 / JCM 11577 / YK-1) OX=709032; GN = tgt PE=3 SV=1
MQFNVDATCGKARACTITTAHSTIQTPIFMPVGTVGSVKALDMADMTELLDTQIILANTYHMYLRPGDETVAKMGGLHGYTTYPNSFLTDSGGFQAFSLSDISKPTESGIEFRSHIDGSKHFFTPEKVIDIQNNLNSDIMMILDDLVALPATQERIKTSIQRTTQWAQQSIDYHRYNQSKGIGINQNIFAIIQGGTDFNFRTQSAEELCAMDYDGFAIGGLSVGESNNLMYDTVEHTTPLMPADKPRYLMGVGTPEDLVENIERGVDMFDCVMPTRNARNGTLFTTFGKVNIKGAVYKYDAQPIDPDCQCYTCRRYSRAYLHHLFRSREITYFRLASLHNLHYYLWLVRQAREAIIAGQFIEFKKDFYARRQS

SEQ ID NO: 61402 - protein, 373 aa, Sulfuricurvum sp.
  REGION 1..373: note = tr|A0A2D0I5T2|A0A2D0I5T2_9HELI Queuine tRNA-ribosyltransferase OS=Sulfuricurvum sp. PD_MW2; OX = 2027917 GN=tgt PE=3 SV=1
MQFHVDATCGNARACTITTAHSTIQTPIFMPVGTVGSVKALDMSDMTDLLDTQIILANTYHTYLRPGDETIAKLGGLHGFTTYPKSFLTDSGGFQAFSLSDISKPTEHGIEFRSHIDGSKHFFTPEKVIDIQNNLNSDIMMILDDLVALPATQERIRTSIKRTTQWAQQSIDYHRNNQSKGIGINQNIFAIIQGGTDFNFRTQSAEELCAMDYDGFAIGGLSVGEANNLMYDTVEHTTPLMPSDKPRYLMGVGTPEDLVENIERGVDMFDCVMPTRNARNGTLFTTFGKVNIKGAAYKFDSEPIDPACECYTCRRYSRAYLHHLFRSREITYFRLASLHNLHYYLWLVKQARQAIIEGKFKEFKKDFYARRQA

SEQ ID NO: 61403 - protein, 375 aa, Sulfuricurvum sp.
  REGION 1..375: note = tr|A0A0C2ZS91|A0A0C2ZS91_9HELI Queuine tRNA-ribosyltransferase OS=Sulfuricurvum sp. PC08-66; OX = 1539066 GN=tgt PE=3 SV=1
MQFSLQASDGSARAGTLKTAHSTILTPVFMPVGTLASVKALDMADIQSELDAQIILANTYHTYLRPGDEVIAQMGGLHGFTSYPKSFLTDSGGFQAFSLSKNTQHFDEGIEFKSHIDGSRHLFTPKKVLDIQYNLNSDIMMILDDLVALPATPERIRASIERTTQWAKTSIDYHRSMQSQGRGLTNNIFAIIQGGTDKNFRTQSANELCALDFDGFAIGGLSVGEPNQAMYDTVEHTTPLMPVDKPRYLMGVGTPEDLVENIARGIDMFDCVMPTRNARNGTLFTHFGRITIKATRFKTDPRPIDENCTCMTCQRYSRSYLSHLFRAKELTYFRLASIHNLHYYLELVRMAREAIIAGQFAQFKHDFYAKRKEPQ

SEQ ID NO: 61404 - protein, 367 aa, unidentified
  source 1..367: note = Sulfuriferula multivorans
  REGION 1..367: note = tr|A0A401JGX1|A0A401JGX1_9PROT Queuine tRNA-ribosyltransferase OS=Sulfuriferula multivorans; OX = 1559896 GN=tgt PE=3 SV=1
MEFKLHSTDGLARRGTLTLAHGAVETPAFMPVGTYGTVKAMSPLELKEIGAHIVLGNTFHLWLRPGLEAIEAHGGLHRFMGWDRPILTDSGGFQVFSLGALRKITEEGVKFASPLNGDRLFLTPEESMRIQKVLNSDIVMIFDECTPYPAEPDAAAYSMRLSLRWAERSKLAHAGNPNALFGIVQGGMYEDLRDESLRELAAMDFDGYAIGGLSVGEPKDDMRRILAHTAPQLPQHKPRYLMGVGTPEDIVASVQHGVDMFDCVLPTRNARHGILFTRHGDLRIKNARFRTDIAPVDAQCGCYCCRNFSRAYLHHLIRCGEILGARLATLHNLHYYQELMAGLRAAIETGTLGDFVAGFHEQRAGSC

SEQ ID NO: 61405 - protein, 367 aa, unidentified
  source 1..367: note = Sulfuriferula plumbiphila
  REGION 1..367: note = tr|A0A512L7C8|A0A512L7C8_9PROT Queuine tRNA-ribosyltransferase OS=Sulfuriferula plumbiphila; OX = 171865 GN=tgt PE=3 SV=1
MKFKLHSTDDLARRGTLNLTHGTVETPAFMPVGTYGTVKAMSPDELKQIGAHIVLGNTFHLWLRPGLEAVEAHGGLHRFMGWDRPILTDSGGFQVFSLGALRKITEEGVKFASPLNGDRLFLTPEESMRIQKVLNSDIVMIFDECTPYPAEPDAAAYSMRLSLRWAERSQAAHAGNPNALFGIVQGGMYEDLRDESLRELAAMDFDGYAIGGLSVGEPKDDMRRILAHTAPQLPQHKPRYLMGVGTPEDIVASVQNGVDMFDCVLPTRNARHGILFTRHGDLRIRNARFRTDIAPVDAQCGCYCCRNFSRAYLHHLIRCGEILGARLATLHNLHYYQELMAGLRAAIETGTLSDFVARFHEQRAGSC

SEQ ID NO: 61406 - protein, 367 aa, unidentified
  source 1..367: note = Sulfuriferula sp.
  REGION 1..367: note = tr|A0A1Y0G620|A0A1Y0G620_9PROT Queuine tRNA-ribosyltransferase OS=Sulfuriferula sp. AH1; OX = 1985873 GN=tgt PE=3 SV=1
MQFQLHKTDGLARRGTLTLAHGQVETPAFMPVGTYGTVKAMAPDELKTVGAQIVLGNTFHLWLRPGLEAIEAHGGLHKFMGWDRPILTDSGGFQVFSLGALRKITEQGVKFSSPQNGDKLFLSPEESMHIQKVLNSDIVMIFDECTPYPAEHDAAAYSMRLSLRWAERSKTAHAGNPNALFGIVQGGMYEDLRDESLRELGQMNFDGYAIGGLSVGEPKPDMRRILAHTAPQLPADKPRYLMGVGTPEDIVASVQHGVDMFDCVLPTRNARHGILFTKFGDIRIKNARFRIDTAPVDNECTCYCCSNFSRAYLHHLIRCGEILGARLATIHNLHYYQQLMTGLRQAIENGKLNDFVAKFHEQRALSC

SEQ ID NO: 61407 - protein, 373 aa, unidentified
  source 1..373: note = Sulfurifustis variabilis
  REGION 1..373: note = tr|A0A1B4V556|A0A1B4V556_9GAMM Queuine tRNA-ribosyltransferase OS=Sulfurifustis variabilis; OX = 1675686 GN=tgt PE=3 SV=1
MRFELLATDGAARRGRMTFARGTVETPAFMPVGTYGTVKAMTPEELRAAGAEIILGNTFHLMLRPGVDVVRAHGGLHRFTHWEGPILTDSGGFQVWSLGALRKLTEEGVWFQSPVDGAKVFLGPEEAVAVQHALDADIVMVFDECTPYPASESEARASMELSLRWAERCRRAHGDHPAALFGIVQGGMHEHLREISLTGLRQIGFDGYALGGLSVGEPKETMYAVVAHMAPRMPADRPRYLMGVGTPEDLVEAVRRGMDMFDCVLPTRNARNGWLYTSTGHLKIKNSRHAADTSPVDPRCDCYTCRHYSRAYLRHLHQANEILGARLATVHNLHYYQALMRGLRTAIDEKRLDDFANKFYRMRRRETPLEAEE

SEQ ID NO: 61408 - protein, 379 aa, Sulfurihydrogenibium azorense
  REGION 1..379: note = tr|C1DVR0|C1DVR0_SULAA Queuine tRNA-ribosyltransferase OS=Sulfurihydrogenibium azorense (strain Az-Fu1 / DSM 15241 / OCM 825) OX=204536 GN=tgt; PE = 3 SV=1
MFKFQLIKKEGNARLGKIYTPHGEIETPIFMPVGTQGTVKAITVKHLEEDIKAQIILGNTYHLYLRPGLEVLKKFNGLHNFSSWKKPILTDSGGFQVFSLSIGKEKEGKQKAQVVVTEEGVKFKSHLDGSWHFFTPEFVVEIQEIIGSDIMMPLDECPPYPCSHQYAKESLERTVRWLKRSKQAKKNPNQALFGIIQGSVYEDLRKESTLKTVELDMDGYSIGGLSVGEPKEFMYSMTEVVTSLLPENKPRYLMGVGTPEDLLEAIDRGIDMFDCVIPTRNGRNGTLFTHFGKINIKSAKYKFDDTPVDPLCDCYTCKNFSKGYLRHLYNAEEITAYILGTIHNLRFYLKLMEDVRNAIKNESFSIFKKEFLDLYNSNI

SEQ ID NO: 61409 - protein, 379 aa, Sulfurihydrogenibium sp.
  REGION 1..379: note = tr|B2VA97|B2VA97_SULSY Queuine tRNA-ribosyltransferase OS=Sulfurihydrogenibium sp. (strain YO3AOP1) OX=436114 GN=tgt PE=3 SV=1
MFKFELLKEDGNARLGKIYTPHGEIDTPIFMPVGTQGTVKAITMKNLEEINAQIILGNTYHLYLRPGLEVLKKFGGLHNFSSWQKPILTDSGGFQVFSLAAGKEKEGKQKAQVVITEEGVKFKSHLDGSWHFFTPEFVVEIQEIIGSDIMMPLDECPPYPSSHQYALESLKRTIRWLERSKKAKKNPNQALFGIIQGSTYEDLRRESALRTVELDMDGYSIGGLSVGEPKEYMYAMTEIIAPLLPKDKPRYLMGVGTPEDLLESVDRGIDMFDCVMPTRNGRNGTLFTHFGKINIKSAKYKLDETPVDPLCDCYTCKNFSKGYLRHLYNAEEITAYILGTIHNLRFYLRLMEDIREAIKENRFKQFKKEFLERYNGQSV

SEQ ID NO: 61410 - protein, 378 aa, Sulfurihydrogenibium sp.
  REGION 1..378: note = tr|A0A2J6X183|A0A2J6X183_9AQUI Queuine tRNA-ribosyltransferase OS=Sulfurihydrogenibium sp.; OX = 2053621 GN=tgt PE=3 SV=1
MFRFSLIKKDGNARLGKIYTSHGEIETPIFMPVGTQGTVKAITMKHLEEINAQIILGNTYHLYLRPGLEVLKKFGGLHNFSSWKKPILTDSGGFQVFSLAVGKEKEGKQKAQVIITEEGVKFKSHLDGSWHFFTPEFVVEIQEIIGSDIMMPLDECPPYPCSHQYAKQSLDRTVRWLKRSKEAKKNPNQALFGIIQGSVYEDLRKESTLKTLELDMDGYSIGGLSVGEPKEFMYSMTEVVTSLLPENKPRYLMGVGTPEDLLESVDRGVDMFDCVMPTRNGRNGTLFTHYGKINIKSAKYKLDDSPIDPLCDCYTCKNFSKGYLRHLYNAEEITAYILGTIHNLRFYLKLMEDIRQAIKEDRFKSFKREFLDRYNNQG

SEQ ID NO: 61411 - protein, 202 aa, Sulfurihydrogenibium yellowstonense
  REGION 1..202: note = tr|C4FLF5|C4FLF5_9AQUI Queuine tRNA-ribosyltransferase (Fragment) OS=Sulfurihydrogenibium yellowstonense SS-5 OX=432331 GN=SULYE_1409 PE=4 SV=1
MPVGTQGTVKAITMKHLEEINAQIILGNTYHLYLRPGLEVLKKFGGLHNFSSWQKPILTDSGGFQVFSLAAGKEKEGKQKAQVVITEEGVKFKSHLDGSWHFFTPEFVVEIQEIIGSDIMMPLDECPPYPSSHQYALESLKRTIRWLERSKKAKKNPNQALFGIIQGSTYEDLRRESALRTIELDMDGYSVGGLSVGEPKEY

SEQ ID NO: 61412 - protein, 374 aa, Sulfurimonas autotrophica
  REGION 1..374: note = tr|E0US31|E0US31_SULAO Queuine tRNA-ribosyltransferase OS=Sulfurimonas autotrophica (strain ATCC BAA-671 / DSM 16294 / JCM 11897 / OK10); OX = 563040 GN=tgt PE=3 SV=1
MEFTLDATSKNARAGTITTAHSTIKTPVFMPVGTIGSVKSLDAHDVLELLGAEIILANTYHMYLRPGDKTVAKMGKLHGFTKYPKSFLTDSGGFQAFSLSDMSKPKTDGIEFRSHIDGSKHFFTPKKVIDIQHNLGSDIMMILDDLVALPATQERIKLSIERTTAWAKESIEYFRMKQKEGVGTEQNIFAIIQGGTDKAFRTKSATELCALDYDGFAIGGLSVGELNNEMYDTVEHTVQYMPKDKPRYLMGVGTPEDLIENIERGIDMFDCVMPTRNARNGTLFTSFGKMNIKGAKFKEDPAPIDPECQCLTCKTYSRAYINHLFRSREITYFRLATIHNLHYYLTLMREVREAILENRFAEYKKEFYKKRSKS

SEQ ID NO: 61413 - protein, 372 aa, Sulfurimonas denitrificans
  REGION 1..372: note = sp|Q30S46|TGT_SULDN Queuine tRNA-ribosyltransferase; OS = Sulfurimonas denitrificans (strain ATCC 33889 / DSM 1251) OX=326298 GN=tgt PE=3 SV=1
MEFTLEATSKNARACTIKTAHSTIKTPVFMPVGTLGSVKALDMEDVLDLLGAEIILANTYHMYLRPGDETVAKMGKLHGFTTYPKSFLTDSGGFQAFSLSDISKASENGIEFRSHIDGSKHFFTPKKVIDIQHNLGSDIMMILDDLVALPATGERIALSIERTTAWAKESIEYFRKKQKEGIGAEQNIFAIIQGGTDKAFRTKSATELCALDFDGFAIGGLSVGELNNEMYDTVEHTVKYMPKDKPRYLMGVGTPEDLIENIERGIDMFDCVMPTRNARNGTLFTSFGRLNIKGATYKEDAQPVDSECECLTCKRYSRAYLNHLFRSREIAYFRLATIHNLHYYLNLMREAREAILEDKYAEFKAEFYRKRG

SEQ ID NO: 61414 - protein, 373 aa, unidentified
  source 1..373: note = Sulfurimonas gotlandica
  REGION 1..373: note = tr|B6BL99|B6BL99_SULGG Queuine tRNA-ribosyltransferase OS=Sulfurimonas gotlandica (strain DSM 19862 / JCM 16533 / GD1) OX=929558 GN=tgt PE=3 SV=1
MEFTLEATSKNARACTIKTAHSTIKTPVFMPVGTLGSIKALDMDDVLNVLGAEIILANTYHMYLRPGDETVAKMGKLHKFTTYPKSFLTDSGGFQAFSLSDISKPKENGIEFRSHIDGSKHFFTPKKVIDIQNNLGSDIMMILDDLVALPATQERIKLSIERTTAWAKESIEYFRSKQAKGIGQEQNIFAIIQGGTDKAFRTKSATELCALDYDGFAIGGLSVGELNNEMYDTVEHTVQYMPKDKPRYLMGVGTPEDLIENIERGIDMFDCVMPTRNARNGTLFTSFGKINIKGAKFKEDEAPIDPECKCITCQRYSRAYLNHMFRAREITYFRLATIHNLHYYLNLMREVREAILEDRFAEYKEVFYKKRAN

SEQ ID NO: 61415 - protein, 373 aa, unidentified
  source 1..373: note = Sulfurimonas hongkongensis
  REGION 1..373: note = tr|T0J2V4|T0J2V4_9HELI Queuine tRNA-ribosyltransferase OS=Sulfurimonas hongkongensis; OX = 1172190 GN=tgt PE=3 SV=1
MDFKIDATSKNARACTIKTAHSTIKTPVFMPVGTLGSIKALDMQDVLETLGADIILANTYHMYLRPGDKTVAKMGKLHGFTTFFKSFLTDSGGFQAFSLSDISKPKADGIEFRSHIDGSKHFFTPKKVIDIQNNLGSDIMMVLDDLVALPASQERIKLSIERTTEWARESIEYFRQKQESGIGVEQNIFAIIQGGTDKSFREKSAKELCELDFDGFAIGGLSVGELNNEMYDTVEHTTQFMPKEKPRYLMGVGTPEDLIENIDRGIDMFDCVMPTRNARNGTLFTSFGKLNIKGASFKEDKTPIDPECRCLTCQRYSRAYLNHLFRSREITYFRLATLHNLHYYLNLMREAREAILEDRYDEFKSEFYKKREA

SEQ ID NO: 61416 - protein, 372 aa, Sulfurimonas sp.; identical to SEQ ID NO: 56034
  REGION 1..372: note = tr|A0A2M7D0P5|A0A2M7D0P5_9HELI Queuine tRNA-ribosyltransferase OS=Sulfurimonas sp. CG02_land_8_20_14_3_00_36_67 OX=1975545 GN=tgt PE=3 SV=1

SEQ ID NO: 61417 - protein, 372 aa, Sulfurimonas sp.
  REGION 1..372: note = tr|A0A2N6GIK0|A0A2N6GIK0_9HELI Queuine tRNA-ribosyltransferase OS=Sulfurimonas sp. OX=2022749; GN = tgt PE=3 SV=1
MQFTLNATSKNARACTIKTAHSTIKTPVFMPVGTVGSVKALDMQDVLDLLGAEIILANTYHMYLRPGDKTVAKMGKLHGFTTYPKSFLTDSGGFQAFSLSDISKASQDGIEFRSHIDGSKHFFTPKKVIDIQHNLGSDIMMILDDLVALPATQERIALSIERTTAWAKESIEYFRAKQKEGIGVEQNIFAIIQGGTDKVFRTKSATELCKLDFDGFAIGGLSVGEANQDMYDTVEHTVEYMPTDKPRYLMGVGTPEDLIENIERGIDMFDCVMPTRNARNGTLFTSFGRLNIKGAVYKEDNSPVDNECTCLTCQRYSRAYLNHLFRAREITYFRLATIHNLHYYLNLMKEAREAILGDRFTEFKAEFYAKRS

SEQ ID NO: 61418 - protein, 367 aa, unidentified
  source 1..367: note = Sulfurirhabdus autotrophica
  REGION 1..367: note = tr|A0A4R3Y2K9|A0A4R3Y2K9_9PROT Queuine tRNA-ribosyltransferase OS=Sulfurirhabdus autotrophica; OX = 1706046 GN=tgt PE=3 SV=1
MKFEIHAQDGLSRRGTLHLAHGKVETPAFMPVGTYGTVKAMSPVELNDIGAHIVLGNTFHLWLRPGMEVIEAHGGLHGFMGWDKPILTDSGGFQVFSLGDLRKITEEGVKFRSPVNGDPCFLTPEESMRIQRVLNSDIVMVFDECTPHPADLQQADESMQLSLRWAARSKRAHEGNTNALFGIVQGGMHESLRDVSLQGLMDIGFDGYAIGGLSVGEPKEDMMRILAHTAPKLPEKKPRYLMGVGTPEDLVDAVLQGVDMFDCVMPTRNARNGWLFTRNGTVKIRNAQYRLDTAPLDEKCTCYTCQNFTRAYLHHLYRLGEILGARLNTIHNLHYYQELMQGLRQAIEAGKLTDFVAEFRQARAATC

SEQ ID NO: 61419 - protein, 370 aa, unidentified
  source 1..370: note = Sulfurisoma sediminicola
  REGION 1..370: note = tr|A0A497XAI8|A0A497XAI8_9PROT Queuine tRNA-ribosyltransferase OS=Sulfurisoma sediminicola; OX = 1381557 GN=tgt PE=3 SV=1
MKFDLITQDGAARRGTLTLAHGTVETPVFMPVGTYGTVKAMAPNELHEIGAKIVLGNTFHLWLRPGLEVIAAHGGLHRFMGWDGPILTDSGGFQVFSLGDLRKISEDGVKFQSPINGDRLFMRPEDSMQIQHVLNSDIVMIFDECTPYPATEKQAADSMRLSLLWARRSRDEHDRLANRNALFGIVQGGMFEPLREESLAGLAGIGFDGYAIGGLSVGEPKEEFTRILAHTAPRLPAEKPRYLMGVGTPEDIVYAVNRGIDMFDCVLPTRNARNGHLFTRHGDIRIKNAQHKNDLRPLDASCGCYCCRNFSRAYLHHLHRTGEILGSRLNTIHNLFYYQTLMAELRAAIEARGLAAYTAEFHRGRAGGLV

SEQ ID NO: 61420 - protein, 370 aa, Sulfuritalea hydrogenivorans
  REGION 1..370: note = tr|W0SIR5|W0SIR5_9PROT Queuine tRNA-ribosyltransferase OS=Sulfuritalea hydrogenivorans sk43H OX=1223802 GN=tgt PE=3 SV=1
MNFELIATDGAARRGTLTLAHGVAPTPTFMPVGTYGTVKAMSPDELVGIGASIVLGNTFHLWLRPGLEVVAAHGGLHRFMGWNGPILTDSGGFQVFSLGDLRKITEEGVKFASPINGDRLFLTPEESMRIQHVLNSDVVMIFDECTPYPADLSTAAESMRLSLRWAQRSRDEHDRLQNTNALFGIVQGGMHEALRDESLAALVDIGFDGFAIGGLSVGEPKEEMSRILAHTAPRLPADKPRYLMGVGTPEDLVYAVGQGIDMFDCVMPTRNARNGWLFTRHGDVKIKNAQYKADTRPLDESCDCHTCRNFTRAYLHHLHRVGEILGARLNTIHNLFYYQTLMAEMRAAIEQGDFAAFCLRFKRGRAGEQV

SEQ ID NO: 61421 - protein, 367 aa, unidentified
  source 1..367: note = Sulfuritortus calidifontis
  REGION 1..367: note = tr|A0A4R3K0H5|A0A4R3K0H5_9PROT Queuine tRNA-ribosyltransferase OS=Sulfuritortus calidifontis; OX = 1914471 GN=tgt PE=3 SV=1
MQFELLGRDGQARRGRLTTAHGVIETPVFMPVGTYGVVKSLTPDEVRALGAQIVLGNTFHLWLRPGLEVIAAHGGLHGFMRWDGPILTDSGGFQVYSLTHLRKISEEGVRFASPLNGDRLLLTPEKSMEIQRVLNSDIVMIFDECTPYPADHRTAKTSMELSLRWAERSKTAHAGNPNALFGIVQGGMYEDLRDASLEQLSRIGFDGYAIGGLSVGEPKADMERILAHVAPRLPEDRPRYLMGVGTPEDLVHAVSRGIDMFDCVMPTRNARHGVLFTRTGELRIKNAKYRSDLSPIDEACDCYTCRHFSRAYLHHLFRTGETLSGRLNSIHNLNYYQTLMRELREAIEQGRLAAHIETFLAARGIRA

SEQ ID NO: 61422 - protein, 371 aa, Sulfurivirga caldicuralii
  REGION 1..371: note = tr|A0A1N6E4S1|A0A1N6E4S1_9GAMM Queuine tRNA-ribosyltransferase OS=Sulfurivirga caldicuralii; OX = 364032 GN=tgt PE=3 SV=1
MKFELLKTDGPARRGRIIFDRGVVETPAFMPVGTYGTVKAMTPEELKGIGAQIILGNTFHLALRPGTEIIRAHGDLHDFMHWDGPILTDSGGFQVFSLGEMRKIREEGVTFRSPINGAKIFMGPEESMQIQRELGSDIVMIFDECTPYPADHETARLSMELSLRWAERSKRAHADNPAALFGIVQGGMYEDLRKRSAEALQQIGFDGYAIGGLSVGEPKDEMMKVLDFTAPELPQDRPRYLMGVGKPEDLVESVRRGMDMFDCVIPTRNARNGFLFTSTGVVKIRNAVYKHSTQPLDPDCDCYTCRNYTRAYLHHLDRCGEILGARLNTIHNLHYYQHLMRQMREAIEAGTFEAFVADFYARRGLPVPPLA

SEQ ID NO: 61423 - protein, 373 aa, Sulfurospirillum barnesii
  REGION 1..373: note = tr|I3XXF5|I3XXF5_SULBS Queuine tRNA-ribosyltransferase OS=Sulfurospirillum barnesii (strain ATCC 700032 / DSM 10660 / SES-3) OX=760154 GN=tgt; PE = 3 SV=1
MEFQIDKTDGNARACTIKTAHSTIQTPVFMPVGTVGSVKSLDAVDMSEMLGAQIILGNTYHLYLRPSDEVVKHFGGLHGFTKFPNSFLTDSGGFQAFSLSDISKADSNGIMFKSHIDGSTHYFTPEKVLDIQYNLNSDIMMILDDLVALPATKERIALSIKRTTDWAKRAITYHQEKQAQGIGKHQNIFAIIQGGTDKEFRHISANELCALPFDGFAIGGLSVGESNALMYETVEYTTPLMPKEKPRYLMGVGTPEDLVENVERGVDMFDCVMPTRNARNGSLFTSFGKISIKNAKFQKDESPLDPECDCFTCKHYSRGYLHHLFRAKELTYFRLASIHNLHYYLTLMKQMREAILKGEFKAFKAEFYRKRGK

SEQ ID NO: 61424 - protein, 373 aa, Sulfurospirillum deleyianum
  REGION 1..373: note = tr|D1B2G8|D1B2G8_SULD5 Queuine tRNA-ribosyltransferase OS=Sulfurospirillum deleyianum (strain ATCC 51133 / DSM 6946 / 5175) OX=525898 GN=tgt; PE = 3 SV=1
MEFQIDKIDGDARACTIKTAHSTIQTPVFMPVGTVGSVKSLDAFDMSEMLGAKIILGNTYHLYLRPNDEVVKHFGGLHGFTKFPNSFLTDSGGFQAFSLSDISKADKDGIMFKSHIDGSTHYFTPEKVLDIQYNLNSDIMMILDDLVALPATKERVALSIERTTNWAKRAISYHQKRQSEGVGLHQNIFAIIQGGTDKEFRRISAQELCALPFDGFAIGGLSVGESNALMYETVEFVTPLMPKEKPRYLMGVGTPEDLVENVERGVDMFDCVMPTRNARNGTLFTSFGKMSIKNAKFARDESAIDPECDCFTCKHYSRGYLHHLFRAKELTYFRLASIHNLHYYLTLMKQMREAILKGEFQTFKAEFYRKRGK

SEQ ID NO: 61425 - protein, 373 aa, Sulfurospirillum halorespirans
  REGION 1..373: note = tr|A0A1D7TKB0|A0A1D7TKB0_9PROT Queuine tRNA-ribosyltransferase OS=Sulfurospirillum halorespirans DSM 13726 OX=1193502 GN=tgt PE=3 SV=1
MEFQIDKTDGSARACTIKTAHSTIQTPVFMPVGTVGSVKSLDAVDMSEMLGAQIILGNTYHLYLRPNDEVIKHFGGLHGFTKFPNSFLTDSGGFQAFSLSDISKADVNGIMFKSHIDGSSHYFTPEKVLDIQYNFNSDIMMILDDLVALPATKERIALSIKRTTDWAQRAITYHKQKQSEGIGLHQNIFAIIQGGTDKEFRQISANELCALPFDGFAIGGLSVGESNALMYETVEFVTPLMPKDKPRYLMGVGTPEDLVENVERGVDMFDCVMPTRNARNGSLFTSFGKISIKNAKFQRDEAPLDPECECFTCKHYSRGYLHHLFRAKELTYFRLASIHNLHYYLTLMKQMRQAILKGEFKAFKAEFYAKRAK

SEQ ID NO: 61426 - protein, 373 aa, Sulfurospirillum multivorans
  REGION 1..373: note = tr|A0A5B9TS04|A0A5B9TS04_SULMU Queuine tRNA-ribosyltransferase OS=Sulfurospirillum multivorans; OX = 66821 GN=tgt PE=3 SV=1
MEFQIDKTDGSARACTIKTAHSTIQTPVFMPVGTVGSVKSLDAVDMSEMLGAQIILGNTYHLYLRPNDEVIKHFGGLHGFTKFPNSFLTDSGGFQAFSLSDISKADVNGIMFKSHIDGSSHYFTPEKVLDIQYNFNSDIMMILDDLVALPATKERIALSIKRTTDWAQRAITYHKQKQSEGIGLHQNIFAIIQGGTDKEFRRISANELCALPFDGFAIGGLSVGESNALMYETVEFVTPLMPTDKPRYLMGVGTPEDLVENVERGVDMFDCVMPTRNARNGSLFTSFGKISIKNAKFQRDEAPLDPECECFTCKHYSRGYLHHLFRAKELTYFRLASIHNLHYYLTLMKQMRQAILEGRFKAFKAEFYAKRAN

SEQ ID NO: 61427 - protein, 373 aa, Sulfurospirillum sp.
  REGION 1..373: note = tr|A0A432SLU6|A0A432SLU6_9PROT Queuine tRNA-ribosyltransferase OS=Sulfurospirillum sp. OX=2053622; GN = tgt PE=3 SV=1
MQFTIDKTDGAARACTIRTAHSTIVTPVFMPVGTVGTVKALDSYDMLELLQTDIILANTYHLYLRPGDETVGHFGGLHKFANYPKSFLTDSGGFQAFSLSDISRADENGIHFKSHIDGSSHYFTPEKVLDIQYNLGSDIMMILDDLIALPAEKERIKLSIERTTNWARASIGYHRQKQQEGIGVDQNIFAIVQGGIDKEFRKLSATQLTEFDFDGFAIGGLSVGEANADMYDTVAYTVPFLPTEKPRYLMGVGTPEDLIENIERGVDMFDCVMPTRNARNGTLFTTFGKINIKGAKHKLSEDPIDSACSCHTCKNYSRGYLNHLFRAKELTYFRLASLHNLHYYLTLMREVREAILKGEFQAYKREFYAKRAV

SEQ ID NO: 61428 - protein, 374 aa, Sulfurospirillum sp.
  REGION 1..374: note = tr|A0A2D3W774|A0A2D3W774_9PROT Queuine tRNA-ribosyltransferase OS=Sulfurospirillum sp. UBA12182; OX = 2015905 GN=tgt PE=3 SV=1
MEFTIDNVDNKARACTIRTAHSTIQTPVFMPVGTVGSVKSLDASDMAQMLGAKIILGNTYHLYLRPNDKVVKHFGGLHGFTKFPNSFLTDSGGFQAFSLSDISKADENGIHFRSHIDGSKHYFTPQSVLDIQYNLNSDIMMILDDLVALPATRERIALSIQRTTSWAKQAIEYHISQKQKGIGTHQKIFAIIQGGTDKEFRKISANELCSLEDFDGYAIGGLSVGEANQEMYDTVEWTTPFMPTQKPRYLMGVGTPEDLVENVERGVDMFDCVMPTRNARNGTLFTSFGKINIKSAKYIMDENPIDPECDCHTCKNYSRGYINHLFRSKELTYFRLASLHNLHYYLTLMKQIREAILLNRFSEFKKEFYAKRVV

SEQ ID NO: 61429 - protein, 373 aa, Sulfurovum lithotrophicum
  REGION 1..373: note = tr|A0A2T4CQR6|A0A2T4CQR6_9PROT Queuine tRNA-ribosyltransferase OS=Sulfurovum lithotrophicum; OX = 206403 GN=tgt PE=3 SV=1
MEFQIDKTDGFARACTIKTAHSTVQTPVFMPVGTVGAVKALDAMDLATFIKPEIILANTYHMYIRPGDDVVAKMGKLHGFTKYPKSFLTDSGGFQAFSLSDNVKIDEGGITFASHLDGSKHYFTPKKVIDIQHNLGSDIMMILDDLVALPATQERIAASIDRTTRWAQESIDYFREKQAEGIGVEQNIFAIIQGGTDKAFREKSAKELCAMDYDGFAIGGLSVGEANQDMYDTVEWTTQFMPKDKPRYLMGVGTPEDLVENVARGVDMFDCVMPTRNARNGTLFTSFGKVNIKKAEFTTDEGPIDPECECMVCKTYSRSYLRHLYRAREITYFRLGTIHNLYYYLNLMKEMREAILEERFDAFKVEFYKKRKK

SEQ ID NO: 61430 - protein, 373 aa, unidentified
  source 1..373: note = Sulfurovum riftiae
  REGION 1..373: note = tr|A0A151CJ02|A0A151CJ02_9PROT Queuine tRNA-ribosyltransferase OS=Sulfurovum riftiae OX=1630136; GN = tgt PE=3 SV=1
MQFQIDKTDGKARACTIKTAHSTVQTPVFMPVGTVGAVKALDATDLATFIKPEIILANTYHMYIRPGDEVVAKMGKLHGFTKYPKSFLTDSGGFQAFSLSDNVKIDEGGITFRSHLDGSKHYFTPTKVIDIQHNLGSDIMMILDDLVALPATQERIAASIDRTTRWAEESIVYFRAKQKEGIGVEQNIFAIIQGGTDKAFREKSAKELCALDYDGFAIGGLSVGEANQDMYDTVEWTTQFMPKEKPRYLMGVGTPEDLVENVSRGVDMFDCVMPTRNARNGTLFTSFGKVNIKKAEYTIDEKPIDPECNCMVCQTYSRAYLRHLFRAREITYFRLATIHNLYYYLNLMKEMREAILEERFDAFKAAFYKKREQ

SEQ ID NO: 61431 - protein, 373 aa, Sulfurovum sp.
  REGION 1..373: note = sp|A6Q906|TGT_SULNB Queuine tRNA-ribosyltransferase; OS = Sulfurovum sp. (strain NBC37-1) OX=387093 GN=tgt PE=3; SV = 1
MHFQIDKTDSKARACTIKTAHSTIQTPVFMPVGTVGAVKALDATDLATFIKPEIILGNTYHLYIRPGDEVIKTMGKLHGFTKYPKSFLTDSGGFQAFSLSDNVKIDEGGITFRSHLDGSKHYFTPKKVIDIQNNLGSDIMMILDDLVALPATQERIKASIERTTRWAEESITYHRANQKKGIGVDQNIFAIIQGGTDKAFREKSAKELCRLDYDGFAIGGLSVGEANQDMYDTVEWTTQFMPEEKPRYLMGVGTPEDLVENVSRGVDMFDCVMPTRNARNGTLFTSFGKVNIKKAEYTTDAGPIDPECGCMVCQTYSRAYLRHLFRSREITYFRLATIHNLYYYLNLMKEMREAILEERFNDFKVTFYRKRGK

SEQ ID NO: 61432 - protein, 372 aa, Sulfurovum sp.
  REGION 1..372: note = tr|I2K931|I2K931_9PROT Queuine tRNA-ribosyltransferase OS=Sulfurovum sp. AR OX=1165841; GN = tgt PE=3 SV=1
MEFQIDKTDGKARACTIKTAHSTIQTPVFMPVGTVGAVKALDATDLATFIKPEIILGNTYHLYMRPGDETIKTMGKLHGFTKYPKSFLTDSGGFQAFSLSDNVKIDENGITFRSHLDGSKHYFTPKKVIDIQHNLGSDIMMILDDLVALPATQERIKASIERTTRWAQESIDYFRAKQEEGIGVYQNIFAIIQGGTDKAFREKSAKELCAMDYDGFAIGGLSVGEANQDMYDTVEWTTQFMPEEKPRYLMGVGTPEDLVENVARGVDMFDCVMPTRNARNGTLFTSFGKVNIKKAEYTTDEGPVDPECDCMVCKTYSRSYLRHLFRAREITYFRLATIHNLYYYLNLMSQMREAILENRFDAFKVEFYEKRK

SEQ ID NO: 61433 - protein, 376 aa, unidentified
  source 1..376: note = Sunxiuqinia dokdonensis
  REGION 1..376: note = tr|A0A0L8V753|A0A0L8V753_9BACT Queuine tRNA-ribosyltransferase OS=Sunxiuqinia dokdonensis; OX = 1409788 GN=tgt PE=3 SV=1
MNFTLQHQAVNSQARAGKLETGHGTIETPIFMPVGTAGSVKGIHVKDLKEDIQAQIILGNTYHLYLRPGTEIIEEAGGLHKFNGWSGPILTDSGGYQVFSLGDIRKLTEEGAKFQSHIDGSRHLFTPESVVDVQRKIGADIIMAFDECTPGDAGYDYAKKSLALTQRWLERCVNQMEKTKPLYGHGQSLFPIVQGAVYPDLREAAAKHATSIPSDGYAIGGLSVGESEADMYAMIEVVNPILPKDKPRYLMGVGTPINILEAIDRGVDMFDCVMPTRNGRNGMLFTKNGIINIRNKKWAADFSPVDQDGTSFVDHNYSKAFLRHLIISNEMLGAQIASQHNLAFYLWLVKEARRQILTDNFKAWKEELVQQLGKRL

SEQ ID NO: 61434 - protein, 376 aa, Sunxiuqinia elliptica
  REGION 1..376: note = tr|A0A4R6H472|A0A4R6H472_9BACT Queuine tRNA-ribosyltransferase OS=Sunxiuqinia elliptica OX=655355; GN = tgt PE=3 SV=1
MDFTLHHQAVNSEARAGSLQTGHGTIETPIFMPVGTAGSVKGIHVKELKEDIQAQIILGNTYHLYLRPGTAIIEEAGGLHRFNGWDGPILTDSGGYQVFSLGDIRKLTEEGARFQSHIDGSRHLFTPENVIDTQRKIGADIIMAFDECTPGDADFDYAKKSLELTQRWLDRCVNQMAKTKPLYGHSQSLFPIVQGGVYPQLREAAAKHVTTIPSDGYAIGGLSVGEPEADMYAMIEVVNPILPKEKPRYLMGVGTPINILEGIDRGVDMFDCVMPTRNGRNGMLFTQNGIINIKNKKWADDFSPVDPDGTSYVDKQYSKAFLRHLIVANEMLGAQIASQHNLAFYLWLVKEARRQIMADTFKSWKEEMVQKLGQRL

SEQ ID NO: 61435 - protein, 376 aa, Sunxiuqinia elliptica
  REGION 1..376: note = tr|A0A1I2A8U5|A0A1I2A8U5_9BACT Queuine tRNA-ribosyltransferase OS=Sunxiuqinia elliptica OX=655355; GN = tgt PE=3 SV=1
MDFTLHHQAVNSEARAGSLQTGHGTIETPIFMPVGTAGSVKGIHVKELKEDIQAQIILGNTYHLYLRPGTAIIEEAGGLHRFNGWDGPILTDSGGYQVFSLGDIRKLTEEGARFQSHIDGSRHLFTPENVIDTQRKIGADIIMAFDECTPGDADFDYAKKSLELTQRWLDRCVNQMAKTKPLYGHNQSLFPIVQGGVYPQLRETAAKHVTTIPSDGYAIGGLSVGEPEADMYAMIEVVNPILPKEKPRYLMGVGTPINILEGIDRGVDMFDCVMPTRNGRNGMLFTQNGIINIKNKKWADDFSPVDPDGTSYVDKQYSKAFLRHLIVANEMLGAQIASQHNLAFYLWLVKEARRQIMADTFKSWKEEMVQKLGQRL

SEQ ID NO: 61436 - protein, 375 aa, unidentified
  source 1..375: note = Superficieibacter electus
  REGION 1..375: note = tr|A0A2P5GSC9|A0A2P5GSC9_9ENTR Queuine tRNA-ribosyltransferase OS=Superficieibacter electus; OX = 2022662 GN=tgt PE=3 SV=1
MKFELDTTDGRARRGRLVFDRGVVETPAFMPVGTYGTVKGMTPEEVEATGAQIILGNTFHLWLRPGQEIMKLHGDLHDFMQWKGPILTDSGGFQVFSLGDIRKITEQGVHFRNPINGDPIFLDPEKSMEIQFDLGSDIVMIFDECTPYPADWDYAKRSMEMSLRWAKRSRDRFDSLGNKNALFGIIQGSVYEDLRDISVKGLVEIGFDGYAVGGLAVGEPKADMHRILEHVCPQIPADKPRYLMGVGKPEDLVEGVRRGIDMFDCVMPTRNARNGHLFVTEGVVKIRNAKYKSDTGPLDAECDCYTCRNYSRAYLHHLDRCNEILGARLNTIHNLRYYQRLMAGLRKAIEEGKLESFVTDFYQRQGRPVPPVNVD

SEQ ID NO: 61437 - protein, 377 aa, unidentified
  source 1..377: note = Sutterella megalosphaeroides
  REGION 1..377: note = tr|A0A2Z6I8D1|A0A2Z6I8D1_9BURK Queuine tRNA-ribosyltransferase OS=Sutterella megalosphaeroides; OX = 2494234 GN=tgt PE=3 SV=1
MAFSFKVKTTCGKARRGELTLNHGVVQTPIFMPVGTYGSVKAMAPYELKEVGSQIILGNTFHLWLRPGLEVIEAHKGLHDFMQWDKPILTDSGGFQVFSLGELRKITEEGVKFSNPINGNKLFLTPEISMQIQKTLNSDIVMVLDECTPYKIGDRPATELEAAKSMRMSLRWAKRSKDEFERLENPNALFGIVQGGMFTKLREESLDGLKSIGFHGYALGGLSVGEPKEEMLRILDEVAHQLPDDRPRYLMGVGTPEDLVDGVSSGIDMFDCVMPTRNARNGWLFTRFGDVKLKNSRYRNDLRPLDPSCNCYTCRNFSRAYLHHLHKVGEILGARLNTIHNLHFYLNLMQEMRDALEAGTFEEWKTRFREDRARGIE

SEQ ID NO: 61438 - protein, 377 aa, Sutterella parvirubra
  REGION 1..377: note = tr|H3KCR9|H3KCR9_9BURK Queuine tRNA-ribosyltransferase OS=Sutterella parvirubra YIT 11816; OX = 762967 GN=tgt PE=3 SV=1
MAFSFQVKATCGRARRGTLTLNHGVVETPIFMPVGTYGSVKAMAPYELNEVGSQIILGNTFHLWLRPGLEVIGAHKGLHDFMQWSKPILTDSGGFQVFSLGELRKITEEGVRFSNPINGDKLFLTPEVSMQIQRTLNSDIVMVLDECTPYKIGDRPATEMEAAKSMRMSLRWAKRSKDEFDRLENPNALFGIVQGGMFTHLREESLAGLKEIGFHGYALGGLSVGEPKEEMLRILDEVAHKLPEDRPRYLMGVGTPEDLVDGVSNGIDMFDCVMPTRNARNGWLFTRFGDVKLKNSRYRNDLRPLDPSCSCYTCRNFSRAYLHHLHKVGEILGARLNTIHNLHFYLNMMAEIRASLEDGTFEAWKKRFAEDRARGVE

SEQ ID NO: 61439 - protein, 377 aa, Sutterella sp.
  REGION 1..377: note = tr|A0A139JX28|A0A139JX28_9BURK Queuine tRNA-ribosyltransferase OS=Sutterella sp. KLE1602; OX = 1574262 GN=tgt PE=3 SV=1
MAFDFKVKATCGRARRGELTLNHGVVQTPIFMPVGTYGSVKAMAPYELKEIGSQIILGNTFHLWLRPGLEVIGAHNGLHDFMQWDKPILTDSGGFQVFSLGELRKITEEGVKFSNPINGDKLFLSPEVSMKIQRVLNSDVVMVLDECTPYKIGDRPATELEAAKSMRMSLRWAKRSRDEFDRLENPNALFGIVQGGMFEHLREESLEGLKDIGFHGYAVGGLSVGEPKEDMLRIMDHIVHKLPDDRPRYLMGVGTPEDLVAGVSQGIDMFDCVMPTRNARNGWLFTRFGDVKLKNSRYRNDLRPLDPSCNCYTCRNFTRAYLHHLHKVGEILGARLNTIHNLSFYLQIMQEMRDSLEAGTFEAWKKQFAEDRARGVE

SEQ ID NO: 61440 - protein, 377 aa, Sutterella sp.
  REGION 1..377: note = tr|A0A415CEK1|A0A415CEK1_9BURK Queuine tRNA-ribosyltransferase OS=Sutterella sp. AM11-39; OX = 2292075 GN=tgt PE=3 SV=1
MALQFEVLKTEGAARRGVMTLNHGVVQTPVFMPVGTYGTVKAMTPDELEGMGSQIILGNTFHLWLRPGLDVIATHGGLHRFMNWNRPILTDSGGFQVFSLGQLRKISEEGVRFASPINGDKLFLTPEVSMQIQKVLNSDIVMQFDECTPYMIGDRPATEKEAADSMRLSLRWAKRSREEFDRLENPNALFGIVQGGMFPKLREESLAGLKEIGFHGYALGGLSVGEPKEKMLAIMDAIVHQMPEDKPRYLMGVGTPEDLVEGVSRGIDMFDCVMPTRNARNGWLFTRYGDIKIRNAKHKNDTRPLDPSCTCATCRGYTRAYLHHLQKVNEILGARLNSIHNLHFYATIMAEMRKALEEGTFAAWKKKFYEDRAKGTD

SEQ ID NO: 61441 - protein, 377 aa, Sutterella wadsworthensis
  REGION 1..377: note = tr|K1KG73|K1KG73_9BURK Queuine tRNA-ribosyltransferase OS=Sutterella wadsworthensis 2_1_59BFAA OX=742823 GN=tgt PE=3 SV=1
MAFDFKVKATCGRARRGELTLNHGVVQTPIFMPVGTYGSVKAMAPYELKEIGSQIILGNTFHLWLRPGLEVIGAHNGLHDFMQWDKPILTDSGGFQVFSLGELRKITEEGVKFSNPINGDKLFLSPEVSMKIQRVLNSDVVMVLDECTPYKIGDRPATELEAAKSMRMSLRWAKRSRDEFDRLENPNALFGIVQGGMFEHLREESLEGLKGIGFHGYAVGGLSVGEPKEDMLRIMDHIVHKLPDDRPRYLMGVGTPEDLVAGVSQGIDMFDCVMPTRNARNGWLFTRFGDVKLKNSRYRNDLRPLDPSCNCYTCRNFTRAYLHHLHKVGEILGARLNTIHNLSFYLQIMQEMRDSLEAGTFEAWKKQFAEDRARGVE

SEQ ID NO: 61442 - protein, 377 aa, Sutterella wadsworthensis
  REGION 1..377: note = tr|R5PLS1|R5PLS1_9BURK Queuine tRNA-ribosyltransferase OS=Sutterella wadsworthensis CAG:135 OX=1263111 GN=tgt PE=3 SV=1
MAFSFTVKTRCGKARRGTLELNHGIVETPIFMPVGTYGAVKSMAPYELKEVGAQIILGNTFHLWLRPGLEVIGAHGGLHGFGRWDKPILTDSGGFQVFSLGELRKITEEGVRFANPINGSKLFLTPEISMQIQHTLNSDVTMVLDECTPYKIGDRPATEAEAAASMRMSLRWAKRSKDEFDRLENPNTLFGIVQGGMFNHLREESLEGLKDIGFHGYALGGLSVGEPKEEMLRILDEVAYKLPEDHPRYLMGVGTPEDLVDGVSSGIDMFDCVMPTRNARNGWLFTRFGDLKLKNSRYRNDLRPLDPSCTCYTCRNFSRAYLHHLHKVGEILGARLNTIHNLHYYLTLMGEIRAAIENGTFEAWKVQFRTDRARGIE

SEQ ID NO: 61443 - protein, 386 aa, unidentified; identical to SEQ ID NO: 56997
  source 1..386: note = Sutterellaceae bacterium
  REGION 1..386: note = tr|A0A2D6RVT2|A0A2D6RVT2_9BURK Queuine tRNA-ribosyltransferase OS=Sutterellaceae bacterium; OX = 2026794 GN=tgt PE=3 SV=1

SEQ ID NO: 61444 - protein, 251 aa, unidentified
  source 1..251: note = Sutterellaceae bacterium
  REGION 1..251: note = tr|A0A3D4GDM1|A0A3D4GDM1_9BURK Queuine tRNA-ribosyltransferase (Fragment) OS=Sutterellaceae bacterium OX=2026794 GN=DIU26_05960 PE=3 SV=1
EVSMEIQKVLNSDIAMIFDECTPYEIDGRPATEKEAADSMRLSLRWARRSRDEFDRLQNPNALFGIVQGGMFEHLRDESLEGLKAIGFDGYAIGGLSVGEPKEEMMKILDHLKTRMPEDKPRYLMGVGTPEDLVEGVKRGIDMFDCVMPTRNARNGWLFTRYGDIKLRNAKHKHDLRPLDESCDCYCCRNFSRAYLHHLQKVNEILGARLNTIHNLHYYLNLMKEIREALDQGNFEAWCKKFAEDRARGTD

SEQ ID NO: 61445 - protein, 371 aa, Suttonella indologenes
  REGION 1..371: note = tr|A0A380N2C1|A0A380N2C1_9GAMM Queuine tRNA-ribosyltransferase OS=Suttonella indologenes OX=13276; GN = tgt PE=3 SV=1
MKYTLLAQDGNARRGYLTFPNGQVVQTPVFMPVGTLGTVKGLSVEELHGIGAEIILGNTFHLMLRPGEDIVQAHGGLHQFMNWDKPILTDSGGFQVFSLAKIRKISEEGVRFRSPIDGSEVFLTPERSMQVQRALNSNIVMQFDECTPYPATHMEAANSMRLSLRWAARSKAAHAGSPNHLFGIVQGGVYEDLRRESAQALAAMDLPGYAIGGLAVGEPKEAREQTLDVTMPLMPQNKPRYLMGVGKPVDLVEGVRRGVDMFDCVMPSRNARNAYLFTRFGVLKLRNSRYKNDLRPIEEGCNCYTCRHYSRAYLHHLDKCNEMLGARLNTIHNLHYYVHLMHAMRAAIEQQTFDAFAREFYALQAEGVAGY

SEQ ID NO: 61446 - protein, 368 aa, Suttonella ornithocola
  REGION 1..368: note = tr|A0A380MU23|A0A380MU23_9GAMM Queuine tRNA-ribosyltransferase OS=Suttonella ornithocola; OX = 279832 GN=tgt PE=3 SV=1
MKYELLAQDGEARRGKITFPNGQVVQTPVFMPVGTLGTVKGLSPEELHGIGAEIILGNTFHLMLRPGEDIVAAHGGLHQFMHWDKPILTDSGGFQVFSLAKIRKITEEGVRFKSPIDGSEVFLTPERSMQVQRALNSNIVMQFDECTPYPATHQEAADSMRLSLRWAARSKKAHEGSPNHLFGIVQGGVYPDLRRESALALTELNLPGYAVGGLAVGEPKEAREETLDFTLPLMPKNKPRYLMGVGKPVDLVEGVRRGIDMFDCVMPSRNARNAYLFTKYGILKLRNSRYKNDLAPIDETCGCYTCQHYSRAYLHHLDKCNEMLGARLNTIHNLYYYVHLMHEMRAAIEAQQFEHFAHRFYEDQRQGV

SEQ ID NO: 61447 - protein, 390 aa, Swaminathania salitolerans
  REGION 1..390: note = tr|A0A511BT09|A0A511BT09_9PROT Queuine tRNA-ribosyltransferase OS=Swaminathania salitolerans; OX = 182838 GN=tgt PE=3 SV=1
MTQSATKMQWKAEACCGQARAGHLHTAHGTIPTPTFMPVGTAGTVKAMTMDAVRATGAGIILGNTYHLMLRPGAERVRKMGGLHRMMDWSGPILTDSGGFQVMSLGALRKLDQDGVTFNSHIDGSKHRLTPESSTDIQHALDATITMCFDECPALPATPERLESSMELSMRWAARSREAFVQRPGYGQFGIVQGGTERDLRARSAKALTDIGFEGYAIGGLAVGEGQELMFSTLDFTTPLLPQDHARYLMGVGTPDDLLGGVERGVDMFDCVMPTRAGRTARAYTERGTLNLRNARHAGDNRPISPDCDCLACSRHSRAYLHHLFRANEILGPMLLTWHNLAYYQRLMREIRAAIVNGTLPQKAEELRASWAAGDWSQDEFPQPDWPPVP

SEQ ID NO: 61448 - protein, 388 aa, unidentified
  source 1..388: note = Swingsia samuiensis
  REGION 1..388: note = tr|A0A4Y6ULI3|A0A4Y6ULI3_9PROT Queuine tRNA-ribosyltransferase OS=Swingsia samuiensis OX=1293412; GN = tgt PE=3 SV=1
MTEPTQKMTWIPEATCGQARAGHLHTRHGVVQTPTFMPVGTVGTVKGMTMDAVRSTGAGIVLGNTYHLMLRPNADRVQKLGGLHKMMDWPGPILTDSGGFQVMSLGALRKLDEDGVTFRSHIDGSKHRLTPESSTDIQYKLDATITMAFDECPALPATPDVLRKSMEMSMRWAARSREAFVARDGYGQFGIVQGGTEKELREASVKALTDIGFEGYAIGGLAVGEGQELMFSTLDFTTPLLPQDKARYLMGVGTPDDLLGAVMRGVDMFDCVMPSRAGRTARAYTERGTINLRNARFAEDTRPITPHDDSPMAGKYTRAYFHHLFRANEILGPMLLTWHNLAYYQRLMRTIRQAIIAGNLTEVAQKLRQDWAQGDWTEDEWPMPQLAL

SEQ ID NO: 61449 - protein, 382 aa, unidentified
  source 1..382: note = Swingsia sp.
  REGION 1..382: note = tr|A0A4Y6UAM5|A0A4Y6UAM5_9PROT Queuine tRNA-ribosyltransferase OS=Swingsia sp. F3b2 OX=2558361; GN = tgt PE=3 SV=1
MAWVAEARQGQARAGWLHTAHGTVPTPTFMPVGTKATVKAMTADAVRATGAGVVLGNTYHLMLRPGAERVAALGGLHKVMDWPGPILTDSGGFQVMSLGALRKLDEDGVTFRSHIDGSPHRLTPESSTAIQHDLDADITMAFDECPALPAPKAVLEASMERSMRWAARSRKAFKARPGYGQFGIVQGGTDRELRLRSIKALVAIGFEGYAIGGLAVGEPQAEMFATLDYTAPALPEDKPRYLMGVGTPDDMLGAVMRGVDMFDCVMPSRAGRTARAYTERGALNLRNARFKDDPRPLSPYEPSPLNRYSRAYLHHLFRTDEILGPMLLTWHNLAYYQRLMRLIRAHVVAGDLEGFAAFLRAQWALGDWGRAEWDGRPDELRF

SEQ ID NO: 61450 - protein, 400 aa, Symbiobacterium thermophilum
  REGION 1..400: note = sp|Q67Q92|TGT_SYMTH Queuine tRNA-ribosyltransferase; OS = Symbiobacterium thermophilum (strain T / IAM 14863); OX = 292459 GN=tgt PE=3 SV=1
MAVRWELLRRDPASAARLGRLHTPRGVIETPVFMPVGTQATVKTLNPEEVWDLGARIILSNTYHLYLRPGHDLVQEAGGLHRFMNWKGAVLTDSGGFQVFSLADLRKITEEGVQFRSHIDGSTHFLSPEKAIAVENALGADIIMAFDECTPWPCDYDYAKRSIERTARWAARCKAAHARPDEQALFGIVQGSTFADLRRQSAEEIVALDFPGYGIGGLSVGEPKELMHEMLEVQVPLLPDDRPRYLMGVGSPEDLVEGVWRGVDMFDCVLPTRIARHGTVFVPDGKMTVRNAEFARDFLPIQEGCDCYACRNFSRAYIRHLLKADEMLGLRLCSIHNLRFLVRLMEEIRAALAAGTFAEYRKAFLERWHAGEAERRERARAAGGAGHAPGPAEPLLPENR

SEQ ID NO: 61451 - protein, 377 aa, unidentified
  source 1..377: note = Synechococcales bacterium
  REGION 1..377: note = tr|A0A3D5I0H8|A0A3D5I0H8_9CYAN Queuine tRNA-ribosyltransferase OS=Synechococcales bacterium UBA12195 OX=2055798 GN=tgt PE=3 SV=1
MSTAAPFQFELLHRCPHTQARTGRFHTPHGVVETPRFMPVGTAATVKGISAEQLRSTDAQMVLSNTFHLHLQPGESIVAAAGGLHRFMGWPGPMLTDSGGFQVFSLASLNAIKERGVTFQSPRDGSVVELTPERSMAIQEQLGADVAMAFDQCPPYPASHEDVREACDRTHRWLERCVTAHQRPDQALFGIVQGGVFQDLREESARVIASFDLPGCAIGGVSVGEPAAAMHEVVRWCTPLLPEHKPRYLMGVGTLPEMAQAVAHGVDLFDCVLPTRLGRHGAALVNGERWNLKNARFREDHTPLDPSCPCACCQQHSRAYLHHLIKSDEILGLTLLSLHNLTQLIRYTKSMAQAIEEGCFSEHFAPWELNSPAFHTW

SEQ ID NO: 61452 - protein, 378 aa, unidentified
  source 1..378: note = Synechococcales bacterium
  REGION 1..378: note = tr|A0A358BVQ9|A0A358BVQ9_9CYAN Queuine tRNA-ribosyltransferase OS=Synechococcales bacterium UBA8138 OX=2055796 GN=tgt PE=3 SV=1
MTSSAAPFSYEVLHQCPHTKARVGRFHTPHGVVDTPRFMPVGTAATVKGISIDQLRSTGAQMVLSNTFHLHLQPGEAVVAAAGGLHRFMGWHAPMLTDSGGFQVFSLASLNAISELGVTFKSPRDGLVVELTPERVMAIQNSLGADVAMAFDQCPPYPASHADVQEATERTHRWLERCVAAHNCANQALFGIVQGGCYEDLRKESARVVAGFNLPGVAIGGVSVGEPALAMHEVVRWVTPLLPLHKPRYLMGVGTLPEMAQAVAEGVDLFDCVLPTRLGRHGAALVGGERWNLKNARFRNDHSPLDSTCPCPTCQQHSRAYLHHLIKSDEILGLTLLSLHNLSQLLRFTNAMAMAIRDGCFAEHFAPWEPGSAAAHTW

SEQ ID NO: 61453 - protein, 384 aa, Synechococcus elongatus
  REGION 1..384: note = sp|Q8GAA6|TGT_SYNE7 Queuine tRNA-ribosyltransferase; OS = Synechococcus elongatus (strain PCC 7942) OX=1140; GN = tgt PE=3 SV=2
MDRQCAVASLTAFQFQIDRQCSQTRGRACSFHTPHGIVETPRFMPVGTLATVKTVTPAQLRDTGAQMVLSNTYHLHLQPGEEIVAKAGGLHRFMNWSGPMLTDSGGFQVFSLSELRKIEERGVTFRSPRDGAVIEFTPERSIRIQNALGADVIMAFDECPPYPAERKDVEAAVARTYRWLERCINAHERPQDQALFGIVQGGVYLDLRQQAARDLVQLDLPGYAIGGVSVGEPSEEIHRIVEATAPLLPAHKPRYLMGVGTYREMVQAIAAGIDLFDCVIPTRLARHGAALVKGDRWNLKNAQFREDFQPLDEDCNCYCCQNFSRAYLNHLIRSREILGYTLLSIHNITELVRFTTRIREAILSDRFVEEFGHWLQPSAVPVSP

SEQ ID NO: 61454 - protein, 384 aa, Synechococcus elongatus
  REGION 1..384: note = tr|A0A3G6WXE2|A0A3G6WXE2_SYNEL Queuine tRNA-ribosyltransferase OS=Synechococcus elongatus PCC 11801 OX=2219813 GN=tgt PE=3 SV=1
MDRQCAVASLTAFQFQIDRQCSQTRGRACSFHTPHGIVETPRFMPVGTLATVKTVTPAQLSETGAQMVLSNTYHLHLQPGENIVAKAGGLHRFMNWSGPMLTDSGGFQVFSLSELRKIEERGVTFRSPRDGAVIEFTPERSIRIQNALGADVIMAFDECPPYPAERKDVEAAVARTYRWLERCITAHERPQDQALFGIVQGGVYLDLRQQAARDLVQLDLPGYAIGGVSVGEPSEEIHRIVEATAPLLPAHKPRYLMGVGTYREMVQAIASGIDLFDCVIPTRLARHGAALVKGDRWNLKNAQFREDFRPLDEDCSCYCCQNFSRAYLNHLIRSREILGYTLLSIHNITELVRFTTRIREAILSDRFVEEFGHWLQPSAVPVAP

SEQ ID NO: 61455 - protein, 378 aa, unidentified
  source 1..378: note = Synechococcus lacustris
  REGION 1..378: note = tr|A0A2P7EHL5|A0A2P7EHL5_9SYNE Queuine tRNA-ribosyltransferase OS=Synechococcus lacustris; OX = 2116544 GN=tgt PE=3 SV=1
  VARIANT 52: note = Xaa can be any naturally occurring amino acid
MTSSAAPFSYEVLHQCPHTKARVGRFHTPHGVVDTPRFMPVGTAATVKGISXDQLRSTGAQMVLSNTFHLHLQPGEAVVAAAGGLHRFMGWHAPMLTDSGGFQVFSLASLNAISELGVTFKSPRDGLVVELTPERVMAIQNSLGADVAMAFDQCPPYPASHADVQEATERTHRWLERCVAAHNCANQALFGIVQGGCYEDLRKESARVVAGFDLPGVAIGGVSVGEPALAMHEVVRWVTPLLPLHKPRYLMGVGTLPEMAQAVAEGVDLFDCVLPTRLGRHGAALVGGERWNLKNARFRNDHSPLDSTCPCPTCQQHSRAYLHHLIKSDEILGLTLLSLHNLSQLLRFTNAMAMAIRDGCFAEHFAPWEPGSAAAHTW

SEQ ID NO: 61456 - protein, 373 aa, Synechococcus lividus
  REGION 1..373: note = tr|A0A2D2PYZ5|A0A2D2PYZ5_SYNLI Queuine tRNA-ribosyltransferase OS=Synechococcus lividus PCC 6715; OX = 1917166 GN=tgt PE=3 SV=1
MFEFVCQQQCRHSHARAGLFHTPHGSVATPRFMPVGTLANVKTLTPQHLEGAGAQMVLANTYHLHLQPGEEIVAAAGGLHRFMGWSGPILTDSGGFQVFSLSEMRQISDAGVVFRSPHDGQMIELSPERAIRIQEQLGADVIMAFDECPPYPASRAVVTQATQRTLHWLERCIAAKQRPDQALFGIVQGGVYGDIRRECATAMLAYDLPGYAIGGVSVGEPTTAMHEIVAVTAPLLPTHKPRYLMGVGTHLEMLRAIAAGVDLFDCVIPTRLARHGCAIVQGNRWNLKNARFRRDYAPLDPTCPCYTCGTFSRAYLSHLVRAKELLAYTLLSIHNVTELIGFTQAARQAILEDHFPKFAAEWEQRLCTSSHDD

SEQ ID NO: 61457 - protein, 372 aa, Synechococcus sp.
  REGION 1..372: note = sp|Q3B088|TGT_SYNS9 Queuine tRNA-ribosyltransferase; OS = Synechococcus sp. (strain CC9902) OX=316279 GN=tgt PE=3; SV = 1
MFNFEISAHCPHTKGRCGCFHTPHGPVQTPRFMPVGTLATVKGISTEQLARTGAQMVLSNTYHLHLQPGEQVVAEAGGLHRFMGWDGPMLTDSGGFQVFSLGNLNKIDERGVVFRNPRDGRTIDMTPEHATNIQMALGADVAMAFDQCPPYPATENDVKDACRRTHAWLERCVNAHTRSDQALFGIVQGGCFPHLRRESARAVAAFDLPGIAIGGVSVGEPTDDMHRIVRDIGPLLPLDRPRYLMGIGTLREMAVAVANGIDLFDCVLPTRLGRHGTALVGGERWNLRNARFRNDHTPLDSSCSCLACTGHSRAYIHHLIRSDELLGLTLLSLHNITHLVRFTNAMAQAIQDGCFSEDFAPWQEDSPAHHTW

SEQ ID NO: 61458 - protein, 373 aa, Synechococcus sp.
  REGION 1..373: note = tr|A0A0H5PPT0|A0A0H5PPT0_SYNPZ Queuine tRNA-ribosyltransferase OS=Synechococcus sp. (strain WH8103) OX=29410 GN=tgt PE=3 SV=1
MFGFEISAHCANTAARCGCFHTPHGPVHTPRFMPVGTLATVKGISTDQLARTGAQMVLSNTYHLHLQPGEEIVAAAGGLHGFMGWDGPMLTDSGGFQVFSLGDLNKIDDRGVVFRNPRDGRIIDMTPEHATQIQMALGADVAMAFDQCPPYPATENDVIDACRRTHAWLARCVEAHSRDNQALFGIVQGGCFPHLRRESARAVADFDLPGIAVGGVSVGEPVEEMHRIVRDVTPLLPTHKPRYLMGIGTLREMAVAVANGIDLFDCVLPTRLGRHGTALVGGERWNLRNARFRHDHTPLDPSCPCPTCSGGHTRAYLNHLIRSEELLGLTLLSLHNITHLLRFTTAMSQAIRDGCFSEDFAPWEPDSPAHHTW

SEQ ID NO: 61459 - protein, 374 aa, Synechocystis sp.
  REGION 1..374: note = sp|Q55983|TGT_SYNY3 Queuine tRNA-ribosyltransferase; OS = Synechocystis sp. (strain PCC 6803 / Kazusa) OX=1111708; GN = tgt PE=3 SV=1
MPLPSVNFTYQCQARCSHSQARAGIFQTPHGPVETPRFMPVGTLATVKGITPAQLADTQAQMVLANTYHLHLQPGEKIIAAAGGVHKFMGWSGPMLTDSGGFQVFSLSQLRTIGEQGVLFRSPRDGRLIDMTPENSIRIQNALGADVIMAFDECPPGQGDRLMVEQATARTYRWLERCIEAHQRPGDQALFGIVQGGTYLDLRSQAAEQLIALDLPGYAIGGVSVGEAPALIDKVVQHTAPLLPAHKPRYLMGVGTYREMARAIFAGIDLFDCVIPTRFGRHGTALVQGERWNLKNATFREDHRPLDETCPCYTCQTFSRAYLNHLIRSREMLGYILLSLHNITELIRFTQSIRQAILNDTFTQDFAHWLTPPE

SEQ ID NO: 61460 - protein, 390 aa, Synechocystis sp.
  REGION 1..390: note = tr|A0A068MS13|A0A068MS13_SYNY4 Queuine tRNA-ribosyltransferase OS=Synechocystis sp. (strain PCC 6714) OX=1147 GN=tgt PE=3 SV=1
MPLPSVNFTYQCQARCSHSQVRAGIFQTPHGPVETPRFMPVGTLATVKGITPAQLADTQAQMVLANTYHLHLQPGEKIIAAAGGVHKFMGWPGPMLTDSGGFQVFSLSQLRTIDERGVTFRSPRDGRLIDMTPENSIRIQNALGADVIMAFDECPPGQGDRPMVERATARTYRWLERCIEAHQRPQDQALFAIVQGGTFLDLRSQAVEKLLALDLPGYAIGGVSVGEAPALIDKVVQHTAPLLPAHKPRYLMGVGTYREMARAIFAGIDLFDCVIPTRFGRHGTALVQGERWNLKNATFREDHRPLDENCPCYTCQTFSRAYLNHLIRSREMLGYILLSLHNITELIRFTQSIRQAILNDTFTQDFAHWLTPPGQLEEKSGQLPIFCGDP

SEQ ID NO: 61461 - protein, 364 aa, unidentified
  source 1..364: note = Synergistaceae bacterium
  REGION 1..364: note = tr|A0A3D3VUI7|A0A3D3VUI7_9BACT Queuine tRNA-ribosyltransferase (Fragment) OS=Synergistaceae bacterium OX=2053624 GN=DIT24_06120 PE=3 SV=1
MFGFRIDSRCPDTMARTGEIRTERGSVPTPAFMPVGTRATVKAMAPFELQEMGAGIILANTYHLYLRPGHEVIREAGGLHRFMAWPGLILTDSGGFQVFSLSTLREISDDGVTFRSHLDGTTHLMSPELSVQVQEALGSDIAMCFDECVPYPCSPGDSQEAVRRTLLWARRCQDVHSRADQTLFGIVQGSVFEDQRISCARELAAMDFPGYAVGGLSVGEPHSEMYRILDAVIPALPEGKPRYLMGVGYPPNLVEGVARGIDMFDCVLPTRNGRNGTLFTPGGRMNIKNLEYERDFRPIDPQCGCYACRNFTRSYIRHLFRSGEILASRLCTWHNLHYLLDLMRGIRGSIRSGNFADFRERFHE

SEQ ID NO: 61462 - protein, 373 aa, unidentified
  source 1..373: note = Synergistaceae bacterium
  REGION 1..373: note = tr|A0A3B9TSP5|A0A3B9TSP5_9BACT Queuine tRNA-ribosyltransferase OS=Synergistaceae bacterium; OX = 2053624 GN=tgt PE=3 SV=1
MGCFRIEASCQKTGARAGILETRHGFVKTPVFMPVGTQATVKAMAPFELKAIGSQIILSNTYHLYLRPGQDVINEAGGLHKFMGWDRPILTDSGGFQVFSLSDLREVNDEGVVFQSHLDGRRHFLTPELAVSIQEKLGSDIAMCLDECVPYPCDEKRSAGAVKRTIEWAARCKKAHSREGQLLFGIVQGSIFPSQRRHCAEALSEADFPGYGIGGLSVGEPHEIMYEMLDELAPVLPALKPRYLMGVGYPPNLIEGVARGVDMFDCVLPTRLGRNGTVFTSRGRLNIKNSVFERDFGPIEQGCTCYACRTVTRAYIRHLYRSREILASRLCTWHNLHFLQKLMERVRSAIVEGTFEMFRKEFNETFRDGENTP

SEQ ID NO: 61463 - protein, 276 aa, unidentified
  source 1..276: note = Synergistales bacterium
  REGION 1..276: note = tr|A0A101GPR3|A0A101GPR3_9BACT Queuine tRNA-ribosyltransferase OS=Synergistales bacterium 57_84; OX = 1641384 GN=XD83_0635 PE=3 SV=1
MFSLSTLREISDDGVTFRSHLDGTTHLMSPELSVQVQEALGSDIAMCFDECVPYPCSPGDSQEAVRRTLLWARRCQDVHSRADQTLFGIVQGSVFEDQRISCARELAAMDFPGYAVGGLSVGEPHSEMYRILDAVIPALPEGKPRYLMGVGYPPNLVEGVARGIDMFDCVLPTRNGRNGTLFTPGGRMNIKNLEYERDFRPIDPQCGCYACRNFTRAYIRHLFRSGEILASRLCTWHNLHYLLDLMRGIRGSIRSGNFADFRERFHEEFRDGGVRG

SEQ ID NO: 61464 - protein, 379 aa, unidentified
  source 1..379: note = Synergistales bacterium
  REGION 1..379: note = tr|A0A117LNS3|A0A117LNS3_9BACT Queuine tRNA-ribosyltransferase OS=Synergistales bacterium 53_16; OX = 1635273 GN=tgt PE=3 SV=1
MGSVNGLGCFRIEASCQKTGARAGILETRHGFVKTPVFMPVGTQATVKAMAPFELKAIGSQIILSNTYHLYLRPGQDVINEAGGLHKFMGWDRPILTDSGGFQVFSLSDLREVNDEGVVFQSHLDGRRHFLTPELAVSIQEKLGSDIAMCLDECVPYPCDEKRSAGAVKRTIEWAARCKKAHSREGQLLFGIVQGSIFPSQRRHCAEALSEADFPGYGIGGLSVGEPHEIMYEMLDELAPVLPALKPRYLMGVGYPPNLIEGVARGVDMFDCVLPTRLGRNGTVFTSRGRLNIKNSVFERDFGPIEQGCTCYACRTVTRAYIRHLYRSREILASRLCTWHNLHFLQKLMERVRSAIVEGTFEMFRKEFNETFRDGENTP

SEQ ID NO: 61465 - protein, 374 aa, Synergistes jonesii
  REGION 1..374: note = tr|A0A073IQA6|A0A073IQA6_9BACT Queuine tRNA-ribosyltransferase OS=Synergistes jonesii OX=2754; GN = tgt PE=3 SV=1
MFEYKLIAECRQTGARAGVLTTPHGTVETPVFMPVGTQATVKAMTPEELEELGAQIILCNTYHLHMRTGEDIVEEAGGAHRFMNWKHPILTDSGGFQVFSLAKLNKITDEGVEFRSHIDGGKRFMRPEDSMEIQQKLGGDIAMAFDECVSLPTTPEYSRAAMERTIAWGKRCRDHHSRKDQALFGIVQGALYESQRIECVERLEEIGFPGYGIGGLSVGESHAEMYGVLDALCPKMPKEKPRYLMGVGFPTNLIEGVARGVDMFDCVLPTRNGRNGQLFTRFGKMNIKNLSYARDFTPPDPSCGCYVCRNFTRAYLRHLYTAGEILAARLCSWHNLYFLVNLLRDARSAIVEGRFPAFRRDFMENFMEGAYLDE

SEQ ID NO: 61466 - protein, 374 aa, Synergistes sp.
  REGION 1..374: note = tr|G9PY90|G9PY90_9BACT Queuine tRNA-ribosyltransferase OS=Synergistes sp. 3_1_syn1; OX = 457415 GN=tgt PE=3 SV=1
MFEYKLIAQCPETGARAGEFTTPHGVIKTPVFMPVGTQATVKAMTPPELEGMGAQIILGNTYHLHMRPGEDIVAEAGGLHRFMGWHHPILTDSGGFQVFSLANINKIKEDGVEFRSHIDGSKHFMRPEDSIEIQQKLGSDIAMAFDECVSLPTTPEYSREAMERTLRWAKRCREYHSRPGQALFGIVQGALYESQRIECIERLEEIGFPGYGIGGLSVGESHAEMYRILDALSPHMPQDKPRYLMGVGFPTNLVEGIARGIDMFDCVLPTRNGRNGQLLTSFGKMNIKNLAFARDFTAPDPQCDCYVCRSFTRAYLRHLYTAGEILAARLCSWHNLHFLVNLVRGARQAIIEGRFPAFRRGFMENFMEGAYLNE

SEQ ID NO: 61467 - protein, 382 aa, unidentified
  source 1..382: note = Synergistetes bacterium
  REGION 1..382: note = tr|A0A1V5K0K6|A0A1V5K0K6_9BACT Queuine tRNA-ribosyltransferase OS=Synergistetes bacterium ADurb.Bin520 OX=1852915 GN=tgt PE=3 SV=1
MKTSRAVIMVACCAMSIIAYQPGARAGELHTPHGVIETPVFMPVGTQGTVKAMAPFELVEMGASIVLGNTYHLWLRPGSELVASLGGLHRFMGWSRGLLTDSGGFQVFSLGELRTISEEGVAFRSHIDGKRCFLSPEDSMRIQEELGSDIAMCFDECVALPASPERSRDALERTLRWAERCQRAHGRKDQALFGIVQGATFPDQRRECAERMAVMDFPGYGIGGLSVGESHEEMYAMLEVTNAVLPRGKPRYLMGVGLPENLVEGVARGVDMFDCVLPTRNGRNGTVFTLRGRLNLKAQRYLRDEDPLDPTCDCYVCRHHSRAYIRHLYRAGEILAARLCSWHNLHFLIRLMRRLRGAILQGRFGELRREIMMALREGDGTP

SEQ ID NO: 61468 - protein, 373 aa, unidentified
  source 1..373: note = Synergistetes bacterium
  REGION 1..373: note = tr|A0A2N1QU76|A0A2N1QU76_9BACT Queuine tRNA-ribosyltransferase OS=Synergistetes bacterium HGW-Synergistetes-1 OX=2013842 GN=tgt PE=3 SV=1
MFEYRLIAECPETGARAGELITPHGVIETPVFMPVGTQATVKAMTPPELEEIGAQIILGNTYHLYMRPGADIVEEAGGLHKFMQWHHPILTDSGGFQVFSLSELRKITDEGVEFRSHLDGSKHFMRPEDSMDIQQKLGSDIAMAFDECVVWPTTEEYSRAAMERTISWAGRCKEHHSREDQALFGIVQGSMFEAQRIECIKRLEEIGFPGYGIGGLSVGESHEDMYRILDALCPEMPVNKPRYLMGVGHPANLIEGVARGIDMFDCVLPTRNGRNGGVLTSFGKLNLKNRGFARDFTPIDPSCGCYTCRNFTRAYIRHLYTAGEILAARLCSWHNLYFLVNLMRDARKAIIEGRYPQFRRDFFSKYNEGPIQP

SEQ ID NO: 61469 - protein, 292 aa, unidentified
  source 1..292: note = Syntrophaceae bacterium
  REGION 1..292: note = tr|A0A3D4R464|A0A3D4R464_9DELT Queuine tRNA-ribosyltransferase (Fragment) OS=Syntrophaceae bacterium OX=2052184 GN=DIW05_08015 PE=3 SV=1
MPFSFELIKKDLQTSARLGKMVTPHGTVQTPAFMPVGTQGTVKSMRPEEIQNCGAQILLSNTYHLYLRPGHETIRRMGGLHSFMNWPGPILTDSGGFQVYSLAALRKIGPDGVMFQSHIDGSKHFLTPQKAVLIQEALGSDIMMCLDECTHYPATRKQTSDSLDLTVKWAGLCRKAKTNPEQALFGIVQGGAYMDLRRQAVLQTVPIGFDGYALGGVSVGEPKEMMQAITDEITPLLPSEKPRYLMGVGTPADIVYGVSRGIDLFDCVIPTRSARHGLLFTNSEKIVIKNAR

SEQ ID NO: 61470 - protein, 376 aa, unidentified
  source 1..376: note = Syntrophaceae bacterium
  REGION 1..376: note = tr|A0A1J5I892|A0A1J5I892_9DELT Queuine tRNA-ribosyltransferase OS=Syntrophaceae bacterium CG2_30_58_14 OX=1805378 GN=tgt PE=3 SV=1
MEFTRIAKDPGCGARLGKIGTPHGDVRTPAFMPVGTQGAVKALTPEQVRGLGAEIILGNAYHLYLRPGHRLIADLGGLHRFMNWPGPILTDSGGFQIYSLGALRRMAEEGATFQSHIDGSSHFLSPEKAVEIQEALGSDIMMCLDECIAYPATRGEVERALARTARWADRCKQSRKNRAQSLFGIIQGGVYPDLRRRGAEEMTAIGFDGYAIGGLSVGEPKVLMLENLAATAPLLPEDRPRYLMGVGTPEDLVEGVFHGIDMFDCVMPTRCARNGLLFTNGEKVVIKNARYREDASPLDSECDCYTCQNYSRAYLRHLFVAGEILAMVLNTIHNLRYYLHLMERIREAIREGRYPEFRDRFIRERTAIHADGCPET

SEQ ID NO: 61471 - protein, 370 aa, Syntrophaceticus schinkii
  REGION 1..370: note = tr|A0A0B7MN02|A0A0B7MN02_9FIRM Queuine tRNA-ribosyltransferase OS=Syntrophaceticus schinkii; OX = 499207 GN=tgt PE=3 SV=1
MGFFHFDLLKKSSKSKARLGVINTPRGKIHTPAFMPVGTQATVKTMTPDEVARLGAEIILSNTYHLYLRPGMGIIRQAEGLHKFMNWQRPILTDSGGFQVFSLSSLRQITDEGVHFRSHLDGSKHFIGPEQSMEIQAALGSDIAMAFDECSPFPCSYEDALAGLERTTSWAERCLKAPHAPGQVVFGIVQGSVYPELRARSAREITGLDFPGYAIGGLSVGEPKSIMYELLEYTTPLLPENKPRYLMGVGSADCLWEGVAHGIDMFDCVLPTRVARNGTAFTWQGKVVVRNAKYAEDFSPLEPDCDCYTCKHYSRAYLRHLFNAGEILGPRLLTIHNLHFTLSVMERIRRSIKDGCFEEEKNAFLDQYSI

SEQ ID NO: 61472 - protein, 373 aa, Syntrophobacter fumaroxidans
  REGION 1..373: note = sp|A0LFR2|TGT_SYNFM Queuine tRNA-ribosyltransferase; OS = Syntrophobacter fumaroxidans (strain DSM 10017 / MPOB); OX = 335543 GN=tgt PE=3 SV=1
MDFRIIARDASCHARRGRLRTAHGTFDTPVFMPVGTQASVKSLSPDELEDLGAHIILGNTYHLLLRPGAERVARLGGLHRFMHWNRSILTDSGGFQVFSLARINRIEEDGVVFQSHIDGARHAITPETSMECQMQLGSDIAMCFDECTAYPVTYEYARESMLRTVRWAARSKEAHTLPEQSLFGIVQGGVFCDLRRDCLERLVETGFDGYALGSLSVGESKEEMLSVLEAVAPGLPAASPRYVMGVGTPEDLVEGVRCGVDMFDCVMPTRNARNGMLFTVRGGIQIKNSRYADDDRPIEEGCSCYTCRRFSRAYLRHLFLARELLAYRLNTLHNLHYYLGLMAAMREAIEANAFDRWRRSFYLDRENREPAEE

SEQ ID NO: 61473 - protein, 365 aa, Syntrophobacter sp.
  REGION 1..365: note = tr|A0A0S7XVA4|A0A0S7XVA4_9DELT Queuine tRNA-ribosyltransferase OS=Syntrophobacter sp. DG_60; OX = 1703361 GN=tgt PE=3 SV=1
MQFKIEAQDGNARAGLLITPHGVIHTPAFMPVGTLGSVKSLTSEDLETIGTEIILANTYHLYLRPGHLLIKKFGGLHKFMHWGGPLLTDSGGYQVYSLAKKREIKEEGVVFRSHINGSSHFLTPEKVIGVQSYFGSDIIMCLDECPPYPIDYSYAERSLKLTTKWAGECKLAHKNLNQSLFGIAQGGFYPDLRRRAALSLIEIGFDGYAIGGLSVGEPKEKTWEAIEICNEMLPKDRPRHAMGIGLPEDILEAVLRGMDMFDCVVPTRHARTGTLFTSFGELTIKKAQYTQDEHPIDEACNCYVCRHYSRAYLRHLFISKELLAYRLNSYHNVYYYLNFVRQIRQAILDGHLAEFRKKFYEMRKS

SEQ ID NO: 61474 - protein, 370 aa, Syntrophobacter sp.
  REGION 1..370: note = tr|A0A2U3L710|A0A2U3L710_9DELT Queuine tRNA-ribosyltransferase OS=Syntrophobacter sp. SbD1; OX = 2043167 GN=tgt PE=3 SV=1
MKFQIVSKDPGCSARAGRIELARGHIDTPVFMPVGTAGSVKSISPEELESLGVQIILGNTYHLYLRPGDERIARLGGLHKFMGWDYPILTDSGGFQVFSLARINKIEEEGVLFQSHIDGSRHLITPESAIGIQKNLGSDIMMCFDECTPYPISYEYASESVQRTIRWSLRSKEASAGSDQALFAIVQGGVFKDLREMCLEKLAETGFDGYAIGSLSVGESKEQMLEVMNWLAPKLPDSAPRYVMGVGAPEDLVEGVRAGVDMFDCVMPTRNARNGTLFTSRGAVHIKNSGYAEDSGPLDPDCGCYTCRRFSRAYLRHLYMCRELLSYRLNTIHNLHYYLDLMAQVRAAIAAGRFEQWRAGFYARREMQIV

SEQ ID NO: 61475 - protein, 384 aa, unidentified
  source 1..384: note = Syntrophobacteraceae bacterium
  REGION 1..384: note = tr|A0A1J5IGE6|A0A1J5IGE6_9DELT Queuine tRNA-ribosyltransferase OS=Syntrophobacteraceae bacterium CG2_30_61_12 OX=1805379 GN=tgt PE=3 SV=1
MGRKVILMKFKLLKTDSGCGARRGRLETAHGVIETPMFMPVGTQGSVKSVSPDELEALDTRIILGNTYHLYLRPGAERIERFGGLHRFIHWDRAILTDSGGYQVFSLAPMRKIEEQGVHFQSHIDGSRHFIRPEDAVRIQQQLGSDIAMCFDECTPYPISRDYAEASAERTVRWAQRCKAAHQRTDQALFGIVQGGVFPELRRRCLEQLQAIGFDGYAVGSLAVGEPKAEMLRVLNQLVPAMPAAAPRYLMGVGTPEDLVAGVAAGIDLFDCVMPTRNARNGMLFTAAGHLQIKNRCHADDPRPIEEGCTCYTCARFSRGYLRHLFMARELLAYRLNTLHNLHYYLNLMGDIRAALDQDQFADWTREFHARRGSGDGGEQGAAS

SEQ ID NO: 61476 - protein, 369 aa, unidentified
  source 1..369: note = Syntrophobacteraceae bacterium
  REGION 1..369: note = tr|A0A3B8HLW6|A0A3B8HLW6_9DELT Queuine tRNA-ribosyltransferase OS=Syntrophobacteraceae bacterium; OX = 2052185 GN=tgt PE=3 SV=1
MKLGFEVITTDTQSGARRGRFLTSHGRVETPVFMPVGTQASVKSLSPDELEQLGVSILLGNTYHLYLRPGAEVVARLGGLHRFMGWRRAILTDSGGYQVFSLAQTRRIEEQGVVFQSHLDGSRHLITPEDATHIQMLLGADIIMCFDECTPYPADYQYVQDSMNRTVRWAQRCRSAHQHPDQALFGIIQGGTHLDLRQQCLEQLLEICFDGYAIGSLAVGEPKQSTMEILAGLTPRLPHELPRYLMGVGTPEDLVEGVMMGVDMFDCVMPTRNARNGMLFTRHGHLQIKNSCHATDDHPIEEECQCYTCQRFSRAYLRHLFMARELLAYRLNTLHNLYYYQNLMAEMRSAIEGHEFIQWRREFYARRQP

SEQ ID NO: 61477 - protein, 376 aa, unidentified; identical to SEQ ID NO: 61470
  source 1..376: note = Syntrophobacterales bacterium
  REGION 1..376: note = tr|A0A2M7BJM4|A0A2M7BJM4_9DELT Queuine tRNA-ribosyltransferase OS=Syntrophobacterales bacterium CG03_land_8_20_14_0_80_58_14 OX=1974100 GN=tgt PE=3 SV=1

SEQ ID NO: 61478 - protein, 375 aa, unidentified
  source 1..375: note = Syntrophobacterales bacterium
  REGION 1..375: note = tr|A0A2M8GD19|A0A2M8GD19_9DELT Queuine tRNA-ribosyltransferase OS=Syntrophobacterales bacterium CG_4_8_14_3_um_filter_49_14 OX=1974097 GN=tgt PE=3 SV=1
MVDGYQFELLKKDLTSRARLGKIQTPHGEVNTPVFMPVGSQGAVKSLVPEWVRKLGAEMIIGNAYHLYLKPGHKIVGDLGGLHRFMNWSGPLLTDSGGFQIYSLSALRKITDKGVMFQSHIDGSRQFLTPELVVEIQETLGSDIMMCLDECTPYPAGFAEVEKSLALTIEWAGRSKDAKKNSNRQALFGIVQGGMYPDLRERGVEGITGIGFDGYALGGLSVGEPKEMMTEIVAGTTPLLPEDKPRYLMGVGTPEDIVACVHQGIDMFDCVMPTRCARNGLLFTNRENIVIKNARYSDDSSPLDSSCDCYTCRHYSRAYLRHLFLAREILAMILNTIHNIRYYMHLLEMIREAIRNGQYADFKNNFLRNRSYSGV

SEQ ID NO: 61479 - protein, 384 aa, Syntrophobotulus glycolicus
  REGION 1..384: note = tr|F0T264|F0T264_SYNGF Queuine tRNA-ribosyltransferase OS=Syntrophobotulus glycolicus (strain DSM 8271 / FlGlyR) OX=645991 GN=tgt PE=3 SV=1
MSPVHLEILQQEKSTRARLGKLYTPHGVIDTPVFMPVGTQATVKTMTPEEIKEIGAGIILGNTYHLFLRPGHELIREFGGLHHFMHWDGAILTDSGGFQVFSLGDLRKITEEGVEFRSHHDGSKQFLSPEKAMEIQMALGADIVMAFDECTPHPCTREYAEASMERTLRWLKRCQDTLKTTRTQALFGIVQGSMYKDLRIESARRTVEYDLPGYAIGGLSVGEDKQTMYEVLDYTVPELPEDKPRYLMGVGSPDALIEGVIRGIDMFDCVLPTRIARNGTAMTRSGKVVIKNAEYAKDPKPLDPGCDCYACRNYSRAYIRHLFKAGEILGLRLMTIHNLRFLQNLMAEIRKSIAGDTLLEFRDRFFREYGYEEERQDKQNRPAD

SEQ ID NO: 61480 - protein, 368 aa, Syntrophomonas sp.
  REGION 1..368: note = tr|A0A3B8HXK2|A0A3B8HXK2_9FIRM Queuine tRNA-ribosyltransferase OS=Syntrophomonas sp. OX=2053627; GN = tgt PE=3 SV=1
MLKFELEITSPQYQARLGRLTLSHGEVETPVFMPVGTQATVKTLTPEELYEIGIGIILANTYHLYLRPGEELVAKAGGLHSFMNWKRNILTDSGGFQVFSLSKLRKISDEGVEFQSHIDGSRHFLSPEKVMDIEQKLGADIAMCFDECAPYPCSYEEAELAVERTTLWAKRCREVHRHQEQALFGIVQGNIFPDLRARSAEELVKLDFPGYAVGGLSVGEPKENMYEILEFLHPLLPADKPRYLMGVGEPEDLIEGVKRGIDMFDCVVPTRLARHGTAYTYSGKITVRNAAFKEDFLPIDTRCDCYVCRNYSRAYLRHLIKAEEILAHRLLSYHNVYFLVNLMARIRNAIREGNLDNFCHDFFSEYRF

SEQ ID NO: 61481 - protein, 368 aa, Syntrophomonas sp.
  REGION 1..368: note = tr|A0A356UEY0|A0A356UEY0_9FIRM Queuine tRNA-ribosyltransferase OS=Syntrophomonas sp. OX=2053627; GN = tgt PE=3 SV=1
MFHFELLKQDSNSSARLGRITTGHGVIDTPVFMPVGTQATVKTLTPEELYEIGVQIILSNTYHLYLRPGEELIARAGGLHRFMNWKGNVLTDSGGFQVFSLAKLRRISDEGVYFNSHIDGSVHFLSPEKVMQIEQELGADIAMCFDECAPYPCSYEEALQAVVRTSLWARRCRENHHRSDQVLFAIVQGNIFPDLRQRSAEELLKMDFPAYAIGGLSVGEPKEDMYRILDFMHGLLPVDKPRYLMGVGTPEDLLEGVKRGVDMFDCVLPTRLARHGTAYTAEGKITVRNAQYADDFSPIDNSCDCYVCRNYSRAYLRHLIKAEEILAHRLLSYHNVYFLVKLMENIRSAINQGRFSTFYHDFLNTYRF

SEQ ID NO: 61482 - protein, 369 aa, Syntrophomonas wolfei
  REGION 1..369: note = tr|Q0AX19|Q0AX19_SYNWW Queuine tRNA-ribosyltransferase OS=Syntrophomonas wolfei subsp. wolfei (strain DSM 2245B / Goettingen) OX=335541 GN=tgt; PE = 3 SV=1
MLKFELLQEDKTSAARLGRLTTAHTTVDTPIFMPVGTQATVKTLTPEDLYEIGAGIILANAYHLYLRPGCELIQQAGGLHRFMNWKKGILTDSGGFQVFSLSKLRDINDDGVWFHSHIDGSRHFLTPEKVMEIEAKLGADIAMCFDECAPYPCTYEEAEKAVKRTSLWAGRCKKAHNNDKQVLFGIIQGSVYPELRERSVGELTALDFPGYAIGGLSVGEPKEMLYATLEVTTRMLPREKPRYLMGVGAPEDLLEGVRLGVDMFDCVLPTRLARHGTAYTAEGKITVRNALYAADFSPLDARCSCYVCQNYSRAYIRHLIKAEEILAQRLLSYHNLYFLFQLMAGIRAALAKGEFPSFYREFFHNYISA

SEQ ID NO: 61483 - protein, 368 aa, Syntrophomonas zehnderi
  REGION 1..368: note = tr|A0A0E4C9E0|A0A0E4C9E0_9FIRM Queuine tRNA-ribosyltransferase OS=Syntrophomonas zehnderi OL-4; OX = 690567 GN=tgt PE=3 SV=1
MFTFQVTKNDDASAARLGRLSTSHGVFDTPIFMPVGTQATVKAVTPEMLTEMGAGIILSNTYHLYLRPGADLVERAGGLHKFMNWPRGILTDSGGFQIFSLQGLRKISDEGVVFNSHIDGSRHFLSPQIVMEIEQKLGADIAMCFDECAPYPCSYEEADQAVTRTSLWAKRCRDSHNCSDQALFGIIQGNIFADLREKSAREITALDFPGYAIGGLSVGEPKEDMYRILDLTHQLLPTDKPRYLMGVGAPEDLVEGVARGVDMFDCVLPTRIARHGTAFTHRGKLVVRNAVYAADFRALDTDCDCRVCKNYSRAYIRHLVKAEEILAHTLITYHNLYFLIKMMQDIRQAIAEDRFNEFYTNFYASYKF

SEQ ID NO: 61484 - protein, 377 aa, unidentified
  source 1..377: note = Syntrophorhabdaceae bacterium
  REGION 1..377: note = tr|A0A1V5CDW4|A0A1V5CDW4_9DELT Queuine tRNA-ribosyltransferase OS=Syntrophorhabdaceae bacterium PtaU1.Bin034 OX=1811715 GN=tgt PE=3 SV=1
MSAITIENTDGQARLGTLVTGHGLIETPVFMPVGTQGAVKAILNRDLQEMGVKMILGNAYHLYLRPGDELIRDMGGIQKFAGWDGAVLTDSGGYQIFSLGVLRKIREEGVNFQSHIDGSRHFLTPERIVEVQENIGADVCMCLDECVSYPSSHEYTSASVDLTTRWAQRCHSVKNDSSLLFGIVQGGTYADLRLKSARDLVELNFDGYALGGFSVGEPKSVMWEMVDVAIGELPREKPRYLMGLGFPEDIVKGVSKGIDMFDCVIPTRHARNGNLFTRLGRINIKHAKYARDGKPIDEQCQCYTCRNFSRAYLRHLFVTRELTSYYLNTVHNLFFYADLMERIREAIREGKFGQFCEDFRSEWKGGELQDGYSVCDG

SEQ ID NO: 61485 - protein, 387 aa, Syntrophorhabdus aromaticivorans
  REGION 1..387: note = tr|A0A351U7U1|A0A351U7U1_9DELT Queuine tRNA-ribosyltransferase OS=Syntrophorhabdus aromaticivorans OX=328301 GN=tgt PE=3 SV=1
MNTIALLKQEGHARLGIVRTGHGEIETPVFMPVGTQGIVKATSPRDLKNMGIKVILANAYHLYLRPGDHLVREMGGIHRFAGWDGAVLTDSGGYQVFSLGVLREIREDGVLFQSHIDGSRHFLSPEKVVEVQENIGADICMCFDECAPYPSSYEYTSNSVDLTSRWAERCKNAKKNDGTMLFGIVQGGFYRDLRLKSAEELIKMDFDGYAVGGLSVGEPKSIMWEMVDTVVDMLPKDKPRYLMGLGFPEDIVEGVRKGIDMFDCVIPTRHARNGSLFTRNGRINIKHAKYVKDESPIDEQCQCYTCRTFSRAYLRHLFVSHEISSYYLNTIHNIFFYNNLMQTIREAIREGSFETFCEAFKGEWKGGELQDEYSIRDGHSGSIRTGG

SEQ ID NO: 61486 - protein, 387 aa, Syntrophorhabdus sp.
  REGION 1..387: note = tr|A0A1V5DD66|A0A1V5DD66_9DELT Queuine tRNA-ribosyltransferase OS=Syntrophorhabdus sp. PtaU1.Bin153 OX=1811705 GN=tgt PE=3 SV=1
MNTIALLKKDGHARLGIVRTGHGEIETPVFMPVGTQGIVKATSPRDLKDMGIKVILANAYHLYLRPGDQLVREMGGIHRFAGWDGSVLTDSGGYQIFSLGVLREIKEDGVLFQSHIDGSRHFLSPEKAVEVQENIGADICMCFDECAPYPSSYEYTSNSVDLTSRWAKRCKNAKKNDEAMLFGIVQGGFYRDLRLKSAQELIGMDFDGYAVGGLSVGEPKSIMWEMVDTVVDMLPEDKPRYLMGLGFPEDIVEGVRKGIDMFDCVIPTRHARNGSLFTNDGRINIKHAKYVKDESPIDEQCQCYTCRTFSRAYLRHLFVSHELSSYYLNTIHNIFFYNNLIRNIREAIREGSFETFYEAFKSKWKGGELQNEYSVCDGHPGSVRAGG

SEQ ID NO: 61487 - protein, 379 aa, Syntrophorhabdus sp.
  REGION 1..379: note = tr|A0A1V4WYH4|A0A1V4WYH4_9DELT Queuine tRNA-ribosyltransferase OS=Syntrophorhabdus sp. PtaB.Bin184 OX=1811701 GN=tgt PE=3 SV=1
MTMIEIDHTDGAARSGRLITGHGTIETPVFMPVGTQGVVKAMTHRQLKELGVTMILSNAYHLYLRPGDELIGRMGGLHNFSGWDGAILTDSGGYQIFSLGVLREIKDDGVLFQSHIDGSRHFLTPEKIVRVQENIGADIAMCLDECVSYPSTFEYTSESVELTTRWARRCLAARSGEGTQKLFGIIQGGFYPDLRLRSAGDILSLDFDGFAIGGLSVGEPKSLMWDMVDTVVGLMPAGKPRYMMGIGLPEDLMEGVRRGIDMFDCIIPTRFARNGSLFTWDGRINIKNARFTGDERPIQEGCTCYTCRTYSRAYLRHLTVSHELTSFYLNTIHNVHFYMELMKKIRSAVSTGTFDAFYHDFKRRYEGGESDDRYSVCNG

SEQ ID NO: 61488 - protein, 378 aa, Syntrophothermus lipocalidus
  REGION 1..378: note = tr|D7CLE4|D7CLE4_SYNLT Queuine tRNA-ribosyltransferase OS=Syntrophothermus lipocalidus (strain DSM 12680 / TGB-C1) OX=643648 GN=tgt PE=3 SV=1
MSVGCKMFGFVINRKCSATGARLGVLSTPHGVFETPMFMPVGTQATVKTLIPEELYEIGTGIILANSYHLYLRPGTEIIHMAGGLHRFMNYRRGILTDSGGYQVFSLAPLRRITDDGVYFNSHIDGSRHFLNPEKVISIQEDLGADIIMCFDECSPYPCKYEEAREAVSRTTKWAERCLQAHRREDQALFGIVQGNVYEDLRIESAASLVSLGFDGYAIGGLSVGEPKEDMYRIIEVMNTVLPEDKPRYLMGVGAPEDLVEGVKRGVDMFDCVLPTRLARHGTAYTSRGKLVIRNAEYRDDFRPLDEECGCYVCHNYTRAYLRHLFKAEEILALRLLTYHNIYFLIKLMENIRSAIQEDRLLVFCERFLTRYSEPSGN

SEQ ID NO: 61489 - protein, 376 aa, Syntrophus aciditrophicus
  REGION 1..376: note = tr|Q2LVH1|Q2LVH1_SYNAS Queuine tRNA-ribosyltransferase OS=Syntrophus aciditrophicus (strain SB) OX=56780 GN=tgt PE=3 SV=1
MPPLKQHFRILNTDPGSAARLGLLSTVHGEVHTPAFMPVGTQGTVKALTPDTVKSLGAEIILCNTYHLYLRPGHRLIESLGGLHRFMNWPGPILTDSGGFQVYSLGKLRKVTREGVIFQSHIDGSRHKITPELAIEIQEALNTDIMMCLDECTPWPAGFQEAESSLSLTLSWAERSRKARTNSSSQALYGIIQGGMYLELRRRAVEAITAMDFDGYALGGVSVGEPKPLMEQIVSETAPLLPEDRPHYLMGVGTPEDIVRAVDCGIDLFDCVMPTRCARHGLLFTNAEKVVIKNARYREDNGPLDSDCDCYTCRNFSRAYLRHLYVAGEILAMTLNTLHNIRYYMRLMEQIRSAIGRGQYAAFKTRFLKDRRMSEA

SEQ ID NO: 61490 - protein, 376 aa, Syntrophus gentianae
  REGION 1..376: note = tr|A0A1H7WEB8|A0A1H7WEB8_9DELT Queuine tRNA-ribosyltransferase OS=Syntrophus gentianae OX=43775; GN = tgt PE=3 SV=1
MAPLNQHFRILNTDPESAARCGLLSTPHGQVLTPAFMPVGTQGTVKSLTPDTVKALGAEMILCNTYHLYLRPGHQLIASLGGLHSFMNWGGPILTDSGGFQVYSLGKLRKITPEGAIFQSHIDGSRHRLTPELAIEIQEALGSDIMMCLDECTPYPATFSEAEASLSLTLSWAERSRKARADSSPQALYGIVQGGMYPDLRKRAVEAIAAMNFDGCALGGVSVGEPKALMEQIVAETTPLLPADRPHYLMGVGTPEDIVKAVDCGIDLFDCVMPTRCARHGLLFTNTEKVVIKNARYRKDNGPLDSECDCYTCRNFSRAYLRHLYVAGEILAMTLNTLHNIRYYMRLMEQIRDAIGCGQYAAFKSRFLKDRQRVET

SEQ ID NO: 61491 - protein, 374 aa, Syntrophus sp.
  REGION 1..374: note = tr|A0A1V5DLW5|A0A1V5DLW5_9DELT Queuine tRNA-ribosyltransferase OS=Syntrophus sp. PtaU1.Bin005; OX = 1811712 GN=tgt PE=3 SV=1
MPPIKQHFKVLETDPGSAARCGLLSTPHGDVRTPAFMPVGTQGTVKSLAPDTVKELGAEMILCNTYHLYLRPGHGLIASLGGLHSFMNWHGPILTDSGGFQVYSLGKLRKITPEGAIFQSHIDGSRHRLTPELAVEIQEALHSDIMMCLDECTPYPATFREAESSLSLTLSWAERSRKARADSSDQALYGIVQGGMYSELRKRAVEAISAMNFDGYALGGLSVGEPKAQMEQIVQETAPLLPADRPHYLMGVGTPEDIVKAVDCGIDLFDCVMPTRCARHGLLFTNAEKVVIKNARYREDNGPLDSECDCYTCRNFSRAYLRHLYVAGEILAMTLNTLHNIRYYMRLMEQIRNAIGCGQYAAFKTRFLESRLKA

SEQ ID NO: 61492 - protein, 338 aa, Syntrophus sp.
  REGION 1..338: note = tr|A0A1V4XQU6|A0A1V4XQU6_9DELT Queuine tRNA-ribosyltransferase OS=Syntrophus sp. PtaB.Bin138; OX = 1811711 GN=tgt_1 PE=3 SV=1
MPVGTQATVKAMTPDELWEVKARIILANTYHLYIRPGHELIGRMGGLHGFMGWSGPILTDSGGFQVFSLGELCRIKEEGVTFRSHLDGSPHFISPEVSIDIQEDLGADIIMCFDECPPATADYDYVRKSMEMTSRWAVRCREARRRKDQALFGIVQGGRFPDLRAQSARDLREIGFDGYALGGLSVGEEKEVMYGVMETCEPLLPEDRPRYIMGIGTPEDLIEGIYRGYDMFDCVMPTRNARNGMLFTSSGSLNIKNARYAEDREPIDPECGCYVCRNYSRAYLRHLYRAGEILSSRFNTYHNLYYYLNLMEKARDAIAEGRFARFREEFYEKRAVSV

SEQ ID NO: 61493 - protein, 376 aa, unidentified
  source 1..376: note = Tabrizicola sp.
  REGION 1..376: note = tr|A0A3S8UBA5|A0A3S8UBA5_9RHOB Queuine tRNA-ribosyltransferase OS=Tabrizicola sp. K13M18; OX = 2494374 GN=tgt PE=3 SV=1
MATGFTFTVAATDGAARTGAIKTPRGEIRTPAFMPVGTAATVKAMLPESVRATGADILLGNTYHLMLRPTAERIAALGGLHRFMNWDRPILTDSGGFQVMSLGPLRKLTEEGVRFSSHLDGSKHMLTPERSMEIQALLGSDIVMCFDECPALPATEAEVAKSMRLSMRWAQRSRDAFGDRPGHALFGIMQGGVTRDLRQESAKALTDIGFDGYAVGGLAVGEGQEAMFSVLDYAPGFLPADKPRYLMGVGKPDDIVGAVERGIDMMDCVLPSRSGRTGQAWTPRGQVNLRNARHKDDPRPLDESCTCPACTGYSRAYLHHVVKSDEIIGSMLLTWHNLHYYQVLMQGLRDAIAVGRLAGFVASFHAGRASGDIDPL

SEQ ID NO: 61494 - protein, 376 aa, unidentified
  source 1..376: note = Tabrizicola sp.
  REGION 1..376: note = tr|A0A4Z0LMS6|A0A4Z0LMS6_9RHOB Queuine tRNA-ribosyltransferase OS=Tabrizicola sp. WMC-M-20; OX = 2528693 GN=tgt PE=3 SV=1
MAQRFGFTVEATDGRARKGVIRTPRGEIRTPAFMPVGTAATVKAMLPESVRATGADILLGNTYHLMLRPTAERIAHLGGLHRFMNWDRPILTDSGGFQVMSLASLRKLTEEGVRFSSHIDGSKHMLSPERSMEIQKLLGSDIVMCFDECPALPATDAEVAKSMALSMRWAQRSRDAFGDRPGHALFGIMQGGVTRDLREESARALVDIGFDGYAVGGLAVGEGQEAMFGVLDYAPGFLPEEKPRYLMGVGKPDDIVGAVERGIDMMDCVLPSRSGRTGQAWTRRGQVNIKNARHMDDQRPLDEECTCPACRSYSRAYLHHVFKAQEMISGMLLTWHNLHYYQELMQGLRDAIATGTLPAFVAAFHAQRAMGDIDPV

SEQ ID NO: 61495 - protein, 379 aa, unidentified
  source 1..379: note = Tahibacter aquaticus
  REGION 1..379: note = tr|A0A4R6YZ10|A0A4R6YZ10_9GAMM Queuine tRNA-ribosyltransferase OS=Tahibacter aquaticus OX=520092; GN = tgt PE=3 SV=1
MLRICQLNKESTMQFDLIKTSGAARRGRLTFARGTIETPAFMPVGTYGSVKAMLPRDIKEIGAEIILGNTFHLFLRPGLEVIGEFGGLHDFIGWDRPILTDSGGFQVFSLAHKRKITEQGVTFASPIDGSKVFLSPEESMRIQRVLNSDIVMIFDECTPYPATEKQASDSMELSLRWAERSRRAHEGNANALFGIVQGGVYPALRERSAAGLQQIGFDGYAVGGLAVGEPEAERNHTLEATVPLLPADKPRYLMGVGRPEDIVEAVRRGIDMFDCVMPTRNARNAHLFTRHGVLRLRNAQYQRDTRPIDEACGCHTCASGFSRAYLRHLDKCNEILASQLATIHNLYHYQELMRGLRAAIAEDRLDAFVAEFYALRRPA

SEQ ID NO: 61496 - protein, 376 aa, unidentified
  source 1..376: note = Taibaiella chishuiensis
  REGION 1..376: note = tr|A0A2P8DCL7|A0A2P8DCL7_9BACT Queuine tRNA-ribosyltransferase OS=Taibaiella chishuiensis; OX = 1434707 GN=tgt PE=3 SV=1
MEFELIATDAETGARAGLLHTDHGTIETPIFMPVGTVGSVKAVMQEQLKETVKGQIILGNTYHLYLRPGTEILEKAGGLHKFNGWDRPILTDSGGYQVFSLSGNRKLKEEGALFQSHIDGSRHLFTPESVMDIQRSIGADIVMAFDECTPYPCEYGYARKSMELTHRWLTRCVKRFGETEPKYGHNQSLFPIVQGSTYKDLRRESAEFISQIEADGNAIGGLSVGEPEQDMYEMCELVCGILPKQKPRYLMGVGTPWNILEGIGLGVDMFDCVMPTRNGRNGMLFTSEGVVNIKNKRWADDFSPIDAGLEDGPSTVYTKAYLRHLFAANEILGLQLASLQNLSFYLHLVKEARKHIIAGDFASWRRGMLETVKRRN

SEQ ID NO: 61497 - protein, 376 aa, unidentified
  source 1..376: note = Taibaiella soli
  REGION 1..376: note = tr|A0A2W2A780|A0A2W2A780_9BACT Queuine tRNA-ribosyltransferase OS=Taibaiella soli OX=1649169; GN = tgt PE=3 SV=1
MEFQLLAADSGSKARAGIITTDHGQIETPIFMPVGTVGSVKAVNQQQLKEEIKAQIILGNTYHLYLRPGTEILEEAGGLHKFNGWDRPILTDSGGYQVFSLSNNRKLTEEGAMFQSHIDGSRHLFTPERVMDIQRSIGADIIMAFDECPPYPSEYLYAKNSMELTHRWLARCIQRLGETEPKYGYRQTLFPIVQGSTYKDLRKASAEFVAAAECEGNAIGGLSVGEPEEMMYEMCALCCEYLPESKPRYLMGVGTPWNILENISLGVDMFDCVMPTRNGRNGMLFTSKGVVNIKNKKWANDFTPIDDGIDCYTSNFYTKAYLRHLFVASEILALEIASIHNLAFYLHLVKQAREHIIAGDYNQWKNEMIPILKQRC

SEQ ID NO: 61498 - protein, 376 aa, unidentified
  source 1..376: note = Taibaiella sp.
  REGION 1..376: note = tr|A0A3N6ZUE2|A0A3N6ZUE2_9BACT Queuine tRNA-ribosyltransferase OS=Taibaiella sp. KBW10 OX=2153357; GN = tgt PE=3 SV=1
MKFELQAVCPDTGARAGLLHTDHGVIETPIFMPVGTAGSVKAVMQDQLLHDVKAEIILGNTYHLYLRPGTEILEAAGGLHKFNGWDKPILTDSGGYQVFSLSANRKLKEEGAIFQSHIDGSKHLFSPERVMDIQRSIGADIIMAFDECTPYPCDYAYAHKSMELTHRWLDRCVQRLSETDPKYGYNQSLFPIVQGSTYKDLRKISAEYIASKGADGNAIGGLSVGEPEQDMYEMCGLVCDILPKDKPRYLMGVGTPWNIIENIGLGVDMFDCVMPTRNGRNGMLFTSEGVVNIKNKKWEKDFSPIDAGIDSRFSNYYTKAYLRHLFQAKEILGLQLASLQNLSYYLHLVKEARQHILNGTFASWKRTALDIVKTRL

SEQ ID NO: 61499 - protein, 376 aa, unidentified
  source 1..376: note = Tamilnaduibacter salinus
  REGION 1..376: note = tr|A0A2U1CYX2|A0A2U1CYX2_9ALTE Queuine tRNA-ribosyltransferase OS=Tamilnaduibacter salinus; OX = 1484056 GN=tgt PE=3 SV=1
MRDDCVMQFEKLANDGEARRGRLTFPRGTVETPAFMPVGTYGTVKGMLPRDIEEIGAEIILGNTFHLMLRPGTEVIRGHGDLHDFTQWQGPILTDSGGFQVFSLGEMTKISEKGVQFRSPIDGSPVELNPEIAMQVQRDLGSDIVMIFDECTPYPATEQQARESMDLSLRWAERSKQAHGDNPSALFGIVQGGMYEGLREASLNGLTDIGFDGYAIGGLSVGEPKEDMQRILTHIAPKLPDDQPRYLMGVGRPEDIVEAVRRGVDMFDCVMPTRNARNGHLFTTEGVIKIRNAKHRHDTGPLDTACDCYTCRHFSRGYLHHLDRCGEMLGSQLNTIHNLRHYQSLMAGLRGAIEAGTLSDFIERFYERCGQTVPPL

SEQ ID NO: 61500 - protein, 370 aa, unidentified
  source 1..370: note = Tamilnaduibacter salinus
  REGION 1..370: note = tr|A0A2A2I3M9|A0A2A2I3M9_9ALTE Queuine tRNA-ribosyltransferase OS=Tamilnaduibacter salinus; OX = 1484056 GN=tgt PE=3 SV=1
MQFEKLANDGEARRGRLTFPRGTVETPAFMPVGTYGTVKGMLPRDIEEIGAEIILGNTFHLMLRPGTEVIRGHGDLHDFAQWQGPILTDSGGFQVFSLGEMTKISEKGVQFRSPIDGSPVELNPEIAMQVQRDLGSDIVMIFDECTPYPATEQQARESMDLSLRWAERSKQAHGDNPAALFGIVQGGMYEGLREASLNGLTDIGFDGYAIGGLSVGEPKEDMQRILTHIAPKLPDDQPRYLMGVGRPEDIVEAVRRGVDMFDCVMPTRNARNGHLFTTEGVIKIRNAKHRHDTGPLDTECDCYTCRHFSRGYLHHLDRCGEMLGSQLNTIHNLRHYQSLMAGLRGAIEAGTLSDFIERFYERRGQTVPPL

SEQ ID NO: 61501 - protein, 376 aa, unidentified
  source 1..376: note = Tamlana nanhaiensis
  REGION 1..376: note = tr|A0A0D7W3G8|A0A0D7W3G8_9FLAO Queuine tRNA-ribosyltransferase OS=Tamlana nanhaiensis OX=1382798; GN = tgt PE=3 SV=1
MKFELKANDPNSKARAGKLTLDHGVIETPIFMPVGTVATVKGVHQRELKNDINPDIILGNTYHLYLRPQTPILEKAGGLHKFMNWDRNILTDSGGYQVYSLSANRKIKEEGVKFKSHIDGSYHTFTPENVMEIQRTIGADIIMAFDECTPYPCDYNYAKRSMHMTHRWLDRCINHLEKTPLKYGYNQAFFPIVQGSTYKDLRQQSAEYIANAGAFGNAIGGLSVGEPAEEMYAMTDVVCNILPEDKPRYLMGVGTPINILENIALGVDMFDCVMPTRNARNGMLFTAHGTINIKNLKWAEDFSPIDEMGITFVDTEYSKAYLRHLFTVNELLGKQIATIHNLGFYLWLVREARKHILAGDFAVWKDKMVKQMDKRL

SEQ ID NO: 61502 - protein, 376 aa, unidentified
  source 1..376: note = Tamlana sedimentorum
  REGION 1..376: note = tr|A0A0D7W2E2|A0A0D7W2E2_9FLAO Queuine tRNA-ribosyltransferase OS=Tamlana sedimentorum OX=1435349; GN = tgt PE=3 SV=1
MKFELNAKDPNSKARAGKITLDHGVIETPIFMPVGTVATVKGVHQRELKNDINPDIILGNTYHLYLRPQTQVLEKAGGLHKFMNWDRNILTDSGGYQVYSLSANRKIKEEGVKFKSHIDGSYHTFTPENVMEIQRTIGADIIMAFDECTPYPCDYNYAKRSMHMTHRWLDRCINHLEKTPLKYGYNQAFFPIVQGSTYKDLRQQSAEYIANSGAVGNAIGGLSVGEPAEEMYAMTDVVCSILPEEKPRYLMGVGTPINILENIALGVDMFDCVMPTRNARNGMLFTAHGTINIKNLKWAEDFSPIDEMGITFVDTEYSKAYLRHLFTVNELLGKQIATIHNLGFYLWLVREARKHILAGDFRAWKDKMVKQMDKRL

SEQ ID NO: 61503 - protein, 376 aa, Tamlana sp.
  REGION 1..376: note = tr|A0A2I7SMH5|A0A2I7SMH5_9FLAO Queuine tRNA-ribosyltransferase OS=Tamlana sp. UJ94 OX=2069432; GN = tgt PE=3 SV=1
MKFEINAQDSQSKARAGKITTDHGVIETPIFMPVGTVATVKGVHQRELKDEINPDIILGNTYHLYLRPQTKIIEKAGGLHKFMNWDRNILTDSGGYQVYSLSANRKIKEEGVKFKSHIDGSYHTFTPENVMEIQRSIGADIIMAFDECTPYPCDYNYAKRSMHMTHRWLDRCINHLEKTPLKYNYNQAFFPIVQGSTYTDLRKQSAEYIANAGAVGNAIGGLSVGEPAEEMYAMTDVVCSILPEDKPRYLMGVGTPINILENIALGVDMFDCVMPTRNARNGMLFTAHGTINIKNLKWAEDFSPIDEMGITFVDTEYSKAYLRHLFTVNELLGKQIATIHNLGFYLWLVREARKHILAGDFRTWKDMMVKQMNNRL

SEQ ID NO: 61504 - protein, 376 aa, Tamlana sp.
  REGION 1..376: note = tr|A0A5C4SG94|A0A5C4SG94_9FLAO Queuine tRNA-ribosyltransferase OS=Tamlana sp. CW2-9 OX=2583814; GN = tgt PE=3 SV=1
MKFELKSQDTQSKARAGKITTDHGVIETPIFMPVGTLATVKGVHQRELKEEINPDIILGNTYHLYLRPSTDILEKAGGLHKFMNWDRNILTDSGGYQVYSLSANRKIKEEGVKFKSHIDGSYHVFTPENVMEIQRTIGADIIMAFDECTPYPCDYNYAKRSMHMTHRWLDRCINHLEKIPVKYGYSQAFFPIVQGSTYKDLRQQSAEYIANSGAVGNAIGGLSVGEPAEEMYAMTDVVCSILPEDKPRYLMGVGTPINILENIGLGVDMFDCVMPTRNARNGMLFTAHGTINIKNKKWEADFSPIDEMGITYVDTEYSKAYLRHLFTVNELLGKQIATIHNLGFYLWLVREARKHILAGDFRMWKKKMVKQMDNRL

SEQ ID NO: 61505 - protein, 375 aa, unidentified
  source 1..375: note = Tangfeifania diversioriginum
  REGION 1..375: note = tr|A0A1M6MDF1|A0A1M6MDF1_9BACT Queuine tRNA-ribosyltransferase OS=Tangfeifania diversioriginum; OX = 1168035 GN=tgt PE=3 SV=1
MKFKVTATTSNSRARAGVITTDHGTIETPIFMPVGTAGSVKGIHSRDLQEDIKAQIILGNTYHLYLRPGIEVIEKAGGLHKFNRWNGPILTDSGGYQVFSLGDIRKLTEEGARFQSHIDGSYHSFTPENVIDIQRSIGADIMMAFDECTPGDADYAYAKKSLELTQRWLDRCINQFENTQSKYGYSQTLFPIVQGNTFADLRQKAVAHVISHNADGYAIGGLSVGEPEEAMYEMTEICTADLPEDKPRYLMGVGTPINILEGIDRGVDMFDCVMPTRNGRNGMLFTSDGIINIRNKKWQNDHSPVDENGTSFVDQYSKAYLRHLIISNEMLGAQIASQHNLAFYLWLVKTARQKIAEGGFRAWKEEMTERLKERL

SEQ ID NO: 61506 - protein, 376 aa, Tannerella forsythia
  REGION 1..376: note = tr|A0A0E4BI15|A0A0E4BI15_TANFO Queuine tRNA-ribosyltransferase OS=Tannerella forsythia KS16; OX = 1307833 GN=tgt PE=3 SV=1
MKFELVQTDSQSQARAGVMTTDHGIIETPIFMPVGTQGTVKAVHIPELEQDIRAQIILGNTYHLYLRPGLDILEKAGGLHKFNGWNRPILTDSGGFQVFSLAENRKLTSEGAEFRSHIDGSKHFFSPERVMDIERTIGADIMMAFDECCPGDADYGYAEKSLDLTEQWLKRCVKRFNETEPKYGYGQCLFPIVQGCVYPDLRTRAAENVAAIGADGNAIGGLAVGEPTEKMYEMVELVNGILPKDKPRYLMGVGTPVNLLEAIERGVDMFDCIMPTRNGRNGQLFTRFGTMNMRNRKWADDFSPIDPDAHSYVDTLYSRAYLHHLFKADELLALQIASVHNLAFYLWLVREARQHIIAGDFTTWKNSMIGPLSQRI

SEQ ID NO: 61507 - protein, 376 aa, Tannerella forsythia
  REGION 1..376: note = tr|A0A3P1XYF7|A0A3P1XYF7_TANFO Queuine tRNA-ribosyltransferase OS=Tannerella forsythia OX=28112; GN = tgt PE=3 SV=1
MKFELVQTDSQSQARAGVMTTDHGIIETPIFMPVGTQGTVKAVHIPELEQDIRAQIILGNTYHLYLRPGLDILEKAGGLHRFNSWNRPILTDSGGFQVFSLAENRKLTSEGAEFRSHIDGSKHFFSPERVMDIERTIGADIMMAFDECCPGDADYGYAKKSLDLTEQWLKRCVKRFNETEPKYGYSQCLFPIVQGCVYPDLRIRAAENVAEIGADGNAIGGLAVGEPTEKMYEMVELVNGILPKDKPRYLMGVGTPANLLEAIERGVDMFDCIMPTRNGRNGQLFTRFGTMNMRNRKWADDFSPIDPDAHSYVDTLYSRAYLHHLFKADELLALQIASVHNLAFYLWLAREARLHIIAGDFMTWKSSMIGPLSQRI

SEQ ID NO: 61508 - protein, 384 aa, Tannerella sp.
  REGION 1..384: note = tr|R7DFC4|R7DFC4_9BACT Queuine tRNA-ribosyltransferase OS=Tannerella sp. CAG:51; OX = 1262979 GN=tgt PE=3 SV=1
MRQILNKRMDFELQYTDPCSRARAGKITTDHGCINTPIFMPVGTVASVKAVHLHELKEDIKAQIILGNTYHLYLRPGLDTLEKAGGLHKFNGWDRPILTDSGGFQVFSLSENRKLTEEGAHFRSHIDGSKHLFTPEKVVDIQRIIGSDIMMALDECPPGQSDYSYAKKSLQLTQRWLERGWKHFCETEGKYGYKQTFFPIVQGCVYPDLRKDAAKHVAQLGADGNAIGGLAVGEPTEKMYEMIDVVNEILPTDKPRYLMGVGTPANILEGIERGVDMFDCVMPTRNGRNGMLFTANGIMNMRNKKWADDFSPIDPDGTSYVDHQYSKAYLRHLFISNEILAMQIASVHNLAFYVWLTQEARKHILNGTFKTWKDEMIIRVTHRL

SEQ ID NO: 61509 - protein, 376 aa, Tannerella sp.
  REGION 1..376: note = tr|A0A396N4Y5|A0A396N4Y5_9BACT Queuine tRNA-ribosyltransferase OS=Tannerella sp. AF04-6; OX = 2293248 GN=tgt PE=3 SV=1
MDFELQYTDPCSHARAGKITTDHGCINTPIFMPVGTVASVKAVHLHELKEDIKAQIILGNTYHLYLRPGLDTLEKAGGLHKFNGWDRPILTDSGGFQVFSLSENRKLTEEGAHFRSHIDGSKHLFTPEKVVDIQRIIGSDIMMALDECPPGQSDYSYAKKSLQLTQRWLERGWKHFCETEGKYGYKQTFFPIVQGCVYPDLRKDAAKHVAQLGADGNAIGGLAVGEPTEKMYEMIDVVNEILPTDKPRYLMGVGTPANILEGIERGVDMFDCVMPTRNGRNGMLFTANGIMNMRNKKWADDFSPIDPDGTSYVDHQYSKAYLRHLFISNEILAMQIASVHNLAFYVWLTQEARKHILNGTFKTWKDEMIIRVTHRL

SEQ ID NO: 61510 - protein, 383 aa, Tanticharoenia sakaeratensis
  REGION 1..383: note = tr|A0A0D6MNR3|A0A0D6MNR3_9PROT Queuine tRNA-ribosyltransferase OS=Tanticharoenia sakaeratensis NBRC 103193 OX=1231623 GN=tgt PE=3 SV=1
MSAFHWRCSATCGHARAGMLKTAHGDVPTPTFMPVGTAGTVKAMTMDSVRSTGAGIVLGNTYHLMLRPGADRVAALGGLHKMMDWPGPILTDSGGFQVMSLGALRKLDQDGVTFQSHIDGSKHRLTPEISTQIQHKLDATITMAFDECPALPATPENLRKSMELSMRWAARSREAFVQRDGYGQFGIVQGGTERDLREYSVRALADIGFEGYAIGGLAVGEGQALMFETLDYTAPLLPPDRARYLMGVGTPDDLLGAVERGVDMFDCVMPTRAGRTARAYTERGTLNLRNARHANDTRPLSPDCDCLACARHSRAYLHHLFRADEILGPMLLTWHNLAYYQRLMRTIRAAIIADDLPETARALRAGWASEDWTPDEMPYPDLS

SEQ ID NO: 61511 - protein, 377 aa, unidentified
  source 1..377: note = Tardiphaga robiniae
  REGION 1..377: note = tr|A0A164A9E1|A0A164A9E1_9BRAD Queuine tRNA-ribosyltransferase OS=Tardiphaga robiniae OX=943830; GN = tgt PE=3 SV=1
MTVANHFELLRTDGAARRGQLTTPHGVVRTPAFMPVGTLGAMKSLHWREVRDAGADIVLGNTYHLMLRPGAERIASFGGLQKFTTWNGPMLTDSGGFQVMSLAQLRKVTEQGVTFRSHIDGAKFELTPERAIEIQRLLNSDIAMQLDECVRLPAEHADIDRAMQLSLRWAERCKRAFETAPDGYMLFGIAQGGDVPELRRASAQGLIDIGFHGYAIGGLAVGEPQAVMLAMIEEVVPILPSDRPRYLMGVGTPDDMLEAVARGVDMFDCVMPTRNGRHGMAFTRYGQINMRNARHQDDPRPLDEESTWPAARDYSRAYLHHLVRSGETLGAMLLSEINIAYYQSLMQGIRASIEAGTFEEFRARTRECWARGDIPPR

SEQ ID NO: 61512 - protein, 377 aa, unidentified
  source 1..377: note = Tardiphaga sp.
  REGION 1..377: note = tr|A0A2U0TWS6|A0A2U0TWS6_9BRAD Queuine tRNA-ribosyltransferase OS=Tardiphaga sp. OV697 OX=2135487; GN = tgt PE=3 SV=1
MTVANHFELLRTDGTARRGQLTTPHGVVRTPAFMPVGTLGAMKSLHWRDVRDAGADIVLGNTYHLMLRPGAERVASFGGLQKFTTWNGPMLTDSGGFQVMSLAQLRKVTEQGVTFRSHIDGAKFELTPERAIEIQRLLNSDIAMQLDECVRLPAEHADIDRAMQLSLRWAERCKRAFETAPEGYMLFGIAQGGDVPALRRASAQGLIDIGFHGYAIGGLAVGEPQAVMLAMIEEVVPILPSDRPRYLMGVGTPDDMLEAVARGVDMFDCVMPTRNGRHGMAFTRHGQINMRNARHQDDPRPLDEESTWPAARDYSRAYLHHLVRSGETLGAMLLSEINIAYYQSLMQGIRAAIEAGTFEEFRAQTRECWARGDIPSR

SEQ ID NO: 61513 - protein, 377 aa, unidentified
  source 1..377: note = Tardiphaga sp.
  REGION 1..377: note = tr|A0A5A7VMS6|A0A5A7VMS6_9BRAD Queuine tRNA-ribosyltransferase OS=Tardiphaga sp. P9-11 OX=2024614; GN = tgt PE=3 SV=1
MTVANHFELLRTDGAARRGQLTTPHGVVRTPAFMPVGTLGAMKSLHWRDVRDAGADIVLGNTYHLMLRPGAERVASFGGLQKFTTWNGPMLTDSGGFQVMSLAQLRKVTEQGVTFRSHIDGAKFELTPERAIEIQRLLNSDIAMQLDECVRLPAEHADIDRAMQLSLRWAERCKRAFETAPEGYMLFGIAQGGDVPVLRRASAQGLIDIGFHGYAIGGLAVGEPQAVMLAMIEEVVPILPSDRPRYLMGVGTPDDMLEAVARGVDMFDCVMPTRNGRHGMAFTRHGQINMRNARHQDDPRPLDEESTWPAARDYSRAYLHHLVRSGETLGAMLLSEINIAYYQSLMQGIRAAIEAGTFEEFRAQTRECWARGDIPPR

SEQ ID NO: 61514 - protein, 375 aa, Tateyamaria omphalii
  REGION 1..375: note = tr|A0A1P8MT58|A0A1P8MT58_9RHOB Queuine tRNA-ribosyltransferase OS=Tateyamaria omphalii OX=299262; GN = tgt PE=3 SV=1
MSSFSFDLQATDGRARTGVISTPRGEIRTPAFMPVGTAATVKAMMPDSVRATGADVLLGNTYHLMLRPTAERIDRLGGLHRFMNWDRPILTDSGGFQVMSLAGLRKLTEEGVTFKSHIDGSKHALTPERSMEIQRLLGSDIVMCFDECPALPADRDRIAESMRLSMRWARRSRDAFGDRPGHALFGIQQGGLEQDLREESAEALKEIGFEGYAVGGLAVGEGQEAMFSCLDYAPEQLPGDKPRYLMGVGKPDDIVGAVARGIDMMDCVLPSRSGRTGQVFTRRGVVNIKNARHSDDPRPLDEYCTCPACSNYSRAYLHHVFRAQEMISGMLLTWHNLHYYQEIMQGMRDAIAADTFDTWQKVFHATRAQGDIDPL

SEQ ID NO: 61515 - protein, 375 aa, Tateyamaria sp.
  REGION 1..375: note = tr|A0A0B4D2P5|A0A0B4D2P5_9RHOB Queuine tRNA-ribosyltransferase OS=Tateyamaria sp. ANG-S1; OX = 1577905 GN=tgt PE=3 SV=1
MSSFSFDLQATDGRARTGVISTPRGDIRTPAFMPVGTAATVKAMMPESVRATGADILLGNTYHLMLRPTAERIDRLGGLHTFMNWERPILTDSGGFQVMSLAGLRKLTEEGVTFKSHIDGSKHALTPERSMEIQRLLGSDIVMCFDECPALPADRTRIADSMRLSMRWAQRSRDAFGDRPGYALFGIQQGGLEQDLREESAEALKGIGFEGYAIGGLAVGEGQEAMFGCLDYAPEQLPVDKPRYLMGVGKPDDIVGAVARGIDMMDCVLPSRSGRTGQVFTRRGVINIKNARHADDPRPLDEDCNCPACSNYSRAYLHHVFRSNEMIAGMLLTWHNLHYFQEIMQGMRDAIAAGTFEAWQADFHAMRARGDIEPL

SEQ ID NO: 61516 - protein, 383 aa, Tatlockia micdadei
  REGION 1..383: note = tr|A0A098GKM7|A0A098GKM7_TATMI Queuine tRNA-ribosyltransferase OS=Tatlockia micdadei OX=451; GN = tgt PE=3 SV=1
MNKFSSELIKKHAYTKARVTRISTPHGDFLTPVFMPVGTRAGVNNMTPRELLEAGSQIVLGGNTYHMLCAPGMSVIEKAGGMHPFMGWHGPMLTDSGGFQVFSLSKNKEICSIDEEGAHFRLPGSTRLIHMTPEMSLETQKIIGADIIMAFDQCTPDHCSREEVKRIMKRTHRWLRQSIDYHQKYPTSRYGATQALFGIVQGGIYEDLRQESADFITSMNPDGIAIGGETVGFNMKTTIDIIRWINKYLPENKPRYTMGVGMSPQDLLDVVAEGIDMFDCVAPTRNARHGSLYCGELIKEGNWLRFASPYENARIQIKKACFASDLEPIMPSCTCYTCQHHSRAFLHHLSKQRANLFTALASIHNVHVMNEVCAKMRDLIFSS

SEQ ID NO: 61517 - protein, 374 aa, Tatumella citrea
  REGION 1..374: note = tr|A0A1Y0L658|A0A1Y0L658_TATCI Queuine tRNA-ribosyltransferase OS=Tatumella citrea OX=53336; GN = tgt PE=3 SV=1
MKFELMKTDGRARRGRLVFDRGVVETPAFMPVGTYGTVKGMTPEEVRETGAQIILGNTFHLWLRPGQEIMKLHGDLHDFMQWQGPILTDSGGFQVFSLGDIRKITEAGVHFRNPINGDPIFLDPEKSMEIQYDLGSDIVMIFDECTPYPADWDYAKRSMEMSLRWAKRSRDRFDSLGNKNALFGIIQGSVYEDLRDVSVKGLVEIGFDGYAVGGLAVGEPKADMHRILEHVCPQIPEDKPRYLMGVGKPEDLVEGVRRGVDMFDCVMPTRNARNGHLFVTDGVVKIRNAKHKDDTSPLDAECDCYTCRHYSRAYLHHLDRCNEILGARLNTIHNLRYYQRLMAGLRKAIEDDKLEHFVADFYQKTGKDVPALNV

SEQ ID NO: 61518 - protein, 374 aa, Tatumella morbirosei
  REGION 1..374: note = tr|A0A095TES0|A0A095TES0_9GAMM Queuine tRNA-ribosyltransferase OS=Tatumella morbirosei OX=642227; GN = tgt PE=3 SV=1
MKFELMKTDGRARRGRLVFDRGVVETPAFMPVGTYGTVKGMTPEEVKDTGAQIILGNTFHLWLRPGQEIMKLHGDLHDFMQWQGPILTDSGGFQVFSLGDIRKITEAGVHFRNPINGDPIFLDPEKSMEIQYDLGSDIVMIFDECTPYPADRDYAKRSMEMSLRWAKRSRDRFDSLGNKNALFGIIQGSVYEDLRDVSVKGLVEIGFDGYAVGGLAVGEPKEDMHRILEHVCPQIPEDKPRYLMGVGKPQDLVEGVRRGVDMFDCVMPTRNARNGHLFVTDGVVKIRNAKHKDDTSPLDAECDCYTCRHYSRAYLHHLDRCNEILGARLNTIHNLRYYQRLMAGLRKAIEDDKLEHFVADFYQRTGKDVPALNV

SEQ ID NO: 61519 - protein, 374 aa, Tatumella ptyseos
  REGION 1..374: note = tr|A0A085JAV3|A0A085JAV3_9GAMM Queuine tRNA-ribosyltransferase OS=Tatumella ptyseos ATCC 33301; OX = 1005995 GN=tgt PE=3 SV=1
MKFELITTEGRARRGRLVFDRGVVETPAFMPVGTYGTVKGMTPEEVKDTGAQIILGNTFHLWLRPGQEIMKLHGDLHDFMQWQGPILTDSGGFQVFSLGDIRKITEAGVHFRNPINGDAIFLDPEKSMEIQYDLGSDIVMIFDECTPYPADHDYAKRSMEMSLRWAKRSRDRFDSLGNKNALFGIIQGSVYEDLRDVSVKGLVEIGFDGYAVGGLAVGEPKEDMHRILEHVCPQIPEDKPRYLMGVGKPEDLVEGVRRGVDMFDCVMPTRNARNGHLFVTDGVVKIRNAKHKDDTSPLDAECDCYTCRHYTRAYLHHLDRCNEILGARLNTIHNLRYYQRLMAGLRQAIEDGNLEQFVTDFYQRKGKDVPALNV

SEQ ID NO: 61520 - protein, 374 aa, Tatumella ptyseos; identical to SEQ ID NO: 61519
  REGION 1..374: note = tr|A0A2X5PHV3|A0A2X5PHV3_9GAMM Queuine tRNA-ribosyltransferase OS=Tatumella ptyseos OX=82987; GN = tgt PE=3 SV=1

SEQ ID NO: 61521 - protein, 374 aa, Tatumella sp.
  REGION 1..374: note = tr|A0A2G8C5X7|A0A2G8C5X7_9GAMM Queuine tRNA-ribosyltransferase OS=Tatumella sp. OPLPL6 OX=1928657; GN = tgt PE=3 SV=1
MKFEYIKRDGRARRGRLVFDRGVVETPAFMPVGTYGTVKGMTPEEVKETGAQILLGNTFHLWLRPGQEIMKLHGDLHDFMQWQGPILTDSGGFQVFSLGDIRKITEKGVHFRNPINGDPIFLDPEKSMEIQHDLGSDIVMIFDECTPYPADWDYAKRSMEMSLRWAQRSRDRFDELGNKNALFGIVQGGVYEDLRDISVKGLVEIGFDGYAVGGLAVGEPKADMHRILEHVCPQLPEEKPRYLMGVGKPEDLVEGVRRGIDMFDCVMPTRNARNGHLFVTDGVVKIRNAKHKSDTSPLDAECDCYTCKHYTRAYLYHLDRCNEILGARLNTIHNLRYYQRLMAGLRQAIEDDRLEEFVADFYTKIGKEVPALPF

SEQ ID NO: 61522 - protein, 381 aa, Taylorella asinigenitalis
  REGION 1..381: note = tr|G4QA08|G4QA08_TAYAM Queuine tRNA-ribosyltransferase OS=Taylorella asinigenitalis (strain MCE3) OX=1008459 GN=tgt PE=3 SV=1
MLESKFKFEVLKTQGKARRATMTLNHGAVQTPMFMPVGTYGCVKAMLPSDLKEVGSQVILGNTFHLWLRPGTEVIEKHGGLHGFMNWDQPILTDSGGFQVFSLSDLRSKIYEEGVKFSSPIDGAKLFLTPEESMRIQKSLNSDIVMVFDECTPYLIKDRPATHEEAAKSMRMSLRWAKRSKTAFEELRNPNALFGIVQGGMYDDLRIESLHGLKEIGFHGYAIGGLSVGEPKEEMNRIIEFLAHQLPEDAPRYLMGVGTPEDLVYGVAHGIDMFDCVMPTRNARNGTLFTRYGDLKIRNARYKDDMRPVDPSLPPNTSSKFSRAYLHHLQKTNEISGSRLNTIHNLMFYLHIMKEMREAIELGSFTEWVAKFHEDRARGIE

SEQ ID NO: 61523 - protein, 381 aa, Taylorella asinigenitalis
  REGION 1..381: note = tr|I7JMW7|I7JMW7_9BURK Queuine tRNA-ribosyltransferase OS=Taylorella asinigenitalis 14/45; OX = 1091495 GN=tgt PE=3 SV=1
MLESKFKFEVLKTQGKARRATMTLNHGAVQTPMFMPVGTYGCVKAMLPSDLKEVGSQVILGNTFHLWLRPGTEVIEKHGGLHGFMNWDQPILTDSGGFQVFSLSDLRSKIYEEGVKFSSPIDGAKLFLTPEESMRIQKSLNSDIVMVFDECTPYLIKDRPATHEDAAKSMRMSLRWAKRSKTAFEELRNPNALFGIVQGGMYDDLRIESLHGLKEIGFHGYAIGGLSVGEPKEEMNRIIEFLAHQLPEDAPRYLMGVGTPEDLVYGVAHGIDMFDCVMPTRNARNGTLFTRYGDLKIRNARYKDDMRPVDPSLPPNTSSKFSRAYLHHLQKTNEISGSRLNTIHNLMFYLHIMKEMREAIELGSFTEWVAKFHEDRARGIE

SEQ ID NO: 61524 - protein, 381 aa, Taylorella equigenitalis
  REGION 1..381: note = tr|I7IAU2|I7IAU2_9BURK Queuine tRNA-ribosyltransferase OS=Taylorella equigenitalis 14/56; OX = 1091497 GN=tgt PE=3 SV=1
MIDSKFKFEVLQTQGKARRASLTLNHGTVQTPMFMPVGTYGCVKAMLPADLKEVGSQVILGNTFHLWLRPGIEVIEKHGGLHGFMNWDQPILTDSGGFQVFSLSDLRSKITEEGVKFSSPIDGAKLFLTPEESMRIQKSLNSDIVMVFDECTPYIIKDRPATHEEAAKSMRMSLRWARRSKDAFEKLNNPNALFGIVQGGMFDDLRIESLKGLTDIGFHGYAIGGLSVGEPKEEMNRIIEFLAHQLPADAPRYLMGVGTPEDLVYGVAQGIDMFDCVMPTRNARNGTLFTRYGDLKIRNARYKDDMRPVDDSLPPNTSSKFTRSYLHHLQKTNEISGARLNTIHNLMFYLHIMKEMREALEKGSFLEWVAKFHEDRARGIE

SEQ ID NO: 61525 - protein, 375 aa, Telmatospirillum siberiense
  REGION 1..375: note = tr|A0A2N3PPI6|A0A2N3PPI6_9PROT Queuine tRNA-ribosyltransferase OS=Telmatospirillum siberiense; OX = 382514 GN=tgt PE=3 SV=1
MSAFGFRHLGSDGRARLGEVSTAHGVIHTPAFMPVGTVGTVKAMTPESVASTGAEIILGNTYHLMLRPTAERVERFGGLHRFMNWPGPILTDSGGFQVMSLAKLRTMTEEGVTFQSHLDGSRHTLTPERSMEIQRMLDSDITMSFDECTAFPASEEVAATSMRLSMRWAKRSRAAFSERPGYGLFGIVQGSVYPELRAESVAALTDIGFHGYAVGGLAVGEGQEEMFRILDVTTPLLPEDRPRYLMGVGKPSDIVGSVMRGIDMFDCVMPTRSGRTGQAFTRRGPVNIRNARHQEDPRPLDEACGCPACRSYSRAYLHHLARAEEVLGLMLMTWHNLHYYQDLMRELRAAIAEGRLSRYAADFAALQAEGDIAPL

SEQ ID NO: 61526 - protein, 376 aa, unidentified
  source 1..376: note = Tenacibaculum caenipelagi
  REGION 1..376: note = tr|A0A4R6TGY6|A0A4R6TGY6_9FLAO Queuine tRNA-ribosyltransferase OS=Tenacibaculum caenipelagi; OX = 1325435 GN=tgt PE=3 SV=1
MQFDLKITDPKSKARAGVITTDHGTIETPIFMPVGTVATVKGVHQSELKDEVNPDIILGNTYHLYLRPQTSILEQAGGLHKFMNWDRNILTDSGGYQVYSLSGRRKINEEGVKFKSHIDGSTHFFTPENVMEIQRSIGADIIMAFDECTPYPCDYSYAKQSMHMTHRWLKRCVNHLEKVPPKYGYNQTLFPIVQGSTYTDLRKQSAEFIASVEAEGNAIGGLSVGEPAEEMYAMTEVVTAILPEDKPRYLMGVGTPINILENIALGVDMFDCVMPTRNARNGMLFTAHGSINIKNKKWENDFSPIDEMDITYVDTMYSKAYLRHLFASREMLGKQIASIHNLGFYLWLVREARKHIIAGDFATWKDKMVKQMDKRL

SEQ ID NO: 61527 - protein, 376 aa, Tenacibaculum dicentrarchi
  REGION 1..376: note = tr|A0A0U3KE02|A0A0U3KE02_9FLAO Queuine tRNA-ribosyltransferase OS=Tenacibaculum dicentrarchi; OX = 669041 GN=tgt PE=3 SV=1
MQFDLKITDPKSKARAGVITTDHGIIETPIFMPVGTVGTVKGVHQSELKDEINPDIILGNTYHLYLRPKLKTLEAAGGLHKFMNWDRNILTDSGGYQVYSLSGRRKINEEGVKFKSHIDGSMHFFTPENVMETQRTIGADIIMAFDECTPYPCDYNYAKRSMHMTHRWLTRCVNHLEKVPFKYGHKQAFFPIVQGSTYKDLRKQSAEYIASVGAEGNAIGGLSVGEPADELYAMTEVVTAILPEDKPRYLMGVGTPINILENIALGIDMFDCVMPTRNARNGMLFTAHGSINIKNKKWENDFSPIDDMGITYVDTMYSKAYLRHLFAAKEMLGKQIASIHNLGFYLWLTREARKHIIAGDFVQWKDKMVKQMDNRL

SEQ ID NO: 61528 - protein, 376 aa, Tenacibaculum dicentrarchi
  REGION 1..376: note = tr|A0A2H1XM16|A0A2H1XM16_9FLAO Queuine tRNA-ribosyltransferase OS=Tenacibaculum dicentrarchi; OX = 669041 GN=tgt PE=3 SV=1
MQFDLKITDPKSKARAGVITTDHGTIETPIFMPVGTVGTVKGVHQSELKDEINPDIILGNTYHLYLRPKLKTLEAAGGLHKFMNWDRNILTDSGGYQVYSLSGRRKINEEGVKFKSHIDGSMHFFTPENVMETQRTIGADIIMAFDECTPYPCDYNYAKRSMHMTHRWLTRCVNHLEKLPFKYGYKQAFFPIVQGSTYKDLRKQSAEYIASVGAEGNAIGGLSVGEPAEELYAMTEVVTAILPEDKPRYLMGVGTPINILENIALGIDMFDCVMPTRNARNGMLFTAHGSINIKNKKWENDFSPIDDMGITYVDTMYSKAYLRHLFAAKEMLGKQIASIHNLGFYLWLTREARKHIIAGDFVQWKDKMIKQMDNRL

SEQ ID NO: 61529 - protein, 376 aa, Tenacibaculum discolor
  REGION 1..376: note = tr|A0A497YZF7|A0A497YZF7_9FLAO Queuine tRNA-ribosyltransferase OS=Tenacibaculum discolor; OX = 361581 GN=tgt PE=3 SV=1
MQFDLKITDPKSKARAGVITTDHGTIETPIFMPVGTVATVKGVHQSELKDEINPDIILGNTYHLYLRPKLETLEAAGGLHKFMNWDRNILTDSGGYQVYSLSGRRKINEEGVKFKSHIDGSTHFFTPENVMETQRTIGADIIMAFDECTPYPCDYNYAKRSMHMTHRWLDRCIKHFENTPPKYGYSQSLFPIVQGSTYKDLRKQSAEYIANSGAEGNAIGGLSVGEPAEEMYAMTEVVTAILPEDKPRYLMGVGTPINILENIALGVDMFDCVMPTRNARNGMLFTAHGSINIKNKKWEKDFSPIDEMGITWVDNMYSKAYLRHLFASREMLGKQIASIHNLGFYLWLVREARKHIIAGDFASWKDKMVKQMDKRL

SEQ ID NO: 61530 - protein, 376 aa, unidentified
  source 1..376: note = Tenacibaculum finnmarkense
  REGION 1..376: note = tr|A0A2H1XZZ7|A0A2H1XZZ7_9FLAO Queuine tRNA-ribosyltransferase OS=Tenacibaculum finnmarkense; OX = 1680763 GN=tgt PE=3 SV=1
MQFDLKITDPKSKARAGVITTDHGIIETPIFMPVGTVGTVKGVHQSELKDEINPDIILGNTYHLYLRPKLETLEAAGGLHKFMNWDRNILTDSGGYQVYSLSGRRKINEEGVVFKSHIDGSSHFFSPENVMETQRTIGADIIMAFDECTPYPCDYNYAKRSMHMTHRWLKRCVNHLEKVPFKYGHKQAFFPIVQGSTYKDLRKQSAEYIASVGAEGNAIGGLSVGEPADELYAMTEVVTAILPEDKPRYLMGVGTPINILENIALGIDMFDCVMPTRNARNGMLFTAHGSINIKNKKWENDFSPIDDMAITYVDTMYSKAYLRHLFAAKEMLGKQIASIHNLGFYLWLTREARKHIIAGDFVQWKDKMVKQMDNRL

SEQ ID NO: 61531 - protein, 379 aa, unidentified
  source 1..379: note = Tenacibaculum finnmarkense
  REGION 1..379: note = tr|A0A2I2MCQ2|A0A2I2MCQ2_9FLAO Queuine tRNA-ribosyltransferase OS=Tenacibaculum finnmarkense; OX = 1680763 GN=tgt PE=3 SV=1
MSPMQFDLKITDPKSKARAGVITTDHGTIETPIFMPVGTVGTVKGVHQSELKDEINPDIILGNTYHLYLRPKLKTLEAAGGLHKFMNWDRNILTDSGGYQVYSLSGRRKINEEGVKFKSHIDGSMHFFTPENVMETQRTIGADIIMAFDECTPYPCDYNYAKRSMHMTHRWLTRCVNHLEKVPFKYGHKQAFFPIVQGSTYKDLRKQSAEYIASVGAEGNAIGGLSVGEPADELYAMTEVVTAILPEDKPRYLMGVGTPINILENIALGIDMFDCVMPTRNARNGMLFTAHGSINIKNKKWENDFSPIDDMGITYVDTMYSKAYLRHLFAAKEMLGKQIASIHNLGFYLWLTREARKHIIAGDFVQWKDKMVKQMDNRL

SEQ ID NO: 61532 - protein, 376 aa, Tenacibaculum gallaicum
  REGION 1..376: note = tr|A0A3E0I143|A0A3E0I143_9FLAO Queuine tRNA-ribosyltransferase OS=Tenacibaculum gallaicum; OX = 561505 GN=tgt PE=3 SV=1
MQFDLKITDPKSKARAGVITTDHGTIETPIFMPVGTVATVKGVHQSELKDEINPDIILGNTYHLYLRPKLETLEAAGGLHKFMNWDRNILTDSGGYQVYSLSGRRKINEEGVKFKSHIDGSTHFFTPENVMETQRTIGADIIMAFDECTPYPCDYNYAKRSMHMTHRWLDRCIKHFEKTPPKYGYSQSLFPIVQGSTYKDLRKQSAEYIANSGAEGNAIGGLSVGEPAEEMYAMTEVVTAILPEDKPRYLMGVGTPINILENIALGVDMFDCVMPTRNARNGMLFTAHGSINIKNKKWEKDFSPIDEMGITWVDTMYSKAYLRHLFASREMLGKQIASIHNLGFYLWLTREARKHIIAGDFAEWKDKMVKQMDKRL

SEQ ID NO: 61533 - protein, 376 aa, unidentified
  source 1..376: note = Tenacibaculum holothuriorum
  REGION 1..376: note = tr|A0A1Y2PHB6|A0A1Y2PHB6_9FLAO Queuine tRNA-ribosyltransferase OS=Tenacibaculum holothuriorum; OX = 1635173 GN=tgt PE=3 SV=1
MQFELKTNDPKSKARAGVITTDHGTIETPIFMPVGTVGTVKGVHQSELKDEINPDIILGNTYHLYLRPQTKILEEAGGLHKFMNWDRNILTDSGGYQVYSLSGRRKINEEGVKFKSHIDGSTHFFTPENVMEIQRSIGADIIMAFDECTPYPCDYGYAKRSMHMTHRWLKRCVNHLEKVPPKYGYNQTLFPIVQGSTYTDLRKESAEFIASVGAEGNAIGGLSVGEPAEEMYAMTDVVCSILPEDKPRYLMGVGTPINILENIALGVDMFDCVMPTRNARNGMLFTAHGSINIKNKKWENDFSPIDEMGITWVDTMYSKAYLRHLFAAREMLGKQIASIHNLGFYLWLTREARKHIIAGDFAEWKDKMVKQMNKRL

SEQ ID NO: 61534 - protein, 376 aa, Tenacibaculum jejuense
  REGION 1..376: note = tr|A0A238UB54|A0A238UB54_9FLAO Queuine tRNA-ribosyltransferase OS=Tenacibaculum jejuense; OX = 584609 GN=tgt PE=3 SV=1
MQFDLKLKDPKSKARAGVITTDHGTIETPIFMPVGTVASVKGVHQSELKDEINPDIILGNTYHLYLRPKTDILEQAGGLHKFMNWDRNILTDSGGYQVYSLSGRRKINEEGVKFKSHIDGSTHFFTPENVMEIQRSIGADIIMAFDECTPYPCDYNYAKNSMHMTHRWLKRCINHLEKTPLKYDYNQTLFPIVQGSTYTDLRKQSAEFIASVEAEGNAIGGLSVGEPAEEMYAMTDVVCSILPEDKPRYLMGVGTPINILENIALGVDMFDCVMPTRNARNGMLFTAHGTINIKNKKWENDFSAIDEMGITFVDTLYSKAYLRHLFASKELLGKQIASIHNLGFYLWLVREARKHILEGDFAVWKDKMVKQMSKRL

SEQ ID NO: 61535 - protein, 376 aa, Tenacibaculum litoreum
  REGION 1..376: note = tr|A0A427SA75|A0A427SA75_9FLAO Queuine tRNA-ribosyltransferase OS=Tenacibaculum litoreum; OX = 321269 GN=tgt PE=3 SV=1
MQFDLKITDPKSKARAGVITTDHGTIETPIFMPVGTVATVKGVHQSELKDEINPDIILGNTYHLYLRPKLETLEAAGGLHKFMNWNRNILTDSGGYQVYSLSGRRKINEEGVKFKSHIDGSMHFFTPENVMETQRTIGADIIMAFDECTPYPCDYNYAKRSMHMTHRWLDRCIKHFENTPPKYGYSQSLFPIVQGSTYKDLRKQSAEYIANSGAEGNAIGGLSVGEPAEEMYAMTEVVTEILPEDKPRYLMGVGTPINILENIALGVDMFDCVMPTRNARNGMLFTAHGSINIKNKKWENDFSPIDEMGITWVDTMYSKAYLRHLFASREMLGKQIASIHNLGFYLWLVREARKHIIAGDFATWKDKMVKQMDKRL

SEQ ID NO: 61536 - protein, 376 aa, Tenacibaculum lutimaris
  REGION 1..376: note = tr|A0A420E0P9|A0A420E0P9_9FLAO Queuine tRNA-ribosyltransferase OS=Tenacibaculum lutimaris; OX = 285258 GN=tgt PE=3 SV=1
MQFDLKITDPKSKARAGVITTDHGTIETPIFMPVGTVATVKGVHQSELKEEINPDIILGNTYHLYLRPQTSILEQAGGLHKFMNWDRNILTDSGGYQVYSLSGRRKINEEGVKFKSHIDGSTHFFTPENVMDTQRTIGADIIMAFDECTPYPCDYNYAKRSMHMTHRWLDRCIKHFNNTPPKYGYNQTLFPIVQGSTYKDLRKQSAEYIANSGAEGNAIGGLSVGEPAEEMYAMTEVVTAILPEDKPRYLMGVGTPINILENIALGVDMFDCVMPTRNARNGMLFTAHGSINIKNKKWENDFSPIDEMGITWVDTMYSKAYLRHLFASREMLGKQIASIHNLGFYLWLVREARKHIIAGDFATWKDKMVKQMDKRL

SEQ ID NO: 61537 - protein, 379 aa, Tenacibaculum maritimum
  REGION 1..379: note = tr|A0A2H1E978|A0A2H1E978_9FLAO Queuine tRNA-ribosyltransferase OS=Tenacibaculum maritimum NCIMB 2154 OX=1349785 GN=tgt PE=3 SV=1
MPPMQFDLKTKDPKSKARAGVITTDHGTIETPIFMPVGTVGTVKGVHQTELKNEINPDIILGNTYHLYLRPQTSILEQAGGLHKFMNWDRNILTDSGGYQVYSLSGRRKINEEGVKFKSHIDGSTHFFTPESVMEIQRSIGADIIMAFDECTPYPCDYNYAKRSMHMTHRWLKRCVNHLEKTPLKYDYSQTLFPIVQGSTYKDLRKQSAEFIASVGAEGNAIGGLSVGEPAEEMYAMTEVVTAILPEDKPRYLMGVGTPINILENIALGIDMFDCVMPTRNARNGMLFTAHGTINIKNKKWENDFSAIDEMGITFVDTLYSKAYLRHLFASKELLGKQIASIHNLGFYLWLTREARKHILAGDFAVWKDKMVKQMDKRL

SEQ ID NO: 61538 - protein, 376 aa, Tenacibaculum mesophilum
  REGION 1..376: note = tr|A0A1M5F803|A0A1M5F803_9FLAO Queuine tRNA-ribosyltransferase OS=Tenacibaculum mesophilum; OX = 104268 GN=tgt PE=3 SV=1
MQFDLKITDPKSKARAGVITTDHGTIETPIFMPVGTVATVKGVHQSELKDEINPDIILGNTYHLYLRPKLETLEAAGGLHKFMNWDRNILTDSGGYQVYSLSGRRKINEEGVKFKSHIDGSTHFFTPENVMETQRTIGADIIMAFDECTPYPCDYNYAKRSMHMTHRWLDRCIKHFENTPPKYGYSQSLFPIVQGSTYKDLRKQSAEYIANSGAEGNAIGGLSVGEPAEEMYAMTEVVTEILPEDKPRYLMGVGTPINILENIALGVDMFDCVMPTRNARNGMLFTAHGSINIKNKKWENDFSPIDEMGITWVDTMYSKAYLRHLFAAREMLGKQIASIHNLGFYLWLVREARKHIIAGDFTEWKDKMVKQMDKRL

SEQ ID NO: 61539 - protein, 376 aa, Tenacibaculum skagerrakense
  REGION 1..376: note = tr|A0A4R2NJ78|A0A4R2NJ78_9FLAO Queuine tRNA-ribosyltransferase OS=Tenacibaculum skagerrakense; OX = 186571 GN=tgt PE=3 SV=1
MQFKLESTDPKSKARAGVITTDHGTIETPIFMPVGTVASVKGVHQSELKNEINPDIILGNTYHLYLRPQTDILEKAGGLHKFMNWDRNILTDSGGYQVYSLSGRRKINEEGVKFKSHIDGSMHFFTPENVMEIQRSIGADIIMAFDECTPYPCDYNYAKSSMHMTHRWLKRCIEHLGKVPPKYGYEQTLFPIVQGSTYKDLRKQSAEFIASVEAEGNAIGGLSVGEPAEEMYAMTDVVCQILPEDKPRYLMGVGTPINILENIALGVDMFDCVMPTRNARNGMLFTAHGTINIKNKKWESDFSPIDEMGITFVDTLYSKAYLRHLFASKELLGKQIASIHNLGFYLWLVREARKHIKAGDFADWKDKMVKQMSNRL

SEQ ID NO: 61540 - protein, 376 aa, Tenacibaculum soleae
  REGION 1..376: note = tr|A0A1B9XXV0|A0A1B9XXV0_9FLAO Queuine tRNA-ribosyltransferase OS=Tenacibaculum soleae OX=447689; GN = tgt PE=3 SV=1
MQFDLKTTDPKSKARAGVITTDHGTIETPIFMPVGTVGTVKGVHQSELKNEINPDIILGNTYHLYLRPKLETLEAAGGLHKFMNWDRNILTDSGGYQVYSLSGRRKINEEGVKFKSHIDGSMHFFTPENVMETQRTIGADIIMAFDECTPYPCDYNYAKRSMHMTHRWLKRCVNHLEKLPFKYGYEQTFFPIVQGSTYKDLRKQSAEYIASVGAQGNAIGGLSVGEPAEELYGMTEVVTAILPEDKPRYLMGVGTPINILENIALGIDMFDCVMPTRNARNGMLFTAHGSINIKNKKWEQDFSPIDEMGITWVDTMYSKAYLRHLFAAKEMLGKQIASIHNLGFYLWLTREARKHIIAGDFTQWKDKMVKQMDNRL

SEQ ID NO: 61541 - protein, 376 aa, Tenacibaculum sp.
  REGION 1..376: note = tr|A0A2H1YGM9|A0A2H1YGM9_9FLAO Queuine tRNA-ribosyltransferase OS=Tenacibaculum sp. TNO020; OX = 1458515 GN=tgt PE=3 SV=1
MEFDLKITDPKSKARAGVITTDHGTIETPIFMPVGTVGTVKGVHQSELKDEINPDIILGNTYHLYLRPKLETLEAAGGLHKFMNWDRNILTDSGGYQVYSLSGRRKINEQGVKFKSHIDGSMHFFTPENVMETQRTIGADIIMAFDECTPYPCDYNYAKRSMHMTHRWLTRCINHLEKLPFKYGHEQTFFPIVQGSTYKDLRQQSAEYIASVGAQGNAIGGLSVGEPAEELYAMTEIVTAILPEDKPRYLMGVGTPINILENIALGIDMFDCVMPTRNARNGMLFTAHGSINIKNKKWEQDFSPIDEMGITYVDTMYSKAYLRHLFAAKEMLGKQIASIHNLGFYLWLTREARKHIIAGDFTQWKDKMVKQMDNRL

SEQ ID NO: 61542 - protein, 376 aa, Tenacibaculum sp.
  REGION 1..376: note = tr|A0A1H5IPI8|A0A1H5IPI8_9FLAO Queuine tRNA-ribosyltransferase OS=Tenacibaculum sp. MAR_2010_89; OX = 1250198 GN=tgt PE=3 SV=1
MQFDLKITDPKSKARAGVITTDHGTIETPIFMPVGTVATVKGVHQSELKEQINPDIILGNTYHLYLRPQTKILEQAGGLHKFMNWDRNILTDSGGYQVYSLSGRRKINEEGVKFKSHIDGSTHFFTPENVMETQRTIGADIIMAFDECTPYPCDYNYAKRSMHMTHRWLKRCINHLEKTPLKYDYNQTFFPIVQGSTYKDLRKQSAEYIASVGAEGNAIGGLSVGEPAEELYAMTEVVTEILPEDKPRYLMGVGTPINILENIALGIDMFDCVMPTRNARNGMLFTAHGSINIKNKKWENDFSPIDEMGITHVDTMYSKAYLRHLFASKEMLGKQIASIHNLGFYLWLTREARKHILAGDFVEWKDKMVKQMDKRL

SEQ ID NO: 61543 - protein, 376 aa, unidentified
  source 1..376: note = Tenacibaculum todarodis
  REGION 1..376: note = tr|A0A1L3JFZ5|A0A1L3JFZ5_9FLAO Queuine tRNA-ribosyltransferase OS=Tenacibaculum todarodis; OX = 1850252 GN=tgt PE=3 SV=1
MKFDLHTTDQKSKARAGTITTDHGTIETPIFMPVGTVGTVKGVHQSELKDQINPDIILGNTYHLFLRPKLEVLEAAGGLHKFMNWDRNILTDSGGYQVYSLSGRRKIKEEGVKFKSHIDGSTHFFSPENVMETQRTIGADIIMAFDECTPYPCDYNYAKRSMHMTHRWLDRCINHLEKLPFKYGYEQTFMPIVQGSTYKDLRRQSAEYIANSGQQANAIGGLSVGEPAEEMYAMTEVVTEILPEDKPRYLMGVGTPINILENIALGIDMFDCVMPTRNARNGMLFTAHGSINIKNKKWEQDFSPIDDMGITWVDTMYSKAYLRHLFVAKEMLGKQIASIHNLGFYVWLTREARKHIIAGDFREWKDKMVKQMDNRL

SEQ ID NO: 61544 - protein, 371 aa, unidentified
  source 1..371: note = Tenericutes bacterium
  REGION 1..371: note = tr|A0A2K9AVN0|A0A2K9AVN0_9BACT Queuine tRNA-ribosyltransferase OS=Tenericutes bacterium MZ-XQ; OX = 1911683 GN=tgt PE=3 SV=1
MSIKFEVLHTCKQSGARLGKLTTPHGVFETPFFMPVGTQATVKTLTPEEIKEVSEGLILGNTYHLWLQPGNDIVKEHGGIRGFMQWDGALLTDSGGFQVFSLTDMRKITEEGVFFKHHKNGSQLFMSPEDSIKVQEDLGADIIMSFDECPPPYASYEYMKDSVDRTLRWAKRGKDALTTDQALFGIVQGGLDKELRKYSAEELIKMDFPGYSIGGLSVGETKEEMYEITKFLNPILPVDKPRYLMGVGAPDDLVENVINGMDMFDCVLPTRIARHGTALTTEGKVVIKNATYERDYTPLDPNLDTHVKKYTKSYIRHLFKGNEILGMRLVTYQNLAYLKHLMQEIRQAIKEDRLLDFKEEMKQKTNYFKTR

SEQ ID NO: 61545 - protein, 334 aa, unidentified
  source 1..334: note = Tenericutes bacterium
  REGION 1..334: note = tr|A0A1G3VUW3|A0A1G3VUW3_9BACT Queuine tRNA-ribosyltransferase (Fragment) OS=Tenericutes bacterium GWD2_38_27 OX=1802348 GN=A2009_03535 PE=3 SV=1
TQATVKTLTVEEVKEVSDGMILGNTYHLWLQPGEDIVKEHGGIRGFMQWDGALLTDSGGYQVFSLTDMRKITEEGVHFKHHKNGSSLFMSPENSIKIQESLGADIIMSFDECPPPYETDEYMKTSVDRTLRWAKRGKDVLSTDQALFGIVQGGLNKEIRKYCTEELIKMDFPGYSIGGLSVGETKHEMYEMTKYLNPILPFDKPRYLMGVGSPDDLVENVINGIDMFDCVLPTRIARHGSALTTEGKIVIKNQTYERDFKPLDPNLQTPVSKYTRSYIRHLFKGEEMLGMRLVTYQNLAYLKHLMKEIRQAILEDRLLDYKDEMKKKTNYFKSH

SEQ ID NO: 61546 - protein, 394 aa, unidentified
  source 1..394: note = Tengunoibacter tsumagoiensis
  REGION 1..394: note = tr|A0A401ZTQ5|A0A401ZTQ5_9CHLR Queuine tRNA-ribosyltransferase OS=Tengunoibacter tsumagoiensis; OX = 2014871 GN=tgt PE=3 SV=1
MPPFSFSIEAECPETWARAGTIQTPHGPIHTPIFMPVGTQATVKSVSPEELRAAQAQIILSNTYHLMLRPGSDLIASFGGLHSFMHWDGPILTDSGGFQVWSLGNLRKLNEDGVVFKSHIDGSLHTLTPERVMEIEAELGSDIVLPLDICSPYPCTLAEARKAMEWTHRWEERALVAKERHNPDQTLFGIVQGAFEPELRRESARIIGNMPFKGLSIGGLSVGEPKEQMWGMLRHVTPELPRDKPRHLLGVGSPEDLVEGVGLGMDMFDCVLPTRVARHGGLFTRDGRVSIKGARFRMEHGPIEDGCDCYTCQHYSAAYVHHLARAEEQLYFRLGTIHNIRFMLRLAAELRSSILNGTYVAFREAFLARYVPASEKVREAQREKWKAAREQRQS

SEQ ID NO: 61547 - protein, 383 aa, unidentified
  source 1..383: note = Tengunoibacter tsumagoiensis
  REGION 1..383: note = tr|A0A402A5E0|A0A402A5E0_9CHLR Queuine tRNA-ribosyltransferase OS=Tengunoibacter tsumagoiensis; OX = 2014871 GN=KTT_41480 PE=3 SV=1
MSQVTTSNLSSSTSQSQDQYGTLSLPHGEIQLPIYMPDATLAVVRSLDAADLENCSVEAVVMNTFHLMQKPGSSTIQALGGLHKMSGWQRPIVADSGGFQAYSLIQQNAKFGSLSDDGITFKPEGADRKFQLTPEKAIQLQLSYDADVVMCLDYCTHVDAPEQIQADAVMHTIDWAKRCKKEFERLLKQKKFPAGKQPMLFGVIQGGGSFELRKRCAEALLEIGFDGFGYGGWPLDGQGKLLTEIITYTRELIPAHYQMHALGVGHPANIADCTKIGYGIFDSAMPTRDARHARLYAFTGPQSSFAAGEKWFHYVYANDDKYIKTDQPVSPYCDCLCCQRYSLGYLRHLFKINDTLFFRLATIHNLRFMTMLTQRLRAAADVQ

SEQ ID NO: 61548 - protein, 379 aa, Tenuibacillus multivorans
  REGION 1..379: note = tr|A0A1G9ZKC6|A0A1G9ZKC6_9BACI Queuine tRNA-ribosyltransferase OS=Tenuibacillus multivorans; OX = 237069 GN=tgt PE=3 SV=1
MTAITYELIKTCKQTGARLGRVTTPHGSFETPVFMPVGTLATVKTMAPEELKEMGANIILSNTYHLWIRPGEDIVEEAGGLHSFMNWDGSILTDSGGFQVFSLSDRRKIHEEGVHFRNHLSGEKLFLSPEKAMRIQNSLGSDIMMAFDECPPYPASHEYMESSVNRTSRWAERCLEAHQNKDKQGLFGIVQGGKYEDLRKQSARDLVSLDFPGYAIGGLSVGEPKDVMNNVLEFTTPLLPSDKPRYLMGVGSPDSLVDGAIRGVDMFDCVLPTRIARNGTCMTSHGRLVVRNAKFARDFTPLDENCDCYTCRNYTKAYIRHLIKANETLGIRLTTYHNLYFLVKLMEKVRKAIKEDRLGDFRDQFFDQYGFNKPNAKNF

SEQ ID NO: 61549 - protein, 377 aa, Tepidamorphus gemmatus
  REGION 1..377: note = tr|A0A4R3MCH6|A0A4R3MCH6_9RHIZ Queuine tRNA-ribosyltransferase OS=Tepidamorphus gemmatus; OX = 747076 GN=tgt PE=3 SV=1
MNVPHSFSIHARDGAARLGTLAFHRGAVRTPAFMPVGTAATVKAMFPETVRATGADIVLGNTYHLMLRPGAERVAELGGLHRFMNWPRPILTDSGGFQVMSLSSLRKLTEDGVIFRSHLDGSEHRLSPERSVEIQRLLGADITMQLDECVALPCADAEAERAMELSLRWAERSKRAFGSDSSRALFGIVQGGTVPALRLRSAAGLVDIGFDGYAVGGLAVGEPQAVMLETLDVTVPALPADRPRYLMGVGTPEDILLSVMRGIDMFDCVMPTRAGRHGQAYTRRGRINLRNARHADDPRPLDEESDCPAARDYSRAYLHHLIKAGEMLGAMLLTWANVHYYQQLMDGIRAAIAAGRLADHAEAIRRAWAAGDIPPRG

SEQ ID NO: 61550 - protein, 372 aa, unidentified
  source 1..372: note = Tepidanaerobacter acetatoxydans
  REGION 1..372: note = tr|F4LTJ4|F4LTJ4_TEPAE Queuine tRNA-ribosyltransferase OS=Tepidanaerobacter acetatoxydans (strain DSM 21804 / JCM 16047 / Re1) OX=1209989 GN=tgt; PE = 3 SV=1
MNFNILKKSANTSARLGELETLHGSFATPVFMPVGTQATVKTMTPDELKEIGAKIILSNTYHLYLRPGHEIIREAGGLHKFMNWDGSILTDSGGFQVFSLGELREINEEGVTFRSHIDGSIHFIGPETSVEIQNALGSDIMMAFDECIPYPATFEYVLSSVERTTRWAERCQKAHNNIDTQTLFGIVQGGVYKELRRKSAIDIVSLGFEGYAIGGLSVGEPKKEMYDMLDFTVPLLPDDKPRYLMGVGTPEDLFEGVIRGIDMFDCVLPTRIARHGTVFTKKGKLVVRNAAYARDFTPLDPSCDCYACKNFTRAYIRHLINVGEILGIRLTTIHNLHFLVTLMQEIQKAIEGDYLLELKDEFYANFGILQYM

SEQ ID NO: 61551 - protein, 372 aa, Tepidanaerobacter syntrophicus
  REGION 1..372: note = tr|A0A0U9HHE7|A0A0U9HHE7_9THEO Queuine tRNA-ribosyltransferase OS=Tepidanaerobacter syntrophicus; OX = 224999 GN=tgt PE=3 SV=1
MKFDVVKKSSNTSARLGRLETCHNSFSTPIFMPVGTQATVKTMTPDELEEIGAKIILGNTYHLYLRPGHELIREAGGLHKFMNWNGSILTDSGGFQVFSLGELREIKEEGVTFRSHIDGSLHFIGPETSMEIQNALGSDIMMAFDECIPYPATYEYVLRSVERTTRWAERCKKAHKNTETQTLFGIVQGGVYKELRKKSAQDITSLDFEGYAIGGLSVGEPKKMMYEMLDFTVPLLPDERPRYLMGVGTPQDLFEGVIRGIDMFDCVLPTRIARHGTVFTKKGKLVVRNAAYARDFGPLDPTCDCYVCRNFSRAYIRHLISANEILGLRLTTYHNLYFLINLMQKIQKAIEGDYLLELKDEFFADFGIPNIM

SEQ ID NO: 61552 - protein, 377 aa, unidentified
  source 1..377: note = Tepidibacillus fermentans
  REGION 1..377: note = tr|A0A4R3KKR3|A0A4R3KKR3_9BACI Queuine tRNA-ribosyltransferase OS=Tepidibacillus fermentans; OX = 1281767 GN=tgt PE=3 SV=1
MSAIRYELIKKDKKTGARLGRLYTPHGVIETPIFMPVGTQATVKTMSPEELKQMNAQIILSNTYHLFLRPGHDIVKEAGGLHHFMNWDRPILTDSGGFQVFSLSDLRKITEEGVHFRNHLSGEKLFISPEKSIEIQNALGADIIMAFDECPPYPADRDYVKKSLERTTRWAERSLKAHSRPNDQALFGIVQGGVYKDLREQSAKEITSLNFPGYAIGGLSVGEPKEMMFDILEYTTPLLPEDKPRYLMGVGDPESLFEGVIRGIDMFDCVLPTRIARNGTAMTSQGRLVVRNAKYARDFGPIDPKCSCYTCQNYSRAYVRHLLKADEIFGLRLTTYHNLFFLLNLMKNIRQAILEDRLLEYKEEFFAEYGRNELRTF

SEQ ID NO: 61553 - protein, 373 aa, Tepidibacter formicigenes
  REGION 1..373: note = tr|A0A1M6MWD2|A0A1M6MWD2_9FIRM Queuine tRNA-ribosyltransferase OS=Tepidibacter formicigenes DSM 15518 OX=1123349 GN=tgt PE=3 SV=1
MSAIRYEHIKTCKQSGARLGRIHTPHGVIDTPIFMPVGTQATVKSMTPEELKEINAKIILSNTYHLYMRPGHELVEKAGGLHKFMNWDRAILTDSGGFQVFSLGPLRKITEEGVEFRSHLDGSKHFISPEKAIEIENALGADIIMAFDECAPYPASRDYVKNSLERTTRWAKRCKDAHKYPDRQGLFGIVQGGMYKDLREQSAYEIMELDFPGYAVGGLSVGEPKPLMYEVLEYTTPLLPKDKPRYLMGVGSPDALIEGVIRGIDMFDCVLPTRIARNGTAMTSHGKVVVRNAKYAEDFLPLDPECSCYTCRNYSRAYIRHLVKANEILGARLITYHNLYFLLKLMENVRQAIREDRLLDFRREFFTKYGYEL

SEQ ID NO: 61554 - protein, 373 aa, Tepidibacter thalassicus
  REGION 1..373: note = tr|A0A1M5QK06|A0A1M5QK06_9FIRM Queuine tRNA-ribosyltransferase OS=Tepidibacter thalassicus DSM 15285 OX=1123350 GN=tgt PE=3 SV=1
MSAIRYELIKTCKQSGARLGRIHTPHGVIPTPIFMPVGTQATVKSMTPEELKEIDAKIILSNTYHLYMRPGHKLVEKAGGLHKFMNWDRAILTDSGGFQVFSLGPLRKITEEGVEFRSHLDGSKHFISPEKAIEIENSLGADIIMAFDECAPYPASRDYVKNSLERTTRWAKRCKDAHKYPDRQALFGIVQGGMYRDLREQSAKEIMELDFPGYAVGGLSVGEPKPLMYEVLEYTTPLLPKDKPRYLMGVGSPDALIEGVIRGIDMFDCVLPTRIARNGTAMTSHGKVVVRNAKYAEDFLPLDPECSCYTCRNYSRAYIRHLIKANEILGARLITYHNLYFLLKLMENVREAIMEDRLLDFRREFFSKYGYEL

SEQ ID NO: 61555 - protein, 379 aa, unidentified
  source 1..379: note = Tepidicaulis marinus
  REGION 1..379: note = tr|A0A081B7F1|A0A081B7F1_9RHIZ Queuine tRNA-ribosyltransferase OS=Tepidicaulis marinus OX=1333998; GN = tgt PE=3 SV=1
MSEFRFDLRATDGKARLGAVHTSRGVIRTPAFMPVGTAATVKALYTEQVRGTGADILLGNTYHLMLRPGAERVASLGGLHKFMNWDGPILTDSGGFQVMSLAKLRKMSEEGVTFQSHLDGSRHMLSPERSIDIQCLLGSDIQMVLDECTPFPATEKQAAESMQLSQRWAVRSKEAFEAHPRRHEGQALFGIVQGSTYPDLRAESAAGLIETGFHGYAIGGLAVGEGQKEMLRVLDYTAPLLPQDRPRYLMGVGTPDDLVEAVSRGVDMFDCVMPTRSGRHGQAFTRRGKVNLKNARHADDPRPLDESLDCPAARDYSRAYLHHLIKNGEILGMMLLTWNNVAYYQRLMADMRAAIEAGDFAGFYKRFKEEQAEGDISPL

SEQ ID NO: 61556 - protein, 392 aa, Tepidicella xavieri
  REGION 1..392: note = tr|A0A4R6U825|A0A4R6U825_9BURK Queuine tRNA-ribosyltransferase OS=Tepidicella xavieri OX=360241; GN = tgt PE=3 SV=1
MLTFQLLKTEGHARRGVLTLNHGVVQTPIFMPVGTYGTVKGVMPRSLHDMGAQIILGNTFHLWMRPGLDVMRAFGGLHGFEQWHKPILTDSGGFQVWSLGAMRKITEEGVHFASPVNGDKLFMSPEVSMQIQTVLNSDIVMQLDECTPYWQGDKASGHVTTEAEARASMALSLRWARRSKAEFERLGNPNALFGIVQGGMFEHLRQESLEALVDMDFPGYAIGGVSVGEPKEEMRRIMAHTPHRLPAHKPRYLMGVGTPEDLVEGVACGVDMFDCVMPTRNARNGTIFTRYGDLKLRNARHKADPQPLDPTCTCYACAGASGVSWADGGRDGFSRAYLHHLDRCGEMLGPMLTTIHNLHYYLNLMQEVRDALDAGTFAAFRQRFAAERARGV

SEQ ID NO: 61557 - protein, 372 aa, Tepidimicrobium xylanilyticum
  REGION 1..372: note = tr|A0A1H3DTN1|A0A1H3DTN1_9FIRM Queuine tRNA-ribosyltransferase OS=Tepidimicrobium xylanilyticum; OX = 1123352 GN=tgt PE=3 SV=1
MTVRFRLIKESKECMARLGELETPHGIVETPIFMPVGTKATVKTMTPEEVEDLGAQIILSNTYHLYLRPGHKLIEEAGGLHKFMNWDGPILTDSGGFQIFSLGDLRKISEEGVEFKSHIDGSTHFISPEKSIEIQNSLGSDIMMAFDECVSYPADYDYVKKSMERTTRWAKRCKDFHKNWEKQALFGIVQGGMYKDLREESVKGITDIGFSGYAVGGLSVGEPRELMCEMLDFTTPLLPKDKPRYLMGVGTPDYLFEAVIRGIDMADCVMPTRIARNGAVMTSIGRINIRNAKYSRDFTKLDPECDCYTCTNYTRAYIRHLFNVNEILGLRLTTIHNLYFLIKLMENIRTAIREDRLLEYREEFYKNYGYID

SEQ ID NO: 61558 - protein, 394 aa, unidentified
  source 1..394: note = Tepidimonas alkaliphilus
  REGION 1..394: note = tr|A0A554W4E3|A0A554W4E3_9BURK Queuine tRNA-ribosyltransferase OS=Tepidimonas alkaliphilus; OX = 2588942 GN=tgt PE=3 SV=1
MLSFELLATDPTSHARRGRLRLTHGVVETPIFMPVGTYGTVKGVTPRSLLEMGAQIILGNTFHLWLRPGLEVIRAFGGLHRFEQWPRPILTDSGGFQVWSLGAMRRITEEGVHFASPVNGDRLFLSPEVSIQIQTALDSDIVMQLDECTPYWQGDKTSGHVTTEAEARASMELSLRWARRSKAEFERLGNRNALFGIVQGGMFEHLRQESLEALVELDLPGYAIGGVSVGEPKEDMRRILAHTPHRLPAHKPRYLMGVGTPEDLVEGVACGVDMFDCVMPTRNARNGTYFTRYGDLKIRNARHKADPRPIDPSCTCYACAGISGVSWNDGGRDGFSRAYLHHLDRCGEMLGPMLATIHNLHYYLNLMREIRAALEAGTFAAFRQRFAAERAAGV

SEQ ID NO: 61559 - protein, 394 aa, Tepidimonas aquatica
  REGION 1..394: note = tr|A0A554WRQ3|A0A554WRQ3_9BURK Queuine tRNA-ribosyltransferase OS=Tepidimonas aquatica OX=247482; GN = tgt PE=3 SV=1
MLRFDVLATDPTSHARRGRLTLNHGVVETPIFMPVGTYGTVKGVTPRSLHEMGAQIILGNTFHLWMRPGLDVIRAFGGLHAFEQWHKPILTDSGGFQVWSLGAMRKITEEGVHFASPVNGDKLFMSPEVSIQIQTVLGSDIVMQLDECTPYWQGDKASGHVTTEAEACASMELSLRWARRCKAEFERLGNPNALFGIVQGGMFEHLRQASLEALVEMDFPGYAIGGVSVGEPKEEMRRIMAHTPHRLPAHKPRYLMGVGTPEDLVEGVACGVDMFDCVMPTRNARNGTYFTRYGDLKIRNARHKTDPRPIDPSCTCYACAGSSGVPWEAGGREGFSRAYLHHLDRCGEMLGPMLATIHNLHYYLNLMRDVRAALEAGRFGEFRQRFAAERSQGV

SEQ ID NO: 61560 - protein, 394 aa, unidentified
  source 1..394: note = Tepidimonas fonticaldi
  REGION 1..394: note = tr|A0A1A6DWU2|A0A1A6DWU2_9BURK Queuine tRNA-ribosyltransferase OS=Tepidimonas fonticaldi; OX = 1101373 GN=tgt PE=3 SV=1
MLTFELLATDPTSHARRGRLTLNHGVVQTPIFMPVGTYGTVKGVMPRSLHDMGAQIILGNTFHLWMRPGLDVMRAFGGLHGFEQWHKPILTDSGGFQVWSLGAMRKITEEGVHFASPVNGDKLFMSPEVSMQIQTVLNSDIVMQLDECTPYWQGDKASGHVTTEAEARASMALSLRWARRSKAEFERLGNPNALFGIVQGGMFEHLRQESLEALVDMDFPGYAIGGVSVGEPKEEMRRIMAHTPHRLPAHKPRYLMGVGTPEDLVEGVACGVDMFDCVMPTRNARNGTIFTRYGDLKLRNARHKADPQPLDPTCTCYACAGASGVRWVDGGRDGFSRAYLHHLDRCGEMLGPMLTTIHNLHYYLNLMQEVRDALDAGTFAAFRQRFAAERAQGV

SEQ ID NO: 61561 - protein, 397 aa, unidentified
  source 1..397: note = Tepidimonas fonticaldi
  REGION 1..397: note = tr|A0A554XKF1|A0A554XKF1_9BURK Queuine tRNA-ribosyltransferase OS=Tepidimonas fonticaldi; OX = 1101373 GN=tgt PE=3 SV=1
MPAMLTFELLATDPTSHARRGRLTLNHGVVETPIFMPVGTYGTVKGVMPRSLHDMGAQIILGNTFHLWMRPGLDVMRAFGGLHGFEQWHKPILTDSGGFQVWSLGAMRKITEEGVHFASPVNGDKLFMSPEVSMQIQTVLNSDIVMQLDECTPYWQGDKASGHVTTEAEARASMALSLRWARRSKAEFERLGNPNALFGIVQGGMFEHLRQESLEALVDMDFPGYAIGGVSVGEPKEEMRRIMAHTPHRLPAHKPRYLMGVGTPEDLVEGVACGVDMFDCVMPTRNARNGTIFTRYGDLKLRNARHKADPQPLDPTCTCYACAGTSGVPWADGGRDGFSRAYLHHLDRCGEMLGPMLTTIHNLHYYLNLMQEVRDALDAGTFAAFRQRFAAERAQGV

SEQ ID NO: 61562 - protein, 394 aa, Tepidimonas ignava
  REGION 1..394: note = tr|A0A4R3LDX0|A0A4R3LDX0_9BURK Queuine tRNA-ribosyltransferase OS=Tepidimonas ignava OX=114249; GN = tgt PE=3 SV=1
MLRFDVLTTDPTSHARRGRLTLNHGVVETPIFMPVGTYGTVKGVTPRSLHEMGAQIILGNTFHLWMRPGLDVIRAFGGLHAFEQWHKPILTDSGGFQVWSLGAMRKITEEGVHFASPVNGDKLFMSPEVSIQIQTVLGSDIVMQLDECTPYWQGDKASGHVTTEAEARASMELSLRWARRCKAEFERLGNPNALFGIVQGGMFEHLRQASLEALVEMDFPGYAIGGVSVGEPKEEMRRIMAHTPHRLPANKPRYLMGVGTPEDLVEGVACGVDMFDCVMPTRNARNGTYFTRYGDLKIRNARYKTDPLPIDPSCTCYACAGTCGVSWNDGGREGFSRAYLHHLDRCGEMLGPMLATIHNLHHYLNLMREIRAALDAGCYADFRRRFAAERSQGV

SEQ ID NO: 61563 - protein, 394 aa, unidentified
  source 1..394: note = Tepidimonas sediminis
  REGION 1..394: note = tr|A0A554WQT4|A0A554WQT4_9BURK Queuine tRNA-ribosyltransferase OS=Tepidimonas sediminis; OX = 2588941 GN=tgt PE=3 SV=1
MLSFELLATDPTSHARRGRLTLTHGVVETPIFMPVGTYGTVKGVTPRSLLEMGAQIILGNTFHLWLRPGLEVIRAFGGLHRFEQWPRPILTDSGGFQVWSLGAMRKITEEGVHFASPVNGDRLFLSPEVSIQIQTALDSDIVMQLDECTPYWQGDQQSGHVTTEAEARASMELSLRWARRSKAEFERLGNRNALFGIVQGGMFEHLRQESLEALVELDLPGYAVGGVSVGEPKEDMRRILAHTPHRLPAHKPRYLMGVGTPEDLVEGVACGVDMFDCVMPTRNARNGTCFTRYGDLKIRNARHKTDPRPIDPSCTCYACAGTSGVSWNDGGREGFARAYLHHLDRCGEMLGPMLATIHNLHYYLNLMREIRAALEAGTFAAFRQRFAAERAAGV

SEQ ID NO: 61564 - protein, 394 aa, Tepidimonas sp.
  REGION 1..394: note = tr|A0A554XIE4|A0A554XIE4_9BURK Queuine tRNA-ribosyltransferase OS=Tepidimonas sp. SPSP-6; OX = 2267262 GN=tgt PE=3 SV=1
MLQFQILATDPDSHARRARLTLNHGVVETPIFMPVGTYGTVKGVMPRNLHEMGAQIILGNTFHLWLRPGLEVIRAFGGLHGFEQWPKPILTDSGGFQVWSLGAMRKISEEGVHFASPVNGDKLFMSPEVSIQIQTVLNSDIVMQLDECTPYWQGDKASGHVTTEAEARASMELSLRWARRCQAEFERLGNRNALFGIVQGGMYEHLRQESLEALAALDLPGYAIGGVSVGEPKEDMRRIMAHTPHRLPAHKPRYLMGVGTPEDLVEGVACGVDMFDCVMPTRNARNGTYFTRTGDLKIRNARYKTDPLPIDPSCTCYACAGAEGVSWEDGGRGGFSRAYLHHLDRCGEMLGPMLATIHNLHFYLHLMQEVRAALETGRFSAFRQRFASERARGV

SEQ ID NO: 61565 - protein, 394 aa, Tepidimonas taiwanensis
  REGION 1..394: note = tr|A0A554X7A3|A0A554X7A3_9BURK Queuine tRNA-ribosyltransferase OS=Tepidimonas taiwanensis; OX = 307486 GN=tgt PE=3 SV=1
MLQFQLLATDPTSHARRGRLTLNHGVVETPIFMPVGTYGTVKGVTPRSLREMGAQIILGNTFHLWMRPGLDVIRAFGGLHGFERWERPILTDSGGFQVWSLGAMRKITEEGVRFASPVNGDKLFLSPEVSMQIQTVLNSDIVMQLDECTPYWQGDKASGHVTTEAEARASMELSLRWARRSKAEFERLGNPNALFGIVQGGMFEHLREASLEALVAMDFHGYAIGGVSVGEPKEEMRRIMAHTPHRLPAHKPRYLMGVGTPEDLVEGVACGVDMFDCVMPTRNARNGHLFTRYGDVKIRNARYKDDPLPIDPDCTCYACAGDAGVSWNDGGREGFSRAYLHHLDRCGEMLGPMLATIHNLHYYLNLMREVRAALEAGTFAAFRQRFAAERSRGV

SEQ ID NO: 61566 - protein, 400 aa, Tepidimonas thermarum
  REGION 1..400: note = tr|A0A554X3M0|A0A554X3M0_9BURK Queuine tRNA-ribosyltransferase OS=Tepidimonas thermarum OX=335431; GN = tgt PE=3 SV=1
MLEFTVLRTDPPRDGYAGSHARRGVLKLNHGVVQTPIFMPVGTYGTVKGVMPRSLREMGAQIILGNTFHLWMRPGLDVIRAFGGLHAFEQWERPILTDSGGFQVWSLGAMRKITEEGVHFASPVNGDKLFMSPEVSIQIQTALDSDIVMQLDECTPYWQGDKANGHVTTEAEARQSMEMSLRWARRSQAEFERLGNRNALFGIVQGGMFEHLREESLQALVEMDFPGYAVGGVSVGEPKEAMRRIMAHTPHRLPAHKPRYLMGVGTPEDLVEGVACGVDMFDCVMPTRNARNGTYFTRYGDLKIRNARHKTDPRPIDPSCTCYACAGDSGIPWHAGGRAGFSRAYLHHLDRCGEMLGPMLATIHNLHYYLNLMQEVRDALDAGTFGDYRQRFAAERAQGV

SEQ ID NO: 61567 - protein, 373 aa, unidentified
  source 1..373: note = Tepidiphilus thermophilus
  REGION 1..373: note = tr|A0A0K6IW42|A0A0K6IW42_9PROT Queuine tRNA-ribosyltransferase OS=Tepidiphilus thermophilus; OX = 876478 GN=tgt PE=3 SV=1
MSDTPAFTLLATDGAARRGRLHLAHGTVETPIFMPVGTYGTVKAMTPTALEDVGAQIVLGNTFHLWLRPGLEVIRRHGGLHRFMGWNKPILTDSGGFQVFSLGALRKISEEGVRFASPIDGARCFLTPEVSMQIQTVLDSDVVMIFDECTPYPATETQAAESMRLSLRWAQRSRAEFDRLGNRNALFGIVQGGMYEALRDESLAGLMEIGFDGYAIGGLSVGEPKDEMRRVLEYVAPRLPQTRPRYLMGVGTPEDLIHGVDAGVDMFDCVMPTRNARNGLLFTRYGDVKIRNARYREDTAPLDETCSCTTCRHFTRAYLHHLYRTGEILASILNTTHNLHFYLTLMAELRAAIERGNFTETAARLLAERQRGV

SEQ ID NO: 61568 - protein, 372 aa, unidentified
  source 1..372: note = Terasakiispira papahanaumokuakeensis
  REGION 1..372: note = tr|A0A1E2VDK9|A0A1E2VDK9_9GAMM Queuine tRNA-ribosyltransferase OS=Terasakiispira papahanaumokuakeensis OX=197479 GN=tgt PE=3 SV=1
MQFELLNTEGKARRGRLRFPRGDVETPAFMPVGTYGTVKGMTPRDIQDIGAHIILGNTFHLMLRPGTEVIAEHGDLHDFMQWQGPILTDSGGFQVFSLGEMRKITEQGVTFKSPIDGSKVFMGPEESMAVQKALGSDIVMIFDECTPYPATHDEARKSMEMSLRWAKRSREAHGDSPSALFGIIQGGMYRDLREQSLAALNDIGFDGMAIGGLSVGEPKEEMIKVLDYLPDLMPADKPRYLMGVGKPEDLVEGVRRGVDMFDCVMPTRNARNGHYFVHDGVIKIRNAKHRHDTNPLDPHCDCYTCQNFSRSYLHHLDKCGEMLGAMLATIHNLRHYQQLMAGLRGALEAGKLADFVDDFYARRNLVTPPLSE

SEQ ID NO: 61569 - protein, 372 aa, Teredinibacter sp.
  REGION 1..372: note = tr|A0A509E2E1|A0A509E2E1_9GAMM Queuine tRNA-ribosyltransferase OS=Teredinibacter sp. ISS155; OX = 2584524 GN=tgt PE=3 SV=1
MKFNKISEDGFARRGQLIFNRGVVETPAFMPVGTYGTVKGMLPRDIEAIGAQIILGNTFHLMLRPGTEIIKQHGDLHDFTQWSGPILTDSGGFQVFSLGDLRKITEEGVKFRSPIDGSEIFLDPEKAMQVQRDLGSDIVMIFDECTPYPASEMDARQSMELSLRWARRSKQAHEGNPNALFGIVQGGMYEQLRTESLAGLVDIGFDGYAIGGLSVGEPKEDMARILDHLKTRMPVEKPRYLMGVGKPEDIVEGVVRGIDMFDCVMPTRNARNGHLFTTEGVVKIRNACHKMDTAPLDAHCDCYTCQNFSRSYLHHLDKCGEILGSQLNTIHNLRHYQKIMQELRTAIEQNSLNRYVDEFYQRQNKIRPSMFL

SEQ ID NO: 61570 - protein, 380 aa, Teredinibacter turnerae
  REGION 1..380: note = tr|C5BLY1|C5BLY1_TERTT Queuine tRNA-ribosyltransferase OS=Teredinibacter turnerae (strain ATCC 39867 / T7901) OX=377629 GN=tgt PE=3 SV=1
MAECHMQFELDTSDGAARRGRLRFPRGVVETPAFMPVGTYGTVKGMLPRDIHDTGAQILLGNTFHLMLRPGTEVVKQHGDLHDFMQWSGPILTDSGGFQVFSLGDLRKITEEGVKFRSPIDGSEVFLDPERAMQVQRDLGSDIVMIFDECTPYPATETEAKSSMELSLRWAARSKAAHEGNPSALFGIVQGGMYENLRTESLQGLTEIGFNGYAIGGLSVGEPKEDMIRVLNHLGPQMPVDKPRYLMGVGKPEDIVEGVCRGVDMFDCVMPTRNARNGHLFTREGVIKIRNACHRYDTGPLDPSCDCYTCSNFSRAYLHHLDKCGEILGAQLNTIHNLRHYQTVMSEIRAAIEAHNLKNWVNEFYARQSKARPAFCQSLE

SEQ ID NO: 61571 - protein, 371 aa, unidentified
  source 1..371: note = Terrabacteria group
  REGION 1..371: note = tr|A0A537LHD3|A0A537LHD3_9BACT Queuine tRNA-ribosyltransferase OS=Terrabacteria group bacterium ANGP1 OX=2569760 GN=tgt PE=3 SV=1
MSGFRFELLRGSAAGPRLGSLQTPRGVVRTPAFMPVGTQATVKGLTSEEVREIGAEMILANTFHLYLRPGADVIERAGGLHKFMRWDGPILTDSGGFQIFSLARLRRLTDEGVTFRSPLDGAEHLFTPERVLEIQRQLGSDLVMPLDVCLGYPADDEKAKEALRLTLLWARRSRAHGSGNGQMLFGIVQGGFSPVLRRDAAARTVEMGFDGYAIGGLSVGEPRELTAELIQETCAGLPADRPRYLMGVGAPPALLDAIARGVDLFDCVLPTRVARTGAIFTRQGRVNVRNAGFREDLGPPDDSCRCAVCARYTRAYLRHLFNADEMLGPRLATYHNLSFLAQLMEEARAAIAADRFDSWRREVLVAYVTPW

SEQ ID NO: 61572 - protein, 371 aa, unidentified
  source 1..371: note = Terrabacteria group
  REGION 1..371: note = tr|A0A537LLL6|A0A537LLL6_9BACT Queuine tRNA-ribosyltransferase OS=Terrabacteria group bacterium ANGP1 OX=2569760 GN=tgt PE=3 SV=1
MSGFRFELLRGSAAGPRLGSLQTPRGVVRTPAFMPVGTQATVKGLTSEEVREIGAEMILANTFHLYLRPGADVIERAGGLHKFMRWDGPILTDSGGFQIFSLARLRRLTDEGVTFRSPLDGAEHLFTPERVLEIQRQLGSDLVMPLDVCLGYPADDEKAKEALRLTLLWARRSRAHGSGNGQMLFGIVQGGFSPVLRRDAAARTVEMGFDGYAIGGLSVGEPRELTAELIQETCAGLPADRPRYLMGVGAPPALLDAIARGVDLFDCVLPTRVARTGAIFTRQGRVNVRNAAFREDLGPPDDSCRCAVCARYTRAYLRHLFNADEMLGPRLATYHNLSFLAQLMEEARAAIAADRFDSWRREVLVAYVTPW

SEQ ID NO: 61573 - protein, 378 aa, Terribacillus aidingensis
  REGION 1..378: note = tr|A0A285NQQ8|A0A285NQQ8_9BACI Queuine tRNA-ribosyltransferase OS=Terribacillus aidingensis; OX = 586416 GN=tgt PE=3 SV=1
MAIRYEFIKQDKQTGARLGIVHTPHGSFETPTFMPVGTLATVKTMSPEDLTELNAKIILSNTYHLWLRPGHEIIREAGGLHKFMNWDGAILTDSGGFQVFSLSDLRDIQEEGVHFRNHISGEKLFLSPEKAMDIQNALGSDIMMAFDECPPYPASFDYMKASVERTSRWAERCLTAHARPDVQGLFGIVQGGEYEDLRKQSAQDLVSLDFPGYAVGGLSVGEPKDVMNRVLEFTTPWLPQDKPRYLMGVGSPDSLIDGAIRGIDMFDCVLPTRIARNGTCMTSNGRLVVRNAQYARDFGPIDENCDCKVCKNYSRAYIRHLIKCNETFGFRLTTYHNLHFLIELMRKVREAIKEDRLGDFRDEFFESYGFNKPNAKNF

SEQ ID NO: 61574 - protein, 378 aa, Terribacillus goriensis
  REGION 1..378: note = tr|A0A075LLU8|A0A075LLU8_9BACI Queuine tRNA-ribosyltransferase OS=Terribacillus goriensis; OX = 386490 GN=tgt PE=3 SV=1
MAIRYEFIKQDKQTGARLGIVHTPHGSFETPTFMPVGTLATVKTMSPEELTELNANIILSNTYHLWLRPGHEIIREAGGLHKFMNWDGAILTDSGGFQVFSLSDLRDIQEEGVHFRNHISGEKLFLSPEKAMDIQNALGSDIMMAFDECPPYPATYDYMKASVERTSRWAERCLTAHARPDVQGLFGIVQGGEFEELRKQSAQDLVSMDFPGYAVGGLSVGEPKDVMNRVLEFTTPWLPQDKPRYLMGVGSPDSLIDGAIRGIDMFDCVLPTRIARNGTCMTSKGRLVVRNAQYARDFGPIDENCDCKVCKNYSRAYIRHLIKCNETFGFRLTTYHNLHFLIELMRKVREAIKEDRLGDFRDEFFESYGFNKPNAKNF

SEQ ID NO: 61575 - protein, 378 aa, Terribacillus halophilus
  REGION 1..378: note = tr|A0A1G6SKL3|A0A1G6SKL3_9BACI Queuine tRNA-ribosyltransferase OS=Terribacillus halophilus; OX = 361279 GN=tgt PE=3 SV=1
MAIRYEFIKQDKQTGARLGIVHTPHGSFETPTFMPVGTLATVKTMSPEELTELNANIILSNTYHLWLRPGHEIIREAGGLHKFMNWDGAILTDSGGFQVFSLSDLRDIQEEGVHFRNHISGEKLFLSPEKAMEIQNALGSDIMMAFDECPPYPATYDYMKASVERTSRWAERCLTAHARPDVQGLFGIVQGGEFEDLRKQSAQDLVSMDFPGYAVGGLSVGEPKDVMNRVLEFTTPWLPQDKPRYLMGVGSPDSLIDGAIRGIDMFDCVLPTRIARNGTCMTSNGRLVVRNAQYARDFGPIDENCDCKVCKNYSRAYIRHLIKCNETFGFRLTTYHNLHFLIELMRKVREAIKEDRLGDFRDEFFESYGFNKPNAKNF

SEQ ID NO: 61576 - protein, 378 aa, Terribacillus saccharophilus
  REGION 1..378: note = tr|A0A1H7Z4G7|A0A1H7Z4G7_9BACI Queuine tRNA-ribosyltransferase OS=Terribacillus saccharophilus; OX = 361277 GN=tgt PE=3 SV=1
MAIRYEFIKQDKQTGARLGIVHTPHGSFETPTFMPVGTLATVKTMSPEELTELNANIILSNTYHLWLRPGHEIIREAGGLHKFMNWDGAILTDSGGFQVFSLSDLRDIQEEGVHFRNHISGEKLFLSPEKAMDIQNALGSDIMMAFDECPPYPATYDYMKASVERTSRWAERCLTAHARPDVQGLFGIVQGGEFEDLRKQSAQDLVSMDFPGYAVGGLSVGEPKDVMNRVLEFTTPWLPQDKPRYLMGVGSPDSLIDGAIRGIDMFDCVLPTRIARNGTCMTSKGRLVVRNAQYARDFGPIDENCDCKVCKNYSRAYIRHLIKCNETFGFRLTTYHNLHFLIELMRKVREAIKEDRLGDFRDEFFESYGFNKPNAKNF

SEQ ID NO: 61577 - protein, 378 aa, Terribacillus sp.
  REGION 1..378: note = tr|A0A268BS09|A0A268BS09_9BACI Queuine tRNA-ribosyltransferase OS=Terribacillus sp. 7520-G; OX = 2025389 GN=tgt PE=3 SV=1
MAIRYEFIKQDKQTGARLGIVHTPHGSFETPTFMPVGTLATVKTMSPEELTELNANIILSNTYHLWLRPGHEIIREAGGLHKFMNWDGAILTDSGGFQVFSLSDLRDIREEGVHFRNHISGEKLFLSPEKAMEIQNALGSDIMMAFDECPPYPATYDYMKASVERTSRWAERCLAAHARPDVQGLFGIVQGGEYEDLRKQSAQDLVSMDFPGYAVGGLSVGEPKDVMNRVLEFTTPWLPQDKPRYLMGVGSPDSLIDGAIRGIDMFDCVLPTRIARNGTCMTSNGRLVVRNAQYARDFGPIDENCDCKVCKNYSRAYIRHLIKCNETFGFRLTTYHNLHFLIELMRKVREAIKEDRLGDFRDEFFESYGFNKPNAKNF

SEQ ID NO: 61578 - protein, 371 aa, unidentified
  source 1..371: note = Terriglobus albidus
  REGION 1..371: note = tr|A0A5B9E946|A0A5B9E946_9BACT Queuine tRNA-ribosyltransferase OS=Terriglobus albidus OX=1592106; GN = tgt PE=3 SV=1
MSLSFELLKESGPARRATLTLPHGEVETPVFMPVGTAASVKAVPQDVMETNGAEGKGAGIILANTYHLYLRPGHELIRRAGGVHKFMSWNRAMLTDSGGFQVFSLSELRKVTPDGVEFRSHHDGSKHFFSPEHSMEVQIALGADIMMAFDECVETPATWERTKESMGLTHAWAQRSLDYWKEHRHEVPWHNELDGSHQSLFGIVQGGMYKDLRAESAERLVEMDFPGYAIGGLAVGEAREVTREMIAHTLEYLPKDKPRYVMGVGYPDEIVEYARMGVDMMDCVLPTRAGRHGLLFTSQGRLNIKNKQYAEDQNPPDPACNCMVCRRYTRAYLRHLMHTGEPLALTLASEHNLAFYLDQMQALRNEFDQAE

SEQ ID NO: 61579 - protein, 394 aa, Terriglobus roseus
  REGION 1..394: note = tr|A0A1G7PH85|A0A1G7PH85_9BACT Queuine tRNA-ribosyltransferase OS=Terriglobus roseus OX=392734; GN = tgt PE=3 SV=1
MGGTAICAVPPIVFYNQRQMSLRFEIHRTENSMRRATLHLPHGSVETPVFMPVGTAASVKAVPQDILETLGDDGRGAEIILANTYHLYLRPGHELIRRAGGVHKFMSWNRPMLTDSGGFQVFSLAALRKITAEGVEFRSHLDGSKHFFSPEHSIDVQIALGADIIMAFDECTEHPATYERTRDSMALTHAWAQRSLDHFHSHCQDVPWFNELGQRQNLYGIVQGGMYKDLRTESANRLLEMRAPNGEGFDGYAIGGLAVGEPREVTREIIAHTLELLPKDKPRYVMGVGYPDEIVEYAQMGVDQMDCVLPTRAARHALLFTSEGRLNIRGKKFSEDHGQADPECHCPVCRRYSRAYLRHLFHTGEPLAATLASVHNLSFYLDTMRKLRGERIAG

SEQ ID NO: 61580 - protein, 408 aa, Terriglobus roseus
  REGION 1..408: note = tr|I3ZAX7|I3ZAX7_TERRK Queuine tRNA-ribosyltransferase OS=Terriglobus roseus (strain DSM 18391 / NRRL B-41598 / KBS 63) OX=926566 GN=tgt PE=3 SV=1
MSREKAGAFRRLNRTPSRRCFSPGHPPPSLQSKVMSLRFEIHNTHGNLRRGTLHLPHGSVQTPVFMPVGTAASVKAVPQDTLETLGDDGRGAEIILANTYHLYLRPGHDLIRRAGGVHKFMSWPRPMLTDSGGFQVFSLAALRKITPDGVEFRSHLDGSKHFFSPEHSIDVQIALGADIIMAFDECTEHPATYERTRDSMGLTHAWALRSLEHFHANAHNVPWFAELGSQRQNLYGIVQGGMYKDLRAESAARLTEMRDANGNGFDGYAIGGLAVGEPREVTREIIAHTLELLPKDKPRYVMGVGYPDEIVEYAKMGVDQMDCVLPTRAARHALMFTSEGRLNIRGKKFAEDHGPADPTCNCTTCRRYSRAYLRHLFHTGEPLAATLASVHNLHFYLETMRHLRDGSL

SEQ ID NO: 61581 - protein, 371 aa, Terriglobus saanensis
  REGION 1..371: note = tr|E8V4F6|E8V4F6_TERSS Queuine tRNA-ribosyltransferase OS=Terriglobus saanensis (strain ATCC BAA-1853 / DSM 23119 / SP1PR4) OX=401053 GN=tgt PE=3; SV = 1
MGLTFEVSKTTAAGGRRGVIGLPHGDVQTPVFMPVGTVASVKAVPQETVETIGAGGRGAEIILANTYHLYLRPGHELVRRMGGVHKFMSWRRPMLTDSGGFQVFSLKGLRKVKEEGVEFRSHLDGGKHFFSPEHSMAVQIALGADIMMAFDECTEHPATWQRAKDSMEMTHRWAQRSLDYFQAHASEVPWHEERGGRRQSLFGIVQGGMHKDLRTQSAETLVAMDFDGYAIGGLAVGEERDVTREMIAHTLEYLPKDKPRYVMGVGYPDEIEEYAKMGVDMMDCVLPTRAGRHGLVFTSQGRVNIKNKIHEEDGGPLDPACTCSVCARYSRGYIRHLFAAGEALGMTLASVHNLAFYLDTMERVRGEIAEG

SEQ ID NO: 61582 - protein, 345 aa, unidentified
  source 1..345: note = Terrimicrobium sacchariphilum
  REGION 1..345: note = tr|A0A146G9I3|A0A146G9I3_TERSA Queuine tRNA-ribosyltransferase OS=Terrimicrobium sacchariphilum; OX = 690879 GN=tgt PE=3 SV=1
MPVGTQGTVKAVSPRELHELGAQIILGNTYHLHVRPGEKLISRLGGLHRFNGWDRPILTDSGGFQVFSLARLRKITEDGVHFQNHLDGTPTFIGPEQSMEIQRDLGSDIVMTFDECPPYPCEEAVASTSLDLTLRWAVRCKEWWASQPDESKPLLFGIVQGSSYPELRAKSAQELVKIGFDGYAVGGVSVGEPEPEMMAAIENAEPHLPQDRARYAMGLGTPPQMVEMVARGIDMFDCVLPTRLARNGTAFTAAGTMALKNAGYAEDPGPIEEGCTCYACANFTRAYIRHLIKAEEILGLRLVSLHNLHFYLNLMRTARRAIIEGNFAEFRRAFVAGYKKNEANA

SEQ ID NO: 61583 - protein, 379 aa, Terrimonas sp.
  REGION 1..379: note = tr|A0A2T7QFY2|A0A2T7QFY2_9BACT Queuine tRNA-ribosyltransferase OS=Terrimonas sp. NS-102; OX = 2171976 GN=tgt PE=3 SV=1
MAALQFELKTTDSQSKARAGIITTDHGSIPTPIFMPVGTAGSVKAVTQQQLKDEVNAKIILGNTYHLYLRPGTGILESAGGLHQFMNWNRPILTDSGGYQVFSLSGTRKIQEEGVVFQSHIDGSRHLFSPETVMDIQRSIGADIIMAFDECPPYPSDYKYAERSMHLTHRWLDRSFNRIEITSSKYEHTQNLFPIVQGGTYHDLRKMSCEYISSKNATGNAIGGLSVGEPEEMMYDLCGLCCDNLPVQKPRYLMGVGTPWNILECIALGIDMFDCVMPTRNGRNAMLFTSNGVINIDNKKWEKDYSPIDDGIACETSNYYSKAYLRHLMKSKEILGLTIASIQNLAFYLHVVTEARKHIEAGDFTSWMKESVVRFKQRL

SEQ ID NO: 61584 - protein, 373 aa, unidentified
  source 1..373: note = Terrisporobacter glycolicus
  REGION 1..373: note = tr|A0A1I3SQL3|A0A1I3SQL3_9FIRM Queuine tRNA-ribosyltransferase OS=Terrisporobacter glycolicus; OX = 36841 GN=tgt PE=3 SV=1
MSAIRYELIKTCKQSGARLGRLHTPHGVIETPIFMPVGTQATVKAMTPEELKEIGSQIILSNTYHLYMRPGHDLVKEAGGLHKFMNWDKPILTDSGGFQVFSLGPLRKITEEGVHFRSHIDGSKHFISPEKAMEIQNALGSDIMMAFDECAPYPADREYVKNSLERTTRWLRRCKEAHKNTENQALFGIIQGGMYKDLREQSAKEILELDLPGYAVGGLSVGEPKPLMYEVLDYTVPLMPEDKPRYLMGVGSPDDLLEGVIRGIDMFDCVLPTRIARNGTAMTSQGKVVVRNAKYARDFTPLDPECDCYCCKNYTKAYIRHLVKANEILAARLISTHNLRFLLKLMEDIRQAIMEDRLLDFKDEFFSKYGYKL

SEQ ID NO: 61585 - protein, 371 aa, unidentified
  source 1..371: note = Terrisporobacter othiniensis
  REGION 1..371: note = tr|A0A0B3VKY3|A0A0B3VKY3_9FIRM Queuine tRNA-ribosyltransferase OS=Terrisporobacter othiniensis; OX = 1577792 GN=tgt PE=3 SV=1
MSAIRYELIKTCKQSGARLGRLHTPHGVIETPIFMPVGTQATVKAMTPEELKEIGSQIILSNTYHLYMRPGHDLVKEAGGLHKFMNWDRPILTDSGGFQVFSLGPLRKITEEGVHFRSHIDGSKHFISPEKAMEIQNALGSDIMMAFDECAPYPADREYVKNSLERTTRWLKRCKEAHKNTENQALFGIIQGGMYKDLREQSAREILELDLPGYAVGGLSVGEPKPLMYEVLDYTVPLMPEDKPRYLMGVGSPDDLLEGVIRGIDMFDCVLPTRIARNGTAMTSQGKVVVRNAKYARDFTPLDPECDCYCCKNYTKAYIRHLVKANEILAARLISTHNLRFLLKLMEDVRQAIMEDRLLDFKDEFFAKYGY

SEQ ID NO: 61586 - protein, 431 aa, unidentified
  source 1..431: note = Tersicoccus phoenicis
  REGION 1..431: note = tr|A0A1R1L7Z3|A0A1R1L7Z3_9MICC Queuine tRNA-ribosyltransferase OS=Tersicoccus phoenicis OX=554083; GN = tgt PE=3 SV=1
MPRSDFSFHVTARLTETTTSPAAGRAGVIDTPHGPIRTPAFIPVGTQAAVKAVLPEAVAELGGQAVLANAYHLYLQPGADIVDEAGGLGRFMNWPGPTFTDSGGFQVMSLGSGFKKVISMDLPAERQGADDAVAPGKERLADVDEDGVWFRSHLNGDRHRFTPEVSMGIQHQLGADITFAFDELTTLMNSRGYQEESLERTRRWAQRCLDEHARLTTQRSGKPYQALFGVIQGAQYEDLRRKACRDLAAMTSGMDDGEDGGGFDGYGIGGALEKENLGTIVGWCADELPEDRPRHLLGISEPDDVFTAIENGADTFDCVSPTRVARTSAVYTRDGRINLAGARYKRQFTPIDETCDCYTCAHYTVAYLRHLFKAKEMNAATLASIHNERFVVRMVDDARRALEDGTFFDLKADVLGRYYGRTAARGTTTVG

SEQ ID NO: 61587 - protein, 427 aa, unidentified
  source 1..427: note = Tersicoccus sp.
  REGION 1..427: note = tr|A0A1R1LXI7|A0A1R1LXI7_9MICC Queuine tRNA-ribosyltransferase OS=Tersicoccus sp. Bi-70; OX = 1897634 GN=tgt PE=3 SV=1
MPHDDFSFRVTARLNETTSSAGAGRAGVIDTPHGPIRTPAFIPVGTQAAVKAVLPEAIAELGGQAVLANAYHLYLQPGADIVDEAGGLGRFMNWPGPTFTDSGGFQVMSLGSGFKKVISMDLPAGDQGVDDAVAPGKERLADVDEDGVWFRSHLNGDRHRFTPEVSMGIQHQLGADIMFAFDELTTLMNSRGYQEESLERTRRWAQRCLDEHARLTTERTGRPYQALFGVIQGAQYEDLRRKACTDLAEMRAATAGGDGHGFDGYGIGGALEKENLGTIVGWCAQELPEDRPRHLLGISEPDDVFTAIENGADTFDCVSPTRVARTSAVYTRDGRINLAGARYKRQFTPIDETCDCYTCAHYTVAYLRHLFKAKEMNASTLASIHNERFVVRMVDDARRALEDGSFLDLKTEVLGRYYGTRMTTPAG

SEQ ID NO: 61588 - protein, 408 aa, unidentified
  source 1..408: note = Tessaracoccus aquimaris
  REGION 1..408: note = tr|A0A1Q2CLC0|A0A1Q2CLC0_9ACTN Queuine tRNA-ribosyltransferase OS=Tessaracoccus aquimaris; OX = 1332264 GN=tgt PE=3 SV=1
MSFSFDVTHRLDDAPGRVGVIHTPHGDIETPAFVVVGTKATVKAVLPETVADLGAQAVLANAYHLYLQPGSDLIDEAGGLGAFMNWPGPTFTDSGGFQVMSLGAGFKKVLAMDTAGLQNDDVIAEGKTRMAHVDEDGVTFKSHLDGTRHRFTPEISMRIQHELGADIMFAFDELTTLMNTRGYQEASVERTHRWAERCLAAHAQLTRERADKPYQALFGVIQGAQYEDLRRSAARGLAELEVDGQSFDGFGLGGALEKENLGTIIGWMVDELPDDKPRHLLGISEPDDFFAAIEMGADTFDCVNPSRVARNAAIYTADGRYNVNTARHRRSFVPLEEGCDCYTCQHYTRAYLHHLFKAKEMLASTLATIHNERFTVRLVDAIRAAMRAGDFYAYRDEFLGRFYSTEPA

SEQ ID NO: 61589 - protein, 405 aa, Tessaracoccus bendigoensis
  REGION 1..405: note = tr|A0A1M6CZ81|A0A1M6CZ81_9ACTN Queuine tRNA-ribosyltransferase OS=Tessaracoccus bendigoensis DSM 12906 OX=1123357 GN=tgt PE=3 SV=1
MSFSFDVTHRLETSPGRAGVIHTPHGSIETPAFIVVGTKASVKAVLPEAVRDLGAQAVLANAYHLYLQPGSDLIDEAGGLGRFMNWPMPTFTDSGGFQVMSLGAGFKKVLAMDTAGLQNDDVIAEGKTRMAHVDEDGVTFKSHLDGDRHRFTPEVSMRIQHELGADIMFAFDELTTLMNTRGYQESSVERTHRWAARCLGAHAELTRQRADKPYQALFGVIQGAQYEDLRRRAARGLAELEVDGQRFDGFGLGGALEKENLGTIVGWMVDELPEDRPRHLLGISEPDDFFAAVEMGVDTFDCVNPSRVARNAAIYTADGRYNVNTARHRRSFIPLEDGCDCYTCLHYTRAYLHHLFKAKEMLASTLATIHNERFTVRLVDNIRAALVSGDFHAYRDEFLGRFYSA

SEQ ID NO: 61590 - protein, 407 aa, Tessaracoccus flavescens
  REGION 1..407: note = tr|A0A1Q2CTX7|A0A1Q2CTX7_9ACTN Queuine tRNA-ribosyltransferase OS=Tessaracoccus flavescens; OX = 399497 GN=tgt PE=3 SV=1
MLVSFSFDVTHRLEGAPGRAGAIHTPHGDIETPAFVVVGTKATVKAVLPESVSDLGAQAVLANAYHLYLQPGSDLIDEAGGLSTFMNWPGPTFTDSGGFQVMSLGAGFKKVLAMDTAGLQNDDVIAEGKTRMAHVDEDGVTFKSHLDGNRHRFTPEISMRIQHELGADIMFAFDELTTLMNTRAYQESSVERTHRWAERCLAAHAQLTTERADKPYQALFGVIQGAQYEDLRRAAARGLASLEVDGQAFDGFGLGGALEKENLGTIIGWMVDELPEDKPRHLLGISEPDDFFAAIEMGADTFDCVNPSRVARNAAIYTADGRYNVNTARHRRSFIPLEEGCDCYTCTHYTRAYLHHLFKAKEMLASTLATIHNERFTVRLVDNIRAALKAGQFHAYKDEFLGRFYSA

SEQ ID NO: 61591 - protein, 408 aa, unidentified
  source 1..408: note = Tessaracoccus flavus
  REGION 1..408: note = tr|A0A1Q2CDR6|A0A1Q2CDR6_9ACTN Queuine tRNA-ribosyltransferase OS=Tessaracoccus flavus OX=1610493; GN = tgt PE=3 SV=1
MTAAFSFDVTHRLDGAPGRAGVIHTPHGRIETPAFIVVGTKATVKAVLPEAVAELGGQAVLANAYHLYLQPGADLVDEAGGLGAFMNWPGPTFTDSGGFQVMSLGAGFKKVLAMDTAGLQDDDVIAEGKTRMAHVDDDGVTFKSHLDGTRHRFTPEVSMRIQHQLGADVMFAFDELTTLMNTRGYQEQSVERTHRWAERCLAEHRRLTDERAGKPYQALFGVIQGAQYEDLRRRAARGLAELEVDGQSFDGFGLGGALEKENLGEIIGWMVEELPESKPRHLLGISEPDDFFAAIEMGADTFDCVNPSRVARNAAIYTADGRYNVNTARHKRSFIPLEEGCDCYTCTHYTRAYIHHLFKAKEMLSSTLATIHNERFTVRLVDNIRAALREGRFYEYRDEFLGRFYART

SEQ ID NO: 61592 - protein, 411 aa, unidentified
  source 1..411: note = Tessaracoccus lapidicaptus
  REGION 1..411: note = tr|A0A1C0AKG8|A0A1C0AKG8_9ACTN Queuine tRNA-ribosyltransferase OS=Tessaracoccus lapidicaptus; OX = 1427523 GN=tgt PE=3 SV=1
MTAGFSFDVTHRLDDARGRVGVIHTPHGDIETPAFIVVGTKATVKAVLPEAVADLGAQAVLANAYHLYLQPGSDLVDQAGGLGRFMNWPGPTVTDSGGFQVMSLGAGFKKVLAMDTAGLADDDVIADGKTRMAHVDDDGVTFRSHLDGTSHRFTPEVSMRIQHELGADIIFAFDELTTLMNTRAYQEASVERTHRWAERCLAEHQCLTRERGGRPYQALFGVIQGAQYEDLRRGAARGLAELEVDGRTFDGFGLGGALEKENLGTIISWMVDELPERKPRHLLGISEPDDLFAAVEAGADTFDCVNPSRVARNAAIYTADGRYNVNTARHRRSFIPLEEGCDCYTCTHYTRAYLHHLFKAKEMLSSTLATIHNERFTVRLVDQIRASLKSGDFYAFRDEFLGRFYRRGAGA

SEQ ID NO: 61593 - protein, 409 aa, Tessaracoccus oleiagri
  REGION 1..409: note = tr|A0A1G9LS31|A0A1G9LS31_9ACTN Queuine tRNA-ribosyltransferase OS=Tessaracoccus oleiagri; OX = 686624 GN=tgt PE=3 SV=1
MSFSFEVGARIDGAPGRTGVIHTPHGDIETPAFIVVGTKATVKAVLPEAVADLGAQAVLANAYHLYLQPGSDVVDEAGGLGRFMNWPGPTFTDSGGFQVMSLGAGFKKVLAMDTEGLQDDDVIADGKTRRALVDEDGVTFKSHLNGDPHRFTPEVSMRIQHELGADIMFAFDELTTLMNTREYQEASVERTHRWAVRCLAEHRRLTEERVGKPYQALFGVVQGAQYEDLRRRAARGLAELEVDGQRFDGFGLGGALEKQRLGEITRWMVEELPDDRPRHMLGLSEPDDFFAAIEMGGDTFDCVNPSRVARNGAIYTADGRYNVNTARHKRSFVPLEEGCDCYTCRHYTRAYVHHLFKGKEMLASTLATIHNERFTVRLVDNIRAAIRTGDFHAYRDEFLGRFYAGAATA

SEQ ID NO: 61594 - protein, 408 aa, unidentified
  source 1..408: note = Tessaracoccus rhinocerotis
  REGION 1..408: note = tr|A0A553K476|A0A553K476_9ACTN Queuine tRNA-ribosyltransferase OS=Tessaracoccus rhinocerotis; OX = 1689449 GN=tgt PE=3 SV=1
MSFGFEITGRLEGHGRTGTITTPHGSIETPAFVVVGTKATVKGVLPEQLTDLGAQAVLANAYHLYLQPGPDIVDEAGGLGAFMNWQGPTFTDSGGFQVMSLGSGFKKVLAMDTAGLADDDVVAEGKARLAHVDDDGVTFHSHLNGDRHRFTPEVSMGIQHQLGADVMFAFDELTTLMNTRAYQELSVERTHAWAVRCLAEHARLTRERSDKPYQALFGVVQGAQYEDLRRSAARGLAQLEVDGQSFDGYGLGGALEKQNLGTIIGWMADELPEDKPRHLLGISEPDDLFAAVAAGADTFDCVNPSRVARNAAIYTADGRYNVNTASSRRAFKPLDDGCDCYTCAHYTRAYLHHLFKAKEILASTLATIHNERFTVRLVDDIRAAVRAGDFDAFRTEFLGRFYAERSRS

SEQ ID NO: 61595 - protein, 405 aa, Tessaracoccus sp.
  REGION 1..405: note = tr|A0A3P1WTM8|A0A3P1WTM8_9ACTN Queuine tRNA-ribosyltransferase OS=Tessaracoccus sp. OH4464_COT-324 OX=2491059 GN=tgt PE=3 SV=1
MTFFEIDSRLGSAPGRTGVIHTPHGDIETPAFIVVGTKATVKAVLPETVSELGAQAVLANAYHLYLQPGSELVDEAGGLGKFMNWPGPTFTDSGGFQVMSLGAGFKKVLAMDTTGLQNDDVIAEGKQRRAHVDEDGVTFVSHLNGDLHRFTPEVSMRIQHELGADIMFAFDELTTLMNTREYQEASVERTYRWAERCLAAHEQLTKERADKPYQALFGVIQGAQYEDLRRRAARGLAELEVAGRQFDGFGLGGALEKRRLGEIVGWMVDELPEEKPRHLLGISEPDDLFAAVEMGADTFDCVNPSRVARNAAIYTHDGRFNVNTSANRRAFVPLDEDCDCYTCAHYTRAYLHHLFKAKEMLASTLATIHNERFTVRLVDQIRRAIRSGEFYEFRDDFLGRFYAGR

SEQ ID NO: 61596 - protein, 406 aa, Tessaracoccus sp.
  REGION 1..406: note = tr|A0A1R1IJU6|A0A1R1IJU6_9ACTN Queuine tRNA-ribosyltransferase OS=Tessaracoccus sp. ZS01; OX = 1906324 GN=tgt PE=3 SV=1
MSFSFDVTHHLEGAPGRAGVIHTPHGPIETPAFIAVGTKATVKAVLPESVAATGAQAVLANAYHLYLQPGSDIVDEAGGLGRFMNWPGPTFTDSGGFQVMSLGAGFKKVLAMDTKGMVDDDVIAEGKERRAHVDDDGVTFKSHLNGTMHRFTPEISMRIQHELGADIMFAFDELTTLMNTRGYQEDSVARTHAWAVRCLAEHARLTRERADKPYQALFGVIQGAQYEDLRRRAAQGLAALEVDGHGFDGFGLGGALEKENLGQIIGWMVEELPERKPRHLLGISEPDDLFAAVEMGADTFDCVNPSRVARNAAIYTADGRYNVNTAAHRRSFIPLEDGCDCYTCTHYTRAYLHHLFKAKEMLASTLATIHNERFTVRLVDTMRQTLKDGSCHAFRDEFLGRFYSGR

SEQ ID NO: 61597 - protein, 386 aa, unidentified
  source 1..386: note = Testudinibacter aquarius
  REGION 1..386: note = tr|A0A4R3YA42|A0A4R3YA42_9PAST Queuine tRNA-ribosyltransferase OS=Testudinibacter aquarius; OX = 1524974 GN=tgt PE=3 SV=1
MKYELHQTDGRARRGRLTFQRPQGEFSVETPAFMPVGTYGTVKGMTPEEVKATGAQILLGNTFHLWLRPGQEVMKLHGDLHDFMQWHGPILTDSGGFQVFSLGDIRKIKEEGVHFRNPINGEKIFLSPEKSMEIQYDLGSDIVMIFDECTPYPADFDYAKNSMEMSLRWAKRSRDRFDELGNKNALFGIIQGGVYEELRKVSVEGLVDIGFDGYAVGGLAVGEPKEDMHRILEYVCPQIPQDKPRYLMGVGKPEDLVEGVRRGIDMFDCVMPTRNARNGHLFTADGVIKIRNAKYRDDTSPLEAECDCYTCKHYSKAYLYHLDKCGEILGARLNTIHNLRYYQRLMAQLREAIEKGELEQFVEQFYARIGKPVPPLNQYHAFSEVK

SEQ ID NO: 61598 - protein, 381 aa, Tetragenococcus halophilus
  REGION 1..381: note = tr|A0A424XQU5|A0A424XQU5_TETHA Queuine tRNA-ribosyltransferase OS=Tetragenococcus halophilus subsp. halophilus DSM 20339 OX=1123358 GN=tgt PE=3 SV=1
MTQPAIKYRLIKKEKHTGARLGELITPHGTFPTPMFMPVGTLATVKTMSPEELKEMGAGVILSNTYHLWLRPGEDLVAEAGGLHKFMNWDQPILTDSGGFQVFSLADMRNIEEKGVHFRNHLNGLKMFLSPEKAIDIQNKLGSDIMMSLDECPPYDESYNYVKDSIERTSRWAERGLKAHANPQTQGVFGIVQGAGYKDLRKQSAKDLVSLDFPGYSIGGLSVGEPKQEMNRMLEYTTPLIPENKPRYLMGVGAADSLIDGAIRGIDMFDCVLPTRIARNGTCMTSKGRLVVKNAKFARDFRPIDEQCHCYTCRNYTRAYVRHLLKCDETFGIRLTTYHNLYFLLHLMEQVRQAIRDDQLLEFREQFFEAYGFNEENAKNF

SEQ ID NO: 61599 - protein, 381 aa, Tetragenococcus halophilus
  REGION 1..381: note = tr|A0A2H6CCV9|A0A2H6CCV9_TETHA Queuine tRNA-ribosyltransferase OS=Tetragenococcus halophilus subsp. flandriensis OX=1513898 GN=tgt PE=3 SV=1
MTQPAIKYRLIKKEKHTGARLGELITPHGTFPTPMFMPVGTLATVKTMSPEELKEMGAGVILSNTYHLWLRPGEDLVAEAGGLHKFMNWDQPILTDSGGFQVFSLADMRNIEEKGVHFRNHLNGSKMFLSPEKAIDIQNKLGSDIMMSLDECPPYDECYNYVKDSIERTSRWAERGLKAHANPQTQGLFGIVQGAGYKDLRKQSAKDLVSLDFPGYSIGGLSVGEPKQEMNRMLEYTTPLIPEDKPRYLMGVGAADSLIDGAIRGIDMFDCVLPTRIARNGTCMTSKGRLVVKNAKFARDFRPIDEQCHCYTCRNYTRAYVRHLLKCDETFGIRLTTYHNLYFLLHLMEQVRQAIRDDQLLEFREQFFEEYGFNEENAKNF

SEQ ID NO: 61600 - protein, 381 aa, Tetragenococcus koreensis
  REGION 1..381: note = tr|A0A3G5F7G7|A0A3G5F7G7_9ENTE Queuine tRNA-ribosyltransferase OS=Tetragenococcus koreensis; OX = 290335 GN=tgt PE=3 SV=1
MTQPAIQYRLIKKEKHTGARLGELITPHGTFPTPMFMPVGTLATVKTMSPEELKEMGAGVILSNTYHLWLRPGEDIVAEAGGLHKFMNWDQPILTDSGGFQVFSLADMRNIEEAGVHFRNHINGSKMFLSPEKAIDIQNKLGSDIMMSLDECPPYDESYDYVKNSIERTTRWAERGLKAHANPEMQGLFGIVQGAGHKDLRKQSAKDLVSLDFPGYSIGGLSVGEPKAEMNRMLEYTTPLIPENKPRYLMGVGAADSLIDGAIRGVDMFDCVLPTRIARNGTCMTSKGRLVVKNAKFARDFRPIDEQCNCYTCRNYTRAYVRHLLKCDETFGIRLTTYHNLHFLLHLMEQVRQAIRDDQLLEFREQFFEEYGFNEENAKNF

SEQ ID NO: 61601 - protein, 182 aa, Tetragenococcus muriaticus
  REGION 1..182: note = tr|A0A091C6S4|A0A091C6S4_9ENTE tRNA-guanine transglycosylase OS=Tetragenococcus muriaticus PMC-11-5; OX = 1302649 GN=TMUPMC115_0284 PE=4 SV=1
MRKQSAKDLVSLDFPGYSIGGLSVGEPKAEMNEMLEFTTPLIPESKPRYLMGVGAADSLIDGAIRGVDMFDCVLPTRIARNGTCMTSKGRLVVKNAKYARDFHPIDENCDCYTCRNYTRAYVRHLLKSNETFGIRLTTYHNLYFLLHLMAQVRQAIKEDQLLEFREQFFEEYGFNEKNAKNF

SEQ ID NO: 61602 - protein, 358 aa, Tetragenococcus muriaticus
  REGION 1..358: note = tr|A0A091C580|A0A091C580_9ENTE Queuine tRNA-ribosyltransferase OS=Tetragenococcus muriaticus 3MR10-3 OX=1302648 GN=tgt PE=3 SV=1
MITPHGTFPTPMFMPVGTLATVKTMSPEELKEMGAGVILSNTYHLWLRPGEDIVAQAGGLHKFMNWDQPILTDSGGFQVFSLADMRNIEEAGVHFRNHIDGSKMFLSPEKAVDIQNKLGSDIMMSLDECPPYNESHDYVKKSIERTTRWAQRGLEAHANPEKQGLFGIVQGAGYKDLRKQSAKDLVSLDFPGYSIGGLSVGEPKAEMNEMLEFTTPLIPESKPRYLMGVGAADSLIDGAIRGVDMFDCVLPTRIARNGTCMTSKGRLVVKNAKYARDFHPIDENCDCYTCRNYTRAYVRHLLKSNETFGIRLTTYHNLYFLLHLMAQVRQAIKEDQLLEFREQFFEEYGFNEKNAKNF

SEQ ID NO: 61603 - protein, 381 aa, Tetragenococcus osmophilus
  REGION 1..381: note = tr|A0A3G5FB62|A0A3G5FB62_9ENTE Queuine tRNA-ribosyltransferase OS=Tetragenococcus osmophilus; OX = 526944 GN=tgt PE=3 SV=1
MTQPAIQYRLIKKEKHTGARLGELITPHGTFPTPMFMPVGTLATVKTMSPEELKEMGAGVILSNTYHLWLRPGEDIVAQAGGLHKFMNWDQPILTDSGGFQVFSLADMRNIEEAGVHFRNHIDGSKMFLSPEKAIDIQNKLGSDIMMSLDECPPYNESYDYVKKSIERTTRWAQRGLEAHANPGQQGLFGIVQGAGYKDLRKQSAKDLVSLDFPGYSIGGLSVGEPKEEMNKMLEFTTPLIPENKPRYLMGVGAADSLIDGAIRGIDMFDCVLPTRIARNGTCMTSRGRLVVKNAKYARDFHPIDENCDCYTCRNYTRAYVRHLLKSNETFGIRLTTYHNLYFLLHLMAQVRQAIKEDQLLEFREQFFEEYGFNEENAKNF

SEQ ID NO: 61604 - protein, 379 aa, unidentified
  source 1..379: note = Tetzosporium hominis
  REGION 1..379: note = tr|A0A264W0L3|A0A264W0L3_9BACL Queuine tRNA-ribosyltransferase OS=Tetzosporium hominis OX=2020506; GN = tgt PE=3 SV=1
MTAIRYELLKKDKQTGARLGIVHTPHGSFETPTFMPVGTQATVKTMSPEEIKGMDAGIILSNTYHLWLRPGHDIIREAGGLHKFMNWDRAILTDSGGFQVFSLSDMRKIEEEGVHFRNHLNGDKLFLSPEKSMEVQNALGSDIMMAFDECPPYPASHEYMKASVERTSRWAERCMTAHTNTDKQGLFGIIQGGEYEDLRRQSAQDIISLDFPGYAIGGLSVGEPKDIMNRVLEFTTPLMPDNKPRYLMGVGSPDSLIDGAIRGVDMFDCVLPTRIARNGTMFTKKGRLVIKGAKFARDFGPVDETCDCYTCKNYSRAYLRHLFKADETFGLRLASTHNLHFLMNLMKDVRQAIREDRLLDFKEEFFEEYGYNKPNAKNF

SEQ ID NO: 61605 - protein, 378 aa, Thalassobacillus cyri
  REGION 1..378: note = tr|A0A1H4FBL7|A0A1H4FBL7_9BACI Queuine tRNA-ribosyltransferase OS=Thalassobacillus cyri OX=571932; GN = tgt PE=3 SV=1
MAITYEFVKTCKQTGARLGRVHTPHGSFDTPTFMPVGTLATVKTMSPEELQEMNANIILSNTYHLWLRPGEDIIEEAGGLHKFMNWDGAILTDSGGFQVFSLSDLRQIEEEGVHFRNHISGEKLFLSPEKAMHIQNALGSDIMMAFDECPPYPAEYEYLKKSVERTSRWAERCLAAHKNPDKQGLFGIVQGGEYEELRRQSAEDLISLDFPGYAIGGLSVGEPKDVMNRVLDFTAPMLPENKPRYLMGVGSPDSLIDGSIRGIDMFDCVLPTRIARNGTCMTSNGRLVVRNAKFSRDFRPIDENCDCYTCRNYSRAYIRHLVKNNETFGFRLTTYHNLYFLLKLMEHVRQAIREDRLGDFREEFFEQYGFNKPNAKNF

SEQ ID NO: 61606 - protein, 376 aa, Thalassobacter sp.
  REGION 1..376: note = tr|A0A099T7W4|A0A099T7W4_9RHOB Queuine tRNA-ribosyltransferase OS=Thalassobacter sp. 16PALIMAR09; OX = 1225651 GN=tgt PE=3 SV=1
MTQTFSFSLHGTDGRARTGTVHTPRGDIRTPAFMPVGTAATVKAMMPENVRATGADILLGNTYHLMLRPTAERVARLGGLHKFMNWDRPILTDSGGFQVMSLGALRKLTEEGVTFKSHIDGSKHHLTPERSMEIQRLLGSDIVMCFDECPALPADRARIRESMELSMRWAKRSRDAFGDRPGHALFGIQQGGLEEDLRAESAEALRGIEFDGYAVGGLAVGEGQEAMFSCLDFAPEQLPKDKPRYLMGVGKPDDLVGAVKRGIDMFDCVLPSRSGRTGQAFTRRGVVNIKNARHMDDPRPLDAECTCPACSNYSRAYLHHVFRSQEILSSMLLTWHNLHYYQELMAAMRAAIASGTFADFETGFHAARAQGDIEPV

SEQ ID NO: 61607 - protein, 376 aa, unidentified
  source 1..376: note = Thalassobacter stenotrophicus
  REGION 1..376: note = tr|A0A0P1FHP5|A0A0P1FHP5_9RHOB Queuine tRNA-ribosyltransferase OS=Thalassobacter stenotrophicus; OX = 266809 GN=tgt PE=3 SV=1
MTQTFSFSLHGTDGRARTGTVHTPRGDIRTPAFMPVGTAATVKAMMPESVRATGADILLGNTYHLMLRPTAERVARLGGLHKFMNWDRPILTDSGGFQVMSLGALRKLTEEGVTFKSHIDGSKHHLTPERSMEIQRLLGSDIVMCFDECPALPADRARIRESMELSMRWAKRSRDAFGDRPGHALFGIQQGGLEEDLRAESAEALRGIEFDGYAVGGLAVGEGQEAMFSCLDFAPEQLPKDKPRYLMGVGKPDDLVGAVKRGIDMFDCVLPSRSGRTGQAFTRRGVVNIKNARHMDDPRPLDAECTCPACSNYSRAYLHHVFRSQEILSSMLLTWHNLHYYQELMAAMRAAIASGTFADFETGFHAARAQGDIEPV

SEQ ID NO: 61608 - protein, 374 aa, Thalassobaculum litoreum
  REGION 1..374: note = tr|A0A1G7Q3T1|A0A1G7Q3T1_9PROT Queuine tRNA-ribosyltransferase OS=Thalassobaculum litoreum DSM 18839 OX=1123362 GN=tgt PE=3 SV=1
MTIGFETWAKDGAARRGRLTLAHGTIETPAFMPVGTAATVKAMRPESVAETGAEILLGNTYHLMLRPTAERIAELGGLHRFMNWNKPILTDSGGFQVMSLAGRRKLDKDGVTFQSHIDGSKHRLTPERSIEIQHLLGSDITMAFDECTPHPATHEQAADSMRLSMKWAARSKEAFTDRPGHTLFGIVQGSVYDDLRRESVEALTGIGFEGYAVGGLAVGEGQEEMFRVLEATTPHLPDDAPRYLMGVGKPGDLVGAVTRGIDMFDCVLPSRSGRTGQAQTRRGPVNLRNARHAADPRPLDADCACPACTGYSRAYLHHLQKADEILGPMLLTWHNLHYYQELMAGLRGAVEAGTLADFAAAFAEQQAAGDIPAL

SEQ ID NO: 61609 - protein, 376 aa, unidentified
  source 1..376: note = Thalassobium sp.
  REGION 1..376: note = tr|C7D7U8|C7D7U8_9RHOB Queuine tRNA-ribosyltransferase OS=Thalassobium sp. R2A62; OX = 633131 GN=tgt PE=3 SV=1
MTQPFSFDLTATDGRARGGTIHTPRGDIRTPAFMPVGTAATVKAMMPESVAATGADILLGNTYHLMLRPTAERIARLGGLHKFMNWDKPILTDSGGFQVMSLAGLRKLTEKGVTFKSHIDGSKHELTPERSMEIQRLLGSDIVMCFDECPALPADRKRIAQSMEMSMRWAKRSRDAFGDRPGYALFGIQQGGLEQDLRQESAEALREIGFEGYAVGGLAVGEGQEAMFDCLDYAPEQLPTDKPRYLMGVGKPDDIVGAVARGIDMMDCVLPSRSGRTGQVFTRHGVVNIKNARHADDPRPLDENCSCPACSNYSRAYLHHVFRSQEMISGMLLTWHNLHYFQELMQGMRDAIEVGQFAQFQSDFHGARAQGDIDPL

SEQ ID NO: 61610 - protein, 382 aa, unidentified
  source 1..382: note = Thalassobium sp.
  REGION 1..382: note = tr|A0A2G2PQN9|A0A2G2PQN9_9RHOB Queuine tRNA-ribosyltransferase OS=Thalassobium sp. OX=2030825; GN = tgt PE=3 SV=1
MQFELHSEITDGSSHARRGTITFPRGKIQTPAFMPVGTYGSVKGLNPDQVEALGAEIILGNTFHLMLRPGTEVIKEHGDLHDFIGWGKPILTDSGGFQVFSLGDMRKITEEGVAFRSPVNGDKVMMTPESSMQVQRDLGSDIVMIFDECTPYPATEKEAADSMRMSLRWAKRSKDAHGDNPSALFGIIQGGMYEELRDESLAGLQDIGFDGYAIGGLSVGEPKPDMMRVLRHVAPKMPQDKPRYLMGVGKPEDLVEGVRRGVDMFDCVMPTRNARNSHLFTSKGVLKIRNAANRSYNGPVDDECDCYTCKNFSRAYLHHLDKCKEILGATLNSIHNLHYYQTLMAGLRRSLEEGTFAGFVDEFYAKRGMKTPPLDENSGARE

SEQ ID NO: 61611 - protein, 375 aa, unidentified
  source 1..375: note = Thalassobius activus
  REGION 1..375: note = tr|A0A0P1IU65|A0A0P1IU65_9RHOB Queuine tRNA-ribosyltransferase OS=Thalassobius activus OX=1715691; GN = tgt PE=3 SV=1
MTSRFSFELKATDGKARTGVISTPRGEIRTPAFMPVGTAATVKAMMPESVRATGADILLGNTYHLMLRPTAERIDRLGGLHKFMNWERPILTDSGGFQVMSLAGLRKLTEKGVTFQSHIDGSKHELTPERSMEIQKLLGSDIVMCFDECPALPADRDRIVESMRMSMRWAQRSKDAFGDRPGHALFGIQQGGLEQDFREESAKALRDIEFDGYAIGGLAVGEGQEAMFKVLDFAPDQLPVNKPRYLMGVGKPDDIVGAVKRGVDMMDCVLPSRSGRTGQVFTKRGVVNIKNARHADDPRPLDESVDSPARNYSRAYLHHVFRSNEMIAGMLLTWHNLRYFQDIMNEMRHAIAAGTFDAWEEEFHAMRALGDIEPI

SEQ ID NO: 61612 - protein, 376 aa, unidentified
  source 1..376: note = Thalassobius autumnalis
  REGION 1..376: note = tr|A0A0P1GE90|A0A0P1GE90_9RHOB Queuine tRNA-ribosyltransferase OS=Thalassobius autumnalis; OX = 2072972 GN=tgt PE=3 SV=1
MSEKFSFEKLGQDGKARTGVIHTTRGDIRTPAFMPVGTAATVKAMMPESVAATGADILLGNTYHLMLRPTAERIDALGGLHKFMNWDKPILTDSGGFQVMSLAGLRKLTEKGVTFKSHIDGSRHELTPERSMEIQRLLGSDIVMCFDECPALPADRDTIAKSMRMSMRWAQRSRDAFGDRPGHALFGIQQGGLEQDFRQESAEALREIGFDGYAVGGLAVGEGQGAMFGCLDFAPDMLPEDKPRYLMGVGKPDDIVGAVARGIDMMDCVLPSRSGRTGQAFTRHGVVNIKNARHQDDPRPLDEQCSCPACSNYSRAYLHHVYRSQEMISGMLLTWHNLHYFQELMQGMRDAIAAGTFEAFQKDFHETRANGDIERL

SEQ ID NO: 61613 - protein, 376 aa, Thalassobius gelatinovorus
  REGION 1..376: note = tr|A0A0N7LVM2|A0A0N7LVM2_THAGE Queuine tRNA-ribosyltransferase OS=Thalassobius gelatinovorus; OX = 53501 GN=tgt PE=3 SV=1
MTRRFEFEKLGQDGKARLGVIRSPRGEIRTPAFMPVGTAGTVKAMMPESVASTGADILLGNTYHLMLRPTAERIDRLGGLHKFMNWDKPILTDSGGFQVMSLSNLRKMSEEGVTFKSHIDGSRHTLTPERSMEIQRLLGSDIVMCFDECTPFPADPKVSMESMRLSMRWAQRSREAFGDRPGHALFGIQQGSIYRDQRERSAELLKAIEFEGYAVGGLAVGEGQDTMFEVLDYAPDMLPEDKPRYLMGVGKPDDIVGAVARGIDMMDCVLPTRSGRTGQVFTRHGVLNIKNARHQDDPRPVDESCSCPACRNYSRAYLHHVFRAQEMISGMLLTWHNLQYYQDLMQGMRGAIAGGTFDQFQSDFHAQRAQGDIEPL

SEQ ID NO: 61614 - protein, 380 aa, Thalassobius mediterraneus
  REGION 1..380: note = tr|A0A0P1GN67|A0A0P1GN67_9RHOB Queuine tRNA-ribosyltransferase OS=Thalassobius mediterraneus; OX = 340021 GN=tgt PE=3 SV=1
MRCGMEKTFSFEKLGQDGKARTGVIHTTRGDIRTPAFMPVGTAATVKAMMPESVAATGADILLGNTYHLMLRPTAERIDRLGGLHKFMNWDKPILTDSGGFQVMSLADLRKLTEKGVTFKSHIDGSRHELTPERSMEIQRLLGSDIVMCFDECPALPADRDAIAKSMRLSMRWADRSREAFGDRPGHALFGIQQGGLEQDFRQESAEALRNIGFDGYAVGGLAVGEGQEAMFKCLDFAPDMLPEDKPRYLMGVGKPDDIVGAVARGIDMMDCVLPSRSGRTGQAFTRHGVVNIKNVRHKDDPRPLDENCTCPACSNYSRAYLHHVYRSQEMISGMLLTWHNLHYFQELMQGMRDAIAAGTFEAFQKTFHETRANGDIERL

SEQ ID NO: 61615 - protein, 376 aa, Thalassobius sp.
  REGION 1..376: note = tr|A0A2E9GB21|A0A2E9GB21_9RHOB Queuine tRNA-ribosyltransferase OS=Thalassobius sp. OX=1979401; GN = tgt PE=3 SV=1
MQFSLQHQDKQSSARAGELITDHGKIETPIFMPVGTAGTVKAVHQRELENDIQAQIILGNTYHLYLRPGLDIIQKAGGIHKFNGWERPVLTDSGGYQVYSLADTRKITEEGVAFRSHISGNKLFFTPEYVMDIQRIIGADIIMAFDECTPYPCEYQYAKDSMHMTHRWLKRCCDRFDTTDSLYGYKQTLFPIVQGSTYKDLRIQSAETIASFEREGNAIGGLSVGEPHEDMYEMTELVCGILPKDKPRYLMGVGTPANILECIALGVDMFDCVMPTRNARNGMLFTTQGIINIRNAKWQDDFTPIDEELGGYVSTFYSKAYLRHLKHSDEYLAGMIASVHNLTFYLWLVKEARKHIIAGDFATWKDIMVKKLMVRL

SEQ ID NO: 61616 - protein, 375 aa, Thalassococcus halodurans
  REGION 1..375: note = tr|A0A1H5SCP5|A0A1H5SCP5_9RHOB Queuine tRNA-ribosyltransferase OS=Thalassococcus halodurans; OX = 373675 GN=tgt PE=3 SV=1
MTQFSFALHATDGRARTGEISTPRGEIRTPAFMPVGTAATVKAMMPESVRATGADILLGNTYHLMLRPTAERIDRLGGLHKFMNWDRPILTDSGGFQVMSLADLRKMTEKGVTFKSHIDGSKHELTPERSMEIQRLLGSDIVMCFDECPALPASKDRIAESMRLSMRWAQRSRDAFGDRPGHALFGIQQGGLEQDLREESAKALQDIGFDGYAIGGLAVGEGQEAMFSCLDYAPDMLPVDKPRYLMGVGKPDDIVGAVKRGIDMMDCVLPSRSGRTGQAWTRRGQVNIKNARHQDDPRPLDEQCTCPACSNYSRAYLHHVFRAQEMISGMLLTWHNLHYFQELMQGMRDAIAAGRFAEFEAEFHAQRAEGDIERL

SEQ ID NO: 61617 - protein, 374 aa, unidentified
  source 1..374: note = Thalassococcus profundi
  REGION 1..374: note = tr|A0A369TQ13|A0A369TQ13_9RHOB Queuine tRNA-ribosyltransferase OS=Thalassococcus profundi; OX = 2282382 GN=tgt PE=3 SV=1
MSTSFTLHATDGRARTGVISTPRGDIRTPAFMPVGTAGTVKAMLPGSVRATGADILLGNTYHLMLRPTAERVHRLGGLHKFMNWDRPILTDSGGFQVMSLADLRKLTEHGVTFKSHIDGSKHEITPERSMEIQRLLGSDIVMCFDECPALPATDEAVADSMRLSMRWAERSKLAFGDRPGHMLFGIQQGGVTEELRAESARALTGIGFDGYAIGGLAVGEGQEAMFGVLDYAPEMLPADKPRYLMGVGKPDDIVGAVKRGVDMMDCVLPSRSGRTGQAFTRHGVVNIKNARHQDDPRPLDEACTCPACRDYSRAYLHHVFRSHEMISGMLLTWHNLHYFQEIMQGIRDAIAAGTFADWEAAFHAGRAAGDIDPL

SEQ ID NO: 61618 - protein, 376 aa, Thalassococcus sp.
  REGION 1..376: note = tr|A0A4P6MI53|A0A4P6MI53_9RHOB Queuine tRNA-ribosyltransferase OS=Thalassococcus sp. S3; OX = 2017482 GN=tgt PE=3 SV=1
MTQRFSYELTATDGAARTGVISTPRGEIRTPAFMPVGTAATVKAMLPESVAATGADVLLGNTYHLMLRPTAERIDRLGGLHRFMNWEKPILTDSGGFQVMSLAGLRKLTEEGVTFKSHIDGSKHALTPERSMEIQRLLGSDIVMCFDECPALPATEERVAESMRLSMRWAARSREAFGDRPGHALFGIQQGGVTQDLRAESAEALRKIGFDGYAVGGLAVGEGQEAMFGVLDYAPAMLPEEKPRYLMGVGKPDDIVGAVARGIDMMDCVLPSRSGRTGQVFTRRGVLNIKNARHQDDPRPLDEDCTCPACQSYSRAYLHHVFRAQEMISGMLLTWHNLHYYQEIMSGMRTAISEGRFDAWQREFHAGRAEGDIEPL

SEQ ID NO: 61619 - protein, 385 aa, Thalassolituus oleivorans
  REGION 1..385: note = tr|A0A1L6KIH1|A0A1L6KIH1_9GAMM Queuine tRNA-ribosyltransferase OS=Thalassolituus oleivorans; OX = 187493 GN=tgt PE=3 SV=1
MQFDLHHQETEGSFARRGTLRFPRGEVQTPAFMPVGTYGSVKGLNPDQVEDLGAEIILGNTFHLMLRPGTEVVKAHGDLHDFIGWDKPILTDSGGFQVFSLGDMRKITEEGVTFASPVNGDKVLMTPESSMQVQRDLGSDVVMIFDECTPYPATEKEAADSMRLSLRWAKRSKDAHGDNPSALFGIIQGGMYESLRDESLAGLLDIGFDGYAVGGLSVGEPKPDMMRVLRHIAPQMPVDKPRYLMGVGKPEDLVEGVRRGIDMFDCVMPTRNARNGHLFTHTGVVKLRNAANRSDTGPIDPECDCYTCKSYSRAYLHHLDRCREILGATLNSIHNLHYYQTLMAGLRRSLEEGTFAEFVNDFYAKRGKTTPSLDQHTDQFQESAE

SEQ ID NO: 61620 - protein, 395 aa, Thalassolituus oleivorans
  REGION 1..395: note = tr|M5DQN5|M5DQN5_9GAMM Queuine tRNA-ribosyltransferase OS=Thalassolituus oleivorans MIL-1; OX = 1298593 GN=tgt PE=3 SV=1
MSTDTSRECFMQFDLHHQETEGSFARRGTLRFPRGEVQTPAFMPVGTYGSVKGLNPDQVEDLGAEIILGNTFHLMLRPGTEVVKAHGDLHDFIGWDKPILTDSGGFQVFSLGDMRKITEEGVTFASPVNGDKVLMTPESSMQVQRDLGSDVVMIFDECTPYPATEKEAADSMRLSLRWAKRSKDAHGDNPSALFGIIQGGMYESLRDESLAGLLDIGFDGYAVGGLSVGEPKPDMMRVLRHIAPQMPVDKPRYLMGVGKPEDLVEGVRRGIDMFDCVMPTRNARNGHLFTHTGVVKLRNAANRSDTGPIDPECDCYTCKSYSRAYLHHLDRCREILGATLNSIHNLHYYQTLMAGLRRSLEEGTFAEFVNDFYAKRGKTTPSLDQHTDQLQESAE

SEQ ID NO: 61621 - protein, 390 aa, Thalassolituus sp.
  REGION 1..390: note = tr|A0A558NAF9|A0A558NAF9_9GAMM Queuine tRNA-ribosyltransferase OS=Thalassolituus sp. C2-1; OX = 2597518 GN=tgt PE=3 SV=1
MSMTRECFMQFELHSEITDGSSHARRGTITFPRGKIQTPAFMPVGTYGSVKGLNPDQIEALGAEIILGNTFHLMLRPGTEVIKEHGDLHDFIGWDKPILTDSGGFQVFSLGDMRKITEEGVAFRSPVNGDKVMMTPESSMQVQRDLGSDIVMIFDECTPYPATEKQAADSMRMSLRWAKRSKDAHGDNPSALFGIIQGGMYEDLRDESLAGLLEIGFDGYAIGGLSVGEPKPDMMRVLRHVAPKMPQDKPRYLMGVGKPEDLVEGVRRGVDMFDCVMPTRNARNSHLFTSKGVLKIRNAANRTYNGPVDDECDCYTCKNFSRAYLHHLDKCKEILGATLNSIHNLHYYQTLMAGLRRSLEEGTFAGFVDEFYAKRGMKTPPLDQDSGARE

SEQ ID NO: 61622 - protein, 378 aa, Thalassomonas actiniarum
  REGION 1..378: note = tr|A0A0D8CRJ4|A0A0D8CRJ4_9GAMM Queuine tRNA-ribosyltransferase OS=Thalassomonas actiniarum; OX = 485447 GN=tgt PE=3 SV=1
MQYELVTTDGKARRGRLIFDRGVVETPAFMPVGTYGTVKGMTTAEVEATGAHILLGNTFHLMLRPGTEIIEQHGDLHDFMNWHKPILTDSGGFQVFSLGAMRKITEKGVEFRSPVNGEKIMLTPERSMEVQRSLGSDIVMIFDECTPYPASHKEAKTSMELSLRWAQRSKDAHGDNPSALFGIVQGGMYEDLREVSVSGLKAIDFDGFAIGGLSVGEPKEDMIRILDHTTPLIPENKPRYLMGVGKPEDLVEGVRRGIDMFDCVMPTRNARNGHLFVTNGVIKIRNSRHKTDTGSLDPQCDCYTCKNYSRAYLHHLDKCNEILGAQLNTQHNLRFYQRVMQGLRDAIEQGKLDEFVEEFYALRDLPVPPLKGADKAED

SEQ ID NO: 61623 - protein, 377 aa, Thalassomonas sp.
  REGION 1..377: note = tr|A0A553FJE9|A0A553FJE9_9GAMM Queuine tRNA-ribosyltransferase OS=Thalassomonas sp. M1454; OX = 2594477 GN=tgt PE=3 SV=1
MKYDLINKDGKARRGRLTFDRGVVETPAFMPVGTYGTVKGMKTDEVKDTGAHIILGNTFHLMLRPGTEIIEQHGGLHGFMNWDKPILTDSGGFQVFSLGKMRKITEKGVEFRSPVNGEKIMLTPERSMEVQRSLGSDIVMIFDECTPYPATHEEAKVSMELSLRWAKRSKAAHGDNPSALFGIVQGGMYEDLRKVSAAGLIDIDFDGYAIGGLSVGEPKEEMIKVLDHTTDLIPENKPRYLMGVGKPEDLVEGVRRGIDMFDCVMPTRNARNGHLFVTDGIVKIRNARHKTDTGPLDPGCDCYTCKNYSRAYLHHLDKCNEILGSQLNTLHNLHFYQRVMQGLRDAIEQGKLDEFVQEFYAIRGLEVPPLNSSVTQE

SEQ ID NO: 61624 - protein, 378 aa, Thalassomonas viridans
  REGION 1..378: note = tr|A0A0D8DF68|A0A0D8DF68_9GAMM Queuine tRNA-ribosyltransferase OS=Thalassomonas viridans; OX = 137584 GN=tgt PE=3 SV=1
MQYELVTTDGKARRGRLIFDRGVVETPAFMPVGTYGTVKGMTTAEVEATGAHILLGNTFHLMLRPGTEIIEQHGDLHDFMNWHKPILTDSGGFQVFSLGAMRKITEKGVEFRSPVNGEKIMLTPERSMEVQRSLGSDIVMIFDECTPYPASHKEAKTSMELSLRWAQRSKDAHGDNPSALFGIVQGGMYEDLREVSVNGLKAIDFDGFAIGGLSVGEPKEDMIRILDHTTPLIPENKPRYLMGVGKPEDLVEGVRRGIDMFDCVMPTRNARNGHLFVTNGVIKIRNSRHKTDTGPLDPECDCYTCKNYSRAYLHHLDKCNEILGAQLNTQHNLRFYQRVMQGLRDAIEQGKLDEFVEEFYALRDLPVPPLKGVDETED

SEQ ID NO: 61625 - protein, 380 aa, unidentified
  source 1..380: note = Thalassospira alkalitolerans
  REGION 1..380: note = tr|A0A1Y2LGV7|A0A1Y2LGV7_9PROT Queuine tRNA-ribosyltransferase OS=Thalassospira alkalitolerans; OX = 1293890 GN=tgt PE=3 SV=1
MTEFRYELLATDGKARLGRIHTAHGVIDTPAFMPVGTAATVKGMLPENVADTGAQILLGNTYHLMLRPGAERIARLGGLHKFMNWDKPILTDSGGYQVMSLSKLRKITEDGVTFKSHIDGRKFALSPERSMEIQHLLGSTITMAFDECTPFPATEQQAADSMRMSMRWAKRSKDAFVNREGYALYGIQQGSVFENLRRESSEKLTELDLPGHSVGGLAVGEGQQIMFDTLDFCVDMLPANKPRYLMGVGKPSDLVGAVMRGIDQFDCVLPTRSGRNAQGFTHRGTLNLKNGRHRDDDRPLDDQCNCPACTKYSRAYLHHLIKAGEILGAVLLTWHNLAYYQDLMADMRKAIAEGRMDAFARDFHAAQEGGDIDPMPIIED

SEQ ID NO: 61626 - protein, 380 aa, unidentified
  source 1..380: note = Thalassospira lohafexi
  REGION 1..380: note = tr|A0A2N3LBU8|A0A2N3LBU8_9PROT Queuine tRNA-ribosyltransferase OS=Thalassospira lohafexi; OX = 744227 GN=tgt PE=3 SV=1
MTEFRYELLATDGKARLGRIHTAHGVIDTPTFMPVGTAATVKAMLPENVADTGAQILLGNTYHLMLRPGAERIARLGGLHKFMNWDKPILTDSGGYQVMSLAKLRKITEDGVTFKSHIDGRKFNLTPERSMEIQHLLGSTITMAFDECTPFPATEQQARESMQMSMRWAKRSRDAFVNREGYALYGIQQGSVFEALRRESSEKLAELDLPGHSVGGLAVGEGQQIMFDTLDFCVDMLPANKPRYLMGVGKPSDLVGAVMRGIDQFDCVLPTRSGRNAQAFTHRGTLNLKNGRHRDDDRPLDDQCGCPACTKYSRAYLHHLIKAGEMLGSVLLTWHNLAYYQDLMRDMRSAISEGRMDAFARDFHAAQEGGDIDPVPIIED

SEQ ID NO: 61627 - protein, 380 aa, Thalassospira lucentensis
  REGION 1..380: note = tr|A0A367V6G2|A0A367V6G2_9PROT Queuine tRNA-ribosyltransferase OS=Thalassospira lucentensis MCCC 1A00383 = DSM 14000 OX=1123365 GN=tgt PE=3 SV=1
MTEFRYELLAQDGKARLGRIYTAHGVIDTPTFMPVGTAATVKAMLPENVADTGAQILLGNTYHLMLRPGAERIARLGGLHKFMNWDKPILTDSGGYQVMSLAKLRKITEDGVTFKSHIDGRKFNLTPERSMEIQHLLGSTITMAFDECTPFPATEQQARESMQMSMRWAKRSRDAFVNREGYALYGIQQGSVFENLRRESSEKLTELDLPGHSVGGLAVGEGQQIMFDTLDFCVDMLPANKPRYLMGVGKPSDLVGAVMRGIDQFDCVLPTRSGRNAQAFTHRGTLNLKNGRHRDDDRPLDDQCGCPACTKYSRAYLHHLIKAGEMLGSVLLTWHNLAYYQDLMRDMRSAISEGRMDAFARDFHAAQEGGDIDPVPIIED

SEQ ID NO: 61628 - protein, 380 aa, Thalassospira lucentensis
  REGION 1..380: note = tr|A0A154L244|A0A154L244_9PROT Queuine tRNA-ribosyltransferase OS=Thalassospira lucentensis; OX = 168935 GN=tgt PE=3 SV=1
MTEFRYELLATDGKARLGRIHTAHGVIDTPAFMPVGTAATVKGMLPENVADTGAQILLGNTYHLMLRPGAERIARLGGLHKFMNWDKPILTDSGGYQVMSLSKLRKITEDGVTFKSHIDGRKFALSPERSMEIQHLLGSTITMAFDECTPFPATEQQAADSMRMSMRWAKRSKDAFVEREGYALYGIQQGSVFESLRRESSEKLAELDLPGHSVGGLAVGEGQQIMFDTLDFCVDMLPANKPRYLMGVGKPSDLVGAVMRGIDQFDCVLPTRSGRNAQAFTHRGTLNLKNGRHRDDDRPLDDQCNCPACTKYSRAYLHHLIKAGEILGAVLLTWHNLAYYQDLMRGMRDAIAEGRMEQFARDFYAGQEGGDIDPVPIIED

SEQ ID NO: 61629 - protein, 380 aa, unidentified
  source 1..380: note = Thalassospira marina
  REGION 1..380: note = tr|A0A2N3KWD8|A0A2N3KWD8_9PROT Queuine tRNA-ribosyltransferase OS=Thalassospira marina OX=2048283; GN = tgt PE=3 SV=1
MTEFRYELLAQDGKARRGRIHTAHGVIETPAFMPVGTAATVKGMMPESVAATGAQILLGNTYHLMLRPGAERIARLGGLHKFMNWDKPILTDSGGYQVMSLAGLRKITEEGVTFKSHIDGRKFSLSPERSMEIQHLLGSTITMAFDECTPFPATEEVAAESMRMSMRWAKRSRDAFVEREGYALYGIQQGSVFEHLRRESSEKLAELDLPGHSVGGLAVGEGQQVMFETLDFCVDMLPANKPRYLMGVGKPSDLVGAVMRGIDQFDCVLPTRSGRNAQAFTRRGTVNLKNGRHRDDDRPLDDQCSCPACSQYSRAYLHHLIKANEILGAMLLTWHNLQYYQDLMKGMRDAIDEGRMEAFARDFYAGQEGGDIDPVPMIQD

SEQ ID NO: 61630 - protein, 380 aa, unidentified
  source 1..380: note = Thalassospira mesophila
  REGION 1..380: note = tr|A0A1Y2L2H5|A0A1Y2L2H5_9PROT Queuine tRNA-ribosyltransferase OS=Thalassospira mesophila; OX = 1293891 GN=tgt PE=3 SV=1
MTEFRYELLAKDGKARRGRIHTAHGTIETPAFMPVGTAATVKGMMPESVAATGAEILLGNTYHLMLRPGAERIARLGGLHKFMNWDKPILTDSGGYQVMSLSSLRKITEEGVTFKSHIDGRKFSLSPERSMEIQHLLGSTITMAFDECTPFPATEDVAAESMRMSMRWAKRSRDAFVNREGYALYGIQQGSVFENLRRESSDKLAELDLPGHSVGGLAVGEGQQVMFDTLDFCVDMLPANKPRYLMGVGKPSDLVGAVMRGIDQFDCVLPTRSGRNAQAFTHRGTVNLKNGRHRDDDRPLDDHCSCPACSQYSRAYLHHLIKANEILGAMLLTWHNLQYYQDLMKGMRDAIANGQMDAFAKQFYADQEGGDIDPVPMIQD

SEQ ID NO: 61631 - protein, 380 aa, unidentified
  source 1..380: note = Thalassospira permensis
  REGION 1..380: note = tr|A0A074J6J2|A0A074J6J2_9PROT Queuine tRNA-ribosyltransferase OS=Thalassospira permensis NBRC 106175 OX=1353532 GN=tgt PE=3 SV=1
MTEFRYELLATDGKARLGRIHTAHGVIDTPAFMPVGTAATVKGMLPENVADTGAQILLGNTYHLMLRPGAERIARLGGLHKFMNWDKPILTDSGGYQVMSLSKLRKITEDGVTFKSHIDGRKFALSPERSMEIQHLLGSTITMAFDECTPFPATEQQAADSMRMSMRWAKRSKDAFVEREGYALYGIQQGSVFENLRRESSEKLAELDLPGHSVGGLAVGEGQQIMFDTLDFCVDMLPANKPRYLMGVGKPSDLVGAVMRGIDQFDCVLPTRSGRNAQAFTHRGTLNLKNGRHRDDDRPLDDQCNCPACTKYSRAYLHHLIKAGEILGAVLLTWHNLAYYQDLMRGMREAIAAGRMEQFARDFYAGQEGGDIDPVPIIED

SEQ ID NO: 61632 - protein, 380 aa, unidentified
  source 1..380: note = Thalassospira povalilytica
  REGION 1..380: note = tr|A0A2N3KQ19|A0A2N3KQ19_9PROT Queuine tRNA-ribosyltransferase OS=Thalassospira povalilytica; OX = 732237 GN=tgt PE=3 SV=1
MTEFRYELLAQDGKARLGRIHTAHGVIDTPTFMPVGTAATVKGMLPENVADTGAQILLGNTYHLMLRPGAERIARLGGLHKFMNWDKPILTDSGGYQVMSLAKLRKITEEGVTFKSHIDGRKFNLTPERSMEIQHLLGSTITMAFDECTPFPATEQQARESMQMSMRWAKRSKDAFVEREGYALYGIQQGSVFENLRRESSEKLAELDLPGHSVGGLAVGEGQQIMFDTLDFCVDMLPANKPRYLMGVGKPSDLVGAVMRGIDQFDCVLPTRSGRNAQAFTHRGTLNLKNGRHRDDDRPLDDQCNCPACTKYSRAYLHHLIKAGEILGAVLLTWHNLAYYQDLMRGMREAIAEGRMEAFARDFHAGQEGGDIDPVPIIED

SEQ ID NO: 61633 - protein, 380 aa, Thalassospira profundimaris
  REGION 1..380: note = tr|A0A367WQ64|A0A367WQ64_9PROT Queuine tRNA-ribosyltransferase OS=Thalassospira profundimaris; OX = 502049 GN=tgt PE=3 SV=1
MTEFRYELLAQDGKARLGRIHTAHGVIDTPTFMPVGTAATVKGMLPENVADTGAQILLGNTYHLMLRPGAERIARLGGLHKFMNWDKPILTDSGGYQVMSLAKLRKITEEGVTFKSHIDGRKFNLTPERSMEIQHLLGSTITMAFDECTPFPATEQQAADSMRMSMRWAKRSKDAFVEREGYALYGIQQGSVFENLRRESSEKLAELDLPGHSVGGLAVGEGQQIMFDTLDFCVDMLPANKPRYLMGVGKPSDLVGAVMRGIDQFDCVLPTRSGRNAQAFTHRGTLNLKNGRHRDDDRPLDDQCNCPACTKYSRAYLHHLIKAGEILGAVLLTWHNLAYYQDLMRGMREAIAEGRMDAFARDFHAGQEGGDIDPVPIIED

SEQ ID NO: 61634 - protein, 380 aa, Thalassospira profundimaris
  REGION 1..380: note = tr|K2KV28|K2KV28_9PROT Queuine tRNA-ribosyltransferase OS=Thalassospira profundimaris WP0211 OX=1177928 GN=tgt PE=3 SV=1
MTEFRYELLAQDGKARLGRIHTAHGVIDTPTFMPVGTAATVKGMLPENVADTGAQILLGNTYHLMLRPGAERIARLGGLHKFMNWDKPILTDSGGYQVMSLAKLRKITEEGVTFKSHIDGRKFNLTPERSMEIQHLLGSTITMAFDECTPFPATEQQARESMQMSMRWAKRSKDAFVNREGYALYGIQQGSVFESLRRESSEKLAELDLPGHSVGGLAVGEGQQIMFDTLDFCVDMLPANKPRYLMGVGKPSDLVGGVMRGIDQFDCVLPTRSGRNAQAFTHRGTLNLKNGRHRDDDRPLDDQCGCPACTKYSRAYLHHLIKAGEILGAVLLTWHNLAYYQDLMRGMREAIAEGRMDAFARDFHVGQEGGDIDPVPIIED

SEQ ID NO: 61635 - protein, 380 aa, Thalassospira sp.
  REGION 1..380: note = tr|A0A3C0FU67|A0A3C0FU67_9PROT Queuine tRNA-ribosyltransferase OS=Thalassospira sp. OX=1912094; GN = tgt PE=3 SV=1
MTEFRYELLAQDGKARLGRIHTAHGVIDTPTFMPVGTAATVKGMLPENVADTGAQILLGNTYHLMLRPGAERIARLGGLHKFMNWDKPILTDSGGYQVMSLAKLRKITEEGVTFKSHIDGRKFNLTPERSMEIQHLLGSTITMAFDECTPFPATEQQARESMQMSMRWAKRSRDAFVNREGYALYGIQQGSVFENLRRESSEKLAELDLPGHSVGGLAVGEGQQIMFDTLDFCVDMLPSNKPRYLMGVGKPSDLVGAVMRGIDQFDCVLPTRSGRNAQAFTHRGTLNLKNGRHRDDDRPLDDQCGCPACTKYSRAYLHHLIKAGEILGAVLLTWHNLAYYQDLMRGMREAISEGRMDAFARDFHAGQEGGDIDPVPIIED

SEQ ID NO: 61636 - protein, 380 aa, Thalassospira sp.
  REGION 1..380: note = tr|A0A2E9WCQ5|A0A2E9WCQ5_9PROT Queuine tRNA-ribosyltransferase OS=Thalassospira sp. OX=1912094; GN = tgt PE=3 SV=1
MTEFRYEFLAQDGKARLGRIHTAHGVIDTPTFMPVGTAATVKAMLPENVADTGAQILLGNTYHLMLRPGAERIARLGGLHKFMNWDKPILTDSGGYQVMSLAKLRKITEDGVTFKSHIDGRKFNLTPERSMEIQHLLGSTITMAFDECTPFPATEQQARESMQMSMRWAKRSRDAFVEREGYALYGIQQGSVFENLRRESSEKLTELDLPGHSVGGLAVGEGQQIMFDTLDFCVDMLPANKPRYLMGVGKPSDLVGAVMRGIDQFDCVLPTRSGRNAQAFTHRGTLNLKNGRHRDDDRPLDDQCGCPACTKYSRAYLHHLIKAGEMLGSMLLTWHNLAYYQDLMRDMRSAISEGRMDAFARDFHAAQEGGDIDPVPIIED

SEQ ID NO: 61637 - protein, 380 aa, Thalassospira xiamenensis
  REGION 1..380: note = tr|A0A285TVX8|A0A285TVX8_9PROT Queuine tRNA-ribosyltransferase OS=Thalassospira xiamenensis; OX = 220697 GN=tgt PE=3 SV=1
MTEFRYELLATDGKARLGRIHTAHGVIDTPAFMPVGTAATVKGMLPENVADTGAQILLGNTYHLMLRPGAERIARLGGLHKFMNWDKPILTDSGGYQVMSLSKLRKITEDGVTFKSHIDGRKFALSPERSMEIQHLLGSTITMAFDECTPFPATEQQAADSMRMSMRWAKRSKDAFVEREGYALYGIQQGSVFENLRRESSEKLAELDLPGHSVGGLAVGEGQQIMFDTLDFCVDMLPANKPRYLMGVGKPSDLVGAVMRGIDQFDCVLPTRSGRNAQAFTHRGTLNLKNGRHRDDDRPLDDQCNCPACTKYSRAYLHHLIKAGEILGAVLLTWHNLAYYQDLMRGMRDAIAEGRMEQFARDFYAGQEGGDIDPVPIIED

SEQ ID NO: 61638 - protein, 380 aa, Thalassospira xiamenensis
  REGION 1..380: note = tr|A0A0B4XYB2|A0A0B4XYB2_9PROT Queuine tRNA-ribosyltransferase OS=Thalassospira xiamenensis M-5 = DSM 17429 OX=1123366 GN=tgt PE=3 SV=1
MTEFRYELLATDGKARLGRIHTAHGVIDTPAFMPVGTAATVKGMLPENVADTGAQILLGNTYHLMLRPGAERIARLGGLHKFMNWDKPILTDSGGYQVMSLSKLRKITEDGVTFKSHIDGRKFALSPERSMEIQHLLGSTITMAFDECTPFPATEQQAAESMRMSMRWAKRSKDAFVEREGYALYGIQQGSVFENLRRESSEKLAELDLPGHSVGGLAVGEGQQIMFDTLDFCVDMLPANKPRYLMGVGKPSDLVGAVMRGIDQFDCVLPTRSGRNAQAFTHRGTLNLKNGRHRDDDRPLDDQCNCPACTKYSRAYLHHLIKAGEILGAVLLTWHNLAYYQDLMRGMREAIAAGRMEQFARDFYAGQEGGDIDPVPIIED

SEQ ID NO: 61639 - protein, 380 aa, Thalassospira xianhensis
  REGION 1..380: note = tr|A0A367U7C2|A0A367U7C2_9PROT Queuine tRNA-ribosyltransferase OS=Thalassospira xianhensis MCCC 1A02616 OX=1177929 GN=tgt PE=3 SV=1
MTEFRYELLATDGKARLGRIHTAHGVIDTPAFMPVGTAATVKGMLPENVADTGAQILLGNTYHLMLRPGAERIARLGGLHKFMNWDKPILTDSGGYQVMSLSKLRKITEDGVTFKSHIDGRKFALSPERSMEIQHLLGSTITMAFDECTPFPATEQQAAESMRMSMRWAKRSKDAFVEREGYALYGIQQGSVFENLRRESSEKLAELDLPGHSVGGLAVGEGQQIMFDTLDFCVDMLPANKPRYLMGVGKPSDLVGAVMRGIDQFDCVLPTRSGRNAQAFTHRGTLNLKNGRHRDDDRPLDDQCNCPACTKYSRAYLHHLIKAGEILGAVLLTWHNLAYYQDLMRGMRDAIAQRRMEQFARDFYAGQEGGDIDPVPIIED

SEQ ID NO: 61640 - protein, 381 aa, unidentified
  source 1..381: note = Thalassotalea agarivorans
  REGION 1..381: note = tr|A0A1I0AJH3|A0A1I0AJH3_THASX Queuine tRNA-ribosyltransferase OS=Thalassotalea agarivorans; OX = 349064 GN=tgt PE=3 SV=1
MKQKMTYDLLGKDGKARRGRLTFERGTVETPAFMPVGTYGTVKGMKAEEIKEIGAEIILGNTFHLMLRPGTDIIEQHGDLHDFINWDKPILTDSGGFQVFSLGAMRKITEEGVKFSSPVNGEKIMLTPERSMEVQRKLGSDIVMIFDECTPYPATHKEAKDSMEMSLRWAQRSKDAHGDNPNALFGIVQGGMYEDLRETSIEGLKSIEFDGYAIGGLSVGEPKEDMIRILDHTPDLIPENKPRYLMGVGKPEDLVEGVRRGIDMFDCVMPTRNARNGHLFVTDGVVKIRNAKNKTDTGPLDPECDCYTCKNYSKAYLHHLDKCNEILGSQLNTIHNLAYYQRLMKGLRDAIEQGKLDDFVADFYARRGKEVPPLAGSETTD

SEQ ID NO: 61641 - protein, 377 aa, unidentified
  source 1..377: note = Thalassotalea euphylliae
  REGION 1..377: note = tr|A0A3E0U5N3|A0A3E0U5N3_9GAMM Queuine tRNA-ribosyltransferase OS=Thalassotalea euphylliae; OX = 1655234 GN=tgt PE=3 SV=1
MKYELINKDGKARRGRLTFERGTVETPAFMPVGTYGTVKGMKTEEIKEIGAEIILGNTFHLMLRPGTDIIEQHGDLHDFINWDKPILTDSGGFQVFSLGKMRKITEEGVKFSSPVNGEKIMLTPERSMEVQRALGSDIVMIFDECTPYPATHQEAKDSMELSLRWAQRSKDAHQGNPNALFGIVQGGMYEDLREVSVDGLKAIDFDGYAIGGLSVGEPKEDMIRILDHTTPLIPENKPRYLMGVGKPEDLVEGVRRGIDMFDCVMPTRNARNGHLFVSDGVVKIRNAKNKTDTGPLDPECDCYTCKNYSKAYLHHLDKCNEILGSQLNTIHNLRYYQRVMKGLRDAIEAGTLDDFVADFYARRGLPVPPLAEGSEQV

SEQ ID NO: 61642 - protein, 377 aa, unidentified
  source 1..377: note = Thalassotalea euphylliae
  REGION 1..377: note = tr|A0A3E0UIC3|A0A3E0UIC3_9GAMM Queuine tRNA-ribosyltransferase OS=Thalassotalea euphylliae; OX = 1655234 GN=tgt PE=3 SV=1
MKYELINKDGKARRGRLTFERGTVETPAFMPVGTYGTVKGMKTEEIKEIGAEIILGNTFHLMLRPGTDIIEQHGDLHDFINWDKPILTDSGGFQVFSLGKMRKITEEGVKFSSPVNGEKIMLTPERSMEVQRALGSDIVMIFDECTPYPATHQEAKDSMELSLRWAQRSKDAHQGNPNALFGIVQGGMYEDLREVSVDGLKAIDFDGYAIGGLSVGEPKEDMIRILDHTTPLIPENKPRYLMGVGKPEDLVEGVRRGIDMFDCVMPTRNARNGHLFVSDGVVKIRNAKNKTDTGPLDPECDCYTCKNYSKAYLHHLDKCNEILGSQLNTIHNLRFYQRVMKGLRDAIEAGTLDDFVADFYARRGLPVPPLAEGSEQV

SEQ ID NO: 61643 - protein, 379 aa, unidentified
  source 1..379: note = Thalassotalea sp.
  REGION 1..379: note = tr|A0A516HAG8|A0A516HAG8_9GAMM Queuine tRNA-ribosyltransferase OS=Thalassotalea sp. PS06; OX = 2594005 GN=tgt PE=3 SV=1
MKYELINQDGKARRGRLIFDRGVVETPAFMPVGTYGTVKGMTTDEVEATGAHILLGNTFHLMLRPGTEIIEQHGDLHDFMNWHKPILTDSGGFQVFSLGEMRKITEKGVEFRSPVNGEKIMLTPERSMEVQRSLGSDIVMIFDECTPYPATHEEAKASMELSLRWAKRSKDAHGDNPSALFGIVQGGMYEDLREISAQGLLDIDFDGYAIGGLSVGEPKEEMIKILDHTPDLIPKEKPRYLMGVGKPEDLVEGVRRGIDMFDCVMPTRNARNGHLFVTNGVVKIRNAKHKTDTGPLDPECDCYTCKNYSKAYLHHLDKCNEILGAQLNTMHNLRFYQRVMQGLRDAIEQGKLDDFVAEFYALRGMDVPPLEPNSGSNEE

SEQ ID NO: 61644 - protein, 377 aa, unidentified
  source 1..377: note = Thalassotalea sp.
  REGION 1..377: note = tr|A0A1Q6CMS9|A0A1Q6CMS9_9GAMM Queuine tRNA-ribosyltransferase OS=Thalassotalea sp. PP2-459; OX = 1742724 GN=tgt PE=3 SV=1
MSYELITKDGKARRGRLTFARGTVETPAFMPVGTYGTVKGMKSEEIEEIGAEIILGNTFHLMLRPGTDIIEQHGDLHDFIHWDKPILTDSGGFQVFSLGAMRKITEEGVKFSSPVNGEKIMLTPERSMEVQRKLGSDIVMIFDECTPYPATHVEAKESMELSLRWAQRSKDAHKENPNALFGIVQGGMYEDLREVSINGLKAIDFDGYAIGGLSVGEPKEDMVRILDHTAPLIPENKPRYLMGVGKPEDLVEGVRRGIDMFDCVMPTRNARNGHLFVTTGVVKIRNAKNKVDTGPLDEQCDCYTCKNYSRAYLHHLDKCNEILGSQLNTIHNLRFYQRIMKELRDAIEQGKLEEYVSEFYALRSLPVPPLAKGSEQV

SEQ ID NO: 61645 - protein, 370 aa, Thauera aminoaromatica
  REGION 1..370: note = tr|A0A5C7SCN4|A0A5C7SCN4_9RHOO Queuine tRNA-ribosyltransferase OS=Thauera aminoaromatica; OX = 164330 GN=tgt PE=3 SV=1
MQFELLTTDGGARRGRLTLAHGVVETPVFMPVGTYGTVKAMTPAMLSDIGAQICLGNTFHLWLRPGLDIISAHQGLHRFMAWDKPILTDSGGFQVFSLGALRKISEEGVKFASPIDGAKLFLTPEISMQIQSVLNSDIVMIFDECTPYPATRDEAAKSMRLSQRWAKRSRDEFDRLENKNALFGIVQGGMYEDLRDESQAALEDIGFHGFAIGGLSVGEPKDDMARILAHTAPRLPQGKPRYLMGVGTPEDIVAGVAAGIDMFDCVMPTRNARNGWLFTRYGDIKIKNAVHKADTRPLDPSCDCYTCRNFSRAYLHHLHRTGEILGSMLNTVHNLRYYQTLTAELRAAIAAGEFAPYVQRFRGERATGTG

SEQ ID NO: 61646 - protein, 370 aa, Thauera aminoaromatica; identical to SEQ ID NO: 61645
  REGION 1..370: note = tr|N6Y2Q0|N6Y2Q0_9RHOO Queuine tRNA-ribosyltransferase OS=Thauera aminoaromatica S2; OX = 1234381 GN=tgt PE=3 SV=1

SEQ ID NO: 61647 - protein, 378 aa, Thauera aromatica
  REGION 1..378: note = tr|A0A2R4BL22|A0A2R4BL22_THAAR Queuine tRNA-ribosyltransferase OS=Thauera aromatica K172 OX=44139; GN = tgt PE=3 SV=1
MHFELLATDRGARRGRLTLAHGVVETPVFMPVGTYGTVKAMTPAMLADIGAQICLGNTFHLWLRPGLEIIGAHGGLHRFMAWDKPILTDSGGFQVFSLGALRKISEEGVKFASPIDGAKLFLTPEISMQIQHVLNSDIVMIFDECTPYPATRDEAAKSMQLSQRWARRSRDEFDKLNDKADADPEKRNALFGIVQGGMYEDLRDESQAALEAIGFDGFAIGGLSVGEPKEDMARILAHTAPRLPQDKPRYLMGVGTPEDIVAGVAAGIDLFDCVMPTRNARNGWLFTRHGDIKIKNAVHKADTRPLDPSCDCYTCRHFSRAYLHHLHRSGEILGSMLNTVHNLRYYQTLTAELRAAIIAGEFAQYVQRFHRERATGTA

SEQ ID NO: 61648 - protein, 374 aa, Thauera chlorobenzoica
  REGION 1..374: note = tr|A0A1H5UAV0|A0A1H5UAV0_9RHOO Queuine tRNA-ribosyltransferase OS=Thauera chlorobenzoica OX=96773; GN = tgt PE=3 SV=1
MRFELLATDCGARRGRLTLAHGVVETPVFMPVGTYGTVKAMTPSMLADIGAQICLGNTFHLWLRPGLEIIAAHGGLHRFMAWDKPILTDSGGFQVFSLGALRKISEEGVKFASPIDGAKLFLTPEISMQIQHVLNSDIVMIFDECTPYPASRDEAAQSMLLSQRWAKRSRDEFDKLSDRLENPNALFGIVQGGMYEDLRDESQAALEAIGFDGFAIGGLSVGEPKEDMARILAHTAPRLPAAKPRYLMGVGTPEDIVAGVAAGIDMFDCVMPTRNARNGWLFTRYGDIKIKNAVHKADPRPLDPSCDCYTCRNFSRAYLHHLHRSGEILGSMLNTVHNLRYYQTLTHELREAIVTGRFTARVHDFRAERATGTR

SEQ ID NO: 61649 - protein, 370 aa, unidentified
  source 1..370: note = Thauera humireducens
  REGION 1..370: note = tr|A0A127KA74|A0A127KA74_9RHOO Queuine tRNA-ribosyltransferase OS=Thauera humireducens OX=1134435; GN = tgt PE=3 SV=1
MQFELLTTDGGARRGRLTLTHGVVETPVFMPVGTYGTVKAMTPAMLSDIGAQICLGNTFHLWLRPGLDIIRAHEGLHRFMGWDKPILTDSGGFQVFSLGALRKITEEGVKFASPIDGAKLFLTPEISMQIQSVLNSDIVMIFDECTPYPATRDEAAKSMRLSQRWARRSRDEFDRLENRNALFGIVQGGMYEDLRDESQAALEEIGFHGFAIGGLSVGEPKEDMARILAHTAPRLPQGKPRYLMGVGTPEDIVDGVAAGIDMFDCVMPTRNARNGWLFTRYGDIKIKNAVHKADTRPLDPSCDCYTCRNFSRAYLHHLHRTGEILGSMLNTVHNLRYYQTLTSELRDAIANGQFDAYVQRFRSERATGTQ

SEQ ID NO: 61650 - protein, 374 aa, Thauera linaloolentis
  REGION 1..374: note = tr|N6YZJ8|N6YZJ8_9RHOO Queuine tRNA-ribosyltransferase OS=Thauera linaloolentis 47Lol = DSM 12138 OX=1123367 GN=tgt PE=3 SV=1
MPNTMQFELLTTDGGARRGRLTLAHGTIETPVFMPVGTYGTVKAMTPDMLAGIGAQICLGNTFHLWLRPGLDIIRAHKGLHRFMAWDKPILTDSGGFQVFSLGALRKITEEGVKFASPIDGARLFLTPEISMQIQTTLNSDIVMIFDECTPYPATRDEAAKSMRLSQRWAKRSRDEFDRLGNPNALFGIVQGGMFEDLRDESLAALEDIGFHGFAIGGLSVGEPKDEMARILTHTAPRLPQGKPRYLMGVGTPEDIVAGVTAGIDMFDCVMPTRNARNGWLFTRYGDIKIKNAVHKADTRPLDPSCDCYTCRNFSRAYLHHLHRSGEILGSMLNTVHNLRYYQTLTAELRAAIAGNTFDAYVRRFREERAAGAH

SEQ ID NO: 61651 - protein, 370 aa, Thauera phenylacetica
  REGION 1..370: note = tr|N6YJP7|N6YJP7_9RHOO Queuine tRNA-ribosyltransferase OS=Thauera phenylacetica B4P; OX = 1234382 GN=tgt PE=3 SV=1
MQFELLTTDGGARRGRLTLAHGTVETPVFMPVGTYGTVKAMTPAMLSDIGAQICLGNTFHLWLRPGLDIIAAHQGLHRFMAWDKPILTDSGGFQVFSLGALRKITEEGVKFASPIDGARLFLTPEISMQIQSVLNSDIVMIFDECTPYPATRDEAAKSMRLSQRWARRSRDEFDRLENKNALFGIVQGGMYEDLRDESQAALEDIGFHGFAIGGLSVGEPKEDMARILAHTAPRLPQGKPRYLMGVGTPEDIVEGVAAGIDMFDCVMPTRNARNGWLFTRYGDIKIKNAVHKADTRPLDPSCDCYTCRNFSRAYLHHLHRTGEILGSMLNTVHNLRYYQTLTSELREAIAAGTFAACVQRFRSERATGTN

SEQ ID NO: 61652 - protein, 370 aa, unidentified
  source 1..370: note = Thauera propionica
  REGION 1..370: note = tr|A0A235EWE2|A0A235EWE2_9RHOO Queuine tRNA-ribosyltransferase OS=Thauera propionica OX=2019431; GN = tgt PE=3 SV=1
MQFELLTTDGGARRGRLTLAHGIVETPVFMPVGTYGTVKAMTPAMLADIGAQICLGNTFHLWLRPGLDIIAAHEGLHRFMAWDKPILTDSGGFQVFSLGALRKITEEGVKFASPIDGAKLFLTPEISMQIQTVLNSDIVMIFDECTPYPATRDEAAKSMRLSQRWAKRSRDEFDRLENRNALFGIVQGGMYEDLRDESQGVLEEIGFHGFAIGGLSVGEPKEDMARILAHTAPRLPQGKPRYLMGVGTPEDIVDGVAAGIDMFDCVMPTRNARNGWLFTRYGDIKIKNAVHKADTRPLDPSCDCYTCRNFSRAYLHHLHRTGEILGSMLNTVHNLRYYQTLTSELRDAIAVGQFDAYVQRFRSERATGTQ

SEQ ID NO: 61653 - protein, 370 aa, Thauera sp.; identical to SEQ ID NO: 61645
  REGION 1..370: note = tr|A0A0C3N5Q4|A0A0C3N5Q4_9RHOO Queuine tRNA-ribosyltransferase OS=Thauera sp. SWB20 OX=1572758; GN = tgt PE=3 SV=1

SEQ ID NO: 61654 - protein, 369 aa, Thauera sp.
  REGION 1..369: note = tr|A0A290ZIW3|A0A290ZIW3_9RHOO Queuine tRNA-ribosyltransferase OS=Thauera sp. K11 OX=2005884; GN = tgt PE=3 SV=1
MQFELLATSGGARRGRMTLAHGTVETPVFMPVGTYGTVKAMTPAMLADVGAQICLGNTFHLWLRPGLEIIGAHAGLHRFMAWDKPILTDSGGFQVFSLGALRKIGEEGVKFASPIDGAKLFLTPEISMEIQTVLDSDIVMIFDECTPYPASRDEAAASMRLSQRWARRSRDEFDRRENPNALFGIVQGGMYEDLRDESLGALADIGFHGFAIGGLSVGEPKDDMQRILAHTAPRLPQGKPRYLMGVGTPEDIVAGVAAGIDMFDCVMPTRNARNGWLFTRYGDIKIKNAVHKADTQPLDPSCDCYTCRNFSRAYLHHLHRAGEILGSMLNTIHNLHYYQTLTAELRRSIEDQAFSAYVQRFRGERAAGA

SEQ ID NO: 61655 - protein, 370 aa, Thauera terpenica
  REGION 1..370: note = tr|T0AXC9|T0AXC9_9RHOO Queuine tRNA-ribosyltransferase OS=Thauera terpenica 58Eu; OX = 1348657 GN=tgt PE=3 SV=1
MQFELLTSDGGARRGRLTLAHGVVDTPVFMPVGTYGTVKAMTPTMLADIGAQICLGNTFHLWLRPGLDVVQAHAGLHRFMAWDKPILTDSGGFQVFSLGALRKITEEGVKFASPIDGAKLFLTPEISMQIQTVLNSDIVMIFDECTPYPATHDEAASSMRLSQRWARRSRDEFDRLENANALFGIVQGGMHEDLRDESLGALEEIGFHGFAIGGLSVGEPKEDMTRILAHTAPRLPQGKPRYLMGVGTPEDIVEGVAAGIDMFDCVMPTRNARNGWLFTRYGNVKIKNAVHKADTRPLDASCACYTCRNFSRAYLHHLHRTGEILGSMLNTVHNLHYYQTLTAEMRDAIAGGSFDAYVKRFRTERATGAL

SEQ ID NO: 61656 - protein, 374 aa, Thermacetogenium phaeum
  REGION 1..374: note = tr|K4LF33|K4LF33_THEPS Queuine tRNA-ribosyltransferase OS=Thermacetogenium phaeum (strain ATCC BAA-254 / DSM 12270 / PB) OX=1089553 GN=tgt PE=3 SV=1
MGFFHFQLLKKSKKSMARLGIIRTPRGVIHTPAFMPVGTQATVKTLTPEEVSDLGAEIILSNTYHLYLRPGTEIINKAGGLHRFMNWQGPILTDSGGFQVFSLGSLRRITDDGVHFRSHLDGSPHFISPEKSMEIQAVLGSDIAMAFDVCAPFPCSYEEALEAVERTTRWAERSLKAPHAPGQVVFGIVQGSVYPELRERSAREITALDFPGYAVGGLSVGEPKVIMYEVLEKTTPLLPEDRPRYLMGVGTADCLWEGVARGVDLFDCVLPTRIARNGTALTSKGKVVVRNAEFADDFSPIDADCGCYTCRNYSRAYLRHLFKAEEILGHRLLTIHNLYFTLGVMAEIRQAIREDRFEEHMDEFLKQLNSTNVE

SEQ ID NO: 61657 - protein, 391 aa, Thermaerobacter marianensis
  REGION 1..391: note = tr|E6SIX3|E6SIX3_THEM7 Queuine tRNA-ribosyltransferase OS=Thermaerobacter marianensis (strain ATCC 700841 / DSM 12885 / JCM 10246 / 7p75a); OX = 644966 GN=tgt PE=3 SV=1
MAGWDGWFVVEHREAHSQARAGRLVTPHGVVETPVFMPVGTQAAVKTLSPHELRAVGAEIILSNTYHLYLRPGSDVVAAAGGLHRFMAWDGPILTDSGGFQVFSLASLRQVTDDGVRFRSHLDGSEHLFTPERSMAVQRDLGADIIMCFDECLAYPARRDEVEASVDRTTRWAQRCHRFWQEEGNPERQALFGIVQGGAYPELRRRSAEALQELDFPGYAVGGLSVGEPAGVTVAVLDATVPLLPADRPRYLMGVGTPDLILEAVWRGIDMMDCVLPTRMARHGTVYTSEGKLTVRNAAFARDFRPLDPACDCYACRHFTRAYIRHLLKVNETLGMRLTTLHNLRYLHRFMERLRQAVREDRLPEFRAAFYRGEGAVLGFRPPEPAALPEA

SEQ ID NO: 61658 - protein, 391 aa, Thermaerobacter sp.
  REGION 1..391: note = tr|A0A371Z7Z4|A0A371Z7Z4_9FIRM Queuine tRNA-ribosyltransferase OS=Thermaerobacter sp. PB12/4term; OX = 2293838 GN=tgt PE=3 SV=1
MGRWDGWFTVEHQEAHSHARAGRLHTPHGVVETPVFMPVGTQAAVKTLSPHELHQVGAQIILSNTYHLYLRPGSQVVAEAGGLHRFMAWHRPILTDSGGFQVFSLAALRQVTGDGVRFRSHLDGSEHFFTPELSMAVQRDLGADIIMCFDECLAYPARRDEVAASVERTTRWARRCHRAWQEDGHPDRQALFGIVQGGAYPDLRRRSAEELVELDFPGYAVGGLSVGEPAGVTVAVLDVTVPLLPTGRPRYLMGVGTPDLILEAVWRGIDMMDCVLPTRMARHGTVYTSQGRITVRNAAYARDFGPLDPACDCYACRHFSRAYIRHLLKVNETLGMRLTTIHNLRYLQRFMERLRQAVREDRLPEFRAAFYREEGAALGFHPPEPEPLPAG

SEQ ID NO: 61659 - protein, 391 aa, Thermaerobacter sp.
  REGION 1..391: note = tr|A0A4P7GU03|A0A4P7GU03_9FIRM Queuine tRNA-ribosyltransferase OS=Thermaerobacter sp. FW80; OX = 2546351 GN=tgt PE=3 SV=1
MSGWDGWFTIEHREAHSQARTGRLATPHGTVETPVFMPVGTQAAVKTLSPHELRAVGAQIILSNTYHLYLRPGSAVVAAAGGLHRFMAWEGPILTDSGGFQVFSLASLREVTADGVRFRSHLDGSEHLFTPELSMAVQRDLGADIIMCFDECLAFPAPYDAVAASVERTTRWARRCHRAWREEGRPDRQALFGIVQGGVYADLRRRSAEALVELDLPGYAVGGLSVGEPAGLTVAVLEAVVPLLPADRPRYLMGVGTPDLILEAVWRGIDMMDCVLPTRMARHGTVFTSEGRLTVRNAAFARDFRPLDPACDCYACRHFTRAYIRHLLKVNETLGMRLTTIHNLRYLHRFMERLRQAVRADRLPEFRAAFYAGEGAALGFRPPEPATLPGA

SEQ ID NO: 61660 - protein, 391 aa, Thermaerobacter subterraneus
  REGION 1..391: note = tr|K6PZE2|K6PZE2_9FIRM Queuine tRNA-ribosyltransferase OS=Thermaerobacter subterraneus DSM 13965 OX=867903 GN=tgt PE=3 SV=1
MGRWDGWFTVEHHEVHSHARAGRLHTPHGVVETPVFMPVGTQAAVKTLSPHELHQVGAQIILSNTYHLYLRPGSQVVAEAGGLHRFMAWDRPILTDSGGFQVFSLAALRQVTGDGVRFRSHLDGSEHFFTPELSMAVQRDLGADIIMCFDECLAYPARRDEVEASVERTTRWARRCHRAWQEDGDPDRQALFGIVQGGAYPDLRRRSAEELAELDFPGYAVGGLSVGEPAGVTVAVLDVTVPLLPAGRPRYLMGVGTPDLILEAVWRGIDMMDCVLPTRMARHGTVYTSQGRITVRNAAYARDFGPLDPACDCYACRHFSRAYIRHLLKVNETLGMRLTTIHNLRYLQRFMERLRQAVREDRLPEFRAAFYREEGAALGFRPPEPEPLPAG

SEQ ID NO: 61661 - protein, 378 aa, Thermanaeromonas toyohensis
  REGION 1..378: note = tr|A0A1W1W180|A0A1W1W180_9THEO Queuine tRNA-ribosyltransferase OS=Thermanaeromonas toyohensis ToBE OX=698762 GN=tgt PE=3 SV=1
MTPVSFEVIKVEKTFGARLGRLITPHGVVHTPVFMPVGTQATVKTMTPEEVESLGAEIILSNTYHLYLRPGAEVIREAGGLHRFMNWHRPILTDSGGFQVFSLASLREVRPEGVLFRSHLDGSTHFMGPQESMAVQEALGSDIAMAFDECVAYPASYEEVEAAVERTTRWAEECLKVHKRQDQAVFGIIQGGVFPDLRRRSAQEITSLDFPGYGIGGLSVGEPKSMMYAILEELRPFLPESKPRYLMGVGSPDCLLEGVKRGIDMFDCVLPTRIARNGTVLTSRGKLVVRNAIYARDFRPLDPECDCYTCRNFTRAYIRHLIKANEVLGLRLTTIHNLYFIFRLMDRIRQAIAEDRLLEMSEEFYSRYQATEGGEENF

SEQ ID NO: 61662 - protein, 372 aa, unidentified
  source 1..372: note = Thermanaerothrix daxensis
  REGION 1..372: note = tr|A0A0P6YK64|A0A0P6YK64_9CHLR Queuine tRNA-ribosyltransferase OS=Thermanaerothrix daxensis; OX = 869279 GN=tgt PE=3 SV=1
MTIASFAFELIARQGRARAGVIHTPHGPILTPIFAPVGTQATVKAVTPAQLEEHGVTLVLSNTYHLYLRPGAELIAELGGLHRFMSWPHPILTDSGGFQVFSLSENRRVDDEGVTFRSHIDGSLHRLTPEIAIEVQEKLGADIIMAFDECAPPYDRAYNERALERTHRWAERCLKAKTRSDQALFGIVQGGIFLDLREQSARFLTGLGFPGYAIGGLSVGETKAEMHAVLELVDGLLPEDKPRYLMGVGTPQDIINGILRGVDMFDCVLPTRLARHHAAMTRTGRLNMMNAAYARDSRPIDPECTCYTCRHFTRAYLRHLIVAREMLAATLLSIHNITTLITLVSEARSAILAGRFEQFAAEFFAAQETLPS

SEQ ID NO: 61663 - protein, 367 aa, Thermanaerovibrio acidaminovorans
  REGION 1..367: note = tr|D1B5Y5|D1B5Y5_THEAS Queuine tRNA-ribosyltransferase OS=Thermanaerovibrio acidaminovorans (strain ATCC 49978 / DSM 6589 / Su883); OX = 525903 GN=tgt PE=3 SV=1
MGFRVVAECPVTGARAGELTTAHGVVKTPVFMPVGTQATVKAMAPFELKALGAQIILGNTYHLFLRPGEELVERAGGLHRFMGWDRPILTDSGGFQVFSLAELRTLSDEGVVFRSHLDGSRHVMTPERAVRIQERLGSDIAMCFDECVKYPTTYEYSMGAVKRTLAWARRCLAAKTRDDQLLFGIVQGSVFEDQRIACAEALMEMDFPGYSIGGLSVGESHQEMYRILDCLKGVLPKGKPRYLMGVGHPSNLLEGIARGVDMFDCVLPTRNGRNGTVFTSRGRLNVKNLSLAEDFTPLDPDCTCYACRNFSRAYIRHLYKAGEILAMRLCTWHNLHFLISLVEGARRAILEGTFPEYRERFLRTFEG

SEQ ID NO: 61664 - protein, 372 aa, Thermanaerovibrio velox
  REGION 1..372: note = tr|H0UQH5|H0UQH5_9BACT Queuine tRNA-ribosyltransferase OS=Thermanaerovibrio velox DSM 12556 OX=926567 GN=tgt PE=3 SV=1
MSFKVVAQCPVTGARAGELVTSHGVVRTPVFMPVGTQATVKAMAPFELKAIGAQIILGNTYHLFLRPGEDLVEKAGGLHRFMNWDRPILTDSGGFQVFSLAELRTLSDDGVVFRSHLDGKRHLMTPERAVAIQEKLGSDIAMCFDECVKYPSSYEYSMEAMKRTIRWARRCREAHGRQDQLLFGIVQGSVFEDQRLMCAEALMEMDFPGYSIGGLSVGESHQEMYRILDCLKGVLPQQKPRYLMGVGHPSNLMEGISRGVDMFDCVLPTRNGRNGTVFTSRGKLNVKNLSLAEDFTPLDPECSCYACRNFSRAYIRHLYKAGEILAMRLCTWHNLHFLVSLVEGARRAIIEGTFPEYKERFLRVFEGDSADG

SEQ ID NO: 61665 - protein, 374 aa, Thermincola ferriacetica
  REGION 1..374: note = tr|A0A0L6W674|A0A0L6W674_9FIRM Queuine tRNA-ribosyltransferase OS=Thermincola ferriacetica; OX = 281456 GN=tgt PE=3 SV=1
MAVKFELIKECKQTKARLGRLHTPHGIINTPVFMPVGTQATVKTMTPEELKDIGAEIILSNTYHLYLRPGSKLIREAGGLHKFMNWDRPILTDSGGFQVFSLGPLRKITEDGVEFRSHLDGSKHFMTPELATEVQMDLGSTIAMAFDECAPYPCTFEYAREALERTTRWAERCKKAHNRMDQALFGIVQGGMYRELREQSARELVELDFPGYAIGGLSVGEPKPLMYEVLDYTTPLLPADKPRYLMGVGSPDCIIEGVIRGVDMFDCVLPTRIARNGTAMTSGGKVVIRNAVYARDFTPLDHECDCYTCRNYSRAYIRHLFKAEEILALRLVTIHNLYFLLRLMEHLRKAIAEDCVPEFRKRFFEKYGYDGEEI

SEQ ID NO: 61666 - protein, 374 aa, unidentified; identical to SEQ ID NO: 61665
  source 1..374: note = Thermincola potens
  REGION 1..374: note = tr|D5XEJ3|D5XEJ3_THEPJ Queuine tRNA-ribosyltransferase OS=Thermincola potens (strain JR); OX = 635013 GN=tgt PE=3 SV=1

SEQ ID NO: 61667 - protein, 387 aa, Thermoactinomyces sp.
  REGION 1..387: note = tr|A0A151Z163|A0A151Z163_9BACL Queuine tRNA-ribosyltransferase OS=Thermoactinomyces sp. AS95; OX = 1811386 GN=tgt PE=3 SV=1
MVSSIGGNTLAVKYELIKTCKQSGARLGRLHTPHGTIDTPIFMPVGTQATVKTMSPEELKEMNAQIILSNTYHLFLRPGHDIVREAGGLHAFMNWDRPILTDSGGFQVFSLSKLRDITEEGVTFRSHISGEKLFIGPEKAMEIQNALGADIIMAFDECPPYPADREYVKASTERTYRWLKRCMKAHQRPAEQALFGIVQGGMYQDLREESARQLVDLDLPGYAVGGLSVGESKELMYEVLDYTTPLLPGHKPRYLMGVGSPDALIEGSIRGIDMFDCVLPTRIARNGTAMTSQGRVVVRNAKYARDFTALDPECDCYTCRNYTKAYLRHLIKADETFGLRLITYHNLYFLLELMKQVRQAILEDRLLDFRDAFMMKYYGSLHPEKPF

SEQ ID NO: 61668 - protein, 378 aa, Thermoactinomyces sp.
  REGION 1..378: note = tr|A0A1K1U6Z8|A0A1K1U6Z8_9BACL Queuine tRNA-ribosyltransferase OS=Thermoactinomyces sp. DSM 45891; OX = 1761907 GN=tgt PE=3 SV=1
MAVRYELLKQCKQSGARLGRLHTPHGVIETPIFMPVGTLATVKTMSPEELKEMDAQIILSNTYHLFIRPGHEIVKEAGGLHQFMNWDRPILTDSGGFQVFSLGDLRKITEEGVQFRSHLSGEKLFLSPEKVMAIQNALGADIIMAFDECPPYPAEYEYVKNSTERTYRWLKRCKEAHDRPEDQALFGIVQGGEYRELREESARQLVDLDLPGYAVGGLSVGEPHEMMFEILGYTTPLLPKDKPRYLMGVGSPEALIQGAILGVDMFDCVLPTRIARNGTTMTSGGRLVVRNAKFTRDFGPLDPNCDCYTCRNYSRAYLRHLIKADETFGLRLTTYHNLYFLLNLMHQVRQAIMEDRLLDFRDEFMMKYYGTLNPVQKF

SEQ ID NO: 61669 - protein, 391 aa, Thermoactinomyces vulgaris
  REGION 1..391: note = tr|A0A0N0YDG6|A0A0N0YDG6_THEVU Queuine tRNA-ribosyltransferase OS=Thermoactinomyces vulgaris; OX = 2026 GN=tgt PE=3 SV=1
MVISDANLVGGNILAVRYELIKTCKQSGARLGRLHTPHGTIETPIFMPVGTQATVKTMSPEELKEMNAQIILSNTYHLFLRPGHDIVKEAGGLHSFMNWDRPILTDSGGFQVFSLSQLRNITEEGVTFRSHLSGEKLFISPEKAMEIQNALGADIIMAFDECPPHPAEKAYVKASTERTYRWLERCIKAHARPHDQALFGIVQGGMHQDLREESAKQLVELDLPGYAVGGLSVGEPKEVMYEVLSYTTPHLPVHKPRYLMGVGSPDALIQGAILGIDMFDCVLPTRIARNGTTMTSQGRLVVRNAKFARDYTPLDPACDCYTCRNYTRAYLRHLIKADETFGLRLTTYHNLYFLLKLMEQVRQAIREDRLLDFRDEFMMKYYGSLNPNAAF

SEQ ID NO: 61670 - protein, 375 aa, Thermoanaerobacter brockii
  REGION 1..375: note = tr|E8US90|E8US90_THEBF Queuine tRNA-ribosyltransferase OS=Thermoanaerobacter brockii subsp. finnii (strain ATCC 43586 / DSM 3389 / AKO-1); OX = 509193 GN=tgt PE=3 SV=1
MAAIKYRLIKKDSRTNARLGILETPHGIIETPVFMPVGTQATVKSMTPEELKEIGATIILSNTYHLYLRPGHKIIEKAGGLHKFMNWDRAILTDSGGFQVFSLNSLRKITEDGVEFRSHIDGSRHFFTPEKVIEIQNALGSDIMMSFDECAPYPADYDYVKKSMELTIKWAERGKRAHKNTEKQALFGIVQGGTYEDLRKECAQRLVDMDFPGYSIGGLSVGEPKNVMYDIVDLTTEYLPEDKPRYLMGVGSPDDLIEGVIRGVDMFDCVLPTRIARNGTVFTSKGKLIVRDAPYAEDFSPLDEECDCYTCRNYSRAYIRHLFKANEILAARLATIHNLYFLIKLMERIREAIRQDRLLEFKKQFFKKYGYKEEY

SEQ ID NO: 61671 - protein, 375 aa, Thermoanaerobacter ethanolicus; identical to SEQ ID NO: 61670
  REGION 1..375: note = tr|C7IUL7|C7IUL7_THEET Queuine tRNA-ribosyltransferase OS=Thermoanaerobacter ethanolicus CCSD1 OX=589861 GN=tgt PE=3 SV=1

SEQ ID NO: 61672 - protein, 376 aa, Thermoanaerobacter italicus
  REGION 1..376: note = tr|D3T8J8|D3T8J8_THEIA Queuine tRNA-ribosyltransferase OS=Thermoanaerobacter italicus (strain DSM 9252 / Ab9) OX=580331 GN=tgt PE=3 SV=1
MAAIKYWLIKKDSRTKARLGILETPHGAIETPVFMPVGTQATVKAMTPEELKEIGATIILSNTYHLYLRPGHKIIEKAGGLHKFMNWDRAILTDSGGFQVFSLSSLRKITEDGVEFRSHIDGSRHFFTPEKVIEIQNALGADIIMSFDECAPYPADYEYVKKSMEFTIKWAERGKKAHRYTEKQALFGIVQGGTYEDLRRECTQRLVDMDFPGYSIGGLSVGEPKNVMYDMVDLTTENLPEDKPRYLMGVGSPDDLIEGVIRGVDMFDCVLPTRIARNGTVFTSKGKLIVRDAPYAEDFFPLDEECDCYTCKNYSRAYIRHLFKAGEILAARLATLHNLYFLIKLMERIREAIKQDRLLEFKKEFFEKYYGNKEDY

SEQ ID NO: 61673 - protein, 375 aa, Thermoanaerobacter kivui
  REGION 1..375: note = tr|A0A097AR80|A0A097AR80_THEKI Queuine tRNA-ribosyltransferase OS=Thermoanaerobacter kivui; OX = 2325 GN=tgt PE=3 SV=1
MAAIKYQLIKKDSRTKARLGILQTSHGIIETPVFMPVGTQATVKTMTPEELKEIGATIILSNTYHLYLRPGHKLIEKAGGIHKFMNWDRAILTDSGGFQVFSLSSLREITEEGVEFRSHIDGSKHFFTPEKVIEIQNALGADIIMSFDECAPYPADYGYVKNSMELTIKWAERGKKAHKNTDKQALFGIVQGGTYEDLRKECANRLVEMDFPGYSIGGLSVGEPKNLMYDILDLTTDYLPEDKPRYLMGVGSPDDLIEGVIRGVDMFDCVLPTRIARNGTVFTSKGKLVVRNAAYAEDFSPLDDECECYTCKNYSRAYIRHLFKANEILAARLATIHNLYFLVKLMERIREAIRQDRLLEFKKQFFEKYGYKEEY

SEQ ID NO: 61674 - protein, 376 aa, Thermoanaerobacter mathranii; identical to SEQ ID NO: 61672
  REGION 1..376: note = tr|D7ANM1|D7ANM1_THEM3 Queuine tRNA-ribosyltransferase OS=Thermoanaerobacter mathranii subsp. mathranii (strain DSM 11426 / CIP 108742 / A3); OX = 583358 GN=tgt PE=3 SV =1

SEQ ID NO: 61675 - protein, 375 aa, Thermoanaerobacter pseudethanolicus; identical to SEQ ID NO: 61670
  REGION 1..375: note = sp|B0K959|TGT_THEP3 Queuine tRNA-ribosyltransferase; OS = Thermoanaerobacter pseudethanolicus (strain ATCC 33223 / 39E) OX=340099 GN=tgt PE=3 SV=1

SEQ ID NO: 61676 - protein, 376 aa, Thermoanaerobacter siderophilus
  REGION 1..376: note = tr|I8R1I3|I8R1I3_9THEO Queuine tRNA-ribosyltransferase OS=Thermoanaerobacter siderophilus SR4 OX=880478 GN=tgt PE=3 SV=1
MAAIKYHLIKKDSKTKARLGILETPHGIIETPVFMPVGTQATVKSMTPEELKEIGATIILSNTYHLYLRPGHKIIEKAGGLHKFMNWDRAILTDSGGFQVFSLNSLRKITEDGVEFRSHIDGSRHFFTPEKVIEIQNALGSDIMMSFDECAPYPADYDYVKKSMELTIKWAERGKRAHKNTEKQALFGIVQGGTYEDLRKECAQRLVDMDFPGYSIGGLSVGEPKNVMYDIVDLTTEYLPEDKPRYLMGVGSPDDLIEGVIRGVDMFDCVLPTRIARNGTVFTSKGKLIVRDAPYAEDFSPLDEECDCYTCRNYSRAYIRHLFKANEILAARLATLHNLYFLIKLMGKIREAIRQDRLLEFKKEFFKKYYRNKEEY

SEQ ID NO: 61677 - protein, 375 aa, Thermoanaerobacter sp.
  REGION 1..375: note = tr|A0A3F3EF75|A0A3F3EF75_9THEO Queuine tRNA-ribosyltransferase OS=Thermoanaerobacter sp. X561; OX = 588857 GN=tgt PE=3 SV=1
MAAIKYRLIKKDSRTNARLGILETPHGVIETPVFMPVGTQATVKAMTPEELKEIGATIILSNTYHLYLRPGHKIIEKAGGLHRFMNWDRAILTDSGGFQIFSLSSLRKIKEEGVEFRSHIDGSKHFFTPEKVIEIQNALGSDIIMSFDECAPYPADYEYVKNSMELTIKWAERGKKAHKNTEKQALFGIVQGGIYEDLRKECAQRLVEMDFPGYSIGGLSVGEPKNVMYDIVDLTTEYLPENKPRYLMGVGSPDDLIEGVIRGVDMFDCVLPTRIARNGTVFTSKGKLIVRDAPYAEDFSPLDEECDCYTCKNYSRAYIRHLFKANEILAARLATIHNLYFLIKLMERIREAIRQDRLLEFKKQFFKKYGYKEEY

SEQ ID NO: 61678 - protein, 375 aa, Thermoanaerobacter sp.; identical to SEQ ID NO: 61677
  REGION 1..375: note = sp|B0K0M1|TGT_THEPX Queuine tRNA-ribosyltransferase; OS = Thermoanaerobacter sp. (strain X514) OX=399726 GN=tgt; PE = 3 SV=1

SEQ ID NO: 61679 - protein, 375 aa, Thermoanaerobacter thermocopriae; identical to SEQ ID NO: 61677
  REGION 1..375: note = tr|A0A101D7R8|A0A101D7R8_9THEO Queuine tRNA-ribosyltransferase OS=Thermoanaerobacter thermocopriae OX=29350 GN=tgt PE=3 SV=1

SEQ ID NO: 61680 - protein, 376 aa, Thermoanaerobacter thermohydrosulfuricus
  REGION 1..376: note = tr|M8CNA9|M8CNA9_THETY Queuine tRNA-ribosyltransferase OS=Thermoanaerobacter thermohydrosulfuricus WC1 OX=1198630 GN=tgt PE=3 SV=1
MAAIKYHLIKKDSKTKARLGILETPHGIIETPVFMPVGTQATVKSMTPEELKEIGATIILSNTYHLYLRPGHKIIEKAGGLHKFMNWDRAILTDSGGFQVFSLNSLRKITEDGVEFRSHIDGSRHFFTPEKVIEIQNALGSDIMMSFDECAPYPADYDYVKKSMELTIKWAERGKRAHKNTEKQALFGIVQGGTYEDLRKECAQRLVDMDFPGYSIGGLSVGEPKNVMYDIVNLTTEYLPEDKPRYLMGVGSPDDLIEGVIRGVDMFDCVLPTRIARNGTVFTSKGKLIVRDAPYAEDFSPLDEECDCYTCRNYSRAYIRHLFKANEILAARLATLHNLYFLIKLMGKIREAIRQDRLLEFKKEFFKKYYRNKEEY

SEQ ID NO: 61681 - protein, 376 aa, Thermoanaerobacter thermohydrosulfuricus; identical to SEQ ID NO: 61680
  REGION 1..376: note = tr|A0A1G7H746|A0A1G7H746_THETY Queuine tRNA-ribosyltransferase OS=Thermoanaerobacter thermohydrosulfuricus OX=1516 GN=tgt PE=3 SV=1

SEQ ID NO: 61682 - protein, 376 aa, Thermoanaerobacter uzonensis
  REGION 1..376: note = tr|A0A1M5A1R3|A0A1M5A1R3_9THEO Queuine tRNA-ribosyltransferase OS=Thermoanaerobacter uzonensis DSM 18761 OX=1123369 GN=tgt PE=3 SV=1
MTAIKYHLIKKDSKTKARLGIIETPHGIIETPVFMPVGTQATVKSMTPEELKEIGATIILSNTYHLYLRPGQKIIEKAGGLHKFMNWDRAILTDSGGFQVFSLSSLRKITEDGVEFRSHIDGSRHFFTPEKVIEIQNALGSDIMMSFDECAPYPADYDYVKKSMELTIKWAERGKRAHKNTEKQALFGIVQGGTYEDLRKECVQRLVDIDFPGYSIGGLSVGEPKNVMYDIVDLTTEYLPEDKPRYLMGVGSPDDLIEGVIRGVDMFDCVLPTRIARNGTVFTSKGKLIVRDAPYAEDFSPLDEECDCYTCRNYSRAYIRHLFKANEILAARLATLHNLYFLIKLMKKIREAIRQDQLLEFKKEFFKKYYGNKEEY

SEQ ID NO: 61683 - protein, 376 aa, Thermoanaerobacter wiegelii
  REGION 1..376: note = tr|G2MSZ7|G2MSZ7_9THEO Queuine tRNA-ribosyltransferase OS=Thermoanaerobacter wiegelii Rt8.B1 OX=697303 GN=tgt PE=3 SV=1
MAAIKYHLIKKDSKNKARLGILETPHGIIETPVFMPVGTQATVKSMTPEELKEIGATIILSNTYHLYLRPGHKIIEKAGGLHKFMNWDRAILTDSGGFQVFSLNSLRRITEDGVEFRSHIDGSRHFFTPEKVIEIQNALGSDIMMSFDECAPYPADYDYVKKSMELTIKWAERGKRAHKNTEKQALFGIVQGGTYEDLRKECAQRLVDMDFPGYSIGGLSVGEPKNVMYDIVDLTTEYLPEDKPRYLMGVGSPDDLIEGVIRGVDMFDCVLPTRIARNGTVFTSKGKLIVRDAPYAEDFSPLDEECDCYTCRNYSRAYIRHLFKANEILAARLATLHNLYFLIKLMKKIREAIRQDQLLEFKKEFFKKYYGNKEEY

SEQ ID NO: 61684 - protein, 371 aa, unidentified
  source 1..371: note = Thermoanaerobacteraceae bacterium
  REGION 1..371: note = tr|A0A3A9JVG4|A0A3A9JVG4_9THEO Queuine tRNA-ribosyltransferase OS=Thermoanaerobacteraceae bacterium SP2 OX=2292448 GN=tgt PE=3 SV=1
MRFEVLKKAENSRARLGLLQTPHGTIETPVFMPVGTQATVKTMTPEELEQIGAKIILGNTYHLYLRPGHKVVEEAGGLHKFMNWNRSILTDSGGYQVFSLGELREIREEGVTFRSHIDGSLHFIGPETSIEIQNALGADIIMSFDECIPYPATYDYVKNSVQRTSRWAERCKKAHVNPKQTLFGIVQGGLYKDLREESAKDLVSLDFEGYSIGGLSVGEPKENMYEVLDYTVPLLPEEKPRYLMGVGSPDAIFEGVLRGIDMFDCVLPTRIARNGTVFTRKGKLVVRNAVYARDFSPLDHDCDCYVCRNYTRAYIRHLINAKEVLGIRLTTIHNLYFLLNLMKDIRRAIEGGYLSEFKNEFFESFGYKQEY

SEQ ID NO: 61685 - protein, 373 aa, unidentified
  source 1..373: note = Thermoanaerobacteraceae bacterium
  REGION 1..373: note = tr|A0A5D8QGI5|A0A5D8QGI5_9THEO Queuine tRNA-ribosyltransferase OS=Thermoanaerobacteraceae bacterium A05MB OX=2606906 GN=tgt PE=3 SV=1
MGQFRYELIKEEKNTRARLGRIYTPHGVIETPIFMPVGTQATVKAMTPEELKDIGAQIILSNTYHLYLRPGHNIVKKAGGLHNFMHWDRPILTDSGGYQVFSLSDLREINEEGVYFKSHLDGSRHFIGPEKAMEIENALGADIIMCFDECAPYPSEWEYVKRSSDMTIKWAQRCKKAHNRPDEQALFGILQGGIYEDIRTENAKRMVDMDFPGYSIGGLSVGEPKNIMLDIIELVEEYMPKDKPRYLMGVGSPDLLIEGSIRGVDMFDCVLPTRIARNGTVMTSHGKLVIRNAQYAEDFTPLDDECDCYVCKNYTRAYIRHLFKAGEILAARLATYHNIYFLIRLMERIREAIKNDSLLDFRKEFFAKYGYEL

SEQ ID NO: 61686 - protein, 371 aa, unidentified
  source 1..371: note = Thermoanaerobacterales bacterium
  REGION 1..371: note = tr|A0A3G2R7G3|A0A3G2R7G3_9FIRM Queuine tRNA-ribosyltransferase OS=Thermoanaerobacterales bacterium SK-G1 OX=2316383 GN=tgt PE=3 SV=1
MRFEVLKKAENSRARLGLLQTPHGTIETPVFMPVGTQATVKTMTPEELEQIGAKIILGNTYHLYLRPGHKVVEEAGGLHKFMNWNRSILTDSGGYQVFSLGELREIREEGVTFRSHIDGSLHFIGPETSIEIQNALGADIIMSFDECIPYPATYDYVKNSVQRTSRWAERCKKAHVNPKQTLFGIVQGGLYKDLREESAKDLVSLDFEGYSIGGLSVGEPKENMYEVLDYTVPLLPEEKPRYLMGVGSPDAIFEGVLRGIDMFDCVLPTRIARNGTVFTRKGKLVVRNAVYARDFSPLDHDCDCYVCRNYTRAYIRHLINAKEVLGIRLTTIHNLYFLLNLMKDIRRAIEGGYLSEFKNEFFESFGYKQEF

SEQ ID NO: 61687 - protein, 372 aa, unidentified
  source 1..372: note = Thermoanaerobacterales bacterium
  REGION 1..372: note = tr|A0A124FJ09|A0A124FJ09_9FIRM Queuine tRNA-ribosyltransferase OS=Thermoanaerobacterales bacterium 50_218 OX=1635288 GN=tgt PE=3 SV=1
MGLFHFEVIKECKKTRARLGKIHTPRGIINTPAFMPVGTQATVKTLTPDEVTALGADVILCNTYHLYLRPGTEIIEAAGGLHRFMNWKGPILTDSGGFQVFSLASLRKVSDQGVEFRSHLDGSLHFITPEKAIEIQEVLGSDIAMVFDECVPFPCSYGDALTAVERTTRWAKRCLRVHSRTDQVVFGIVQGSVYPELRARSALDLVNLDFAGYAIGGLSVGEPKPMMYGILDCTVPFLPERKPRYLMGVGTADCILEAVARGIDLFDCVLPTRIARNGTALTRWGKLVVRNAEYAADFSPIDPECSCYTCRNFTRAYLRHLFKAGEILGHRLLTIHNLHFTLNLMEKIRQAILEDRFLEFKSEFLNGFRITK

SEQ ID NO: 61688 - protein, 374 aa, Thermoanaerobacterium aotearoense
  REGION 1..374: note = tr|W9E8S7|W9E8S7_9FIRM Queuine tRNA-ribosyltransferase OS=Thermoanaerobacterium aotearoense SCUT27 OX=1421016 GN=tgt PE=3 SV=1
MTAIKYDLVKKEKNTKARLGVLHTPHGDIETPVFMPVGTQATVKAMTPEELKEIGANIILSNTYHLYLRPGHELIKKAGGLHKFMNWDRAILTDSGGFQVFSLGPLRKITEEGVEFRSHIDGSKHFLTPEKVIEIENALGADIIMSFDECAPYPADYGYVKNSMELTLRWARRGKDAHKNTERQALFGIVQGGTYDDLRKECANRLVDMDFPGYSIGGLSVGEEKQLMYHVVDLTTDFLPQDKPRYLMGVGSPGDLIEGVIRGVDMFDCVLPTRIARNGTVLTSTGRLIVRDAPHAEEFIPLDSECDCYTCKNFSRAYIRHLFKANEILAARLATIHNLRFLTRLMEGIREAIKQDKLLEFKSQFYKKYGYKEE

SEQ ID NO: 61689 - protein, 374 aa, Thermoanaerobacterium saccharolyticum; identical to SEQ ID NO: 61688
  REGION 1..374: note = tr|I3VVZ7|I3VVZ7_THESW Queuine tRNA-ribosyltransferase OS=Thermoanaerobacterium saccharolyticum (strain DSM 8691 / JW/SL-YS485) OX=1094508; GN = tgt PE=3 SV=1

SEQ ID NO: 61690 - protein, 374 aa, Thermoanaerobacterium sp.
  REGION 1..374: note = tr|A0A1X2FZR3|A0A1X2FZR3_9FIRM Queuine tRNA-ribosyltransferase OS=Thermoanaerobacterium sp. PSU-2; OX = 1930849 GN=tgt PE=3 SV=1
MTAIKYDLLKREKNTKARLGVLHTPHGDIETPVFMPVGTQATVKAMTPEELKEIGANIILSNTYHLYLRPGHELIKKAGGLHKFMNWDRAILTDSGGFQVFSLGPLRKITEEGVEFRSHIDGSRHFLTPEKVIEIENALGADIIMSFDECAPYPADYGYVKNSMELTLRWAKRGKEAHKNTDKQALFGIVQGGTYDDLRKECANRLVDMDFPGYSIGGLSVGEEKQLMYHVVDLTTDFLPQDKPRYLMGVGSPDDLIEGVIRGVDMFDCVLPTRIARNGTVLTSTGRLIVRDAPHAEEFIPLDAECDCYTCKNFSRAYIRHLFKANEILAARLATIHNLRFLTRLMEGIREAIKQDKLLEFKSQFYKKYGYKEE

SEQ ID NO: 61691 - protein, 374 aa, Thermoanaerobacterium sp.
  REGION 1..374: note = tr|A0A285BC13|A0A285BC13_9FIRM Queuine tRNA-ribosyltransferase OS=Thermoanaerobacterium sp. RBIITD OX=1550240 GN=tgt PE=3 SV=1
MTAIKYDLIKRDSRTKARLGVLHTPHGDIETPVFMPVGTQATVKSMTPEELKNIGAKIILSNTYHLYLRPGHELIKKAGGLHKFMNWDRAILTDSGGFQVFSLGPLRKITEEGVEFHSHLDGSKHFLTPEKVIEIENALGADIIMSFDECTPYPADYDYVKKSMEMTVRWAKRGKEAHKNTNKQALFGIVQGGTYDDLRKECTNMLVDMDFPGYSIGGLSVGEEKELMYHVVDYTTEFLPQDKPRYLMGVGSPDDLIECVIRGIDMFDCVLPTRIARNGTVLTSKGRLIIRDAPHAEEFMPLDDECDCYACRNFSRAYIRHLFKANEILAARLATIHNLRFLVKLMEDIRDAIMQDKLLEFKSQFYQKYGYEEE

SEQ ID NO: 61692 - protein, 374 aa, Thermoanaerobacterium thermosaccharolyticum
  REGION 1..374: note = tr|D9TNV3|D9TNV3_THETC Queuine tRNA-ribosyltransferase OS=Thermoanaerobacterium thermosaccharolyticum (strain ATCC 7956 / DSM 571 / NCIB 9385 / NCA 3814) OX=580327 G N=tgt PE=3 SV=1
MTAIKYDLIKKEKMTKARLGVLHTPHGDIETPVFMPVGTQATVKTMTPEELKEIGARIILSNTYHLYLRPGHEVIKKAGGLHKFMNWDRAILTDSGGFQVFSLGPLRKITEDGVEFRSHLDGSRHFLTPEKVIEIENALGADIIMSFDECAPYPADYDYVKNSMEMTLRWAKRGKEAHKNIDKQALFGIVQGGTYDDLRRECANRLVDMDFPGYSIGGLSVGEEKELMYHVVDYTTDLLPQDKPRYLMGVGSPDDLIEGVIRGVDMFDCVLPTRIARNGTVLTSSGRLIVRDAPHAEEFIPLDSECDCYTCKNFSRAYIRHLFKANEILAARLATIHNLRFLTKLMEDIREAIKQDKLLEFKSQFYKKYEYKEE

SEQ ID NO: 61693 - protein, 374 aa, Thermoanaerobacterium thermosaccharolyticum; identical to SEQ ID NO: 61692
  REGION 1..374: note = tr|A0A223I2B7|A0A223I2B7_THETR Queuine tRNA-ribosyltransferase OS=Thermoanaerobacterium thermosaccharolyticum OX=1517 GN=tgt PE=3 SV=1

SEQ ID NO: 61694 - protein, 381 aa, Thermoanaerobacterium xylanolyticum
  REGION 1..381: note = tr|F6BGK0|F6BGK0_THEXL Queuine tRNA-ribosyltransferase OS=Thermoanaerobacterium xylanolyticum (strain ATCC 49914 / DSM 7097 / LX-11); OX = 858215 GN=tgt PE=3 SV=1
MTAIKYDLLKREKNTKARLGVLHTPHGDIETPVFMPVGTQATVKAMTPEELKEIGANIILSNTYHLYLRPGHELIKKAGGLHKFMNWDRAILTDSGGFQVFSLGPLRKITEEGVEFRSHIDGSRHFLTPEKVIEIENALGADIIMSFDECAPYPADYGYVKNSMELTLRWAKRGKEAHKNTDKQALFGIVQGGTYDDLRKECANRLVDMDFPGYSIGGLSVGEEKQLMYHVVDLTTDYLPQDKPRYLMGVGSPDDLIEGVIRGVDMFDCVLPTRIARNGTVLTSTGRLIVRDAPHAEEFIPLDAECDCYTCKNFSRAYIRHLFKANEILAARLATIHNLRFLTRLMEDIRNAIKQDKLLEFKSQFYKKYGYKYFGNMSRGD

SEQ ID NO: 61695 - protein, 375 aa, unidentified
  source 1..375: note = Thermoanaerobaculum aquaticum
  REGION 1..375: note = tr|A0A062XUF9|A0A062XUF9_9BACT Queuine tRNA-ribosyltransferase OS=Thermoanaerobaculum aquaticum; OX = 1312852 GN=tgt PE=3 SV=1
MGRNGTFRVVAREGFARAGELETPHGIVRTPAFMPVGTAGSVKGLAPWELARLAPEMVLANTYHLLLRPGIEVVAELGGLHRFMGWSGPILTDSGGFQVFSLAQLRRVSQEGVLFRSHIDGTEFLLTPESCMDAQRRLGVDVAMALDVCPALPASRETLEQAVKLTGLWARRCRQALPAGEGPLVFGIVQGGLELDLRRQALEALLPLDFDGYALGGFSVGEPPEAMWQAVGVLAPELPEDRPRYLMGVGTVRDILEAVAAGVDLFDCVIPTRNARNGLLHTSRGPVVVKHARYRGCPEPPDPQCTCPTCQTCSLAYLRHLYLAREAAYVVLATVHNLHFYLTLMRQVRSAIIDGRFAELRQGISADLAAAVEAS

SEQ ID NO: 61696 - protein, 377 aa, Thermobacillus composti
  REGION 1..377: note = tr|L0EG59|L0EG59_THECK Queuine tRNA-ribosyltransferase OS=Thermobacillus composti (strain DSM 18247 / JCM 13945 / KWC4) OX=717605 GN=tgt PE=3 SV=1
MAIKYELIKVCKQSGARLGRVHTPHGSFDTPAFMPVGTQATVKTVSPEELKAMDAGIILSNTYHLFLRPGHKLIERAGGLHRFMNWDRAILTDSGGFQVFSLSAMRKIKEEGVEFRSHLNGDRLFLSPELATEIQNALGSDIMMAFDECPPYPADYDYVKQSVERTSRWAERCLKAHARPDDQGLFAIVQGGMYEDLRRQSAADLTSLDFPGYAIGGLSVGEPKDVMYEVLDYTVPLLPADKPRYLMGVGSPDALIEGSIRGIDMFDCVLPTRIARNGTCMTSRGRLVVRNARYAEDFGPLDPACDCYTCRNYSRAYIRHLIKADETFGIRLTTIHNLHFLLKLMQDVRQAIMEDRLLDFRDRFFAEYGLFDNDKGF

SEQ ID NO: 61697 - protein, 382 aa, Thermobacillus sp.
  REGION 1..382: note = tr|A0A3E0QQP7|A0A3E0QQP7_9BACL Queuine tRNA-ribosyltransferase OS=Thermobacillus sp. OX=2108467; GN = tgt PE=3 SV=1
MGSDNVAIKYELIKVCKQSGARLGRVHTPHGSFDTPAFMPVGTQATVKTVSPEELKAMDAGIILSNTYHLFLRPGHKLIERAGGLHRFMNWDRAILTDSGGFQVFSLSAMRKIKEEGVEFRSHLNGDRLFLSPELATEIQNALGSDIMMAFDECPPYPADYDYVKQSVERTSRWAERCLKAHARPDDQGLFAIVQGGMYEDLRRQSAADLTSLDFPGYAIGGLSVGEPKDVMYEVLDYTVPLLPADKPRYLMGVGSPDALIEGSIRGIDMFDCVLPTRIARNGTCMTSRGRLVVRNARYAEDFGPLDPACDCYTCRNYSRAYIRHLIKADETFGIRLTTIHNLHFLLKLMQDVRQAIMEDRLLDFRDRFFAEYGLFDNDKGF

SEQ ID NO: 61698 - protein, 385 aa, Thermobacillus sp.
  REGION 1..385: note = tr|A0A1Y3Q913|A0A1Y3Q913_9BACL Queuine tRNA-ribosyltransferase OS=Thermobacillus sp. ZCTH02-B1; OX = 1858795 GN=tgt PE=3 SV=1
MERTGSDNVAIRYELIKVCKQSGARLGRVHTPHGSFDTPAFMPVGTQATVKTVSPEELKEIGAGIILSNTYHLFLRPGHKLIERAGGLHRFMNWDRAILTDSGGFQVFSLAEMRKIREEGVEFRSHLNGDRLFLSPELATEIQNALGSDIMMAFDECPPYPADYEYVRQSVARTSRWAERCLKAHARPEEQALFGIVQGGMYEDLRRQSAADLTSLDFPGYAIGGLSVGEPKHVMYEVLEYTVPLLPADKPRYLMGVGSPDALIEGAIRGIDMFDCVLPTRIARNGTCMTSRGRLVVRNAKYAEDFGPIDPACDCYTCRNYSRAYIRHLIKADETFGIRLTTIHNLHFLMKLMQDVRQAILEDRLLDFRDRFFAEYGLFDNPHGF

SEQ ID NO: 61699 - protein, 394 aa, unidentified
  source 1..394: note = Thermobaculum terrenum
  REGION 1..394: note = tr|D1CFZ2|D1CFZ2_THET1 Queuine tRNA-ribosyltransferase OS=Thermobaculum terrenum (strain ATCC BAA-798 / YNP1) OX=525904 GN=tgt PE=3 SV=1
MDIDHTQFSFEVQATDGLARAGILTTPHGDIKTPVFMPVGTQATVKAMKPEDVDALGAQIVLSNTYHLYLRPGVEIVAKAGGLHKFMRWPKPILTDSGGFQVFSLASRREVLDEGVRFRSHIDGSEHLFTPENVIKYQEFLGADIIMAFDECAPYPADKSYVKEAMERTHRWLERCIASKTRPDQALFGIVQGGIWLDLREESALFVSSMDLPGYGIGGLSVGEDKEQMLEALSVVTAILPMDKPRYLMGVGSPEDLLNGIALGVDMFDCVLPTRNARNGALLVPTGRLNIRNAQFKEDFTPIQEDCDCYTCSNFTRAYLHHLFRAEELLAYTLATTHNLRFLVRLMDGAREAILKGEFEDYRQQFLAGFQPPDPEARKLNRERRFAGLLEETK

SEQ ID NO: 61700 - protein, 378 aa, Thermobrachium celere
  REGION 1..378: note = tr|R7RSS0|R7RSS0_9CLOT Queuine tRNA-ribosyltransferase OS=Thermobrachium celere DSM 8682; OX = 941824 GN=tgt PE=3 SV=1
MGAIRYELIKTCKQSGARLGRLHTPHGVIETPIFMPVGTQATVKTMTPEELKEIGAQIILSNTYHLYMRPGEKLVEKAGGLHKFMNWDRPILTDSGGFQVFSLSKLRDITEEGVTFRSHIDGSKHFISPEKAIEIENALGADIIMAFDECLPYPCDYDYAKNSLYRTIRWAERCLKAHKNTEKQALFGIIQGGMYRDLREESVREMIKLDFPGYAVGGLSIGEPKDIMYEVLDWTVHLLPENKPRYLMGVGSPDALLEGVIRGVDMFDCVLPTRIARNGTVFTSKGKLVVRNAEYAEDFRPLDEECDCYACRNYTRAYIRHLFKAKEILGARLTTIHNLRFLLRLMENVRQAIMEDRLLDFKEEFFEKYGYNEGKWTF

SEQ ID NO: 61701 - protein, 373 aa, unidentified
  source 1..373: note = Thermoclostridium caenicola
  REGION 1..373: note = tr|A0A1M6G8V2|A0A1M6G8V2_9FIRM Queuine tRNA-ribosyltransferase OS=Thermoclostridium caenicola; OX = 659425 GN=tgt PE=3 SV=1
MPAIRYELIKTCKQSGARLGRIHTPHGSFETPVFMPVGTQATVKGMSPDELKEIDAHIILSNTYHLFLRPGSELVRDAGGLHGFMNWDRSILTDSGGFQVFSLSDLRDITEEGVTFRSHIDGSKKFMSPEISIKTQNDLGADIIMAFDECAPYPCDFDYARKSMEMTTRWAKRCKQAHARPEDQALFGIVQGSVYPELRKESAKQITDLDFPGYAVGGLSVGEPGEVMKEMLEITVPLLPADKPRYLMGVGSPDYLIEGVIRGIDMFDCVLPTRIGRNGTVFTSSGRIIVRDAKYARDFSPMDPECDCYACRNFTRAYIRHLFKTGEILGLRLATWHNLRFLINLMSDIRQAIREDRLLDFRKEFFTRFGYPL

SEQ ID NO: 61702 - protein, 377 aa, unidentified
  source 1..377: note = Thermoclostridium stercorarium
  REGION 1..377: note = tr|A0A1B1YKD3|A0A1B1YKD3_THEST Queuine tRNA-ribosyltransferase OS=Thermoclostridium stercorarium subsp. leptospartum DSM 9219 OX=1346611 GN=tgt PE=3 SV=1
MAAVTYELIHVCKQTGARLGRVHTPHGSFDTPVFMPVGTQATVKGMSPDELKEIGAGIILSNTYHLYLRPGHELIKKAGGLHRFMNWDRPILTDSGGFQVFSLAELRDITEEGVTFRSHIDGSKHFLSPEKSIEIQNALGSDIIMAFDECAPYPCDYEYAKKSMEMTTRWAERCLKAHKNPEKQALFGIVQGSVYEDLRRESAKQLTAMDFPGYAIGGLSVGEPGEVMMEMLEKTVPYLPENKPRYLMGVGSPDYLIDGSIRGIDMFDCVLPTRIGRNGTVFTSKGRIIIRDAKYAEDFSPIDEECDCYVCRNFTRAYIRHLFKAGEMLGLRLATWHNLRFLIRLMENIREAIRNDCLGDFRNEFFRKFGYDTKTGI

SEQ ID NO: 61703 - protein, 377 aa, unidentified; identical to SEQ ID NO: 61702
  source 1..377: note = Thermoclostridium stercorarium
  REGION 1..377: note = tr|L7VPC4|L7VPC4_THES1 Queuine tRNA-ribosyltransferase OS=Thermoclostridium stercorarium (strain ATCC 35414 / DSM 8532 / NCIMB 11754) OX=1121335; GN = tgt PE=3 SV=1

SEQ ID NO: 61704 - protein, 375 aa, Thermocrinis albus
  REGION 1..375: note = tr|D3SQ45|D3SQ45_THEAH Queuine tRNA-ribosyltransferase OS=Thermocrinis albus (strain DSM 14484 / JCM 11386 / HI 11/12) OX=638303 GN=tgt PE=3 SV=1
MLFRIIASCGRARRGILFTPHGEIHTPVFMPVGTQGTVKAMIHRLLEEIGTQIILGNTYHLYLRPGVEVIKKAGGLHNFISWRKPILTDSGGFQVFSLSRGRKDGRARVKVREEGVEFRDHLAGDLHFFTPELVIKIQEAFGSDIMMPLDECVEYPTTYAYAKEALERTIRWLDRSISAKERQDQALFGIVQGAFFEDLRRESALRTVERELDGYAIGGLSVGEPKNMMYDITELVCEYLPWEKPRYLMGVGLPEDLLEAIDRGVDMFDCVAPTRFARTGTLFTSYGRLNIRNERFKKDFSPPDPQCDCYTCKNFSRAYLRHLFQSEEISAYILNTIHNLYFYHKLMEGARRAIEEGRFGEYKRQWLEKLEMGVI

SEQ ID NO: 61705 - protein, 376 aa, Thermocrinis minervae
  REGION 1..376: note = tr|A0A1M6SKC3|A0A1M6SKC3_9AQUI Queuine tRNA-ribosyltransferase OS=Thermocrinis minervae OX=381751; GN = tgt PE=3 SV=1
MFSFRVLKSDGSARLGELVTPHGVIKTPVFMPVGTQGTVKAMIPSLLEEVGAQIILGNTYHLYLRPGVEVVEGAGGLHRFIGWHKPILTDSGGFQVFSLSRERNDKRSSVKVLEEGVEFKDHLSGDRHFFTPEKVVQIEEALGADIIMPLDVCIEYPTTYARAKEAVELTIRWLDRSIRVKRREDQVLFAIVQGSVYEDLRLESAYMSMERDLFGYAIGGLSVGEPKEEMYRITRVVCSVLPWDKPRYLMGVGLPEDIVEAVASGVDMFDCVAPTRMARTGTLFTSQGRINIKSKIYEKDYDPPDPNCDCYTCSNFSRAYLRHLYKAEEISAYILNTIHNLRFYHRLMEDIRRSIEESRFEEFRKNFLRSWLRTSY

SEQ ID NO: 61706 - protein, 377 aa, Thermocrinis ruber
  REGION 1..377: note = tr|W0DFR5|W0DFR5_9AQUI Queuine tRNA-ribosyltransferase OS=Thermocrinis ruber OX=75906; GN = tgt PE=3 SV=1
MFKFEVLKADGKARRGRLYTPHGVIETPVFMPVGTQGTVKAMIHKLLEDIGTQIILGNTYHLYLRPGLEVIESAGGLHNFIGWKKPILTDSGGFQVFSLAKDRLKDGRSKVKVEEDGVYFKDHLAGDTHFFTPEFVIKAQEIFGSDIIMPLDECVEYPTTYAYAKSALERTLRWLDRSIKAKTREDQVLFGIVQGAFFEDLRRESALRTMERELFGYAIGGLSVGEPKEIMIEMAQLVCEELPWEKPRYLMGVGMPEDLLMAIGVGVDMFDCVAPTRMARTGTLFTSQGKLNIRKEIYKKDFSPPDPECDCYTCQNFSRAYLRHLFHAEEISAYILNTIHNLHFYHRLMEGARKAIEEGNFDSYRKGWLERLSVAVG

SEQ ID NO: 61707 - protein, 374 aa, unidentified
  source 1..374: note = Thermodesulfatator autotrophicus
  REGION 1..374: note = tr|A0A177E8I3|A0A177E8I3_9BACT Queuine tRNA-ribosyltransferase OS=Thermodesulfatator autotrophicus OX=1795632 GN=tgt PE=3 SV=1
MASIFQIEKKCPQTGARTGFLFTRRGVIETPVFMPVGTQASVKTLTPEEVSGLGARIILANTYHLFLRPGHELIARHGGLHRFMNWPRSILTDSGGYQVFSLAKLCKIEEEGARFQSHLDGQEYLLTPELSMEIQAGLDSDIRMVLDTCIPYPCSYDEAKRLTELTHRWEKRSLLAWQKNHRESLVFGITQGGMFEDLRRYSARVIANFDFHGHAIGGLSVGEPHDLMIEMLEASLSELPEEKPRYLMGVGTPQDILEAVSRGVDMFDCVLPTRNARRGTLFTSFGKISLKQSRYKDDERPIDPECQCYTCRNYSRAYLRHLFMAGELLVYRLNTIHNLHFYLCFMEGIRDAIRKGRFEEFKKHYYERKEESEC

SEQ ID NO: 61708 - protein, 374 aa, Thermodesulfatator indicus
  REGION 1..374: note = tr|F8ACJ5|F8ACJ5_THEID Queuine tRNA-ribosyltransferase OS=Thermodesulfatator indicus (strain DSM 15286 / JCM 11887 / CIR29812) OX=667014 GN=tgt; PE = 3 SV=1
MARIFQIEKKCPQTKARTGFLFTRRGIIETPVFMPVGTQASVKSLTPEDVSGLGARIILANTYHLFLRPGHELIARLGGLHCFMNWPRSILTDSGGFQVFSLAKLCKIEEDGARFQSHLNGQEYLLTPELSMEIQAGLDSDIRMVLDTCIPYPCPYEEAKRLTELTHRWEERSRLAWQKNHRESLLFGITQGGMFEDLRRYSAKVITSLDFHGYAIGGLSVGEPHDLMLKMLEASIEELPEGKPRYLMGVGTPHDILEAVSRGVDMFDCVLPTRNARRGTLYTSFGKISIKQARYKDDDRPIDPECQCYTCRNYSRAYLRHLFMAGELLVYRLNTIHNLHFYLCFMERIRNAIRKGHFEEFKKHYYERKEEVEC

SEQ ID NO: 61709 - protein, 372 aa, Thermodesulfatator sp.
  REGION 1..372: note = tr|A0A432UFI4|A0A432UFI4_9BACT Queuine tRNA-ribosyltransferase OS=Thermodesulfatator sp.; OX = 1874629 GN=tgt PE=3 SV=1
MLPVFKILKKDRQTEARWGLLLTRRGAVETPVFMPVATGGTVKALPPETVAGLSARVILANTYHLWLRPGPEIIRRAGGLHRFMNWPRVILTDSGGFQVFSLAPLREILEDGVRFRSHLDGAELFLTPEKSLEIQEALDADLRMVLDVCLPYPSSREEAERFTALTHYWAERSLKWWKKRDPRGALLLGIVQGGMFEDLRRQSARTLVSLEFEGYALGGLSVGEPKETMWRMLEVTLPELPEDRPRYLMGVGTPEDILEAVARGVDMFDCVLPTRNARRGTVFTSQGTFHIRNAPYKEDFRPLDPLCDCYTCRHYTRAYLRHLFQAGELLVYYLLTLHNLAFYLRFMREIRKALREGRFAAFREEFYARKGA

SEQ ID NO: 61710 - protein, 377 aa, unidentified
  source 1..377: note = Thermodesulfitimonas autotrophica
  REGION 1..377: note = tr|A0A3N5AZU1|A0A3N5AZU1_9THEO Queuine tRNA-ribosyltransferase OS=Thermodesulfitimonas autotrophica OX=1894989 GN=tgt PE=3 SV=1
MALRFEILKQDGAARLGRLYTPHGVVDTPVFMPVGTQGTVKAMTPEELRALGAQMILANTYHLYLRPGTEIIREAGGLHRFMHWDGPILTDSGGYQVFSLAPLRRLTAEGVIFRSHLDGSEHLFTPEKVVALQEALGSDIAMVLDECPPYPASREEVTAAVARTTAWAERSLAAQSAAQALFGIVQGGVYRDLREQSARELVALDFPGYAIGGLSVGEPKELMYQVLDWTVPLLPPEKPRYLMGVGHPDDIIEAVARGVDMFDCVLPTRLGRHGGALTPFGRLNIRNACYARDFGPLVPGCDCYACQNYSRAYLHHLVRAGEILGLRLLTTHNLHFLLKLTAEIRAAIARGELGLLRARWRERCGGNRTVLEAEGDT

SEQ ID NO: 61711 - protein, 371 aa, unidentified
  source 1..371: note = Thermodesulfobacteriales bacterium
  REGION 1..371: note = tr|A0A524JUS7|A0A524JUS7_9BACT Queuine tRNA-ribosyltransferase OS=Thermodesulfobacteriales bacterium OX=2528040 GN=tgt PE=3 SV=1
MFTFEIHKKDESTKARLGQMTTAHGVVDTPAFMPVATQATVKSLSPQEILDLGFQMVISNAYHLYLRPGHKTVEKLGGLHKFMSWNKSITTDSGGYQVLSLSKTRKIKDDGILFRSHLDGSEHMFTPEKCIEIQEALGVDIMMCLDECPPYPSTYEYMRKSVDLTSRWARLCKESKKRTDNALFGIVQGGVFKELRERSAHDLIDIGFEGYAVGGLGIGEESQKTYEITEHTLGILPLDKPRYLMGLGKPEDIVTAVSMGVDLFDCVIPTRNARNGTLFTSRGKLVIKNAQFAEDERPIDEGCECYTCRTFSRAYLRHLYIAKETLVLRLLTIHNLYYYAELMRGIRGSIKSCDFPNYISRVQSIEGEREN

SEQ ID NO: 61712 - protein, 381 aa, Thermodesulfobacterium commune
  REGION 1..381: note = tr|A0A3B8N4R9|A0A3B8N4R9_9BACT Queuine tRNA-ribosyltransferase OS=Thermodesulfobacterium commune; OX = 1741 GN=tgt PE=3 SV=1
MFKFHVLYESQITQARIGMLITHRGVVETPVFMPVGTQATIKAVPPEKIASLGYRIVLANTYHLYLRPGAEVIKNLGGLHRFMSWPRLILTDSGGFQVYSLSQFRTIKEEGILFKSHLDGSEHFITPVEALEIQTKLGSDIAMVLDTCIPYPLSYEETKALTELTHRWALESFKYRQRHKNTKQAVFGIIQGGMFVDLRQKSASFITSLEFDGYAIGGLSVGEPLELRNEMIEVSVIFMPKDKPRYLMGVGTPLDIAEAVARGVDMFDCVLPTRNARRGSLFTSQGPLSIKSSRFKTDSEPIDPNCTCYTCRNFSRGYLRHLFHTKELLVYQLLTLHNLFYYAKLIEKIKQSIKQETLLNLIQELKELYLKNTQKEAVLWT

SEQ ID NO: 61713 - protein, 373 aa, Thermodesulfobacterium commune
  REGION 1..373: note = tr|A0A075WYG2|A0A075WYG2_9BACT Queuine tRNA-ribosyltransferase OS=Thermodesulfobacterium commune DSM 2178 OX=289377 GN=tgt PE=3 SV=1
MFKFHVLYESQTTQARIGMLINHRGVVETPVFMPVGTQATIKAVPPENIASLGYRVVLANTYHLYLRPGAEVIKDLGGIHRFMRWPRLILTDSGGFQVYSLSQFRTIKEDGIIFKSHLDGSEHFITPVEALEIQTKLGSDIAMVLDTCIPYPLSYEETKALTELTHRWALESFKYRQRHKNTKQAVFGIIQGGMFVDLRQKSTSFITSLEFDGYAIGGLSVGEPLELRNEMIEVSTSFMPKDKPRYLMGVGTPIDIAEAVARGVDMFDCVLPTRNARRGSLFTSQGPLSIKSSRFKTDSEPIDPNCGCYTCRNFSKGYLRHLFHTKELLVYQLLTLHNLFYYAKLIEKIKQNIKQETLLNLIQELKELYSKTT

SEQ ID NO: 61714 - protein, 377 aa, unidentified
  source 1..377: note = Thermodesulfobacterium geofontis
  REGION 1..377: note = tr|F8C1X4|F8C1X4_THEGP Queuine tRNA-ribosyltransferase OS=Thermodesulfobacterium geofontis (strain OPF15) OX=795359 GN=tgt PE=3 SV=1
MFKFQILYQSRKNQARIGAIITHRGVIETPVFMPVGTQGTIKTMPPEIVSSLGYNIILSNTYHLYLRPGPDIIQELGGIHKFMNWKKLILTDSGGFQVYSLSQFRKITEEGILFKSHINGTEHFFSPIMVLEIQKKLGSDILMVLDTCIPYPLSYEETKNLTELTHKWAVESFEYWQRHKNEKQAVFGIIQGGMYEDLRRYSAKFITSLEFDGYAIGGLSVGEPLETRNQMIETSLEYMPYHKPRYVMGIGTPLDIIDAVIRGIDMFDCVLPTRNARRGTVFTSKGFLSIKNASFKSDSLPLDPECECYTCRNFSRGYLRHLFHAKELLVYFLLTLHNLFYYAKLMKHIKNAIKTETLENLREEVAQYYLKNFNDSK

SEQ ID NO: 61715 - protein, 376 aa, unidentified
  source 1..376: note = Thermodesulfobacterium geofontis
  REGION 1..376: note = tr|A0A2N7PPA2|A0A2N7PPA2_9BACT Queuine tRNA-ribosyltransferase OS=Thermodesulfobacterium geofontis OX=1295609 GN=tgt PE=3 SV=1
MFKFEVHYQSKKTQARIGTIVTHRGVIETPVFMPVGTQGTIKAMPPEVVNSLGYEIILSNTYHLYLRPGVDIIKELGGIHKFINWKKIILTDSGGFQVYSLSQFRKITEEGIIFKSHIDGTEHFFSPVTTMEIQKKLRSDIMMVLDTCIPYPLSYEETKNLTELTHKWAIESFEYWQRHKNEKQAVFGIIQGGMYEDLRKYSAKFVTSLEFDGYAIGGLSVGEPLELRNHMIEISIEYMPYNKPRYVMGIGTPLDIIDAVIRGIDMFDCVLPTRNARRGTVFTSKGLLSIKNANLKDDSSPLDPECECYTCRNYSRGYLRHLFHAKELLVYFLLTLHNLFYYAKLMRHIKEAIKNETLEIFREELAEYYFKNNSSE

SEQ ID NO: 61716 - protein, 371 aa, unidentified
  source 1..371: note = Thermodesulfobium acidiphilum
  REGION 1..371: note = tr|A0A2R4VYA5|A0A2R4VYA5_9FIRM Queuine tRNA-ribosyltransferase OS=Thermodesulfobium acidiphilum; OX = 1794699 GN=tgt PE=3 SV=1
MRENLIMIKEKFTQKNIGKFNFRIEENSSFFQLFSNTRIRQGQLNIRGKIAKTPLFMPVATRGTVRALTPSQLKEIGFEMILSNTYHLHERPGEEVINKLGGLHKFMNWDGLILTDSGGYQVFSLSNYRRVTDDGVVFRSILDGKEIFFTPEKVLEIQKKLNSDVAIFLDECPEYPCNAKREEESLKRTIKFAERSIKVEKNPGQLFFGVVQGGMNFKLRQECAQALLSLGVDGLAIGGLSIGEEPSLTKEVLLATLEVIPPGKPRYLMGVGSDILEYIKMGIDMFDSVFPTRIARHGSAILYNKGRINISNKRFKEDESPLDRNCDCYTCRNFSRAYLRHLFVCDELLGKTLLSIHNLTVLYKTVRALNS

SEQ ID NO: 61717 - protein, 367 aa, Thermodesulfobium narugense
  REGION 1..367: note = tr|M1E734|M1E734_9FIRM Queuine tRNA-ribosyltransferase OS=Thermodesulfobium narugense DSM 14796 OX=747365 GN=tgt PE=3 SV=1
MIMIRENFVQENMEKFSSQSKNCSSFFQLISNKGIRQGQFNIRGKVAKTPLFMPVATRGTVRGVSPSQLKEIGFEMILANTYHLHERPGEEVISKLGGLHRFMNWDGLILTDSGGYQVFSLSNYRKVTDEGVVFRSVLDGKEIFLTPEKVLEIQKKLNSDIAIFLDECPEYPCSAKREEESLIRTLKFAQSSIKVEKNPGQLFFGVVQGGMNFKLRQECVHALLSLGVDGLAIGGLSVGEEPSLTKEVLLATLEVIPPDKPRYLMGVGSDILEYIKMGVDMFDSVFPTRIARHGSAILYNKGRINISNKRFKEDESPLDEDCDCYTCRNFSRAYLRHLFVCGELLGKTLLSIHNLTVLYKTVRALNS

SEQ ID NO: 61718 - protein, 381 aa, Thermodesulforhabdus norvegica
  REGION 1..381: note = tr|A0A1I4SAZ4|A0A1I4SAZ4_9DELT Queuine tRNA-ribosyltransferase OS=Thermodesulforhabdus norvegica; OX = 39841 GN=tgt PE=3 SV=1
MDRVFSFSVLNKDPSCNARLGRLHTAHGSVDTPVFMPVGTQATVKSLDPEDLQKMNCRIILGNTYHLYLRPGTEVISRFGGLHGFMGWDGAILTDSGGFQVFSLAKIREISEEGVLFHSHIDGSRHMMTPEKAIEIQEILGSDIAMSFDECTPYPVDREYARLSMERTLRWAIRGKKRHGKVDQALFGIVQGSVFADLRMECLERLVEIGFDGYALGSLSVGEPKEMMLEVLEKTLPQFPEDAPRYLMGVGTPEDIVEGVRLGVDMFDCVLPTRNARNGTLFTSFGRINIKNSAYVVDGSPVDPECDCYTCRKFSRAYLRHLYVSRELLAYRLNTIHNVHYYLSLMEKIREAITKGNFMEWRKEFYAKRWEQNEAELHFRG

SEQ ID NO: 61719 - protein, 379 aa, Thermodesulfovibrio aggregans
  REGION 1..379: note = tr|A0A0U9HN10|A0A0U9HN10_9BACT Queuine tRNA-ribosyltransferase OS=Thermodesulfovibrio aggregans; OX = 86166 GN=tgt PE=3 SV=1
MQFKILKKDGFARTALLETKRGVIHTPAFMPVGTNGTVKAMTPEEVRDIGYEIILSNTYHLYLRPGHETIKEIGGIHRFINWQGPILTDSGGFQIYSLASLRKITSEGVEFRSHIDGSLHFISPERAIEIQIALGSDIMMVFDECVPYPAEKQYVEKSIKLTKDWAERCKNYFEKQRTNQSLFGIIQGGVYDDLREKSLEEIVKIGFDGYAIGGLSVGEPKEDMYRVVKNVTPLMPEDKPRYLMGVGDLIDVLHAVEHGIDMFDCVMPTRNARNGTLFTSRGRISIKRSEFKDDSTALDPECDCYTCRNYTKAFLRHLYMCREILSMRLNTIHNLYFYCKFFEKMRTAIAEGRFQDFKKEWLPVLEKNFSSEPDDFHHS

SEQ ID NO: 61720 - protein, 372 aa, Thermodesulfovibrio aggregans
  REGION 1..372: note = tr|A0A2J6WJG3|A0A2J6WJG3_9BACT Queuine tRNA-ribosyltransferase OS=Thermodesulfovibrio aggregans; OX = 86166 GN=tgt PE=3 SV=1
MQFKILKKDGFARNAIIETKRGIINTPVFMPVGTNGTVKAMTPEEIWEIGYEIILSNTYHLYLRPGHEIIKKLGGIHKFINWHGPILTDSGGFQIYSLASLRKITPQGVEFRSHIDGSLHFITPEKAIEIQLALGSDIMMVLDECVPYPAEKEYVKKSLKLTEDWAKRCKDYFEKHRNDQALFGIIQGGIYEELRQKAMEGIVKIDFDGYALGGLSVGEPKEDMYRVIKNIAHLMPEEKPRYLMGVGDLMDVLHAVEHGIDMFDCVIPTRNARNGTLFTSQGRISIKRSEFKEDNSPLDPDCDCYTCRNYTKAFLRHLYMCREILSMRLNTIHNLYFYCRFFEKMREAIAEGRFQDFKKQWIPVLEKNFSPE

SEQ ID NO: 61721 - protein, 373 aa, Thermodesulfovibrio sp.
  REGION 1..373: note = tr|A0A1C3FDD4|A0A1C3FDD4_9BACT Queuine tRNA-ribosyltransferase OS=Thermodesulfovibrio sp. N1; OX = 1871110 GN=tgt PE=3 SV=1
MQFKILKKDGYARAGIIESERGVVHTPCFMPVGTNGTVKAMTPEELSMIGYEIILSNTYHLYLRPGHEIIKKLGGIHKFINWKLPILTDSGGFQIYSLSSLRKINTEGVEFRSHLDGSLHFLTPEKSIEIQQALGSDIMMVLDECIPYPSEKEYVEKSLQLTTEWAKRCKEHFEKNKTSQAIFGIVQGGFYIELRNKALKELLKIGFDGYALGGLSVGEPKEEMYQIIKNMAPVMPEDKPRYLMGVGDLMDVLYAVEWGIDMFDCVMPTRNARNGTLFTSQGRISIKRTEFKEDPLPLDPACDCYTCKNYSRAYLRHLYMCREILSMRLNTIHNLYFYCQFFRKMREAIKKGEFQIFKSQWLPILEKNACFKE

SEQ ID NO: 61722 - protein, 388 aa, Thermodesulfovibrio sp.
  REGION 1..388: note = tr|A0A1G3Y2Q2|A0A1G3Y2Q2_9BACT Queuine tRNA-ribosyltransferase OS=Thermodesulfovibrio sp. RBG_19FT_COMBO_42_12 OX=1802373 GN=tgt PE=3 SV=1
MKFNTIKTDGNARAGLIETDRGKIHTPAFMPVGTLGTVKAMSPDELKEMGAEIILCNTYHLYLRPGHEVISVLGGIHKFMNWDRPILSDSGGFQVFSLSALRKIEENGVYFKSHLDGSMHFIGPKEAMEIQSLLGSDIAMVLDDCTPFPSTYEYASESLERTIKWAKECKEYHEKMKDVGQIPPNPPLLKGGERGLYNHESVRQLFGIIQGSLFEDLRKKSAEELQNIGFDGYAVGGLSVGEPKEEMHRMIYFTAPLLPAEKPRYLMGIGELKDVLAAVEAGFDMFDCVMPTRNARNGTLFTSSGKISIKREEFKADRGPLDPVCNCYTCRNYSRGYLRHIFLSKEILSMRLNTIHNLYFYFNFFRNMRKSIIEGIFTEFKTKWEAIL

SEQ ID NO: 61723 - protein, 383 aa, Thermodesulfovibrio yellowstonii
  REGION 1..383: note = sp|B5YHX4|TGT_THEYD Queuine tRNA-ribosyltransferase; OS = Thermodesulfovibrio yellowstonii (strain ATCC 51303 / DSM 11347 / YP87) OX=289376 GN=tgt PE=3 SV=1
MRFKILQKDGLARTGIIETQRGIIHTPAFMPVGTNGTVKAMTPEEVRQIGYEIILSNTYHLYLRPGHETIKMIGGIHKFINWHCPILTDSGGFQIYSLASLRKITLEGVEFRSHIDGSLHFINPEKAIDIQLALGSDIMMVLDECIPYPADEEYVEKSIKLTTEWAKRCKEHFEKQDTYQALFGIIQGGVFSDLRIRALEELLKIDFHGYAIGGLSVGEPKTDMYKIVKDISPLMPEDKPHYLMGVGDLIDVLHAVEHGIDMFDCVIPTRNARNGTLFTSQGRISIKRSEFKEDLSPLDPDCDCYTCKNYSRAFLRHLYTCREILSMRLNTIHNLYFYCRFFEKMRQAIAERRFQEFKKEWLPVLEKNFYQESNDFHHSLENY

SEQ ID NO: 61724 - protein, 377 aa, unidentified
  source 1..377: note = Thermoflavifilum aggregans
  REGION 1..377: note = tr|A0A2M9CXD0|A0A2M9CXD0_9BACT Queuine tRNA-ribosyltransferase OS=Thermoflavifilum aggregans; OX = 454188 GN=tgt PE=3 SV=1
MAIGFHIVQEDVHTRARAGCITTDHGMIETPIFMPVGTAGAVKTLLQQQLDQDLQAPIILGNTYHLYLRPGTDVLQQAGGLHRFMHWNGALLTDSGGYQVFSLAKIRKITEEGVWFQSHIDGSKHFFSPQRVMEIQRRIGADIVMAFDECTPYPCTHAYARASLQLTHRWLDVCLACFQEQGLYGYSQTLFPIVQGSVYADLRRASAEYIAAKETAGYAIGGLSVGEPEQMMYEMTALVNEILPTGKPRYLMGVGTPWNILESIALGVDMFDCVMPTRNGRNGMLFTWQGIINIRNKKWATDFSVIDEYTTGPVSTYYSKAYLRHLFVSNEISGLQIATLHNLSFYLQLVREARKHILQGDFLSWKNEIIPRLKSRL

SEQ ID NO: 61725 - protein, 378 aa, Thermoflavimicrobium dichotomicum
  REGION 1..378: note = tr|A0A1I3R789|A0A1I3R789_9BACL Queuine tRNA-ribosyltransferase OS=Thermoflavimicrobium dichotomicum OX=46223 GN=tgt PE=3 SV=1
MAIRYELIKECKQSGARLGRIHTPHGTIDTPIFMPVGTQATVKTMSPEELKEMGAQIILSNTYHLFLRPGHEIVKEAGGLHSFMNWDRAILTDSGGFQVFSLSQFRNITEEGVTFRSHLSGEKLFISPEKAMEIQNALGSDIMMAFDECPPYPAEREYVEESTERTYRWAKRCIEAHQRPDEQALFGIVQGGMYQDLRERSAKQLVELDLPGYAVGGLSVGEPKELMYEVLSYTTPLLPKDKPRYLMGVGSPDALIHGVIHGIDMFDCVLPTRIARNGTTMTSQGRLVIRNAKFARDFTPLDPACDCYTCRNYTRAYLRHLIKADETLGIRLTTYHNLYFLLRLMEKIRQAIREDRLLDFRDEFMLQYYGSLTPQSAF

SEQ ID NO: 61726 - protein, 378 aa, Thermoflavimicrobium sp.
  REGION 1..378: note = tr|A0A364K8J2|A0A364K8J2_9BACL Queuine tRNA-ribosyltransferase OS=Thermoflavimicrobium sp. FBKL4.011 OX=2137476 GN=tgt PE=3 SV=1
MAIRYELIKECKQSGARLGRIHTPHGTIDTPIFMPVGTQATVKTMSPEELKEMDAQIILSNTYHLFLRPGHEIVKEAGGLHSFMNWDRAILTDSGGFQVFSLSQLRKITEEGVSFRSHLSGEKLFIGPEKAMEIQNALGSDIMMAFDECPPYPAEREYVEASTERTYRWAKRCIAAHQRPDEQALFGIVQGGMFRDLRERSARQLVDLDLPGYAVGGLSVGEPKELMYEVLSYTTPLLPKDKPRYLMGVGSPDALIQGAIYGIDMFDCVLPTRIARNGTTMTSQGRLVIRNAKFARDFTPLDPNCDCYTCRNYTRAYLRHLIKADETLGIRLTSYHNLYFLLKLMKQVRRAIQEDRLLDFQNEFMLQYYGSLTPQTAF

SEQ ID NO: 61727 - protein, 342 aa, unidentified
  source 1..342: note = Thermoflexia bacterium
  REGION 1..342: note = tr|A0A3M1E2T4|A0A3M1E2T4_9CHLR Queuine tRNA-ribosyltransferase OS=Thermoflexia bacterium; OX = 2420334 GN=tgt PE=3 SV=1
MPVGTQATVKAMSPRDLKDVGATMILANTYHLYLRPGDERIARLGGLHRFMAWDGPILTDSGGYQVFSLARMRRVDADGVTFRSHIDGSEHRFTPEKVIAIQENLGADIITCLDECAPPTDYEYNLQALERTHAWAQRCREAHRRDDQALFGIVQGGVFPDLRERSARFITGLGFDGYAIGGLSVGEPKEQTYAVLEWMDDLLPADRPRYLMGVGTPQDLVEGVARGVDMFDCVLPTRMGRNGGALTRWGRINLRNARYAEDPSPLLPDCTCYTCIHFSRAYLRHLILANEILGAHLLTLHNLYLMLTIAREIREAILAGRFTAYREEHESQRAREEPEELS

SEQ ID NO: 61728 - protein, 376 aa, unidentified
  source 1..376: note = Thermoflexibacter ruber
  REGION 1..376: note = tr|A0A1I2E8U5|A0A1I2E8U5_9BACT Queuine tRNA-ribosyltransferase OS=Thermoflexibacter ruber OX=1003; GN = tgt PE=3 SV=1
MKFELQATDIQSKARAGIITTDHGTIQTPIFMPVGTVGTVKAVHQRELEQDIKAQIILGNTYHLYLRPKLDIIEKAGGLHKFNGWSRSILTDSGGYQVYSLAANRKIKEEGVIFQSHIDGSKHLFTPENVMDIQRTIGADIIMAFDECPPYPCEYQYAKNSMELTHRWLRRCCERFDSTEGKYGYSQTLFPIIQGSTFKDLRVQSAETIASFEREGNAIGGLSVGEPVEEMYAMTELVCDILPKDKPRYLMGVGTPANILEAITLGVDMFDCVMPTRNARNGMIFTSQGILNMKNEKWKDDLSPLDPTIGGYVSTFYSKAYLRHLIVSGELLGGQIASIQNLTFYLWLVRQAREHILAGDYRTWKDYMVKQVMQRL

SEQ ID NO: 61729 - protein, 385 aa, unidentified
  source 1..385: note = Thermoflexus hugenholtzii
  REGION 1..385: note = tr|A0A2A9HG93|A0A2A9HG93_9CHLR Queuine tRNA-ribosyltransferase OS=Thermoflexus hugenholtzii; OX = 1495650 GN=tgt PE=3 SV=1
MTAAAAFRFELTTRPAGPVAPRTGRLHTAHGIVETPVFMPVGTLATVKTLLPAEVAETGASIILVNAYHLYLRPGHRLIERLGGVHRFMRWDRPILSDSGGFQVFSLASLRKVTEDGVRFRSHIDGSEHHYTPELAMEVQQALGVDIAMPLDHVVPGDAPYEAAAEAVQRTLRWYRRCREAAPGLPTFAIIQGGTHPALRRYHAREALQAEPPGFSIGGLSVGEPKARMWETVELTNAELPIERPRYLMGVGSPEDLVEGIARGIDMFDCVLPTRLGRNGALFTDTGRLTIRNAANREVDAPPDPVCDCLACRQFSLAYLHHLFRNDELLGHRLATHHNLRYLARLVERARQAIRDGSFEQFRREFLARYRTADEEARLASRRRM

SEQ ID NO: 61730 - protein, 393 aa, unidentified
  source 1..393: note = Thermoflexus hugenholtzii
  REGION 1..393: note = tr|A0A212QX79|A0A212QX79_9CHLR Queuine tRNA-ribosyltransferase OS=Thermoflexus hugenholtzii JAD2; OX = 877466 GN=tgt PE=3 SV=1
MRSAQPEPWQSSGDETMRAEPIRFTLLARDGRARAGFLDTPHGRIPTPCFAPVGTQGAVKTVPAWDLEALGAKLILANTYHLYLRPGDERIARLGGLHRFMGWDGPILTDSGGFQIFSLQGLREVDDDGVTFRSHLDGSLHRFTPEKAIRIQENLGADLIMCLDECPPPLDYDYNVRALERTHRWAERCRAAHTRPDQALFGIVQGGVFEDLRTRSARFLIGLDFPGYAIGGLSVGEPKALTYRVLELMDALLPEEKPRYLMGVGTLLDFVEAVARGVDLFDCVMPTRVARHGTAITRTGRLNLRNALYAEDPRPIDETCGCPTCGRFSRAYLRHLFNVGEPLAMYLTTLHNLYTMFRFMEDMRQAILEGRFAEFRAAVLEAHAALAPEEADR

SEQ ID NO: 61731 - protein, 412 aa, unidentified
  source 1..412: note = Thermogemmatispora argillosa
  REGION 1..412: note = tr|A0A455T141|A0A455T141_9CHLR Queuine tRNA-ribosyltransferase OS=Thermogemmatispora argillosa; OX = 2045280 GN=tgt PE=3 SV=1
MDVLAARSGPFAFTIEVENPPVPSASTWARACTLQTPHGTIQTPMFMPVGTQATVKCLTPEEVQAAGAQIILANTYHLMLRPGSQLIDSFGGLHHFMRWPGPILTDSGGFQVFSLGHLRTLTEEGVTFKSHLDGSLHLLTPERGLQIEAELGADFVLPLDICSGYPCSPQEARTAMERTHRWAMRALEAFYKHPHRPERPQALFGIVQGAFEPELRQESARFIGSLPFFGLSIGGLSVGEPKALMWELLRVTTPALPREKPRHLLGVGSPEDLIMGIDLGMDLFDCVLPTRVARHGGLFTRRGRVNIKRARFRAERGPVEEGCDCYTCRNYSAAYLHHLARAEEQLYYRLGSIHNLRFMLRLAAEARAAILAGTFPAFRDAFLASYVPASETAREEQRAKWLARAAARALSS

SEQ ID NO: 61732 - protein, 398 aa, unidentified
  source 1..398: note = Thermogemmatispora tikiterensis
  REGION 1..398: note = tr|A0A328VJY5|A0A328VJY5_9CHLR Queuine tRNA-ribosyltransferase OS=Thermogemmatispora tikiterensis; OX = 1825093 GN=tgt PE=3 SV=1
MDVENPPVPSAPTWARACTLQTPHGQIQTPIFMPVGTQATVKCLTPEEVQATGAQIILANTYHLMLRPGSELIDSFGGLHAFMRWPGPMLTDSGGFQVFSLGHLRTLTEEGVTFKSHLDGSLHLLTPERGLQIEAELGADFVLPLDICSGYPCTPQEARQAMERTHRWALRALEAFTQRPHRPERPQALFGIVQGAFEPELRQESARFIGSLPFFGLSIGGLSVGEPKALMWELLRATTPALPREKPRHLLGVGSPEDLIMGIDLGMDLFDCVLPTRVARHGGLFTRRGRVNIKRARFRTEHGPVEEGCDCYTCRNYSAAYLHHLARAEEQLYYRLGSIHNLRFMLRLAAEARAAILAGTFPAFRDAFLASYVPASETAREEQRVKWLARMASRATSS

SEQ ID NO: 61733 - protein, 386 aa, unidentified
  source 1..386: note = Thermogutta terrifontis
  REGION 1..386: note = tr|A0A286RFV1|A0A286RFV1_9PLAN Queuine tRNA-ribosyltransferase OS=Thermogutta terrifontis; OX = 1331910 GN=tgt PE=3 SV=1
MSTVGGEIFSVVRTDSQTLARCGILRTAHGIVHTPAFMPVGTQATIKGLLPHLVEGTGTEIILSNTYHLLLRPKPETVAALGGLHRFMGWHKPILTDSGGFQVFSLAQLTRIEERGAVFRSHLDGSLVELTPERAIEVQELLGSDIAMVLDHVVALPNERSVIEDAMERSLRWAERCQKAHQRKDQWLFGIVQGGLEPDLRLRCVEELVQMGFDGYAIGGLSVGEPPAEMYRILDVVAPSLPAERPRYLMGVGRPIDLLEAIARGVDLFDCVMPTRNGRNAMAFTEAGPLRMRNACHERDPRPMDPTCPCLACTFSRGYIRHLFMAREMLGPILVSLHNIAFYQRLLRQARAAIEAGSFGDFLEEKRATWSRTTMEDEDELENRSS

SEQ ID NO: 61734 - protein, 373 aa, Thermohalobacter berrensis
  REGION 1..373: note = tr|A0A419TB14|A0A419TB14_9CLOT Queuine tRNA-ribosyltransferase OS=Thermohalobacter berrensis; OX = 99594 GN=tgt PE=3 SV=1
MMAVKYELIKKSNECNARLGRLHTPHGIVETPIFMPVGTKATVKTMTPEELKEIGAQIILSNTYHLYLRPGHDLVEEAGGLHKFMNWDKPILTDSGGFQVFSLGDLRKITEEGVEFRSHLDGSKHFISPEKSIEIQNSLGADIIMAFDECPPYPSDRDYVKKSLERTTRWAKRCKDAHKNPETQALFGIVQGGMYKDLREQSAKEIIDLDFPGYAIGGLSVGEPKEIMYEVLDYTAPLLPEDKPRYLMGVGSPNYLFEGVIRGIDMFDCVLPTRIARNGTVLTSHGRLVVRNAEYARDFSPLDPECDCYACKNYTRAYIRHLFKANEILAARLATIHNLYFLLKLMENIRKAIKEDRLLEYREEFYKKYGYIK

SEQ ID NO: 61735 - protein, 374 aa, Thermohydrogenium kirishiense
  REGION 1..374: note = tr|A0A4R4AA09|A0A4R4AA09_9FIRM Queuine tRNA-ribosyltransferase OS=Thermohydrogenium kirishiense; OX = 937254 GN=tgt PE=3 SV=1
MTAIKYDLIKKEKMTKARLGVLHTPHGDIETPVFMPVGTQATVKTMTPEELKEIGARIILSNTYHLYLRPGHEVIKKAGGLHKFMNWDRAILTDSGGFQVFSLGPLRKITEDGVEFRSHLDGSRHFLTPEKVIEIENALGADIIMSFDECAPYPADYDYVKNSMEMTLRWAKRGKEAHKNIDKQALFGIVQGGTYDDLRRECANRLVDMDFPGYSIGGLSVGEEKELMYHVVDYTTDLLPQDKPRYLMGVGSPDDLIEGVIRGVDMFDCVLPTRIARNGTVLTSSGRLIVRDAPHAEEFIPLDSECDCYTCKNFSRAYIRHLFKANEILAARLATIHNLRFLTKLMEDIREAIKQDKLLEFKSQFYKKYGYKEE

SEQ ID NO: 61736 - protein, 372 aa, unidentified
  source 1..372: note = Thermoleophilia bacterium
  REGION 1..372: note = tr|A0A2G4H4G5|A0A2G4H4G5_9ACTN Queuine tRNA-ribosyltransferase OS=Thermoleophilia bacterium; OX = 2026888 GN=tgt PE=3 SV=1
MSTPGDFSVQATDGKARAATLVTAHGAIQTPVFMPVGTLGTVKGVDPDELKTIGTQILLGNTYHLHLKPGEDLIAELGGLHRFMAWDGPILTDSGGFQVFSLADTRTIDDDGVSFRSVYDGDLVRLRPEDAMAIQAALGSDIAMCLDEVPKPDAPLAELAVAVERTTRWAARCKATTPAPGQLRFGIVQGGVEPALRERSATDLLEIGFDGYAIGGLAVGEEREATFRITDSTAALLPVDRPRYFMGIGDPEGILRVIAAGVDMFDCVLPTRLGRTGAAMTSNGRLNMRNAAFARDPDPLDPRCECPTCQRFSRAYIRHLVMQKELLGMRLLSVHNIAFLLALCTAAREAIIEQRFDAFLATSLERLMTGAD

SEQ ID NO: 61737 - protein, 420 aa, Thermoleophilum album
  REGION 1..420: note = tr|A0A1H6FK35|A0A1H6FK35_THEAL Queuine tRNA-ribosyltransferase OS=Thermoleophilum album OX=29539; GN = tgt PE=3 SV=1
MLADRPTARADGPRLRFVVEARDGDARAGLLQLRHATIATPVFVPLASAATVRTLDFDDVERLGYRLLLGNTFLLMLRPGAELVARFGGLREFSGWQGAFITDSGGFQVFSLGHGSVADEIKGSRSRPAGERLLLGIDERGARFRSYVDGSEQLLTPERSMAVQAALASDIALAFDECTPFHAGREYTERALERTNRWLDRCIAWQRANAPSWQALYGIVQGGVWEDLRERSKAHLLTSDIDGIAIGGSLGRDKQQMRQVVAWSVRDLPDALPRHLLGIGDVEDLLDAVALGIDSFDCATPTRLARHGTALVPEPARRFRLDLAKAASRDDARPLVEGCPCTVCARHTRAYLHYLVRAGEPSAGRLLTLHNLAFMEALMSGIRAAIREGRFQQYRAAVLAGEEPFGGRCAAPGERPHTAG

SEQ ID NO: 61738 - protein, 379 aa, unidentified
  source 1..379: note = Thermolongibacillus altinsuensis
  REGION 1..379: note = tr|A0A4R1QG77|A0A4R1QG77_9BACI Queuine tRNA-ribosyltransferase OS=Thermolongibacillus altinsuensis OX=575256 GN=tgt PE=3 SV=1
MTPIRYELIKTCKQTGARLGILHTPHGSFETPMFMPVGTLATVKTLSPEELKEMGAGVILSNTYHLWLRPGHEIVKEAGGLHKFMNWDRGILTDSGGFQVFSLSEFRRIEEEGVYFRNHLNGDKLFLSPEKAMEIQNALGSDIMMAFDECPPYPATYEYMKQSVERTSRWAERCLKAHKRPNEQGLFGIVQGGEFEDLRKQSAQDLVSLDFPGYAVGGLSVGEPKEVMNRVLEFTTPLLPANKPRYLMGVGSPDSLIDGAIRGIDMFDCVLPTRIGRNGTVMTSEGRVVIKNAKYARDFSPLDPNCDCYTCRNYTRAYIRHLIKCDETFGIRLTSYHNVYFLIKLMEQVRQAIREDRLGDFREEFFERYGFNKPNAKNF

SEQ ID NO: 61739 - protein, 391 aa, unidentified
  source 1..391: note = Thermomicrobiales bacterium
  REGION 1..391: note = tr|A0A524J218|A0A524J218_9CHLR Queuine tRNA-ribosyltransferase OS=Thermomicrobiales bacterium; OX = 2482790 GN=tgt PE=3 SV=1
MTAPYVGRAARYEVTTAAPTDGSTRARSGRLTLTHGIVETPQFMPVGTNATVKALSPDDIRATGASIILSNTYHLYLRPGHDRIARLGGLHQFMAWDGPILTDSGGYQVVSLGDLRVVDDDGVTFRSHLDGSTHRFTPELATEVQEALGSDIAVAFDQPVFPSSPREMVADATDRTHRWAERSLAAHTREDQAIFGIVQGGLDPDLRAASTRTIAALPFDGICIGGLAGDETPAQRDATLDIAIPILADDPRPRYLMGLGSPADLLEAVHRGIDLFDSVLPARVARNGQLWVPGGRLNLRNQRFLDDSSPVQEDCPCILCQHHSRAYLAHLFRARELLAYRLATCHNLTFTLDFMARIRAAIRSGTFPVAMPGLRAHAGRISGGEGAAMSA

SEQ ID NO: 61740 - protein, 387 aa, unidentified
  source 1..387: note = Thermomicrobiales bacterium
  REGION 1..387: note = tr|A0A5C7JCQ6|A0A5C7JCQ6_9CHLR Queuine tRNA-ribosyltransferase OS=Thermomicrobiales bacterium; OX = 2482790 GN=tgt PE=3 SV=1
MGATAGDFSFDLVATDPRSRARCGCVYTRKGPIQTPVFMPVGTQATVKTLHPHEVERIGAQIVLANTYHLMLRPGSELIDMAGGLHAFMRWDRPILTDSGGFQIFSLAQQARVTEEGVQFRSHIDGSLHMLTPERAVDIQAQLGSDIMMALDHLIGLPAKPRKIFDATMRTHRWLDRCVSALAESDRSRKGVLFGICQGGMEPDLRRLSAQCVAAADVSGVAVGGLSVGETKAEMAEMLDIVVPELPECKPRYLMGVGSPEDLWNGVAQGIDMFDCVLPTRLARNGSVFTPDGRIDILHRSHRASFIPIDQDCDCATCQQFDRAYLHHLFRAREILGLRLASVHNLRFLVRQMESMRPAILNGTFGSARAAFLDRYRVAGPRIGSNA

SEQ ID NO: 61741 - protein, 430 aa, Thermomicrobium roseum
  REGION 1..430: note = tr|B9KZ97|B9KZ97_THERP Queuine tRNA-ribosyltransferase OS=Thermomicrobium roseum (strain ATCC 27502 / DSM 5159 / P-2) OX=309801 GN=tgt PE=3 SV=1
MLLVRPPRQPCAILDRQGIPNRETNGATPLIEGIDEQGMNGKGRFRIIARDMATMARRGVLHTRRGPVQTPAFMPVGTQATVKSLTPEEVRATGSEIVLANTYHLFLRPGLEVLETVGGLHAFMGWDGPILTDSGGFQVYSLAQLRDVTERGVRFRSHIDGSLRELTPEIVIELQMLFGSDVLMPLDDVVGFSESDERQQEAMARTHRWLQRSLHRFQELTAAFAEEKRPLLFGIVQGGFDPSRRVESAHFVASLPVDGLAIGGLSVGEPKDLLYAMLDATAGELPDDRPRYLMGVGAPDDLWRAVAYGIDLFDCVLPTRLARHGALFTPTGRVDITGARFRLHTSPVDETCDCYTCRRFSAAYLHHLFRARELLGYRLATIHNVRFLQRQMETMRRAIEEGTFAAHMERFLSSYEASTALTSSDRLVNG

SEQ ID NO: 61742 - protein, 375 aa, Thermomonas haemolytica
  REGION 1..375: note = tr|A0A4R3MZH1|A0A4R3MZH1_9GAMM Queuine tRNA-ribosyltransferase OS=Thermomonas haemolytica; OX = 141949 GN=tgt PE=3 SV=1
MSRMEFQLLKTDGAARRGRITFPRGVIETPAFMPVGTYGSVKGVLPQQVRELGAQIILGNTFHLFLRPGLEVIAAHGGLHGFARWDGPILTDSGGFQVFSLAHRRKITEAGVTFAAPTDGRKVFLGPEESMRIQKVLGSDIVMIFDECPPVNDKHGQPVHRRVVEKSMELSLRWAERSKKAHEGNDAALFGIVQGGVHHDLRTRSAEGLQQIGFDGYAVGGLAVGESEDERNAMLDHTCPQLPADRPRYLMGVGRPEDLVEAVARGIDMFDCVMPTRNARNGHFFTATGVVRVRNSQYEHDLRPIEEGCDCVACAGGFSRSYLRHLDRCNEMLGPVLGTLHNLRYYQRLMAQMREAIAAGTFADFRESFHAMRRP

SEQ ID NO: 61743 - protein, 378 aa, Thermomonas hydrothermalis
  REGION 1..378: note = tr|A0A1M4UCU6|A0A1M4UCU6_9GAMM Queuine tRNA-ribosyltransferase OS=Thermomonas hydrothermalis; OX = 213588 GN=tgt PE=3 SV=1
MSRMRFTLLGSDGAARRGRISFPRGEVETPAFMPVGTYGSVKGVLPQQVRDLGAQIILGNTFHLFLRPGLEVIEAHGGLHGFARWDGPILTDSGGFQVFSLAHRRKITEDGVTFAAPTDGRKVFLGPEESMRIQKVLGSDIVMIFDECPPVHGKDGQPVHRRVVEKSMELSLRWAERSKRAHEGNDAALFGIVQGGVHPDLRTRSAQGLLQIGFDGYAVGGLAVGESEDERNAMLDHTCPQLPSDRPRYLMGVGRPEDLVEAVARGIDMFDCVMPTRNARNGHYFTAAGVVRVRNAKYEHDLRPIEEGCDCVACAGGFSRAYLRHLDRCNEMLAPILGTLHNLRYYQRLMAQMRDAIAARQFQAFREAFYAARRGAQT

SEQ ID NO: 61744 - protein, 374 aa, Thermomonas sp.
  REGION 1..374: note = tr|A0A5B7ZS97|A0A5B7ZS97_9GAMM Queuine tRNA-ribosyltransferase OS=Thermomonas sp. SY21 OX=2202149; GN = tgt PE=3 SV=1
MSRMDFELLGTDGAARRGRITFPRGTIETPAFMPVGTYGSVKGVLPHQIEDLGAEIILGNTFHLFLRPGLDVIEAHGGLHGFARWDRPILTDSGGFQVFSLAHRRKITEAGVTFAAPTDGSKVFLGPEESMHIQKVLGSDIVMIFDECPPVTVDGQPVDKRVVERSMELSLRWAARSKIAHEGNDAALFGIVQGGVHHDLRSRSAEGLRGIGFDGYAIGGLAVGETEAERNAMLDHTAPQLPEDRPRYLMGVGRPEDLVEAVARGVDMFDCVMPTRNARNGHFFTSTGTIRIRNAQYERDLRPIEEGCDCYSCAGGFSRSYLRHLDRCNEMLAPMLGTLHNLRYYQRLMAQIRAAIETGTFAAFRESFYAARRA

SEQ ID NO: 61745 - protein, 376 aa, unidentified
  source 1..376: note = Thermophagus xiamenensis
  REGION 1..376: note = tr|A0A1I2AD51|A0A1I2AD51_9BACT Queuine tRNA-ribosyltransferase OS=Thermophagus xiamenensis; OX = 385682 GN=tgt PE=3 SV=1
MQYQIEKRDPKSSARSGKIFTDHGEIPTPIFMPVGTVGTVKGIHVKDLEEEVNAPIILGNTYHLYLRPGLEVLKEAGGLHQFMGWNRSILTDSGGFQVFSLSERRKLTEKGAEFRSHLDGSKHLFTPESVVDIQRTIGADIMMAFDECPSGDAPYSYAVQSMELTHRWLKRGIEQFKKSNPLYGYEQTFFPIVQGAGYAELRKRSAEYVASFDMDGNAIGGLAVGEPEEVMYQMIEVVNAILPQDKPRYLMGVGTPVNILEAISLGVDMFDCVMPTRNGRNGMIFTSQGIINIKNEKWKTDFSPIDEQGHCFFDLHYSKAYLRHLFVAREMLGPQIASIHNLSFYLWLVSEARRQIESGCFSTWKDQMVKQLARRL

SEQ ID NO: 61746 - protein, 371 aa, Thermosediminibacter oceani
  REGION 1..371: note = tr|D9RXQ6|D9RXQ6_THEOJ Queuine tRNA-ribosyltransferase OS=Thermosediminibacter oceani (strain ATCC BAA-1034 / DSM 16646 / JW/IW-1228P) OX=555079; GN = tgt PE=3 SV=1
MKFKVLKWAEDCKARTGLLETPHGIIETPVFMPVGTQATVKTLTPDELEQIGAKIILSNTYHLYLRPGHRIIEEAGGLHRFMNWEGSILTDSGGYQVFSLGELREIREEGVTFRSHIDGSLHFISPETSIEIQNSLGADIIMAFDECIPYPATYEYVKNSVERTTRWAERCKKHHKNEKQTLFGIVQGGLYKDLREKSARDLVSMDFKGYAVGGLSVGEPKEHMYEVLDYTVPLLPEDKPRYLMGVGSPDAIFEGIIRGIDMFDCVLPTRIARHGTVFTARGRLVVKNAAYARDFSPLDPECDCYVCKNYTRAYIRHLINANEVLGIRLTTIHNLYFLLSLMEKIRRAIEGGYLLEFKQEFFKKFGYDQGS

SEQ ID NO: 61747 - protein, 370 aa, Thermosinus carboxydivorans
  REGION 1..370: note = tr|A1HT80|A1HT80_9FIRM Queuine tRNA-ribosyltransferase OS=Thermosinus carboxydivorans Nor1 OX=401526 GN=tgt PE=3 SV=1
MAITFELIKQCSKTGARAGRLYTPHGVFETPIFMPVGTQATVKAMSPDELKAMGAGIILSNTYHLYLRPGHELVAEAGGLHGFMHWDRGILTDSGGFQVFSLGPLRKITEEGVAFRSHIDGSKHFLSPEKATEIQMALGADIIMAFDECVPYPAEYDYAKASTERTTRWAERCKKAHTRKDQALFGIVQGGMYKDLRAMSARDLVAMDFPGYAVGGLSVGEPKPLMYEILEYTVPLLPANKPRYLMGVGTPDCLVEGVMYGIDMFDCVFPTRVARNGTVMTSRGKLVVKNAEYARDFRPIDPDCECYTCRNFSRAYIRHLLKAEEIFGLRLTTIHNLHFLLNFMRNMRKAILEDRFLAFRQEFRAQYQLH

SEQ ID NO: 61748 - protein, 367 aa, Thermosipho africanus
  REGION 1..367: note = sp|B7IDU1|TGT_THEAB Queuine tRNA-ribosyltransferase; OS = Thermosipho africanus (strain TCF52B) OX=484019 GN=tgt; PE = 3 SV=1
MGLKFELLKTSGNARRGRIYLPHGVVETPTFMPVGTNANVKLMTPKLLDEIGAQIILGNAFHLYLKPGLDVFRFHGGIHNFMNWQKPVLTDSGGFQVFSLREGRKITEDGVLIRSPLDGSKHMITPELSMEIQHAIGSDIVMAFDYCAEPGISHQDAVVALELTSLWAERSLKKLRSLSDQAIFGIVQGAFFKDLRLRSAKEITSMNFDGFAIGGLSVGEEYDITLDMTKFTAPLLPENKPRYFMGAGSPKLIVDLVDSGIDMFDSVLPTRVARHGQALTWKGKLNIRSAKYKFSKEPIDESCGCYTCKNFSRSYIRHLFDRGEVLGQILLTIHNLHFMMDLSKKIRESIENDTFQELRGEVLKYYA

SEQ ID NO: 61749 - protein, 367 aa, Thermosipho africanus
  REGION 1..367: note = tr|K2PG23|K2PG23_9BACT Queuine tRNA-ribosyltransferase OS=Thermosipho africanus H17ap60334 OX=1161912 GN=tgt PE=3 SV=1
MGLKFELLKTSGNARRGRIYLPHGVVETPTFMPVGTNANVKLMTPKLLDEIGAQIILGNAFHLYLKPGLDVFRFHGGIHNFMNWQKPVLTDSGGFQVFSLREGRKITEDGVLIRSPLDGSKHMITPELSMEIQHAIGSDIVMAFDYCAEPGISHQDAVVALELTSLWAERSLKKLRSLSDQAIFGIVQGAFFKDLRLRSAKEITSMNFDGFAIGGLSVGEEYNITLDMTKFTVPLLPENKPRYFMGAGSPKLIVDLVDSGIDMFDSVLPTRVARHGQALTWKGKLNIRSAKYKFSKEPIDESCGCYTCKNFSRSYIRHLFDRGEVLGQILLTIHNLHFMMDLSKKIRESIENDTFQELRGEVLKYYA

SEQ ID NO: 61750 - protein, 367 aa, Thermosipho atlanticus
  REGION 1..367: note = tr|A0A1M5R0V1|A0A1M5R0V1_9BACT Queuine tRNA-ribosyltransferase OS=Thermosipho atlanticus DSM 15807 OX=1123380 GN=tgt PE=3 SV=1
MALKFELIKVLGKARRGRIYLPHGIVETPTFMPVGTNANVKLMTPKELEEVGAQIILGNAFHLYLKPGMEVLKFHGGINNFIGWHKPVLTDSGGFQVFSLREGRKVTDEGVLIKSPLDGSKHMITPELSMEIQNAINSDIVMAFDYCAEPGIEYDKAVRALELTTKWAERSLKRIRELSDQAIFGIVQGAFFHDLRERSAREITSMEFDGFAIGGLSVGEEYDITLKMTEFTVPFLPENKPRYFMGAGSPKLIVDLVYNGVDIFDSVLPTRVARHGQALTWIGKLNIRAAKFKFDKSPIEETCTCYTCKNFSRSYIRHLFDRREVLGQILLTIHNLHFMMDLSKKIRDSIEEGTFEKLRGEVLKHYD

SEQ ID NO: 61751 - protein, 367 aa, Thermosipho melanesiensis
  REGION 1..367: note = sp|A6LMW2|TGT_THEM4 Queuine tRNA-ribosyltransferase; OS = Thermosipho melanesiensis (strain DSM 12029 / CIP 104789 / BI429) OX=391009 GN=tgt PE=3 SV=1
MALKFELLKTHKNARRGRIYLPHGVVETPTFMPVGTNANVKLMTPENLEEIGAQIILANAFHLYLKPGMEVLRHHNGIHDFMNWEKPILTDSGGFQVFSLRKGRKITKEGVLIKSPLDGSMRMITPELSMEIQNSIGSDIVMAFDYCAEPGISHQDAVVALELTTLWAERSLKSIRNMSDQSIFGIVQGAFYKDLRERSAKEITSMDFDGFAIGGLSVGEGYDITLEMTEFTVPLLPENKPRYFMGAGAPRLIVDLVNLGVDIFDSVLPTRVARHGQALTWKGKMNVRAAKYKFDKSPIDDECTCYTCRNYSRSYIRHLFDRGEVLGQMLLTIHNLHFMMDLSKKIRESIDGGYFEKLRGEVLKYYD

SEQ ID NO: 61752 - protein, 365 aa, Thermosipho sp.
  REGION 1..365: note = tr|A0A1L7BGT0|A0A1L7BGT0_9BACT Queuine tRNA-ribosyltransferase OS=Thermosipho sp. 1063 OX=1462747; GN = tgt PE=3 SV=1
MKFELLKTTKNARRGRIYLPHGVVETPTFMPVGTNANVKLMTPENLKNVGAQIILANAFHLYLKPGIEVLKHHDGIHNFMNWDRPVLTDSGGFQVFSLRKGRKITKDGVLIKSPLDGSMHMITPELSMEIQNAIGSDIVMAFDYCAEPGITHQEAVYALELTTQWAERSLKKIRSLSDQAIFGIVQGAFFKDLRERSAKEITSMNFDGFAIGGLSVGEEYNLTLEMTEFTVPLLPENKPRYFMGAGAPKLIVDLVNLGVDVFDSVLPTRVARHGQALTWKGKINIRAAKHKFDKTPIDKECKCYTCRNYSRSYLRHLFDRGEALGQILLTIHNLHFMMDLSKRIRESIDNNTFEDLRGEVLKYYA

SEQ ID NO: 61753 - protein, 372 aa, Thermosporothrix hazakensis
  REGION 1..372: note = tr|A0A326U8F2|A0A326U8F2_9CHLR Queuine tRNA-ribosyltransferase OS=Thermosporothrix hazakensis; OX = 644383 GN=EI42_05377 PE=3 SV=1
MHASKEQKHTENGARTLQLPHGLLKLPVYLPDATLGVVRAVDSTDLEQCGVQALVMNTYHLMQRPGSSTIQALGGLHTMSAWEHPIITDSGGFQAYSLIQQNARFGTLDADGITFKPEGATRKFQLTPEKAVQLQFSYGSDIVMCLDYCTHVDAPDDVQRLSVMRTIEWAKRCKREYERLLKQKKLAEEKRPLLFAVIQGGGSRELRKQCAEALLDIGFDGFGYGGWPLDKQGRLLADIIRYTRELIPAQYPMHALGVGHPSNVAECVQIGYEIFDSAMPTRDARHGRLYCFQDSAQEKWFQYIYVGDDKHIKNKRPVSEVCDCLCCRHYSLGYLHHLFKVGDTLYYRLATLHNLRFMTMLTERLRAHYVHN

SEQ ID NO: 61754 - protein, 397 aa, Thermosporothrix hazakensis
  REGION 1..397: note = tr|A0A326TQT7|A0A326TQT7_9CHLR Queuine tRNA-ribosyltransferase OS=Thermosporothrix hazakensis; OX = 644383 GN=tgt PE=3 SV=1
MSTVFEFTIDAECSESWARAGTLRTPHGTIRTPIFMPVGTQATVKSVSPEELKAVGAQIILSNTYHLMLRPGSQLIDTFGGLHSFMHWDGPILTDSGGFQVWSLGHLRKLNEDGVTFKSHLDGSYHTLTPERVMQIEAEIGADIILPLDICAPYPCPPQEARKAMEQTHRWEERALIEKERQRPEQALFGIVQGAFEPELRSESARIIGSMPFTGFSIGGLSVGEPKATMWEMLRYVTPELPREKPRHLLGVGSPEDLVMGVGLGMDMFDCVLPTRVARHGGLFTRSGRISIKAARYRTATGPIEEGCDCYTCRNYSAAYVHHLLRAEEQLYYRLGTIHNLRFMLRLAAELREAIITGNYIAYRDEFLERYKPASEAVREQQREKWKAAARARQAQG

SEQ ID NO: 61755 - protein, 372 aa, Thermosporothrix sp.; identical to SEQ ID NO: 61753
  REGION 1..372: note = tr|A0A455SQ02|A0A455SQ02_9CHLR Queuine tRNA-ribosyltransferase OS=Thermosporothrix sp. COM3; OX = 2490863 GN=KTC_52640 PE=3 SV=1

SEQ ID NO: 61756 - protein, 397 aa, Thermosporothrix sp.
  REGION 1..397: note = tr|A0A455STC7|A0A455STC7_9CHLR Queuine tRNA-ribosyltransferase OS=Thermosporothrix sp. COM3; OX = 2490863 GN=tgt PE=3 SV=1
MSTVFEFTIDAECSESWARAGTLRTPHGTIRTPIFMPVGTQATVKSVSPEELKAVGAQIILSNTYHLMLRPGSQLIDTFGGLHSFMHWDGPILTDSGGFQVWSLGHLRKLNEDGVTFKSHLDGSYHTLTPERVMQIEAEIGADIILPLDICAPYPCPPQEARKAMEQTHRWEERALIEKERQRPEQALFGIVQGAFEPELRSESARIIGSMPFTGFSIGGLSVGEPKATMWEMLRYVTPELPREKPRHLLGVGSPEDLVMGVGLGMDMFDCVLPTRVARHGGLFTRSGRISIKAARYRTASGPIEEGCDCYTCRNYSAAYVHHLLRAEEQLYYRLGTIHNLRFMLRLAAELREAIIAGNYIAYRDEFLERYKPASEAVREQQREKWKAAARARQAQG

SEQ ID NO: 61757 - protein, 371 aa, Thermosulfidibacter takaii
  REGION 1..371: note = tr|A0A0S3QS12|A0A0S3QS12_THET7 Queuine tRNA-ribosyltransferase OS=Thermosulfidibacter takaii (strain DSM 17441 / JCM 13301 / NBRC 103674 / ABI70S6); OX = 1298851 GN=tgtPE=3 SV=1
MKFSVFKEDVTTKARIGVIETPRYIAKTPIFMPVGTLGTVKTLSPQELKELGATIILGNTYHLYLRPGVEIIGKLGGLHKFASWNRLILTDSGGFQVHSLSPLRKIKEDGVEFRSHLDGSTHFFTPEEVIRIQCVLGSDFVMPLDWCVSYPASEVEVGKSVKLTIAWAIRSKECPLQSHQSLFAIVQGGMAESLRRYCAQVLVDMDFPGYAIGGLSVGEPKNLMWEMIEFTASLLPKDKPRYLMGVGKPEDIVFAVMCGVDMFDCVLPTRCARNGLLFTSKGKLRIKNNPYRDQDIPVDEDCDCYTCRNFSRAYLRHLFVNDEILALRLNTIHNVHFYMRLMEEIRSRIASGTFNQWARRFIEEYPSLEAT

SEQ ID NO: 61758 - protein, 376 aa, unidentified
  source 1..376: note = Thermosulfurimonas dismutans
  REGION 1..376: note = tr|A0A179D5I6|A0A179D5I6_9BACT Queuine tRNA-ribosyltransferase OS=Thermosulfurimonas dismutans; OX = 999894 GN=tgt PE=3 SV=1
MWGYFHILERDTHTKARLGRLVTRRGIIETPVFMPVATAGSIKAVPPEVVTGLGTRVILANTYHLYLRPGLEIIRQSGGLHSFMNWQRVILTDSGGFQVYSLAQFRKIQEEGVHFKSHIDGSEHLLTPELALEIQEVLNSDIRMVLDVCIPYPCDRKKAKELTALTHRWAERSKNFWEKRENKGALLFGIAQGGMFEDLRRESARVIVEMDFDGYAVGGLSVGEPRDLMLEMLSATLSAFPEDRPRYLMGVGTPEDILEAVAMGVDMFDCVLPTRNARRGTIFTSEGKLSIRNAPFKNDFRPLDPNCQCYTCRNYTRAYLRHLFISGELLVYYLLTVHNLYFYLKLMAKIRKAIAEGRFMEFKADFYQRKEEILCG

SEQ ID NO: 61759 - protein, 378 aa, unidentified
  source 1..378: note = Thermosynechococcus elongatus
  REGION 1..378: note = sp|Q8CWM7|TGT_THEEB Queuine tRNA-ribosyltransferase; OS = Thermosynechococcus elongatus (strain BP-1) OX=197221; GN = tgt PE=3 SV=1
MFEFVCQQECAHTQARAGLFHTPHGTVATPRFMPVGTLANVKTLTPEHLKAAGAQMILANTYHLHLQPGEDIVAAAGGLHCFMGWSGPILTDSGGFQVFSLSEMRQISDQGVVFRSPHDGQIIELSPEGAIAIQEALGADVIMAFDECPPYPASREAVIQATQRTLQWLERCIVAKQRSDQALFAIVQGGVYADLRRECAEAMVPYDLPGYAIGGVSVGEPNRIMHEIVAVTAPLLPVHKPRYLMGVGTHLEMLRAIAAGVDLFDCVIPTRLARHGCAIVQGQRWNLKNARFRRDYEPLDPTCPCYTCRTFSRAYLSHLVRAKELLAYTLLSIHNVTELIRFTQAARQAILEERFAAFAAEWEQRLVVDAEEPDAALL

SEQ ID NO: 61760 - protein, 378 aa, unidentified
  source 1..378: note = Thermosynechococcus sp.
  REGION 1..378: note = tr|A0A5C2M4I0|A0A5C2M4I0_9CYAN Queuine tRNA-ribosyltransferase OS=Thermosynechococcus sp. CL-1; OX = 2583530 GN=tgt PE=3 SV=1
MFEFVCQQDCAHTQARAGLFHTPHGAVATPRFMPVGTLANVKTLTPEHLKAAGAQMVLANTYHLHLQPGEDIVAAAGGLHRFMGWSGPILTDSGGFQVFSLSEMRQISDQGVVFRSPHDGQIIELSPERAIAIQEALGADVIMAFDECPPYPASREAVIQATQRTLHWLERCIAAKQRSDQALFAIVQGGVYADLRRECAAAMLPYDLPGYAIGGVSVGEPNSAMHEIVAVTAPLLPAHKPRYLMGVGTHLEMLRAIAAGVDLFDCVIPTRLARHGCAIVQGQRWNLKNARFRRDYEPLDPTCPCYTCTTFSRAYLSHLVRAKELLAYTLLSIHNVTELIRFTQAARQAILEERFVAFAAEWEQRLVVDAEEPDAALL

SEQ ID NO: 61761 - protein, 378 aa, unidentified
  source 1..378: note = Thermosynechococcus sp.
  REGION 1..378: note = tr|V5V6Z8|V5V6Z8_9CYAN Queuine tRNA-ribosyltransferase OS=Thermosynechococcus sp. NK55a; OX = 1394889 GN=tgt PE=3 SV=1
MFEFVCQQECAHTQARAGLFHTPHGTVATPRFMPVGTLANVKTLTPEHLKAAGAQMILANTYHLHLQPGEDIVAAAGGLHCFMGWSGPILTDSGGFQVFSLSEMRQISDQGVVFRSPHDGQIIELSPERAIAIQEALGADVIMAFDECPPYPASREAVIQATQRTLHWLERCIAAKQRSDQALFAIVQGGVYADLRRECAEVMVPYDLPGYAIGGVSVGEPNSAVHEVVAVTAPLLPVHKPRYLMGVGTHLEMLRAIAAGVDLFDCVIPTRLARHGCAIVQGQRWNLKNARFRRDYDPLDPTCPCYTCRTFSRAYLSHLVRAKELLAYTLLSIHNVTELIRFTQAARQAILEERFAAFAAEWEQRLVVNAEEPDAALL

SEQ ID NO: 61762 - protein, 368 aa, Thermosyntropha lipolytica
  REGION 1..368: note = tr|A0A1M5P9I6|A0A1M5P9I6_9FIRM Queuine tRNA-ribosyltransferase OS=Thermosyntropha lipolytica DSM 11003 OX=1123382 GN=tgt PE=3 SV=1
MLKFKVIKKDASSGARLGELETAHWKCKTPIFMPVGTQATVKTLTPEDLYEIGADIILSNTYHLYLRPGADLVEKAGGLHKFMNWKRGILTDSGGFQVFSLSKLRKITDEGVYFNSHIDGSRHFLTPQKVMEIEQKLGADIAMCFDECAPYPCTYEYAKEALRRTSLWAKICREHHKREDQALFGIVQGSIFDDLRRKSAEDIVALDFPGYAVGGLSVGEPKSEMYRILELTHTLLPEDKPRYLMGVGAPEDLVEGVKRGIDMFDCVLPTRLARHGTAFTHQGRITVRNAGFAEDFSPVDPWCDCYVCKNYSRAYIRHLIKAEEILASRLLSYHNIYFLTSLMAKIRQALAEGRFGEFYDNFFRQYKP

SEQ ID NO: 61763 - protein, 372 aa, Thermotalea metallivorans
  REGION 1..372: note = tr|A0A140L8Y6|A0A140L8Y6_9CLOT Queuine tRNA-ribosyltransferase OS=Thermotalea metallivorans; OX = 520762 GN=tgt PE=3 SV=1
MAIKYELIKECRQSGARLGLLHTPHGTIETPVFMPVGTQATVKAMTPEELKEIHAQIILSNTYHLYLRPGHQLVEKAGGLHKFMNWDRAILTDSGGFQVFSLGDLRKISEEGVEFRSHLDGSKHFISPEKAIEIENALGADIIMAFDECAPYPADRTYVKNSLERTTRWAKRCKEAHKKPDQQALFGIIQGGMYRDLREQSAKEITALDFPGYAVGGLSVGEPKPLMYEILEYTTPLMPKDRPRYLMGVGSPDCLIEGVIRGIDMFDCVLPTRIARNGTAMTSFGKVVIKNAQYAEDFAPLDPNCGCNTCRNYSKAYLRHLYKAQEILSARLVTYHNLYFLLNLMKNIRDAIKADRLLDYRKEFFEKYGYEV

SEQ ID NO: 61764 - protein, 369 aa, Thermotoga maritima
  REGION 1..369: note = sp|Q9X1P7|TGT_THEMA Queuine tRNA-ribosyltransferase; OS = Thermotoga maritima (strain ATCC 43589 / MSB8 / DSM 3109 / JCM 10099) OX=243274 GN=tgt PE=1 SV=1
MEFEVKKTFGKARLGVMKLHHGAVETPVFMPVGTNASVKLLTPRDLEEAGAEIILSNTFHLMLKPGVEIIKLHRGLHNFMGWKRPILTDSGGFQVFSLPKIRIDDEGVVFRSPIDGSKVFLNPEISMEVQIALGSDICMVFDHCPVPDADYEEVKEATERTYRWALRSKKAFKTENQALFGIVQGGIYPDLRRESALQLTSIGFDGYAIGGLSIGEERSLTLEMTEVTVEFLPEDKPRYFMGGGSPELILELVDRGVDMFDSVFPTRIARHGTALTWNGKLNLKASYNKRSLEPVDERCGCYTCKNFTRSYIHHLFDRGEVLGQILLTIHNINFMISLMKEVRRSIESGTFKELKSKVVEVYSSGGVNV

SEQ ID NO: 61765 - protein, 365 aa, Thermotoga maritima
  REGION 1..365: note = tr|R4P3I7|R4P3I7_THEMA Queuine tRNA-ribosyltransferase OS=Thermotoga maritima (strain ATCC 43589 / MSB8 / DSM 3109 / JCM 10099) OX=243274 GN=tgt; PE = 3 SV=1
MKKTFGKARLGVMKLHHGAVETPVFMPVGTNASVKLLTPRDLEEAGAEIILSNTFHLMLKPGVEIIKLHRGLHNFMGWKRPILTDSGGFQVFSLPKIRIDDEGVVFRSPIDGSKVFLNPEISMEVQIALGSDICMVFDHCPVPDADYEEVKEATERTYRWALRSKKAFKTENQALFGIVQGGIYPDLRRESALQLTSIGFDGYAIGGLSIGEERSLTLEMTEVTVEFLPEDKPRYFMGGGSPELILELVDRGVDMFDSVFPTRIARHGTALTWNGKLNLKASYNKRSLEPVDERCGCYTCKNFTRSYIHHLFDRGEVLGQILLTIHNINFMISLMKEVRRSIESGTFKELKSKVVEVYSSGGVNV

SEQ ID NO: 61766 - protein, 369 aa, Thermotoga naphthophila
  REGION 1..369: note = tr|D2C3M8|D2C3M8_THENR Queuine tRNA-ribosyltransferase OS=Thermotoga naphthophila (strain ATCC BAA-489 / DSM 13996 / JCM 10882 / RKU-10) OX=590168; GN = tgt PE=3 SV=1
MEFEVKKTFGKARLGVMKLHHGAVETPVFMPVGTNANVKLLTPRDLEEAGAEIILSNTFHLMLKPGVEIIKLHRGLHNFMGWKRPILTDSGGFQVFSLPKIRIDDEGVVFRSPIDGSKIFLNPEISMEVQIALGSDICMVFDHCPVPDADYEEVKEATERTYRWALRSKKAFKTENQALFGIVQGGIYPDLRRESALQITSIGFDGYAIGGLSIGEERSLTLEMTEVTVEFLPEDKPRYFMGGGSPELILELVNRGVDMFDSVFPTRIARHGTALTWNGKLNLKASYNKRSLEPVDERCGCYTCKNFTRSYIHHLFDRGEVLGQILLTIHNINFMISLMKEVRRSIEDGTFNELKSRVVEVYSSGGVNV

SEQ ID NO: 61767 - protein, 369 aa, Thermotoga neapolitana
  REGION 1..369: note = sp|B9K8N7|TGT_THENN Queuine tRNA-ribosyltransferase; OS = Thermotoga neapolitana (strain ATCC 49049 / DSM 4359 / NS-E) OX=309803 GN=tgt PE=3 SV=1
MEFEVKKTSGKARVGVLKLPHGVVRTPVFMPVGTNANVKLLTPRDLEEAGAEIVLSNTFHLMLKPGVEIIRLHGGLHKFMGWKKPILTDSGGFQVFSLPKLKIDDEGVTFKSPIDGSKVFLSPEISMEVQIALGSDICMAFDHCPPPDADYEVVKEATERTYRWALRSKEAFKTENQVLFGIVQGGVYPDLRKKSALQITSIGFDGYAIGGLSIGEERSLTLEMTEITVEYLPEDRPRYFMGGGSPELILELVDRGVDMFDSVFPTRIARHGTALTWKGRLNLKASYNKRSLDPVDEQCGCYTCKNFTRSYIHHLIDRGEVLGQILLSLHNVSFMISFMDEVRRSIEEGTFREFKGKMIDVYSSGGVSV

SEQ ID NO: 61768 - protein, 369 aa, Thermotoga petrophila; identical to SEQ ID NO: 61764
  REGION 1..369: note = sp|A5IM22|TGT_THEP1 Queuine tRNA-ribosyltransferase; OS = Thermotoga petrophila (strain RKU-1 / ATCC BAA-488 / DSM 13995) OX=390874 GN=tgt PE=3 SV=1

SEQ ID NO: 61769 - protein, 396 aa, Thermotoga sp.; identical to SEQ ID NO: 59857
  REGION 1..396: note = tr|A0A101EUB4|A0A101EUB4_9THEM Queuine tRNA-ribosyltransferase OS=Thermotoga sp. 50_1627; OX = 1635260 GN=tgt PE=3 SV=1

SEQ ID NO: 61770 - protein, 369 aa, Thermotoga sp.
  REGION 1..369: note = sp|B1LB70|TGT_THESQ Queuine tRNA-ribosyltransferase; OS = Thermotoga sp. (strain RQ2) OX=126740 GN=tgt PE=3 SV=1
MEFEVKKTFGKARLGVMKLHHGAVETPVFMPVGTNANVKLLTPRDLEEAGAEIILSNTFHLMLKPGVEIIKLHRGLHNFMGWKRPILTDSGGFQVFSLPKIRIDDEGVVFRSPIDGSKVFLNPEISMEVQIALGSDICMVFDHCPVPDADYEEVKEATERTYRWALRSKKAFKTENQALFGIVQGGIYPDLRRESALQLTSIGFDGYAIGGLSIGEERSLTLEMTEVTVEFLPEDKPRYFMGGGSPELILELVDRGVDMFDSVFPTRIARHGTALTWNGKLNLKASYNKRSLEPVDERCGCYTCKNFTRSYIHHLFDRGEVLGQILLTIHNINFMISLMKEVRRSIESGTFKELKSKVVEVYSSGGVNV

SEQ ID NO: 61771 - protein, 368 aa, unidentified
  source 1..368: note = Thermotogae bacterium
  REGION 1..368: note = tr|A0A3D6DA58|A0A3D6DA58_9BACT Queuine tRNA-ribosyltransferase OS=Thermotogae bacterium; OX = 2053689 GN=tgt PE=3 SV=1
MTFEVFHKDGNARTGVLHTVHGDVETPVFAPVATNATVRFVPHVFLHDMGYRMILSNTFHLLLKPGEDVIRSFGGLHRFMSWSGAILTDSGGFQVFSLPHRKITDEGVEFRSPIDGSLIFLTPERATEFQELLGSDIAMVLDVCMNPYEAEDEIWRSVDRTLKWAVRCKEVHTRSDQALFGIVQGGISEKLRQYSAEETVRIGFDGYAVGGLSVGETIEETLAMLDVVLPILPEDKPRYFMGLGTPELILESVERGIDIFDCVYPTRVGRHGTAMTWTGRLNVKSAVYRMDPRPVDEKCDCYTCKNFSRGYIHHLFNRKEALGMILLSIHNLYFMNQFVRKIRDAIQEGRFQDFKQEFLSSTSLEVSK

SEQ ID NO: 61772 - protein, 383 aa, unidentified
  source 1..383: note = Thermotogae bacterium
  REGION 1..383: note = tr|A0A1V6H2B2|A0A1V6H2B2_9BACT Queuine tRNA-ribosyltransferase OS=Thermotogae bacterium ADurb.Bin062 OX=1852923 GN=tgt PE=3 SV=1
MNSTKSFTLQTQAGSEKIGEALSAGRNGFLRLPHGDVETPVFMPVGTQAAVKCLLPGQLKEIGTQILLSNTFHLYLRPGHEDIRFHGGLHRFMGWDRPILTDSGGFQVFSLSKLNKITDEGVVFRSPLDGSEHFFTPELTVEIQEALGSDIAMVFDECAPHDAPETYIRQAMKRTYEWAKRFYKAHSKEDQMVFGIVQGGVSIPLRQESAEQITSIPFDGYAIGGLSVGEPESVTLAALEATCAYLPKDKPRYLMGVGTPELIFASVALGVDMFDCVLPTRSARHATLYTSGGKVHIKSAKYKRNREPLDPRCDCYTCRHFSRGYLQHLYARSEVSGMVLGSLHNIRFLTAMMENIRISIRERRFEAYRKAFFDRYRNQDGSE

SEQ ID NO: 61773 - protein, 296 aa, unidentified
  source 1..296: note = Thermotogales bacterium
  REGION 1..296: note = tr|A0A117MBF0|A0A117MBF0_9BACT Queuine tRNA-ribosyltransferase (Fragment) OS=Thermotogales bacterium 46_20 OX=1635293 GN=XE05_0454 PE=3 SV=1
MLSYEIISNSSTSRARVGRLNTSHGEILTPAFMPVGTNGTVKSLWQHELIEIGSQIILGNAFHLYLRPGLDVIEHFGGLHDFISWKGPILTDSGGFQVFSIRNKVVEDDGVRFRSPLDGSKLFITPELSMEIQMTLGSDIAMAFDECVEPGVSREYIEESVARTSVWARRCLNSHSGKQALFGIVQGGFFEDLRARSAEEICSMPFDGFAIGGLSVGEKFAITKDMLSFTVTFLPEDRPRYVMGIGSPEMIVVAVENGVDMFDCVLPTRIGRHGTALTSRGKVNLKAAKWRYDKDP

SEQ ID NO: 61774 - protein, 371 aa, Thermovenabulum gondwanense
  REGION 1..371: note = tr|A0A162M4U9|A0A162M4U9_9FIRM Queuine tRNA-ribosyltransferase OS=Thermovenabulum gondwanense; OX = 520767 GN=tgt PE=3 SV=1
MKFEVIKFSEKTRARRGKIFTFHGEIDTPVFMPVGTQASVKTMAPHELEELGAKIILGNTYHLYLRPGHKLIEEAGGLHKFMNWRGSILTDSGGYQVFSLGELREIREEGVTFRSHIDGSIHFISPEISIEIQNSLGADIIMCFDECIPYPSTYEYVKNSVERTTRWAQRCKKHHKKSEQALFGIVQGGLFEELRKKSAKDITDLDFEGYAVGGLSVGEPKQEMYKVLDYTVPLLPENKPRYLMGVGSPDALFEGVIRGIDMFDCVLPTRIARHGTVFTKKGKLVVRNAKYAKDFSPLDPECDCYVCKNFSRAYIRHLLNAGEILGLRLTTYHNLHFLLKIMEEIRKAIEGDYLLELKEEFFKKFGYEDEL

SEQ ID NO: 61775 - protein, 366 aa, Thermovibrio ammonificans
  REGION 1..366: note = tr|E8T4Q6|E8T4Q6_THEA1 Queuine tRNA-ribosyltransferase OS=Thermovibrio ammonificans (strain DSM 15698 / JCM 12110 / HB-1) OX=648996 GN=tgt; PE = 3 SV=1
MKFRILAQEGFARSASFMGTHGQTETPCFMPVGTLGAVKGLTWEQVKGMGYSLVLANVYHLYLRPGLEVIEAAGGLHSFIGWNGLILTDSGGFQVFSLGRLMKIKEEGIEFRSHVDGSKHFFSPEFVVEFEERIGVDIGMVLDECTPYPATYEYAKHSMERTLRWAKRSIEARTTDKTALFGIVQGGVYEDLRLKCVEELVKLPFDGFAIGGLSVGEPKEEMYRITRLVAPKLPPDKPRYLMGVGTPEDILEAVEAGVDMFDCVMPTRNARNGTLFTSRGKINIKAAKYRKDFSPPDPECDCYTCRNFSKAYLRHLYASGEMNASILNTIHNLHFYAKLMERIREAIKGGYFTEFKREFLAKYRGG

SEQ ID NO: 61776 - protein, 368 aa, Thermovibrio guaymasensis
  REGION 1..368: note = tr|A0A420W656|A0A420W656_9BACT Queuine tRNA-ribosyltransferase OS=Thermovibrio guaymasensis; OX = 240167 GN=tgt PE=3 SV=1
MEFKVLSTCGEARYGKLKGTHGETETPCFMPVGTLGAVKGVTWKNVKEMGYSLVLSNVYHLYLRPGLEVIEEAGGIHSFTGWKDLILTDSGGFQVFSLGSLMKLTEEGVEFCSHLDGSKHFFTPEFVIEFEERIGVDIGMVLDECTPYPATYDYAKHSMERTLRWAKRSIEARTTDRTALFGIVQGGVYEDLRLKCVEEITRLPFEGFAIGGLSVGEPKEEMYRITRLVAPNLPSDKPRYLMGVGTPEDILEAVEAGVDMFDCVMPTRNARNGTLFTSYGKVNIKAAKYKKDFTPLDPNCDCYTCRNFTKAYLRHLYVSREVNSVILNTIHNLHFYAKLMEGIREAIKEGRFAQFKEEFLRKFRGEGS

SEQ ID NO: 61777 - protein, 373 aa, Thermovirga lienii
  REGION 1..373: note = tr|G7V8T0|G7V8T0_THELD Queuine tRNA-ribosyltransferase OS=Thermovirga lienii (strain ATCC BAA-1197 / DSM 17291 / Cas60314) OX=580340 GN=tgt PE=3 SV=1
MLKFKLEATCNKTKARAGVIETPHGKIETPVFMPVGTRATVKAMAPFELKAIGAQIILSNTYHLYLRPGADVVAEAGGLHNFMGWDRPILTDSGGFQVFSLSTLREITDDGVLFQSHLDGTRHFMTPEKATLVQEQLGSDIAMCFDECVPYPCSPENSYKAVERTIAWAERCKKAHKRSDQSLFGIVQGSVYPEQRIYCASELKKMDFPGYAIGGLSVGEPHEKMYQMLDVLSEELPHEKPRYLMGVGYPLNLLEGVARGVDMFDCVLPTRNGRNGTVFTYSGRINLKNKAYERDFSPIDPNCNCYACRNFSKAYIRHLYRSGEILASRLCTWHNLHFLVDLMSKARIAILEGSFEDFKRRFEDNFNDEGGRR

SEQ ID NO: 61778 - protein, 385 aa, Thermus aquaticus
  REGION 1..385: note = tr|B7A8H2|B7A8H2_THEAQ Queuine tRNA-ribosyltransferase OS=Thermus aquaticus Y51MC23; OX = 498848 GN=tgt PE=3 SV=1
MSPFRFQVTARAGRARVGLLPTPHGTVETPLFMPVGTQGSVKGLLPRDLKEIGSQVLLANTYHLLLRPGPERVRAFGGLHGFAGWKGPWLTDSGGFQVMSLGHLRRIDERGVVFQSHLNGDLVELTPERSIAVQEALGADLIMAFDECPPYPSPREYLKASLERTLRWLERSLKAKTRPDQGLFGITQGGTDPTLRRLSTLETLRFDLPGYAIGGLAVGESKEEMFPMVELSTALLPEERPRYLMGVGHPEDLVAAMGLGVDLFDCVYPTRTGRFGSALVPEGRLNLKNARHLEEKEPLEEGCDCYACQNFSRGYIAHLVRSGEMLGAILLSLHNLRFLHRLTEGAKAAIREGRYGDFARAFAERRFGREVPLWFREALASGGHW

SEQ ID NO: 61779 - protein, 385 aa, Thermus aquaticus
  REGION 1..385: note = tr|A0A0N0BLF1|A0A0N0BLF1_THEAQ Queuine tRNA-ribosyltransferase OS=Thermus aquaticus OX=271 GN=tgt; PE = 3 SV=1
MSPFRFQVTARAGRARVGLLATPHGTVETPLFMPVGTQGSVKGLLPRDLKEIGSQVLLANTYHLLLRPGPERVRAFGGLHGFAGWKGPWLTDSGGFQVMSLGHLRRIDERGVVFQSHLNGDLVELTPERSIAVQEALGADLIMAFDECPPYPSPREYLKASLERTLRWLERSLKAKTRPDQGLFGITQGGTDPTLRRLSTLETLRFDLPGYAIGGLAVGESKEEMFPMVELSTALLPEERPRYLMGVGHPEDLVAAMGLGVDLFDCVYPTRTGRFGSALVPEGRLNLKNARHLEEKGPLEEGCDCYACQSFSRGYIAHLVRSGEMLGAILLSLHNLRFLHRLTEGAKAAIREGRYGDFARAFAERRFGREVPLWFREALAAGGHW

SEQ ID NO: 61780 - protein, 385 aa, Thermus arciformis
  REGION 1..385: note = tr|A0A1G7DGC2|A0A1G7DGC2_9DEIN Queuine tRNA-ribosyltransferase OS=Thermus arciformis OX=482827; GN = tgt PE=3 SV=1
MDPFRFQVEARAGRARAGRLSTPHGAVETPLFMPVGTAGSVKGLMPKDLKAIGSQVLLANTYHLLLRPGPERVRALGGLHGFAGWEGPWLTDSGGFQVMSLGHMRRIDEEGVIFQSHLDGRLIKLTPERSIAVQEALGADLIMAFDECPPYPSPREYLQASLERTLRWLERSLKAKTRPDQALFGIAQGGTEPDLRRRSTLETIRFDLPGYAIGGLAVGEPKEAMFAMVELSTRLLPEDRPRYLMGVGHPEDLVAAMGLGVDLFDCVYPTRTGRFGSALVPEGRLNLKNARFLEDKRPLEEGCDCYTCKTFSRAYLAHLVRAGEMLGGILLSLHNLRHLHRLTEAAREAIREGRYGDFAREFARRRFGQEVPAWFREALAAGGHW

SEQ ID NO: 61781 - protein, 385 aa, Thermus brockianus
  REGION 1..385: note = tr|A0A1J0LSA9|A0A1J0LSA9_THEBO Queuine tRNA-ribosyltransferase OS=Thermus brockianus OX=56956; GN = tgt PE=3 SV=1
MKPFAFSVEAQSGRARVACLFTPHGVVETPLFMPVGTQGSVKGLLPKDLKEIGSQILLANTYHLLLRPGPERVRALGGLHGFAGWRGPWLTDSGGFQVMSLGHLRRIDEEGVVFQNHLDGSLIRLTPERSLAVQEALGADIVMAFDECPPYPASRDYLKASLERTLRWLERSLKAKTREDQALFGITQGGTDPELRRLSTEETLRFDLPGYAIGGLAVGEPKEAMFRMVELSTRLLPEARPRYLMGVGHPEDLVAAMGLGVDLFDCVYPTRTGRFGSALVPEGRLNLKNARFLEEKGPLEEGCDCYACQTFSRGYIAHLVRAGEMLGGILLSLHNLRYLHRLTEEARRAIREGTYGDFARAFAERRFGKEVPRWFREALAAGGHW

SEQ ID NO: 61782 - protein, 384 aa, Thermus filiformis
  REGION 1..384: note = tr|A0A0A2WR95|A0A0A2WR95_THEFI Queuine tRNA-ribosyltransferase OS=Thermus filiformis OX=276; GN = tgt PE=3 SV=1
MSFAFHRLAQTGRARLGRLETPHGTVTTPLFMPVGTQGSVKGLLPKDLEEIGSQILLANTYHLLLRPGPERVRALGGLHGFAGWKGPWLTDSGGFQVMSLGHLRRIDEEGVVFQSHLNGDLVHLTPERSIAVQEALGADIIMAFDECPPYPSSRAYLEASLERTLRWLERSLRAKTRTDQALFGIAQGGTDPGLRRRSTLETIRFDLPGYAIGGLAVGEPKEEMFRMVALSTELLPEGRPRYLMGVGHPEDLVAAIGLGVDLFDCVYPTRTGRFGYALVPEGRLNLKSGRHLEEATPLDPECDCYACRTFSRAYLAHLVRAGEMLGAVLLSLHNLRYLHRLTEAARAAIGRGAYGDFALAFAERRFGKGVPPWFLEALRAGGHL

SEQ ID NO: 61783 - protein, 385 aa, Thermus oshimai
  REGION 1..385: note = tr|K7R352|K7R352_THEOS Queuine tRNA-ribosyltransferase OS=Thermus oshimai JL-2 OX=751945; GN = tgt PE=3 SV=1
MNFFHFQITHKAGRARTGLLHTPHGPVETPLFMPVGTQGSVKGLMPRDLKEIGSQILLANTYHLLLRPGPERVRALGGLHGFAGWRGPWLTDSGGFQVMSLGHLRRIDEKGVVFQSHLNGDLVELTPERSVAVQEALGSDIAMALDECPPYPSSRAYLEASLERTLRWLERSLKAKTRPDQALFGIAQGGTEADLRRRSTLETIRFDLPGYAIGGLAVGEPKEAMFRMVELSTALLPEEKPRYLMGVGHPEDLVAAMGLGVDLFDCVYPTRTGRFGYALVPEGRLNLKSGRHLEDPRPLEEGCDCYACRTFSRAYLSHLVRSGEMLGAVLLSLHNLRFLHRLTEGAREAIRQGQYGDFARAFAERRFGKEIPPWFREALVAGGHW

SEQ ID NO: 61784 - protein, 385 aa, unidentified
  source 1..385: note = Thermus parvatiensis
  REGION 1..385: note = tr|H7GGM9|H7GGM9_9DEIN Queuine tRNA-ribosyltransferase OS=Thermus parvatiensis OX=456163; GN = tgt PE=3 SV=1
MEPFSFQVEARAGRARVGRLFTPHGAVETPLFMPVGTAGSVKGLMPKDLEAIGSQVLLANTYHLLLRPGPERVRALGGLHGFAGWKGPWLTDSGGFQVMSLGHMRRIDEEGVVFQSHLDGRLIKLTPERSIAVQEALGADLIMAFDECPPYPSPREYLEASLERTLRWLERSLKAKTRPDQALFGIAQGGTDPELRRRSTLETIRFDLPGYAIGGLAVGEPKEAMFAMVELSTRLLPEDRPRYLMGVGHPEDLVAAMGLGVDLFDCVYPTRTGRFGSALVPEGRLNLKNARFLEDRRPLEEGCDCYTCQTFSRAYLAHLVRAGEMLGGILLSLHNLRHLHRLTEAARQAIREGRYGDFAREFAGRRFGREVPPWFREALAAGGHW

SEQ ID NO: 61785 - protein, 385 aa, Thermus scotoductus
  REGION 1..385: note = tr|E8PQK4|E8PQK4_THESS Queuine tRNA-ribosyltransferase OS=Thermus scotoductus (strain ATCC 700910 / SA-01) OX=743525 GN=tgt PE=3 SV=1
MDPFCFAIQARSGRARVGLLTTPHGRVETPLFMPVGTAGSVKGLLPRDLQEIGSQVLLANTYHLLLRPGPERVRTLGGLHRFAGWDGPWLTDSGGFQVMSLGHLRRIDEEGVVFQSHLDGSLIRLTPERSIAIQEALGADFIMAFDECPPYPSSPEYLKASLERTLRWLERSLKAKTRPDQALFGIAQGGTDAGLRALATRETLRFDLPGYAIGGLAVGETKEEMFPMVALSTEILPEAKPRYLMGVGHPEDLVAAMGLGVDLFDSVYPTRTGRFGSALVPEGRINLKNAQYLEDKRPLEEGCDCYACQTFSRAYIAHLVRAGEMLGGILLSLHNLRFLHRLTERAREAIRQGSYGAFAREFAERRFGKEIPPWFREAMAAGGHW

SEQ ID NO: 61786 - protein, 385 aa, Thermus scotoductus
  REGION 1..385: note = tr|A0A430S072|A0A430S072_THESC Queuine tRNA-ribosyltransferase OS=Thermus scotoductus OX=37636; GN = tgt PE=3 SV=1
MDPFRFAIQARSGRARVGLLTTPHGRVETPLFMPVGTQGSVKGLLPKDLKAIGSQVLLANTYHLLLRPGPERVRALGGLHRFAGWDGPWLTDSGGFQVMSLGHLRRIDEEGAVFQSHLDGRLIKLTPERSVAVQEALGADLIMAFDECPPYPASRDYLKASLERTLRWLERSLKAKTRPDQALFGIAQGGTEPDLRRRSTLETIRFDLPGYAIGGLAVGEPKEAMFRMVALSTELLPETKPRYLMGVGHPEDLVAAMGLGVDLFDCVYPTRTGRFGSALVPEGRINLKNAQYLEDKRPLEEGCDCYACQTFSRAYLAHLVRAREMLGGILLSLHNLRFLHRLTERAREAIRQGSYGAFAREFAERRFGKEIPPWFREAMAAGGHW

SEQ ID NO: 61787 - protein, 385 aa, Thermus sp.
  REGION 1..385: note = tr|W2U4L3|W2U4L3_9DEIN Queuine tRNA-ribosyltransferase OS=Thermus sp. NMX2.A1 OX=570924; GN = tgt PE=3 SV=1
MDPFCFAIQARSGRARVGLLTTPHGRVETPLFMPVGTQGSVKGLLPKDLKAIGSQVLLANTYHLLLRPGPERVRALGGLHRFAGWDGPWLTDSGGFQVMSLGHLRRIDEEGVVFQSHLDGSLIRLTPERSIAIQEALGADFIMAFDECPPYPSSPEYLKASLERTLRWLERSLKAKTRPDQALFGIAQGGTDAGLRALATRETLRFDLPGYAIGGLAVGETKEEMFPMVALSTEILPEAKPRYLMGVGHPEDLVAAMGLGVDLFDSVYPTRTGRFGSALVPEGRINLKNAQYLEDKRPLEEGCDCYACQTFSRAYIAHLVRAGEMLGGILLSLHNLRFLHRLTERAREAIRQGSYGAFAREFAERRFGKEIPPWFREAMAAGGHW

SEQ ID NO: 61788 - protein, 385 aa, Thermus sp.
  REGION 1..385: note = tr|G8NCH0|G8NCH0_9DEIN Queuine tRNA-ribosyltransferase OS=Thermus sp. CCB_US3_UF1; OX = 1111069 GN=tgt PE=3 SV=1
MEAFRFTVLARSGRARAGLFHTPHGPVQTPLFMPVGTQGSVKGLLPKDLEAIGSQVLLANTYHLLLRPGPERVRALGGLHGFAGWKGPWLTDSGGFQVMSLGHLRRIDEEGVVFQSHLDGSPLRLTPEESLKVQEALGADIVMAFDECPPYPSPRAYLKASLERTLRWLERSLRAKTRPDQALFGIAQGGTDPELRALSTRETVRFRLPGYAIGGLAVGEPKEAMFPMVALSTEILPEDRPRYLMGVGHPEDLVAAIGLGVDLFDSVYPTRTGRFGSALTLEGRINLKNARFLEDPRPLEEGCDCYTCQTFSRAYLAHLVRTGEMLGGILLSLHNLRHLHRLTEAAREAILRGEYGAFAQAFAQRRFGKEVPRWFQEALAAGGHA

SEQ ID NO: 61789 - protein, 385 aa, unidentified
  source 1..385: note = Thermus tengchongensis
  REGION 1..385: note = tr|A0A4Y9F9G7|A0A4Y9F9G7_9DEIN Queuine tRNA-ribosyltransferase OS=Thermus tengchongensis; OX = 1214928 GN=tgt PE=3 SV=1
MEPFRFQLLARSGRARVGRLQTPHGPVETPLFMPVGTQGSVKGLLPKDLKAIGSQVLLANTYHLLLRPGPERVRTLGGLHGFAGWRGPWLTDSGGFQVMSLGHLRRIDEEGVVFQSHLDGSLVRLTPERSIAVQEALGADFIMAFDECPPYPSSPEYLKASLERTLRWLERSLKAKTRPDQALFGIAQGGTDPELRALSTRETLRFDLPGYAIGGLAVGEPKEAMFPMVALSTEILPEDRPRYLMGVGHPEDLVAAMGLGVDLFDSVYPTRTGRFGSALTPEGRINLKNARFLEDPRPLEEGCDCYACQHFSRAYIAHLVRAGEMLGGILLSLHNLRHLHRLTEGAREAIRRGDYGAFAWAFAERRFGKEVPAWFREAMAAGGHW

SEQ ID NO: 61790 - protein, 385 aa, Thermus thermophilus
  REGION 1..385: note = sp|Q5SLI7|TGT_THET8 Queuine tRNA-ribosyltransferase; OS = Thermus thermophilus (strain HB8 / ATCC 27634 / DSM 579) OX=300852 GN=tgt PE=3 SV=1
MDPFRFQVEARAGRARVGRLFTPHGAVETPLFMPVGTAGSVKGLMPKDLEAIGSQVLLTNTYHLLLRPGPERVRALGGLHGFAGWKGPWLTDSGGFQVMSLGHMRRIDEEGVVFQSHLDGRLIKLTPERSIAVQEALGADLIMAFDECPPYPSPREYLEASLERTLRWLERSLKAKTRPDQALFGIAQGGTDPELRRRSTLETIRFDLPGYAIGGLAVGEPKEAMFAMVELSTRLLPEDRPRYLMGVGHPEDLVAAMGLGVDLFDCVYPTRTGRFGSALVPEGRLNLKNARFLEDRRPLEEGCDCYTCQTFGRAYLAHLVRAGEMLGGILLSLHNLRHLHRLTEAARQAIREGRYGDFAREFARRRFGREVPPWFREALAAGGHG

SEQ ID NO: 61791 - protein, 385 aa, Thermus thermophilus
  REGION 1..385: note = tr|F6DHI8|F6DHI8_THETG Queuine tRNA-ribosyltransferase OS=Thermus thermophilus (strain SG0.5JP17-16) OX=762633 GN=tgt PE=3 SV=1
MDPFRFQVEARAGRARVGRLFTPHGAVETPLFMPVGTAGSVKGLMPKDLEAIGSQVLLANTYHLLLRPGPERVRALGGLHGFAGWKGPWLTDSGGFQVMSLGHMRRIDEEGVVFQSHLDGRLIKLTPERSIAVQEALGADLIMAFDECPPYPSPREYLEASLERTLRWLERSLKAKTRPDQALFGIAQGGTDPELRRRSTLETIRFDLPGYAIGGLAVGEPKEAMFAMVELSTRLLPEDRPRYLMGVGHPEDLVAAMGLGVDLFDCVYPTRTGRFGSALVPEGRLNLKNARFLEDRRPLEEGCDCYTCQTFSRAYLAHLVRAGEMLGGILLSLHNLRHLHRLTEAARQAIREGRYGDFAREFAGRRFGREVPPWFREALAAGGHW

SEQ ID NO: 61792 - protein, 371 aa, Thioalbus denitrificans
  REGION 1..371: note = tr|A0A369CCU4|A0A369CCU4_9GAMM Queuine tRNA-ribosyltransferase OS=Thioalbus denitrificans; OX = 547122 GN=tgt PE=3 SV=1
MKYELVAEDGMARRGRLHFPRGTVATPAFMPVGTYGTVKAMTPEEVRATGAEIILGNTFHLMLRPGTGVVATHGDLHDFMHWDGPILTDSGGFQVFSLGAMRRISEAGVTFQSPVNGDRVFLGPEESMAVQRALGADIVMIFDECTPYPADERTARASMELSLRWARRSREAHGDNPAALFGIVQGGMYPELRAESLAGLREIGFDGYAIGGLSVGEPKAEMLRILDATAPALPADRPRYLMGVGTPEDIVEAVRRGVDMFDCVMPTRNARNGYLFTSTGVVKIRNAANRGDPRPLDEQCGCYTCRNYSRAYLHHLDRCREILGARLNTIHNLHYYQVLMRGLREAIAAGELENYVTRFYAGRAQRPAPVS

SEQ ID NO: 61793 - protein, 371 aa, Thioalkalivibrio denitrificans
  REGION 1..371: note = tr|A0A1V3NBN1|A0A1V3NBN1_9GAMM Queuine tRNA-ribosyltransferase OS=Thioalkalivibrio denitrificans; OX = 108003 GN=tgt PE=3 SV=1
MEFDLIANDGVARRGRLTFARGTVETPAFMPVGTYGTVKTMTPEELEGLGAEIILGNTFHLMLRPGTDVIRAHGDLHDFMHWERPILTDSGGFQVFSLADLRKITEEGVKFRSPVDGAEILLTPERSMAVQRALGSDIVMIFDECTPFPATEDVARESMELSLRWAARSREAHGDNPAALFGIVQGGMYPALRQHSLEGLMAVGFDGYAIGGLSVGEGMEERHRVLDALMPLMPRERPRYLMGVGKPEDIVEAVRRGVDMFDCVIPTRNARNGFLYTREGVMRIRNSRYRDDTGPVDPSCGCYTCRNYSRAYLKHLEKCNEILGARLSTVHNLHYYLSLMGEMREAIASGGFDDWVAGFYALRSQPLPSVP

SEQ ID NO: 61794 - protein, 371 aa, Thioalkalivibrio halophilus
  REGION 1..371: note = tr|A0A1V3A0H1|A0A1V3A0H1_9GAMM Queuine tRNA-ribosyltransferase OS=Thioalkalivibrio halophilus; OX = 252474 GN=tgt PE=3 SV=1
MQFEHLGSDGAARRGRLTFPRGEVETPAFMPVGTYGTVKAMTPEELTGLGAQIILGNTFHLMLRPGTEIIRAHGDLHDFMHWEGPILTDSGGFQVFSLAEMRKISEEGVRFQSPVDGSKVLMTPESSMQVQRELGSDIVMIFDECTPYPATHDEARRSMELSLRWADRSRQAHGDNPAALFGIVQGGMIPELRRESAAGLRSIGFDGYAIGGLSVGEPEDERLATLDVTLPELPVEQPRYLMGVGRPEDIVEAVRRGVDMFDCVMPTRNARNGFLYTREGVLRIRNARFRDDTRPIDPECGCYACRNYSRAYLKHLDKCNEILGSRLATTHNLHYYQDLMRGMRGAIAEGALDAFVADFYGRRGMDVPAVP

SEQ ID NO: 61795 - protein, 355 aa, Thioalkalivibrio nitratireducens
  REGION 1..355: note = tr|L0DY88|L0DY88_THIND Queuine tRNA-ribosyltransferase OS=Thioalkalivibrio nitratireducens (strain DSM 14787 / UNIQEM 213 / ALEN2); OX = 1255043 GN=tgt [H] PE=3 SV=1
MTFERGTVETPAFMPVGTYGTVKAMTPEELRETGAEIILGNTFHLMLRPGTDVIRAHGDLHGFMHWDGPILTDSGGFQVFSLANLRKISEEGVRFQSPVDGSPIHLTPEDSMWVQRELGSDIVMIFDECTPYPSTEDQARESMELSLRWAQRSREAHGDNPAALFGIVQGGMFPELRARSAEALRAIGFDGYAVGGLSVGEPEAKRLRVLDATLPLMPPERPRYLMGVGRPEDIVEAVRRGVDMFDCVMPTRNARNGFLYTREGILRIRNARYRDDTAPVDPACGCYTCRHYSRAYLKHLDKCNEILGPRLATIHNLRYYQDLMRGLREAIAAGELERFVVDFYSMRGMSVPAVA

SEQ ID NO: 61796 - protein, 371 aa, Thioalkalivibrio paradoxus
  REGION 1..371: note = tr|W0DLL6|W0DLL6_9GAMM Queuine tRNA-ribosyltransferase OS=Thioalkalivibrio paradoxus ARh 1 OX=713585 GN=tgt PE=3 SV=1
MKFELQATDQKARRGRMTFARGSVETPAFMPVGTYGTVKAMTPEELRETGAEIILGNTFHLMLRPGTGVIRAHGDLHEFMHWDGPILTDSGGFQVFSLADLRKISEEGVHFQSPVDGSAIRLTPEDSMRVQRELGADIVMIFDECTPYPATEDQAQESMELSLRWAKRSREAHGDNPAALFGIVQGGMFPALRARSAEALRAIGFDGYAVGGLSVGEPEAERLGVLDATLPLLPPEFPRYLMGVGRPEDIVEAVRRGVDMFDCVMPTRNARNGFLYTREGILRIRNARYRDDTAPVDPACGCYTCRHYSRAYLKHLDKCNEILGPRLATIHNLHYYQDLMRGLRDAIAAGELERFVADFYSMRGMPVPAVA

SEQ ID NO: 61797 - protein, 371 aa, Thioalkalivibrio sp.
  REGION 1..371: note = tr|D3S9V8|D3S9V8_THISK Queuine tRNA-ribosyltransferase OS=Thioalkalivibrio sp. (strain K90mix) OX=396595 GN=tgt PE=3 SV=1
MEFEHLGQDGAARRGRLRFPRGEVDTPAFMPVGTYGTVKAMTPEELRELGAQIILGNTFHLMLRPGTEVIRAHGDLHDFMHWEGPILTDSGGFQVFSLAEMRKISEEGVRFQSPVDGSKVLMTPESSMRVQRELGSDIVMIFDECTPYPATEDEARQSMELSLRWAARSREAHGDNPAALFGIVQGGMYPALRRESAAGLREIGFDGYAIGGLSVGETEDERLATLDVTVPLLPEDRPRYLMGVGRPEDIVEAVRRGVDMFDCVMPTRNARNGFLYTREGVLRIRNARFRDDTGPVDPECGCYTCRNYSRAYLKHLDKCNEILGSRLATTHNLHYYQDLMHGLRESIAGGTLQDFVADFYGRRGMEVPPVP

SEQ ID NO: 61798 - protein, 371 aa, Thioalkalivibrio sp.
  REGION 1..371: note = tr|A0A318VNY4|A0A318VNY4_9GAMM Queuine tRNA-ribosyltransferase OS=Thioalkalivibrio sp. ALE21; OX = 1158175 GN=tgt PE=3 SV=1
MQFEHLGSDGAARRGRLTFPRGEVETPAFMPVGTYGTVKAMTPEELTGLGAQIILGNTFHLMLRPGTEIIRAHGDLHDFMHWEGPILTDSGGFQVFSLAEMRKISEEGVRFQSPVDGSKVLMTPESSMQVQRELGSDIVMIFDECTPYPATHDEARRSMELSLRWADRSRQAHGDNPAALFGIVQGGMIPELRRESAAGLRSIGFDGYAIGGLSVGEPEDERLTTLDVTLPQLPVEQPRYLMGVGRPEDIVEAVRRGVDMFDCVMPTRNARNGFLYTREGVLRIRNARFRDDTRPIDPECGCYACRNYSRAYLKHLDKCNEILGSRLATTHNLHYYQDLMRGMREAIAEGALDAFVADFYHRRGMDVPAVP

SEQ ID NO: 61799 - protein, 371 aa, unidentified
  source 1..371: note = Thioalkalivibrio sulfidiphilus
  REGION 1..371: note = sp|B8GTQ4|TGT_THISH Queuine tRNA-ribosyltransferase; OS = Thioalkalivibrio sulfidiphilus (strain HL-EbGR7); OX = 396588 GN=tgt PE=3 SV=1
MKFELIANDGAARRGRLSFPRGTVETPAFMPVGTYGTVKAMTPEELEGIGAEIILGNTFHLMLRPGTEVIQLHGDLHDFMHWEKPILTDSGGFQVFSLADLRKITEEGVKFRSPVDGSEILLTPERSMDVQRALGSDIVMIFDECTPYPATEDQARESMELSLRWAARSKVAHGDSPSALFGIVQGGMYPALRSRSLEGLVDVGFDGYAIGGLSVGEGMEERHHVLDHLMPEMPAERPRYLMGVGKPEDIVEAVRRGVDMFDCVIPTRNARNGFLYTREGVMRIRNSRFRTDTGPIDESCDCYTCRNYSRAYLKHLDKCNEILGARLNTIHNLHYYQTLMRELRGAIAEGRLEAWVAEFYGRRSQAVPSVP

SEQ ID NO: 61800 - protein, 371 aa, Thioalkalivibrio versutus
  REGION 1..371: note = tr|A0A0G3G384|A0A0G3G384_9GAMM Queuine tRNA-ribosyltransferase OS=Thioalkalivibrio versutus; OX = 106634 GN=tgt PE=3 SV=1
MEFENLAADGAARRGRLHFPRGTVETPAFMPVGTYGTVKAMTPEELRELGAEIILGNTFHLMLRPGTEVIRAHGDLHDFMHWEGPILTDSGGFQVFSLAEMRKISEEGVRFQSPVDGSKVLMTPESSMQVQRELGSDIVMIFDECTPYPATADEARQSMELSLRWAARSRTAHGDNPAALFGIVQGGMYPDLRRESAEGLQAIGFDGYAIGGLSVGEPEDERLQTLDATLPLLPQDRPRYLMGVGRPEDIVEAVRRGVDMFDCVMPTRNARNGFLYTREGVLRIRNARFRDDVGPVDPECGCYTCRHYSRAYLKHLDKCNEILGSRLATTHNLHYYQDLMRGLREAIAAGALSEFVADFYGRRGMAIPPVP

SEQ ID NO: 61801 - protein, 371 aa, Thioalkalivibrio versutus
  REGION 1..371: note = tr|A0A1V3BV39|A0A1V3BV39_9GAMM Queuine tRNA-ribosyltransferase OS=Thioalkalivibrio versutus; OX = 106634 GN=tgt PE=3 SV=1
MEFENLAADGAARRGRLHFPRGTVETPAFMPVGTYGTVKAMTPEELRELGAEIILGNTFHLMLRPGTEVIRAHGDLHDFMHWEGPILTDSGGFQVFSLAEMRKISEEGVRFQSPVDGSKVLMTPESSMQVQRELGSDIVMIFDECTPYPATLDEARQSMELSLRWAARSRTAHGDNPAALFGIVQGGMYPDLRRESAEGLQAIGFDGYAIGGLSVGEPEDERLQTLNATLPLLPQDRPRYLMGVGRPEDIVEAVRRGVDMFDCVMPTRNARNGFLYTREGVLRIRNARFRDDVGPVDPECGCYTCRHYSRAYLKHLDKCNEILGSRLATTHNLHYYQDLMRGLREAIAAGALNEFVADFYSRRGMAIPPVP

SEQ ID NO: 61802 - protein, 388 aa, Thiobaca trueperi
  REGION 1..388: note = tr|A0A4R3N419|A0A4R3N419_9GAMM Queuine tRNA-ribosyltransferase OS=Thiobaca trueperi OX=127458; GN = tgt PE=3 SV=1
MEFERLGQDGLARRGRLTFARGTVETPAFMPVGTYGTVKAMTPEELLEIGAEIVLGNTFHLMLRPGTEIVRRLGDLHGFMHWDKPILTDSGGFQVFSLGELRKITEEGAKFQSPVDGSPVFLSPEISMQVQRELGSDIVMIFDECTPYPASEEQARTSMELSLRWAARSRAAHGDNPAALFGIVQGGMHERPRAESLEGLMRIGFDGYAIGGLSVGEPEEDRLRVLDFLADKLPTDRPRYLMGVGTPEDIVAAVQRGIDMFDCVMPTRNARNGHLFTHQGVVRIRNAANRTDERPLDPLCDCYTCRHYSRAYLHHLDKCKEILGARLATIHNLRYYQTLMRGLREAIAAGRLASFVAEFRALRETGQADAASTPWSNASAGRTDSPSI

SEQ ID NO: 61803 - protein, 367 aa, unidentified
  source 1..367: note = Thiobacillaceae bacterium
  REGION 1..367: note = tr|A0A4R1BL51|A0A4R1BL51_9PROT Queuine tRNA-ribosyltransferase OS=Thiobacillaceae bacterium LSR1; OX = 2528202 GN=tgt PE=3 SV=1
MKFDLLTTSGLARRGRLELAHGVVETPVFMPVGTYGAVKSVTPDEVEALGAQIVLGNTFHLWLRPGLEVVAAFGGLHDFMAWRGPILTDSGGFQVYSLTHLRKITEEGVKFASPLDGARLMLTPEQSMAIQRTLNSDIVMIFDECTPYPADWQTAKISMELSLRWAARSKAAHQGNPNALFGIVQGGMYEDLRDRSLAELGRIGFDGYAIGGLSVGEPKEDMVRILAYTAPRLPADRPRYLMGVGTPEDIVQAVGQGIDMFDCVMPTRNARHGVLFTRYGDLRIKNARHRTDTGPIDPSCDCYTCRNFSRAYLHHLFRAGESLAGRLNTIHNLHYYQTLMRELRQAIEAGRYTEFVAAFNNDRMAAC

SEQ ID NO: 61804 - protein, 367 aa, Thiobacillus denitrificans
  REGION 1..367: note = sp|Q3SH61|TGT_THIDA Queuine tRNA-ribosyltransferase; OS = Thiobacillus denitrificans (strain ATCC 25259); OX = 292415 GN=tgt PE=3 SV=1
MKFDLLRTDGGARRGQLHLAHGVVQTPVFMPVGTYGTVKAMSPTEIADIGFEMLLSNTFHLWLRPGLEVIEAHGGLHRFMGWDKPILTDSGGFQVFSLGKLRKITEEGVKFASPTNGDKLFLTPETSMQIQRTLNSDIVMIFDECTPYPATERQAADSMRMSLRWAARSKAAHAGNPNALYGIVQGGMYEALRDESARELIGMDFDGYAIGGLSVGEPKDDMTRILAHTAPQLPADKPRYLMGVGTPSDLVAAVAAGIDQFDCVLPTRNARHGILFTRRGEIRIRNARWKLDTAPIDEECDCYACRHFTRAYVHHLIRAGEILGARLTTLHNLHYYHRLMAEVRAAIDAQRFSEFVARFHATQALGW

SEQ ID NO: 61805 - protein, 367 aa, Thiobacillus denitrificans
  REGION 1..367: note = tr|A0A119CYD3|A0A119CYD3_THIDE Queuine tRNA-ribosyltransferase OS=Thiobacillus denitrificans; OX = 36861 GN=tgt PE=3 SV=1
MKFDLLTTDGGARRGQLHLAHGTVQTPAFMPVGTYGTVKAMSPFELTEIGFEMVLSNTFHLWLRPGLEVIEKFGGLHRFMGWDKPILTDSGGFQVFSLGKLRKITEEGVKFASPINGDKLFLTPEISMQIQHTLNSDIVMIFDECTPYPATEREAADSMRMSLRWAERSKTAHAGNPNALYGIVQGGMFETLRDESARELIGMDFDGYAIGGLSVGEPKDDMARILAHTAPQLPAHKPRYLMGVGTPSDLVAAVAQGIDQFDCVLPTRNARHGILYTRHGDMRIRNARWKTDTAPIDDECTCHTCTHFSRAYVHHLIRANEILGARLATIHNLHYYHRLMADMRTAIEAHRFADFTARFHEMQTCGW

SEQ ID NO: 61806 - protein, 367 aa, Thiobacillus sp.
  REGION 1..367: note = tr|A0A1Q4EN46|A0A1Q4EN46_9PROT Queuine tRNA-ribosyltransferase OS=Thiobacillus sp. 0-1251; OX = 1895858 GN=tgt PE=3 SV=1
MKFDLLATDGGARRGQLQLAHGTVQTPVFMPVGTYGTVKAMSPAELTDIGFEMVLSNTFHLWLRPGLEVIEKFDGLHRFMGWDKPILTDSGGFQVFSLGKLRKITEDGVKFASPINGDKLFLTPEISMQIQRTLNSDIVMIFDECTPYPATEREAADSMRLSLRWAARSKAAHAGNPNALYGIVQGGMYEGLRDESARELIAMDFDGYAIGGLSVGEPKDDMTRILAHTAPQLPADKPRYLMGVGTPSDLVAAVAQGIDQFDCVLPTRNARHGILFTRRGEMRIRNARWKTDTAPIDDECDCHTCTHFSRAYVHHLIRAGEILGARLATIHNLHYYHRLMAEMRAAIEAHRFADFTARFHEMQTHGW

SEQ ID NO: 61807 - protein, 367 aa, Thiobacillus sp.
  REGION 1..367: note = tr|A0A1Q4GTY4|A0A1Q4GTY4_9PROT Queuine tRNA-ribosyltransferase OS=Thiobacillus sp. 65-29; OX = 1895862 GN=tgt PE=3 SV=1
MKFDLLAIDAGARRGRLQLAHGTVETPAFMPVGTYGTVKAMAPAEITEIGYEMVLSNTFHLWLRPGLAVIEKFGGLHRFMGWERPILTDSGGFQVFSLGKLRKISEEGVKFSSPINGDKLFLTPEISMHIQRTLNSDIVMIFDECTPYPASEREAADSMRLSLRWAARSKAAHADNPNALYGIVQGGMYESLRDESAGELIAMDFDGYAIGGLSVGEPKDDMARILAHTAPRLPSDKPRYLMGVGTPADLVAAVAQGIDQFDCVLPTRNARHGILFTRRGELRIRNARWKLDTAPIDPECDCHACTHFSRAYVHHLIRAGEILGARLATIHNLHYYHRLMADMRAAVESGQFAGFAARFHELQSSGW

SEQ ID NO: 61808 - protein, 369 aa, Thiocapsa marina
  REGION 1..369: note = tr|F9U701|F9U701_9GAMM Queuine tRNA-ribosyltransferase OS=Thiocapsa marina 5811 OX=768671; GN = tgt PE=3 SV=1
MDFDLLANDGLARRGRLTFARGMVETPAFMPVGTYGTVKAMTPEELTDLGAEIVLGNTFHLMLRPGTEIIRRCGDLHAFMHWERPILTDSGGFQVFSLGELRKITEEGVHFRSPVDGSPVFLSPEISMQVQRELGSDIVMIFDECTPYPADEAQARASMALSLRWAARSRVAHGDNPSALFGIVQGGMHEEPRAESLDGLMTIGFDGYAVGGLSVGETEAERLRILDFLADKLPKDRPRYLMGVGTPEDIVAAVGRGIDMFDCVMPTRNARNGDLFTHQGKVRIRNAANRTDEGPVDPLCDCYCCRHYSRAYLHHLDKCKEILGARLQTIHNLHYYQTLMRGLREAIAAGRYADFVREFEALRATPDPA

SEQ ID NO: 61809 - protein, 369 aa, Thiocapsa rosea
  REGION 1..369: note = tr|A0A495V655|A0A495V655_9GAMM Queuine tRNA-ribosyltransferase OS=Thiocapsa rosea OX=69360 GN=tgt; PE = 3 SV=1
MDFDLLANDGLARRGRLRFMRGTVETPAFMPVGTYGTVKAMTPEELTDLGAEIVLGNTFHLMLRPGTEIIRRCGDLHGFMHWERPILTDSGGFQVFSLGELRKITEEGVHFRSPVDGSPVFLSPEISMQVQRTLGSDIVMIFDECTPYPADETQARTSMALSLRWAARSREAHGENPSALFGIVQGGMHEGPRAESLDGLMTIGFDGYAVGGLSVGETEAERLRILDFLADKLPADRPRYLMGVGTPEDIVAAVGRGIDMFDCVMPTRNARNGDLFTHQGKVRIRNAAHRTDEGPVDPLCDCYCCRHYSRAYLHHLDKCKEILGARLQTIHNLHYYQTLMRGLREAIAAGRYGAFVSEFEALRATPAPA

SEQ ID NO: 61810 - protein, 369 aa, Thiocapsa roseopersicina
  REGION 1..369: note = tr|A0A1H2WUK3|A0A1H2WUK3_THIRO Queuine tRNA-ribosyltransferase OS=Thiocapsa roseopersicina; OX = 1058 GN=tgt PE=3 SV=1
MDFDLLAVDGLARRGRLSFARGTVETPAFMPVGTYGTVKAMTPEELTDLGAEIVLGNTFHLMLRPGTEIIRRCGDLHGFMHWERPILTDSGGFQVFSLGELRKITEEGVHFRSPVDGSPVFLSPEISMQVQRELGSDIVMIFDECTPYPADEAQARASMALSLRWAARSREAHGDNPSALFGIVQGGMHERPRAESLDGLMTIGFDGYAVGGLSVGETEAERLCILDFLSDRLPTDRPRYLMGVGTPEDIVAAVGRGIDMFDCVMPTRNARNGDLFTHQGKVRIRNAANRTDEGPLDPLCDCYCCRHYSRAYLHHLDKCKEILGARLQTIHNLHYYQTLMRGLREAIAAGRYAAFVGEFEALRATPDPA

SEQ ID NO: 61811 - protein, 369 aa, Thiocapsa sp.
  REGION 1..369: note = tr|A0A0U5E1F2|A0A0U5E1F2_9GAMM Queuine tRNA-ribosyltransferase OS=Thiocapsa sp. KS1 OX=610332; GN = tgt PE=3 SV=1
MDFDLLAVDGLARRGRLSFARGTVETPAFMPVGTYGTVKAMTPEELTDLGAEIVLGNTFHLMLRPGTEIIRRCGDLHGFMHWERPILTDSGGFQVFSLGELRKISEEGVHFRSPVDGSPVFLSPEISMQVQRALGSDIVMIFDECTPYPADEAQARASMALSLRWAARSREAHGDNPSALFGIVQGGMHEGPRAESLDGLMSIGFDGYAVGGLSVGETEAERLRILDFLGDRLPTDRPRYLMGVGTPEDIVAAVGRGIDMFDCVMPTRNARNGDLFTHQGKVRIRNAANRTDEGPLDPLCDCYCCRHYSRAYLHHLDKCKEILGARLQTIHNLHYYQTLMRGLREAIAAGRYAAFVGEFEALRAGSRSS

SEQ ID NO: 61812 - protein, 376 aa, unidentified
  source 1..376: note = Thioclava arenosa
  REGION 1..376: note = tr|A0A2A4CNG7|A0A2A4CNG7_9RHOB Queuine tRNA-ribosyltransferase OS=Thioclava arenosa OX=1795308; GN = tgt PE=3 SV=1
MSQKFSFALHATDGAARTGVISTPRGEIRTPAFMPVGTAATVKAMMPESVRATGADIILGNTYHLMLRPTAERIDRLGGLHKFMNWERPILTDSGGFQVMSLASLRKLTEEGVRFSSHIDGSKHMLTPERSMEIQKLLGSDIVMAFDECPALPATDDEVAKSMRLSMRWAQRSRDAFGDRPGHALFGIMQGGVTRELREESAEALTRIGFDGYAVGGLAVGEGQEAMFGVLDYAPGFLPEDKPRYLMGVGKPDDIVGAVERGIDMMDCVLPSRSGRTGQAWTRRGQVNIKNARHQDDPRPLDEACTCPACRNYSRAYLHHVFRAGEMISGMLLTWHNLHYYQELMQGLRDAIAAGSLKQFVADFHAQRAMGDIEPL

SEQ ID NO: 61813 - protein, 375 aa, unidentified
  source 1..375: note = Thioclava atlantica
  REGION 1..375: note = tr|A0A085TWB8|A0A085TWB8_9RHOB Queuine tRNA-ribosyltransferase OS=Thioclava atlantica OX=1317124; GN = tgt PE=3 SV=1
MTRFSFSLTATDGRARTGTISTPRGEIRTPAFMPVGTAATVKAMMPESVAATGADILLGNTYHLMLRPGAERVARLGGLHKFMNWQKPILTDSGGFQVMSLAGLRKLTEEGVRFSSHVDGSKHLLTPERSMEIQKLLGSDIVMAFDECPALPATDEEVAKSMRLSMRWAQRSRDAFGDRPGHALFGIQQGGVTRELREESAEKLKEIGFEGYAVGGLAVGEGQEAMFGVLDYAPGMLPQDKPRYLMGVGKPDDIVGAVERGIDMMDCVLPSRSGRTGQAWTRRGQVNIKNARHQDDPRPLDENCTCPACRNYSRAYLHHVYRAGEMISGMLLTWHNLHYYQELMAGLRAAIAEGELARFVAEFHAMRDAGDIEPL

SEQ ID NO: 61814 - protein, 375 aa, unidentified
  source 1..375: note = Thioclava dalianensis
  REGION 1..375: note = tr|A0A074THN7|A0A074THN7_9RHOB Queuine tRNA-ribosyltransferase OS=Thioclava dalianensis; OX = 1185766 GN=tgt PE=3 SV=1
MTKFSFTRNATDGAARTGVIDTPRGQIRTPAFMPVGTAATVKAMMPESVAATGADILLGNTYHLMLRPTAERIAGLGGLHTFMNWDKPILTDSGGFQVMSLASLRKLTEEGVRFASHIDGSKHMLTPERSMEIQKLLGSDIVMCFDECPALPATEAEVAASMRLSMRWAQRSRDAFGDRPGHALFGIQQGGVTRELRAESAEKLKEIGFDGYAVGGLAVGEGQEAMFGVLDYACDMLPEDKPRYLMGVGKPDDIVGAVERGIDMMDCVLPSRSGRTGQAWTRRGQVNIKNARHADDPRPLDEACSCPACSNYSRAYLHHVFRSQEMISGMLLTWHNLHYYQELMAGLRAAISEGRLAAFVADFHALRAQGDIEPL

SEQ ID NO: 61815 - protein, 375 aa, unidentified
  source 1..375: note = Thioclava electrotropha
  REGION 1..375: note = tr|A0A1W9XUN1|A0A1W9XUN1_9RHOB Queuine tRNA-ribosyltransferase OS=Thioclava electrotropha; OX = 1549850 GN=tgt PE=3 SV=1
MTKFSFTLKATDGAARTGTISTPRGEIRTPAFMPVGTAATVKAMMPESVAATGADILLGNTYHLMLRPGAERVARLGGLHKFMNWDKPILTDSGGFQVMSLASLRKLTEDGVTFASHVDGSKHMLSPERSMEIQKLLGSDIVMCFDECPALPATEEEVAKSMRLSMRWAQRSRDAFGDRPGHALFGIQQGGVTRELREESAEKLKEIGFEGYAVGGLAVGEGQEAMFGVLDYAPGMLPQDKPRYLMGVGKPDDIVGAVERGIDMMDCVLPSRSGRTGQAWTRRGQVNIKNARHADDPRPLDEACTCPACSNYSRAYLHHVFRSGEMISGMLLTWHNLHYYQELMAGLRAAIDEGALARFVSEFHETRAAGDIEPL

SEQ ID NO: 61816 - protein, 375 aa, unidentified
  source 1..375: note = Thioclava indica
  REGION 1..375: note = tr|A0A074KIJ3|A0A074KIJ3_9RHOB Queuine tRNA-ribosyltransferase OS=Thioclava indica OX=1353528; GN = tgt PE=3 SV=1
MSKFSFTLNATDGAARTGVISTPRGEIRTPAFMPVGTAATVKAMMPESVAATGADILLGNTYHLMLRPTAERIARLGGLHKFMNWNKPILTDSGGFQVMSLASLRKLTEEGVRFASHIDGSKHMLTPERSMEIQKLLGSDIVMAFDECPALPATDAEVAKSMRLSMRWALRSREAFGDRPGYALFGIQQGGVTRELRAESAEKLTEIGFEGYAVGGLAVGEGQEVMFGVLDYAPDMLPVDKPRYLMGVGKPDDIVGAVERGIDMMDCVLPSRSGRTGQAWTRRGQINIKNARHADDPRPLDEGCTCPACRNYSRAYLHHVFRSQEMISGMLLTWHNLHYYQDLMQGLRDAIAAGTLAQFVAAFHAKRAEGDIEPI

SEQ ID NO: 61817 - protein, 375 aa, Thioclava pacifica
  REGION 1..375: note = tr|A0A074J8A4|A0A074J8A4_9RHOB Queuine tRNA-ribosyltransferase OS=Thioclava pacifica DSM 10166; OX = 1353537 GN=tgt PE=3 SV=1
MTKFSFTLKATDGRARTGTISTPRGEIQTPAFMPVGTAATVKAMMPESVAATGADILLGNTYHLMLRPGAERVARLGGLHKFMNWNKPILTDSGGFQVMSLSSLRKLTEEGVTFASHVDGSKHMLSPERSMEIQKLLGSDIVMCFDECPALPATEDEVAKSMRLSMRWAQRSRDAFGDRPGHALFGIQQGGVTRELREESAEKLKEIGFDGYAVGGLAVGEGQEAMFGVLDYAPEMLPTDKPRYLMGVGKPDDIVGAVERGIDMMDCVLPSRSGRTGQAWTRRGQVNIKNARHADDPRPLDEACTCPACQNYSRAYLHHVFRAGEMISGMLLTWHNLHYYQELMAGLRAAITEGELARFVAEFHETRAMGDIEPL

SEQ ID NO: 61818 - protein, 375 aa, Thioclava sp.
  REGION 1..375: note = tr|A0A4R7KL68|A0A4R7KL68_9RHOB Queuine tRNA-ribosyltransferase OS=Thioclava sp. ES.032 OX=1798206; GN = tgt PE=3 SV=1
MTKFSFTLKATDGAARTGTISTPRGEIRTPAFMPVGTAATVKAMMPESVAATGADILLGNTYHLMLRPGAERVARLGGLHKFMNWDKPILTDSGGFQVMSLASLRKLTEEGVTFASHVDGSKHMLSPERSMEIQKLLGSDIVMCFDECPALPATEDEVAKSMRLSMRWAQRSRDAFGDRPGHALFGIQQGGVTRELREESAEKLKEIGFEGYAVGGLAVGEGQEAMFGVLDYAPGMLPQDKPRYLMGVGKPDDIVGAVERGIDMMDCVLPSRSGRTGQAWTRRGQVNIKNARHADDPRPLDEACTCPACSNYSRAYLHHVFRSGEMISGMLLTWHNLHYYQELMAGLRAAIDEGALARFVSEFHDTRAMGDIEPL

SEQ ID NO: 61819 - protein, 375 aa, Thioclava sp.
  REGION 1..375: note = tr|A0A1T2B505|A0A1T2B505_9RHOB Queuine tRNA-ribosyltransferase OS=Thioclava sp. DLFJ4-1; OX = 1915313 GN=tgt PE=3 SV=1
MTKFSFTLKATDGAARTGTISTPRGEIRTPAFMPVGTAATVKAMMPESVAATGADILLGNTYHLMLRPGAERVARLGGLHKFMNWDKPILTDSGGFQVMSLASLRKLTEEGVTFASHVDGSKHMLSPERSMEIQKLLGSDIVMCFDECPALPATEEEVAKSMRLSMRWAQRSRDAFGDRPGHALFGIQQGGVTRELREESAEKLKEIGFEGYAVGGLAVGEGQEAMFGVLDYAPGMLPQDKPRYLMGVGKPDDIVGAVERGIDMMDCVLPSRSGRTGQAWTRRGQVNIKNARHADDPRPLDEACTCPACSNYSRAYLHHVFRSGEMISGMLLTWHNLHYYQELMAGLRAAIDEGALARFVSEFHETRAMGDIEPL

SEQ ID NO: 61820 - protein, 366 aa, Thiocystis violascens
  REGION 1..366: note = tr|I3YFB6|I3YFB6_THIV6 Queuine tRNA-ribosyltransferase OS=Thiocystis violascens (strain ATCC 17096 / DSM 198 / 6111) OX=765911 GN=tgt PE=3 SV=1
MEFDLLGRDGLARRGHLRFARGTVETPAFMPVGTYGTVKAMTPEELLEIGAEIVLGNTFHLMLRPGTDVIRRCGDLHRFMHWERPILTDSGGFQVFSLGDLRRITEEGVHFQSPIDGSPVFLSPEVSMRVQRELGSDIVMIFDECTPYPADEDRARASMELSLRWAARSRAAHGDNPAALFGIVQGGMHERPRAESLDGLQAIGFDGYAIGGLSVGEPEADRLRVLDFLADKLPVDRPRYLMGVGTPEDIVAAVRRGIDMFDCVMPTRHARNGYLFTHQGTVKIRNAIHRTDDGPLDPLCDCYTCRHYSRAYLHHLDKCKEILGARLATIHNLRYYQTLMRGLREAIAAGRLDGFVAEFEGLRALT

SEQ ID NO: 61821 - protein, 367 aa, Thioflavicoccus mobilis
  REGION 1..367: note = tr|L0GX30|L0GX30_9GAMM Queuine tRNA-ribosyltransferase OS=Thioflavicoccus mobilis 8321; OX = 765912 GN=tgt PE=3 SV=1
MRFELFARDGAARRGRLTFERGVVETPAFMPVGTYGTVKAMTPEELEGLGAQIILGNTFHLMLRPGTEVIRRCGDLHGFMHWPGPILTDSGGFQVFSLGELRRISEAGVHFKSPIDGSPVFLGPEESMAVQQALGSDIVMIFDECTPYPAEPDQVRASMELSLRWAARSKAAHGDNPAALFGIVQGGMDEGLRAASLEGLQEIGFDGYAVGGLSVGEPPAERLRVLDFLAGRLPPERPHYLMGVGTPGDIVAAVCRGIDMFDCVMPTRNARNGHLFTHQGVVRIRNARYRDDEGPLDAFCDCYTCRNYSRAYLHHLDRCNEILGARLNSLHNLYYYQSLMRDLREAIAAGRLAGFVADFEARAATGR

SEQ ID NO: 61822 - protein, 373 aa, unidentified
  source 1..373: note = Thioflexothrix psekupsii
  REGION 1..373: note = tr|A0A251X6M2|A0A251X6M2_9GAMM Queuine tRNA-ribosyltransferase OS=Thioflexothrix psekupsii; OX = 1570016 GN=tgt PE=3 SV=1
MFFEKIAQDKQARHGRLVFTRGVVDTPAFMPVGTVGSVKAMSPENVMATGAQIILGNTFHLMLRPGTAVIQAHGDLHDFMHWSQPILTDSGGFQVFSLGKMRTISEKGVLFRSPINGDKVFLGPEESMAVQKALGADIVMIFDECTPYPATETQARDSMQLSLRWADRSKKAHEGNTAALFGIVQGGMYEFLRQESLHGLQAIDFDGYAIGGLSVGEPKEERMRILNSITPQMPADKPRYLMGVGTPSDIVEAVRCGIDMFDCVMPTRNARNGHLFTRHGVVKIRNSRHRHDTRPLDEQCTCYTCQHYSRAYLHHLDRSKEILGAHLNTVHNLHYYQFLMQGLRSAIQMQQLDAFVTDFYRMQQCNDAINEWH

SEQ ID NO: 61823 - protein, 371 aa, unidentified
  source 1..371: note = Thiogranum longum
  REGION 1..371: note = tr|A0A4R1HDL3|A0A4R1HDL3_9GAMM Queuine tRNA-ribosyltransferase OS=Thiogranum longum OX=1537524; GN = tgt PE=3 SV=1
MQYELINKDGRARRGRLAFERGVVETPAFMPVGTYGTVKGMRPEQVAESGAQILLGNTFHLMLRPGTDIIRAHGDLHDFMNWQGPILTDSGGFQVFSLDELRKITEQGVEFRSPVNGDKVFLGPEQSMAVQCALGADIVMIFDECTPYPASTEQVRDSMQLSLRWAQRSREAHGDSPAALFGIVQGGMYPDLRLESLKGLKDIGFDGYAIGGLSVGEPHEERILVLDTLDPALPGDAPRYLMGVGTPEDIVEAVRRGIDMFDCVMPTRNARNGHLFTTQGTLRLRNARFREDTGPLDPECDCYTCQHYSRAYLYHLDRCNEILGAHLNTVHNLRYYQRLMAGLREAIQSGRLEAFVTDFYAKRGQSAPPVP

SEQ ID NO: 61824 - protein, 371 aa, Thiohalobacter thiocyanaticus
  REGION 1..371: note = tr|A0A1Z4VQL6|A0A1Z4VQL6_9GAMM Queuine tRNA-ribosyltransferase OS=Thiohalobacter thiocyanaticus; OX = 585455 GN=tgt PE=3 SV=1
MQFELIATDGQARRGRLTFDRGTVETPAFMPVGTYGTVKAMTPEEVSDTGAEIILGNTFHLMLRPGTEIIRRHGDLHDFMHWNGPILTDSGGFQVFSLGEMRKITEQGVQFQSPVDGSKVFLGPEESMRVQRELGADIVMIFDECTPYPADEKQARESMELSLRWAERSRAAHGDNPAALFGIVQGGMYPELRAQSLAGLQGIGFDGYAIGGLSVGETEAERIRILDALAPILPTDRPRYLMGVGRPEDIVEAVRRGVDMFDCVLPTRNARNGYLFTHRGTVKIRNSASRRDTGPLDPDCGCYTCRNYSRAYLHHLDKCNEILGSRLNTIHNLYYYQTLMRGLREAVAAGELAAYVADFYARRDPAAPSMA

SEQ ID NO: 61825 - protein, 371 aa, Thiohalobacter thiocyanaticus
  REGION 1..371: note = tr|A0A426QGJ0|A0A426QGJ0_9GAMM Queuine tRNA-ribosyltransferase OS=Thiohalobacter thiocyanaticus; OX = 585455 GN=tgt PE=3 SV=1
MQFELIATDGHARRGRLSFDRGTVETPAFMPVGTYGTVKAMTPEEVRDTGAGIILGNTFHLMLRPGTEIIRSHGDLHDFMHWDGPILTDSGGFQVFSLGDMRRITEQGVHFQSPVDGSRVFLGPEESMRVQRELGADIVMIFDECTPYPADADQARASMELSLRWAERSRIAHGDNPAALFGIVQGGMYPELRATSLSGLEAIGFDGYAIGGLSVGETEAERIRILDALAPILPGERPRYLMGVGRPEDIVEAVRRGVDMFDCVLPTRNARNGYLFTHRGTVKIRNSASRRDTGPLDPDCDCYTCRNYSRAYLHHLDRCNEILGSRLNTIHNLYYYQTLMRGLRAAVAAGGLEAFVADFYARRDQAPPSVA

SEQ ID NO: 61826 - protein, 368 aa, Thiohalomonas denitrificans
  REGION 1..368: note = tr|A0A1G5Q1P7|A0A1G5Q1P7_9GAMM Queuine tRNA-ribosyltransferase OS=Thiohalomonas denitrificans; OX = 415747 GN=tgt PE=3 SV=1
MKFDLLKTDGPARRGRMYFERGTVETPAFMPVGTYGTVKAMTPEELQGIGAEIILGNTFHLMLRPGTEVIAAHGDLHDFMHWEGPILTDSGGFQVFSLGKMRKITEEGVRFQSPVDGSRVFLGPEESMAVQRELGSDIVMIFDECTPYPADERQSRASMELSLRWARRSKEAHGENPNALFGIVQGGMYPHLRDESLAGLTEIGFDGYAIGGLSVGEPKEEMLAILDHTGPGMPEDRPRYLMGVGRPEDIVEAVLRGIDMFDCVMPTRNARNGHLFTRRGVIRIRNARYEKDTRPLDLECGCYTCQNYSRAYLRHLHRTNEILGARLNTIHNLFHYQALMKRLREAIAAGRLKAFVSEFYSRLAEGVA

SEQ ID NO: 61827 - protein, 371 aa, Thiohalophilus thiocyanatoxydans
  REGION 1..371: note = tr|A0A4R8IR17|A0A4R8IR17_9GAMM Queuine tRNA-ribosyltransferase OS=Thiohalophilus thiocyanatoxydans OX=381308 GN=tgt PE=3 SV=1
MKFELLQSDGEARRGRLTFDRGTVETPAFMPVGTYGTVKAMTPEELRELGAEIVLGNTFHLMLRPGTEVIEAHGDLHDFMHWDGPILTDSGGFQVWSLGKLRKLSEAGVDFASPVDGSRHFMGPEESMAVQRTLGSDIVMVFDECTPYPASEAEARTSMELSLRWAERCKVAHGDNAAALFGIVQGGMYESLRQASLDGLTRMGFDGYAIGGLSVGEPKEDMLRILDYLGPRMPVDTPRYLMGVGKPEDLVEGVRRGIDMFDCVMPTRNARNGFIFTSTGLLRIRNSQFRTDTRPLDETCDCYTCRHYSRAYLRHLDKTGEILGARLNTLHNLHYYQQLMAQLRAAIAAGNLGGFVADFYDKRSQALPAMS

SEQ ID NO: 61828 - protein, 378 aa, Thiohalorhabdus denitrificans
  REGION 1..378: note = tr|A0A0P9C8Z4|A0A0P9C8Z4_9GAMM Queuine tRNA-ribosyltransferase OS=Thiohalorhabdus denitrificans; OX = 381306 GN=tgt PE=3 SV=1
MTDTPDFSFDLLATDGAARRGRVVTGRGPIDTPAFMPVGTAGTVKGMLPEQVAATGAQILLGNAYHLMLRPGAERVAEFGGLHRFMNWDGPILTDSGGYQVLSLTDLRKLDENGVTFRSHIDGSYWEMTPESSVEIQRLLDADITMVFDECPPYPCEEDEAKRSLDLTLRWAERSKAAFENRPGYGLFGIVQGGVHDHLREESARRLVEMGFHGYAVGGLAVGEPAAERNHTLEVTTPVLPTDRPRYLMGVGKPVDLVDAVERGIDMFDCVLPTRSGRRGLAFTWGGDLKLTNARFRDDHEPLDPNSSCPASRDYSKGYLHHLFRSGELLGWVLLTWHNLHFYQELMAAMRAAVEEGRFADFAAAFRERQAKPKQAGA

SEQ ID NO: 61829 - protein, 366 aa, Thiohalospira halophila
  REGION 1..366: note = tr|A0A1I1QXT5|A0A1I1QXT5_9GAMM Queuine tRNA-ribosyltransferase OS=Thiohalospira halophila DSM 15071 OX=1123397 GN=tgt PE=3 SV=1
MDYRLDATDGPARTGELTFPRGRVPTPAFMPVGTYGTVKAMTPEAVAETGAGIILGNTFHLMLRPGTEVIAAHGDLHDFMNWHGPILTDSGGFQVWSLGKLRKVEEAGVHFRSPVDGAKIFMGPEESMAVQRALGADIVMIFDECTPYPADEATARASMELSLRWAERSREAHGDNPAALFGIVQGGMYPELRAESLAGLQAIGFDGYAIGGLSVGEPPELMNAILDDLVPRMPADRPRYLMGVGRPEDIVEAVRRGVDMFDCVMPTRNARNGHLFTSEGVVRIRHARHRLDTGPADPACDCYTCQHYSRAYLRHLHRCGEILAAQLMTLHNLHFYQRLMADLRAAIAAGELEAFATDFLGRRSQA

SEQ ID NO: 61830 - protein, 375 aa, unidentified
  source 1..375: note = Thiolapillus brandeum
  REGION 1..375: note = tr|W0TIZ5|W0TIZ5_9GAMM Queuine tRNA-ribosyltransferase OS=Thiolapillus brandeum; OX = 1076588 GN=tgt PE=3 SV=1
MKFELHHTDSAARQGKLTFARGPIDTPAFMPVGTYGTVKAMTPEELEGMGAQIILGNTFHLWLRPGTEVIKAHGDLHDFTHWEKPILTDSGGFQVYSLGQMRRITEEGVHFRSPVNGSRVFMGPEESMAIQRDLGSDIVMIFDECTPYPATEEEARHSMELSLRWARRSREAHGDNPAALFGIVQGGVYNDLRQRSLDGLMEIGFDGYAVGGLSVGEPPQDRWRVLDYLADRLPRDKPRYLMGVGTPQDIVEAVSRGIDMFDCVMPTRNARNGHLFTHEGVVRIRNACHEKDTGPVDPHCDCYTCRNYSRAYLRHLQRCNEILGARLNTIHNLYYYQKLMADLRQAISGNRLASFREDFYAARGLPLPSLQGDIL

SEQ ID NO: 61831 - protein, 372 aa, unidentified
  source 1..372: note = Thiomicrorhabdus sp.
  REGION 1..372: note = tr|A0A4P9K3Y9|A0A4P9K3Y9_9GAMM Queuine tRNA-ribosyltransferase OS=Thiomicrorhabdus sp. G1; OX = 2580412 GN=tgt PE=3 SV=1
MEFELDNTDGRARRGRLKFARGVVETPAFMPVGTYGSVKGMTPEEIKDTGAQIILGNTFHLALRPGTDIIELHGDLHDFTHWDGPILTDSGGFQVFSLGKMRKIKEEGVTFRSPVNGEKIFMGPEESMEIQRKLGSDIVMIFDECTPYPATHKEARESMELSMRWAKRSKDAHGDNPSALFGIVQGGMYEDLRVQSIEGLKEIEFDGYAIGGLSVGEPKDEMMATLDFTEPHMPKDKPRYLMGVGKPEDLVEAVRRGIDMFDCVMPTRNARNGFLFSRQGVVKLRNAKHKTSLEPIDKECGCYTCQNYTLSYLHHLDKCREIQGARLNTIHNLHYYQDLMQGLRDAISENRLEAFVEEFYAGIGQPVPPLAD

SEQ ID NO: 61832 - protein, 370 aa, unidentified
  source 1..370: note = Thiomicrospira aerophila
  REGION 1..370: note = tr|W0DUT4|W0DUT4_9GAMM Queuine tRNA-ribosyltransferase OS=Thiomicrospira aerophila AL3; OX = 717772 GN=tgt PE=3 SV=1
MKFELDKQDGRARRGRLKFARGTVETPAFMPVGTYGSVKGMTPEEITDTGAQIMLGNTFHLAIRPGTDIIKLHGDLHDFMHWKGPILTDSGGFQVFSLGKMRKITEEGVTFANPVNGSKIFMGPEESMQIQRDLGSDIVMIFDECTPYPASHIEADVSMRLSLRWAQRSKEAHGDNPSALFGIVQGGMYADLRKESAEKLQQIGFDGYAIGGLSVGEPKEDMKRVLDATEPLLPKDKPRYLMGVGKPEDIVEAVRRGIDMFDCVIPTRNARNGFLFTHSGVVKIRNAVNKTSLEPIDAQCDCYTCKNYTRAYLHHLDKCGEIQGARLNTIHNLHYYQKLMRDIRQSIAEQRFEQFVVDFYIARGLEVPPL

SEQ ID NO: 61833 - protein, 371 aa, unidentified
  source 1..371: note = Thiomicrospira cyclica
  REGION 1..371: note = tr|F6DD20|F6DD20_THICA Queuine tRNA-ribosyltransferase OS=Thiomicrospira cyclica (strain DSM 14477 / JCM 11371 / ALM1) OX=717773 GN=tgt PE=3 SV=1
MEFELDNQDGRARRGRLKFERGTVETPAFMPVGTYGSVKGMTPEEITQTGAQIILGNTFHLAIRPGTEIIKLHGDLHDFMHWQGPILTDSGGFQVFSLGKMRKITEAGVTFANPVNGSKIFMGPEESMQIQRDLGSDIVMIFDECTPYPATHIEADVSMRLSLRWAQRSKEAHGDNPAALFGIVQGGMYADLRKESAEKLQQIGFDGYAIGGLSVGEPKEDMKRVLDATEPLLPNDKPRYLMGVGKPEDIVEAVRRGIDMFDCVIPTRNARNGFLFTHTGVVKIRNAVHKTSLEPVDAQCDCYTCQNYSRAYLHHLDKCGEIQGARLNTIHNLHYYQTLMRDIRTAISHHQFEQFVVDFYAARGLSVPPLS

SEQ ID NO: 61834 - protein, 370 aa, Thiomicrospira sp.
  REGION 1..370: note = tr|A0A3S9TNH9|A0A3S9TNH9_9GAMM Queuine tRNA-ribosyltransferase OS=Thiomicrospira sp. S5; OX = 1803865 GN=tgt PE=3 SV=1
MKFELDKQDGRARRGRLIFDRGVVETPAFMPVGTYGSVKGMMPEEVADTGAQIILGNTFHLAIRPGTDIIEQHGDLHDFINWPGPILTDSGGFQVFSLGKMRKIVEEGVHFRNPVNGSRLFMGPEESMEIQRKLGSDIVMIFDECTPYPASHEVAAESMRLSLRWAERSKNAHEGNPSALFGIVQGGMYEDLREESIQALMEIGFDGYAIGGLSVGEPKEEMMATLDFTEPHMPTDKPRYMMGVGKPEDIVEAVRRGIDMFDCVIPTRNARNGFLFTHTGVVKIRNAVHKTSLEPLDAKCDCYTCRNYTRAYLHHLDKCGEIQGARLNTIHNLHYYQLLMKGLRDAIASNSLDAFVADFYAERDEAVPPL

SEQ ID NO: 61835 - protein, 370 aa, Thiomicrospira sp.
  REGION 1..370: note = tr|A0A0X3TQ94|A0A0X3TQ94_9GAMM Queuine tRNA-ribosyltransferase OS=Thiomicrospira sp. XS5; OX = 1775636 GN=tgt PE=3 SV=1
MKFELDKQDGRARRGRLIFDRGVVETPAFMPVGTYGSVKGMMPEEVADTGAQIILGNTFHLAIRPGTDIIEQHGDLHDFINWPGPILTDSGGFQVFSLGKMRKIVEEGVHFRNPVNGSRLFMGPEESMEIQRKLGSDIVMIFDECTPYPASHEVAAESMRLSLRWAERSKKAHEGNPSALFGIVQGGMYEDLREESIQALMEIGFDGYAIGGLSVGEPKEEMMATLDFTEPHMPKDRPRYMMGVGKPEDIVEAVRRGVDMFDCVIPTRNARNGFLFTHTGVIKIRNAVHKTSLEPLDAKCDCYTCRNYTRAYLHHLDKCGEIQGARLNTIHNLHYYQLLMKGLRDAIASDSLDAFVADFYAERDEAVPPL

SEQ ID NO: 61836 - protein, 379 aa, Thiomonas arsenitoxydans
  REGION 1..379: note = tr|D6CR15|D6CR15_THIA3 Queuine tRNA-ribosyltransferase OS=Thiomonas arsenitoxydans (strain DSM 22701 / CIP 110005 / 3As) OX=426114 GN=tgt; PE = 3 SV=1
MLQFTVHHTAGQARRGTLTLNHGRIDTPQFMPVGTYGTVKGITPDGLKAAGAQIILGNTFHLWLRPGLDVVRQFGGLHRFIGWDAPILTDSGGFQVWSLGAMRKISEEGVRFASPVNGDKLFLTPEVSMQIQTVLGSDIVMQFDECTPYDVDRAGQKHITTEAEARESMELSLRWAARCKAEFARLENPNALFGIVQGGMFEPLRDASLDGLAALDLPGYAIGGLSVGEPKDDMLRLLRHTAPRLPAHKPRYLMGVGTPEDLVDGVSAGIDLFDCVMPTRNARNGHLFTRFGDLRIRNARFKQDERPLDDTCTCATCRQFSRAYLHHLDRCGEMLFGMLATTHNLHYYLQLMRGMRTALDAEAFDAFVAQFHADRARGV

SEQ ID NO: 61837 - protein, 379 aa, Thiomonas bhubaneswarensis
  REGION 1..379: note = tr|A0A0K6HXM9|A0A0K6HXM9_9BURK Queuine tRNA-ribosyltransferase OS=Thiomonas bhubaneswarensis; OX = 339866 GN=tgt PE=3 SV=1
MLQFTVHHTSGQARRGTLTLNHGVIDTPQFMPVGTYGTVKGITPEGLKAAGAQIILGNTFHLWLRPGLDVVRQFGGLHRFIGWDAPILTDSGGFQVWSLGAMRKISEEGVKFASPVNGDKLFLTPEVSMQIQTVLNSDIVMQFDECTPYDVTRGGQKHITTESEARASMELSLRWAARCKAEFARLENPNALFGIVQGGMFEHLRDASLDGLAALDLPGYAIGGLSVGEPKDDMLRLLRHTAPRLPANKPRYLMGVGTPEDLVAGVAAGIDLFDCVMPTRNARNGHLFTRYGDLRIRNARFKLDERPLDETCTCPTCRQFSRAYLHHLDRCGEMLFGMLATTHNLHYYLQLMRDMRAALDAGTFDAFVTQFRADRARGV

SEQ ID NO: 61838 - protein, 380 aa, Thiomonas delicata
  REGION 1..380: note = tr|A0A238D0M7|A0A238D0M7_THIDL Queuine tRNA-ribosyltransferase OS=Thiomonas delicata OX=364030; GN = tgt PE=3 SV=1
MLQFTIHRTAGHARRGTLTLNHGSIETPQFMPVGTYGTVKGITPAGLKDAGAQIILGNTFHLWLRPGLDVVRAFGGLHRFIGWDAPILTDSGGFQVWSLGRSAKISEEGVRFASPVNGDKLFLTPEVSMQIQTVLDADIVMQFDECTPYDVQRGGETHITTETEARASMELSLRWAARCKAEFARLDNPNALFGIVQGGMFESLRDASLAGLVDLDLPGYAIGGLSVGEPKEDMLRLLRHTAPRLPGHKPRYLMGVGTPEDLVDGVAAGIDLFDCVMPTRNARNGHLFTRFGDLRIRNARFKLDQRPIDETCACPACRQFSRAYLHHLDRCREMLFGMLATAHNLHYYLGLMREMREALDAGRFDDFVERFRRDRARGVA

SEQ ID NO: 61839 - protein, 379 aa, Thiomonas intermedia
  REGION 1..379: note = tr|D5X3U9|D5X3U9_THIK1 Queuine tRNA-ribosyltransferase OS=Thiomonas intermedia (strain K12) OX=75379 GN=tgt PE=3 SV=1
MLQFTVHHTAGQARRGTLTLNHGVIDTPQFMPVGTYGTVKGITPEGLKAAGAQIILGNTFHLWLRPGLDVVRQFGGLHRFIGWDAPILTDSGGFQVWSLGAMRKISEEGVRFASPVNGDKLFLTPEVSMQIQTVLGSDIVMQFDECTPYDVDRAGQKHITTEAEARESMELSLRWAARCKTEFARLKNPNALFGIVQGGMFEPLRDASLDGLTALDLPGHAIGGLSVGEPKDDMLRLLRHTAPRLPAHKPRYLMGVGTPEDLVDGVSAGIDLFDCVMPTRNARNGHLFTRFGDLRIRNARFKQDERPIDDTCTCPTCRQFSRAYLHHLDRCGEMLFGMLATTHNLHYYLQLMRDTRTALDAEAFDAFVAQFHADRARGV

SEQ ID NO: 61840 - protein, 380 aa, Thiomonas sp.
  REGION 1..380: note = tr|A0A259P986|A0A259P986_9BURK Queuine tRNA-ribosyltransferase OS=Thiomonas sp. 15-66-11; OX = 1970452 GN=tgt PE=3 SV=1
MLQFTIHRTAGHARRGTLTLNHGSIETPQFMPVGTYGTVKGITPAGLKDAGAQIILGNTFHLWLRPGLDVVRAFGGLHRFIGWDAPILTDSGGFQVWSLGRSAKISEEGVRFASPVNGDKLFLTPEVSMQIQTVLDADIVMQFDECTPYDVQRGGETHITTETEARASMDLSLRWAARCKAEFARLDNPNALFGIVQGGMFESLRDASLAGLVDLDLPGYAIGGLSVGEPKEDMLRLLRHTAPRLPGHKPRYLMGVGTPEDLVDGVAAGIDLFDCVMPTRNARNGHLFTRFGDLRIRNARFKLDQRPIDETCACPACRQFSRAYLHHLDRCREMLFGMLATAHNLHYYLGLMREMREALDAGRFDDFVERFRRDRARGVA

SEQ ID NO: 61841 - protein, 382 aa, Thiomonas sp.
  REGION 1..382: note = tr|A0A078BDD7|A0A078BDD7_9BURK Queuine tRNA-ribosyltransferase OS=Thiomonas sp. CB2 OX=554131; GN = tgt PE=3 SV=1
MSPMLQFTVHHTAGQARRGTLTLNHGVIDTPQFMPVGTYGTVKGITPDGLKTAGAQIILGNTFHLWLRPGLDVVRQFGGLHRFIGWDAPILTDSGGFQVWSLGAMRKISEEGVRFASPVNGDKLFLTPEVSMQIQTVLGSDIVMQFDECTPYDVDRAGQKHITTEAEARESMELSLRWAARCKTEFARLENPNALFGIVQGGMFEPLRDASLDGLAALDLPGYAIGGLSVGEPKDDMLRLLRHTAPRLPAHKPRYLMGVGTPEDLVDGVSAGIDLFDCVMPTRNARNGHLFTRFGDLRIRNARFKQDERPIDDTCTCATCRQFSRAYLHHLDRCGEMLFGMLATTHNLHYYLQLMRGMRTALDAEAFESFVAQFHADRARGV

SEQ ID NO: 61842 - protein, 376 aa, Thioploca ingrica
  REGION 1..376: note = tr|A0A090AIN8|A0A090AIN8_9GAMM Queuine tRNA-ribosyltransferase OS=Thioploca ingrica OX=40754; GN = tgt PE=3 SV=1
MPIESFQILATEEQARCGCLRLPRGTIETPAFMPVGTYGTVKAMTPEQVRATHADIILCNTFHLMLRPGTAVIRAHGGLHDFIHWTRPILTDSGGFQVFSLGERRKISEAGVTFSSPIDGAKVFLGPEESMAVQRELGADIVMVFDECTPYPATAPQARDSMELSLRWAARSKIAHGDNPAALFGIVQGGMYEPLRQASLAGLMDIDFDGYALGGLSVGEPKAEMQRILNFIAPQLPSDKPRYLMGVGTPTDIVAAVCSGIDMFDCVMPTRNARNGHLFTSQGVVRIRQSRYRYDTNPLDPHCDCYTCQNYSRAYLHHLDKAREILGAHLNTFHNLYYYQTFMRELRQAIMTQQLQSWVRNFYAMQKEKSPPLNYS

SEQ ID NO: 61843 - protein, 373 aa, unidentified
  source 1..373: note = Thiopseudomonas denitrificans
  REGION 1..373: note = tr|A0A4R6TY11|A0A4R6TY11_9GAMM Queuine tRNA-ribosyltransferase OS=Thiopseudomonas denitrificans; OX = 1501432 GN=tgt PE=3 SV=1
MSFMQFELLATDGRARRGRLTFPRGTVETPVFMPVGTYGTVKGMLPRDIKDIGAQIILGNTFHLWLRPGTEVIREHGDLHNFMQWQGPILTDSGGFQVFSLGAMRKIREEGVYFSSPVDGRKVFMGPEESMQVQRELGSDVVMIFDECTPYPADFDVAERSMELSLRWARRSKIAHGDNPSALFGIVQGGMHEALRQRSLEGLCEIGFDGLAIGGLSVGEPKEDMIRILDFLPPLMPPDTPRYLMGVGTPADLVEGVRRGIDMFDCVMPTRNARNGHLFVDTGVVKIRNAVHRHDDSPLDATCDCYTCQNFSRAYLHHLVRCGEMLGSMLNTIHNLRHYQVLMAGLREAIQQGTLSRFVEEFYAKRGLPVPAL

SEQ ID NO: 61844 - protein, 370 aa, unidentified
  source 1..370: note = Thiorhodococcus drewsii
  REGION 1..370: note = tr|G2E2K9|G2E2K9_9GAMM Queuine tRNA-ribosyltransferase OS=Thiorhodococcus drewsii AZ1; OX = 765913 GN=tgt PE=3 SV=1
MEFDLLGQDGLARRARLTFERGTVETPAFMPVGTYGTVKAMTPEELLEVGAEIVLGNTFHLMLRPGTEIIRRLGDLHDFMHWDKPILTDSGGFQVFSLGELRKITEEGVHFQSPIDGSKVFLSPEVSMQVQRELGSDIVMIFDECTPYPADEAQTRASMELSLRWAARSREAHGDNPSALFGIVQGGMHEGPRADSLEGLTRIGFDGYAIGGLSVGEPEEDRLRILDFLSDKMPTDRPRYLMGVGTPEDIVAAVQRGIDMFDCVMPTRNARNGYLFTHQGIVKIRNAANRTDEGPLDPLCDCYTCRHYSRAYLHHLDRCKEILGARLATIHNLHYYQTLMRGLREAIAAGKLDAFVSHFKEQRRPRAVRV

SEQ ID NO: 61845 - protein, 416 aa, Thiorhodospira sibirica
  REGION 1..416: note = tr|G4E196|G4E196_9GAMM Queuine tRNA-ribosyltransferase OS=Thiorhodospira sibirica ATCC 700588 OX=765914 GN=tgt PE=3 SV=1
MVCVCQPRPWLLRRGRFIMHTCCLHGCVCSCSQAMAFNLTSNLSRFFMHRSYLSFESLGSDGPARRGRLHFARGVVDTPAFMPVGTYGTVKAMLPEQLQASGAQIILGNTFHLMLRPGTGIIQAHGDLHDFMHWSGPILTDSGGFQVFSLAKLRQLSEEGVRFRSPVDGSVVWLTPERSMEVQRLLGADVVMIFDECTPYPATYAEAEQSMQLSLRWAQRSRQAHGDHSAALFGIVQGGMYPALRQQSLAGLQAIGFDGYAIGGLSVGETTEERHAVLDALMPQMPTQTPRYLMGVGRPEDIVEAVRRGVDMFDCVIPTRNARNGFLYTRQGVMRIRNSRYQDDTRPIDESCTCYTCRHYSRAYLRHLDKCKEILGAQLNTLHNLHYYQTLMHELREAIAEKRLAAYIQNFYAARA

SEQ ID NO: 61846 - protein, 384 aa, Thiorhodovibrio sp.
  REGION 1..384: note = tr|H8Z0U3|H8Z0U3_9GAMM Queuine tRNA-ribosyltransferase OS=Thiorhodovibrio sp. 970; OX = 631362 GN=tgt PE=3 SV=1
MRFEVLQRDGLARRSRLELPRGSIDTPAFMPVGTYGTVKGLTPEEVRALGAQIILGNSFHLMVRPGTDIISAHGDLHDFMHWDGPILTDSGGFQVFSLGELRKITEQGVHFRSPVDGAKLFMGPEESMAVQRALGADIVMIFDDCTPYPATREQARTSMELSLRWAGRSKVAHGDNPAALFGIVQGGMFTDLRAASLEGLLEMGFDGFAVGGLSVGEPPDQREQVLDHLASLLPADKPHYLMGVGTPLDIIAAVQRGIDMFDCVMPTRNARNGHLFTSQGVVRIRNAVHKTDTGPLDPACDCATCRHYSRAYLHHLDKCNEMLGARLNTLHNLSYYQRLMRELRAAIEQGRLTALARGIAEVYAASRIEKRSAEDGGVRSTRWF

SEQ ID NO: 61847 - protein, 370 aa, Thiothrix caldifontis
  REGION 1..370: note = tr|A0A1H4A3Y4|A0A1H4A3Y4_9GAMM Queuine tRNA-ribosyltransferase OS=Thiothrix caldifontis OX=525918; GN = tgt PE=3 SV=1
MSHMQFDLLATDGNARRGRLTFPRGTVETPAFMPVGTYGTVKAMTPEELQGMGAEIILGNTFHLMLRPGTDIVKLHGDLHGFMHWEKPILTDSGGFQVFSLAEMRKISEEGVRFQSPVNGSKVLMTPESSMQVQRDLGSDIVMIFDECTPFPATPDEARHSMELSLRWAKRSKDAHEGNLSALFGIVQGGMYEELRKVSAHGLLDIGFDGYAIGGLSVGEPKDERDKVLECTLPELPTDRPRYLMGVGKPEDIVEAVKRGVDMFDCVIPTRNARNGFLFTRYGTLKIRNSQYQHDTRPIDEQCGCYTCQHYSRAYLRHLDKCGEILSARLNTIHNLYYYQELMRGIRAAISEGRFEAFVSEFYALRQKND

SEQ ID NO: 61848 - protein, 368 aa, Thiothrix eikelboomii
  REGION 1..368: note = tr|A0A1T4W5V4|A0A1T4W5V4_9GAMM Queuine tRNA-ribosyltransferase OS=Thiothrix eikelboomii OX=92487; GN = tgt PE=3 SV=1
MSHLQFELLKTEGLARRGRLTFPRGVVETPAFMPVGTYGTVKAMTPEELKGIGAQIILGNTFHLMLRPGTEIVRLHGDLHEFMHWDKPILTDSGGFQVFSLAAMRKISEQGVRFQSPVNGNPILMTPESSMQVQRELGSDIVMIFDECTPYPATYAEAKRSMELSLRWAARSKTAHADNPAALFGIVQGGVYADLRLQSAEQLQSLEFDGYAVGGLAVGEPKEERDRILEVTVPQLPADKPHYLMGVGKPEDLVEGVLRGIDMFDCVIPTRNARNAFLFTRYGQLKLRNSQYQHDTRPIDEHCGCYTCQNYSRAYLRHLDKCGEILGARLNTIHNLYYYQELMQGIRSALEADRFAEFVREFYALRAH

SEQ ID NO: 61849 - protein, 369 aa, Thiothrix lacustris
  REGION 1..369: note = tr|A0A1Y1QVY7|A0A1Y1QVY7_9GAMM Queuine tRNA-ribosyltransferase OS=Thiothrix lacustris OX=525917; GN = tgt PE=3 SV=1
MQFDLLTTDGNARRGRLTFPRGTVETPAFMPVGTYGTVKAMTPEELQGIGAEIILGNTFHLMLRPGTEIVQLHGDLHGFMHWEKPILTDSGGFQVFSLAEMRKISEEGVRFQSPVNGAKVLMTPESSMQVQRELGSDIVMIFDECTPFPATPDEARHSMELSLRWAKRSKDAHEGNPSALFGIVQGGMYEDLRKVSAHGLLDIGFDGYAIGGLSVGEPKDERDKVLECTLPELPTDRPRYLMGVGKPEDIVEGVKRGVDMFDCVIPTRNARNGFLFTRYGTLKIRNSQYQHDTRPIDKQCGCYTCQHYSRAYLRHLDKCTEILGARLNTIHNLYYYQELMRDIRAAIAAGAFETFVHDFYALRTAAEDS

SEQ ID NO: 61850 - protein, 368 aa, Thiothrix lacustris
  REGION 1..368: note = tr|A0A1Y1QJ32|A0A1Y1QJ32_9GAMM Queuine tRNA-ribosyltransferase OS=Thiothrix lacustris OX=525917; GN = tgt PE=3 SV=1
MQFNLLATDGAARRGRLTFPRGTVETPAFMPVGTYGTVKAMTPEELQGLGAEIILGNTFHLMLRPGTDIVRLHGDLHGFMHWEKPILTDSGGFQVFSLAEMRKISEEGVRFQSPVNGAKVLMTPESSMQVQRELGSDIVMIFDECTPYPATHKEAQDSMELSLRWAKRSKDAHQGNPSALFGIVQGGMYEELRKVSAHGLLDIGFDGYAIGGLSVGEPKDERDKVLECTLPELPADRPRYLMGVGKPEDIVEAVRRGVDMFDCVIPTRNARNGFLFTRYGTLKIRNSQYQHDTRPLDEQCGCYTCQHYSRAYLRHLDKCGEILGARLNTIHNLYYYQELMRDIRAAIAENRFEAFVRDFYALRQAQVS

SEQ ID NO: 61851 - protein, 370 aa, Thiothrix nivea
  REGION 1..370: note = tr|A0A2G6HN41|A0A2G6HN41_9GAMM Queuine tRNA-ribosyltransferase OS=Thiothrix nivea OX=1031 GN=tgt; PE = 3 SV=1
MQFKLITSTGPARRGQLTFPRGSVQTPAFMPVGTYGTVKAMTPEELAGMGAEIILGNTFHLMLRPGTDIIRAHGDLHDFMHWQQPILTDSGGFQVFSLAEMRKITEEGVYFQSPVDGSRHLMSPESSMQVQRELGSDIVMIFDECTPYPATYDQTRESMLLSLRWAARSKAAHTGNPSALFGIVQGGMYDDLRKQSAQQLQEIGFDGYAIGGLSVGEPKAERDAVLETTVPELPADKPRYLMGVGKPEDIVEGVRRGIDLFDCVIPTRNARNGFLFTRYGTLKIRNAKHQHDTGPIDAQCGCYTCQHYSRSYLRHLDKCGEILGARLNTIHNLYYYQELMRGLRQALDEGQFAEFVQEFYTLRSGDKERL

SEQ ID NO: 61852 - protein, 365 aa, Thiothrix sp.
  REGION 1..365: note = tr|A0A5C7RK57|A0A5C7RK57_9GAMM Queuine tRNA-ribosyltransferase OS=Thiothrix sp. OX=1032 GN=tgt; PE = 3 SV=1
MQFQLLKTEGMARRGRLSFPRGEVETPAFMPVGTYGTVKAMTPEELNGIGAQIILGNTFHLMLRPGTEIVRLHGDLHEFMHWDKPILTDSGGFQVFSLAAMRKISEEGVRFQSPVNGSPILMTPESSMQVQRELGSDIVMIFDECTPYPASHTEAKQSMELSLRWAARSKAAHEGNPSALFGIVQGGVYEDLRLQSAEQLQKIDFDGYAVGGLAVGEPKEDRDRILEATVPHLPANKPHYLMGVGKPEDIVEGVLRGIDMFDCVIPTRNARNAFLFTRYGQLKLRNSQYQQDTRPIDEQCGCYTCQHYSRAYLRHLDKCGEILGARLNTIHNLYYYQELMQGIRAALEAGRLNEFVREFYALRAH

SEQ ID NO: 61853 - protein, 95 aa, Thiothrix sp.
  REGION 1..95: note = tr|A0A432UT33|A0A432UT33_9GAMM tRNA guanosine(34) transglycosylase Tgt (Fragment) OS=Thiothrix sp. OX=1032; GN = tgt PE=4 SV=1
FLYTRWGIIKIRNARYRHDTQPLDSTCACYTCQNYSRAYLRHLDKCGEILGARLNTIHNLFYYQQLMRELRDAIAAGTLAEYIREFYAQQSVSVS

SEQ ID NO: 61854 - protein, 371 aa, unidentified
  source 1..371: note = Thiotrichaceae bacterium
  REGION 1..371: note = tr|A0A2A4WEE8|A0A2A4WEE8_9GAMM Queuine tRNA-ribosyltransferase OS=Thiotrichaceae bacterium; OX = 2030882 GN=tgt PE=3 SV=1
MQFELLGSDGEARRGRLRFERGDVETPAFMPVGTCATVKSMTPESVRETGADIILGNTFHLMLRPGTEIVEAHGGLHHFMNWQRPILTDSGGFQVFSLGKLRKITEEGVTFRSPVNGDKIFLGPEESIAVQRSLGSDVVMIFDECTPHPATEEEARTSMALSLRWADRSKTAHGESTSALFGIIQGGMFESLRDRSLRGLLDIGFDGYAIGGLSVGEPKEDMMRVLSHITPHMPASKPRYLMGVGKPEDIVEAVRRGIDMFDCVMPTRNARNGHLFVHSGVIRIRNAQYRNDTQPLDLGCGCYTCQNYSRAYLRHLAASNEMLGATLNSMHNLFYYQEVMSGLRAAIDAGELELFVAEFYAKRAQAVPPVS

SEQ ID NO: 61855 - protein, 364 aa, unidentified
  source 1..364: note = Thiotrichaceae bacterium
  REGION 1..364: note = tr|A0A2A5G488|A0A2A5G488_9GAMM Queuine tRNA-ribosyltransferase OS=Thiotrichaceae bacterium; OX = 2030882 GN=tgt PE=3 SV=1
MLFKLSKKNDGARRGQLSFDRGTIETPAFMPVGTYGTVKAMTPEELTGTGAEIVLGNTFHLMLRPGTEIIRKHGDLHNFMHWQKPILTDSGGFQVYSLAKMRKITENGVIFNSPVDGRKIELTPEYSMQIQKDLGSDIVMIFDECTPYPATEIEAMESMQLSLRWAERCKTAHQGNPSALFGIVQGGMYETLRHESVAGLTTLDFDGYAIGGLSVGEPMEERNQVLDFTVPKLPVDKPRYLMGVGRPEDIIEAVRRGIDMFDCVIPTRHARTGFLYTSTGILKIRNSRYKDDIRPVDENCQCYTCQNYTRSYLRHLDKCGEILYSRLSTIHNLYYYQQLMREIREAIENERFEEFANEFYAGIQ

SEQ ID NO: 61856 - protein, 372 aa, unidentified
  source 1..372: note = Thiotrichales bacterium
  REGION 1..372: note = tr|A0A259DX08|A0A259DX08_9GAMM Queuine tRNA-ribosyltransferase OS=Thiotrichales bacterium 17-46-47 OX=1970602 GN=tgt PE=3 SV=1
MQFTLLKQQGKARRGRMVFERGVVETPAFMPVGTYGAVKGVSPEEVGDVGAQILLGNTFHLFLRPGLEVIESFGGLHNFMNWQGPILTDSGGFQVFSLGELRKITEQGVKFQSPVDGAKIFIGPEESMHIQTVLGSDIVMIFDECTPYPATHDQARFSMELSLRWAQRSRDAYQGKGALFGIVQGGMYEDLRDISLKGLVDIGFDGYAIGGLSVGEPKADMARILDHTAHQLPTDKARYVMGIGKPEDLVEAVRHGADMFDCVMPTRNARNCHIFTRRGVMKLRNTRYKKDTKPIDPHCSCYACRNFSRGYLHHLDKLRESLGARLNTIHNLHYYQQLMQDIRKALDEDRFDAFVEQFYAEQAMGVDALDVA

SEQ ID NO: 61857 - protein, 369 aa, unidentified
  source 1..369: note = Thiotrichales bacterium
  REGION 1..369: note = tr|A0A1H6FGY5|A0A1H6FGY5_9GAMM Queuine tRNA-ribosyltransferase OS=Thiotrichales bacterium HS_08; OX = 1899563 GN=tgt_2 PE=3 SV=1
MNFTLSHQDQHARRGTLQFARGQVETPAFMPVGTYGTVKGMRPEEVRATGAQIILGNTFHLMLRPGIEIIQQHGGLHGFAHWDGPILTDSGGFQVFSLGKMRKITEAGVTFQSPVDGATVFLDPEISMQVQRALDADIVMVFDECTPHPATWAQAKDSMELSLRWALRSKTAHGDNPHALFGIVQGGMYEDLRDHSLAGLKDIGFDGYAIGGLSVGEPKADMMRILEHLGPQMPTHHPRYLMGVGTPEDLLDAVWRGIDMFDCVMPTRNARNGHLFTRHGTLRIRNHRHKHDTRPLDESCDCYTCQHYSRAYLHHLDKAREMLGSHLNTVHNLHYYQTLMREVRAAIENQHLEAFMRETKALWAAGLPD

SEQ ID NO: 61858 - protein, 367 aa, unidentified
  source 1..367: note = Bathymodiolus puteoserpentis
  REGION 1..367: note = tr|A0A483ALW0|A0A483ALW0_9BACT Queuine tRNA-ribosyltransferase OS=thiotrophic endosymbiont of Bathymodiolus puteoserpentis (Logatchev) OX=343240 GN=tgt; PE = 3 SV=1
MKFKLKNTNDKARRGTMIFARGTVETPAFMPVGTYGTVKAMTPEEVEGIGAQIILGNTFHLSITPGTDVIKAHGDLHDFMHWQGPILTDSGGFQVFSLGDMRKISEAGVDFRSPKDGAKIFMGPEESIKIQSDLGSDIVMIFDECTPYPADKVTAEQSMQLSLRWAQRSKDAHQALGNENALFGIVQGGMYEDLRQQSAKKLIEIDFDGYAIGGLSVGEPKEEMIKVLDFLPEQLPDDKPRYLMGVGTPSDLVEAVERGIDMFDCVMPTRNARNGYLFTSSGIVKIRNAQYKLDTKPLDKRCGCYTCQNYSRSYLHHLQRKNEILGARLNTIHNLYYYQDLMKGMREVIEKGVFAEFKQLFYKMQNE

SEQ ID NO: 61859 - protein, 378 aa, Thiovulum sp.
  REGION 1..378: note = tr|J0LB82|J0LB82_9HELI Queuine tRNA-ribosyltransferase OS=Thiovulum sp. ES OX=1177931; GN = tgt PE=3 SV=1
MEFTVKATDGKARRGILKTAHSTIQTPVFMPVGTVATMKGLDTVDLNQYLKPEIILANTYHLYLKPSHKTVKNMGGLHKFTGFPKSFLTDSGGFQAFSLKDSKTDEVGIHFKSHIDGSKHFFTPEKVVDIQNDLGSDIMMVLDDLIALPAEEKRIRESIERTTRWAKNSLEYFLQKREKGIGLDQNIFAIVQGGTNLNFREKSAKELTGIEYQNRSFDGFAIGGLSVGEPNQAMYDTVEFTAPLLPTDKPRYLMGVGTPEDLIENVYRGIDMFDCVMPTRNARNGTIFTTFGRLSIKASRFKEDSKPIDEKCNCYTCQNYSRSYLNHLFRAKEITYVRLATMHNLHYYLNLMSEIRDAIEKGEFENYRKEFYRLRENS

SEQ ID NO: 61860 - protein, 380 aa, Thorsellia anophelis
  REGION 1..380: note = tr|A0A1I0BZX9|A0A1I0BZX9_9GAMM Queuine tRNA-ribosyltransferase OS=Thorsellia anophelis DSM 18579; OX = 1123402 GN=tgt PE=3 SV=1
MSSSKSKMRYELINTDGKARRGRLHFHRGVVETPAFMPVGTYGTVKGMTPEEVAETGAHILLGNTFHLWLRPGQEVIKAHGDLHDFMQWHGPILTDSGGFQVFSLGAMRKISEEGVSFKHPINGSTIFLSPEKSMEIQFDLGSDVVMIFDECTPYPADREYAAKSMALSLRWSQRSRAKFDELNNPNALFGIIQGGIYEDLRDESLSGLIDIGFDGYAVGGLAVGEPKEDMHRILDYICPKIPEDKPRYLMGVGKPEDLVEGVRRGIDMFDCVMPTRNARNGHLFVSKGVIKIRNAKYKNDTGKLDEECDCYTCKNYTLAYLHHLDKCNEILGARLNTIHNLRYYQRLMSELRTAIEENSLDTYITSFYTKIGKPIPNTK

SEQ ID NO: 61861 - protein, 390 aa, unidentified
  source 1..390: note = Tibeticola sediminis
  REGION 1..390: note = tr|A0A3N4U7R6|A0A3N4U7R6_9BURK Queuine tRNA-ribosyltransferase OS=Tibeticola sediminis OX=1917811; GN = tgt PE=3 SV=1
MLTFELLATDPASHARRGRLTLNHGVVETPIFMPVGTYGTVKGVMPRSLHEMGAQIILGNTFHLWMRPGLDVVRSFGGLHRFEQWHRPILTDSGGFQVWSLGAMRKITEEGVHFASPVNGDKLFMSPEVSMQIQTVLNSDIVMQLDECTPYETSGHVTTEAEARASMEMSLRWAARSKAEFERLENPNALFGIVQGGMFEHLRQESLEALVAMDFPGYAVGGVSVGEPKDEMRRIMAHTPHRLPAHKPRYLMGVGTPEDLVEGVACGVDMFDCVMPTRNARNGTLFTRYGDLKIRNARHKTDPQPIDPSCTCYACAGASGVPWEAGGREGFSRAYVHHLDRCGEMLGPMLTTVHNLHYYLNLMREIRAALDAGGYTEFRQRFAADRARGI

SEQ ID NO: 61862 - protein, 379 aa, Tindallia californiensis
  REGION 1..379: note = tr|A0A1H3NDY6|A0A1H3NDY6_9CLOT Queuine tRNA-ribosyltransferase OS=Tindallia californiensis; OX = 159292 GN=tgt PE=3 SV=1
MKKIFTKTGSSSESLARTGMVETYHGKFETPIFMPVGTQATVKTMTPEELRECEAQIILSNTYHLYMRPGSDLVEKAGGLHRFMNWKHPILTDSGGFQVFSLGHLNKITEEGVTFQSHIDGSRHFISPEKAVEIQNQLGADIMMVFDECVPYPSDHEYVRNSVDRTTRWAKRCMDAHRNQDKQHLFGIVQGGMYHDLRKRSAEALIDLDFPGYGIGGLSVGEPKKIMYDVLDHLMPIMPPDKPRYLMGVGSPDALIHGVLRGVDMFDCVLPTRIARNGTAMTSEGPVIIKNAKHFESWAPLDSDCQCYCCRNYSRAYLRHLFKSNEILGLRLLSIHNISFLLELMKGIRKAIKNDCLIDYCQAFYRRYYQEELVFNFIP

SEQ ID NO: 61863 - protein, 379 aa, Tindallia magadiensis
  REGION 1..379: note = tr|A0A1I3A9W8|A0A1I3A9W8_9CLOT Queuine tRNA-ribosyltransferase OS=Tindallia magadiensis OX=69895; GN = tgt PE=3 SV=1
MKKIFTKTGSSSESLARTGIVETYHGKFETPIFMPVGTQATVKTMTPEELKECEAQIILSNTYHLYMRPGSDLVEKAGGLHRFMNWKHPILTDSGGFQVFSLGHLNKITEEGVTFQSHIDGSRHFISPEKAVEIQNQLGADIMMVFDECIPYPSDHEYVRNSVDRTTRWAKRCIDAHRNQDKQHLFGIVQGGMYHDLRKRSAEALIDLDFPGYGIGGLSVGEPKKIMYDVLDHLMPIMPQDKPRYLMGVGSPDALIHGVLRGVDMFDCVLPTRIARNGTAMTSEGPVIIKNAKHFESWIPLDSDCQCYCCRNYSRAYLRHLFKSNEILGLRLLSIHNISFLLELMKGIRKAIKNDCLIDYCQEFYRRYYQEELVFNLIT

SEQ ID NO: 61864 - protein, 380 aa, Tindallia sp.
  REGION 1..380: note = tr|A0A424Y6H6|A0A424Y6H6_9CLOT Queuine tRNA-ribosyltransferase OS=Tindallia sp. MSAO_Bac2; OX = 2293856 GN=tgt PE=3 SV=1
MAKTIFRKEASSSESFARTGLLQTSHGSVETPIFMPVGTQATVKTMTPEEIETCGAQIILSNTYHLYMRPGSELVEKAGGLHQFMNWKKPILTDSGGFQVFSLGHLNKITEEGVTFQSHIDGSRHFISPEKAVEIQNQLGSDIMMVFDECIPYPSDYQYVLQSVDRTTRWAKRCLDAHRNTDKQHLFAIIQGGMYSELRKRSADALLEMDFPGYGIGGLSVGEPKETMYEVLNDLMPNMPENKPRYLMGVGSPDCLIHGVLRGVDMFDCVLPTRIARNGTAMTSEGPVIIKNAKHFDSWEPLDANCQCYCCRNYSRAYLRHLFKANEILGLRLMTIHNITFLLDLMEKMRQGIREDRLLSFCKDFYRAYYKQELQFNLNP

SEQ ID NO: 61865 - protein, 373 aa, Tissierella creatinini
  REGION 1..373: note = tr|A0A4T9WIF4|A0A4T9WIF4_9FIRM Queuine tRNA-ribosyltransferase OS=Tissierella creatinini OX=43143; GN = tgt PE=3 SV=1
MMGIKFDLLKESQDSKARLGLIHTPHGDIETPIFMPVGTRATVKAMTPEEVKGLGAQIILSNTYHLYLKPGHELVKDAGGLHKFMNWDGPILTDSGGFQVFSLGDLRKIKEEGVEFRSHIDGSKHFLSPEKSIEIQNALGSDIMMAFDECAPYPSSYEYVKQSMERTTRWAKRCKDYHKDWDRQGLFGIVQGGMYKDLREISAKALVEMDFPGYAIGGLSVGEPKEMMCDILDFTTPILPKNKPRYLMGVGTPDYLFEAVIRGIDMADCVLPTRIARNGTVMTSKGKLVIRNGKYAKDFNPLDDECDCYACKNYSRAYIRHLFNVDEILGARLATTHNLRFLIKLMENIRQAIKEDRLMEYRSEFYEKFGYTE

SEQ ID NO: 61866 - protein, 371 aa, Tissierella creatinophila
  REGION 1..371: note = tr|A0A1U7M393|A0A1U7M393_TISCR Queuine tRNA-ribosyltransferase OS=Tissierella creatinophila DSM 6911 OX=1123403 GN=tgt PE=3 SV=1
MAIKFDLIKESKDSKARLGKITTPHGEIETPIFMPVGTRATVKTMTPEEVKDLGAQIILANTYHLYLKPGHELVKEAGGLHKFMNWDGPILTDSGGFQVFSLGDLRKIKEEGVEFRSHIDGSKQFISPEKSIEIQNALGSDIMMCFDECTPYPSTYEYAKESMERTTRWAQRCKEAHKNTDKQSLFGIVQGGMYKDLREKSAKDLVAMDFPGYAIGGVSVGEPKEMMCEILDFTTPLLPKDKPRYNMGVGTPDYLFESVIRGIDMADCVMPTRIARNGTVMTSNGRLVIRNAKYAKDFGKLDPECDCYSCKNYSRAYIRHLFNVDEILGARLATIHNLYFLIKLMENIRTAIKEDRLMEYREEFYKKYGYN

SEQ ID NO: 61867 - protein, 374 aa, Tissierella praeacuta
  REGION 1..374: note = tr|A0A3F3S5R1|A0A3F3S5R1_9FIRM Queuine tRNA-ribosyltransferase OS=Tissierella praeacuta OX=43131; GN = tgt PE=3 SV=1
MAIRFELLKEAKDCKARLGKLYTPHGVIETPIFMPVGTRATVKAMTPEEVKGLGAQIILSNTYHLYLRPGHKLIEEAGGLHKFMNWDGPILTDSGGFQVFSLGDLRKIKEEGVEFRSHIDGSKHFISPEKSIEIQNSLGSDIMMCFDECTPYPATYEYAKHSMERTTRWAKRCKDYHKNWDKQGLFGIVQGGMYKDLREQSAKELVELDFPGYAIGGLSVGEPKELMCELLDFTTPLLPKDKPRYNMGVGTPDYLFESVIRGIDMADCVLPTRIARNGTALTSQGKIVIRNAKYAKDFTPLDPECDCYACTNYSRAYIRHLFNVDEILGARLTTIHNLYFLIKLMENIRKAIKEDRILEYKDEFYKKYGYNDKN

SEQ ID NO: 61868 - protein, 374 aa, Tissierella praeacuta; identical to SEQ ID NO: 61867
  REGION 1..374: note = tr|A0A1M4ZER1|A0A1M4ZER1_9FIRM Queuine tRNA-ribosyltransferase OS=Tissierella praeacuta DSM 18095; OX = 1123404 GN=tgt PE=3 SV=1

SEQ ID NO: 61869 - protein, 374 aa, Tissierella sp.
  REGION 1..374: note = tr|A0A265Q2D8|A0A265Q2D8_9FIRM Queuine tRNA-ribosyltransferase OS=Tissierella sp. P1 OX=1280483; GN = tgt PE=3 SV=1
MAIRFELLKEAKDSKARLGKLYTPHGVIETPIFMPVGTRATVKAMTPEEVKGLGAQIILSNTYHLYLRPGHKLIEEAGGLHRFMNWDGPILTDSGGFQVFSLGDLRKIKEEGVEFRSHIDGSKHFISPEKSIEIQNSLGSDIMMCFDECTPYPATYEYAKHSMERTTRWAKRCKDYHKNWDKQGLFGIVQGGIYKDLREQSAKELVELDFPGYAIGGLSVGEPKELMCEILDFTTPLLPKDKPRYNMGVGTPDYLFESVIRGIDMADCVLPTRIARNGTVLTSQGKLVIRNAKYSRDFTKLDPECDCYACTNYSRAYIRHLFNVDEILGSRLTTIHNLYFLIKLMENIRNAIKEDRLLEYKEEFYKKYGYNDKN

SEQ ID NO: 61870 - protein, 375 aa, unidentified
  source 1..375: note = Tissierellales bacterium
  REGION 1..375: note = tr|A0A3D3QS13|A0A3D3QS13_9FIRM Queuine tRNA-ribosyltransferase OS=Tissierellales bacterium; OX = 2053631 GN=tgt PE=3 SV=1
MAIKYELIKESKETKARLGRIVTPHGEIETPVFMPVGTRATVKTMTPEEVKDLGAKIILSNTYHLYLKPGHDLVKEAGGLHRFMNWNGPILTDSGGFQVFSLGELRKIKEEGVEFRSHIDGSKHFISPETSIDIQNALGSDIMMCFDECVPYPADYEYAKQSMERTTRWAKRCKEHHKDWNTQALFGIIQGGMFRDLREQSAKDLVEMDFCGYAVGGLSVGEPMDVMCEVLDYTTPLLPRDKPRYLMGVRSPDYLFEAVIRGIDMADCVLPTRIARNGTAMTSHGKVVIRNGKYSRDFTPLDPECDCYTCRNYTRAYIRHLFNVDEILALRLTTIHNLYFLIKLMERIREAIKEDRLLELKDEFYKKYGYTQLLE

SEQ ID NO: 61871 - protein, 371 aa, unidentified
  source 1..371: note = Tissierellia bacterium
  REGION 1..371: note = tr|A0A133YUY6|A0A133YUY6_9FIRM Queuine tRNA-ribosyltransferase OS=Tissierellia bacterium KA00581; OX = 1588751 GN=tgt PE=3 SV=1
MLKYELIKKDKFSKARLGKIYTNRGIIETPIFMPVGTRATVKAMNVDELKEIGSQIILGNTYHLYLRPGQEIIRAAGGLHKFMNWDRPILTDSGGFQVFSLGAIRKITEEGVMFRSHIDGSKHFISPEKSMEIQNDLGSDIMMAFDECAPYPASYDYVKNSMERTIRWLKRCKEYHKNTENQALFGIIQGGMYKDLRKISAIETCSMDLPGYAVGGLSVGEPKDVMIEYLNYTTEFMPEDKPRYLMGVGTPDYLFEAVEAGIDMADCVLPTRLGRNGTAITTYGKVVIKNAKYAKDFTPLDETCDCYACKNHTKAYIRHLMNVNEILGARLLSTHNLRFLLKTMENIRQAIREDRFLEYKKEFYKNYGYEK

SEQ ID NO: 61872 - protein, 371 aa, unidentified
  source 1..371: note = Tissierellia bacterium
  REGION 1..371: note = tr|A0A095YLF9|A0A095YLF9_9FIRM Queuine tRNA-ribosyltransferase OS=Tissierellia bacterium S7-1-4; OX = 1284708 GN=tgt PE=3 SV=1
MSFEFEVLKKDDRTKARVGVLKTPHGDIPTPIFMPVGTRATVKTLSNNELLDLNTKIILSNTYHLFLRPGDELIKKAGGLHKFMNWKLPILTDSGGFQVFSLTENRQITEEGVHFRSHIDGSKVFLSPEKSISVQENLGSDIMMAFDECAPYPADYNYIKHSMERTLRWLERCVNAKTRDDQALFGIVQGGMYKDLRKLSAIETCKFDLKGYAVGGLSVGEPIEVLKEMLDTCTDYMPEDKPRYHMGVGSPDYLFESVERGIDMADCVLPTRIARNGAAFTKYGRINLKNAKFTEDFTPIEEDCDCYACRNHTKAYIRHLVMNGEILGGRLLSLHNVRFLLKLMENIRKSVIDGNFLEYKEEFYKNYGYLD

SEQ ID NO: 61873 - protein, 389 aa, Tistlia consotensis
  REGION 1..389: note = tr|A0A1Y6CGR2|A0A1Y6CGR2_9PROT Queuine tRNA-ribosyltransferase OS=Tistlia consotensis USBA 355; OX = 560819 GN=tgt PE=3 SV=1
MSAPATTSGAGLGFELFARDGAARRGRLTTAHGTVETPAFMPVGTVATVKGMMPEQVAATGAEILLGNTYHLMLRPGAERIAALGGLHRFMNWPKPILTDSGGFQVMSLASLRRLDEDGVTFKSHLDGSAHRLTPERAVEIQDLLDSNVTMVLDECTPFPATEEQAASSMRLSMRWAERCKAAFRLRPGYGLFGIVQGGVYPALRHESAAALRGIGFDGYAIGGLAVGEPPETMLAVLQETAPALPAERPRYLMGVGRPQDLVESVRRGVDLFDCVLPTRSGRTGRGYTADGEVNMKNARHRDDPRPLDAACGCPLCSGYSRAYLHHLFRAGEMLGPILLTLHNLTFYQTLMRGLRGAIETGSLEDFAAAFHEAYGRGDLPEYVAPTPA

SEQ ID NO: 61874 - protein, 367 aa, Tistrella mobilis
  REGION 1..367: note = tr|A0A162JZW6|A0A162JZW6_9PROT Queuine tRNA-ribosyltransferase OS=Tistrella mobilis OX=171437; GN = tgt PE=3 SV=1
MAEDGMARRGRIVTAHGAIDTPAFMPVGTAGTVKGLTPEQVAATGAQILLGNTYHLMLRPGAERVDRLGGLHRFMNWPAPILTDSGGFQVMSLAALRKLDDDGVTFRSHLDGSKIRLTPERSIEIQRLLDATITMCFDECTPYPATYDQAASSMRLSMRWAERCRTAFTDRPGYALFGIVQGGVHGDLRAESVERLTEIGFEGYAVGGLAVGEGFELMCSTLDVTTPLMPRDKPRYLMGVGRPQDLVAAVRRGIDMFDCVMPTRSGRTGQAFTRRGPVNIRNARHADDPRPLDDRCGCPACTQYSRAYLHHLHKASEILGAVLLTQHNLWYYQDLMREMRAAIPEGRMEAFAAEFEAGLAAGDIPPL

SEQ ID NO: 61875 - protein, 394 aa, Tistrella mobilis
  REGION 1..394: note = tr|I3TKX4|I3TKX4_TISMK Queuine tRNA-ribosyltransferase OS=Tistrella mobilis (strain KA081020-065) OX=1110502 GN=tgt PE=3 SV=1
MTTTPHDQNPTRAIAGEGAEPRFGYTLMAEDGMARRGRIVTAHGAIDTPAFMPVGTAGTVKGLTPEQVAATGAQILLGNTYHLMLRPGAERVDRLGGLHRFMNWPAPILTDSGGFQVMSLAALRKLDDDGVTFRSHLDGSKIRLTPERSIEIQRLLDATITMCFDECTPYPATYDQAASSMRLSMRWAERCRTAFTDRPGYALFGIVQGGVHGDLRAESVERLTEIGFEGYAVGGLAVGEGFELMCSTLDVTTPLMPRDKPRYLMGVGRPQDLVAAVRRGIDMFDCVMPTRSGRTGQAFTRRGPVNIRNARHADDPRPLDDRCGCPACTQYSRAYLHHLHKSSEILGAVLLTQHNLWYYQDLMRGMRAAIPEGRMEAFAAEFEAGLAEGDIPPL

SEQ ID NO: 61876 - protein, 394 aa, Tistrella sp.
  REGION 1..394: note = tr|A0A2E3ENM3|A0A2E3ENM3_9PROT Queuine tRNA-ribosyltransferase OS=Tistrella sp. OX=2024861 GN=tgt; PE = 3 SV=1
MTTTPHDQNPTRAIAGEGAEPRFGYTLMAEDGMARRGRIVTAHGAIDTPAFMPVGTAGTVKGLTPEQVAATGAQILLGNTYHLMLRPGAERVDRLGGLHRFMNWPAPILTDSGGFQVMSLAALRKLDDDGVTFRSHLDGSKIRLTPERSIEIQRLLDATVTMCFDECTPYPATYDQAASSMRLSMRWAERCRTAFTDRPGYALFGIVQGGVHGDLRAESVERLTEIGFEGYAVGGLAVGEGFELMCSTLDVTTPLMPRDKPRYLMGVGRPQDLVAAVRRGIDMFDCVMPTRSGRTGQAFTRRGPVNIRNARHADDPRPLDDRCGCPACTQYSRAYLHHLHKASEILGAVLLTQHNLWYYQDLMREMRAAIPEGRMEVFAAEFEAGLAAGDIPPL

SEQ ID NO: 61877 - protein, 414 aa, unidentified
  source 1..414: note = Unknown
  REGION 1..414: note = tr|A0A563D8S0|A0A563D8S0_9BACT Queuine tRNA-ribosyltransferase OS=TM7 phylum sp. oral taxon 346; OX = 713049 GN=tgt PE=3 SV=1
MNQPLVFRITHRLPGTLARAGTIETPHGTIQTPAFIVGGTKATVKALTVEQVKACGGQSILANTYHLMQRPGAEIIHKAGGLGKFMDYDGPTFTDSGGFQIFSLGIAYKKGIDAVAHTQKGNAAQAVKSANQLAKVTDQGAQFRSHLDGKYIMMTPESSMELQHAIGADIHMAFDELTAPLAARGTIVKAMQRTHAWAERCLVRHDELNAEHLARGENLQALYGVVQGARDETLRRQSANFLGQRNFDGYGIGGVFQPGEIADVVRWVCETLPEDKPRHLLGLGSQPADLFLGVEYGIDTFDCVAPTRQARNGALYTFDGRINISNARFREDFAPIDAECDCYTCQHHTRAYINHLFRADEILGATLASIHNERFVVSTVDQIRASLLDGTFFDFKRSFLTRYYGDNLPIGVTL

SEQ ID NO: 61878 - protein, 399 aa, unidentified
  source 1..399: note = Unknown
  REGION 1..399: note = tr|A0A563DEQ3|A0A563DEQ3_9BACT Queuine tRNA-ribosyltransferase OS=TM7 phylum sp. oral taxon 348; OX = 671231 GN=tgt PE=3 SV=1
MNQALKFDITHKLAGRLGRTGIIITPHGQIETPAFIPVGTQATLKSLVPEQLKDTGAQACLVNAYHLYLRPGHDVIDEAGGIHKFMNWDKPTFSDSGGFQVMSLGAGFKKVIDMNGEGGNNVTNKKDKLATIDNDGVTFKSHLDGSFHRFTPEISMQIQHGIGADITFAFDELTTLYHNYNYQVESLKYRTHPWAERSLLEHKRLNSVRTHRPPQALFGVVQGANYEDLRRQSAQFLGKMDFDGYGLGGALEKSRIGEIVRWMNEELPEDKPRHMLGISEPDDIFSCIENGADTFDCVSPARVGRNGALYTKNGRINIKRAEFKRDFRPFDEECDCYTCKNYSRAYLHHLFKTGELLSNTLATIHNERFIVRLVDNIRSSIKNNTFYDFKNEFLNNYYQ

SEQ ID NO: 61879 - protein, 373 aa, Tolumonas auensis
  REGION 1..373: note = sp|C4L7L3|TGT_TOLAT Queuine tRNA-ribosyltransferase; OS = Tolumonas auensis (strain DSM 9187 / TA4) OX=595494; GN = tgt PE=3 SV=1
MKFELKKTEGRARRGRLVFDRGVVETPAFMPVGTYGTVKGMTPEEVKDTGAQILLGNTFHLWLRPGQDIMRKHGDLHDFMNWHGPILTDSGGFQVFSLGHIRKIKEEGVHFRNPINGEKIFLSPEKSMEIQNDLGSDVVMIFDECTPYPATHDVAKKSMEMSLRWATRSRQRFDELENKNALFGIIQGGVYEDLRDVSLKGLLDIGFDGYAVGGLAVGEPKEDMHRILKHVCPQIPEDKPRYLMGVGKPEDLVEGVRRGIDMFDCVMPTRNARNGHLFTTDGVVKIRNAKYKDDVTSLDAECDCYTCKNYTKSYLHHLDRCNEMLGARLNTIHNLRYYQRLMQGLRDAIDAGTLDDFVADFYQRQDKPVPSLD

SEQ ID NO: 61880 - protein, 379 aa, unidentified
  source 1..379: note = Tolypothrix bouteillei
  REGION 1..379: note = tr|A0A0C1R7I0|A0A0C1R7I0_9CYAN Queuine tRNA-ribosyltransferase OS=Tolypothrix bouteillei VB521301; OX = 1479485 GN=tgt PE=3 SV=1
MTAQFSFQRLANCSQTKARVGIFSTPHGIVETPRFMPVGTLANVKTITPSQLEETGAQMVLCNTYHLHLQPGEAIVAGGGGLHKFMGWKGPILTDSGGFQVFSLSEMRKISEEGVTFRSPHDGQIINLTPERSIEIQNTLGADVIMAFDECPPYPATRQEVEAATQRTYRWLKRCISAHQRQDQALFGIVQGGVYLDLRSQAALALAELDLPGYAIGGVSVGEPPELISHVVKATAPLLPPEKPRYLMGVGTYREIAIAIASGVDLFDCVIPTRWARHGTAMVQGERWNLKNAKFREDFTPIDNTCPCYACRNFSRAYISHLVRAQEILAYTLLSIHNITELIRFTQKIREAILNDTFAIDFASWLEQGAEDLGLENGD

SEQ ID NO: 61881 - protein, 349 aa, unidentified
  source 1..349: note = Tolypothrix campylonemoides
  REGION 1..349: note = tr|A0A0C2LW46|A0A0C2LW46_9CYAN Queuine tRNA-ribosyltransferase OS=Tolypothrix campylonemoides VB511288 OX=1245935 GN=tgt PE=3 SV=1
MPVGTLANVKTLTPAQLRDTQAQMILCNTYHLHLQPGEAIVAGGGGLHKFMGWNGPILTDSGGFQVFSLSEMRKISEEGVTFRSPHDGQIINLTPERSIEIQNILGADVIMAFDECPPYPASREDVEAATLRTYRWLERCIAAHKRSDQALFGIVQGGVHLDLRSSAAVALAQLDLPGYAIGGVSVGEPPELIAKIVEATAPLLPPEKPRYLMGVGTYREMAIAIASGVDLFDCVIPTRWARHGTAMVQGERWNLKNAQFRQDFTPLDETCPCYTCQNFSRAYLSHLVRSQEILAYTLLSIHNITELIRFTQRIRKAILEDRFATEFAQWLTVESTEDSIEKHSGLIND

SEQ ID NO: 61882 - protein, 332 aa, Tolypothrix sp.; identical to SEQ ID NO: 55476
  REGION 1..332: note = tr|A0A0D6KLC3|A0A0D6KLC3_9CYAN Queuine tRNA-ribosyltransferase OS=Tolypothrix sp. PCC 7601; OX = 1188 GN=tgt PE=3 SV=1

SEQ ID NO: 61883 - protein, 337 aa, Tolypothrix sp.
  REGION 1..337: note = tr|A0A218QT36|A0A218QT36_9CYAN Queuine tRNA-ribosyltransferase OS=Tolypothrix sp. NIES-4075; OX = 2005459 GN=tgt PE=3 SV=1
MPVGTLANVKTLTPAQLKDTGAQMVLSNTYHLHLQPGEGIVAGGGGLHKFMGWNGPMLTDSGGFQVFSLSEMRKITEDGVRFRSPHDGQIINLTPERSIEIQNTLGADVIMAFDECPPYPATRQEVEAATARTYRWLQRCIAAHQRSDQALFGIVQGGVYLDLRSQAAVALAKLDLPGYAIGGVSVGEPPELIANIVQATAPLLPPDKPRYLMGVGTYREMAIAIASGVDLFDCVIPTRWARHGTAMVLGDRWNLKNAKFREDFTPLDETCGCYTCQNFTRAYISHLVRSQEILAYTLLSIHNISELIRFTQKIREAILGDRFTTEFGHWLTPGEMG

SEQ ID NO: 61884 - protein, 332 aa, Tolypothrix tenuis; identical to SEQ ID NO: 51925
  REGION 1..332: note = tr|A0A1Z4MXV4|A0A1Z4MXV4_9CYAN Queuine tRNA-ribosyltransferase OS=Tolypothrix tenuis PCC 7101; OX = 231146 GN=tgt PE=3 SV=1

SEQ ID NO: 61885 - protein, 428 aa, Tomitella sp.
  REGION 1..428: note = tr|A0A516X7A9|A0A516X7A9_9ACTN Queuine tRNA-ribosyltransferase OS=Tomitella sp. HY188 OX=2597660; GN = tgt PE=3 SV=1
MYGHSRGRHPGHVWFDGPVTDTGEFFSVSTRMESGLGRTGRIRTPHGDIRTPAFVAVGTKATVKAVPPESIAELGAQAVLANAYHLYLQPGSDIVEEAGGLGAFMNWPGPTFTDSGGFQVLSLGAGFKKVLAMESVSVQADDVIAAGKERLAHVDDDGVTFKSHLDGSRHRFTPEVSMGIQHRLGADIIFAFDELTTLMNTRGYQEESVERTRRWAQRCLDEHRRLTAERAGKPRQALFGVVQGAQYEDLRRQAAQGLVALRDSEGGGFDGYGIGGALEKRNLGTIVGWVSEELPEDKPRHLLGISEPEDLFVAVENGADTFDCVQPSRVARNAALYAPDGRFNITTARNRRDFGPIDADCDCYTCAHYSRAYLHHLFKAKEHLAATLATIHNERFTVRMVDGIRTAIDRGEYAEYKREVLGRFAGGS

SEQ ID NO: 61886 - protein, 375 aa, Trabulsiella guamensis
  REGION 1..375: note = tr|A0A085AE94|A0A085AE94_9ENTR Queuine tRNA-ribosyltransferase OS=Trabulsiella guamensis ATCC 49490 OX=1005994 GN=tgt PE=3 SV=1
MKFELDTTDGRARRGRLVFDRGVVETPAFMPVGTYGTVKGMTPEEVEATGAQIILGNTFHLWLRPGQEIMKLHGDLHDFMHWKGPILTDSGGFQVFSLGDIRKITEQGVHFRNPINGDPIFLDPETSMEIQYDLGSDIVMIFDECTPYPADWDYAKRSMEMSLRWAKRSRDRFDGLGNKNALFGIIQGSVYEDLRDISVKGLVEIGFDGYAVGGLAVGEPKADMHRILEHVCPQIPADKPRYLMGVGKPEDLVEGVRRGIDMFDCVMPTRNARNGHLFVTDGVVKIRNAVHKSDTSPLDAECDCYTCRNYSRAYLHHLDRCNEILGARLNTIHNLRYYQRLMAGLRKAIEEGKLESFVADFYQRQGRPVPPLNVD

SEQ ID NO: 61887 - protein, 375 aa, Trabulsiella odontotermitis
  REGION 1..375: note = tr|A0A0L0H312|A0A0L0H312_9ENTR Queuine tRNA-ribosyltransferase OS=Trabulsiella odontotermitis; OX = 379893 GN=tgt PE=3 SV=1
MKFELDTTDGRARRGRLVFDRGVVETPAFMPVGTYGTVKGMTPEEVEATGAQIILGNTFHLWLRPGQEIMKLHGDLHDFMQWKGPILTDSGGFQVFSLGDIRKITEQGVHFRNPINGDPIFLDPEKSMEIQYDLGSDIVMIFDECTPYPADWDYAKRSMEMSLRWAKRSRDRFDGLGNKNALFGIIQGSVYEDLRDISVKGLVEIGFDGYAVGGLAVGEPKADMHRILEHVCPQIPADKPRYLMGVGKPEDLVEGVRRGIDMFDCVMPTRNARNGHLFVTDGVVKIRNAVHKSDTSPLDSECDCYTCRNYSRAYLHHLDRCNEILGARLNTIHNLRYYQRLMAGLRKAIEEGKLENFVADFYQRQGRPVPPLNVD

SEQ ID NO: 61888 - protein, 376 aa, Tranquillimonas alkanivorans
  REGION 1..376: note = tr|A0A1I5MM49|A0A1I5MM49_9RHOB Queuine tRNA-ribosyltransferase OS=Tranquillimonas alkanivorans; OX = 441119 GN=tgt PE=3 SV=1
MPERFSYELKATDGKARTGVISTPRGEIRTPAFMPVGTAGTVKAMLPESVRATGADILLGNTYHLMLRPTAERIDRLGGLHRFMNWNRPILTDSGGFQVMSLAELRKLTERGVTFRSHIDGSRHEITPERSMEIQRLLGSDIVMAFDECPALPADRKRIEDSMRLSMRWASRSKEAFGDRPGHALFGIQQGGLEQDLREESAKALRDIGFDGYAVGGLAVGEGQEAMFGVLDFAPDMLPADKPRYLMGVGKPDDIVGAVARGIDMMDCVLPSRSGRTGQAWTRHGVVNIKNARHADDPRPLDEHCTCPACTGYSRAYLHHVFRAGEMISGMLLTWHNLHYYQELMQGMRDAIAAGRFAEFERDFHAQRAEGDIAPL

SEQ ID NO: 61889 - protein, 376 aa, Tranquillimonas sp.
  REGION 1..376: note = tr|A0A438AMC0|A0A438AMC0_9RHOB Queuine tRNA-ribosyltransferase OS=Tranquillimonas sp. M0103; OX = 2486419 GN=tgt PE=3 SV=1
MSDGFSYELHATDGKARTGVIRTPRGDIRTPAFMPVGTAGTVKAMMPESVRETGADILLGNTYHLMLRPGAERVARLGGLHRFMNWDRPILTDSGGFQVMSLSDLRKLTEEGVTFRSHVDGSKHHLSPETSMEIQRLLGSDIVMCFDECPALPATEEQVAASMRMSMRWAQRSRDAFGDRPGHALFGIQQGGVTPALREESARALTEIGFDGYAIGGLAVGEGQEAMFGVLDYAPGMLPVDKPRYLMGVGKPADIVGAVARGVDMMDCVLPSRSGRTGQAFTRRGVVNIKNARHADDARPLDEACTCPACRSYSRAYLHHVFRAGEMISGMLLTWHNLHYFQQIMAGMRAAIAEGRFADWQADFDRGQAQGDIDPI

SEQ ID NO: 61890 - protein, 380 aa, Treponema azotonutricium
  REGION 1..380: note = tr|F5YBN9|F5YBN9_TREAZ Queuine tRNA-ribosyltransferase OS=Treponema azotonutricium (strain ATCC BAA-888 / DSM 13862 / ZAS-9) OX=545695 GN=tgt; PE = 3 SV=1
MGSIFAIDQQDSSCSARTGTLDLPHGKVSTPVFMPVGTNATVKALTREDLKEIGFDIVLSNTYHLYLRPGTEVISAANGLHNFMGWDRNILTDSGGFQVFSLAPFRKITEEGVKFRSHIDGSYHFLSPEKVVEVQALFGSDIQMQLDVCTPWGVERKEAVRALETTSLWMNRAKQAWETELAKGEYKGLFFPIVQGNFFKELREESAKRVIDADCPGIAIGGLSVGESEELFLEFLNYTAALLPKEKPRYVMGIGTPEYILGAIENGIDMFDCVFPTRTGRNGHVFTHKGCFALKKAENTLNFSPIDEECGCKVCRSYSRAYLRHLFKAQEILCSMLASYHNLYFLNDLVLKARRAIGENRFLEFKKEFLGRYEQSEEKI

SEQ ID NO: 61891 - protein, 378 aa, Treponema berlinense
  REGION 1..378: note = tr|A0A1T4NYL8|A0A1T4NYL8_9SPIO Queuine tRNA-ribosyltransferase OS=Treponema berlinense OX=225004; GN = tgt PE=3 SV=1
MMNIFDIKHESSDGKARTGTLHLPHGDVQTPVFMPVGTNATVKALTKDDLDEIGFEIILANTYHLYLRPGSDVIEEAGGLHGFSGWEKNFLTDSGGFQVWSLSKLRKITEEGAMFASNIDGSRHLFTPEKIVDVQAQFNSDIQMQLDVCSGWGIDKKEALHSLEITENWLKRAKSEWLKKQDEGYKGILLPIVQGNFFEDLRIRSAEFVTSMEMPAIAIGGLSVGEPAEVFASMLDFTVNHLPKEKAKYVMGIGTPDYILDAVHSGIDMFDCVLPTRNARNGSYFTHDGKLSIKQERFIHDFGPVDSECNCKVCRNYSRSYLRHLFKEQEILSSMLASYHNLYFLHNMMKEIRLAIEENRFEEYRTNFLKRYHAGNIK

SEQ ID NO: 61892 - protein, 382 aa, Treponema brennaborense
  REGION 1..382: note = tr|F4LM04|F4LM04_TREBD Queuine tRNA-ribosyltransferase OS=Treponema brennaborense (strain DSM 12168 / CIP 105900 / DD5/3) OX=906968 GN=tgt PE=3 SV=1
MTTTPDFFTELHADTSSRARTGIVRLPHGTVKTPVFMPVGTNATVKAMTKDDLSEIGFEIILANTYHLYLRPGVEILEQAGGLHGFSGWNGNFLTDSGGFQVFSLAPFRKITGEGVRFKSHIDGSSHLLTPESVVDLQSRFNSDIQMQLDVCTGFDIPEAKAKEALAVTTDWALRAKNEWLQKRDAGYQGALFPIVQGNFYRDLRAQSAEFVSGLDTPGIAIGGLSVGEPFDVYADMLEYTAQLLPRNKPRYVMGIGTPDYILEAVSNGVDMFDCVLPTRNARNGSYFTRDGTIAIKNARYATDFSPIDSECTCKVCREYSRAYLRHLFKEQEILSSMLASYHNLAFLHTMIAEVRTAIAEDRFASYKAAFLKRFNAGGAAE

SEQ ID NO: 61893 - protein, 379 aa, Treponema bryantii
  REGION 1..379: note = tr|A0A1I3K3P4|A0A1I3K3P4_9SPIO Queuine tRNA-ribosyltransferase OS=Treponema bryantii OX=163; GN = tgt PE=3 SV=1
MSEVLKIFDIKHKNKDSRARTGTVHLPHGDVRTPVFMPVGTNATVKAMPKDFLEEIDFDIILANTYHLFLRPGPDLIKEAGGLHGFSQWKKNFLTDSGGFQVFSLSKLRKITDEGVRFQSHIDGSYHMFTPENVVQTQTKFNSDIQMQLDVCSGWGVERKEAERALKITSDWLLRAKGEWEKQREAGYEGMLFPIVQGNFFEDLRQKSAEFVSSLDMPGIAIGGLSVGEPPAEFTKYLNYTVQYLPEDKPKYVMGIGTPEYILDAVQAGIDMFDCVLPTRNARNGSYFTRRGMLSIKQERWIHDFGPIDPECNCKVCRTYSRSYLRHLFKEQEILSSILASYHNLYFLNNMLKEIRVAIDEDRFEEYRKEFLEKFHTGV

SEQ ID NO: 61894 - protein, 379 aa, Treponema bryantii
  REGION 1..379: note = tr|A0A1H9A8V5|A0A1H9A8V5_9SPIO Queuine tRNA-ribosyltransferase OS=Treponema bryantii OX=163; GN = tgt PE=3 SV=1
MSEVLKIFDIKHKASGSRARTGTIHLPHGDVRTPVFMPVGTNATVKAMPKDFLEEIDFDIILANTYHLFLRPGPDLIKEAGGLHGFSQWKKNFLTDSGGFQVFSLSKLRKITDEGVRFQSHIDGSYHMFTPENVVQTQTKFNSDIQMQLDVCSGWGVERKEAEKALRITSDWLLRAKGEWEKQREAGYEGILFPIVQGNFFEDLRQKSAEFVSSLDMPGIAIGGLSVGEPPAEFTKYLNYTVQYLPEDKPKYVMGIGTPEYILDAVQAGIDMFDCVLPTRNARNGSYFTRRGMLSIKQERWIHDFGPVDPECNCKVCRTYSRSYLRHLFKEQEILSSILASYHNLYFLNNMLKEIRVAIDEDRFEQYRTDFLEKFHQGV

SEQ ID NO: 61895 - protein, 382 aa, unidentified
  source 1..382: note = Treponema caldarium
  REGION 1..382: note = tr|F8F3D2|F8F3D2_TRECH Queuine tRNA-ribosyltransferase OS=Treponema caldarium (strain ATCC 51460 / DSM 7334 / H1) OX=744872 GN=tgt PE=3 SV=1
MSETIFSVVHKDASSKARTGIIQLPHGPVETPVFMPVGTNGTVKAITVDDLHEIGFQIILSNTYHLYLRPGTGVIDAAGGLHRFIHWDKNILTDSGGFQVFSLAPFRKITEGGAKFRSHIDGSYHLLSPERVVEIQSILGSDIQMQLDVCTSYGTNYKDAEKALIITDKWLKRAKSAWEAVTDDGIYQGKLFAIVQGNFYKDLRQRSAELVVAADTPGIAIGGLSVGEPFEVFTEYLQYTTALLPEHKPRYVMGIGTPEFILEAIEQGVDMFDCVFPTRTGRNGLLFTRQGPITIKKGKYEYDFNPIDEECTCKVCRNYSRSYLRHLYRTGEILSSILASYHNLYFLHDLVRSARRAIQENRYTSFKKDFLYSYKSGTSKNE

SEQ ID NO: 61896 - protein, 379 aa, Treponema denticola
  REGION 1..379: note = sp|Q73QK5|TGT_TREDE Queuine tRNA-ribosyltransferase; OS = Treponema denticola (strain ATCC 35405 / CIP 103919 / DSM 14222) OX=243275 GN=tgt PE=3 SV=1
MKEKKEIFTLLHQDAASPARTGVLELPHGKVLTPAFMPVGTAATVKAMTKDDLDEIGFEIILANTYHLFLRPGIEVIKAAGGLHGFSDWKKNFLTDSGGFQVFSLSQLRKITEEGVKFQSHIDGSRQFLSPEIAVELQTGFNSDIQMQLDICSSFGISKTQTLADLKITMNWLDRAFAAWHNTPHEYDGALFPIVQGGFFEDLRLQSLEAILKHEPRGIAIGGLSIGEPKDLYQEYLSFTAKHIPKNKPLYVMGIGTPDYILEAVKNGVDIFDCVLPSRNARNGNLFTHEGAISIKRKEYEFDFNPIDSQCKCKVCRQYTRAYLRHLFRTKEILYSMLATYHNLAFLYSMVQDIREAIQNDSFNDYYKNFLKKYENRLD

SEQ ID NO: 61897 - protein, 379 aa, Treponema denticola
  REGION 1..379: note = tr|A0A0E2EPX2|A0A0E2EPX2_TREDN Queuine tRNA-ribosyltransferase OS=Treponema denticola AL-2; OX = 999426 GN=tgt PE=3 SV=1
MKEKKEIFTLLHQDATSPARTGVLELPHGKVLTPAFMPVGTAATVKAMTKDDLDEIGFEIILANTYHLFLRPGIEVIKAAGGLHGFSGWKKNFLTDSGGFQVFSLSQLRKITEEGVKFQSHIDGSRQFLSPEIAVELQTGFNSDIQMQLDICSSFGISKTQTLADLKITMNWLDRAFAAWHNTPDEYDGALFPIVQGGFFEDLRLQSLEAILKHEPRGIAIGGLSIGEPKDLYQEYLSFTAKHIPKNKPLYVMGIGTPDYILEAVKNGVDIFDCVLPSRNARNGNLFTHEGAISIKRKEYEFDFNPIDSQCKCKVCRQYTRAYLRHLFRTKEILYSMLATYHNLAFLYSMVQDIREAIQNDSFNDYYKNFLKKYENRLD

SEQ ID NO: 61898 - protein, 343 aa, Treponema lecithinolyticum
  REGION 1..343: note = tr|U2K1H2|U2K1H2_TRELE Queuine tRNA-ribosyltransferase OS=Treponema lecithinolyticum ATCC 700332 OX=1321815 GN=tgt PE=3 SV=1
MPVGTNASVKGVSKDDLAEIGFEIILANTYHLYLRPGADILEKAGGLHGFSGWNKNFLTDSGGFQVFSLAPFRKITNEGVRFQSHIDGSRHILTPETVADIQARFNSDIQMQLDVCTGYGITEKKAVEALRITENWARRAKAQWEKRRAEGYEGMLFPIVQGNFFKDLRIQSAEFVASLDLPGIAIGGLSVGEPYELYCEMLAFTASLLPPHKVRYVMGIGTPEYILTAVANGIDMFDCVLPTRNGRNGSYFTKDGPIAIKKACYAADFSPIDSECTCKVCKNYSRAYLHHLYKNNEIAASMLGSYHNLAFLYNMMIEVRSAIREGRFEDYRSAFLSRYGGRK

SEQ ID NO: 61899 - protein, 376 aa, Treponema maltophilum
  REGION 1..376: note = tr|S3L298|S3L298_TREMA Queuine tRNA-ribosyltransferase OS=Treponema maltophilum ATCC 51939 OX=1125699 GN=tgt PE=3 SV=1
MKEIFTCTHNDEHSRARCGFLELPHGTVQTPVFMPVGTNASVKGVTKEDLEEIGFEIILANTYHLYLRPGADILEQAGGLHGFSGWEKNFLTDSGGFQVFSLAPFRKITAEGVRFQSHIDGSKHFLTPEIVVDIQARFASDIQMQLDVCTGYGISEKKALEALRITEDWAKRAFKQSERWRDTGYKGSLFPIVQGNFFKDLRAQSAEFVASLNSAGIAIGGLSVGEPFDVYEEFLSYTASLLPREKPRYVMGIGTPEYILAAVANGIDMFDCVLPTRNGRNGSFFTKDGLIAIKKAQYAADFSPIDPECTCKICKNYSRAYLHHLYKNGEIASSMFGSYHNLAFLYNMMVEVRAAINENRFADYRRTFLQRYGGNR

SEQ ID NO: 61900 - protein, 377 aa, Treponema medium
  REGION 1..377: note = tr|S3K6D7|S3K6D7_TREMD Queuine tRNA-ribosyltransferase OS=Treponema medium ATCC 700293; OX = 1125700 GN=tgt PE=3 SV=1
MRERKNIYTLLHQDAGSSARTGVIRLPHGTVQTPAFMPVGTAATVKGITKDDLHEIGFEIILANTYHLFLRPGMDVIKQAGGLHGFSGWNKNFLTDSGGFQVFSLSQLRKIKEEGVTFQSHIDGSRQFLSPEIAVQVQAAFNSDIQMQLDICSPYGISKKETEKALTLTTAWMHRAVREWDQTEGYEGSLFPIIQGGFFEDLRIRSIESIMECDPHGIAIGGLSVGEPEDVYKEFLAFTAAHVPKQKPLYVMGIGTPDYILEAVKNGVDIFDCVLPSRNARNGNLFTRIGPISIKKKEYEYDFGPIDPSCSCKVCRNYSRAYLRHLFRCKEILYSMLATYHNLAFLHRMVAEIRESITEDRFSEYYRRFLKDYYGRA

SEQ ID NO: 61901 - protein, 376 aa, Treponema pedis
  REGION 1..376: note = tr|S5ZUR0|S5ZUR0_9SPIO Queuine tRNA-ribosyltransferase OS=Treponema pedis str. T A4; OX = 1291379 GN=tgt PE=3 SV=1
MKEKKEIFTTLHKDAGSRARTGILELPHGKVLTPAFMPVGTAASVKAMTKDDLNEIGFQIILANTYHLFLRPGIEVIKSAGGLHGFSGWQKNFLTDSGGFQVFSLSGLRKITEEGVKFQSHIDGSSRFLSPEIAVELQTGFNSDIQMQLDICSAYGITKAETLADLKITMNWLDRAFNAWNNTSETYDGALFPIVQGGFFEDLRLQSLEAVLKHEPRGIAIGGLSIGEPKEKYLEFLEFTAKQIPEKKPVYVMGIGTPDYILEAVKNGVDIFDCVLPSRNARNGSLFTHNGAISIKRKEYEFDFGPIDKKCNCKVCREYSRSYLHHLFRTKEILYSMLATYHNLFFLHNMVCDIRKAIETDSFDEYYHNFLKNYKI

SEQ ID NO: 61902 - protein, 376 aa, unidentified
  source 1..376: note = Treponema phagedenis
  REGION 1..376: note = tr|A0A5C0RL07|A0A5C0RL07_TREPH Queuine tRNA-ribosyltransferase OS=Treponema phagedenis OX=162; GN = tgt PE=3 SV=1
MKIRKIFTECHKDAHTAARTGVIALPHGDLRTPAFMPVGTAGTVKGMTKDDLEEIGFEIILANTYHLFLRPGVEVIKAAGGLHGFTQWKRNFLTDSGGFQVFSLANLRRLSDEGVSFQSHLDGSSFFLSPELVVQLQAGFNSDIQMQLDICSNYGISKEQTEKELGLTSAWVKRAFSEWLKTPAEYQGSLFPIIQGGFYKDLRLRSIETVCELNPNGLAIGGLSVGEPTELYAEMLAFTAEHLPKNKPVYIMGIGTPHYILEAVKNGIDLFDCVLPSRNARNGSLFTRKGPISIKKKEFEYDFNPIDSQCNCKVCRTYSRAYLRHLFRSKEILYSMLGTYHNLAFLYTMVQEIRQAIEEDRFAEYYKNFLAEYTGG

SEQ ID NO: 61903 - protein, 376 aa, unidentified
  source 1..376: note = Treponema phagedenis
  REGION 1..376: note = tr|E7NWI7|E7NWI7_TREPH Queuine tRNA-ribosyltransferase OS=Treponema phagedenis F0421; OX = 754027 GN=tgt PE=3 SV=1
MKIRKIFTECHKDAHTVARTGVIALPHGDLRTPAFMPVGTAGTVKGMTKDDLEEIGFEIILANTYHLFLRPGVEVIKAAGGLHGFTQWKRNFLTDSGGFQVFSLANLRRLSDEGVSFQSHLDGSSFFLSPELVVQLQAGFNSDIQMQLDICSNYGISKEQTEKDLGLTSAWVKRAFSEWLKTPDEYQGSLFPIIQGGFYKDLRLRSIETVCELNPNGLAIGGLSVGEPTELYAEMLAFTAEHLPKNKPVYIMGIGTPHYILEAVKNGIDLFDCVLPSRNARNGSLFTRKGPISIKKKEFEYDFNPIDSQCNCKVCRTYSRAYLRHLFRSKEILYSMLGTYHNLAFLYTMVQEIRQAIEEDRFAEYYKNFLAEYTGG

SEQ ID NO: 61904 - protein, 377 aa, Treponema porcinum
  REGION 1..377: note = tr|A0A1T4LBN3|A0A1T4LBN3_9SPIO Queuine tRNA-ribosyltransferase OS=Treponema porcinum OX=261392; GN = tgt PE=3 SV=1
MNIFSPGHTCKNSKARCGVMHLPHGDVRTPVFMPVGTNGAVKAVSKDDIEEMGFEIILANTYHLFLRPGADLVQEAGGLHGFTKYNGNFLTDSGGFQVFSLSKLRKITPEGARFQSHIDGSYHLFTPENVVQTQVKFNSDIQMQLDVCSGFGVDRKEAVSALEITTDWAKRAIKEWQKEREAGYKGYLFPIVQGNFFEDLRRQSAEFVAGLDSAGIAIGGLSVGEPADEFVHFMNYTNQFLPEEKIKYVMGIGTPEYILEAVAAGIDMFDCVLPTRNARNGSYFTHDGMLSIKQERFTHDFSPLDRECNCKVCRTYSRAYLRHLFKEQEILSSMLASYHNLYFLNNMMKEIRAAIENDTFETYKKSFLERFRAGNIQ

SEQ ID NO: 61905 - protein, 380 aa, Treponema primitia
  REGION 1..380: note = tr|F5YMV3|F5YMV3_TREPZ Queuine tRNA-ribosyltransferase OS=Treponema primitia (strain ATCC BAA-887 / DSM 12427 / ZAS-2) OX=545694 GN=tgt PE=3 SV=1
MEPFFTIHHSDTSCSARTGILALPHGPVSTPVFMPVGTNGTVKAITVDDLSAIGFEIILSNTYHLYLRPGLEVISAAKGLHPFMNWQRNILTDSGGFQVFSLAPFRKIRDQGVEFRSHLDGSTHLLSPEGVVEIQTLLGSDIQMQLDVCTKWGVSYKEAENALGITADWLKRAKQTWVEKADNGYEGKLFAIVQGNFFKELRERSAALAAEADTPGIAIGGLSVGEEGDVFQEYLAYTAALLPREKPRYVMGIGTPQYILEAIEQGIDMFDCVLPTRTGRTGRVFTRRGDISIKRADREFDFSPLDPQCTCKVCREYSRAYMRHLFKTQEILCSMLASYHNLYFLHSLVTDARRAIEENRFLQFKEDFLKQYTELPGMGE

SEQ ID NO: 61906 - protein, 379 aa, Treponema putidum
  REGION 1..379: note = tr|A0A562SC64|A0A562SC64_9SPIO Queuine tRNA-ribosyltransferase OS=Treponema putidum OX=221027; GN = tgt PE=3 SV=1
MKEKKEIFTLLHQDAASPARTGVLDLPHGKVLTPAFMPVGTAATVKAMTKDDLNEIGFEIILANTYHLFLRPGIEVIKAAGGLHGFSGWKKNFLTDSGGFQVFSLSQLRKITEEGVKFQSHIDGSRQFLSPEIAVELQTGFNSDIQMQLDICSSFGISKTQTLADLKITMNWLDRAFAAWHNTPDEYDGALFPIVQGGFFEDLRLQSLEAILKHEPRGIAIGGLSIGEPKDLYQEYLSFTAKHIPKNKPLYVMGIGTPDYILEAVKNGVDIFDCVLPSRNARNGNLFTHEGAISIKRKEYEFDFNPIDSQCKCKVCRQYTRAYLRHLFRTKEILYSMLATYHNLAFLYSMVQDIREAIQNDSFNDYYKNFLKKYENRLE

SEQ ID NO: 61907 - protein, 378 aa, Treponema saccharophilum
  REGION 1..378: note = tr|H7EIF5|H7EIF5_9SPIO Queuine tRNA-ribosyltransferase OS=Treponema saccharophilum DSM 2985 OX=907348 GN=tgt PE=3 SV=1
MENIFDINHESADGMARRGTLHLPHGDVRTPVFMPVGTNATVKALTKDDLEEIGFEIILANTYHLYLRPGSDIIEQAGGLHGFSQWKRNFLTDSGGFQVWSLSKLRKITMKGAEFQSNIDGSRHLFTPEKVVDVQTQFNSDIQMVLDVCTGWGIGKDEALRALDVTENWAARAKEEWLKKRDEGYKGILLPIVQGNFFEDLRIRSAEFVTKLDLPAIAIGGLSVGEPPEIFASMLDFTVRHLPKEKAKYVMGIGTPDYILDAVHSGIDMFDCVLPTRNARNGSYFTHDGPLSIKQKRFERDFSPIDKECGCKVCRTYSRAYLRHLFKEQEILSCTLASYHNLYFLHNMVAEIRAAIDGDRFEQYRSDFLRRYHAGNII

SEQ ID NO: 61908 - protein, 377 aa, Treponema socranskii
  REGION 1..377: note = tr|U1FJQ8|U1FJQ8_TRESO Queuine tRNA-ribosyltransferase OS=Treponema socranskii subsp. socranskii VPI DR56BR1116 = ATCC 35536 OX=1125725 GN=tgt; PE = 3 SV=1
MNIFEVHHTSSDGSARTGLLTLPHGTVRTPVFMPVGTNATVKAVSKESLEEIGFEIILANTYHLFLRPGSDLIKEAGGLHGFSKWQKNFLTDSGGFQVFSLAKLRKIGAEGVAFQSHIDGSRHFFTPENVVETQAKFNSDIQMQLDVCTGWNEGRKEAERALAITTDWAKRALSEWKRETERGYRGFLFPIVQGNFFEDLRKESALFVSSLDTAGIAIGGLSVGEPAEEFARFLQYTVQYLPEAKPKYVMGIGTPEYILEAVASGIDMFDCVLPTRNARNGSYFTHDGMLSIKQERFAHDFSPIDAECTCKVCRTYSRAYLRHLFKEQEILSAMLSSYHNLYFLHAMMGEIRNAIEENRFLEYKRDFLARFGTGTIR

SEQ ID NO: 61909 - protein, 377 aa, Treponema socranskii
  REGION 1..377: note = tr|S3JLM3|S3JLM3_TRESO Queuine tRNA-ribosyltransferase OS=Treponema socranskii subsp. paredis ATCC 35535 OX=1125701 GN=tgt PE=3 SV=1
MNIFEVRRTSSDGSARTGLLTLPHGTVRTPVFMPVGTNATVKAVSKESLEEIGFEIILANTYHLFLRPGPDLIKEAGGLHGFSKWQKNFLTDSGGFQVFSLAKLRKIGAEGVAFQSHIDGSRHFFTPENVVETQAKFNSDIQMQLDVCTGWNEGRKEAERALTITTDWAKRALSAWKRETERGYRGFLFPIVQGNFFEDLRKESALFVSSLDTAGIAIGGLSVGEPAEDFVRFLRYTVQYLPESKPKYVMGIGTPEYILEAVASGIDMFDCVLPTRNARNGSYFTHDGMLSIKQERFARDFSPIDAECTCKVCRTYSRAYLRHLFKEQEILSAMLSSYHNLYFLHAMMGEIRNAIEENRFLEYKRDFLARFGAGTIR

SEQ ID NO: 61910 - protein, 378 aa, Treponema sp.
  REGION 1..378: note = tr|A0A3D0LAN5|A0A3D0LAN5_9SPIO Queuine tRNA-ribosyltransferase OS=Treponema sp. OX=166 GN=tgt; PE = 3 SV=1
MIQNFFEIHHSDSSSRARTAVMHLPHGDVETPVFMPVGTKGTVKAVSKDDLEEIGFEIILANTYHMYLRPGADIVKEAGGLHEFTQWKRNFLTDSGGFQVFSLSSLRKIETGGVTFRSDIDGSKHFFTPENVVQTQAKLNSDIQMQLDVCTGYGVTRKEAEKALKITSSWAERSIKEWKVQTEEGYKGILFPIVQGNFYEDLRKESAEFVSSLDTPGFAIGGLSVGEPSDVYVKMLSHTVQFLPRTKPCYVMGIGTPEYILEAVENGVDMFDCVQPTRVARHGLYFTRHGMLSIKQKRFERDFSPVENTCGCKVCRTYSRAYLRHIFREQEILSSMLASYHNLYFLHQMIKEVRESINEDKFPIYKEEFLKQFQSKDV

SEQ ID NO: 61911 - protein, 378 aa, Treponema sp.
  REGION 1..378: note = tr|A0A352BAU9|A0A352BAU9_9SPIO Queuine tRNA-ribosyltransferase OS=Treponema sp. OX=166 GN=tgt; PE = 3 SV=1
MIQNFFEIHHSDSSSRARTAVMHLPHGDVETPVFMPVGTKGTVKAVSKDDLEEIGFEIILANTYHMYLRPGADIVKEAGGLHEFTQWKRNFLTDSGGFQVFSLSSLRKIETGGVTFRSDIDGSKHFFTPENVVQTQAKLNSDIQMQLDVCTGYGVTRKEAEKALKITSSWAERAIKEWKVQMEEGYKGILFPIVQGNFYEDLRKESAEFVSSLDTPGFAIGGLSVGEPSDVYVKMLSHTVQFLPRTKPCYVMGIGTPEYILEAVENGVDMFDCVQPTRVARHGLYFTRHGMLSIKQKRFERDFSPVENTCGCKVCRTYSRAYLRHIFREQEILSSMLASYHNLYFLHQMIKEVRESINEDKFPIYKEEFLKQFQSKDV

SEQ ID NO: 61912 - protein, 378 aa, Treponema succinifaciens
  REGION 1..378: note = tr|F2NTG3|F2NTG3_TRES6 Queuine tRNA-ribosyltransferase OS=Treponema succinifaciens (strain ATCC 33096 / DSM 2489 / 6091) OX=869209 GN=tgt; PE = 3 SV=1
MIKNFFEIQHENKNSCARTGVVHLAHGNVQTPVFMPVGTKGTVKALTKDDLEEIGFEIILANTYHLYLRPGADIVSEAGGLHGFTKWNRNFLTDSGGFQVWSLSNLRKIENEGVAFRSTIDGSKHFFTPENVVQTQVKLNSDIQMQLDVCSGYGVERREAERAFRLSSDWAVRAINEWKLHSENGYKGILFPIVQGNFFDDLRKESAEFVDSLGTPGLAIGGLSVGEPADVFVEKLKYTVQFLSKNKPRYVMGIGTPEYILDAVSNGIDMFDCVQPTRIARHGLYFHHKGMVSIKQKRFERDFSALDSECNCKVCKTYSRAYLRHIFREQEILSSMLASYHNLYFLHNMILEIRSAIENDKFEEYKKNFLDNFHSNEL

SEQ ID NO: 61913 - protein, 377 aa, unidentified
  source 1..377: note = Treponema vincentii
  REGION 1..377: note = tr|S3L8V9|S3L8V9_9SPIO Queuine tRNA-ribosyltransferase OS=Treponema vincentii F0403; OX = 1125702 GN=tgt PE=3 SV=1
MRERKNIYTLLHQDTGSAARAGVISLPHGTVQTPAFMPVGTAATVKGMTKDDLHEIGFEIILANTYHLFLRPGMDVIKQAGGLHGFSGWNKNFLTDSGGSQVFSLSQLRKIKEEGVTFQSHIDGSRQFLSPEIAVQVQAAFNSDIQMQLDICSPYGISKKETEKALTLTTAWMQRAVREWDRTEGYEGSLFPIIQGGFFEDLRLRSIESIMECDPHGIAIGGLSVGEPEEVYKEFLAFTAAHVPKHKPLYVMGIGTPDYILEAVKNGVDIFDCVLPSRNARNGNLFTRTGSISIKKKEYEYDFGPIDSSCSCKVCRNYSRAYLRHLFRCKEILYSMLATYHNLAFLHRMVAEIRESITEDRFSEYYRSFLKDYYGRI

SEQ ID NO: 61914 - protein, 355 aa, unidentified
  source 1..355: note = Treponema vincentii
  REGION 1..355: note = tr|C8PND3|C8PND3_9SPIO Queuine tRNA-ribosyltransferase OS=Treponema vincentii ATCC 35580; OX = 596324 GN=tgt PE=3 SV=1
MISLPHGTVQTPAFMPVGTAATVKGMTKDDLHEIGFEIILANTYHLFLRPGMDVIKQAGGLHGFSGWDKNFLTDSGGFQVFSLSQLRKIKEEGVTFQSHIDGSRQFLSPEIAVQVQAGFNSDIQMQLDICSPYGIPKKETEKALTLTTAWMHRAVREWDQTEGYEGSLFPIIQGGFFEDLRIRSIESIMECDPHGIAIGGLSVGEPEEVYKEFLAFTAAHVPKHKPLYVMGIGTPDYILEAVKNGVDIFDCVLPSRNARNGNLFTRTGPISIKKKEYEYDFGPIDPSCSCKVCRNYSRAYLRHLFRCKEILYSMLATYHNLAFLHRMVAEIRESITEDRFSEYYRRFLKDYYGRI

SEQ ID NO: 61915 - protein, 392 aa, Trichococcus collinsii
  REGION 1..392: note = tr|A0A143YBM4|A0A143YBM4_9LACT Queuine tRNA-ribosyltransferase OS=Trichococcus collinsii; OX = 157076 GN=tgt PE=3 SV=1
MPDIYKKEVNTLTEPAIRYRLIKKEKHTGARLGEIITPHGTFQTPMFMPVGTLATVKTMSPEELKAMGSQIILSNTYHLWLRPGSDLVEEAGGLHKFMNWDRGILTDSGGFQVFSLSQNRQITEAGVHFRNHLNGSKMFLSPEKAIHIENQLGADIIMSFDECPPYSESYDYIKASVERTTRWAERGLEAHKKPNQQGLFGIIQGAGYKDLRLQSAKELISLDFPGYSIGGLSVGETKEEMNGVLDYLTPVMPEDKPRYLMGVGAPDSLIDGVIRGIDMFDCVLPTRIARNGTCMTSSGRLVIKNAKYERDFRPLDEKCDCYTCKNYTRAYIRHLIKADETFGLRLTSYHNLHFLINLMKNVRQAIMDDNLLEFREAFVEEYGFNVENPKKF

SEQ ID NO: 61916 - protein, 392 aa, Trichococcus flocculiformis
  REGION 1..392: note = tr|A0A143YCY5|A0A143YCY5_9LACT Queuine tRNA-ribosyltransferase OS=Trichococcus flocculiformis; OX = 82803 GN=tgt PE=3 SV=1
MPDIYKKEVNTLTEPAIRYRLIKKEKHTGARLGEIITPHGTFQTPMFMPVGTLATVKTMSPEELKTMGSQIILSNTYHLWLRPGSDLVEEAGGLHKFMNWDRGILTDSGGFQVFSLSQNRQITEAGVHFRNHLNGSKMFLSPEKAIHIENQLGADIIMSFDECPPYSESYDYIKASVERTTRWAERGLEAHKKPDQQGLFGIIQGAGYKDLRLQSARELISLDFPGYSIGGLSVGETKEEMNGVLDYLTPVMPENKPRYLMGVGAPDSLIDGVIRGIDMFDCVLPTRIARNGTCMTSSGRLVIKNAKYERDFRPLDEKCDCYTCKNYTRAYIRHLIKADETFGLRLTSYHNLHFLINLMKNVRQAIMDDNLLEFREAFVEEYGFNVENPKKF

SEQ ID NO: 61917 - protein, 396 aa, unidentified
  source 1..396: note = Trichococcus ilyis
  REGION 1..396: note = tr|A0A143Z2P2|A0A143Z2P2_9LACT Queuine tRNA-ribosyltransferase OS=Trichococcus ilyis OX=640938; GN = tgt PE=3 SV=1
MVYWLPDIYKKEVNALTEPAIRYRLIKKEKHTGARLGEIITPHGTFQTPMFMPVGTLATVKTMSPEELKAMGSQIILSNTYHLWLRPGSNLVEEAGGLHKFMNWDRGILTDSGGFQVFSLSENRQITEAGVHFRNHLNGSKMFLSPEKAIHIENQLGADIIMSFDECPPYSESYDYIKASVERTTRWAERGLEAHKKPDQQGLFGIIQGAGYKDLRLQSAKELISLDFPGYSIGGLSVGETKEEMNGVLDYLTPVMPENKPRYLMGVGAPDSLIDGVIRGIDMFDCVLPTRIARNGTCMTSSGRLVIKNAKYERDFRPLDEKCDCYTCKNYTRAYIRHLFKADETFGLRLTTYHNLHFLINLMNGVRQAIMDDNLLEFREAFMEEYGFNVENPKKF

SEQ ID NO: 61918 - protein, 401 aa, Trichococcus palustris
  REGION 1..401: note = tr|A0A143Y6L2|A0A143Y6L2_9LACT Queuine tRNA-ribosyltransferase OS=Trichococcus palustris; OX = 140314 GN=tgt PE=3 SV=1
MNTIAVVYWLPDIIRKEVNTLTEPAIQYRLIKKEKHTGARLGEIITPHGTFQTPMFMPVGTLATVKTMSPEELDEMGAQIILSNTYHLWLRPGSDLVEEAGGLHKFMNWDKGILTDSGGFQVFSLSENRKITEEGVHFRNHLNGSKMFLSPEKAIHIENQLGADIIMSFDECPPYSESYDYIKASVERTTRWAERGLKAHKKPNEQGLFGIIQGAGYKDLRLQSAKELISLDFPGYSIGGLSVGETKEEMNGVLDYLTPVMPENKPRYLMGVGAPDSLIDGVIRGIDMFDCVLPTRIARNGTCMTSGGRLVIKNAKYERDFRPLDEKCDCYTCRNYTRAYIRHLFKADETFGLRLTTYHNLHFLINLMKNVRQAIMDDNLLEFREAFVEEYGFNKENAPKF

SEQ ID NO: 61919 - protein, 392 aa, Trichococcus pasteurii
  REGION 1..392: note = tr|A0A1W1ICM8|A0A1W1ICM8_9LACT Queuine tRNA-ribosyltransferase OS=Trichococcus pasteurii OX=43064; GN = tgt PE=3 SV=1
MPDIYKKEVNTLTEPAIRYRLIKKEKHTGARLGEIITPHGTFQTPMFMPVGTLATVKTMSPEELKAMGSQIILSNTYHLWLRPGSDLVEEAGGLHKFMNWDRGILTDSGGFQVFSLSENRQITEAGVHFRNHLNGSKMFLSPEKAIHIENQLGADIIMSFDECPPYSESYDYIKASVERTTRWAERGLEAHKKPDQQGLFGIIQGAGYKDLRLQSAKELISLDFPGYSIGGLSVGETKEEMNGVLDYLAPVMPENKPRYLMGVGAPDSLIDGVIRGIDMFDCVLPTRIARNGTCMTSSGRLVIKNAKYERDFRPLDEKCECYTCKNYTRAYIRHLFKADETFGLRLTTYHNLHFLINLMNNVRQAIMDDNLLEFREAFVEEYGFNVENPKKF

SEQ ID NO: 61920 - protein, 392 aa, Trichococcus patagoniensis
  REGION 1..392: note = tr|A0A2T5I7Z8|A0A2T5I7Z8_9LACT Queuine tRNA-ribosyltransferase OS=Trichococcus patagoniensis; OX = 382641 GN=tgt PE=3 SV=1
MPDIYKKEVNTLTEPAIRYRLIKKEKHTGARLGEIITPHGTFQTPMFMPVGTLATVKTMSPEELKTMGSQIILSNTYHLWLRPGSDLVEEAGGLHKFMNWDRGILTDSGGFQVFSLSQNRQITEAGVHFRNHLNGSKMFLSPEKAIHIENQLGADIIMSFDECPPYSESYDYIKASVERTTRWAERGLEAHKKPNQQGLFGIIQGAGYKDLRLQSAKELISLDFPGYSIGGLSVGETKEEMNGVLDYLTPVMPEDKPRYLMGVGAPDSLIDGVIRGIDMFDCVLPTRIARNGTCMTSSGRLVIKNAKYERDFRPLDEKCDCYTCKNYTRAYIRHLIKADETFGLRLTSYHNLHFLINLMNNVRQAIMDDNLLEFREAFVEEYGFNVENPKKF

SEQ ID NO: 61921 - protein, 381 aa, Trichococcus sp.; identical to SEQ ID NO: 60674
  REGION 1..381: note = tr|A0A5C5E8X8|A0A5C5E8X8_9LACT Queuine tRNA-ribosyltransferase OS=Trichococcus sp. SKBG; OX = 2585775 GN=tgt PE=3 SV=1

SEQ ID NO: 61922 - protein, 392 aa, Trichococcus sp.; identical to SEQ ID NO: 61916
  REGION 1..392: note = tr|A0A143YM86|A0A143YM86_9LACT Queuine tRNA-ribosyltransferase OS=Trichococcus sp. ES5 OX=872292; GN = tgt PE=3 SV=1

SEQ ID NO: 61923 - protein, 367 aa, unidentified
  source 1..367: note = Trichodesmium erythraeum
  REGION 1..367: note = tr|Q112A6|Q112A6_TRIEI Queuine tRNA-ribosyltransferase OS=Trichodesmium erythraeum (strain IMS101) OX=203124 GN=tgt PE=3 SV=1
MSQNFSFNSQARCSYTKARAGIFITPHGSINTPRFMPVGTLANVKTLTPAQLEAAGAQMILANTYHLHLQPGESIVAGAGGLHKFMAWNRPILTDSGGFQVFSLGDIRTISEAGVKFRSPHDGSMIDLTPERSIQIQNELGGDVIMAFDECPPYPASWEEVELATNRTYRWLQRCIEAHQRQDQALFGIVQGGVYPELRSIAARQLVDLDLPGYAIGGVSVGEPGELIDHIVKVTTPFLPEDKPRYLMGVGTYREMVRAIAEGIDLFDCVIPTRLGRHGAALVRGERWNLKNARFKEDFRPLDEFCPCYCCQNFSRAYLSHLVRAKEALGYTLLSLHNVTELISFTQRIRDAILKDRFITEFGSWLR

SEQ ID NO: 61924 - protein, 339 aa, unidentified
  source 1..339: note = Trichormus variabilis
  REGION 1..339: note = tr|A0A1Z4KF59|A0A1Z4KF59_ANAVA Queuine tRNA-ribosyltransferase OS=Trichormus variabilis NIES-23; OX = 1973479 GN=tgt PE=3 SV=1
MPVGTLANVKTVTPAQLKETGAQMVLSNTYHLHLQPGEAIVAGGGGLHKFMGWNGPMLTDSGGFQVFSLSEMRKITEEGVTFRSPRDGQIIKLTPERSIEIQNILGADVIMAFDECPPYPANRQEVEAATERTYRWLERCITAHQRQDQALFGIVQGGVYLDLRAKAANTLTELDLPGYAIGGVSVGEPPEMMAQIVQATAPLLPAHKPRYLMGVGTYREMVIAIASGIDLFDCVIPTRWARHGTAMVKGERWNLKNAKFREDFAPIDETCPCYACQNFSRAYISHLVRSQEILAYTLLSIHNITELIRFTQKIREAILSDRFLEEFGHWLNSAETDNR

SEQ ID NO: 61925 - protein, 375 aa, unidentified
  source 1..375: note = Trichormus variabilis
  REGION 1..375: note = tr|A0A3S1ALJ0|A0A3S1ALJ0_ANAVA Queuine tRNA-ribosyltransferase OS=Trichormus variabilis SAG 1403-4b OX=447716 GN=tgt PE=3 SV=1
MTNFSFECLATCSHTKARAGVFYTPHGEVETPRFMPVGTLANVKTITPAQLKDTGAQMVLSNTYHLHLQPGEAIVAGGGGLHKFMGWNGPMLTDSGGFQVFSLSEMRKITEEGVNFRSPHDGQMIKLTPERSIEIQNILGADVIMAFDECPPYPATRQEVEAATDRTYRWLERCIAAHKRSDQALFPIVQGGVYLDLRVQAAEALAKLDMPGYAIGGVSVGEPTELMAQIVQTTAPLLPIDKPRYLMGVGTYREMAIAIASGVDLFDCVIPTRWARHGTAIVSGERWNLKNAKFREDFTPLDETCPCYACQNFSRAYISHLVRSQEILAYTLLSIHNITELIRFTQKIRASILSDRFLDDFGHWLKTPEVGETEA

SEQ ID NO: 61926 - protein, 394 aa, unidentified
  source 1..394: note = Trinickia caryophylli
  REGION 1..394: note = tr|A0A1X7CC80|A0A1X7CC80_TRICW Queuine tRNA-ribosyltransferase OS=Trinickia caryophylli OX=28094; GN = tgt PE=3 SV=1
MTEGHRHHPNAAASTVAGGLRFELIATDGQARRGRLTLNHGVVETPIFMPVGTYGTVKAIQPRELEEIQARIILGNTFHLWLRPGLETIAAHGGLHDFMGWRRPILTDSGGFQVFSLGDLRKITEDGVTFASPINGDKLFLSPEVSMQIQKVLNSDIVMQFDECTPYATDGVPTSHADAAGSMRMSLRWALRSIDEFSRLANPNALFGIVQGGMYEDLREESLAGLAEIGFHGLAVGGLSVGEPKEDMLRILDFIGPRLPADKPHYLMGVGTPEDLVAGVAAGIDMFDCVMPTRNARNGWLFTRFGDVKIRNAVHRNSLRPLDESCGCYTCRHFTRGYLHHLHRVGEILGAQLNTIHNLHYYLELMSEIRTAIETGTFDAFRKRFAEERARGVE

SEQ ID NO: 61927 - protein, 394 aa, unidentified
  source 1..394: note = Trinickia soli
  REGION 1..394: note = tr|A0A2N7W8F1|A0A2N7W8F1_9BURK Queuine tRNA-ribosyltransferase OS=Trinickia soli OX=380675 GN=tgt; PE = 3 SV=1
MTEGHAHEPATAAAAGLNGLKFELLKTDGRARRGRLTLNHGVVETPIFMPVGTYGTVKAIQPRELEEIRAQIILGNTFHLWLRPGLETVAAHGGLHGFMGWRRPILTDSGGFQVFSLGDLRKITEDGVTFASPVNGDKLFLSPEVSMQIQKVLNSDIVMQFDECTPYATDGVPTSHDDAAASMRMSMRWAKRSIDEFNRLGNPNALFGIVQGGMFEDLRDESLAGLSELDFHGLAVGGLSVGEPKEDMLRVLEHIGPKLPAHKPHYLMGVGTPEDLVAGVAAGIDMFDCVMPTRNARNGWLFTRFGDIKIRNATHKNSLRPLDETCGCYTCRHFTRGYLHHLHRVGEILGAQLNTIHNLHYYLELMGEIREAIETGAFEAFRQRFRDERARGVE

SEQ ID NO: 61928 - protein, 395 aa, unidentified
  source 1..395: note = Trinickia sp.
  REGION 1..395: note = tr|A0A4U1IBV6|A0A4U1IBV6_9BURK Queuine tRNA-ribosyltransferase OS=Trinickia sp. 7GSK02 OX=2571161; GN = tgt PE=3 SV=1
MTEGHTRASTPQTHEAPANGLKFDLLTTDGQARRGRLTLNHGVIETPIFMPVGTYGTVKAIQPRELEEIRAQIILGNTFHLWLRPGLDTIAAHGGLHGFMGWKRPILTDSGGFQVFSLGDLRKITEDGVTFASPINGDKLFLSPEVSMQIQKVLNSDIVMQFDECTPYAVNGVPTTRDEAAASMRMSMRWAKRSITEFDRLGNPNALFGIVQGGMFEDLRDESLAGLSEIGFHGLAVGGLSVGEPKEDMMRILNHIGPKLPAGKPHYLMGVGTPEDLVAGVAAGIDMFDCVMPTRNARNGWLFTRFGDIKIRNATHKNSLRPLDETCGCYTCRNFSRGYLHHLHRVGEILGAQLNTIHNLHYYLELMGEMRTAIETHTFDAFRKRFAEDRATGVD

SEQ ID NO: 61929 - protein, 395 aa, unidentified
  source 1..395: note = Trinickia symbiotica
  REGION 1..395: note = tr|A0A2N7WZ28|A0A2N7WZ28_9BURK Queuine tRNA-ribosyltransferase OS=Trinickia symbiotica OX=863227; GN = tgt PE=3 SV=1
MTDGHPNHHDPIASPAAAGGLQFELLATDGQARRGRLTLNHGVVETPIFMPVGTYGTVKAIQPRELEEIQARIILGNTFHLWLRPGLDTVAAHGGLHGFMGWRRPILTDSGGFQVFSLGDLRKITEEGVAFASPVNGDKLFLSPEISMRIQRTLNSDIVMQFDECTPYATDGVPTSHTEAAESMRMSLRWAKRSIDEFERLANPNALFGIVQGGMYEDLRDESLAGLSEIGFHGIAVGGLSVGEPKEEMLRVLAHVGPRLPADKPHYLMGVGTPEDLVAGVAAGIDMFDCVMPTRNARNGWLFTRFGDIKIRNAQHRNTLRPLDECCGCYTCRNFTRGYLHHLHRVGEILGAQLNTIHNLHYYLELMGEMRAAIETQTFDAFRKRFAEERARGTE

SEQ ID NO: 61930 - protein, 376 aa, unidentified
  source 1..376: note = Tritonibacter horizontis
  REGION 1..376: note = tr|A0A132BV37|A0A132BV37_9RHOB Queuine tRNA-ribosyltransferase OS=Tritonibacter horizontis; OX = 1768241 GN=tgt PE=3 SV=1
MAELFNFEMSAQDGKARTGVIHTPRGDIRTPAFMPVGTAATVKAMMPESVRATGADILLGNTYHLMLRPTAERIDRLGGLHKFMNWDRPILTDSGGFQVMSLAGLRKLTEQGVTFKSHIDGSKHELTPERSMEIQRLLGSDIVMCFDECPALPADRDRIAESMRLSMRWAERSRDAFGDRPGHALFGIQQGGLEKDFREESAAALTKVGFDGYAVGGLAVGEGQEAMFSCLDYAPDMLPMDKPRYLMGVGKPDDIVGAVARGIDMMDCVLPSRSGRTGQAFTRHGVVNIKNARHQDDPRPLDEGCSCPACRQYSRAYLHHVFRSNEMISGMLLTWHNLHYFQDIMAGMRESIAAGTFAAWQADFHETRARGDIEPL

SEQ ID NO: 61931 - protein, 404 aa, Tropheryma whipplei
  REGION 1..404: note = tr|Q83GU0|Q83GU0_TROWT Queuine tRNA-ribosyltransferase OS=Tropheryma whipplei (strain Twist) OX=203267 GN=tgt PE=3 SV=1
MLDLPVWGNYITGWSIGRWSMFSVLKQTEYGRTGIISTCNGQIHTPAFIPVATKASIKGVLPEQMKQLGAQGLLANAYHLYLRPGPDTIAAAGGLSRFMSWNGPTFTDSGGFQVMSLGRGGKKVISMEVPDNTWESNIRKTSLIRIDDQGVWFRSHIDGSQHRFTPEESIRVQNKIGADIIFAFDQLTTLDDSRAVQEYALERTRLWAERCLNQHSKEDQALFAVIQGANYRDLREKACRDLGQMGFDGFGIGGALEKSRIREIITWCTRKLPEEKPRHLLGISEPNDLMNAIEAGIDTFDCVSPTRVARNTAFYTPSGRKNLRRKMYRNDFSPLVEGCACYACSNFTRAYIHHLFRAKEMCAATLTSIHNEYFIVSMVDGARKAIDEGYFREYKGKILREYYK

SEQ ID NO: 61932 - protein, 375 aa, Tropicibacter naphthalenivorans
  REGION 1..375: note = tr|A0A0P1GF11|A0A0P1GF11_9RHOB Queuine tRNA-ribosyltransferase OS=Tropicibacter naphthalenivorans; OX = 441103 GN=tgt PE=3 SV=1
MALTSFDLKARDGRARTGVITTPRGEIRTPAFMPVGTAATVKGMLPESVRATGADILLGNTYHLMLRPGAERVARLGGLHKFMNWDRPILTDSGGFQVMSLSELRKLTEKGVTFRSHVDGSKHELTPERSMEIQKLLGSDIVMAFDECPALPADRKRLTDSMRLSMRWAQRSRDAFGDRPGHMLFGIQQGGLEEDLRAESAEALKNIGFDGYAIGGLAVGEGQEAMFGCLDFAPGQLPEDKPRYLMGVGKPEDIVGAVKRGIDMMDCVLPSRSGRTGQAWTPRGQVNLKNARHADDPRPLDENCTCPACTSYSRAYLHHVYRSGEMIAGMLLTWHNLHYYQQLMQGMRDAIEAGTFVAFEADFQATRALGDIERL

SEQ ID NO: 61933 - protein, 375 aa, unidentified
  source 1..375: note = Tropicibacter phthalicicus
  REGION 1..375: note = tr|A0A238JCS8|A0A238JCS8_9RHOB Queuine tRNA-ribosyltransferase OS=Tropicibacter phthalicicus; OX = 1037362 GN=tgt PE=3 SV=1
MAQTSFTLHAQDGQARTGVISTPRGEIRTPAFMPVGTAATVKGMMPESVRETGADILLGNTYHLMLRPGAERIDRLGGLHKFMNWERPILTDSGGFQVMSLSDLRKLTEEGVTFKSHIDGSKHHLTPERSMEIQKLLGSDIVMAFDECPALPADRKRIADSMRLSMRWAQRSRDSFGDRPGHMLFGIMQGGLEQDLREESATALIDIGFDGYAVGGLAVGEGQEAMFGCLDYAPGFLPEDKPRYLMGVGKPDDIVGAVKRGIDMMDCVLPSRSGRTGQAWTRRGQINIKNARHAEDPRPLDENCTCPACRNYSRAYLHHVFKSNEMIAGMLLTWHNLHYFQQIMQEMRDAIAAGTFDAWEAEFHAQRAQGDIEPL

SEQ ID NO: 61934 - protein, 376 aa, Tropicimonas isoalkanivorans
  REGION 1..376: note = tr|A0A1I1G471|A0A1I1G471_9RHOB Queuine tRNA-ribosyltransferase OS=Tropicimonas isoalkanivorans; OX = 441112 GN=tgt PE=3 SV=1
MTPRFSFSLHMTDGKARSGIISTPRGEIRTPAFMPVGTAATVKAMMPESVRATGADVLLGNTYHLMLRPTAERIDRLGGLHKFMNWERPILTDSGGFQVMSLAELRKLTEEGVSFRSHIDGSKHMLTPERSMEIQRLLGSDIVMCFDECPALPASHERIAESMRLSMRWAARSRDAFGDRPGHALFGIQQGGDEEDLRGESAEALRAIGFDGYAVGGLAVGEGQEVMFQVLDYAPDMLPADKPRYLMGVGKPDDIVGAVKRGIDMMDCVLPSRSGRTGQAFTRRGVVNIKNARHQEDPRPLDEGCSCPACRNYSRAYLHHVFRAQEIISSMLLTWHNLHYYQELMQGMREAIAEGRFAAWESTFHAERARGDIDPL

SEQ ID NO: 61935 - protein, 376 aa, unidentified
  source 1..376: note = Tropicimonas sediminicola
  REGION 1..376: note = tr|A0A239DDZ6|A0A239DDZ6_9RHOB Queuine tRNA-ribosyltransferase OS=Tropicimonas sediminicola; OX = 1031541 GN=tgt PE=3 SV=1
MTERFSFSLHATDGRARTGTISTPRGEIRTPAFMPVGTAATVKAMLPESVRATGADVLLGNTYHLMLRPTAERIARLGGLHAFMNWERPILTDSGGFQVMSLAELRKLTEEGVTFRSHIDGSRHMLTPERSMEIQQLLGSDIVMCFDECPALPAEHDRIAESMRLSMRWAQRSRDAFGDRPGHALFGIQQGGDKEDLRGESAEALRAIGFDGYAVGGLAVGEGQEVMFRVLDYAPDMLPEDKPRYLMGVGKPDDIVGAVKRGIDMMDCVLPSRSGRTGQAFTRRGVVNIKNARHQEDPRPLDEHCSCPACRSYSRAYLHHVFRSQEIISSMLLTWHNLHYFQELMQGMRDAIAAGRFADWETDFHAQRAEGDIEAL

SEQ ID NO: 61936 - protein, 376 aa, Tropicimonas sp.
  REGION 1..376: note = tr|A0A4Q3Z225|A0A4Q3Z225_9RHOB Queuine tRNA-ribosyltransferase OS=Tropicimonas sp. IMCC6043; OX = 2510645 GN=tgt PE=3 SV=1
MNETVTFELIATDGKARRGTLRTPRGEIRTPAFMPVGTAATVKAMLPESVRETGADVLLGNTYHLMLRPTAERIARLGGLHRFMNWERPILTDSGGFQVMSLAELRKLTEDGVTFRSHVDGSSHRLTPERSMEIQRLLGSDIVMCFDECTPFPAEEAVARDSMRLSMRWAQRSRDAFGDRPGHALFGIQQGSTFLDQRAESAEALTSIGFDGYAIGGLAVGEGQATMFEVLDHAPAMLPEDRPRYLMGVGKPDDIVGAVARGVDMMDCVLPSRSGRTGQAFTPRGVVNIKNARHQDDPRPLDETCGCPACRSYSRAYLHHVFRAREIISSMLLTWHNLHYYQVLMQDMRAAIEAGRFAAWQSEFHSNRALGDIEPL

SEQ ID NO: 61937 - protein, 416 aa, Truepera radiovictrix
  REGION 1..416: note = tr|D7CQA0|D7CQA0_TRURR Queuine tRNA-ribosyltransferase OS=Truepera radiovictrix (strain DSM 17093 / CIP 108686 / LMG 22925 / RQ-24) OX=649638; GN = tgt PE=3 SV=1
MTYPDFSFTITQERGAARLGRLVTPHGTIDTPAFVAVGTQAAVKTLTPEEVLATGAQVIFTNTYHLYLRPGHDLVAAFGGVHRFMGWGAPVMTDSGGFQVFSLGAGLEHGVGKVANIFPGEAGGVLAGAPVRTARPLMKVSEDGVRFKSHIDGTLHTFTPETSIAVQRALGADIILAFDECTSPLHDEAYTARSAERTHRWAERSLRFFQDHPAVHPYPQALYGIVQGGAFERVRKASARTVAGMDFHGLAIGGNLGKTKAQMRQVLEWTTPELPREKPRHLLGIGEVEDIFGAVERGCDTFDCVSPTRNARNGGVLARFDGEQPLPRFRLNIRNARYARDPRPLEEGCDCYTCTRFSRAYVRHLFKADEQLGQRLATLHNLRFMARLMAQIRESLAAGTFDALKRSWLEPVGLGV

SEQ ID NO: 61938 - protein, 413 aa, unidentified
  source 1..413: note = Trueperaceae bacterium
  REGION 1..413: note = tr|A0A2E2UM63|A0A2E2UM63_9DEIN Queuine tRNA-ribosyltransferase OS=Trueperaceae bacterium; OX = 2026798 GN=tgt PE=3 SV=1
MDRNPLVFEIDAEHGMARSGYLRTSHGVIETPAFVAVGTQGTVKSLAPETVIATGTQVLFANTYHLYLRPGQRVIADHGGLHRFMNWQGPLMTDSGGFQVFSLGAGIEHGIGKIASIFPGEEDTQTNEEGDSLKDRSMVSIEEEGVRFISHIDGSEHLFTPEGSIIVQRDLGADIILAFDECTSPLHEKDYTRASAERTHRWADRCLEAFEATIPRHGYPQALFGVVQGGAYRDTREYSAKIIGKKGFDGIAIGGNLGRTRQDMYRILEWTIPYLPADLPRHLLGIGDVSSIFEAVERGVDTFDCVSPTRNARNGGVLVRFDKGVKLRNFRLNLRNARFANDLAPLEQGCSCYTCQHFTRAYIRHLFRAKEQLAHQLASIHNLNFMARLMSEIRSSLKEGRFGVLKEEWLTFE

SEQ ID NO: 61939 - protein, 409 aa, Trueperella bernardiae
  REGION 1..409: note = tr|A0A0W1KL67|A0A0W1KL67_9ACTO Queuine tRNA-ribosyltransferase OS=Trueperella bernardiae OX=59561; GN = tgt PE=3 SV=1
MFTLESRLDGTLARTGTIHTPHGDIHTPAFIPVGTKATVKSTLPESVKDLGAQAVLSNAYHLYLQPGSDVVDDAGGLGAFMNWPGPTYTDSGGFQVMSLGSGFKKVLSDEFSGKTVADDAVAPGKERLANVDDDGVWFRSHLNGDRHRFTPEISMRIQHELGADIIFAFDELTTLMNSRPYQEEALERTRLWAQRCLAEHKRLTEEREGKPYQQLFGVIQGAQYEDLRRKAARDLGSMEVDGQRFDGFGIGGALEKENLSTITAWVSEELPEDRARHMLGISEPDDFFACVESGADTFDCVNPSRVARNAAIYSPTGRFNITRAEFKRDFTPLVEGCTCYTCRNYTRAYIHHLFKAKEMLSATLCTIHNEHFTVNLVDQIRASIAAGTYWEYKEETLGRFYGSAGPMAK

SEQ ID NO: 61940 - protein, 405 aa, unidentified
  source 1..405: note = Trueperella bialowiezensis
  REGION 1..405: note = tr|A0A448PEC6|A0A448PEC6_9ACTO Queuine tRNA-ribosyltransferase OS=Trueperella bialowiezensis; OX = 312285 GN=tgt PE=3 SV=1
MTFTLGTRLDGQLGRTGTIHTPHGDIHTPAFIPVGTKATVKGVTPEQVGEVGAQAVLANAYHLYLQPGSDVVDAAGGLGAFMNWPGPTYTDSGGFQVMSLGSGFKKVLSEEFSGKRVADDAVAAGKERLANVDDDGVWFRSHLNGDLHRFTPEVSMRIQHELGADIIFAFDELTTLMNSRAYQEEALERTRLWAERCLVAHKQLTEERVDKPYQQLFGVIQGAQYEDLRRKAARDLGAMEVDGQRFDGFGIGGALEKENLATIVGWVCEELPEGRARHMLGISEPDDFFACIENGADTFDCVNPSRVARNAAIYSPDGRFNVTRAEFKRDFSPLVEGCECYTCTHYTKAYMHHLFKAKEILSATLATIHNEYFTVKLVDGIRAAIEDGTYWEFKAEVLGRFYAGK

SEQ ID NO: 61941 - protein, 402 aa, Trueperella pyogenes
  REGION 1..402: note = tr|A0A3Q9GIK3|A0A3Q9GIK3_9ACTO Queuine tRNA-ribosyltransferase OS=Trueperella pyogenes OX=1661; GN = tgt PE=3 SV=1
MFSLEHRLEGTLARTGTIHTPHGDIRTPAFIPVGTKATVKATLPESVKDVGAQAVLSNAYHLYLQPGSDVVDEAGGLGAFMNWDGPTFTDSGGFQVMSLGSGFKKVLSDEFSGKAMADDAVAPGRERLANVDDDGVWFRSHLNGSKHRFTPEVSMRIQHELGADIIFAFDELTTLMNSRSYQEKALERTRLWAERCLVAHKQLTEEREGKPYQQLFGVIQGAQYEDLRRKAARDLGSMEVEGQRFDGFGIGGALEKKNLSTITAWVSEELPEDKARHMLGISEPDDFFACIESGADTFDCVNPSRVARNAAIYSPTGRFNVTRAEFKRDFSPLVEGCGCYTCRHYTKAYIHHLFKAKEMLSSTLCTIHNEHFTVNLVDQIRASIADGTYWEFKKEMLRRFYG

SEQ ID NO: 61942 - protein, 402 aa, Trueperella pyogenes
  REGION 1..402: note = tr|A0A2S0RPU5|A0A2S0RPU5_9ACTO Queuine tRNA-ribosyltransferase OS=Trueperella pyogenes OX=1661; GN = tgt PE=3 SV=1
MFSLEHRLEGTLARTGTIHTPHGDIRTPAFIPVGTKATVKATLPESVKDVGAQAVLSNAYHLYLQPGSDVVDEAGGLGAFMNWDGPTFTDSGGFQVMSLGSGFKKVLSDEFSGKAMADDAVAPGRERLANVDDDGVWFRSHLNGSKHRFTPEISMRIQHELGADIIFAFDELTTLMNSRSYQEKALERTRLWAERCLVTHKQLTEEREGKPYQQLFGVIQGAQYEDLRRKAARDLGSMEVDGHRFDGFGIGGALEKENLSRITAWVSEELPEDRARHMLGISEPDDFFACIESGADTFDCVNPSRVARNAAIYSPMGRFNVTRAEFKRDFSPLVEGCECYTCRHYTKAYIHHLFKAKEMLSSTLCTIHNEHFTVNLVDQIRASIADGTYWEFKKEMLGRFYG

SEQ ID NO: 61943 - protein, 1383 aa, Tsukamurella paurometabola
  REGION 1..1383: note = tr|A0A3P8K0X0|A0A3P8K0X0_TSUPA Queuine tRNA-ribosyltransferase OS=Tsukamurella paurometabola; OX = 2061 GN=tgt_1 PE=3 SV=1
MALFLYRLGRFAYLNRFKVIVAWLLIFAGMLTGGAALKGATVDNFSLPGLPSAKATDIVSENFGDSGGDPFTTASATIVFHAKDGKLTDPAAAAGIDRTIADIKNLTKDQDGQKVSVVQDPELLHNPTGKLDPNALTPEQRSKLEAATAQAKDIASTKTQAQKDADAAATSSVSPDGKTAKITVNFIGKVTDLPDTLSEDITKAREAGEAASNGTLQVEADGSAARGAEDMGMTSEIIGMIVAAIVLIITFASLVAWGLPLLNAIIAVPVAIGGVMIASHFIELGTFPTVLTSMIGLAVTIDYALFIVSRYRHELRRLGATTKEQRAEAAGIAVGTAGTAVIFAGLTVIIALAALAFIGMDFLGQMGVAAAWGVFIAVIVALTLLPALLGLFGSKVFAGRVKGLHPQDTDQGEGRVANGLRWANLVKKVPVVTLVAGVAILGILAIPMKDMKTALPGSGMSEKSTSERQAYDLIADAWGKGANGTLLVAVDGAGAQPNQRLGAYKQIVDQLNSNPAIAPLIANAQLAQLAADNKAATIMVTPKSGPNDDDTKTLVTKLRNMVNGDAGTKARLGVDLGVAGNTAIEMDISEKLGDALWIYLGIVIGLAFLLLLLAFRSILVPLTAVLGFLLSVVATFGVTSAIFTDGALGLIDNTQPLVSFLPIFLIGIVFGLAMDYQVFLVSRMREEFVHTGDATKSVVTGVQYGARVVTAAAIIMISVFASFILNEQVFIKEIGFGLAAAVLLDAFVVRMVIIPSVMTLLGKWAWWLPKWLDKILPNVDIEGEALVAQLGRGDANADTAGFPAPITAEIPVPTEPLVAAGPTDVHARGAARVEPATVNGHVNGVDRPTTAPTAPVPLVPLGKDDEHVTAQAPVYADTEQVAAAAETPATTAPDTGEYPVARPGTPHPDQTVTGPIRARDRTRDEIAQLREQNRAIAAELSALRSDYRSMASRTRLQSEHISDPTRFEIEGRLEGPDGPLGRAGRLLTPHGEMLTPAFIPVGTKATVKTVLPEAVSELGAQAVLANAYHLYLQPGPEIVEQAGGLGAFMNWDGPTFTDSGGFQVMSLGSGFKKVIDMTGGGEELQGDDAIAEGKDRLSRVDDDGVTFLSHLDGTEHRFTPERSMQIQHQLGADVIFAFDELTTLHNTRAYQVESLERTRLWARRCLSEHNWLTAQRHDAISLWGVVQGAQYEDLRRKAARDLRALSEEDRLAGGLGFGGYGIGGALEKANLSTIVRWVNQELEEDKPKHLLGISEPDDIFAAVEQGIDTFDCVSPSRVARNGAIYSLDGRYNVTNSRFKTDFRPLDPETENYTSQYTRAYIHHLFKAKESLAATLCTIHNEQFIVSLVAKIRQSMLDGTYWEFKEEFLGRYYKGTQQHLATSD

SEQ ID NO: 61944 - protein, 1062 aa, Tsukamurella paurometabola
  REGION 1..1062: note = tr|D5USC3|D5USC3_TSUPD tRNA-guanine transglycosylase, various specificities OS=Tsukamurella paurometabola (strain ATCC 8368 / DSM 20162 / JCM 10117 / NBRC 16120 / NC TC 13040) OX=521096 GN=Tpau_0550 PE=3 SV=1
MTATTLENQSPEQAAGVPSGPLTHKQILYILAGLMTGMFLAALDQTIVSTAIRTIADDLSGYQLQVWVTTAYLITSTIVTPLYGKLSDIYGRKPFFMFAITVFVLGSLLCSFSTSMYELAAFRAVQGLGAGGLMSLALTIVGDIVPPRERARYQGYFLAVFGTSSVLGPVLGGVFSGADSILGITGWRWVFLVNVPIGVIALLVVYRVLQLPHTRREGVRIDWVGAFMLAVGIVPLLIVAEQGREWGWGSTKSITCYAVGAGGVLAFIIIEKMMGEDAIIPLRIFRNRIFAQGVLISVVVGAAMFGGISLLPQYFQVVRGASPTVAGFMMLPMVLGLMMGSILAGQMISRTGRYRIYPIIGAVLLTVGMWALHYVTADVRLAAVMAGAALIGFGLGNLMQPLTLAMQNILPPQDMGVSTAAATFFRQIGGTLGVAVFLSVLFSEMPKNMQSRLTDAAADPDYTAALQRAAAGHDGQAAQEFANKLAARDSSAVSGIMSDTSALQKLPSTLVHPFKAGFADSMDTVFLAVTVLSAIGLLLVLFWKSVPLRTAPAMETIEEEVVGAVLAGGPVAEPEPAAAADTAPVSPAPVGAHPPGTTGVGTASRAVARQTRAPGPRTVEPVPPDDDRTAPVRVDPALAEIAELRSQNAELAAELAELRTGYRAIAGHTRLRAVGASDPTGFRIEVQGPGAARTGTLSTPHGEIATPAYLPVAARGAVAGITPEMLAALGVQAVTVDLHELYLQPGTAMIEGAGGIGRAMAWAGPVLGDTGITAVAAAKKTRVTDEGIAFRSRLDGGAHRWDPEEAVRVAHRIGVDIAFAMADPVAATAPRAQLEAGVNRSQQWAARALVEHSWQTADRGDRQSLWAVVTGGADAGLRRAAARGLRRLSEQDVQSGGLGFGGYRIDGVRSAAAEALQLRAATEELDRERPRHLATVATPADLFAAIEAGIDLFDGTAAAEAGREGRVFTRDGVLDLTDPQLRADFRPIDPGADRRGPANPADEFTRAYVNHLFAANEGLAVTLCTLHNEHFFATLAADARRALTDGRYPAFTESFLRRFAKV

SEQ ID NO: 61945 - protein, 1398 aa, Tsukamurella pulmonis
  REGION 1..1398: note = tr|A0A1H1B2L5|A0A1H1B2L5_9ACTN Queuine tRNA-ribosyltransferase OS=Tsukamurella pulmonis OX=47312; GN = tgt PE=3 SV=1
MALFLYRLGRFAYLNRFKVIAVWLLIFVGVLGAGVALSKPTVDNFSLPGLPSEKATNIVSENFGDSGGDPFTTASATIVFHAKDGKLTDPAAAAGIDRTIADIKNLTKKVTENGVERDEPLVKDRELLHNPTGKLDPNALTPDQRAQLEAITAQGKDIASTKSPQQKDADAAATSSVSPDGKTAKITVNFVDKVTDLPKSLSEDITKAREAGESASNGTLQIEADGSAARGEPDLGATSEIIGMIVAAIVLIITFASLVAWGLPLINAIIAVPVAIGGVMLATHFIELGTFPTVLTSMIGLAVTIDYALFIVSRYRHELRRLGATTKEQRAEAAGIAVGTAGTAVIFAGLTVIIALAALAFIGMDFLGQMGVAAAWGVFIAVIVALTLLPALLGLFGSKVFAGRVKGLHPPDTDEGEGRVANGLRWAHLIKKVPVVTLIAGVAVLGILAIPIKDMKTALPGSGMSEKSTSERQAYDLIADAWGKGANGTLLVALDGADAQPNQRLAAYAQIVDKLNTSPELSPLVANAQIAQLAPDNKAATVIVTPKSGPNDDDTQSLVTKIRNMANGDAGTESRLGVDLGVAGSTAIEMDVSEKLGFKISAGGVLPLYLAIVVGLAFVLLLVAFRSIMVPITAALGFLLSVLATFGVTSAIFTDGALGLIDNTQPLVAFLPIFMIGIVFGLAMDYQVFLVSRMREEFVHTGDATQSVVTGVQYGARVVTAAAIIMISVFASFILNEQVFIKEIGFGLAVAVLFDAFIVRLVIIPSVMTLLGKWAWWLPKWLDKILPNVDIEGEALVAQLGRGATADTAAIPAQTTAEIPVPTEQLAPVGATDEYARGAARVESAGVNGHSNGVARPSVAPTAPVPLVPLGKDEPATEPVPAATTDENPVVEVNAPAAELPESVVQDTREYPVARPGVPVPDHTTTGPIRERSRGDRTSDEIAQLREQNKAIAAELSALRSDYRSMTSRTRLQSEHISDPTRFDIDGRLEGPDGPLGRAGRLLTPHGEILTPAFIPVGTKATVKTVMPEAVSDLGAQAVLANAYHLYLQPGPEIVEQAGGLGAFMNWDGPTFTDSGGFQVMSLGSGFKKVIDMGGGEELQGDDAIAEGKDRLSRVDDDGVTFRSHLDGTEHRFTPEVSMQIQHQLGADIIFAFDELTTLHNTRAYQVESLERTRLWARRCLSEHNWLTAQRHDAISLWGVVQGAQYEDLRRKAAKDLRALSEEDRLAGGLGFGGYGIGGALEKANLATIVRWVNQELEEDKPKHLLGISEPDDIFAAIEQGIDTFDCVSPSRVARNGAIYSLDGRYNVTNSRFKTDFRPLDPETENFTSQYTRAYIHHLFKAKESLAATLATIHNEQFIVSLVAKIRASMLDGTYWDFKEEFLGRYYKGTQQHLAKSD

SEQ ID NO: 61946 - protein, 433 aa, Tsukamurella sp.
  REGION 1..433: note = tr|A0A5C5RYL4|A0A5C5RYL4_9ACTN Queuine tRNA-ribosyltransferase OS=Tsukamurella sp. HKU72; OX = 2592068 GN=tgt PE=3 SV=1
MASRTRLQSEHISDPTRFEIEGRLDGPDGPLGRAGRLLTPHGEMLTPAFIPVGTKATVKTVLPEAVSDLGAQAVLANAYHLYLQPGPEIVEQAGGLAAFMNWDGPTFTDSGGFQVMSLGSGFKKVIDMTGGEELQGDDAIAEGKDRLSRVDDDGVTFRSHLDGTEHRFTPEVSMQIQHQLGADVIFAFDELTTLHNSRAYQVESLERTRLWARRCLSEHNWLTAQRHDAISLWGVVQGAQYEDLRRKAARDLRALSEEDRLSGGLGFGGYGIGGALEKANLSTIVRWVNQELEEDKPKHLLGISEPDDIFAAVEQGIDTFDCVSPSRVARNGAIYSLDGRYNVTNSRFKTDFRPLDPETENFTSQYTRAYIHHLFKAKESLAATLCTIHNEQFVVSLVAKIRQSMLDGTYWDFKEEFLGRYYKGTQQHLAKSD

SEQ ID NO: 61947 - protein, 433 aa, Tsukamurella sp.
  REGION 1..433: note = tr|A0A5C5RQS9|A0A5C5RQS9_9ACTN Queuine tRNA-ribosyltransferase OS=Tsukamurella sp. HKU70; OX = 2591848 GN=tgt PE=3 SV=1
MASRTRLQSDHISDPTRFEIDGRLEGPDGPLGRAGRLLTPHGEILTPAFIPVGTKATVKTVMPEAVSDLGAQAVLANAYHLYLQPGPEIVEQAGGLGAFMNWDGPTFTDSGGFQVMSLGSGFKKVIDMNGGEELRGDDAIADGKDRLSRVDDDGVTFRSHLDGTEHRFTPEVSMQIQHQLGADIIFAFDELTTLHNTRAYQVESLERTRLWARRCLSEHNWLTAQRHDAISLWGVVQGAQYEDLRRKAARDLRALSEEDRLSGGLGFGGYGIGGALEKANLSTIVRWVNQELEEGKPKHLLGISEPDDIFAAVEQGIDTFDCVSPSRVARNGAIYSLDGRYNVTNSRFKTDFRPLDPETDNYTSQYTRAYIHHLFKAKESLAATLCTIHNEQFIVSLVAKIRQSMIDGTYWDFKEEFLGRYYKGTQQHLAKSD

SEQ ID NO: 61948 - protein, 1390 aa, Tsukamurella tyrosinosolvens
  REGION 1..1390: note = tr|A0A1H5C6U4|A0A1H5C6U4_TSUTY Queuine tRNA-ribosyltransferase OS=Tsukamurella tyrosinosolvens; OX = 57704 GN=tgt PE=3 SV=1
MALFLYRLGRFAYLNRFKVIVAWLLIFAGMLTGGALLKGATVDNFSLPGLPSAKATDIVSENFGDSGGDPFTTASATIVFHTKDGKLTDPAAAAGIDRTIADLKNLTKDQDGRQVSVVQDPELLHNPTGKLDTDALTPEQRSKLEAVAAQGKDIASTKTQAQKDADAAATSSVSPDGKTAKITVDFVGKVTELPDTLSEDIKKAREAGEAASNGTLQVEADGSAARGAEDMGMTSEIIGMIVAAIVLIITFASLVAWGLPLLNAIIAVPVAIGGVMIASHFIELGTFPTVLTSMIGLAVTIDYALFIVSRYRHELRRLGATTKEQRAEAAGIAVGTAGTAVIFAGLTVIIALAALAFIGMDFLGQMGVAAAWGVFIAVIVALTLLPALLGLFGSKVFAGRVKGLHPQDTDQGEGRVANGLRWANLVKKVPVVTLVAGVAILGILAIPMKDMKTALPGSGMSEKSTSERQAYDLISDAWGKGANGTLLVAVDGAGAQPNQRLGAYKQIVDQLNTNPNIAPLIANAQLAQLAQDNKAATIMVTPKSGPNDDDTKTLVTKLRTMTNGDAGTKARLGVDLGVAGSTAIEMDISEKLGDALWIYLGIVVGLAFLLLLVAFRSILVPLTAVLGFLLSVVATFGVTSAIFTDGALGLIDNTQPLVSFLPIFLIGIVFGLAMDYQVFLVSRMREEFVHTGDATQSVVTGVQYGARVVTAAAIIMISVFASFILNEQVFIKEIGFGLAAAVLLDAFVVRMVLIPSVMMLLGKWAWWLPKWLDKILPNVDIEGEALVAQLGRGDANADTAAIPAPITAEIPVPTEQLVAAGATDVHARGKARVEHAGVNGHTNGTTNGAAHGAELPTAAPTVPVPLPLGKDDEHVTEQAPVYADTEQVATAEADAAEAGAPDTAEYPVARPGVPRPDQTATGPIRPRDRTRDEIAQLREQNKAIAAELSALRSDYRSMASRTRLQSEHISDPTRFEIEGRLEGPDGPLGRAGRLLTPHGEMLTPAFIPVGTKATVKTVLPEAVSELGAQAVLANAYHLYLQPGPEIVEQAGGLGAFMNWDGPTFTDSGGFQVMSLGSGFKKVIDMTGGEELQGDDAIAEGKDRLSRVDDDGVTFLSHLDGTEHRFTPERSMQIQHQLGADVIFAFDELTTLHNTRAYQVESLERTRLWARRCLSEHNWLTAQRHDAISLWGVVQGAQYEDLRRKAARDLRALSEEDRFSGGLGFGGYGIGGALEKANLSTIVRWVNQELEEDKPKHLLGISEPDDIFAAVEQGIDTFDCVSPSRVARNGAIYSLDGRYNVTNSRFKTDFRPLDPDTQNYTSQYTRAYIHHLFKAKEGLAATLCTIHNEQFVVSLVAKIRQSMIDGTYWDFKEEFLGRYYKGTQQHLAKSD

SEQ ID NO: 61949 - protein, 373 aa, unidentified
  source 1..373: note = Tumebacillus algifaecis
  REGION 1..373: note = tr|A0A223CZW6|A0A223CZW6_9BACL Queuine tRNA-ribosyltransferase OS=Tumebacillus algifaecis; OX = 1214604 GN=tgt PE=3 SV=1
MTAIRFELLKTEKHTGARRGRLHTPHGVIETPIFMPVGTLATVKTLSPEELKEIGAQIILSNTYHLWLRPGHDIVKEAGGLHKFMNWDRPILTDSGGFQVFSLSDLRKITEEGVQFRNHLSGEKLFLSPEKAIEIENDLGADIIMAFDECPPYPADRQYLKDSLERTTRWAKRCIAAHQRPDEQALFGIIQGGMDKELRRQSAEELLELDFPGYAVGGLSVGEPKEIMNEVLEFTTPLMPKNKPRYLMGVGSPDDLFEGVIRGIDMFDCVLPTRIARNGTCMTSVGKVVVRNATYARDFGPLDPNCDCYTCKNYSRAYIRHLIKCDEVFGIRLTSIHNVHFLVTMMENIRKAIDEDRLLEYKHAFYESYGYNM

SEQ ID NO: 61950 - protein, 373 aa, unidentified
  source 1..373: note = Tumebacillus avium
  REGION 1..373: note = tr|A0A1Y0IW51|A0A1Y0IW51_9BACL Queuine tRNA-ribosyltransferase OS=Tumebacillus avium OX=1903704; GN = tgt PE=3 SV=1
MAAIRYELLKTEKHTGARRGRLHTPHGVIETPIFMPVGTLATVKTLSPEELKDIGAQIILSNTYHLWLRPGHDIVKEAGGLHKFMNWDRPILTDSGGFQVFSLSDLRKITEEGVQFRNHISGEKLFLTPEKAIEIENDLGADIIMAFDECPPYPADRQYLKDSLERTTRWAKRCIAAHQRPDEQALFGIIQGGMDKELRRQSAEELLELDFPGYAVGGLSVGEPKEIMNEVLEFTTPLMPKDKPRYLMGVGSPDDLFEGVIRGIDMFDCVLPTRIARNGSCMTSVGKVVVRNANYARDFGPLDPNCDCYTCKNYSRAYIRHLIKCDETFGIRLTSIHNVHFLVTMMDNIRKAIDEDRLLEYKHAFYESYGYNM

SEQ ID NO: 61951 - protein, 372 aa, unidentified
  source 1..372: note = Tumebacillus flagellatus
  REGION 1..372: note = tr|A0A074M8D6|A0A074M8D6_9BACL Queuine tRNA-ribosyltransferase OS=Tumebacillus flagellatus; OX = 1157490 GN=tgt PE=3 SV=1
MAVRYELLKTEKHTGARRGRLHTPHGVIETPIFMPVGTLATVKTLSPEELKDNGAQIILSNTYHLWLRPGHEIVKEAGGLHKFMNWDRPILTDSGGFQVFSLSDLRKITEEGVQFRNHLSGEKLFLSPEKAIEIENALGADIIMAFDECPPFPADRQYLKNSLERTTRWAKRCKEAHARPHDQALFGIIQGGMDKELRKQSAEELIELDFPGYAVGGLSVGEPKDIMNEVLEFTTPLMPKDKPRYLMGVGSPDDLFEGVERGIDMFDCVLPTRIARNGTCMTSVGKVVIRNATYQRDFGPLDPNCDCYTCKNYSRAYIRHLIKCDEVFGIRLTTIHNVHFLIKLMDDIRKAIEEDRFVELKKSFYESYGYTL

SEQ ID NO: 61952 - protein, 372 aa, Tumebacillus permanentifrigoris
  REGION 1..372: note = tr|A0A316D618|A0A316D618_9BACL Queuine tRNA-ribosyltransferase OS=Tumebacillus permanentifrigoris; OX = 378543 GN=tgt PE=3 SV=1
MAVRYELIKTDKHTGARRGRLHTPHGTIETPVFMPVGTLATVKTMSPEELKDTGAQIILSNTYHLWLRPGHDIVQEAGGLHKFMNWDRPILTDSGGFQVFSLSDLRKITEEGVTFRNHLSGEKLFLSPEKAIEIENALGADIIMAFDECPPFPADRQYLKESLERTTRWAKRCKAAHAREHDQALFGIIQGGMDKELRRQSAEELLELDFPGYAVGGLSVGEPKDIMNEVLDFTVPLMPTNKPRYLMGVGSPDDLFEGVIRGIDMFDCVLPTRIARNGTCMTSVGKVVVRNATYARDFGPLDPNCDCYTCKNYSRAYIRHLIKCDETFGIRLTSIHNVHFLIKMMGDIREAIEEDRLLELKKSFYESYGYTL

SEQ ID NO: 61953 - protein, 373 aa, Tumebacillus sp.
  REGION 1..373: note = tr|A0A4R2QYW6|A0A4R2QYW6_9BACL Queuine tRNA-ribosyltransferase OS=Tumebacillus sp. BK434; OX = 2512169 GN=tgt PE=3 SV=1
MAAIRFELLKTEKHTGARRGRLHTPHGVIETPIFMPVGTLATVKTLSPEELKQIGAQIILSNTYHLWLRPGHDIVKEAGGLHKFMNWDRPILTDSGGFQVFSLSDLRKITEEGVQFRNHLSGEKLFLSPEKAIEIENDLGADIIMAFDECPPYPADRQYLKDSLERTTRWAKRCIAAHKRPDEQALFGIIQGGMDKELRRQSAEELLELDFPGYAVGGLSVGEPKEIMNEVLEFTTPLMPKNKPRYLMGVGSPDDLFEGVIRGIDMFDCVLPTRIARNGTCMTSVGKVVVRNANYARDYGPLDPNCDCYTCKNYSRAYIRHLIKCDETFGIRLTSIHNVHFLVTMMDNIRKAIDEDRLLEYKHAFYESYGYNM

SEQ ID NO: 61954 - protein, 378 aa, Turicibacter sanguinis
  REGION 1..378: note = tr|D4W4J3|D4W4J3_9FIRM Queuine tRNA-ribosyltransferase OS=Turicibacter sanguinis PC909; OX = 702450 GN=tgt PE=3 SV=1
MAIKYELIHECKQSGARYGKLHTPHGSFETPVFMPVGTLATVKTLSPEELEKMGAKIILANTYHLWLQPGEKIVEEAGGLHKFENWGGAILTDSGGFQVFSLSKLRQISEEGVTFRDHRNGAPLFMSPEISIGVQNSLGADIIMSFDECPPYPATYDYMKDSVERTIRWAERGKNAHKNPDTQALFGIVQGGEFPELRKYCAEKLVEMDFPGYSVGGVSVGEPKDVARKMISYTTPYLPKDKPRYLMGVGSPDDLIDGAILGIDMFDCVLPTRIARHGTAMTSVGRVVIKNKTYERDFTPLDPNCDCYACKNYTKAYIRHLIKANESFGQRLVSYHNLHFLINLMEQIREAIKNDRLLDFKEEFFEQYGLNKPGSRGF

SEQ ID NO: 61955 - protein, 378 aa, Turicibacter sanguinis; identical to SEQ ID NO: 61954
  REGION 1..378: note = tr|A0A173QV48|A0A173QV48_9FIRM Queuine tRNA-ribosyltransferase OS=Turicibacter sanguinis; OX = 154288 GN=tgt PE=3 SV=1

SEQ ID NO: 61956 - protein, 378 aa, Turicibacter sp.
  REGION 1..378: note = tr|A0A0X8G2I2|A0A0X8G2I2_9FIRM Queuine tRNA-ribosyltransferase OS=Turicibacter sp. H121; OX = 1712675 GN=tgt PE=3 SV=1
MAIKYELIHECKQSGARYGKLHTPHGTFETPVFMPVGTLATVKTLSPEELDQMGAKIILANTYHLWLQPGEKIVEEAGGLHKFENWGGAILTDSGGFQVFSLSKLREITEEGVTFRDHRNGAPLFMSPEISIGVQNSLGADIIMSFDECPPYPATFEYMKNSVDRTIRWAERGKKAHKNPETQALFGIVQGGEFPELRKYCAEKLVEMDFPGYSIGGVSVGEPKDVARKMIEYTVPYLPKDKPRYLMGVGSPDDLIDGAIRGIDMFDCVLPTRIARHGTAMTSVGRVVIKNKVYERDFTPLDPNCDCYTCKNYTRSYIRHLIKANESFGQRLVSYHNLHFLINLMEQIREAIRNDRLLDFREEFFEQYGINLPGSRGF

SEQ ID NO: 61957 - protein, 377 aa, unidentified
  source 1..377: note = Turicimonas muris
  REGION 1..377: note = tr|A0A227KR34|A0A227KR34_9BURK Queuine tRNA-ribosyltransferase OS=Turicimonas muris OX=1796652; GN = tgt PE=3 SV=1
MSLTFHLHKTHGKARRGEMHLNHGVVQTPVFMPVGTYGTVKAMSPLELNEIGSQIILGNTFHLWLRPGLEVIEQHGGLHKFMGWEKPILTDSGGFQVFSLGKLRKITEEGVKFASPINGERLFLTPEVSMEIQKVLNSDIAMIFDECTPYEIDGRPATEKEAADSMRLSLRWAERSKNAFVKLQNPNALFGIVQGGMFEKLRDESLEGLMKIGFDGYAIGGLSVGEPKEDMMRILDHMSERMPADKPHYLMGVGTPEDLVEGVKRGIDMFDCVMPTRNARNGWLFTRYGDIKLRNARYKNDLRPLDETCDCYCCRNFSRAYLHHLQKVNEILGARLNTIHNLHFYLNLMQEIRDALDNDTFDEWCEKFAEDRKRGIE

SEQ ID NO: 61958 - protein, 368 aa, Turneriella parva
  REGION 1..368: note = tr|I4B6F2|I4B6F2_TURPD Queuine tRNA-ribosyltransferase OS=Turneriella parva (strain ATCC BAA-1111 / DSM 21527 / NCTC 11395 / H) OX=869212 GN=tgt; PE = 3 SV=1
MKFETLATDGAARAGTLQLRDAKILTPIFMPVGTQATVKAISQDDLEEIGYRLILGNTYHLYLRPGAETLRQAGGIHKFMSWPHAVLTDSGGYQAFSLSKNVKLKDHGVIFRSHLDGSEHIFSPESTISIERDIGADIIMPIDDCAPYPADDKRLKESLARTHRWLAECKKYWLREPRHQHLFGIAQGGVNPLLRADSAKACADLDLPGYAIGGLSVGEPLEYYVPSLAAAIEHLPKEKPRYVMGVGTIPELLNGVALGVDMFDCVLPTRNARNGQVFTSVGKVNLRNLKHAQSDSPIDPECSCKVCKKYSLGYIRHLHKQNEILGLMLSTYHNLYFMHGFMRQMRHAIQAQNFEQFRTHWLRLFAPV

SEQ ID NO: 61959 - protein, 373 aa, unidentified
  source 1..373: note = Tychonema bourrellyi
  REGION 1..373: note = tr|A0A2G4F124|A0A2G4F124_9CYAN Queuine tRNA-ribosyltransferase OS=Tychonema bourrellyi FEM_GT703; OX = 2040638 GN=tgt PE=3 SV=1
MSEKFSFQCQANCSHTKARAGVFTTPHGVLETPKFMPVGTLANVKTLTPAHLKDAGSQMVLANTYHLHLQPGEHIVAGAGGLHKFMAWPGPILTDSGGFQVFSLSQMRTISEEGVTFRSPRDGRMINLTPERSIQIQNELGADVIMAFDECPPYPATRQEVESATDRTYRWLKRCIQAHSRPDQALFGIVQGGVYPDLRSRAANQLIDLDLPGYAIGGVSVGESGDLIAEIVKVTAPLLPPNKPRYLMGIGTYREMAVAVASGVDMFDCVIPTRLARHGTAFVAGGRLSLKNARFREDFAPLDESCPCYTCQNFSRAYLAHLARANEVLGYTLLAIHNVTELIRFTQRMREAIFADRFTEEFGHWLTPAVDRA

SEQ ID NO: 61960 - protein, 377 aa, unidentified
  source 1..377: note = Tyzzerella nexilis
  REGION 1..377: note = tr|B6FR80|B6FR80_9FIRM Queuine tRNA-ribosyltransferase OS=Tyzzerella nexilis DSM 1787; OX = 500632 GN=tgt PE=3 SV=1
MYKLLKRDGLAKRGEFHTVHGVIQTPVFMNVGTAAAIKGAVSTEDLQGIKTQVELSNTYHLHVRPGDQVVKKLGGLHKFMVWDKPILTDSGGFQVFSLAGLRKIKEEGVYFNSHIDGKKIFMGPEESMQIQSNLASTIAMAFDECPSSVATREYIQNSVERTTRWLARCKAEMARLNTLPDTINQHQMLFGINQGGIYEDIRIEHAKEIAKMDLDGYAVGGLAVGESHEEMYRILEAVVPYLPIEKPTYLMGVGTPANILEAVDRGVDFFDCVYPSRNGRHGHVYTNQGKLNLFNAKYELDDAPIEEGCQCPACRTYSRAYIRHLLKAKEMLGMRLCVLHNLYFYNNMMEEIRAAIEAGRYKEYKREKLAGMGIQEV

SEQ ID NO: 61961 - protein, 377 aa, unidentified; identical to SEQ ID NO: 61960
  source 1..377: note = Tyzzerella nexilis
  REGION 1..377: note = tr|A0A413J2R3|A0A413J2R3_9FIRM Queuine tRNA-ribosyltransferase OS=Tyzzerella nexilis OX=29361; GN = tgt PE=3 SV=1

SEQ ID NO: 61962 - protein, 377 aa, unidentified
  source 1..377: note = Tyzzerella sp.
  REGION 1..377: note = tr|A0A1Y4UQC2|A0A1Y4UQC2_9FIRM Queuine tRNA-ribosyltransferase OS=Tyzzerella sp. An114 OX=1965545; GN = tgt PE=3 SV=1
MYKLLKTCGRAKRGEFHTPHGVIQTPVFMNVGTLAAIKGALSTEDLEKIKCQVELSNTYHLHLRPGDEVVKKLGGLHKFMVWDKPILTDSGGFQVFSLTSLRKITEEGVYFNSHIDGRKIFMGPEESMRIQSNLASTIAMAFDECIGIPAERNYVEQSVARTTRWLARSKAEIDRLNNLDDTINKKQMLFGINQGATYADIRIEHAKVISDMDLDGYAIGGLAVGETHEEMYRILEEVVPYLPQNKPTYLMGVGTPENILEAVERGVDFFDCVLPARNGRHANVYTNKGKLNLMNAKYELDDTPIDETCTCPTCQRYTKAYIRHLFKAKEMLAMRLCVMHNLHFFNTMMEEIRDAIENGTFAEYKKAKLEGFKENGK

SEQ ID NO: 61963 - protein, 377 aa, unidentified
  source 1..377: note = Tyzzerella sp.
  REGION 1..377: note = tr|A0A352UQY7|A0A352UQY7_9FIRM Queuine tRNA-ribosyltransferase OS=Tyzzerella sp. OX=2053632; GN = tgt PE=3 SV=1
MYKVLKKCGRAKRAEFHTPHGVIQTPVFMNVGTAGAIKGAVSTEDLEQLKCQVELSNTYHLHLRPGDKLIKEMGGLHKFMVWDKPILTDSGGFQVFSLGLLRKIKEEGVYFSSHIDGRKIFMGPEESMQIQSNLGSTIAMAFDECIGLPAERPYVEASVARTTRWLERCKKEMHRLNQLEDTVNPKQMLFGINQGATFEDIRIEHAKRISEMNLDGYAIGGLAVGESHAEMYRILDEVVPYLPEEKPTYLMGVGTPENILEAVERGVDFFDCVLPARNGRHAHVYTNKGKLNLLNAKYEKDDSPIDDTCGCPACRRYSRAYIRHLFKAKEMLAMRLCVMHNLYFFNSMMEEIRQAIEEDRFHAYKAAKLDGFRENGK

SEQ ID NO: 61964 - protein, 369 aa, Uliginosibacterium sp.
  REGION 1..369: note = tr|A0A2N4XRG0|A0A2N4XRG0_9RHOO Queuine tRNA-ribosyltransferase OS=Uliginosibacterium sp. TH139; OX = 2067453 GN=tgt PE=3 SV=1
MHFQLLSTSGQARRGRLQLAHGIVETPVFMPVGTYGTVKAMSPHELLEIGAQICLGNTFHLWLRPGMEVFKQFGGLHGFMGWDKPILTDSGGFQVFSLGALRKITEEGVKFSSPINGDKLFLTPEISMQIQHGLNSDIVMIFDECTPYPASVDEAAKSMRMSARWARRSRDEHDKLGNRNALFGIVQGGMYEDLRDESLAGLQQIGFDGYAIGGLSVGEPKEDFYRVLAHTGPRLPADKPHYLMGVGTPEDLVYGVSQGIDMFDCVMPTRNARNGWLFTRWGDLKIRNAKHKQDTRPIDESCECYTCRHFSRAYLHHLDRAQEMLGPRLMTIHNLHYYQHLMREIRAAIEADDYAGFQLRFAAERQRGA

SEQ ID NO: 61965 - protein, 376 aa, Ulvibacter antarcticus
  REGION 1..376: note = tr|A0A3L9Y6B7|A0A3L9Y6B7_9FLAO Queuine tRNA-ribosyltransferase OS=Ulvibacter antarcticus; OX = 442714 GN=tgt PE=3 SV=1
MKFKLEAKDANSQARAGEITLDHGIIETPIFMPVGTVGTVKGVHQKELKDEINPDIILGNTYHLYLRPQTPILEKAGGIHKFMNWDRNILTDSGGYQVYSLSANRKIKEEGVKFKSHIDGSYHFFTPENVMEIQRKIGADIIMAFDECTPYPCDYNYAKRSMHMTHRWLDRCITHLDKTPLHYDYNQTFFPIVQGSTYKDLRKQSAEYIASVGAAGNAIGGLSVGEPAEEMYEMTAVVTEILPEDKPRYLMGVGTPINILENIALGIDMFDCVMPTRNGRNGMLFTAHGTINIKNKKWEADFSAIDEMDITWVDTAYSKAYVRHLFTVNEMLGRQIATIHNLGFYLWLVREARKHILAGDFNAWKNIMVKQMDKRL

SEQ ID NO: 61966 - protein, 376 aa, Ulvibacter litoralis
  REGION 1..376: note = tr|A0A1G7JDC9|A0A1G7JDC9_9FLAO Queuine tRNA-ribosyltransferase OS=Ulvibacter litoralis OX=227084; GN = tgt PE=3 SV=1
MQFKLEAKDVNSKARAGTMTLDHGTVETPIFMPVGTMGTVKGVHQKELTDEINPDIILGNTYHLYLRPKTQILEKAGGLHKFMNWDRPILTDSGGYQVYSLSSNRKIKEEGVKFKSHIDGSFHVFTPENVMEIQRTIGADIIMAFDECTPYPCDYNYARRSMHMTHRWLDRCINHLDKTPLKYDYNQTFFPIVQGSTYKDLRKQSAEYIASVGAEGNAIGGLSVGEPAEEMYAMTEVVTEILPEDKPRYLMGVGTPINILENIALGIDMFDCVMPTRNGRNGMLFTAHGTMNMKNKKWEDDFSPIDEMGITWVDTAYSKAYLRHLFASNEMLARQIGTIHNLGFYMWLVREARKHILAGDFTSWKNTMVKQMDNRL

SEQ ID NO: 61967 - protein, 376 aa, Ulvibacter sp.
  REGION 1..376: note = tr|A0A167ERZ2|A0A167ERZ2_9FLAO Queuine tRNA-ribosyltransferase OS=Ulvibacter sp. LPB0005; OX = 1763537 GN=tgt PE=3 SV=1
MQFKLEATDAASRARAATITLDHGTIETPIFMPVGTVATVKGVHQKELSEEINPDIILGNTYHLYLRPQTPILEKAGGIHKFMNWDRNILTDSGGYQVYSLSANRKIKEEGVKFKSHIDGSYHFFTPENVMEIQRTIGADIIMAFDECTPYPCDYNYAKRSMHMTHRWLDRCINHLEKTPLKYDYNQTFFPIVQGSTYKDLRKQSAEYIASVGAEGNAIGGLSVGEPAEEMYEMTDVVTSILPKDKPRYLMGVGTPINILENIALGIDMFDCVMPTRNGRNGMLFTAHGSINIKNKKWEDDFSPIDEMGITWVDTAYSKAYVRHLFTVNEMLGRQIGTIHNLGFYLWLVREARKHILAGDFTTWKNKMVKQMDKRL

SEQ ID NO: 61968 - protein, 376 aa, Ulvibacter sp.
  REGION 1..376: note = tr|A0A2N0EPE8|A0A2N0EPE8_9FLAO Queuine tRNA-ribosyltransferase OS=Ulvibacter sp. MAR_2010_11; OX = 1250229 GN=tgt PE=3 SV=1
MQFTLEATDTGSQARAGTMILDHGTVETPIFMPVGTVGTVKGVHQRELETEIKPDIILGNTYHLFLRPQIDILEKAGGLHKFMNWKHPILTDSGGYQVYSLSANRKIKEEGVKFKSHIDGSYHVFTPENVMEIQRSIGADIIMAFDECTPYPCEYNYAKRSMHMTHRWLDRCIAHLEKTPYKYDFSQTFFPIVQGSTYKELRKQSAEYIASVGAEGNAIGGLSVGEPAEEMYEMTSVVTEILPKDKPRYLMGVGTPINILENIALGIDMFDCVMPTRNGRNGMLFTAHGTINIKNKKWEADFSALDEMNITWVDTAYSKAYVRHLFTVNEMLGRQIATIHNLGFYMWLVREARKHILAGDFATWKTTMVKQMDKRL

SEQ ID NO: 61969 - protein, 382 aa, Umboniibacter marinipuniceus
  REGION 1..382: note = tr|A0A3M0A5P6|A0A3M0A5P6_9GAMM Queuine tRNA-ribosyltransferase OS=Umboniibacter marinipuniceus; OX = 569599 GN=tgt PE=3 SV=1
MRKECFMSFELDKTSGRARRGRLKFPRGTVETPIFMPVGTYGTVKGMTPEDLLKIGSQIILGNTFHLWLRPGTEVIKAHGDLHDFAGWDKPILTDSGGFQVFSLGKLRKITEAGVSFQSPINGDKVFLDPEKSMQIQRDLGSDVVMCFDECTPYPATHREAKDSMEMSLRWAQRSKDAHGDNPSALFGIIQGGMYQDLREESVKGLLDIGFDGYAIGGLSVGEPKEDMFRVLDVTEPLMNEDQPRYLMGVGKPGDLVEGVRRGVDMFDCVMPTRNARNGHLFIHEGVVKIRNAKHKLDTSPLDPHCDCYTCQNFSRAYLHHLHRCNEMLGAQLNTIHNLRFYVRLMERIREALDEDRFDQFVVDFYAAQGLDVPELVPPSES

SEQ ID NO: 61970 - protein, 375 aa, unidentified
  source 1..375: note = Alphaproteobacteria bacterium
  REGION 1..375: note = tr|A0A212JUK1|A0A212JUK1_9PROT Queuine tRNA-ribosyltransferase OS=uncultured Alphaproteobacteria bacterium OX=91750 GN=tgt PE=3 SV=1
MTEFGFTLLAADGMGRRGRLETAHGSIETPAFMPVGTAATVKAMMPESVAATGAEILLGNTYHLMLRPGAERVGALGGLHRFMGWDKPILTDSGGFQVMSLAKLRKMDEDGVTFRSHVDGSAHRLTPERSMEIQHLLDSDVTMAFDECTPFPAEHDVAAASMRLSMRWAARSKAAFVPREGYGLFGIVQGSVYSDLRAESAARLAEIGFDGYAIGGLAVGEGQAAMFETLDFTTPLLPKTKPRYLMGVGKPMDIVGAVLRGVDMFDCVMPTRSGRTAQAFTHRGTLNLRNARHADDPRPLDECCDCPACSRFSRAYLHHLIRCEEIQGAMLLTWHNLRFYQMLMARLRAAIEAGSLAQTAAAIEAELSRGDVEPI

SEQ ID NO: 61971 - protein, 376 aa, Anaerotruncus sp.
  REGION 1..376: note = tr|A0A1C6GN73|A0A1C6GN73_9FIRM Queuine tRNA-ribosyltransferase OS=uncultured Anaerotruncus sp.; OX = 905011 GN=tgt PE=3 SV=1
MYTLKKQVGHARRGEFKTVHGTVQTPAFMNVGTVAAIKGGLSSYDLKDIRTQVELCNTYHLHLRPGDKLIHELGGLHKFMGWDRPILTDSGGFQVFSLAKLRKIKEEGVHFSSHIDGRKIFMGPEESMQIQSNLASTIAMAFDECIQLPAEYDYVKQSCDRTYRWLVRCKAEMDRLNQLPDRNNPHQMLFGINQGGTYEDIRIENARLNAQLDLDGHAIGGLAVGEPKEEMYHIISVVDEYLPRDKPRYLMGVGTPGNIIEGVSRGIDLFDCVMPSRNARHGHLFTWEGIRNLNNAKYEKDLLPIDPQCDCPVCSRHSRAYIRHLLRAGETLGQRLTVMHNLYFYNRLLERIREALENDTFEQFRAQYVDVLDTRI

SEQ ID NO: 61972 - protein, 402 aa, Avibacterium sp.
  REGION 1..402: note = tr|A0A486XDW4|A0A486XDW4_9PAST Queuine tRNA-ribosyltransferase OS=uncultured Avibacterium sp.; OX = 1936169 GN=tgt PE=3 SV=1
MTMKFKLHKTDGTARRGTMTFQRPQGEFEVQTPAFMPVGTYGTVKGMTPEEVRATGAEILLGNTFHLWLRPGQEIMRKHGDLHDFMNWHRPILTDSGGFQVFSLGKLRKITEEGVKFQNPINGERIFLSPEKSMEIQYDLGSDIVMIFDECTPYPATFDYAKKSMEMSLRWAKRSRNRFDELGNQNALFGIVQGGVYEELRKISVEGLVEIGFDGYAVGGLAVGEPKEDMHRILEYVCPQLPADKPRYLMGVGKPEDLVEGVRRGIDMFDCVMPTRNARNGHLFVTDGIVKIRNAKYRDDTSPLDPECDCYTCKNYTKAYLYHLDKCGEILGARLNTIHNLRYYQRLMAQIREAIENDTFEQFVQDFYARIGKPVPPLQSEVQQSAQTANAQSSSPQGEQNA

SEQ ID NO: 61973 - protein, 396 aa, unidentified
  source 1..396: note = Unknown
  REGION 1..396: note = tr|L7VT23|L7VT23_9BACT Queuine tRNA-ribosyltransferase OS=uncultured bacterium A1Q1_fos_1266 OX=1256546 GN=tgt PE=3 SV=1
MLKFELLQTDAPNSHARRGRMTLNHGVVETPVFMPVGTYGTVKGVTPQSLEDMGAQIILGNTFHLWMRPGLDVVKQFGGLHKFELWQKPMLTDSGGFQVWSLGEMRKISEEGVKFSSPVNGDKLFLTPEVSMQIQTILNSDIAMQFDECTPYISVEPKTKGQLTTLTEARSSMELSLRWAKRCKAEFARLENPNALFGIVQGGMHTALRDASLEGLEELDFPGIAVGGLSVGEPKEEMLRVLKHIGPKLPAHKPHYLMGVGTPEDLIAGVENGIDMFDCVMPTRNARNGTLFTRFGDLKIRNARHKADEQPLDATCTCYACAGTSGIPYAQGGRTGFSRAYLHHLDRCGEMLGPMLASIHNLHYYLNMMREVRAALDAGQFSAFVQQFHNDRARGV

SEQ ID NO: 61974 - protein, 391 aa, unidentified
  source 1..391: note = Unknown
  REGION 1..391: note = tr|K2EKU6|K2EKU6_9BACT Queuine tRNA-ribosyltransferase OS=uncultured bacterium OX=77133; GN = tgt PE=3 SV=1
MFELITKFDDRRVGNLHTQNGVIHTPFFMPIATKGAVKNISPEDLRDLGAEIVLGNTYHLWLRPGDELIAKAGGLHRFMNWDGPILTDSGGYQVFSLGARAKEKYGSSGVKLSEKGVKFIDPLNGNRHFMTPEKSIDIQLNLGSDMIMVLDECPPYPCSHEKARKSMELTLRWAKRCFEHFHERMKSFEGSEKGRPLLFCIVQGSVYEDLRKECAKRLIEIGISAKGGPDSGWDGYAIGGVAVGEPRKHLYEILQWVTPLLPEDKPRYLMGLGKPEELVRAVQAGMDMFDCVIPTREGRHGRLFRWKDGVNFQISNYKKDESFYETINISNEKFKEDFTSIDPQCDCYTCRNFTKAYLNHLLRTNEPFFLKLATVHNLNFYLRLMNLLKNS

SEQ ID NO: 61975 - protein, 376 aa, Bacteroides sp.
  REGION 1..376: note = tr|A0A1C6KRQ9|A0A1C6KRQ9_9BACE Queuine tRNA-ribosyltransferase OS=uncultured Bacteroides sp.; OX = 162156 GN=tgt PE=3 SV=1
MTFDLQYTDSKSNARAGLITTDHGQIETPIFMPVGTVGTVKGVHVTELKEDIKAQIILGNTYHLYLRPGLDVLEKAGGLHKFNGFDRPMLTDSGGFQVFSLSGIRKLREEGAEFRSHIDGSKHIFTPEKVMDIERTIGADIMMAFDECPPGDSDYAYAKKSLGLTHRWLDRCIQRFNETEPKYGYQQSLFPIVQGCVYPDLRKQSAEFIASKGADGNAIGGLAVGEPVDKMYEMIELVNDILPKDKPRYLMGVGTPVNILEGIERGVDMFDCVMPTRNGRNGMLFTKDGIINMRNKKWETDFSPIEADGASAVDTLYSKAYLRHLFHAQELLAMQIASIHNLAFYLWLVGEARKHIIAGDFSTWKPMMVKRVSTRL

SEQ ID NO: 61976 - protein, 376 aa, Bacteroides sp.
  REGION 1..376: note = tr|A0A1C5QQS0|A0A1C5QQS0_9BACE Queuine tRNA-ribosyltransferase OS=uncultured Bacteroides sp.; OX = 162156 GN=tgt PE=3 SV=1
MKFELQYTDPKSNARAGLITTDHGQIETPIFMPVGTLGTVKGVHLHELKNDIKAQIILGNTYHLYLRPGLDIIEGAGGLHKFNGFDRPMLTDSGGFQVFSLSDIRKLREEGVEFRSHIDGSKHLFTPERVMDIERTIGADIIMAFDECAPGTSDYDYAKKSMELTHRWLDRCCARFNETEPKYGYSQSLFPIVQGCVYPDLRRRSAEYIASKNADGNAIGGLAVGEPTEKMYEMIEVVNEILPTDKPRYLMGVGTPVNILEGIERGVDMFDCVMPTRNGRNGMLFTKDGIMNMRNKKWENDYSPIEADGASYVDTMYSRAYLRHLFHAQELLALQIASIHNLAFYLWLVGEARKHIIAGDFSTWKPMMVKRLSTRL

SEQ ID NO: 61977 - protein, 374 aa, unidentified
  source 1..374: note = Unknown
  REGION 1..374: note = tr|E0XSS9|E0XSS9_9PROT Queuine tRNA-ribosyltransferase OS=uncultured beta proteobacterium HF0130_04F21 OX=710819 GN=tgt PE=3 SV=1
MKFSIIAKDQNARTGLMRLSNGEVETPIFMPVGTYGAVKGMTSQILQKLGVQILLGNTFHLWLRPGLDIVENFGGLNKFMNWSKPILTDSGGFQVWSLGNLRKITEEGVYFKSPVNGDKLFLSPEKSMEIQKTLNSDIAMVFDECTDWPVSKKQADLSMKLSSRWAKRCRDSFNGNNNLFGIVQGGMFEDLRFESLSNLIGLNFDGYAIGGLSVGEPKKDMFRILEKIMPAMPSDKPRYLMGVGKPEDLVEAVINGVDMFDCVLPTRNARNGLLYTQFGDLKIRNSRYSSDKSPIDKSCKCPVCNPGDNLDQPYYSRAYLHHLQKINEMLGSILTTSHNLWFYLNLLKQIREAIKAGTLKNWRQNFYDKRSIGV

SEQ ID NO: 61978 - protein, 385 aa, Blautia sp.
  REGION 1..385: note = tr|A0A1C6KU00|A0A1C6KU00_9FIRM Queuine tRNA-ribosyltransferase OS=uncultured Blautia sp.; OX = 765821 GN=tgt PE=3 SV=1
MAKYTLMKTEGRAKRAQFETVHGTIQTPVFMNVGTVGAIKGAVSTMDLKDIGTQVELSNTYHLHVRTGDKLIKEFGGLHKFMVWDRPILTDSGGFQVFSLAGLRKIKEEGVYFQSHIDGHKIFMGPEESMQIQSNLGSTIAMAFDECPSSVASREYVQASVDRTTRWLERCKAEMARLNGLPDTVNKEQLLFGINQGAIYADIRIAHADTISKLDLDGYAVGGLAVGETHEQMYHILDEVVPHLPQNKPTYLMGVGTPANILEGVARGIDFFDCVYPSRNGRHGHVYTNRGKLNLFNAKYELDPSPIEEGCQCPACQHYSRAYIRHLLKAKEMLGMRLCVLHNLYFYNHLMEEIRDALDQGNFAEYKEMRLAGFEEGKINSRYSK

SEQ ID NO: 61979 - protein, 383 aa, Blautia sp.; identical to SEQ ID NO: 52649
  REGION 1..383: note = tr|A0A1C5R8X2|A0A1C5R8X2_9FIRM Queuine tRNA-ribosyltransferase OS=uncultured Blautia sp.; OX = 765821 GN=tgt PE=3 SV=1

SEQ ID NO: 61980 - protein, 380 aa, Butyricicoccus sp.
  REGION 1..380: note = tr|A0A1C5Y8Q8|A0A1C5Y8Q8_9CLOT Queuine tRNA-ribosyltransferase OS=uncultured Butyricicoccus sp.; OX = 1193532 GN=tgt PE=3 SV=1
MKIGTFNLLKTEGYARRGEFCTAHGVVQTPVFQNVGTAGAIKGAVDAFDLKALGCQIELSNTYHLHVRPGDQIVRQMGGLHRFMRWDGPMLTDSGGFQVFSLATLRKIKEEGVTFHSHVDGRRIFMGPEESMRIQSNLGSDIAMAFDECIENPAPREYVKDSIDRTTRWLRRCKAELTRLNSLPDTVNPQQMLFGINQGGTYDDLRIEHMQAIAELDLPGYAIGGLAVGESTEVMYHILDVVLPHAPENKPRYLMGVGTPSNIIEGVARGVDFFDCVMPTRNARHGHLFTHNGILNIMNAKYQTDDRPIEEGCGCPTCQRFSRAYLRHLLKSGEMLSQRLLVMHNLWFYNHLMQEIRDALEQGTFAAFRAEYSEKMSKRI

SEQ ID NO: 61981 - protein, 372 aa, unidentified
  source 1..372: note = Atribacteria sp.
  REGION 1..372: note = tr|G3BMR6|G3BMR6_9BACT Queuine tRNA-ribosyltransferase OS=uncultured Candidatus Atribacteria bacterium OX=263865 GN=tgt PE=3 SV=1
MSFKFKIIKEINKANNKARVGIMETAHGVVETPVFMPVGTQATIKGILPKEIKELGFSIILCNAYHLFLRPGHALISKSGGLHKFMGWDKVILSDSGGFQVFSLGKINKINDDGVVFQSYINGTRHFINTEKAMEIQMALGSDIAMVFDQCVPFPSNRYETQLAANRTYQWAKECRKYHNRKDQTLFGIIQGGLFPDIRRENTFKLRDLDFPGYALGGLSVGEPKPLMYEMIETVIPLLPTEKPRYLMGVGAPESILEGVIRGIDMFDCVLPTRNGRNGCLFTHNGKISITNAQYKDDLEPLDQFCHCYTCQNFSRAYLRHLYKAQEMLAPILGTIHNLYFMSQLMKNIRKAILENRLESFKREFYNNYLSQ

SEQ ID NO: 61982 - protein, 377 aa, unidentified
  source 1..377: note = Atribacteria sp.
  REGION 1..377: note = tr|G3BMH1|G3BMH1_9BACT Queuine tRNA-ribosyltransferase OS=uncultured Candidatus Atribacteria bacterium OX=263865 GN=tgt PE=3 SV=1
MSIEFKIIKEINTYNQNKARAGILKTEHSVIETPVFMPVGTQATIKGILPKEIDNLGFSIILCNAYHLFLRPGHQLIYKCGGLHHFMGWDKSILTDSGGFQVFSLGKINKINDEGVTFQSYIDGSRHFINPQKAMEIQMALGSDIAMVFDQCVPYPSTKYETQIAADRTYKWAKECQKYHNRESQSLFGIIQGGLFPDIRKENSRKLVDLEFPGYALGGLSVGEPKPLMYEILETIVPLLPEEKPRYLMGVGAPESIIEGVSRGIDMFDCVLPTRNGRNGCLFTHHGKISITNVKYKEDFTPLDRNCHCYTCQNFTRAYLRHLYMAKEMLAPILGTIHNLYFMNQLMKGIREAILENSLESFQKNFYENYLVQEEEL

SEQ ID NO: 61983 - protein, 375 aa, Citrobacter sp.
  REGION 1..375: note = tr|A0A212IEW2|A0A212IEW2_9ENTR Queuine tRNA-ribosyltransferase OS=uncultured Citrobacter sp.; OX = 200446 GN=tgt PE=3 SV=1
MKFELDTTDGRARRGRLVFDRGVVETPAFMPVGTYGTVKGMTPEEVEATGAQIILGNTFHLWLRPGQEIMKLHGDLHDFMQWKGPILTDSGGFQVFSLGDIRKITEQGVHFRNPINGDPIFLDPEKSMEIQYDLGSDIVMIFDECTPYPADWDYAKRSMEMSLRWAKRSRDRFDSLGNKNALFGIIQGSVYEDLRDISVKGLVDIGFDGYAVGGLAVGEPKEDMHRILEHVCPQIPADKPRYLMGVGKPEDLVEGVRRGIDMFDCVMPTRNARNGHLFVTDGVVKIRNAKHKSDTSPLDVECDCYTCRNYSRAYLHHLDRCNEILGARLNTIHNLRYYQRLMAGLRKAIEEGKLESFVTDFYQRQGRPVPPLNVD

SEQ ID NO: 61984 - protein, 444 aa, Citrobacter sp.
  REGION 1..444: note = tr|A0A212ID80|A0A212ID80_9ENTR Queuine tRNA-ribosyltransferase OS=uncultured Citrobacter sp.; OX = 200446 GN=tgt PE=3 SV=1
MKFELDTTDGRARRGRLVFDRGVVETPAFMPVGTYGTVKGMTPEEVEATGAQIILGNTFHLWLRPGQEIMKLHGDLHDFMQWKGPILTDSGGFQVFSLGDIRKITEQGVHFRNPINGDPIFLDPEKSMEIQYDLGSDIVMIFDECTPYPADWDYAKRSMEMSLRWAKRSRDRFDSLGNKNALFGIIQGSVYEDLRDISVKGLVDIGFDGYAVGGLAVGEPKEDMHRILEHVCPQIPADKPRYLMGVGKPEDLVEGVRRGIDMFDCVMPTRNARNGHLFVTDGVVKIRNAKHKSDTSPLDVECDCYTCRNYSRAYLHHLDRCNEILGARLNTIHNLRYYQRLMAGLRKAIEEGKLESFVTDFYQRQGNFYFMILRPQQKRTKEHKNLMNSIAKGDEVLTNGGLVGRVTKVAESGYIAIALNDTTEVVIKRDFVAAVLPKGTMKAL

SEQ ID NO: 61985 - protein, 377 aa, unidentified
  source 1..377: note = Clostridiales bacterium
  REGION 1..377: note = tr|A0A212JW65|A0A212JW65_9FIRM Queuine tRNA-ribosyltransferase OS=uncultured Clostridiales bacterium OX=172733 GN=tgt PE=3 SV=1
MFKVIKTEGHARRGVFSCAHGGEVQTPVFMNVGTQGAIKGGVSAHDLKDIGCQIELSNTYHLHLRPGDDVVRQMGGLHKFMDWDGPILTDSGGFQVFSLSGLRKITEEGVTFASHIDGHRVFMGPEESMRIQSNLGSDIAMAFDECVENPSTHDYVKPSCERTLRWLTRCVAEHKRLNVLADTVNPGQMLFGINQGGIYPDLRVWHMKEIARLDCDGFAIGGLAVGESAETMYEIIEAVEPHMPADKPRYLMGVGTPSNIIESVYRGVDFFDCVMPARNARHGKLYTWEGALNIKNEKYRTDPLPIDPACNCPACRSFSRAYLRHLFAAGEMLAMRLAVMHNLYFYNELMGRIRAALEEGSFEEFRARYSSVLEKKI

SEQ ID NO: 61986 - protein, 385 aa, Clostridium sp.; identical to SEQ ID NO: 61978
  REGION 1..385: note = tr|A0A1C6LC65|A0A1C6LC65_9CLOT Queuine tRNA-ribosyltransferase OS=uncultured Clostridium sp.; OX = 59620 GN=tgt_2 PE=3 SV=1

SEQ ID NO: 61987 - protein, 379 aa, Clostridium sp.; identical to SEQ ID NO: 53977
  REGION 1..379: note = tr|A0A1C6GIH5|A0A1C6GIH5_9CLOT Queuine tRNA-ribosyltransferase OS=uncultured Clostridium sp.; OX = 59620 GN=tgt PE=3 SV=1

SEQ ID NO: 61988 - protein, 379 aa, Collinsella sp.
  REGION 1..379: note = tr|A0A1C5S303|A0A1C5S303_9ACTN Queuine tRNA-ribosyltransferase OS=uncultured Collinsella sp.; OX = 165190 GN=tgt PE=3 SV=1
MDQSLFTYDIIAEDSKTHARAGVLHTPHGDIETPIFMPVGTRATVKGVPWETVKDLGAQIVLSNTYHLAMRPGADLIDEMGGLHSFMNWHGPILTDSGGFQIFSHSDAVKLSDKGVRFIATDYDGSHVFWSPEDNMAIAQKLGSDICMQLDQCIGYPAERRDVQRAMDLSSRWAERCYKAHTRPDQALFGIVQGGMHLDLRIKSLERLEEMGNFPGYGIGGYSVGEDHETMFESLEPLAAEYMPKGKPRYLMGVGNPTTLVRGVACGIDMFDCVLPTRTGRMGTAFSSEGRLNFRNARFAHDGGPVDPQCTCPVCIGGYTRAHIRHMVTVKEMLGGILLSMHNIYYLLDLMRRARQAIIDGTYSEFVNDWMASPAAKDY

SEQ ID NO: 61989 - protein, 377 aa, Coprococcus sp.
  REGION 1..377: note = tr|A0A1C5NQ37|A0A1C5NQ37_9FIRM Queuine tRNA-ribosyltransferase OS=uncultured Coprococcus sp.; OX = 458253 GN=tgt PE=3 SV=1
MYKIICKDGRAKRATFTTVHGTVETPVFMNVGTAAAIKGAVATTDLKEIGCQIELSNTYHLHVRPGDEVVKKMGGLHKFMYWDRPILTDSGGFQVFSLAGLRKIKEEGVTFNSHVDGRKIFMGPEESMQIQSNLASTIAMAFDECAPAKAERSYVENSVARTYRWLERCKAEMTRLNSLPDTINKEQMLFGINQGAVYEDIRIDHAKRIAELDLPGYAIGGLAVGETAEEMYHILDVTVPYLPENKPVYLMGVGTPINILEAVDRGVDFFDCVYPSRNGRHAHVYTKHGKLNLKNAKYETDDRPIEEGCGCPACQHYSRGYIRHLLKANEMLGMRFCVLHNLYFYNNMMKEIRQAIEEGSYASYKKSMIESLTSNEV

SEQ ID NO: 61990 - protein, 377 aa, Coprococcus sp.
  REGION 1..377: note = tr|A0A1C5RP15|A0A1C5RP15_9FIRM Queuine tRNA-ribosyltransferase OS=uncultured Coprococcus sp.; OX = 458253 GN=tgt PE=3 SV=1
MYELIKRDGRAKRGRFHTVHGVIETPVFMNVGTIAAIKGAVSTADLEEIGTQVELSNTYHLHVRPGDQVVKKLGGLHKFMAWDKPILTDSGGFQVFSLAGLRKIKEEGVYFNSHIDGRKIFMGPEESMQIQSNLASTIAMAFDECPSSVAERKYMQASVERTTRWLARCKEEMARLNSLDDTINKHQMLFGINQGGVYEDIRIEHAQQIAEMDLDGYAVGGLAVGETHEEMYRILDAVVPCLPVARPTYLMGVGTPANILEAVDRGVDFFDCVYPSRNGRHGHVYTKHGKLNLFNAKFELDERPIEEGCQCPACRRYSRAYIRHLLKAKEMLGMRLCVLHNLYYYNHLMEDIREAIEEGRYARFKKETLAKMEEKED

SEQ ID NO: 61991 - protein, 391 aa, unidentified
  source 1..391: note = Unknown
  REGION 1..391: note = tr|A0A212K0I3|A0A212K0I3_9DELT Queuine tRNA-ribosyltransferase OS=uncultured delta proteobacterium OX=34034 GN=tgt PE=3 SV=1
MPIQTSSTPPAPTPGSFSVTATDGAARAGLLQTGHGLIPTPIFMPVGTVGSVKALAPDDLYALDARIILGNTYHLYLRPGDDLVARRGGLHAFAAWDRPILTDSGGFQAFSLSDLRKISEEGVLFRSHLDGSKHLFTPEKVVAIQRNLGSDIMMVLDECVPYGTDRAYTATSIKLTTRWALRSREAFPAALTRSGEAYNLLFAITQGGFFPDLRTASVEELAPHDFDGFAIGGLSVGESKGEMYDLLAHTAPLLPVAKPRYLMGVGTPLDIMTGVAAGVDMFDCVLPTRNARNGTLYTSMGKVNIKRKEFAEDDSPLDPACSCYTCRTFSKAYLRHLYTAKELLSFRLNSLHNLTYYLNLVTRAREAIINGAFAALYAEIRELYKEELPAV

SEQ ID NO: 61992 - protein, 377 aa, unidentified
  source 1..377: note = Desulfobacteraceae bacterium
  REGION 1..377: note = tr|A0A484HIN8|A0A484HIN8_9DELT Queuine tRNA-ribosyltransferase OS=uncultured Desulfobacteraceae bacterium OX=218296 GN=tgt PE=3 SV=1
MSVGPFSFKIIAESRDSRARAGAVFTPRGVVKTPAFMPVGTLASVKALSPEDIVETGADIILGNAYHLYLKPGLEIIDLFSGLHDFMGWRRPILTDSGGFQIFSLAKLARITENGATFQSHIDGSAHTLTPEGVIDIQRVLGSDIMMCLDQCVKYPAEKKEAEDALDLTERWAKRCLERWKETREKRGGELFGIVQGGMFPDLRKRAAESMAEMGFAGHALGGLSVGEPADLMLETADLSLPLLPRRKPKYIMGVGTPENLVELTALGADMFDCVMPARNARNGKLFTRRGSMNIKNARYAHDTGPVDPDCGCRTCRQFSRAYLRHLFMSRELLAYRLNTIHNLRYYLDLMKEMRAAIIRDEFEKFRKKFYEDRADG

SEQ ID NO: 61993 - protein, 372 aa, Desulfobacterium sp.
  REGION 1..372: note = tr|E1YAT5|E1YAT5_9DELT Queuine tRNA-ribosyltransferase OS=uncultured Desulfobacterium sp.; OX = 201089 GN=tgt PE=3 SV=1
MRFNLVAVDSCGARKGEFQTAHGIVHTPAFMPVGTAGFVRSITPRDVAETNSEVVLANTYHLSIGERLATVKRLGGLHRFMGWDKTILTDSGGFQVFSLPGKEISDDGVSFSYEENGERIFFSPERSMEIQRDLGADIVMAFDECVEHTASREYIEKSVDRTTEWAKRCRKVELKEYQFMFGIVQGGIYPDLRQKSAVGITSIPFDGFAIGGVSVGEGFELMKKVVEVTAPFLPEQKPRYLMGVGLPEDLLAAVKGGMDMFDCVIPTRYARQGTLFTRMGKIRILDKTYRKDKFPLDTKCNCYTCRTYPRMVLRYLLFSRDPLAETLLTIHNLTFYQDLMKDIREAIEQNCYDEFYEEWLAVYKKKSAKNNT

SEQ ID NO: 61994 - protein, 268 aa, Desulfobacterium sp.
  REGION 1..268: note = tr|E1YFT1|E1YFT1_9DELT Queuine tRNA-ribosyltransferase OS=uncultured Desulfobacterium sp.; OX = 201089 GN=N47_J04060 PE=3 SV=1
MTNEGYSFQSHIDGSSHVLTPEKAVQVQMLLNSDIMMCLDQCIEYPAEKKEAQDALELTTQWAKRCKKTWEETGESRNALFGIVQGGMFKDLREKSAKEIVETGFSGYAIGGLSVGEPADIMLEIADYTLEKLPAGKPKYMMGVGTPENLVDLVALGADMFDCVMPTRNARNGQMFTNKGTINICNSRYKYDTAPVEEGCLCYTCSNFSRAYLRHLYMSKEILAYRLNTIHNIYYYTKLMKDMRKAILNDEFEEFKTDFYNKRIKGEG

SEQ ID NO: 61995 - protein, 370 aa, Desulfofustis sp.
  REGION 1..370: note = tr|V4IS27|V4IS27_9DELT Queuine tRNA-ribosyltransferase OS=uncultured Desulfofustis sp. PB-SRB1 OX=1385624 GN=tgt PE=3 SV=1
MSTSFAISKRSTECFARRGLLNTAHGDINTPVFMPVGTQATVKAVRVDDLKDAGASIILGNTYHLYVRPGHELIRELGGLHRFMNWDRPILTDSGGYQIFSLSERTTISEEGAKFRSHVDGAALFLGPEEAVTVQEALGSDVIMCLDTCIGFPATRDEVEAATALTTRWAARCKTARTRAENLLFGIVQGGMFGDLRAQSAESLVEIGFDGYAIGGLSVGEPTELMYEMTEASVAHLPTTHPVYLMGVGTPADLIEGIWRGVDMFDCVMPTRNARNGTLFTSFGKVVIKNARYRDDPRPIDEACDCPVCRHYSRAYLRHLFSCRELLGYQLCTIHNLHYYLNLMAGARRAIEEDRYGAFRRDFYSGMAPQ

SEQ ID NO: 61996 - protein, 379 aa, Desulfovibrio sp.
  REGION 1..379: note = tr|A0A212L353|A0A212L353_9DELT Queuine tRNA-ribosyltransferase OS=uncultured Desulfovibrio sp.; OX = 167968 GN=tgt PE=3 SV=1
MSDSIFTIEHRDGAARAGLLRTAHGVIPTPIFMPVGTVGSVKAIAPDDLAAIGAPVILGNTYHLYLRPGDDLVARRGGLHEFASWPGAILTDSGGFQVFSLSSLRKIREEGVEFRSHLDGSRHLFTPEKVLQIQRNLNSDIMMVLDECVPFGADYDYTEKSLALTTRWAKRARAAYPAGTAHNLLFGITQGGFHKDLRKRSVEELCGIDFDGFAIGGLSVGEPKAQMYDLLYHTAPLLPESKPRYLMGVGTPLDIANGINAGVDMFDCVLPTRNARNGTLYTSQGKINIRRKQFAEDDGPLDPNCNCYTCRTFSRAYLRHLYASQELLSFRLNSLHNLTYFLDLARNARQAIVQGRYTDFLAGIEALYPDEAARAAEGA

SEQ ID NO: 61997 - protein, 395 aa, Desulfovibrio sp.
  REGION 1..395: note = tr|A0A212K2V5|A0A212K2V5_9DELT Queuine tRNA-ribosyltransferase OS=uncultured Desulfovibrio sp.; OX = 167968 GN=tgt PE=3 SV=1
MLPLLRRAALAATLRGMSQSVFTIEHTDGAARAGVLRTAHGTIPTPIFMPVGTVGSVKALAPDDLAAIGAPIILGNTYHLYLRPGDELVHRRGGLHKFASWPGSILTDSGGFQVFSLSSLRKIREEGVEFRSHLDGSKHLFTPEKVLEIQRNLNSDIMMVLDECVPFGADYAYTEKSLALTTRWAKRAMDAYPPGSAHNLMFGITQGGFYKDLRERSVNELCAMDFDGFAIGGLSVGEPKDKMYDLLYHTAPLLPGEKPRYLMGVGTPLDIATGIHAGVDMFDCVLPTRNARNGTLYTSLGKINIKRREFAEDDGPLDPNCRCYACRNFSRAYLRHLYASQELLSFRLNSLHNLTYFLDLARNARQAIVEGRYMDFLAKITALYPDEAARAAAGS

SEQ ID NO: 61998 - protein, 376 aa, Dorea sp.
  REGION 1..376: note = tr|A0A1C5M159|A0A1C5M159_9FIRM Queuine tRNA-ribosyltransferase OS=uncultured Dorea sp. OX=286138; GN = tgt PE=3 SV=1
MYELLKTDGLAKRGRLHTVHGVIETPVFMNVGTIAAIKGAVSTTDLQEIGTQVELSNTYHLHVRPGDEVVKKLGGLHKFMVWDKPILTDSGGFQVFSLAGLRRIKEEGVYFNSHIDGRKIFMGPEQSMQIQSNLASTIAMAFDECPSSVADRDYMENSVNRTTRWLKRCKAEMDRLNSLPDTINKHQMLFGINQGGVYEDIRVRHAQEISELDLDGYAVGGLAVGESHEEMYRILDAVVPHLPQNKPTYLMGVGTPANILEAVERGVDFFDCVYPSRNGRHGHVYTNHGKMNLFNAKYELDTRPIEEGCNCPVCRTYSRAYVRHLLKAKEMLGMRFCVLHNLYFYNKMMEEIREAIEAGRYKEYKEEKLRRMAEGE

SEQ ID NO: 61999 - protein, 376 aa, Dysgonomonas sp.
  REGION 1..376: note = tr|A0A212K2F8|A0A212K2F8_9BACT Queuine tRNA-ribosyltransferase OS=uncultured Dysgonomonas sp.; OX = 206096 GN=tgt PE=3 SV=1
MDFKLQYTDGQTKARAGLITTDHGQIETPIFMPVGTQGAVKAVHMTELKNDIEAQIILGNTYHLYLRPGLEILKQAGGLHKFNSWDKPILTDSGGFQVFSLAENRKLTEEGAIFRSHIDGSKHFFTPESVMDIQRVIGADIIMAFDECTPGDADYAYAKKSLDLTERWLDRCFTQFNGTECEYGYKQALFPIVQGCVYPDLRRRAAENVASKGADGNAIGGLAVGEPTEKMYEMIEVVNEILPADKPRYLMGVGTPANILEAIERGVDMFDCIMPTRNGRNGQLFTRNGIMNMRNKKWADDFSPIEENGASFVDTLYTKAYLRHLFITNEILGLQIASIHNLAFYLQLVKEAREHIIAGDFSGWKKEMVENVSRRI

SEQ ID NO: 62000 - protein, 376 aa, Dysgonomonas sp.
  REGION 1..376: note = tr|A0A212J1H8|A0A212J1H8_9BACT Queuine tRNA-ribosyltransferase OS=uncultured Dysgonomonas sp.; OX = 206096 GN=tgt PE=3 SV=1
MDFELQYTDDQSSARTGLITTDHGQIETPIFMPVGTQGAVKAVHMTELENDIQAQIILGNTYHLYLRPGLDILQQAGGLHKFNSWNKPILTDSGGFQVFSLAHNRKLTEEGAIFRSHIDGSKHVFTPEYVMDIERTIGADIMMAFDECTPGDADYTYAKKSLDLTERWLDRCIKRFNETECEYGYKQALFPIVQGCVYPDLRRRAAENVASKGADGNAIGGLAVGEPTEKMYEMIEVVNEILPKDKPRYLMGVGTPANILEAIERGVDMFDCIMPTRNGRNGQLFTRNGIMNMRNQKWAKDFSAIEENGASFVDTLYTKAYLRHLFITNEILALQIASIHNLAFYLWLVKEARQHIIAGDFLSWKRMMIENVSRRL

SEQ ID NO: 62001 - protein, 380 aa, Eubacterium sp.
  REGION 1..380: note = tr|A0A1C5VNA6|A0A1C5VNA6_9FIRM Queuine tRNA-ribosyltransferase OS=uncultured Eubacterium sp.; OX = 165185 GN=tgt PE=3 SV=1
MYKLLTKDGMAKRGEFETVHGTIQTPVFMNVGTVGAIKGAVSTDDLRTIGTQVELSNTYHLHVRTGDKLIKQFGGLHKFMGWDKPILTDSGGFQVFSLSGLRKIKEEGVYFQSHIDGHHIFMGPEESMQIQSNLGSTIAMAFDECPSSRADRTYIQNSVDRTTRWLERCKKKMQELNSLPDTVNPHQMLFGINQGGVFADIRIEHAKRISELDLDGYAVGGLAVGETHDEMYYILDEVVPYLPENKPTYLMGVGTPANIIEAVDRGIDFFDCVYPSRNGRHGHVYTHHVKLNLFNKKFELDPRPIEEGCQCPACRTYSRAYIRHLLKAKEMLGMRLCVLHNLYFYNHLMEEIRGAIDEHRYKEFKKTTLEGFLTPEEEYR

SEQ ID NO: 62002 - protein, 382 aa, Eubacterium sp.
  REGION 1..382: note = tr|A0A1C6IPS6|A0A1C6IPS6_9FIRM Queuine tRNA-ribosyltransferase OS=uncultured Eubacterium sp.; OX = 165185 GN=tgt PE=3 SV=1
MSKNYKLINMDGKAKRGEFTTVHGVIQTPVFMNVGTAAAIKGAVSTMDLQQIKTQVELSNTYHLHVRPGDDVVKKMGGLHKFMVWDKPILTDSGGFQVFSLAGLRKIKEEGVYFNSHVDGRKIFMGPEQSMQIQSNLASTIAMAFDECAPSTADEKYIRNSVERTTRWLKRCKEEMKRLNSLDDTINKHQMLFGINQGGVFENIRKEHADIISELDLDGYAVGGLAVGETHEEMYRILDEVVPHLPTDKPTYLMGVGTPANILEAVDRGIDFFDCVYPSRNGRHGHVYTNRGKINLFNAKYELDSKPIEEGCDCPACRTYSRAYIRHLLKAKEMLGMRLCVLHNLYFYNTMMEEIRDAIENNRYKEYKKQKLEGFLENDNNK

SEQ ID NO: 62003 - protein, 381 aa, Faecalibacterium sp.
  REGION 1..381: note = tr|A0A1C5LZB4|A0A1C5LZB4_9FIRM Queuine tRNA-ribosyltransferase OS=uncultured Faecalibacterium sp.; OX = 259315 GN=tgt PE=3 SV=1
MPSLTTYKLLKQEHDARRGEFKTVHGTVQTPAFQNVATAGAIKGGLSAQDLKDIGAQVMLCNTYHLHLRPGDKLVADMGGLHKFTRWNGPILTDSGGFQVFSLAKLRKITEEGVTFASHLDGHRIFMGPEESMQIQANLGSTIAMAFDECVENPAQHDYSKASCERTTRWLKRCKIEMARLKHEGISVNPDQLLFGINQGCTFADLRVEHMKQIADLDLDGYAIGGLAVGEPTEVMYEMISQVEPHMPKDKIRYLMGVGTPGNIIEAVARGVDLFDCVMPSRNARHGHLNTWDGIINIKNAKYERDERPIDPACGCPVCRSYSRAYIRHLFKAEEILGMRLAVMHNLWFYNHLMERIRDELDAGTFTAFHDKYVKLLDTRI

SEQ ID NO: 62004 - protein, 381 aa, Faecalibacterium sp.
  REGION 1..381: note = tr|A0A1C5MPK4|A0A1C5MPK4_9FIRM Queuine tRNA-ribosyltransferase OS=uncultured Faecalibacterium sp.; OX = 259315 GN=tgt PE=3 SV=1
MPSLTTFKLLKQEHNARRGEFKTVHGTVQTPAFQNVATAGAIKGGLSAQDLQQIGTQVMLCNTYHLHLRPGDQLVADMGGLHKFTRWNGPILTDSGGFQVFSLSKLRKITEEGVTFASHLDGHRIFMGPEESMQIQANLGSTIAMAFDECVENPAQHAYSKASCERTTRWLKRCKAEMARLKQEGKATNPDQLLFGINQGCTFADLRVEHMKQIAELELDGYAIGGLAVGEPAEVMYEMISEVEPYMPKDKIRYLMGVGTPGNMIEAVSRGVDLFDCVMPSRNARHGHLNTWGGIINIKNAKYERDERPIDPTCGCPACRNYSRAYIRHLFKAEELLGMRLAVMHNLWFYNHLMERIRDELDAGTFTAFHDRYVKLLDTRI

SEQ ID NO: 62005 - protein, 384 aa, unidentified
  source 1..384: note = Flavobacteriaceae bacterium
  REGION 1..384: note = tr|Q2YZE6|Q2YZE6_9FLAO Queuine tRNA-ribosyltransferase OS=uncultured Flavobacteriaceae bacterium OX=165436 GN=tgt PE=3 SV=1
MPTDDIMNMQFELKGKDPQSKARAGVITTAHGVIETPIFMPVGTVASVKGVHQRELKNDINPDIILGNTYHLYLRPQTDILEKAGGLHKFMNWDRNILTDSGGYQVYSLSANRKIKEEGVKFKSHIDGSYHIFTPENVMEIQRSIGADIIMAFDECTPYPCEYNYAKRSMHMTHRWLDRCINHLEKTPLKYNYNQAFFPIVQGSTYKDLRMQSAEYIANAGAVGNAIGGLSVGEPAEEMYAMTEIVCNILPEDKPRYLMGVGTPINILENIALGIDMFDCVMPTRNARNGMLFTAHGTMNIKNLKWKDDFSPVDEMGITYVDTDYTKAYLRHLFSVNELLGMQIATIHNLGFYLWLVREARKHILAGDFKIWKNQMVNQMNKRL

SEQ ID NO: 62006 - protein, 354 aa, unidentified
  source 1..354: note = Flavobacteriia bacterium
  REGION 1..354: note = tr|F4MLV6|F4MLV6_9BACT Queuine tRNA-ribosyltransferase OS=uncultured Flavobacteriia bacterium OX=212695 GN=tgt PE=3 SV=1
MVKYKTPIFMPVGTAGAVKSIYTEDLTIDTHAQIILSNTYHLYLRPGTDIIEKAGGIHKFITWNKPMLTDSGGFQVHSLQHIRKITEEGVQFQSHIDGSRHMFTPESVMDIQRKIGADIVMAFDECTNYPCEKTYAREAMLRTHRWLDRCIEYWDSSEGIYDYRQALFPIVQGSTYSDLRKQSAEYVASKEAFGNAIGGLSVGEPAEEMYAMTEKVCSILPTDRPRYLMGVGTPVNILENIALGVDMFDCVMPTRNARNGQIFTSEGIINIKNAKWADDLSPIDSNGDSCVDNRFSKAYLRHLFVSNEALGKQIASLHNLRFYLWLVEEARKHIIHGDFISWKNSMIPKLQSRL

SEQ ID NO: 62007 - protein, 376 aa, unidentified
  source 1..376: note = Flavobacteriia bacterium
  REGION 1..376: note = tr|H6RHN6|H6RHN6_9BACT Queuine tRNA-ribosyltransferase OS=uncultured Flavobacteriia bacterium OX=212695 GN=tgt PE=3 SV=1
MKFNLSHRDPQSKARAATLETDHGIIETPIFMPVGTVASVKGVHQRELKEEIKPDIILGNTYHLYLRPKTDILMKAGGLHKFMGWDKNILTDSGGYQVYSLSSNRKIKEEGVKFKSHIDGSYHFFTPENVMEIQRNIGADIIMAFDECTPYPCDYSYAKRSMHMTHRWLDRCMTHLEKTPYTYDYEQTFFPIVQGSTYKDLRRQSAEFIASVGAQGNAIGGLSVGEPADEMYAMTEVVCEVLPEDKPRYLMGVGTPINILENIALGIDMFDCVMPTRNARNGMLFTAHGTINIKNKKWEADFSAVDEMGHTFVDTEYSKAYLRHLFAANEYLGKQIATIHNLGFYMWLVRTAREKIIAGEFAAWKAMMVVQMDKRL

SEQ ID NO: 62008 - protein, 381 aa, Flavonifractor sp.
  REGION 1..381: note = tr|A0A1C5Y7F7|A0A1C5Y7F7_9FIRM Queuine tRNA-ribosyltransferase OS=uncultured Flavonifractor sp.; OX = 1193534 GN=tgt PE=3 SV=1
MFQLLKTEVKARRGVFTCPHGTVQTPVFMNVGTCGAIKGAVSAHDLKEIGCQIELSNTYHLHLRPGDDVVRQMGGLHKFMDWDGPMLTDSGGFQVFSLSGLRKITEEGVTFASHIDGKRIFMGPEESMRIQSNLGSDIAMAFDECVENPAPYDYVKASCERTARWLDRCAVEHRKLNEAPGCVNPGQMLFGINQGGTYADLRKWHMDEIAKLDCDGYAIGGLAVGEPTQTMYDIIEAVEPHMPKEKPRYLMGVGTPSNIIEGVARGVDFFDCVMPARNARHGKLYTWEGTINIKNEKYKLDSRPIDPTCNCPVCRSFSRAYLRHLLTAGEMLAMRLAVLHNLHFYNELMLRIREALDQGRFEAFRQKFSGKLDRPAADPGI

SEQ ID NO: 62009 - protein, 379 aa, Flavonifractor sp.
  REGION 1..379: note = tr|A0A1C6DR81|A0A1C6DR81_9FIRM Queuine tRNA-ribosyltransferase OS=uncultured Flavonifractor sp.; OX = 1193534 GN=tgt PE=3 SV=1
MFEVVKTEGRARRGVFTCAHGTVQTPVFMNVGTQGAIKGAVSAHDLKEIGCQVELSNTYHLHLRPGDGVVKEMGGLHKFMDWSGPILTDSGGFQVFSLSGLRKITEEGVTFASHIDGRRVFMGPEESMRIQSNLGSDIAMAFDECVANPSTREYVKPSCERTLRWLARCKEEHDRLNSLSDTVNPHQMLFGINQGGIYPDLRVWHMKETAKIDCDGYAIGGLAVGEPTQTMYDIIDAVEPHMPKDKPRYLMGVGTPSNIIEAVARGVDFFDCVMPARNARHGKLYTWEGTLNIKNEKYKTDPTPIDPTCTCPACSSFSRAYLRHLFAAGEMLAMRLAVLHNLHFYNELMVRIRAALDEGTFEEFRRTYSGKLDAPIGNS

SEQ ID NO: 62010 - protein, 367 aa, unidentified
  source 1..367: note = Gammaproteobacteria bacterium
  REGION 1..367: note = tr|A0A5E5PPE2|A0A5E5PPE2_9GAMM Queuine tRNA-ribosyltransferase OS=uncultured Gammaproteobacteria bacterium OX=86473 GN=tgt PE=3 SV=1
MKFKLKNTNDKARRGTMIFARGTVETPAFMPVGTYGTVKAMTPEEVEGIGAQIILGNTFHLSITPGTDVIKAHGDLHDFMHWQGPILTDSGGFQVFSLGDMRKISEAGVDFRSPKDGAKIFMGPEESIKIQSDLGSDIVMIFDECTPYPADKVTAEQSMQLSLRWAQRSKDAHQALGNENALFGIVQGGMYEDLRQQSAKKLIEIDFDGYAIGGLSVGEPKEEMIKVLDFLPEQLPDDKPRYLMGVGTPSDLVEAVERGIDMFDCVMPTRNARNGYLFTSSGIVKIRNAQYKLDTKPLDKRCGCYTCQNYSRSYLHHLQRKNEILGARLNTIHNLYYYQDLMKGMREAIEKGVFAEFKQLFYKMQNE

SEQ ID NO: 62011 - protein, 367 aa, unidentified
  source 1..367: note = Gammaproteobacteria bacterium
  REGION 1..367: note = tr|A0A5E5QFK7|A0A5E5QFK7_9GAMM Queuine tRNA-ribosyltransferase OS=uncultured Gammaproteobacteria bacterium OX=86473 GN=tgt PE=3 SV=1
MKFKLKNTNNKARRGTMIFARGMVETPAFMPVGTYGTVKAMTPEEVKGIGAQIILGNTFHLSITPGTEVIKAHGDLHDFMHWQGPILTDSGGFQVFSLGDMRKISEAGVDFRSPKDGAKIFMGPEESIKIQSDLGADIVMIFDECTPYPADKVTAEQSMQLSLRWAQRSKDTHQALGNENALFGIVQGGMYEDLRQQSAKKLIEIEFDGYAIGGLSVGEPKEAMIKVLDFLPEQLPKDKPRYLMGVGTPSDLVEAVERGIDMFDCVMPTRNARNGYLFTSSGIVKIRNAQYKLDTKPLDERCACYTCQHYSRSYLHHLQRKNEILGARLNTIHNLYYYQDLMAGMREAIEQGVFAEFKQWFYKMQNA

SEQ ID NO: 62012 - protein, 379 aa, Lachnospira sp.
  REGION 1..379: note = tr|A0A1C6EYY1|A0A1C6EYY1_9FIRM Queuine tRNA-ribosyltransferase OS=uncultured Lachnospira sp.; OX = 446043 GN=tgt PE=3 SV=1
MEYEILKTEGRAKRARVSTVHGEIQTPVFMNVGTVAAIKGAVSTMDLKEIHTQVELSNTYHLHVRTGDKLIKQFGGLHKFMNWDRPILTDSGGFQVFSLAGMRKIKEEGVYFQSHIDGHRIFMGPEESMQIQSNLGSTIAMAFDECPSSVADRSYIKNSVERTTRWLARCKTEMARLNSLEDTINPHQLLFGINQGGVYEDIRIEHAKRISEMDLDGYAVGGLAVGESHEEMYRILDAVVPYLPKNKPTYLMGVGTPANILEGVDRGIDFFDCVYPSRNGRHGHVYTKHGKLNLFNARYELDSRPIEEGCQCPACRAYSRAYIRHLLKAKEMLGMRLCVLHNLYFYNNLMTEIRESIDNGCFAEYKKNMLESMAAGPQD

SEQ ID NO: 62013 - protein, 341 aa, unidentified
  source 1..341: note = Unknown
  REGION 1..341: note = tr|Q6SI06|Q6SI06_9BACT Queuine tRNA-ribosyltransferase OS=uncultured marine bacterium 106; OX = 257383 GN=tgt PE=3 SV=1
MPVGTLGTVKALTPEEVRELGAEIILGNTYHLHLRPGDELVRKLGGLHHFMNWDGPILTDSGGFQIFSLAKLLKLDQSGVVIRSHIDGSKITLTPEISIAIQQNLGSTIMMCLDQCLELPATRQEIERSIALTTKWAQRSKDASSQGSGVSGEQALFGIVQGGGELNLREQSLEQMVNIGFDGYAIGGLSVGETKEEMYSVVHHIAAKMPAQKPRYLMGVGDPEDLLEGIEAGIDMFDCVMPTRNARNGSLFTSHGKISIKKNQYKEDPAPLDPDCACSTCKNYSRAYLRHLFKTNEILGMRLNTYHNLFFYIYLIKQARNAIKEKRFPNFKKTFLQKYRS

SEQ ID NO: 62014 - protein, 372 aa, unidentified
  source 1..372: note = Unknown
  REGION 1..372: note = tr|A4GHV1|A4GHV1_9BACT Queuine tRNA-ribosyltransferase OS=uncultured marine bacterium EB0_39H12 OX=415437 GN=tgt PE=3 SV=1
MYSLLKKEGSARRGEVKTLHGTFQTPAFMPVGTYGAVKSLTPENLNQINAEIILSNTYHLMERPGVEIIKSHGGLHEFMGWDKPILTDSGGYQVFSLAKKRKISEEGVEFVSPLNGNKIFLDPETCMELQTGYGVDIAMVLDECTPYPVEKPIAENSMNLSLRWAQRSREAFKSDKSSLFGIIQGGIYEDLREQSLESLKTMGFEGYAIGGLSVGEPKEHLRNIVSHVAPLMPEDKPRYLMGVGTPLDIVKAVESGVDMFDCVIPTRHARNGYLYTSEGVVKIRNSVHKDSLESLDRNCNCYTCKNFSRSYLHHLDKTKEMLGSTLQTIHNLSFYLNLMRNLRVSIERGTLHPFIEEFEQTWNKFESPNINN

SEQ ID NO: 62015 - protein, 368 aa, Megasphaera sp.
  REGION 1..368: note = tr|A0A1C5L810|A0A1C5L810_9FIRM Queuine tRNA-ribosyltransferase OS=uncultured Megasphaera sp.; OX = 165188 GN=tgt PE=3 SV=1
MVITYELQAECDGARAGILRTPHGTFKTPMFMPVGTQATVKTLSPEELYDMGAQVILSNTYHLFLRPGEDLVKEAGGLHKFMNWKQAILTDSGGFQVFSLGQMRKITEEGVTFRSHLDGSKKFLSPEVSMDVQMALNSDIAMAFDECIPYPSDYDYTLHSTERTSRWAKRCLDHHHSDTQGLFGIVQGGMYADLRRKSCEELVDMNFDGYGIGGLSVGESKDIMYDILDHTTPYLPQTKARYLMGVGTPDCLVEGVARGVDMFDCVFPTRVARNGMAMTHTGRLTVRNAKYARDFSPIEEGCGCYTCRNYTRAYIRHLFKAEELLAYRLVSIHNLYSLLQFMRDMRQSILDGTFRQFRQEFWKRYQDA

SEQ ID NO: 62016 - protein, 410 aa, Mycobacterium sp.
  REGION 1..410: note = tr|A0A1Y5PAZ2|A0A1Y5PAZ2_9MYCO Queuine tRNA-ribosyltransferase OS=uncultured Mycobacterium sp.; OX = 171292 GN=tgt PE=3 SV=1
MPFFTVGAELPGRRGRAGVIHTPHGDIHTPAFIAVGTKATVKAVLPETMRDLGAQAVLANAYHLYLQPGPDIVDEAGGLGAFMNWPGPTFTDSGGFQVLSLGAGFRKVLSMDANRVQADDVIAEGKQRLAHVDDDGVTFTSHLDGSTHRFTPEVSMQIQHTIGADIIFAFDELTTLVNTRGYQEESVDRTQAWAVRCLTEHRRLTAERPERPSQALFGVVQGAQYEDLRRQASRDLASIVDAEGRGFDGYGIGGALEKQNLATIVGWCTDELPDDKPRHLLGISEPDDLFAAVAAGADTFDCVSPSRVARNAAVYSPTGRFNITGARYRRDFTPIDAECDCYTCGHYTRAYLHHLFKAKEILSATLCTIHNERFVIRLVDQIRAAIVTGEFDELRDHVLGQYYGHSTRAQ

SEQ ID NO: 62017 - protein, 364 aa, unidentified
  source 1..364: note = Unknown
  REGION 1..364: note = tr|E7C7P3|E7C7P3_9BACT Queuine tRNA-ribosyltransferase OS=uncultured nuHF1 cluster bacterium HF0770_35I22 OX=723586 GN=tgt PE=3 SV=1
MGQARTGVLSTAHGVINTPTFMAVGTAATVKAMTPEAVSETGTQVILGNTYHLMLRPGADRIENFGGLHRFMNWGGPILTDSGGFQTMSLSNLRELDESGVKFRSHIDGSYHELTPEGAINMQKKFGSDISMVLDECTPFPETENGSKKSMLRSMRWAERSKSAFEPREGHGLFGIVHGGMHPQIRVESVEILKNIGFDGYAIGGLSVGEKQETMFNILDYTASILPPDKPRYLMGVGKPSDLVGAVIRGVDMFDCVLPTRSGRTNQAFTHMGELNMRNAKHRDSKSPIDPKCHCYTCDNYTRGYLHHLVMSKEILGLSLLTWHNLQYYQDLMKGLRQAITSGLLSNFATQFYEDQEIGDTVSN

SEQ ID NO: 62018 - protein, 377 aa, Oscillibacter sp.
  REGION 1..377: note = tr|A0A1C5NW07|A0A1C5NW07_9FIRM Queuine tRNA-ribosyltransferase OS=uncultured Oscillibacter sp.; OX = 876091 GN=tgt PE=3 SV=1
MFKVLKTEGRARRGEFSCAHGGVVQTPVFMNVGTQGAIKGGVSAHDLKEVGCQIELSNTYHLHLRPGDHIVRQMGGLHKFMDWDGPILTDSGGFQVFSLASLRKIREEGVTFASHIDGHRIFMGPEESMQIQSNLGSDIAMAFDECVENPATYEYAKASCERTARWLERCKAEHDRLNALPDTVNPGQMLFGINQGATFADLRVWHMDQIAKIDCDGYAIGGLAVGEPAEVMYEIIDAVEPHMPKDKPRYLMGVGTPSNIIEGVARGVDFFDCVMPSRNGRHGKLFTWEGTVNILNEKYATDPRPISESCGCPACRRFSRAYIRHLFKADEVLALRLAVLHNLYFYNELAARIRRALDEGTFADFRARYSGNLEKRA

SEQ ID NO: 62019 - protein, 377 aa, Oscillibacter sp.; identical to SEQ ID NO: 54838
  REGION 1..377: note = tr|A0A1C6I9P6|A0A1C6I9P6_9FIRM Queuine tRNA-ribosyltransferase OS=uncultured Oscillibacter sp.; OX = 876091 GN=tgt PE=3 SV=1

SEQ ID NO: 62020 - protein, 288 aa, unidentified
  source 1..288: note = Unknown
  REGION 1..288: note = tr|H5SDM1|H5SDM1_9BACT Queuine tRNA-ribosyltransferase (Fragment) OS=uncultured planctomycete OX=120965 GN=HGMM_F14B06C01 PE=3 SV=1
MSTAGEEIFSVVRTDSQTLARCGILRTAHGIVHTPAFMPVGTQASIKGLLPHLVEGTGTEIILSNTYHLLLRPKPETVAALGGLHRFMGWHKPILTDSGGFQVFSLAQLTRIEERGAVFRSHLDGSLVELTPERAIEVQEMLGSDIAMVLDHVVALPNERSLIEDAMERSLRWAERCQKAHKRKDQWLFGIVQGGLEPDLRLRCVKELIQIGFDGYAIGGLSVGEPPAEMYRILDVVAPSLPAERPRYLMGVGRPIDLLEAIARGVDMFDCVMPTRNGRNAMAFTEAG

SEQ ID NO: 62021 - protein, 413 aa, Pleomorphomonas sp.
  REGION 1..413: note = tr|A0A212L914|A0A212L914_9RHIZ Queuine tRNA-ribosyltransferase OS=uncultured Pleomorphomonas sp.; OX = 442121 GN=tgt PE=3 SV=1
MGTKRCPLPLVGESWREGWETRRIRKRRPESKAQPMTQPFSFRLLATDGRARRGEILTPHGVVRTPAFMPVGTLGTVKAMFMDDVKATGADVILGNTYHLMLRPGAERVAALGGLHKFSTWDKTILTDSGGFQVMSLAKLRRMDEQGVTFQSHIDGSRHELTPERSIEIQGLLGSDIQMQLDECVRLPAEPKEVERGMRLSLRWAERSRRQFEAMGGPQKGQGLYGIVQGGDVSSLREISARELSAMPFEGYSVGGLAVGEPQAVMLEMIDVVDPILPQGKPRYLMGVGTPDDIIESVARGIDQFDCVMPTRAGRHGLAYTRFGKLNFKNARHMDDPRPIDPTSDCPAARDYSRAYIHHLVRTGESLGAMLLTWVNVAYYQSLMAGIRDSIEAGRFEAFKAETKAAWARGENG

SEQ ID NO: 62022 - protein, 376 aa, Polaribacter sp.
  REGION 1..376: note = tr|F4MLD6|F4MLD6_9FLAO Queuine tRNA-ribosyltransferase OS=uncultured Polaribacter sp.; OX = 174711 GN=tgt PE=3 SV=1
MKFDLKITDPKSKARAGKITTDHGTIETPIFMPVGTVGTVKGVHQTELKDQINPDIILANTYHLFLRPGMDILEKAGGIHKFMNWDRNILTDSGGYQVYSLSGRRKINEEGVKFKSHIDGSMHFFTPENVMETQRTIGADIIMAFDECTPYPCDYNYAKRSMHMTHRWLDRCMNHLEKLPFKYGFEQTFFPIVQGSTYKDLRKQSAEYIANAGAQGNAIGGLSVGEPAEELYGMTEIVCEILPEDKPRYLMGVGTPINILENIALGVDMFDCVMPTRNARNGMLFTAHGSINIKNKKWEDDFSPIDDMGITWVDTMYSKAYLRHLFAAKEMLGKQIASIHNLGFYVWLTREARKHIIAGDFREWKDKMVKQMDKRL

SEQ ID NO: 62023 - protein, 372 aa, Prochlorococcus marinus
  REGION 1..372: note = tr|Q1PJ67|Q1PJ67_PROMR Queuine tRNA-ribosyltransferase OS=uncultured Prochlorococcus marinus clone HOT0M-8G12 OX=379396 GN=tgt PE=3 SV=1
MFEFEITSNCSNTFARTGIFHTPNGKVNTPRFMPVGTLATVKGISSKQLTSTGSEMILSNTFHLHLQPGEKLVKESGGIHKFMNWHKPILTDSGGYQVFSLAKLNNISDKGVEFKNPRDGSHVFLSPKKVMQIQMDLGSDVAMAFDHCPPHTANENEIEESLQRTHSWLQKCVDTHQKSNQALFGIVQGGKYPRLREFSAKFTSSFDLPGIAVGGVSVGEGLEEIHSVINYVPRFLPINKPRYLMGIGSLKEISLAVANGFDIFDCVLPTRLGRHGTAFFNDERLNLRNARFKNDFFPIDKNCKCETCKSYSRAYLHHLIRNDEILGLTLISLHNIAHLIRFTNAISTAIKDNCFTIDFAPWKTSSIAHHTW

SEQ ID NO: 62024 - protein, 376 aa, Roseburia sp.
  REGION 1..376: note = tr|A0A1C6E9B5|A0A1C6E9B5_9FIRM Queuine tRNA-ribosyltransferase OS=uncultured Roseburia sp.; OX = 512314 GN=tgt PE=3 SV=1
MYRIIKKDGLAKRGELQTVHGTVQTPLFMNVGTAAAIKGAVATTDLLKIKTQIELSNTYHLHVRPGDKLIKELGGLHKFMVWDKPILTDSGGFQVFSLAGLRKIKEEGVYFNSHVDGRKIFMGPEESMQIQSNLASTIAMAFDECPSAVADRGYVQNSVDRTFRWLGRCKDEMQRLNGLEDTINKHQMLFGINQGAIYDDIRVDHAKRISELDLDGYALGGLAVGESHEEMYHILDVTVPHLPVDKPTYLMGVGTPANILEAVDRGVDFFDCVYPSRNGRHGHVYTNYGKLNLFNQKYEKDMRPIEEGCQCPACRTYSRAYIRHLLKAKEMLGMRLCVLHNLYFYNTMMEEIREAIEQERYRTYKEEKLYRMSQGK

SEQ ID NO: 62025 - protein, 383 aa, Roseburia sp.
  REGION 1..383: note = tr|A0A1C5PMD1|A0A1C5PMD1_9FIRM Queuine tRNA-ribosyltransferase OS=uncultured Roseburia sp.; OX = 512314 GN=tgt PE=3 SV=1
MYELLKQDGRAKRGIFHTVHGDIQTPVFMNVGTVAAIKGAVSTEDLEQIKTQVELSNTYHLHVRPGDKLIKELGGLHKFMVWDKPILTDSGGFQVFSLAGLRKIKEEGVYFHSHIDGAKIFMGPEESMQIQSNLASTIAMAFDECAPALADRGYVEASVARTTRWLARCKAEMTRLNGLEDTINKNQMLFGINQGAIYPDIRVDHAKRISELDLDGYAVGGLAVGETHEEMYDILDQTVPYLPLEKPTYLMGVGTPANILEAVDRGVDFFDCVYPTRNGRHGHLYTNQGKINLFNKKYEKDMRPIEEGCQCPTCRRYSRAYVRHLLKAKEMLGMRLCVLHNLYFYNTMMEEIRDAIDAGSYKSYKEEKLYGMNQINREKEAQI

SEQ ID NO: 62026 - protein, 376 aa, Ruminococcus sp.; identical to SEQ ID NO: 60473
  REGION 1..376: note = tr|A0A1C6BB29|A0A1C6BB29_9FIRM Queuine tRNA-ribosyltransferase OS=uncultured Ruminococcus sp.; OX = 165186 GN=tgt_2 PE=3 SV=1

SEQ ID NO: 62027 - protein, 376 aa, Ruminococcus sp.
  REGION 1..376: note = tr|A0A1C6G551|A0A1C6G551_9FIRM Queuine tRNA-ribosyltransferase OS=uncultured Ruminococcus sp.; OX = 165186 GN=tgt PE=3 SV=1
MYKLIKRDGNAKRGEFHTVHGVIQTPVFMNVGTAAAIKGAVSTEDLQQIGTQVELSNTYHLHVRPGDQVVKKMGGLHKFMVWDKPILTDSGGFQVFSLAGLRKIKEEGVYFNSHVDGRKIFMGPEQSMQIQSNLASTIAMAFDECPSSVAEREYVQRSVERTTRWLHRCKEEMARLNSLPDTINQHQMLFGINQGAIYEDIRIEHAQQIRELDLDGYAVGGLAVGESHEEMYRILDAVVPELPVDKPTYLMGVGTPANILEAVDRGVDFFDCVYPSRNGRHGHVYTNHGKLNLFNAKYELDPKPIEEGCQCPACRHYSRAYIRHLLKAKEMLGMRLCVLHNLYFYNHLMEEIRDAIEAGNYKAFKKEKLSGFENNA

SEQ ID NO: 62028 - protein, 376 aa, Sphingobacterium sp.
  REGION 1..376: note = tr|E0Y0S9|E0Y0S9_9SPHI Queuine tRNA-ribosyltransferase OS=uncultured Sphingobacterium sp. EB080_L08E11 OX=710992 GN=tgt PE=3 SV=1
MKFTLEHNDPKSAARAGTIATDHGTIQTPIFMPVGTAGTVKGVHTKDLREDTKAQIILGNTYHLFLRPGTEILKAAGGLHKFNGWDRPILTDSGGYQVYSLANQRKITEEGATFASHIDGTKHLFTPERVMDIQREIGADIIMAFDECPPYPSTYEYAKQSMHMTHRWLDRCFNRINETDPLYGYEQTLFPIIQGSTYEDLRNESAEYIASKNAEGNAIGGLSVGEPAEEMYKHAAGACAILPKDKPRYLMGVGTPANILENISLGIDMFDCVMPTRNGRNGQIFTSEGILNLRNKKWENVHEPLDPNGTSFVDSQYTKAYVRHLIHSKESLGAQIASLHNIRFYLWLVEQAREHIIAGDFASWKNQILPKLEQRL

SEQ ID NO: 62029 - protein, 374 aa, Sphingopyxis sp.
  REGION 1..374: note = tr|A0A1Y5PNL5|A0A1Y5PNL5_9SPHN Queuine tRNA-ribosyltransferase OS=uncultured Sphingopyxis sp.; OX = 310581 GN=tgt PE=3 SV=1
MADRFAFQISATDGAARTGVIAMQRGAIRTPAFMPVGTAATVKAMRPAEVRATGADIILGNTYHLMLRPTAERMARLGGLHKFMSWDRPILTDSGGYQVMSLSALTKQSEEGVAFKSHLDGSRHMLTPERSMEIQRLLGSDIVMAFDECPPSGVDAKRAAASMERSMRWAARSRAGFDAGGEHASRSALFGIQQGSLDEKLRARSAAALTDIGFDGYAIGGLAVGEGQEAMFGVLDYAPGQLPADKPRYLMGVGKPDDLVGAVARGVDMFDCVLPTRSGRNGQAFTRDGPINIRNAKFAEDQAPLDADCHCPVCTTWSRAYLHHLVRSGEMLGAMLMTQHNLHHYQDLMQDMRDAIAAGTFAAFQRDFDARYRR

SEQ ID NO: 62030 - protein, 380 aa, unidentified
  source 1..380: note = Unknown
  REGION 1..380: note = tr|A0A3P3XTI4|A0A3P3XTI4_9SPIR Queuine tRNA-ribosyltransferase OS=uncultured spirochete OX=156406; GN = tgt PE=3 SV=1
MSEPIFHEIHRDNSCRARTGILSLPHGDVQTPAFMPVGTNATVKAVEPKDIAEMGFSIILANTYHLFLRPGPEIIAKAGGLHGFSGWKGNFLTDSGGFQVFSLSQFRKILVEGVHFKSHIDGSSHVLTPEKVVDVQVAFNSDIQMALDICAPWGETEKKAYHAAMLTYDWAKRAKSQWLAQRDHGYQGYLFGIVQGNFYRELRKTSAEQIGSLDFPGIAIGGLSIGEPKDAYIEYLEYTATLLPSEKPHYLMGIGTPDYIIEAVRNGIDIFDCVYPTRTARNGLLFTSKGQITIKKAMYREDYLPIDPECTCHVCRTYSRAYLHHLFRNNEILYSMLASQHNLHFMAQFVSDIRHAIEEDKFELFAGNFLHVYEKMSSQD

SEQ ID NO: 62031 - protein, 380 aa, unidentified
  source 1..380: note = Unknown
  REGION 1..380: note = tr|A0A3P3XF55|A0A3P3XF55_9SPIR Queuine tRNA-ribosyltransferase OS=uncultured spirochete OX=156406; GN = tgt PE=3 SV=1
MANSIFIEKHRDPSCRARTGTLFLPHGEVETPTFMPVGTNATVKAVEPADLDAMGFNIILANTYHLFLRPGPDIIAKAGGLHGFSGWKKNFLTDSGGFQVFSLSQFRKILQEGVHFKSHIDGSSHVLTPEKVVDVQVAFNSDIQMALDICAPWGETEKKAFRAAMLTYDWAKRAKSQWIMHRENGYQGNLFGIVQGNFYEELRKLSAEQISELDLPGIAIGGLSIGEPKEAYIEYLELTSALLPLDKPHYLMGIGTPDYIIEAVRNGIDIFDCVYPTRTARNGLLFTSKGQITIKKAIFKEDFSPIDPECSCHVCKTYSRAYLHHLFRNNEILYSMLASQHNLHFTADFVGKIRRAIEQDRFEAFARAFMSGYSEAAAAE

SEQ ID NO: 62032 - protein, 369 aa, Sporomusa sp.
  REGION 1..369: note = tr|A0A212LS19|A0A212LS19_9FIRM Queuine tRNA-ribosyltransferase OS=uncultured Sporomusa sp.; OX = 307249 GN=tgt PE=3 SV=1
MAITYELIKRCSKTGARAGRIHTPHGVFDTPIFMPVGTQATVKAMSPDELKAMGAGIILSNTYHLYLRPGHDLVAEAGGLHKFMQWDRAILTDSGGFQVFSLGPLRKITEDGVTFRSHIDGSKHFLSPEKATEVQMALGADIIMAFDECVPYPAEHEYARQSTERTTRWAERCRKAHTRKDQALFGIVQGGMYKDLRTMSARDLVSLDFPGYAIGGLSVGEPKPLMYEMLEHTVPLLPQNKPRYLMGVGTPDCLLEGVMYGIDMFDCVFPTRVARNGTVMTNRGRLVVKNAEFARDFRPIDPDCNCYTCRNFSRAYIRHLLKTEEIFGLRLTTTHNLHFLVNFMKEMRQSILDERFLEFREEFWAYYHK

SEQ ID NO: 62033 - protein, 376 aa, Stenotrophomonas sp.
  REGION 1..376: note = tr|A0A1Y5Q7K9|A0A1Y5Q7K9_9GAMM Queuine tRNA-ribosyltransferase OS=uncultured Stenotrophomonas sp.; OX = 165438 GN=tgt PE=3 SV=1
MSRLQFTLQTTDGNARRGQLSFPRGTVQTPAFMPVGTYGSVKGVLPEQVRALGAEIILGNTFHLYLRPGLDVIADHGGLHGFCRWNGPILTDSGGFQVFSLAHRRKITEQGVTFASPTDGARVFLGPEESMKIQKVLDSDVVMIFDECTPYPATEPVARKSMELSLRWAQRSRDAHDALGNDAALFGIVQGGVHIDLRSRSAEGLQQIGFDGYAIGGLAVGEPEHERNAMLEHMHPILPADRPRYLMGVGRPEDLVEGVARGVDMFDCVMPTRNARNGHYFTSFGTVRIRNARYERDMDTIEPGCGCHACNSGYTRSYLRHLDRCNEMLAPMLGTLHNLYYYEKLMADMRAAIEAGTFLAFRESFYAARGTVAPAL

SEQ ID NO: 62034 - protein, 162 aa, unidentified
  source 1..162: note = Unknown
  REGION 1..162: note = tr|A0A482ZTL3|A0A482ZTL3_9GAMM tRNA-guanine transglycosylase OS=uncultured SUP05 cluster bacterium; OX = 655186 GN=SPONL_694 PE=4 SV=1
MSETKVDDMLIEMIEPKIKEIEQRFSDGEGLTQDDINTLLLKSQYNHINHLDDKLNEVTASVIGLEGKFNILEGGFNTLEGKFELLKTDIESKFDILEGKFELLKTDLESKFELLKTDLEGKFDLLKTDIEVTIQKALNKNMLVLVAAMGFFLTLSKLIDKF

SEQ ID NO: 62035 - protein, 365 aa, unidentified
  source 1..365: note = Unknown
  REGION 1..365: note = tr|D1KB21|D1KB21_9GAMM Queuine tRNA-ribosyltransferase OS=uncultured SUP05 cluster bacterium OX=655186 GN=tgt PE=3 SV=1
MKFNLINTDNKARRGTLIFDRGEVETPAFMPVGTYGTVKAMTPEEVSETGAQIILGNTFHLDITPGTDVIEAHGDLHDFMHWQGPILTDSGGFQVFSLGDMRKISEQGVDFQSPKNGDKIFMGPEESMQIQKKLGSDIVMIFDECTPYPADKVTASQSMQLSLRWAKRSKDEHNRLNNNNALFGIVQGGMHEDLRIESIEALVNIGFDGFAIGGLSVGEPKEEMMKVLDYLPEKMPKDKPRYLMGVGTPSDLVEAVERGIDMFDCVMPTRNARNGYLFTSVGIVKIRNAQYRFDISALDEHCECYTCKNYTKSYLHHLQRKNEILGARLNTIHNLHYYQYLMNQMRVAIEKNTFSEFKKDFYEQQ

SEQ ID NO: 62036 - protein, 366 aa, Thiohalocapsa sp.
  REGION 1..366: note = tr|V4JA47|V4JA47_9GAMM Queuine tRNA-ribosyltransferase OS=uncultured Thiohalocapsa sp. PB-PSB1 OX=1385625 GN=tgt PE=3 SV=1
MRFELLATDGAARRARLHFERGIVDTPAFMPVGTYGTVKAMTPEETATTGAQIILGNTFHLMARPGTAVIAAHGDLHDFMRWDGPILTDSGGFQVFSLGDLRKITEPGVHFRSPVDGRPLFMGPEESMTVQRELGSDIVMIFDDCTPYPASWEQAHASMRRSLRWAARCKTAHGDNPSALFGINQGGMYPDLRAESLAGLLEIGFDGYAIGGLSVGEPEAERLEVLDFLADRLPSAFPHYLMGVGTPEDLIAGVQRGIDLFDCVMPTRNARNGHLFTHTGTVRIRNAEHKTSTDSLDPHCNCYTCRNYSRAYLHHLDKCNEILGARLNTIHNLTYYQTLMSGMRDAIAAGALHQFVADFFARRIVS

SEQ ID NO: 62037 - protein, 377 aa, Undibacterium parvum
  REGION 1..377: note = tr|A0A3Q9BRL4|A0A3Q9BRL4_9BURK Queuine tRNA-ribosyltransferase OS=Undibacterium parvum OX=401471; GN = tgt PE=3 SV=1
MLEFTLIKKDKTSAARRGRVRVNHGVIETPIFMPVGTYGSVKAMSPLELKEIDAHIILGNTFHLWLRPGMNVINKFGGLHDFMGWDKPILTDSGGFQVFSLGAMRKITEEGVKFSSPINGERLFLSPEISMQIQRSLNSDIVMQFDECTPYEIDGRAATTEEAGKSMRMSLRWAQRSIDEFNRGENPNALFGIVQGGMFENLRDESLAGLNEMNFHGIAIGGLSVGEPKEDMMRVLQHIGPKLPENKPHYLMGVGTPEDLVAGVTNGIDMFDCVMPTRNARNGWIFTRYGDVKIKNARYKEEKEPLDATCECYTCKNFSRAYLHHLHRTGEILGARLNTIHNLHYYLDLMKKIRQSLDDERFPEFVAEFRADRARGV

SEQ ID NO: 62038 - protein, 377 aa, Undibacterium pigrum
  REGION 1..377: note = tr|A0A318JAM1|A0A318JAM1_9BURK Queuine tRNA-ribosyltransferase OS=Undibacterium pigrum OX=401470; GN = tgt PE=3 SV=1
MLEFTLIKKDKTTAARRGRVKVNHGEIETPIFMPVGTYGSVKAMSPLELKEIDAHIILGNTFHLWLRPGTDVLNKFGGLHGFMGWDKPILTDSGGFQVFSLGAMRKITEEGVKFSSPISGERLFLSPEISMQIQRALNSDIVMQFDECTPYEIDGRPATTEEAGKSMRMSLRWAKRSIDEFNQGENPNALFGIVQGGMFEHLRDESLAGLNELNFHGIAIGGLSVGEPKEDMMRVLAHVGPKLPENKPHYLMGVGTPEDLVAGVANGIDMFDCVMPTRNARNGWIFTRFGDIKIKNARYKEDKEPLDATCECYACKNFSRAYLHHLHRTGEILGARLNTIHNLHYYLDLMKNIRKALDDERFPEFVQQFHADRARGV

SEQ ID NO: 62039 - protein, 377 aa, Undibacterium sp.
  REGION 1..377: note = tr|A0A3S0H1Z5|A0A3S0H1Z5_9BURK Queuine tRNA-ribosyltransferase OS=Undibacterium sp. S11R28; OX = 2495591 GN=tgt PE=3 SV=1
MLEFTLIKKDKTSAARRGRVRVNHGVIETPIFMPVGTYGSVKAMSPLELKEIDAHIILGNTFHLWLRPGMNVINKFGGLHDFMGWDKPILTDSGGFQVFSLGAMRKITEEGVKFSSPINGERLFLSPEISMQIQRSLNSDIVMQFDECTPYEIDGRAATNEEAGKSMRMSLRWAQRSIDEFNRGENPNALFGIVQGGMFEHLRDESLAGLNELNFHGIAIGGLSVGEPKEDMMRVLAHIGPKLPENKPHYLMGVGTPEDLIAGVTNGIDMFDCVMPTRNARNGWIFTRYGDVKIKNARYKEDKEPLDATCACYTCKNFSRAYLHHLHRTGEILGARLNTIHNLHYYLDLMKQVRQSLDDERFPEFVAEFRSDRARGV

SEQ ID NO: 62040 - protein, 376 aa, unidentified
  source 1..376: note = Unknown
  REGION 1..376: note = tr|A6ERS0|A6ERS0_9BACT Queuine tRNA-ribosyltransferase OS=unidentified eubacterium SCB49; OX = 50743 GN=tgt PE=3 SV=1
MDFKIEGTDINSQARAGTMTLDHGPVETPIFMPVGTVGTVKGVHQSELANEINPDIILGNTYHLYLRPSIDILEKAGGLHKFINWDRNILTDSGGYQVYSLSQNNKIKEEGVKFKSHIDGSYHLFTPENVMEIQRSIGADIIMAFDECTPYPCDYNYAKRSMHMTHRWLERCLTHLDKVPFKYDYSQTFFPIVQGSTYKDLRKQSAEYIAGVGAEGNAIGGLSVGEPAEEMYEMTEVVTAILPKDKPRYLMGVGTPINLLENIALGIDMFDCVMPTRNGRNGMLFTAHGTINIKNKKWEADFSAIDDMAITWVDTAYSKAYVRHLFTVNEMLGRQIATIHNLGFYLWLVREARKHIIAGDFTKWKNMMVKQMDKRL

SEQ ID NO: 62041 - protein, 381 aa, Ureibacillus terrenus
  REGION 1..381: note = tr|A0A540V044|A0A540V044_9BACL Queuine tRNA-ribosyltransferase OS=Ureibacillus terrenus OX=118246; GN = tgt PE=3 SV=1
MTQPAIRYELIKTCKQSGARLGIVHTPHGSFETPAFMPVGTQATVKTMSPEELKEIGAGIILSNTYHLWLRPGNDIVKEAGGLHKFMNWDRPILTDSGGFQVFSLSDLRKIKEEGVYFRNHLNGDKLFLSPEKSIQIQNDLGADIIMAFDECPPYPATYEYMLESVDRTTRWAKRCKEAHQRPEEQGLFGIVQGGEFEDLRKRSAEALVDLDLPGYAVGGLSVGEPKEVMYRVLEFTTPLLPVNKPRYLMGVGSPDALIEGAIRGIDMFDCVLPTRIARNGTLMTSQGRLVIKNAQYARDFGPLDPNCDCYACKNYSRAYVRHLIRSGEIFGLRLTTYHNLYFLLRLMEKVRQAIREDRLLDFRNEFFEQYGFNKPNAKNF

SEQ ID NO: 62042 - protein, 381 aa, Ureibacillus thermophilus
  REGION 1..381: note = tr|A0A4P6UVY3|A0A4P6UVY3_9BACL Queuine tRNA-ribosyltransferase OS=Ureibacillus thermophilus; OX = 367743 GN=tgt PE=3 SV=1
MTQPAIRYEHIKTCKQSGARLGIVHTPHGSFETPAFMPVGTQATVKTMSPEELKEIGAGIILSNTYHLWLRPGNDIVKEAGGLHKFMSWDRPILTDSGGFQVFSLSDLRKIEEEGVYFRNHLNGDKLFLSPEKSIEIQNDLGADIIMAFDECPPYPATYEYMLRSVDRTTRWAKRCKEAHKRPEEQGLFGIVQGGEFEDLRKRSAEALVELDFPGYAVGGLSVGEPKEVMYRVLEFTTPLLPKDKPRYLMGVGSPDALIEGAIRGIDMFDCVLPTRIARNGTLMTSQGRLVIKNAQYARDFGPLDPNCDCYACRNYSRAYVRHLIRTGEIFGMRLTTYHNLYFLLRLMEKVRQAIREDRLLDFRDEFFEQYGFNKPDAKNF

SEQ ID NO: 62043 - protein, 371 aa, Uruburuella suis
  REGION 1..371: note = tr|A0A4V6NQ21|A0A4V6NQ21_9NEIS Queuine tRNA-ribosyltransferase OS=Uruburuella suis OX=252130; GN = tgt PE=3 SV=1
MLKFTLHKKDGHARRGTLELNHGKIETPVFMPVGTYGSVKAMTPQNLHDINAQIILGNTYHLWLRPGLEVISQFGGLHDFIGWDKPILTDSGGFQVFSLSDMRKLTEEGCTFKSPINGDKLFLSPEISMQIQTVLNSDIAMQLDECTPGEAAHEQARKSLQMSLRWAERSKAEFERLNNPNALFGIVQGAMYEDLREESLKGLEQFDFPGLAIGGLSVGEPKPEMYRMLRTVGPMLPEHKPHYLMGVGTPEDLVYGVAHGVDMFDCVMPTRNARNGWLFTRFGDLKIKNAKHKLDTRPIDESCSCYACQNFSRAYLHHLHRAGEILGAQLNTIHNLHYYQVIMAEMREAIEQGQFENWRAQFHEQRARGTD

SEQ ID NO: 62044 - protein, 381 aa, Vagococcus acidifermentans
  REGION 1..381: note = tr|A0A430B398|A0A430B398_9ENTE Queuine tRNA-ribosyltransferase OS=Vagococcus acidifermentans; OX = 564710 GN=tgt PE=3 SV=1
MTEPAIRYRLIKKEKHTGARLGEIITPHGTFPTPMFMPVGTLATVKTMSPEELKEMGAGIILSNTYHLWLRPGEDIVQEAGGLHKFMNWNQGILTDSGGFQVWSLSDMRNISEEGVRFKNHLNGSEMFLSPEKAIHIQNALGSDIMMSFDECAPFYESHDYVKKSIERTSRWAERGLKAHQRPEDQGLFGIIQGAGYKDLRKQSAQELVAMDFPGYSIGGLSVGETKEEMNEVLEYVTPFIPDHKPRYLMGVGTADSLIDGAIRGVDMFDCVLPTRIARNGTCMTSKGRLVVKNAQYARDFRPLDEKCDCYTCRNYTRAYIRHLIKADETFGLRLTSYHNLYFLLDVMRQVRQAIMDDNLLEFREAFFEEYGFNKKNAKNF

SEQ ID NO: 62045 - protein, 381 aa, Vagococcus carniphilus
  REGION 1..381: note = tr|A0A430B3N3|A0A430B3N3_9ENTE Queuine tRNA-ribosyltransferase OS=Vagococcus carniphilus; OX = 218144 GN=tgt PE=3 SV=1
MSEPAIKYRLIKKEKHTGARLGEIITPHGTFPTPMFMPVGTLATVKTMAPEELKDMGAGIILSNTYHLWLRPGEDIVEEAGGLHKFMNWDQGILTDSGGFQVWSLSDMRKIEEEGVHFRNHLNGSKMFLSPEKAIQIQNKLGPDIMMSFDECPPFEQSHDYVKKSIERTSRWAERGLNAHQNADRQGLFGIIQGAGFKDLREQSAKDLVSLDFPGYSIGGLSVGEPKSEMNRVLEFTTPLIPENKPRYLMGVGTADSLIDGVIRGVDMFDCVLPTRIARNGTCMTSQGRLVVKNAQYAKDFRPIDEKCDCYTCRHYSRAYIRHLIKCDETFGIRLTSYHNLYFLLNVMKQVRQAIMDDNLLEFRQTFFEEYGFNEENPKNF

SEQ ID NO: 62046 - protein, 381 aa, Vagococcus elongatus
  REGION 1..381: note = tr|A0A430B131|A0A430B131_9ENTE Queuine tRNA-ribosyltransferase OS=Vagococcus elongatus OX=180344; GN = tgt PE=3 SV=1
MTEPAIRYRLIKKEKHTGARLGEIITPHGTFPTPMFMPVGTLATVKTMAPEELKEMGAGIILSNTYHLWLRPGEDIVAEAGGLHQFMNWDQGILTDSGGFQVWSLADMRNIEEKGVHFKNHLNGSKMFLSPEKAIQIQNQLGADIIMSFDECAPFYESHDYVKKSIERTTRWAERGLKAHANPEKQGLFGIIQGAGYKDLRLQSARDLISLDFPGYSIGGLSVGETKAEMNEALEWLNPVIPENKPRYLMGVGTADSLIDGAIRGVDMFDCVLPTRIARNGTCMTSQGRLVVKNAQYARDFRPLDEKCDCYTCRNYTRAYVRHLIKCDETFGLRLTSYHNLYFLLNVMKQVRQAILDDNLLEFREAFFEEYGFNQENPKNF

SEQ ID NO: 62047 - protein, 381 aa, unidentified
  source 1..381: note = Vagococcus entomophilus
  REGION 1..381: note = tr|A0A430AGM7|A0A430AGM7_9ENTE Queuine tRNA-ribosyltransferase OS=Vagococcus entomophilus; OX = 1160095 GN=tgt PE=3 SV=1
MTEPAIRYRLIKKEKHTGARLGEIITPHGTFPTPMFMPVGTLATVKTMAPEELKEMGAGIILSNTYHLWLRPGEDLVSEAGGLHKFMNWDQGILTDSGGFQVWSLSDIRDIKEEGVHFRNHLNGSKMFLSPEKAIDIQNKLGSDIMMSFDECAPFYESHDYVKKSIERTSRWAERGLKAHANPDSQGLFGIIQGAGFKDLREQSAKDLVSMDFPGYSIGGLSVGETKEEMNEMLEYTTPFIPENKPRYLMGVGTPDSLIDGVIRGIDMFDCVLPTRIARNGTCMTSQGRLVVKNAQYARDFRPIDEKCDCYTCRNYSRAYIRHLIKCDETFGIRLTSYHNLYFLLNVMKQVRQAIMDDNLLEFREAFFEEYGFNQKNAKKF

SEQ ID NO: 62048 - protein, 381 aa, Vagococcus fessus
  REGION 1..381: note = tr|A0A430A903|A0A430A903_9ENTE Queuine tRNA-ribosyltransferase OS=Vagococcus fessus OX=120370; GN = tgt PE=3 SV=1
MTEPAIRYRLIKTEKHTGARLGEIITPHGTFPTPMFMPVGTLATVKTMAPEELKEMGAGIILANTYHLWLRPGEDLVEKAGGLHKFMNWDQGILTDSGGFQVWSLSEMRNITEEGVSFKNHLNGSKMFLSPEKAIGIQNKLGPDIMMSFDECAPFYESHDYVKKSIERTSRWAERGLEAHANPDRQGLFGIIQGAGFKDLREQSAKDLISMDFPGYSIGGLSVGETKEEMNRVLDYMNPIIPQDKPRYLMGVGTADSLIDGVINGVDMFDCVLPTRIARNGTCMTSQGRLVIKNAKYAEDFRPIDEKCDCYACRNYTRAYIRHLIKCNETFGIRLTSYHNLYFLQTVMKDIRQAIMDDNLLEYREAFFEEYGFNKENAKNF

SEQ ID NO: 62049 - protein, 381 aa, Vagococcus fluvialis
  REGION 1..381: note = tr|A0A369B2T9|A0A369B2T9_9ENTE Queuine tRNA-ribosyltransferase OS=Vagococcus fluvialis OX=2738; GN = tgt PE=3 SV=1
MSEPAIKYRLIKKEKHTGARLGEIITPHGTFPTPMFMPVGTLATVKTMAPEELKEMGAGIILSNTYHLWLRPGEDIVEEAGGLHKFMNWDQGILTDSGGFQVWSLSDMRRIEEEGVHFRNHLNGSKMFLSPEKAIQIQNKLGPDIMMSFDECPPFEQSHDYVKKSIERTSRWAERGLEAHANKDRQGLFGIIQGAGYKDLREQSARDLVSLDFPGYSIGGLSVGETKQEMNKVLEYTTPLIPENKPRYLMGVGTADSLIDGVIRGVDMFDCVLPTRIARNGTCMTSQGRLVVKNAKYARDYRPIDEKCNCYTCRNYSRAYIRHLIKCDETFGIRLTSHHNLHFLLNVMKQVRQAIMDDNLLEFRQAFFEEYGFNEENAKNF

SEQ ID NO: 62050 - protein, 381 aa, Vagococcus fluvialis
  REGION 1..381: note = tr|A0A1X6WMQ2|A0A1X6WMQ2_9ENTE Queuine tRNA-ribosyltransferase OS=Vagococcus fluvialis bH819; OX = 1255619 GN=tgt PE=3 SV=1
MSEPAIKYRLIKKEKHTGARLGEIITPHGTFPTPMFMPVGTLGTVKTMAPEELKDMGAGIILSNTYHLWLRPGEDLVEEAGGLHKFMNWDQGILTDSGGFQVWSLSDMRRIEEEGVHFRNHLNGSKMFLSPEKAIQIQNKLGPDIMMSFDECPPFEQSHDYVKKSIERTSRWAERGLNAHANADRQGLFGIIQGAGFQDLREQSARDLVSLDFPGYSIGGLSVGESKQEMNKVLEYTTPLIPENKPRYLMGVGTADSLIDGVIRGVDMFDCVLPTRIARNGTCMTSKGRLVVKNAKFARDFRPLDEKCDCYTCRNYSRAYIRHLIKCDETFGIRLTSYHNLYFLLNVMKQVRQAIMDDNLLEFRQAFFEEYGFNEENPKNF

SEQ ID NO: 62051 - protein, 381 aa, unidentified
  source 1..381: note = Vagococcus humatus
  REGION 1..381: note = tr|A0A429Z6H4|A0A429Z6H4_9ENTE Queuine tRNA-ribosyltransferase OS=Vagococcus humatus OX=1889241; GN = tgt PE=3 SV=1
MTEPAIRYRLIKKEKHTGARLGEIITPHGTFPTPMFMPVGTLATVKTMAPEELKEMGAGIILSNTYHLWLRPGEDIVEQAGGLHQFMNWDQGILTDSGGFQVWSLADMRNIEEEGVHFKNHLNGSPMFLSPEKAIQIQNKLGSDIMMSFDECPPFYESHDYVKRSIERTTRWAERGLKAHAHPDRQGLFGIVQGAGFKDLRKQSAEELMSLDFPGYSIGGLSVGETKGEMNDILHFLNPILPENKPRYLMGVGTADSLIDGVINGVDMFDCVLPTRIARNGTCMTSQGRLVVKNAKYAEDFRPLDEKCDCYTCRNYTRAYIRHLIKCNETFGFRLTSYHNLYFLLNVMKQVRQAIMDDNLLEFREAFFEEYGFNKENAKNF

SEQ ID NO: 62052 - protein, 381 aa, Vagococcus lutrae
  REGION 1..381: note = tr|V6Q310|V6Q310_9ENTE Queuine tRNA-ribosyltransferase OS=Vagococcus lutrae LBD1; OX = 1408226 GN=tgt PE=3 SV=1
MTESPIRYRLIKTEKHTGARLGEIITPHGTFPTPMFMPVGTLATVKTMAPEELKEMGAGIILSNTYHLWLRPGEDIVEEAGGLHQFMNWDQGILTDSGGFQVWSLADMRNITEEGVHFKNHLNGSKMFLSPEKAIQIQNKLGPDIMMSFDECPPFYESHDYVKKSIERTTRWAERGLKAHANPDRQGLFGIVQGAGYKDLRIQSAKDLVSLDFPGYSIGGLSVGESKEEMNEALEWLNPILPSNKPRYLMGVGTPDSLIDGVIRGVDMFDCVLPTRIARNGTCMTSQGRLVVKNAKYERDFRPIDEKCDCYTCRNYTRAYVRHLIKANETFGLRLTSYHNLYFLLNVMKQVRQAIMDDNLLEFREAFFEEYGFNEKNAKNF

SEQ ID NO: 62053 - protein, 381 aa, Vagococcus lutrae; identical to SEQ ID NO: 62052
  REGION 1..381: note = tr|A0A429ZD99|A0A429ZD99_9ENTE Queuine tRNA-ribosyltransferase OS=Vagococcus lutrae OX=81947; GN = tgt PE=3 SV=1

SEQ ID NO: 62054 - protein, 381 aa, unidentified
  source 1..381: note = Vagococcus martis
  REGION 1..381: note = tr|A0A1V4DHS7|A0A1V4DHS7_9ENTE Queuine tRNA-ribosyltransferase OS=Vagococcus martis OX=1768210; GN = tgt PE=3 SV=1
MTEPAIKYRLIKKEKHTGARLGEIITPHGTFPTPMFMPVGTLATVKTMAPEELKEMGAGIILSNTYHLWLRPGEDIVAGAGGLHKFMNWDQGILTDSGGFQVWSLSDMRQIEESGVHFRNHLNGSKMFLSPEKAIQIQNKLGPDIMMSFDECPPFQESHDYVKKSIERTSRWAERGLKAHQNPDRQGLFGIIQGAGYKDLREQSARELVGLDFPGYSIGGLSVGEPKEEMNKVLEYTTPLIPENKPRYLMGVGTPDSLIDGVIRGVDMFDCVLPTRIARNGTCMTSQGRLVVKNAKYAEDYRPIDEKCDCYTCRHYTRAYIRHLIKCDETFGIRLTSYHNLYFLLNTMKQVRQAIMDDNLLEFRQAFFEEYGFNKENAKNF

SEQ ID NO: 62055 - protein, 381 aa, Vagococcus penaei
  REGION 1..381: note = tr|A0A1Q2D6P2|A0A1Q2D6P2_9ENTE Queuine tRNA-ribosyltransferase OS=Vagococcus penaei OX=633807; GN = tgt PE=3 SV=1
MTEPAIKYRLIKKEKHTGARLGEIITPHGTFPTPMFMPVGTLATVKTMAPEELKDMGAGIILSNTYHLWLRPGEDIVEEAGGLHRFMNWDQGILTDSGGFQVWSLSDMRRIEEEGVHFRNHLNGSKMFLSPEKAIQIQNKLGPDIMMSFDECPPFYESHDYVKKSIDRTSRWAERGLKAHANADRQGLFGIIQGAGYKDLRQQSARDLVAMDFPGYSIGGLSVGETKHEMNTILEYTTPLIPEHKPRYLMGVGTADSLIDGVIRGVDMFDCVLPTRIARNGTCMTSKGRLVVKNAQYARDFRPLDEKCDCYTCRNYTRAYIRHLIKCDETFGMRLTSYHNLYFLLNVMKQVRQAIMDDNLLEFREAFFEEYGFNEENAKKF

SEQ ID NO: 62056 - protein, 381 aa, Vagococcus salmoninarum
  REGION 1..381: note = tr|A0A429ZGD2|A0A429ZGD2_9ENTE Queuine tRNA-ribosyltransferase OS=Vagococcus salmoninarum OX=2739; GN = tgt PE=3 SV=1
MTEPAIRYRLIKKEKHTGARLGEIITPHGTFPTPMFMPVGTLATVKTMAPEELKEMGAGIILSNTYHLWLRPGEDLVEKAGGLHKFMNWDQGILTDSGGFQVWSLADMRNISEEGVNFKNHINGSKMFLSPEKAIQIQNKLGPDIMMSFDECAPFYESHDYVKRSIERTTRWAERGLNAHANPDRQGLFGIIQGAGFKDLREQSAKDLISLDFPGYSIGGLSVGETKAEMNEVLQYLNPLIPENKPRYLMGVGTADSLIDGAINGVDMFDCVLPTRIARNGTCMTSKGRLVIKNAQYAEDFRPIDEKCQCYTCKNYTRAYIRHLIKCNETFGIRLTSYHNLYFLLNVMKQVRQSIMDDNLLEFRQAFFEEYGFNDKNAKNF

SEQ ID NO: 62057 - protein, 381 aa, Vagococcus sp.
  REGION 1..381: note = tr|A0A4D7CZH1|A0A4D7CZH1_9ENTE Queuine tRNA-ribosyltransferase OS=Vagococcus sp. MN-17 OX=2571750; GN = tgt PE=3 SV=1
MTEPAIRYRLIKKEKHTGARLGEIITPHGTFPTPMFMPVGTLATVKTMAPEELKDMGAGIILSNTYHLWLRPGEDIVEEAGGLHKFMNWDQGILTDSGGFQVWSLSDMRKIEEEGVHFRNHLNGSKMFLSPEKAIQIQNKLGPDIMMSFDECPPFEESHDYVKKSIERTTRWAERGLKAHANPDRQGLFGIVQGAGYKDLRLQSAKDLMSLDFPGYSIGGLSVGETKDEMNNILDVLNPVLPENKPRYLMGVGTADSLIDGVIRGVDMFDCVLPTRIARNGTCMTSKGRLVVKNAQYARDFRPIDEKCGCYTCRNYSRAYVRHLIKSDETFGLRLTSYHNLYFLLDVMKQVRQAIMDDNLLEFRQAFFEEYGFNKENAKKF

SEQ ID NO: 62058 - protein, 381 aa, Vagococcus sp.
  REGION 1..381: note = tr|A0A429ZAA7|A0A429ZAA7_9ENTE Queuine tRNA-ribosyltransferase OS=Vagococcus sp. SS1994; OX = 1977868 GN=tgt PE=3 SV=1
MTEPAIKYRLIKKEKHTGARLGEIITPHGTFPTPMFMPVGTLATVKTMAPEELKEMGAGIILSNTYHLWLRPGEDIVEGAGGLHKFMNWDQGILTDSGGFQVWSLSDMRQIEESGVHFRNHLNGSKMFLSPEKAIQIQNKLGPDIMMSFDECPPFQESHDYVKKSIERTSRWAERGLKAHQNPDRQGLFGIIQGAGYKDLREQSARELVGLDFPGYSIGGLSVGEPKEEMNRVLEYTTPLIPENKPRYLMGVGTPDSLIDGVIRGVDMFDCVLPTRIARNGTCMTSQGRLVVKNAKYAEDYRPIDEKCDCYTCRNYTRAYIRHLIKCDETFGIRLTSYHNLYFLLNTMKQVRQAIMDDNLLEFRQAFFEEYGFNKENAKNF

SEQ ID NO: 62059 - protein, 381 aa, unidentified
  source 1..381: note = Vagococcus teuberi
  REGION 1..381: note = tr|A0A1J0A7N8|A0A1J0A7N8_9ENTE Queuine tRNA-ribosyltransferase OS=Vagococcus teuberi OX=519472; GN = tgt PE=3 SV=1
MTEPAIKYRLIKKEKHTGARLGEIITPHGTFPTPMFMPVGTLATVKTMAPEELKEMGAGIILSNTYHLWLRPGENIVEGAGGLHKFMNWDQGILTDSGGFQVWSLSDMRQIEESGVHFRNHLNGSKMFLSPEKAIQIQNKLGPDIMMSFDECPPFQESHDYVKKSIERTSRWAERGLKAHQNPDRQGLFGIIQGAGYKDLREQSARELVGLDFPGYSIGGLSVGEPKEEMNRVLEYTTPLIPENKPRYLMGVGTPDSLIDGVIRGVDMFDCVLPTRIARNGTCMTSQGRLVVKNAKYAEDYRPIDEKCDCYTCRNYTRAYIRHLIKCDETFGIRLTSYHNLYFLLNTMKQVRQAIMDDNLLEFRQAFFEEYGFNKENAKNF

SEQ ID NO: 62060 - protein, 373 aa, unidentified
  source 1..373: note = Vampirococcus sp.
  REGION 1..373: note = tr|A0A410P2Y6|A0A410P2Y6_9BACT Queuine tRNA-ribosyltransferase OS=Vampirococcus sp. LiM; OX = 1930593 GN=tgt PE=3 SV=1
MPMNFSVIHTDKETQARAGILQMERGSLETPVFMPVGTQATVKSLSPRELEEAGAQIMLNNAYHLYLRPGTEIIREAGGLHKFMNWPKLILTDSGGYQVFSLSLLRKIKDEGVEFQSHLDGSRHFLTPESVIGIQNDLGSDIMMPLDECVHYPASFDLAQKAVDRTTLWAGRSKKEWAKTQRGVLFGIVQGSTYPELRKKSAEELKSIGFQGYAIGGISVGEPQDLMYNMISFAARELPAEAPRYVMGVGLPEDILEAVSLGADMFDCVVPTRYGRNGSAFTSCGKITVRNGAYSRDRTPLDPRCDCYCCRNFTRSYLRHLFNTGEILGLRLVSYHNVYFFLDLMKKVRASLHEGRFASFKREFLSRYRQKEG

SEQ ID NO: 62061 - protein, 412 aa, Varibaculum cambriense
  REGION 1..412: note = tr|W1TVC3|W1TVC3_9ACTO Queuine tRNA-ribosyltransferase OS=Varibaculum cambriense DORA_20; OX = 1403948 GN=tgt PE=3 SV=1
MTFTKVAELPGRRGRAGIIHTPHGDIPTPAFIPVGTKATVKTVLPETMKELGAAAILANAYHLYLQPGPEVIDQAGGLARFMNWGGPTFTDSGGFQVLSLGSGYKKVLSGEFTGSGRADHMVAAKKERHAHVDEEGVTFRSHLDGSRHRFTPEVSMQIQHQLGADIMMAFDELTTLLNSREYQVESLERTRRWAERCLAEHERLTVERADKPYQMLYGVIQGAQYEDLRRKAARDLSAMEVAGRSFDGFGIGGALEKENLATIVDWVCEELPEEKPRHLLGLSEPDDIFAGVEAGADTFDCVNPSRIGRNGGLYGRYGRFNLTRSEFKRDFQAPVAGCNCYTCQNYSIAYLHHLFKAKEMLGFTLATIHNEYFTVQLVRGIRQSIIEGEYPAYKQRVLGDFYGGQPLRSHWG

SEQ ID NO: 62062 - protein, 417 aa, Varibaculum cambriense
  REGION 1..417: note = tr|A0A134BJ97|A0A134BJ97_9ACTO Queuine tRNA-ribosyltransferase OS=Varibaculum cambriense; OX = 184870 GN=tgt PE=3 SV=1
MRGTDLTFTKVAGLPGRRGRAGIIHTPHGDIPTPAFIPVGTKATVKTVLPETMKQLGAAAILSNAYHLYLQPGPEVIDQAGGLARFMNWNGPTFTDSGGFQVLSLGSGYKKVLSGEFTGSGRADHTVAEKKERHAHVDDEGVTFRSHLDGSRHRFTPEVSMQIQHQLGADIMMAFDELTTLLNSREYQVEPLERTRRWAERCLAEHQRLTLERADKPYQMLYGVIQGAQYEDLRRKAARDLSAMEVAGRSFDGFGIGGAFEKENLATIVDWVCEELPEDKPRHLLGLSEPDDIFAGVEAGADTFDCVNPSRIGRNGGLYGRYGRFNLTRSEFKRDFAAPVAGCDCYTCQNYSIAYLHHLFKAKEMLGFTLATIHNEYFTVQLVRGIRKAIIEGDYPEYKQRVLGDFYGGEPLRSHWG

SEQ ID NO: 62063 - protein, 374 aa, unidentified
  source 1..374: note = Variibacter gotjawalensis
  REGION 1..374: note = tr|A0A0S3PXK9|A0A0S3PXK9_9BRAD Queuine tRNA-ribosyltransferase OS=Variibacter gotjawalensis; OX = 1333996 GN=tgt PE=3 SV=1
MKIYKLNATDGAARTGEVATPHGIIRTPAFMPVGTQATVKGMHPEAVRETGADVVLGNTYHLMLRPGAERVAALGGLHKFMNWPHVILTDSGGFQVMSLSAMRKIDENAVTFRSHIDGSTHVLTPERAIEIQTLLGSDIVMQLDECVRLPAERAEVEKAMRLSLRWAERCQRAFAPVRDGRSLFAIVQGGDDVALREESARELNAMDFPGYAIGGLAVGEPQEVMLRMLEVVAPLLPADKPRYLMGVGTPDDLLKAVARGIDMFDCVMPTRNGRHGLAFSRFGPINLKNARHADDPRPFDEESPCAAARTYSRAYLHHLTKTNEMLGAILLTTINIAYYQELMAGARAAIAAKAFASFADGVAAGWAAGDLPTR

SEQ ID NO: 62064 - protein, 390 aa, Variovorax boronicumulans
  REGION 1..390: note = tr|A0A286NS84|A0A286NS84_9BURK Queuine tRNA-ribosyltransferase OS=Variovorax boronicumulans; OX = 436515 GN=tgt PE=3 SV=1
MLNFELLKTDPDSHARRATLTLNHGKVQTPIFMPVGTYGTVKGVMPRSLEEMGAQIILGNTFHLWMRPGLDVMASFGGLHQFEKWDKPILTDSGGFQVWSLGAMRKISEEGVKFASPVNGDKLFLTPEVSMQIQTILNSDIVMQFDECTPYDTKGHITTEAEARVSMELSLRWAKRCQAEFTRLSNPNALFGIVQGGMFENLREESLAALVDMDFPGYAIGGVSVGEPKEEMLHIMGHTPHRLPANKPRYLMGVGTPEDLVQGVADGVDMFDCVMPTRNARNGTMFTRFGDLKMRNARHKSDPQPVDPSCTCHACAGTSGVSWNDGGREGFSRAYLHHLDRCGEMLGPMLCTIHNLHYYLNLMTEIRAALDAGTFTAFRAQFKADRARGV

SEQ ID NO: 62065 - protein, 391 aa, Variovorax boronicumulans
  REGION 1..391: note = tr|A0A1E7TXZ0|A0A1E7TXZ0_9BURK Queuine tRNA-ribosyltransferase OS=Variovorax boronicumulans; OX = 436515 GN=tgt PE=3 SV=1
MENGLHFKILRTEGHARRGVLTLNHGVVQTPIFMPVGTYGTVKGVMPRSLEEMGAQIILGNTFHLWMRPGLDVMASFGGLHQFEKWDKPILTDSGGFQVWSLGAMRKISEEGVKFASPVNGDKLFLTPEVSMQIQTILNSDIVMQFDECTPYDTKGHITTEAEARVSMELSLRWAKRCQSEFARLENPNALFGIVQGGMFENLREESLAALVDMDFPGYAIGGVSVGEPKEEMLHIMGHTPHRLPANKPRYLMGVGTPEDLVQGVADGVDMFDCVMPTRNARNGTMFTRFGDLKMRNARHKSDPQPVDPSCTCHACAGTSGVSWNDGGREGFSRAYLHHLDRCGEMLGPMLCTIHNLHYYLNLMTEIRAALDAGTFTAFRAQFKADRARGV

SEQ ID NO: 62066 - protein, 390 aa, unidentified
  source 1..390: note = Variovorax guangxiensis
  REGION 1..390: note = tr|A0A502DV60|A0A502DV60_9BURK Queuine tRNA-ribosyltransferase OS=Variovorax guangxiensis; OX = 1775474 GN=tgt PE=3 SV=1
MLNFDLLTTDPDSHARRGTLTLNHGPVQTPIFMPVGTYGTVKGVMPRSLEEMGAQIILGNTFHLWMRPGLDVMASFGGLHGFERWNKPILTDSGGFQVWSLGAMRKISEEGVKFASPVNGDKLFLTPEVSMQIQTVLNSDIVMQFDECTPYDTHGHITTEAEARTSMELSLRWAARCKTEFKKLENPNALFGIVQGGMFENLREESLAALVEMDFPGYAIGGVSVGEPKAEMLHIMGHTPHRLPVHKPRYLMGVGTPEDLVQGVADGVDMFDCVMPTRNARNGTMFTRFGDLKMRNARHKIDPQPVDPSCTCHACAGTSGVSWNDGGREGFSRAYLHHLDRCGEMLGPMLCTIHNLHYYLNLMREIREALDAGAFTAFRAKFKSERARGV

SEQ ID NO: 62067 - protein, 390 aa, unidentified
  source 1..390: note = Variovorax guangxiensis
  REGION 1..390: note = tr|A0A3S0X857|A0A3S0X857_9BURK Queuine tRNA-ribosyltransferase OS=Variovorax guangxiensis; OX = 1775474 GN=tgt PE=3 SV=1
MLNFELLKTDPDSHARRATLTLNHGKVQTPIFMPVGTYGTVKGVMPRSLEEMGAQIILGNTFHLWMRPGLDVMASFGGLHQFEKWDKPILTDSGGFQVWSLGAMRKISEEGVKFASPVNGDKLFLTPEVSMQIQTILNSDIVMQFDECTPYDTKGHITTEAEARISMELSLRWAKRCQAEFTRLQNPNALFGIVQGGMYENLREESLAALVDMDFPGYAIGGVSVGEPKEEMLHIMGHTPHRLPANKPRYLMGVGTPEDLVQGVADGVDMFDCVMPTRNARNGTLFTRFGDLKMRNARHKSDPQPIDPSCTCHACAGTSGVSWNDGGREGFSRAYLHHLDRCGEMLGPMLTTIHNLHYYLNLMSEIRDSLDAGTFTEFRVRFKSDRARGV

SEQ ID NO: 62068 - protein, 390 aa, Variovorax paradoxus
  REGION 1..390: note = tr|E6UWL2|E6UWL2_VARPE Queuine tRNA-ribosyltransferase OS=Variovorax paradoxus (strain EPS) OX=595537 GN=tgt PE=3 SV=1
MLNFELLKTDPDSHARRATLTLNHGKVQTPIFMPVGTYGTVKGVMPRSLEEMGAQIILGNTFHLWMRPGLDVMQSFGGLHQFEKWNKPILTDSGGFQVWSLGAMRKISEEGVKFASPVNGDKLFLTPEVSMQIQTTLNSDIVMQFDECTPYDTKGHITTEAEARTSMELSLRWAKRCQSEFARLENPNALFGIVQGGMFENLREESLAALVDMDFPGYAIGGVSVGEPKEEMLHIMGHTPHRLPANKPRYLMGVGTPEDLVQGVADGVDMFDCVMPTRNARNGTMFTRFGDLKMRNARHKSDPQPVDPSCTCHACAGTSGVSWNDGGREGFSRAYLHHLDRCGEMLGPMLCTIHNLHYYLNLMTEIRAALDAGTFTEFRARFKAERARGV

SEQ ID NO: 62069 - protein, 390 aa, Variovorax paradoxus
  REGION 1..390: note = tr|A0A0P8ZW79|A0A0P8ZW79_VARPD Queuine tRNA-ribosyltransferase OS=Variovorax paradoxus OX=34073; GN = tgt PE=3 SV=1
MLNFELLKTDPDSHARRATLTLNHGVVQTPIFMPVGTYGTVKGVMPRSLEEMGAQIILGNTFHLWMRPGLDVMQSFGGLHQFEKWNKPILTDSGGFQVWSLGAMRKISEEGVKFASPVNGDKLFLTPEVSMQIQTILNSDIVMQFDECTPYDTKGHITTEAEARISMELSLRWARRCQAEFERLQNPNALFGIVQGGMYENLREESLAALVDMDFPGYAIGGVSVGEPKEEMLHIMGHTPHRLPANKPRYLMGVGTPEDLVQGVADGVDMFDCVMPTRNARNGTLFTRFGDLKMRNARHKSDPQPIDPSCTCHACAGTSGVSWNDGGREGFSRAYLHHLDRCGEMLGPMLTTIHNLHYYLNLMREIREALDAGTFTEFRARFKSERARGV

SEQ ID NO: 62070 - protein, 390 aa, Variovorax sp.
  REGION 1..390: note = tr|A0A1G8QSP5|A0A1G8QSP5_9BURK Queuine tRNA-ribosyltransferase OS=Variovorax sp. OV700 OX=1882826; GN = tgt PE=3 SV=1
MLNFELLKTDAASHARRGTLTLNHGKVQTPIFMPVGTYGTVKGVMPRSLEEMGAQIILGNTFHLWMRPGLDVMASFGGLHQFEKWNKPILTDSGGFQVWSLGAMRKISEEGVKFASPVNGDKLFLTPEVSMQIQTILNSDIVMQFDECTPYDTKGHITTEAEARTSMELSLRWARRCQHEFARLENPNALFGIVQGGMFENLREESLAALVEMDFPGYAIGGVSVGEPKEEMLHIMGHTPHRLPAHKPRYLMGVGTPEDLVQGVADGVDMFDCVMPTRNARNGTLFTRFGDLKMRNARHKNDPQPIDPSCTCHACAGTSGVAWNDGGREGFSRAYLHHLDRCAEMLGPMLTTIHNLHYYLNLMREIREALEADGFTAFRARFKADRARGV

SEQ ID NO: 62071 - protein, 390 aa, Variovorax sp.
  REGION 1..390: note = tr|A0A244EIZ8|A0A244EIZ8_9BURK Queuine tRNA-ribosyltransferase OS=Variovorax sp. JS1663; OX = 1851577 GN=tgt PE=3 SV=1
MLNFELLATDPDSHARRGTLTLNHGVVQTPIFMPVGTYGTVKGVMPRNLEEMGAQIILGNTFHLWMRPGLDVMASFGGLHQFEKWDKPILTDSGGFQVWSLGAMRKISEEGVKFASPVNGDKLFLTPEVSMQIQTILNSDIVMQFDECTPYDTNGHVTTEAEARSSMELSLRWAKRCQAEFARLANPNALFGIVQGGMYENLREESLAQLVELDFPGYAIGGVSVGEPKEEMLRIMAHTPHRLPAHKPRYLMGVGTPEDLVEGVAQGVDMFDCVMPTRNARNGTLFTRFGDLKMRNARHKNDPQPIDPSCTCHACAGASGVPWNEGGREGFSRAYLHHLDRCGEMLGPMLTTIHNLHYYLNLMREIRAALDADRYSAFRAQFKADRARGV

SEQ ID NO: 62072 - protein, 375 aa, unidentified
  source 1..375: note = Varunaivibrio sulfuroxidans
  REGION 1..375: note = tr|A0A4R3J8H4|A0A4R3J8H4_9PROT Queuine tRNA-ribosyltransferase OS=Varunaivibrio sulfuroxidans; OX = 1773489 GN=tgt PE=3 SV=1
MTDFSFELLGADGGARRGRVTCAHGVIQTPAFMPVGTAATVKAMLPENVAATGAEIILGNTYHLMLRPGAERIARLGGLHAFMNWPGPILTDSGGYQVMSLSELRKLDENGVTFRSHIDGSYHTLTPERSMEIQHQLGSDITMCFDECPPYPSEKADVARATQLSMRWAARSRAAFVNRPGYGLFGINQGGVHEDLREQSAQALKEIGFDGYAIGGLAVGEGRALMFSTLDFTTLMLPTDKPRYLMGVGKPEDLVGAVARGVDMFDCVLPTRSGRTAQAFTRRGPVNLKNARHGDDPRPLDDHCSCPTCRNYSRAYLNHVVKAGEIIAAMLLTWHNLQYYQDLMADIRRAIESGTFAAFEADFQSQYGQGDIAPL

SEQ ID NO: 62073 - protein, 371 aa, Veillonella atypica
  REGION 1..371: note = tr|A0A3A6W2S0|A0A3A6W2S0_9FIRM Queuine tRNA-ribosyltransferase OS=Veillonella atypica OX=39777; GN = tgt PE=3 SV=1
MPSITYELQKTCPHTGARAGLLHTPHGTYETPMFMPVGTQATVKTMTPEELKAIGSQVILSNTYHLFLRPGPELVEEAGGLHKFMNWDQAILTDSGGFQVFSLGDMRKITEEGVTFRSHIDGSKQFLSPEVATKVQEQLGSDIAMAFDECIPYPAEHDYAKRSTARTTRWAHRCQEARHAHDRQGMFGIVQGGMYKDLRKQSAAELVAMDFEGYSIGGLSVGEPHDLMNEILEYTTPLLPTNKARYLMGVGTADCLVEGVARGIDMFDCVYPTRVARNGMAMTWHGRLNIRNAQYAHDWGPLEEGCQCYTCKNYSRAYLRHLYKAEEILALRLVTYHNLYFLLEFMRQMRKAILEDRFPQFRMQFWDNFNK

SEQ ID NO: 62074 - protein, 371 aa, Veillonella atypica; identical to SEQ ID NO: 62073
  REGION 1..371: note = tr|E1LE33|E1LE33_9FIRM Queuine tRNA-ribosyltransferase OS=Veillonella atypica ACS-134-V-Col7a OX=866778 GN=tgt PE=3 SV=1

SEQ ID NO: 62075 - protein, 369 aa, Veillonella criceti
  REGION 1..369: note = tr|A0A380NL10|A0A380NL10_9FIRM Queuine tRNA-ribosyltransferase OS=Veillonella criceti OX=103891; GN = tgt PE=3 SV=1
MVITYELQKECPHTGARAGLLHTPHGTFKTPMFMPVGTQATVKTMSPEELKEMGAQIILSNTYHLFLRPGPELVEEAGGLHRFMNWGGGILTDSGGFQVFSLGDLRKITEEGVAFRSHIDGSKKFLSPEIATRVQEQLGADIAMAFDECIPYPADYAYADRSTARTTRWAERCRKAHTSPTQGMFGIVQGGMYKDLRTRSAKELVAMDFDGYSIGGLSVGEPHDIMYDILEHTTPLLPTNKARYLMGVGTPDCLVEGVARGVDMFDCVFPTRVARNGMAMTHNGRVTIKNATYAHDWGPIEEGCQCYACRNYSRAYIRHLYKAEEILAFRLVSYHNLYFLLHFMRQMRAAILEDRFPAFRDEFWAAYKK

SEQ ID NO: 62076 - protein, 371 aa, Veillonella denticariosi
  REGION 1..371: note = tr|A0A2S7ZBK6|A0A2S7ZBK6_9FIRM Queuine tRNA-ribosyltransferase OS=Veillonella denticariosi JCM 15641 OX=1298594 GN=tgt PE=3 SV=1
MASITYELQKTCPHTGARAGLLHTPHGTFQTPMFMPVGTQATVKTMTPEELKDMGSQVILSNTYHLFLRPGSELIEEAGGLHTFMNWDQAILTDSGGFQVFSLGDMRKITEEGVTFRSHIDGSKQFLSPEVATKVQEQLGSDIAMAFDECIPYPADHDYAKRSTARTTRWAHRCQEARHAHDRQGMFGIVQGGMYKDLRKQSAAELVAMDFEGYSIGGLSVGEPHDLMNEILEYTTPLLPTDKARYLMGVGTADCLVEGVARGVDMFDCVYPTRVARNGMAMTWKGRLNIRNAAYSRDWGPLEEGCQCYTCQNYSRAYIRHLYKAEEILALRLVTYHNLYFLLEFMRQMRQAILEDRFPQFRMQFWDSFKK

SEQ ID NO: 62077 - protein, 290 aa, Veillonella dispar
  REGION 1..290: note = tr|W1V533|W1V533_9FIRM Queuine tRNA-ribosyltransferase (Fragment) OS=Veillonella dispar DORA_11 OX=1403949 GN=Q619_VDC00514G0001 PE=3 SV=1
MPSITYELQKTCPHTGARVGLLHTPHGTFQTPMFMPVGTQATVKTMTPEELKTMGSQVILSNTYHLFLRPGPELVEEAGGLHKFMNWDQAILTDSGGFQVFSLGDMRKITEDGVTFRSHIDGSKQFLSPEVATKVQEQLGSDIAMAFDECIPYPADHDYAKRSTARTTRWAHRCQEARKAHDRQGMFGIVQGGMYKDLRKQSAEELVAMDFEGYSIGGLSVGEPHDLMNEILEYTTPLLPTNKARYLMGVGTADCLVEGVARGVDMFDCVYPTRVARNGMAMTWNGRLNI

SEQ ID NO: 62078 - protein, 371 aa, Veillonella dispar
  REGION 1..371: note = tr|C4FRS1|C4FRS1_9FIRM Queuine tRNA-ribosyltransferase OS=Veillonella dispar ATCC 17748; OX = 546273 GN=tgt PE=3 SV=1
MPSITYELQKTCPHTGARAGLLHTPHGTFQTPMFMPVGTQATVKTMTPEELKAMGSQVILSNTYHLFLRPGPELVEEAGGLHKFMNWDQAILTDSGGFQVFSLGDMRKITEEGVTFRSHIDGSKQFLSPEVATKVQEQLGSDIAMAFDECIPYPADHDYAKRSTARTTRWAHRCQEARKAHDCQGMFGIVQGGMYKDLRKQSAEELVAMDFEGYSIGGLSVGEPHDLMNEILEFTTPLLPTNKARYLMGVGTADCLVEGVARGIDMFDCVYPTRVARNGMAMTWNGRLNIRNAQFAHDWGPLEEGCQCYTCKNYSRAYIRHLYKAEEILALRLVTYHNLYFLLEFMRQMRQAILEDRFPQFRMQFWDSFKK

SEQ ID NO: 62079 - protein, 370 aa, Veillonella montpellierensis
  REGION 1..370: note = tr|A0A096CSD2|A0A096CSD2_9FIRM Queuine tRNA-ribosyltransferase OS=Veillonella montpellierensis DNF00314 OX=1401067 GN=tgt PE=3 SV=1
MVITYELQKECPHTGARAGLLHTPHGTFQTPMFMPVGTQATVKTMTPEELKEMGAQLILSNTYHLFLRPGADLIAEAGGLHQFMNWNQAILTDSGGFQVFSLGDMRKITEKGVTFRSHIDGSTQFLSPEVATQVQMKLNSDIAMAFDECIPYPADYDYTKASTERTTRWAERCRKIHDSKIQGMFGIVQGGMYKKLRTQSAKELVDLDFDGYSIGGLSVGEPHDMMNDILEHTTPLLPSHKARYLMGVGTPDCLVEGVARGVDMFDCVYPTRVARNGMAMTWQGRLTLRNATFAHDWNPIEDGCQCYTCKNYSRAYIRHLYKAEEILAFRLVTYHNLYFLLEFMRRMRTAILEDRFPAFREEFWANYHKK

SEQ ID NO: 62080 - protein, 371 aa, Veillonella parvula
  REGION 1..371: note = tr|A0A418PG68|A0A418PG68_9FIRM Queuine tRNA-ribosyltransferase OS=Veillonella parvula OX=29466; GN = tgt PE=3 SV=1
MPSIIYELQKTCPHTGARAGLLHTPHGTFQTPMFMPVGTQATVKTMTPEELKAMGSQVILSNTYHLFLRPGPELVEEAGGLHKFMNWDQAILTDSGGFQVFSLGDMRKITEDGVTFRSHIDGSKQFLSPEVATKVQEQLGSDIAMAFDECIPYPADHDYAKRSTARTTRWAHRCQAARRAHDRQGMFGIVQGGMYKDLRKQSAEELVAMDFEGYSIGGLSVGEPHDLMNEILEYTTPLLPTNKARYLMGVGTADCLVEGVARGVDMFDCVYPTRVARNGMAMTWNGRLNIRNAQFAHDWGPLEEGCQCYTCKNYSRAYIRHLYKAEEILALRLVTYHNLYFLLEFMRQMRQAILEDRFPQFRMQFWDSFKK

SEQ ID NO: 62081 - protein, 371 aa, Veillonella parvula
  REGION 1..371: note = tr|D1BLM1|D1BLM1_VEIPT Queuine tRNA-ribosyltransferase OS=Veillonella parvula (strain ATCC 10790 / DSM 2008 / JCM 12972 / Te3) OX=479436 GN=tgt; PE = 3 SV=1
MPSITYELQKTCPHTGARAGLLHTPHGTFQTPMFMPVGTQATVKTMTPEELKAMGSQVILSNTYHLFLRPGPELIEEAGGLHKFMNWDQAILTDSGGFQVFSLGDMRKITEDGVTFRSHIDGSKQFLSPEVATKVQEQLGSDIAMAFDECIPYPADHDYAKRSTARTTRWAHRCQESRKAHDRQGMFGIVQGGMYKDLRKQSAEELVAMDFEGYSIGGLSVGEPHDLMNEILEYTTPLLPTNKARYLMGVGTADCLVEGVARGVDMFDCVYPTRVARNGMAMTWNGRLNIRNAQFAHDWGPLEEGCQCYTCKNYSRAYIRHLYKAEEILALRLVTYHNLYFLLEFMRQMRQAILEDRFPQFRMQFWDSFKK

SEQ ID NO: 62082 - protein, 371 aa, Veillonella rodentium
  REGION 1..371: note = tr|A0A239YNL9|A0A239YNL9_9FIRM Queuine tRNA-ribosyltransferase OS=Veillonella rodentium OX=248315; GN = tgt PE=3 SV=1
MASITFELQKTCPHTGARAGLLHTPHGTFQTPMFMPVGTQATVKTMTPEELKDMGSQVILSNTYHLFLRPGAELIEEAGGLHTFMNWDQAILTDSGGFQVFSLGDMRKITEEGVTFRSHIDGSKQFLSPEVATKVQEQLGSDIAMAFDECIPYPADHDYAKRSTARTTRWAHRCQEARHAHDRQGMFGIVQGGMYKALRKQSAEELVAMDFEGYSIGGLSVGEPHDLMNEILEYTTPLLPTDKARYLMGVGTADCLVEGVARGVDMFDCVYPTRVARNGMAMTWKGRLNIRNAVYSRDWGPLEEGCQCYTCQNYSRAYIRHLYKAEEILALRLVTYHNLYFLLEFMRQMRQAILEDRFPQFRMQFWDSFKK

SEQ ID NO: 62083 - protein, 371 aa, Veillonella rogosae
  REGION 1..371: note = tr|A0A2S7Z0J3|A0A2S7Z0J3_9FIRM Queuine tRNA-ribosyltransferase OS=Veillonella rogosae JCM 15642; OX = 1298595 GN=tgt PE=3 SV=1
MASITYELQKTCPHTGARAGLLHTPHGTFQTPMFMPVGTQATVKTMTPEELKAMGSQVILSNTYHLFLRPGPELVEEAGGLHKFMNWDQAILTDSGGFQVFSLGDMRKITEDGVTFRSHIDGSKQFLSPEVATKVQEQLGSDIAMAFDECIPYPADHDYAKRSTARTTRWAHRCQEARKAHDRQGMFGIVQGGMYKDLRKQSAEELVAMDFEGYSIGGLSVGEPHDLMNEILEYTTPLLPTNKARYLMGVGTADCLVEGVARGIDMFDCVYPTRVARNGMAMTWKGRLNIRNAQFAHDWGPLEEGCQCYTCKNYSRAYIRHLYKAEEILALRLVTYHNLYFLLEFMRQMRQAILEDRFPQFRMQFWDSFKK

SEQ ID NO: 62084 - protein, 369 aa, unidentified
  source 1..369: note = Veillonella seminalis
  REGION 1..369: note = tr|K9DKU9|K9DKU9_9FIRM Queuine tRNA-ribosyltransferase OS=Veillonella seminalis ACS-216-V-Col6b OX=883156 GN=tgt PE=3 SV=1
MVITYELQKECPHTGARAGLLHTPHGTFKTPMFMPVGTQATVKTMSPEELKEMGAQIILSNTYHLFLRPGPELVEEAGGLHRFMNWDGGILTDSGGFQVFSLGDLRKITEEGVAFRSHIDGSKKFLSPEIATKVQEQLGADIAMAFDECIPYPADYAYADRSTARTTRWAERCCKAHTSPTQGMFGIVQGGMYKDLRTRSAKELVAMDFDGYSIGGLSVGEPHDLMYDILEHTTPLLPTNKARYLMGVGTPDCLVEGVARGVDMFDCVFPTRVARNGMAMTHNGRVVIKNATYAHDWGPLEDGCECYTCRNYSRAYIRHLYKAEEILAFRLVSYHNLYFLLNFMRQMRAAILEDRFPAFRDEFWAGYKK

SEQ ID NO: 62085 - protein, 371 aa, Veillonella sp.
  REGION 1..371: note = tr|A0A2S7ZDZ8|A0A2S7ZDZ8_9FIRM Queuine tRNA-ribosyltransferase OS=Veillonella sp. T34266-5; OX = 2027457 GN=tgt PE=3 SV=1
MPSITYELQKTCPHTGARAGLLHTPHGTYETPMFMPVGTQATVKTMTPEELKAIGSQVILSNTYHLFLRPGPELVEEAGGLHKFMNWDQAILTDSGGFQVFSLGDMRKITEEGVTFRSHIDGSKQFLSPEVATKVQEQLGSDIAMAFDECIPYPAEHDYAKCSTARTTRWAHRCQEARHAHDRQGMFGIVQGGMYKDLRKQSAAELVAMDFEGYSIGGLSVGEPHDLMNEILEYTTTLLPTNKARYLMGVGTADCLVEGVARGIDMFDCVYPTRVARNGMAMTWHGRLNIRNAQYAHDWGPLEEGCQCYTCKNYSRAYLRHLYKAEEILALRLVTYHNLYFLLEFMRQMRKAILEDRFPQFRMQFWDNFNK

SEQ ID NO: 62086 - protein, 369 aa, Veillonella sp.
  REGION 1..369: note = tr|F9N535|F9N535_9FIRM Queuine tRNA-ribosyltransferase OS=Veillonella sp. oral taxon 780 str. F0422 OX=944564 GN=tgt PE=3 SV=1
MAIRYELQKQCPHTGARAGLLHTPHGTYETPMFMPVGTQATVKTLAPEELKAMGSQVILSNTYHLFLRPGADLVEEAGGLHKFMNWDQAILTDSGGFQVFSLGKLRKITEEGVNFRSHLDGSKKFLSPEVATKVQEQLGSDIMMAFDECIPYPADHRYADASTARTTRWAERCQEARRSKNQGMFGIVQGGMYKDLRERSAKELVDMDFEGYSIGGLSVGEPHDLMYEVLEYTTPLLPTNKARYLMGVGTADCLVEGVARGVDMFDCVYPTRVARNGMAMTWKGRLNLRNASFMRDWGPIEEGCGCYACQNYSRAYIRHLYKAEEILAFRLVSYHNLYFLLEFMRQMRKAILEDRFVAFREEFWQYFTK

SEQ ID NO: 62087 - protein, 371 aa, unidentified
  source 1..371: note = Veillonella tobetsuensis
  REGION 1..371: note = tr|A0A480BAX6|A0A480BAX6_9FIRM Queuine tRNA-ribosyltransferase OS=Veillonella tobetsuensis; OX = 1110546 GN=tgt PE=3 SV=1
MPSITYELQKTCPHTGARAGLLHTPHGTYETPMFMPVGTQATVKTMTPEELKVIGSQVILSNTYHLFLRPGPELVEEAGGLHKFMNWDQAILTDSGGFQVFSLGDMRKITEEGVTFRSHIDGSKQFLSPEVATKVQEQLGSDIAMAFDECIPYPADHDYAKRSTARTTRWAHRCQEARRAHDRQGMFGIVQGGMYKDLRKQSAEELVAMDFEGYSIGGLSVGEPHDLMNEILEYTTPLLPTNKARYLMGVGTADCLVEGVARGIDMFDCVYPTRVARNGMAMTWHGRLNIRNAQFAHDWGPLEEGCQCYTCKNFSRAYVRHLYKAEEILALRLVTYHNLYFLLEFMRQMRKAILEDRFPQFRMQFWDNFNK

SEQ ID NO: 62088 - protein, 371 aa, unidentified
  source 1..371: note = Veillonella tobetsuensis
  REGION 1..371: note = tr|A0A2S7ZRT8|A0A2S7ZRT8_9FIRM Queuine tRNA-ribosyltransferase OS=Veillonella tobetsuensis; OX = 1110546 GN=tgt PE=3 SV=1
MPSITYELQKTCPHTGARAGLLHTPHGTYETPMFMPVGTQATVKTMTPEELKVIGSQVILSNTYHLFLRPGPELVEEAGGLHKFMNWDQAILTDSGGFQVFSLGDMRKITEEGVTFRSHIDGSKQFLSPEVATKVQEQLGSDIAMAFDECIPYPADHDYAKRSTARTTRWAHRCQEARHAHDRQGMFGIVQGGMYKDLRKQSVAELVAMDFEGYSIGGLSVGEPHDLMNEILEYTTPLLPTNKARYLMGVGTADCLVEGVARGIDMFDCVYPTRVARNGMAMTWHGRLNIRNAQFAHDWGPLEEGCQCYTCKNFSRAYVRHLYKAEEILALRLVTYHNLYFLLEFMRQMRKAILEDRFPQFRMQFWDNFNK

SEQ ID NO: 62089 - protein, 389 aa, unidentified
  source 1..389: note = Veillonellaceae bacterium
  REGION 1..389: note = tr|A0A134CMV0|A0A134CMV0_9FIRM Queuine tRNA-ribosyltransferase OS=Veillonellaceae bacterium DNF00626 OX=1588754 GN=tgt PE=3 SV=1
MIGYMCIIFMRVIFLIGDIIMVIRYELIKEDKHTGARAGLLHTPHGTFKTPMFMPVGTQATVKTLTPNELYEMGAQIVLSNTYHLFLRPGTDLIRDAGELHRFMRWDKGILTDSGGFQVFSLGAMRKITEEGVYFRSFLDGSKQFLSPEVSIHAQENLGSDIAMAFDECIPYPADYEYAKHSTERTSRWAERCINAHTRTDRGMFGIVQGGMYKDLRKQSALDISSLPFDGLAIGGLSVGEPHDLMYDILEYTTEWLPQDKARYLMGVGTPDCLVEGVARGVDMFDCVFPTRVARNGMAMVHSGRMNMKNKKYERDFAPLEEGCGCYTCQTFTRAYIRHLYKSEELLAFRLVTIHNLYFLLQFMRDMREAILSDSFSDFRENFMAGYVK

SEQ ID NO: 62090 - protein, 368 aa, unidentified; identical to SEQ ID NO: 57424
  source 1..368: note = Veillonellaceae bacterium
  REGION 1..368: note = tr|A0A134CDE5|A0A134CDE5_9FIRM Queuine tRNA-ribosyltransferase OS=Veillonellaceae bacterium KA00182 OX=1588748 GN=tgt PE=3 SV=1

SEQ ID NO: 62091 - protein, 370 aa, unidentified
  source 1..370: note = Ventosimonas gracilis
  REGION 1..370: note = tr|A0A139SUX4|A0A139SUX4_9GAMM Queuine tRNA-ribosyltransferase OS=Ventosimonas gracilis; OX = 1680762 GN=tgt PE=3 SV=1
MRFERLASDGKARHGRLHFPRGVVETPAFMPVGTYGTVKGMLPRDIEAIGAQIVLGNTFHLWLRPGTEVIEKLGDLHDFMQWQRPILTDSGGFQVFSLGKLRKIREEGVHFASPVDGRKVFMGPEESIAVQRSLGSDIVMIFDECTPYPADFASAQRSMELSLRWAARSKAAHSGSSAALFGIIQGGMYQDLRLRSLEGLAQIGFDGLAIGGLSVGEPKDEMRRVLDFLPEAMPPELPRYLMGVGTPEDLVEGVRRGVDMFDCVMPTRNARNGYLFTESGILKIRNAKNRHDDSAVDPGCDCYCCLHFSRAYLHHLDKCGEMLAPMLMTIHNLRYYQRLMAGLRDAIEQGKLADFSHAFYAKRGQSCPSV

SEQ ID NO: 62092 - protein, 390 aa, Verminephrobacter eiseniae
  REGION 1..390: note = sp|A1WFH2|TGT_VEREI Queuine tRNA-ribosyltransferase; OS = Verminephrobacter eiseniae (strain EF01-2) OX=391735; GN = tgt PE=3 SV=1
MLQFDLLTTDPASHARRGRLTLRHGQVQTPIFMPVGTHGSVKGVLPRSLHEMGAQIILGNTFHLWLRPGLAVLQGFGGLHGFEKWNKPILTDSGGFQVWSLGALRTITEEGVHFASPVNGDKLFLSPEVSMQIQTTLDSDIVMQLDECTPYETRGQRTTERAACQSMQMSLRWAKRSQDEFQRLNNPNALFGIVQGGMYENLRAESLAALAAMDLPGYAIGGVSVGEPKDEMLRIMAHTPHRLPAHKPRYLMGVGTPEDLVEGVAQGVDMFDCVMPTRNARNGTLFTRFGDLKIRNARHKTDPQPLDGSCTCYTCAGPSGVAWDQGGRDGFSRAYLHHLERCGEMLGPMLSTVHNLHYYLNLMREIRQALDAGEFTQLRARLKADRARGV

SEQ ID NO: 62093 - protein, 390 aa, Verminephrobacter sp.
  REGION 1..390: note = tr|A0A4Q2LZB8|A0A4Q2LZB8_9BURK Queuine tRNA-ribosyltransferase OS=Verminephrobacter sp. Larva24; OX = 2509434 GN=tgt PE=3 SV=1
MLQFDLLTTDPASHARRGRLTLRHGQVQTPIFMPVGTHGSVKGVLPRSLHEMGAQIILGNTFHLWLRPGLAVLQGFGGLHGFEKWNKPILTDSGGFQVWSLGALRTITEEGVHFASPVNGDKLFLSPEVSMQIQTTLDSDIVMQLDECTPYETRGQRTTERAACQSMQMSLRWAKRSQDEFQRLNNPNALFGIVQGGMYENLRAESLAALAAMDLPGYAIGGVSVGEPKDEMLRIMAHTPHRLPAHKPRYLMGVGTPEDLLEGVAQGVDMFDCVMPTRNARNGTLFTRFGDLKIRNARHKTDPQPLDGSCTCYTCAGPSGVAWDQGGRDGFSRAYLHHLERCGEMLGPMLSTVHNLHYYLNLMREIRQALDAGEFTQLRARLKADRARGV

SEQ ID NO: 62094 - protein, 405 aa, unidentified
  source 1..405: note = Verrucomicrobia bacterium
  REGION 1..405: note = tr|A0A1Q6V4A1|A0A1Q6V4A1_9BACT Queuine tRNA-ribosyltransferase OS=Verrucomicrobia bacterium 13_2_20CM_55_10 OX=1805420 GN=tgt PE=3 SV=1
MFELFTQDRQSKARRGRVGTLHGVVETPAFMPVGTQGTVKAVTPRELHELKAQIVLGNTYHLFVRPGLDVIKHFGGLHKFMNWDGPILTDSGGYQIFSLAKLRKITEDGVEFQNHLDGARAFISPEIAMEIQVALGSDIAMALDECVPYPCQYDYAAQSAEMTTRWARRCKEALQGRREENVQRSKPNAQHPRAEPIQSAIRNPQSAIERQLLFGIVQGATFDDLRKASAQAIVELDFDGYAIGGVSVGEPEDEMMRAVESAEPFLPHDKPRYAMGLGTPPQLLEMIARGMDMFDCVLPTRLARNGTAFTATGTINLKNAEVARDKRPIEENCTCPACREFSRGYIRHLIKAEEILGLRLITLHNLHFYLYLMNRARTEIERQSFDKFRRASVAEYKTRDATTAA

SEQ ID NO: 62095 - protein, 401 aa, unidentified
  source 1..401: note = Verrucomicrobia bacterium
  REGION 1..401: note = tr|A0A2V6EZA3|A0A2V6EZA3_9BACT Queuine tRNA-ribosyltransferase OS=Verrucomicrobia bacterium; OX = 2026799 GN=tgt PE=3 SV=1
MFELLAQDRQSRARHGRLTTAHGAIKTPAFVPVGTQGSVKAVSPRELRELNAPIVLGNTYHLFVRPGIEVIKHFGGLHKFMTWDRPILTDSGGYQIFSLAKLRKISENGVHFQNHVDGSPAFISPESAMEIQAALGSDIAMVLDECPPWPCEYDYAAKSAEMTTRWAKRCKEWTKENAQLPTSNAEPPTSNIEDRTTDIGQSAIDRQLVFGIVQGATFGELREQSAQAIVDLDFDGYAIGGVSVGEPEEEMFRAVESSEPFLPNEKPRYAMGLGTPPQLLEMISRGMDMFDCVLPTRLARNGTAFTATGTLNLKNAEYAKDRRPIEEDCVCSSCREFSRGYVRHLIKAEEILGLRLITLHNLHFYLDLMRQARDKIDKGTFDEFRREFVSNYETRDVDIAV

SEQ ID NO: 62096 - protein, 385 aa, unidentified
  source 1..385: note = Verrucomicrobia subdivision
  REGION 1..385: note = tr|A0A0R2RJ17|A0A0R2RJ17_9BACT Queuine tRNA-ribosyltransferase OS=Verrucomicrobia subdivision 6 bacterium BACL9 MAG-120507-bin52 OX=1655590 GN=tgt PE=3; SV = 1
MKSAGEVFRLEKSDGAARAGVVQTAHGDFQTPVFMPVGTQASVKGVSPDELTEMGAKIILGNTYHLVVRPGLEVMGQMGGLHKFMRWDGPILTDSGGFQVFSLAKIREVKEEGVWFSSHVDGKKLFLGPKEAVRAQVALGSDIMMAFDECPPWPCSREVLEKSLERTLRWAKICREEQGVSGTKNLLFGIVQGGDQADLRQKSCEGLLHIGFDGYAVGGVSVGEPEREMMRAIDASMPFLPMDRPRYVMGLGHPDQMVRMIGKGVDMFDCVLPTRVARNGTACTVTGPTSVRKANWTRDEGPIVKDCGCYTCLRFSRAYIQHLIKAEELLGLRLISLHNLYFNLETLRQARRAILEDRWQSWSRDFLERYQRGGSSKEEEDSHDV

SEQ ID NO: 62097 - protein, 387 aa, unidentified
  source 1..387: note = Verrucomicrobia subdivision
  REGION 1..387: note = tr|A0A520RTH9|A0A520RTH9_9BACT Queuine tRNA-ribosyltransferase OS=Verrucomicrobia subdivision 3 bacterium OX=2052186 GN=tgt PE=3 SV=1
MFELLKTDAGSKARRGRLTTAHGVIETPVFMPVGTQASVKALDPRELHEMGTQIVLGNTYHLAIRPGMDIMNEAGGLHRFMNWDLPILTDSGGFQVFSLAKIRKIRQDGVEFRSHLDGSPLFLGPKEAMKIQRELGSDIAMAFDQCPNHDAPVSEMKETVDRTLRWARLCLEQPRAEGQLIFGIGQGGSNAELREYCAKALCKMDFDGFAIGGVSVGEPEPEMMKAVEYTEPFLPADKARYAMGLGTPAQLVELVARGVDMFDCVLPTRVARNGTAFTKKGTISIKAGYNKRDWNPIEEDCECYACRHFTKAYLRHLLNVDEILGLRMLSVHNSHMFLDLMRNIRLHLDNGTFSEYRREFIAGYTPTLKVLEQRARHAESQQESSSK

SEQ ID NO: 62098 - protein, 375 aa, unidentified
  source 1..375: note = Verrucomicrobiaceae bacterium
  REGION 1..375: note = tr|A0A1Z9FMG0|A0A1Z9FMG0_9BACT Queuine tRNA-ribosyltransferase OS=Verrucomicrobiaceae bacterium TMED137 OX=1986879 GN=tgt PE=3 SV=1
MFELLQTDPDCKARRGRLTTPHGVIETPIFMPVGTQGSVKTLHPEDLHLMEAQIILGNTYHLWLRPGTNVISKLGGLHSFTTWDGPILTDSGGFQVWSLSKIRKISEEGVNFQSHLDGTRMMLSPEKSMEIQATFGSDIAMLFDECPPYPCERKYAEESTALTTRWGKRCKEWVETNRPTSGNGRQLHFGIVQGSVYRDLREESARALVDLDLDGYAIGGVSVGEPEEEMFAAIQNTEPFLPGNKPRYAMGLGTPTQLLEMISQGVDMFDCVHPTRCARHGQAFTPDGPVHIKNKCFEFDSAPLTAEAHPHVARFSRAFLRHSFRAGEIIAQRVLSFHNLHFYLQLMENSRQAIAEGRFREFQREFVERYTAGAK

SEQ ID NO: 62099 - protein, 379 aa, unidentified
  source 1..379: note = Verrucomicrobiaceae bacterium
  REGION 1..379: note = tr|A0A1Z8ZPY6|A0A1Z8ZPY6_9BACT Queuine tRNA-ribosyltransferase OS=Verrucomicrobiaceae bacterium TMED86 OX=1986881 GN=tgt PE=3 SV=1
MFELLSTDPDCKARRGRLTTPHGVIETPIFMPVGTQGSVKTLHPEDLQAMDAQIILGNTYHLWLRPGTEVIAKLGGLHGFTTWDGPILTDSGGFQVWSLSKIRKITEAGVEFRSHLDGSKMMLSPEKSMEIQATFGSDIAMLFDECPPYPCERKYAEESTDLTTRWAKRCKAWVEEQRPTSGEGRQLHFGIVQGSVYPDLREKSARALVDLDFDGYAIGGVSVGEPEEEMFAAIQNAEPFLPQDKPRYAMGLGTPTQLLEMIGQGVDMFDCVHPTRCARHGQAFTPDGPIHIKNKEFEFDVSPLSEDAHPHVARFSKAFLRHSFRAGEIIAQRVLSFHNLHFYLKLMENTRSAIEEGCFREFQSDFVSRYTAKKSKPNH

SEQ ID NO: 62100 - protein, 377 aa, unidentified
  source 1..377: note = Verrucomicrobiae bacterium
  REGION 1..377: note = tr|A0A2A2Q2R1|A0A2A2Q2R1_9BACT Queuine tRNA-ribosyltransferase OS=Verrucomicrobiae bacterium Tous-C2TDCM OX=1982329 GN=tgt PE=3 SV=1
MFTLLHTDSRTAARRGRMTLAHGEVETPCFMPVGTRGTVKSVHPAELSDPALDCRILLGNTYHLFLRPGTEVLDHFGGLHEFMCWQRPILTDSGGYQVFSLSKLRKLTEEGVRFQSHLDGSPVHLTPESVLEIQRSIGSDICMILDECPPFPCEREYAEKSLALTQRWAVRAREWVAKHQPKGQRHFGIVQGSCFPDLRERAARDLVDLDFDGYAIGGLSVGEPIPEMLKAVDIAAPILPAHKPRYAMGLGQPDQLLELISRGIDMFDCVLPTRVARNGTAYTADGTINLKNARWEKSRDPLGPTGSTHPLCEGFTLGYLRHLIKNDELLGLRLLSLHNLAFYLDLMKQAQRAIEGGSFADFKETFIRRYRAGRSEA

SEQ ID NO: 62101 - protein, 371 aa, unidentified
  source 1..371: note = Verrucomicrobiae bacterium
  REGION 1..371: note = tr|A0A2A2YE44|A0A2A2YE44_9BACT Queuine tRNA-ribosyltransferase OS=Verrucomicrobiae bacterium AMD-G2 OX=1982328 GN=tgt PE=3 SV=1
MLKTDTESKARLGRLDLPHGTVETPIFMPVGTQGAVKTLHPDDLDALGAQIILGNTYHLWLRPGHELIKEFGGLHEFTSWEKPILTDSGGFQVWSLAKLRKITEEGVRFQNHLDGSEMMLTPELSMEIQAAIGSDIAMLFDECPPYPCDEKYAANSLALTTRWAHRCKDWVTTHEPRSGEGRQQHFGIVQGSIYAEMREQSARELAAMDFDGYAIGGVSVGEPEEEMFRAIDNAVPFLPDHKPRYAMGLGTPPQILEMIGRGVDMFDCVMPTRIARHGTAFTLDGPIQIKNLAFAKDPRPLCETAHPHVARFSRAYIRHLFRAGEILSLRLLSFHNLHFYLRLVSDARAAIAEGTFLSFKNSFNKRYLKLL

SEQ ID NO: 62102 - protein, 387 aa, unidentified
  source 1..387: note = Verrucomicrobiales bacterium
  REGION 1..387: note = tr|A0A353DXU2|A0A353DXU2_9BACT Queuine tRNA-ribosyltransferase OS=Verrucomicrobiales bacterium; OX = 2026801 GN=tgt PE=3 SV=1
MFTLLKKDPSSRARRGRLATAHGVIETPVFMPVGTQASVKALDPRELLEMGSQIVLGNTYHLALRPGMDIMQEAGGLHRFMNWDLPILTDSGGFQVFSLAKIRQVSQEGVAFKSHLDGSTLFLGPKEAMAIQRQLGSDIAMAFDQCPAHDAPEGEMKEAVDRTLRWAAACLEQPRAVGQQVFGIVQGGSHPEIRESCAQALCKMDFDGYAIGGVSVGEPEPEMMKAVEFTEPLLPENKARYAMGLGTPAQLVELVARGVDMFDCVLPTRVARNGTAFTKEGTISIKAGYNKRDWRPIEEDCNCYACQHFTRAYLRHLLNVNEILGLRMLSVHNSHMYLALMRDIRRHLDEGTFEAFRASFAATYRPTQKILDQRAAHALREQESPSN

SEQ ID NO: 62103 - protein, 387 aa, unidentified; identical to SEQ ID NO: 62097
  source 1..387: note = Verrucomicrobiales bacterium
  REGION 1..387: note = tr|A0A350I3Y7|A0A350I3Y7_9BACT Queuine tRNA-ribosyltransferase OS=Verrucomicrobiales bacterium; OX = 2026801 GN=tgt PE=3 SV=1

SEQ ID NO: 62104 - protein, 396 aa, Verrucomicrobium sp.
  REGION 1..396: note = tr|A0A1H2DUX7|A0A1H2DUX7_9BACT Queuine tRNA-ribosyltransferase OS=Verrucomicrobium sp. GAS474; OX = 1882831 GN=tgt PE=3 SV=1
MSFQLTHTDPSSRARAGVLTTEHGTIETPVFMPVGTQGSVKAVFGRDLREMKTQILLGNTYHLFIRPGIDDMRTYGGLHKFMNWDGPILTDSGGFQVFSLAPLRKLVEDGVHFRSHISGEPLFLGTKESIGMQVAIGSDIMMVLDECPPWPCEPEPARAAVERTVRWAADCKRIAAELAASEVNRPTKNQLLFGIVQGGSHADLRKECAQRLVEIGFDGYAIGGVSVGEPEPEMMASIEMAEPYLPADKPRYAMGLGQPWQLVELVARGVDMFDCVLPTRMARHGTVYSRDGHFHLKTSPYRLDERPLDPECGCYACKNYTRAYIRHLLKTEEIVGLMLVSLHNSHFYLDFMREVRAAIIAGTFADYRRAFRERYRIPGKNLGEHRSDLKRKNDNE

SEQ ID NO: 62105 - protein, 388 aa, unidentified
  source 1..388: note = Verticiella sediminum
  REGION 1..388: note = tr|A0A556AQA0|A0A556AQA0_9BURK Queuine tRNA-ribosyltransferase OS=Verticiella sediminum; OX = 1247510 GN=tgt PE=3 SV=1
MTHTTPLASSSRPGLTFELLATDGKARRGRLLLNHGEVHTPMFMPVGTYGSVKAMDPVELRQIGSQVILGNTFHLWLRPGTEIMQAHGGLHGFMQWPGPILTDSGGFQVFSLQGMRKITEEGVRFASPIDGARLFLTPEESMRIQRALDSDIAMVFDECTPYKIGERPATQEEAARSMRMSLRWAQRSRDSFEALENPNALFGIVQGGMFEGLRDESLAGLVDIGFHGYAIGGLSVGEPKEDMLRILAHVAPRLPVDAPRYLMGVGTPEDLVEGVANGVDMFDCVMPTRNARNGWLFTRYGDIKIRNARYRDDTAPLDESCACPTCTRFTRAYLHHLQRANEILGARLNTLHNLYFYLQIMREMREAIAAGTFESWRARFAADRARGV

SEQ ID NO: 62106 - protein, 370 aa, unidentified
  source 1..370: note = Vesicomyosocius okutanii
  REGION 1..370: note = sp|A5CW46|TGT_VESOH Queuine tRNA-ribosyltransferase; OS = Vesicomyosocius okutanii subsp. Calyptogena okutanii (strain HA) OX=412965 GN=tgt PE=3 SV=1
MKFELKNTNYLARRGKIIFDRGEVETPSFMPVGTYGSVKAMTPEELSSFGTQMILGNSFHLAITPGIDVVQAHGNLHDFMHWKGPILTDSGGFQVFSLGETRKISEKGVDFRSPKDGAKIFMGPEESIQIQKKLGSDIVMIFDECTPYPADKKTVYKSMQLSLRWAQRSKNEHDRLNNKNALFGIVQGGMHEDLRIQSAATLVEIGFNGFAIGGLSVGESKEEMIKVLDYLPSQLPSDKLRYLMGVGTPKDLVEAVERGIDMFDCVMPTRNARNGYLFTSIGIVKIRNARYRLDTSVLDECCHCYTCQNYSKSYLHHLQRKNEILGARLNTIHNLYYYQYLMLQMRRAIESNKFSKFKKEFYQQQGHDTL

SEQ ID NO: 62107 - protein, 381 aa, unidentified
  source 1..381: note = Vespertiliibacter pulmonis
  REGION 1..381: note = tr|A0A3N4VWH9|A0A3N4VWH9_9PAST Queuine tRNA-ribosyltransferase OS=Vespertiliibacter pulmonis; OX = 1443036 GN=tgt PE=3 SV=1
MKYELKKTDGNARRGRLTFSRPKGEYHVETPAFMPVGTYGTVKGMTPEEVAATGAQILLGNTFHLWLRPGQEIMKMHGDLHDFMQWHGPILTDSGGFQVFSLGKLRKIKEEGVTFQNPISGEKIFLSPEKSMEIQYDLGSDIVMIFDECTPYPATFDYAKQSMEMSLRWAKRSRDRFDELENPNALFGIIQGGVYEELRKVSVEKLVEIGFDGYAVGGLAVGEPKEDMHRILEYVCPQIPADKPRYLMGVGKPEDLVEGVRRGIDMFDCVMPTRNARNGHLFVSNGIVKIRNAKYRNDISPLDPECDCYTCKNYTKAYLYHLDKCGEILGARLNTIHNLRYYQRLMAQIRQAIDDDRFDEFVVEFYQKIGKEVPPLQLSSE

SEQ ID NO: 62108 - protein, 377 aa, Vibrio aerogenes
  REGION 1..377: note = tr|A0A1M5YYD4|A0A1M5YYD4_9VIBR Queuine tRNA-ribosyltransferase OS=Vibrio aerogenes CECT 7868; OX = 1216006 GN=tgt PE=3 SV=1
MKLKFELKKKNGNARRGQIQFERGTVQTPVFMPVGTYGTVKGMTPEEVKETGAEILLGNTFHLWLRPGQEIMKMHGDLHDFMNWQGPILTDSGGFQVFSLGDIRKITEEGVHFRNPVNGEKIFMDAEKSMEIQRDLGSDIVMIFDECTPYPASHDEAKSSMEMSLRWAKRSRDHFDQLENPNSLFGIVQGSVYEDLRDISAKGLTDIGFDGYAVGGLAVGEPKEDMHRILEHTCPLLPEDKPRYLMGVGKPEDLVEGVRRGIDMFDCVMPTRNARNGHLFVTGGVVKIRNAKHKTDTTPLDPECDCYTCKNYSKSYLHHLDRCNEILGARLNTIHNLRYYQRLMASIRQAIEADRFEEFVTEFYARRDRDVPPVGQV

SEQ ID NO: 62109 - protein, 377 aa, Vibrio agarivorans
  REGION 1..377: note = tr|A0A2K1CK00|A0A2K1CK00_9VIBR Queuine tRNA-ribosyltransferase OS=Vibrio agarivorans OX=153622; GN = tgt PE=3 SV=1
MKLKFDLKKKDGVARRGQLTFERGTVQTPAFMPVGTYGTVKGMTPEEVKGTGAEILLGNTFHLWLRPGQEVMKMHGDLHDFMNWQGPILTDSGGFQVFSLGSMRTITEKGVHFRNPVNGDKIFMDAEKSMEIQKDLGSDIVMIFDECTPYPATHDEAKKSMEMSLRWAQRSRDHFDKLENPNNLFGIVQGGVYEDLRDVSVKGLTEIGFDGYAVGGLAVGEPKEDMHRVLEHTCPQLPEDKPRYLMGVGKPEDLVEGVRRGIDMFDCVMPTRNARNGHLFVTGGVIKIRNAKHKTDTTPLDPHCDCYTCQNYSKAYLHHLERCNEILGARLNTIHNLRYYQRLMESIRNAIDEDRFDEFVAEFYARRDREVPPLSKA

SEQ ID NO: 62110 - protein, 377 aa, unidentified
  source 1..377: note = Vibrio alfacsensis
  REGION 1..377: note = tr|A0A347USI7|A0A347USI7_9VIBR Queuine tRNA-ribosyltransferase OS=Vibrio alfacsensis OX=1074311; GN = tgt PE=3 SV=1
MKLKFDLKKKNGNARRGQLTFERGTVQTPAFMPVGTYGTVKGMTPEEVKGTGAEILLGNTFHLWLRPGQEVMKMHGDLHDFMNWHGPILTDSGGFQVFSLGKMRTITEQGVHFRNPVNGDKIFMDAEKSMEIQKDLGSDIVMIFDECTPYPATHDEAKKSMEMSLRWAQRSRDHFDKLENPNNLFGIVQGGVYEDLRDVSVKGLTEIGFDGYAVGGLAVGEPKEDMHRILEHTCPQLPEDKPRYLMGVGKPEDLVEGVRRGIDMFDCVMPTRNARNGHLFVTGGVIKIRNAKHKTDTTPLDPHCDCYTCQNYSKSYLHHLERCNEILGARLNTIHNLRYYQRLMESIRKAIDEDRFDEFVQEFYARRDREVPPLGEA

SEQ ID NO: 62111 - protein, 378 aa, Vibrio alginolyticus
  REGION 1..378: note = tr|D0WU67|D0WU67_VIBAL Queuine tRNA-ribosyltransferase OS=Vibrio alginolyticus 40B; OX = 674977 GN=tgt PE=3 SV=1
MKLKFDLKKKNGNARRGQLTFERGTVQTPAFMPVGTYGTVKGMTPEEVKGTGAEILLGNTFHLWLRPGQEVMKMHGDLHDFMNWHGPILTDSGGFQVFSLGKMRTITEEGVHFRNPVNGDKIFMDAEKSMEIQKDLGSDIVMIFDECTPYPATHDEAKKSMEMSLRWAQRSRDHFEKLENPNNLFGIVQGGVYEDLRDVSVKGLTEIGFDGYAVGGLAVGEPKEDMHRILEHTCPQLPEDKPRYLMGVGKPEDLVEGVRRGIDMFDCVMPTRNARNGHLFVTGGVIKIRNAKHKTDTTPLDPHCDCYTCQNYSKSYLHHLERCNEILGARLNTIHNLRYYQRLMESIRKAIDEDRFDEFVTEFYERRGREVPPLAKEQ

SEQ ID NO: 62112 - protein, 378 aa, Vibrio alginolyticus; identical to SEQ ID NO: 62111
  REGION 1..378: note = tr|A0A0H0YFJ4|A0A0H0YFJ4_VIBAL Queuine tRNA-ribosyltransferase OS=Vibrio alginolyticus OX=663; GN = tgt PE=3 SV=1

SEQ ID NO: 62113 - protein, 383 aa, unidentified
  source 1..383: note = Vibrio algivorus
  REGION 1..383: note = tr|A0A557P6H7|A0A557P6H7_9VIBR Queuine tRNA-ribosyltransferase OS=Vibrio algivorus OX=1667024; GN = tgt PE=3 SV=1
MKYELIKKDGVARRGRLTFKRGSVETPAFMPVGTYGTVKGMTPEEVKDTGAEILLGNTFHLWLRPGQEVMKLHGDLHDFMNWQGPILTDSGGFQVFSLGKMRKITEEGVHFRNPVNGDRIFMDAEKSMEIQKDLGSDIVMIFDECTPYPATHEEARKSMEMSLRWAQRSRDHFDKLENPNALFGIVQGGVYGDLRDVSVKGLTEIGFDGYAVGGLAVGEPKEDMHHMLEHTCPQLPEDKPRYLMGVGKPEDLVEGVRRGIDMFDCVMPTRNARNGHLFVTGGVVKIRNASHKTDTSPLDPHCDCYTCKNYSKSYLHHLDRCNEILGARLNTIHNLRYYQRLMASIRLAIDEDRFEEFVQEFYARRDREVPPLQKELRMSDSSQ

SEQ ID NO: 62114 - protein, 376 aa, Vibrio anguillarum
  REGION 1..376: note = tr|A0A1Y0P179|A0A1Y0P179_VIBAN Queuine tRNA-ribosyltransferase OS=Vibrio anguillarum OX=55601; GN = tgt PE=3 SV=1
MKLTYELKKKNGNARRGQLTFERGTVQTPAFMPVGTYGTVKGMTPEEVKETGAEILLGNTFHLWLRPGQEVMKMHGDLHDFMNWQGPILTDSGGFQVFSLGDIRKITEEGVHFRNPVNGDKIFMDAEKSMEIQKDLGSDIVMIFDECTPYPATHDEAKKSMEMSLRWAQRSRDHFDKLENTNSLFGIVQGSVYEDLRDVSVKGLTEIGFDGYAVGGLAVGEPKEDMHRVLEHTCPQLPEDKPRYLMGVGKPEDLVEGVRRGIDMFDCVMPTRNARNGHLFVTGGVIKIRNAVHKTDTTALDPHCDCYTCKNYSKSYLHHLDRCNEILGARLNTIHNLRYYQRLMASIRLAIEEDRFDAFVEEFYARRNREVPPMGQ

SEQ ID NO: 62115 - protein, 394 aa, Vibrio anguillarum
  REGION 1..394: note = tr|F7YNK9|F7YNK9_VIBA7 Queuine tRNA-ribosyltransferase OS=Vibrio anguillarum (strain ATCC 68554 / 775) OX=882102 GN=tgt PE=3 SV=1
MLAPNHDTSDCFSDIGGFVKLTYELKKKNGNARRGQLTFERGTVQTPAFMPVGTYGTVKGMTPEEVKETGAEILLGNTFHLWLRPGQEVMKMHGDLHDFMNWQGPILTDSGGFQVFSLGDIRKITEEGVHFRNPVNGDKIFMDAEKSMEIQKDLGSDIVMIFDECTPYPATHDEAKKSMEMSLRWAQRSRDHFDKLENTNSLFGIVQGSVYEDLRDVSVKGLTEIGFDGYAVGGLAVGEPKEDMHRVLEHTCPQLPEDKPRYLMGVGKPEDLVEGVRRGIDMFDCVMPTRNARNGHLFVTGGVIKIRNAVHKTDTTALDPHCDCYTCKNYSKSYLHHLDRCNEILGARLNTIHNLRYYQRLMASIRLAIEEDRFDAFVEEFYARRNREVPPMGQ

SEQ ID NO: 62116 - protein, 382 aa, unidentified
  source 1..382: note = Vibrio antiquarius
  REGION 1..382: note = tr|A7K196|A7K196_VIBAE Queuine tRNA-ribosyltransferase OS=Vibrio antiquarius (strain Ex25) OX=150340 GN=tgt PE=3 SV=1
MKLKFDLKKKNGNARRGQLTFERGTVQTPAFMPVGTYGTVKGMTPEEVKGTGAEILLGNTFHLWLRPGQEVMKMHGDLHDFMNWHGPILTDSGGFQVFSLGKMRTITEEGVHFRNPVNGDKIFMDAEKSMEIQKDLGSDIVMIFDECTPYPATHDEAKKSMEMSLRWAQRSRDHFEKLENPNNLFGIVQGGVYEDLRDVSVKGLTEIGFDGYAVGGLAVGEPKEDMHRILEHTCPQLPEDKPRYLMGVGKPEDLVEGVRRGIDMFDCVMPTRNARNGHLFVTGGVIKIRNAKHKTDTTPLDPHCDCYTCQNYSKSYLHHLERCNEILGARLNTIHNLRYYQRLMESIRKAIDEDRFDEFVTEFYERRGREVPPLAKEQSLTD

SEQ ID NO: 62117 - protein, 378 aa, Vibrio atlanticus
  REGION 1..378: note = tr|A0A558GP63|A0A558GP63_9VIBR Queuine tRNA-ribosyltransferase OS=Vibrio atlanticus OX=693153; GN = tgt PE=3 SV=1
MKLKYELKKTNSGARRGQLQFERGSVETPAFMPVGTYGTVKGMTPEEVKDTGAEILLGNTFHLWLRPGQEIMKLHGDLHDFMNWKGPILTDSGGFQVFSLGATRKITEEGVHFRNPVNGDKIFMDAEKSMEIQKDLGSDIVMIFDECTPYPATHKEAKDSMEMSLRWAQRSRNHFDKQENPNSLFGIVQGGVYEDLRDVSVKGLTEIGFDGYAVGGLAVGEPKEDMHRILEHTCPQLPEDKPRYLMGVGKPEDLVEGVRRGIDMFDCVMPTRNARNGHLFVTEGVIKIRNAKHKTDTTPLDSDCDCYTCKNYSKSYLHHLDRCNEILGARLNTIHNLRFYQRIMSDIRQSIDEDRFEEFVAEFYARMGREVPPLGKES

SEQ ID NO: 62118 - protein, 378 aa, Vibrio atlanticus
  REGION 1..378: note = tr|A0A1C3IKH1|A0A1C3IKH1_9VIBR Queuine tRNA-ribosyltransferase OS=Vibrio atlanticus OX=693153; GN = tgt PE=3 SV=1
MKLKYELKKTNSGARRGQLQFERGTVETPAFMPVGTYGTVKGMTPEEVKDTGAEILLGNTFHLWLRPGQEIMKLHGDLHDFMNWKGPILTDSGGFQVFSLGATRKITEEGVHFRNPVNGDKIFMDAEKSMEIQKDLGSDIVMIFDECTPYPATHKEAKDSMEMSLRWAQRSRNHFDKQENPNSLFGIVQGGVYEDLRDVSVKGLTEIGFDGYAVGGLAVGEPKEDMHRILEHTCPQLPEDKPRYLMGVGKPEDLVEGVRRGIDMFDCVMPTRNARNGHLFVTEGVIKIRNAKHKTDTTPLDSECDCYTCKNYSKSYLHHLDRCNEILGARLNTIHNLRFYQRVMSDIRQSIDEDRFEEFVAEFYARMGREVPPLGKES

SEQ ID NO: 62119 - protein, 377 aa, Vibrio azureus
  REGION 1..377: note = tr|U3AT90|U3AT90_9VIBR Queuine tRNA-ribosyltransferase OS=Vibrio azureus NBRC 104587; OX = 1219077 GN=tgt PE=3 SV=1
MKLKFDLKKKDGVARRGQLTFERGTVQTPAFMPVGTYGTVKGMTPEEVKGTGAEILLGNTFHLWLRPGQEVMKLHGDLHDFMNWQGPILTDSGGFQVFSLGKMRTITEKGVHFRNPVNGDKIFMDAEKSMEIQKDLGSDIVMIFDECTPYPATHDEAKKSMEMSLRWAQRSRDHFDKLENPNNLFGIVQGGVYEDLRDVSVKGLTEIGFDGYAVGGLAVGEPKEDMHRVLEHTCPQLPEDKPRYLMGVGKPEDLVEGVRRGIDMFDCVMPTRNARNGHLFVTGGVIKIRNAKHKTDTTPLDPHCDCYTCQNYSKAYLHHLERCNEILGARLNTIHNLRYYQRLMESIRNAIDEDRFDEFVAEFYARRDREVPPLSKA

SEQ ID NO: 62120 - protein, 377 aa, unidentified
  source 1..377: note = Vibrio barjaei
  REGION 1..377: note = tr|A0A1J4QV78|A0A1J4QV78_9VIBR Queuine tRNA-ribosyltransferase OS=Vibrio barjaei OX=1676683; GN = tgt PE=3 SV=1
MKLQYELKKKNGHARRGQLTFERGTVQTPAFMPVGTYGTVKGMTPEEVKGTGAEILLGNTFHLWLRPGQEIMKMHGDLHDFMNWHGPILTDSGGFQVFSLGDIRKITEEGVHFRNPVNGDKIFMDAEKSMEIQKDLGSDVVMIFDECTPYPATHAEAKKSMEMSLRWAQRSRDHFDKLENPNSLFGIVQGSVYEDLRDVSVEGLTNIGFDGYAVGGLAVGEPKEDMHRVLEHTTPKLPEDKPRYLMGVGKPEDLVEGVRRGIDMFDCVMPTRNARNGHLFVTGGIVKIRNATNKTDTGPLDEHCDCYTCKNYSKAYLHHLDRCNEILGARLNTIHNLRYYQRLMESIRTAIDEDRFDEFVEEFYARRNREVPPLDMK

SEQ ID NO: 62121 - protein, 378 aa, unidentified
  source 1..378: note = Vibrio bivalvicida
  REGION 1..378: note = tr|A0A177XVH1|A0A177XVH1_9VIBR Queuine tRNA-ribosyltransferase OS=Vibrio bivalvicida OX=1276888; GN = tgt PE=3 SV=1
MKLKFDLKKKDGVARRGQLTFERGTVQTPAFMPVGTYGTVKGMTPEEVKGTGAEILLGNTFHLWLRPGQEVMKMHGDLHDFMNWHGPILTDSGGFQVFSLGKMRTITEQGVHFRNPVNGDKIFMDAEKSMEIQKDLGSDIVMIFDECTPYPATHDEAKKSMEMSLRWAQRSRDHFDKLENPNNLFGIVQGGVYEDLRDVSVKGLTEIGFDGYAVGGLAVGEPKEDMHRILEHTCPQLPEDKPRYLMGVGKPEDLVEGVRRGIDMFDCVMPTRNARNGHLFVTGGVIKIRNAKHKTDTTPLDPYCDCYTCQNYSKSYLHHLERCNEILGARLNTIHNLRYYQRLMESIRKAIDEDRFDEFVTEFYERRGREVPPLAKEQ

SEQ ID NO: 62122 - protein, 378 aa, Vibrio brasiliensis
  REGION 1..378: note = tr|E8LPX3|E8LPX3_9VIBR Queuine tRNA-ribosyltransferase OS=Vibrio brasiliensis LMG 20546; OX = 945543 GN=tgt PE=3 SV=1
MKLKFDLKKKDGVARRGQLTFERGTVQTPAFMPVGTYGTVKGMTPEEVKGTGAEILLGNTFHLWLRPGQEVMKMHGDLHDFMNWQGPILTDSGGFQVFSLGKMRTITEQGVHFRNPVNGDKIFMDAEKSMEIQKDLGSDIVMIFDECTPYPATHDEAKKSMEMSLRWAQRSRDHFDKLENPNNLFGIVQGGVYEDLRDVSVKGLTEIGFDGYAVGGLAVGEPKEDMHRILEHTCPQLPEDKPRYLMGVGKPEDLVEGVRRGIDMFDCVMPTRNARNGHLFVTGGVIKIRNAKHKTDTTALDPHCDCYTCQNYSKSYLHHLERCNEILGARLNTIHNLRYYQRLMESIRNAIDEDRFDEFVKEFYERRGREVPPLAKEQ

SEQ ID NO: 62123 - protein, 378 aa, Vibrio breoganii
  REGION 1..378: note = tr|A0A193K9Q3|A0A193K9Q3_9VIBR Queuine tRNA-ribosyltransferase OS=Vibrio breoganii OX=553239; GN = tgt PE=3 SV=1
MKFELKKNDGTARRGQLQFERGSVQTPAFMPVGTYGTVKGMTPEEVKGTGAEILLGNTFHLWLRPGQEVMKLHGDLHDFMNWQGPILTDSGGFQVFSLGDIRKITEKGVHFRNPVNGDKIFMDAEKSMEIQKDLGSDVVMIFDECTPYPATHNEAKKSMEMSLRWAQRSRDHFDKLENPNSLFGIVQGGVYEDLRDVSVEGLTKIGFDGYAVGGLAVGEPKEDMHRILEHTCPQLPEDKPRYLMGVGKPEDLVEGVRRGIDMFDCVMPTRNARNGHLFVTGGVIKIRNAKHKTDTTPLDPECDCYTCQNYSKSYLHHLDRCNEILGSRLNTIHNLRYYQRLMESIRTAIDEDRFESFVEEFYARRDRDVPPMLKADAE

SEQ ID NO: 62124 - protein, 378 aa, Vibrio breoganii
  REGION 1..378: note = tr|A0A2N7HEV8|A0A2N7HEV8_9VIBR Queuine tRNA-ribosyltransferase OS=Vibrio breoganii OX=553239; GN = tgt PE=3 SV=1
MKFELKKNDGTARRGQLQFERGSVQTPAFMPVGTYGTVKGMTPEEVKGTGAEILLGNTFHLWLRPGQEVMKLHGDLHDFMNWQGPILTDSGGFQVFSLGDIRKITEKGVHFRNPVNGDKIFMDAEKSMEIQKDLGSDVVMIFDECTPYPATHNEAKKSMEMSLRWAQRSRDHFDKLENPNSLFGIVQGGVYEDLRDVSVEGLTKIGFDGYAVGGLAVGEPKEDMHRILEHTCPQLPEDKPRYLMGVGKPEDLVEGVRRGIDMFDCVMPTRNARNGHLFVTGGVIKIRNAKHKTDTTPLDPECDCYTCQNYSKSYLHHLDRCNEILGSRLNTIHNLRYYQRLMESIRIAIDEDRFESFVEEFYARRERDVPPMLKADAE

SEQ ID NO: 62125 - protein, 378 aa, Vibrio campbellii
  REGION 1..378: note = sp|A7MT83|TGT_VIBCB Queuine tRNA-ribosyltransferase; OS = Vibrio campbellii (strain ATCC BAA-1116 / BB120); OX = 338187 GN=tgt PE=3 SV=1
MKLSFDLKKKNGNARRGQLTFERGTVQTPAFMPVGTYGTVKGMTPEEVKGTGAEILLGNTFHLWLRPGQEVMKMHGDLHDFMNWHGPILTDSGGFQVFSLGKMRKITEKGVHFRSPVNGDKIFMDAEKSMEIQKDLGSDIVMIFDECTPYPATHNEAKKSMEMSLRWAQRSRDHFDKLENPNNLFGIVQGGVYEDLRDVSIKGLTEIGFDGYAVGGLAVGEPKEDMHRILEHTCPQLPEDKPRYLMGVGKPEDLVEGVRRGIDMFDCVMPTRNARNGHLFVTGGVIKIRNAKHKTDTTPLDPHCDCYTCQHYSKSYLHHLERCNEILGARLNTIHNLRYYQRLMESIRKAIDEDRFDEFVTEFYERRGREVPPLAKEQ

SEQ ID NO: 62126 - protein, 378 aa, Vibrio campbellii; identical to SEQ ID NO: 62125
  REGION 1..378: note = tr|A0A0A3ERM0|A0A0A3ERM0_9VIBR Queuine tRNA-ribosyltransferase OS=Vibrio campbellii OX=680 GN=tgt; PE = 3 SV=1

SEQ ID NO: 62127 - protein, 379 aa, unidentified
  source 1..379: note = Vibrio caribbeanicus
  REGION 1..379: note = tr|E3BMU0|E3BMU0_9VIBR Queuine tRNA-ribosyltransferase OS=Vibrio caribbeanicus ATCC BAA-2122 OX=796620 GN=tgt PE=3 SV=1
MKLKFELKKKDGVARRGQLTFERGTVQTPAFMPVGTYGTVKGMTPEEVKDTGAEILLGNTFHLWLRPGQEVMKMHGDLHDFMNWHGPILTDSGGFQVFSLGDIRKITEQGVHFRNPVNGEKIFMDAEKSMEIQNDLGSDIVMIFDECTPYPATHAEAKKSMEMSLRWAQRSRDHFDKLENPNNLFGIVQGGVYEDLRDVSVRGLTEIGFDGYAVGGLAVGEPKEDMHRVLEHTCPQLPEDKPRYLMGVGKPEDLVEGVRRGVDMFDCVMPTRNARNGHLFVTGGVVKIRNAKHKTDTSPLDPHCDCYTCKNYSKSYLHHLDRCNEILGARLNTIHNLRYYQRLMESIRSAIDEDRFDEFVQEFYARRDREVPPLAKTSA

SEQ ID NO: 62128 - protein, 378 aa, unidentified
  source 1..378: note = Vibrio caribbeanicus
  REGION 1..378: note = tr|A0A0A6QLN3|A0A0A6QLN3_9VIBR Queuine tRNA-ribosyltransferase OS=Vibrio caribbeanicus OX=701175; GN = tgt PE=3 SV=1
MKLKFDLKKKDGVARRGQLTFERGTVQTPAFMPVGTYGTVKGMTPEEVKGTGAEILLGNTFHLWLRPGQEIMKMHGDLHDFMNWHGPILTDSGGFQVFSLGKMRTITEEGVHFRNPVNGDKIFMDAEKSMEIQKDLGSDIVMIFDECTPYPATHDEAKKSMEMSLRWAQRSRDHFDKLENPNNLFGIVQGGVYEDLRDVSVKGLTEIGFDGYAVGGLAVGEPKEDMHRILEHTCPQLPEDKPRYLMGVGKPEDLVEGVRRGIDMFDCVMPTRNARNGHLFVTGGVIKIRNAKHKTDTSPLDPHCDCYTCQNYSKSYLHHLERCNEILGARLNTIHNLRYYQRLMESIRTAIDEDRFDEFVKEFYERRGREVPPLSKEQ

SEQ ID NO: 62129 - protein, 381 aa, Vibrio casei
  REGION 1..381: note = tr|A0A368LLE3|A0A368LLE3_9VIBR Queuine tRNA-ribosyltransferase OS=Vibrio casei OX=673372 GN=tgt; PE = 3 SV=1
MEYELIKKDGVARRGRLTFKRGSVETPAFMPVGTYGTVKGMTPEEVKDTGAEILLGNTFHLWLRPGQEIMKLHGDLHDFMNWQGPILTDSGGFQVFSLGKMRKITEEGVHFRNPVNGDRIFMDAEKSMEIQKDLGSDIVMIFDECTPYPATHDEAKKSMEMSLRWAQRSRDHFDKLENPNSLFGIVQGGVYGDLRDVSVKGLTEIGFDGYAVGGLAVGEPKEDMHNMLEHTCPQLPEDKPRYLMGVGKPEDLVEGVRRGIDMFDCVMPTRNARNGHLFVTGGIVKIRNASHKTDTSSLDPHCDCYTCKNYSKSYLHHLDRCNEILGARLNTIHNLRYYQRLMASIRLAIDEDRFEEFVQEFYARRDREVPPLQKEIRSSAQ

SEQ ID NO: 62130 - protein, 378 aa, Vibrio celticus
  REGION 1..378: note = tr|A0A1C3JL60|A0A1C3JL60_9VIBR Queuine tRNA-ribosyltransferase OS=Vibrio celticus OX=446372; GN = tgt PE=3 SV=1
MKLKYELKKTNSGARRGQLQFERGTVETPAFMPVGTYGTVKGMTPEEVKDTGAEILLGNTFHLWLRPGQEIMKMHGDLHDFMNWHGPILTDSGGFQVFSLGAMRKITEEGVHFRNPVNGDKIFMDAEKSMEIQKDLGSDIVMIFDECTPYPATHKEAKDSMEMSLRWAERSRNHFDKLENPNSLFGIVQGGVYEDLRDVSVKGLTEIGFDGYAVGGLAVGEPKEDMHRILEHTCPQLPEDKPRYLMGVGKPEDLVEGVRRGIDMFDCVMPTRNARNGHLFVTEGVIKIRNAKHKTDTTPLDSECDCYTCKNYSKSYLHHLDRCNEILGARLNTIHNLRFYQRVMSDIRQSIDEDRFEEFVAEFYARMGREVPPLGKES

SEQ ID NO: 62131 - protein, 378 aa, Vibrio chagasii
  REGION 1..378: note = tr|A0A2S7VBQ6|A0A2S7VBQ6_9VIBR Queuine tRNA-ribosyltransferase OS=Vibrio chagasii OX=170679; GN = tgt PE=3 SV=1
MKLKYELKKTNAGARRGQLQFERGTVETPAFMPVGTYGTVKGMTPEEVKDTGAEILLGNTFHLWLRPGQEIMKMHGDLHDFMNWQGPILTDSGGFQVFSLGAMRKITEEGVHFRNPVNGDKIFMDAEKSMEIQKDLGSDIVMIFDECTPYPATHKEAKDSMEMSLRWAERSRNHFDKLENPNSLFGIVQGGVYEDLRDVSVKGLTEIGFDGYAVGGLAVGEPKEDMHRILEHTCPQLPEDKPRYLMGVGKPEDLVEGVRRGIDMFDCVMPTRNARNGHLFVTEGVIKIRNAKHKTDTTPLDSECDCYTCKNYSKSYLHHLDRCNEILGARLNTIHNLRFYQRVMSDIRQSIDEDRFEEFVAEFYARMGREVPPLGKES

SEQ ID NO: 62132 - protein, 379 aa, Vibrio cholerae
  REGION 1..379: note = sp|Q9KTY9|TGT_VIBCH Queuine tRNA-ribosyltransferase; OS = Vibrio cholerae serotype O1 (strain ATCC 39315 / El Tor Inaba N16961) OX=243277 GN=tgt PE=3 SV=1
MKLKFELKKKNGNARRGQLIFERGTVQTPAFMPVGTYGTVKGMTPEEVKETGAQILLGNTFHLWLRPGQEVMKMHGDLHDFMNWQGPILTDSGGFQVFSLGDIRKITEEGVHFRNPVNGDKIFMDAEKSMEIQKDLGSDIVMIFDECTPYPATHDEAKKSMEMSLRWAKRSRDHFDKLENPNNLFGIVQGGVYEDLRDVSVKGLTEIGFDGYAVGGLAVGEPKEDMHRVLEHTCPQLPEDKPRYLMGVGKPEDLVEGVRRGIDMFDCVMPTRNARNGHLFVTGGVIKIRNAAHKTDTTPLDPHCDCYTCKNYSKSYLHHLDRCNEILGARLNTIHNLRYYQRLMESIRKAIDEDRFDQFVAEFYARRNREVPPLQKDKA

SEQ ID NO: 62133 - protein, 379 aa, Vibrio cholerae; identical to SEQ ID NO: 62132
  REGION 1..379: note = sp|C3LSZ4|TGT_VIBCM Queuine tRNA-ribosyltransferase; OS = Vibrio cholerae serotype O1 (strain M66-2) OX=579112; GN = tgt PE=3 SV=1

SEQ ID NO: 62134 - protein, 378 aa, unidentified
  source 1..378: note = Vibrio cidicii
  REGION 1..378: note = tr|A0A151KY47|A0A151KY47_9VIBR Queuine tRNA-ribosyltransferase OS=Vibrio cidicii OX=1763883; GN = tgt PE=3 SV=1
MKLKFDLKKKNGNARRGQLTFERGTVQTPAFMPVGTYGTVKGMTPEEVKDTGAEILLGNTFHLWLRPGQEVMKMHGDLHDFMNWQGPILTDSGGFQVFSLGDIRKITEEGVHFRNPVNGDKIFMDAEKSMEIQKDLGSDIVMIFDECTPYPATHAEAKKSMEMSLRWAQRSRDHFDKLENPNNLFGIVQGGVYEDLRDVSVKGLTEIGFDGYAVGGLAVGEPKEDMHRVLEHTCPQLPEDKPRYLMGVGKPEDLVEGVRRGIDMFDCVMPTRNARNGHLFVTGGVIKIRNAIHKTDTSALDPHCDCYTCKNYSKSYLHHLDRCNEILGARLNTIHNLRYYQRLMESIRKAIDEDRFEQFVEEFYARRNREVPPLGKQA

SEQ ID NO: 62135 - protein, 379 aa, Vibrio cincinnatiensis
  REGION 1..379: note = tr|A0A1T4N9G4|A0A1T4N9G4_VIBCI Queuine tRNA-ribosyltransferase OS=Vibrio cincinnatiensis DSM 19608 OX=1123491 GN=tgt PE=3 SV=1
MKLTFELKKKNGNARRGQLTFERGTVQTPAFMPVGTYGTVKGMTPEEVAETGAEILLGNTFHLWLRPGQEVMKMHGDLHDFMNWKGPILTDSGGFQVFSLGDIRKITEEGVHFRNPVNGSKIFMDAEKSMEIQKDLGSDIVMIFDECTPYPATHDEAKKSMEMSLRWAQRSRDHFDKLENPNSLFGIVQGGVYEDLRDVSVKGLTEIGFDGYAVGGLAVGEPKQDMHRILEHTCPQLPEDKPRYLMGVGKPEDLVEGVRRGIDMFDCVMPTRNARNGHLFVTGGVIKIRNAVHKTDTTPLDPHCDCYTCKNYSKSYLHHLDRCNEILGARLNTIHNLRYYQRLMASIRTAIDEDRFEQFVVDFYARREREVPPLQTEQA

SEQ ID NO: 62136 - protein, 378 aa, Vibrio comitans
  REGION 1..378: note = tr|A0A4Y3IL78|A0A4Y3IL78_9VIBR Queuine tRNA-ribosyltransferase OS=Vibrio comitans NBRC 102076; OX = 1219078 GN=tgt PE=3 SV=1
MKFELKKTDGVARRGQLQFERGSVQTPAFMPVGTYGTVKGMTPEEVKGTGAEILLGNTFHLWLRPGQEVMKLHGDLHDFMNWQGPILTDSGGFQVFSLGDIRKITEKGVHFRNPVNGDKIFMDAEKSMEIQKDLGSDVVMIFDECTPYPATHNEAKKSMEMSLRWAQRSRDHFDKLENPNSLFGIVQGGVYEDLRDVSVEGLTKIGFDGYAVGGLAVGEPKEDMHRILEHTCPQLPVDKPRYLMGVGKPEDLVEGVRRGIDMFDCVMPTRNARNGHLFVTGGVIKIRNAKHKTDTTPLDPECDCYTCQNYSKSYLHHLDRCNEILGSRLNTIHNLRYYQRLMESIRKAIDEDRFESFVEEFYARRDREVPPMLKADAE

SEQ ID NO: 62137 - protein, 378 aa, Vibrio coralliilyticus
  REGION 1..378: note = tr|A0A0A0SUM7|A0A0A0SUM7_9VIBR Queuine tRNA-ribosyltransferase OS=Vibrio coralliilyticus; OX = 190893 GN=tgt PE=3 SV=1
MKLKFDLKKKDGVARRGQLTFERGTVQTPAFMPVGTYGTVKGMTPEEVKGTGAEILLGNTFHLWLRPGQEIMKMHGDLHDFMNWHGPILTDSGGFQVFSLGDIRKITEEGVHFRNPVNGDKIFMDAEKSMEIQKDLGSDIVMIFDECTPYPATHAEAKKSMEMSLRWAQRSRDHFDKLENQNNLFGIVQGGVYEDLRDVSVKGLTEIGFDGYAVGGLAVGEPKEDMHRILEHTCPQLPEDKPRYLMGVGKPEDLVEGVRRGIDMFDCVMPTRNARNGHLFVTGGVIKIRNAKHKTDTTPLDPECDCYTCQNYSKSYLHHLDRCNEILGARLNTIHNLRYYQRVMESIRKAIDEDRFDEFVKEFYERRGREVPPLAKEQ

SEQ ID NO: 62138 - protein, 378 aa, Vibrio crassostreae; identical to SEQ ID NO: 62130
  REGION 1..378: note = tr|A0A1B1BXS2|A0A1B1BXS2_9VIBR Queuine tRNA-ribosyltransferase OS=Vibrio crassostreae 9CS106; OX = 1191300 GN=tgt PE=3 SV=1

SEQ ID NO: 62139 - protein, 378 aa, Vibrio crassostreae; identical to SEQ ID NO: 62130
  REGION 1..378: note = tr|A0A0T7D0S4|A0A0T7D0S4_9VIBR Queuine tRNA-ribosyltransferase OS=Vibrio crassostreae OX=246167; GN = tgt PE=3 SV=1

SEQ ID NO: 62140 - protein, 382 aa, Vibrio diabolicus; identical to SEQ ID NO: 62116
  REGION 1..382: note = tr|A0A0T7EVC9|A0A0T7EVC9_9VIBR Queuine tRNA-ribosyltransferase OS=Vibrio diabolicus OX=50719; GN = tgt PE=3 SV=1

SEQ ID NO: 62141 - protein, 379 aa, Vibrio diazotrophicus
  REGION 1..379: note = tr|A0A2J8I5Y5|A0A2J8I5Y5_VIBDI Queuine tRNA-ribosyltransferase OS=Vibrio diazotrophicus OX=685; GN = tgt PE=3 SV=1
MKLQFNLKKKNGNARRGQLTFERGTVQTPAFMPVGTYGTVKGMTPEEVADTGAQILLGNTFHLWLRPGQEVMKMHGDLHDFMNWQGPILTDSGGFQVFSLGDIRKITEEGVHFRNPVNGDKIFMDAEKSMEIQKDLGSDIVMIFDECTPYPATHDEAKNSMEMSLRWAQRSRDHFDKLENPNSLFGIVQGSVYEDLRDVSVKGLTEIGFDGYAVGGLAVGEPKEDMHRMLEHTCPQLPEDKPRYLMGVGKPEDLVEGVRRGIDMFDCVMPTRNARNGHLFVTGGVIKIRNAVHKTDTSPLDPHCDCYTCKNYSKSYLHHLDRCNEILGARLNTIHNLRYYQRLMESIRTAIDEDRFDQFVEEFYARRNREVPPLQKEKA

SEQ ID NO: 62142 - protein, 379 aa, Vibrio diazotrophicus
  REGION 1..379: note = tr|A0A2J8HBK4|A0A2J8HBK4_VIBDI Queuine tRNA-ribosyltransferase OS=Vibrio diazotrophicus OX=685; GN = tgt PE=3 SV=1
MKLQFNLKKKNGNARRGQLTFERGTVQTPAFMPVGTYGTVKGMTPEEVADTGAQILLGNTFHLWLRPGQEVMKMHGDLHDFMNWQGPILTDSGGFQVFSLGDIRKITEEGVHFRNPVNGDKIFMDAEKSMEIQKDLGSDIVMIFDECTPYPATHDEAKKSMEMSLRWAQRSRDHFDKLENPNSLFGIVQGSVYEDLRDVSVKGLTEIGFDGYAVGGLAVGEPKEDMHRMLEHTCPQLPEDKPRYLMGVGKPEDLVEGVRRGIDMFDCVMPTRNARNGHLFVTGGVIKIRNAVHKTDTSPLDPHCDCYTCKNYSKSYLHHLDRCNEILGARLNTIHNLRYYQRLMESIRTAIDEDRFDQFVEEFYARRNREVPPLQKEKA

SEQ ID NO: 62143 - protein, 378 aa, unidentified
  source 1..378: note = Vibrio europaeus
  REGION 1..378: note = tr|A0A178JDW1|A0A178JDW1_9VIBR Queuine tRNA-ribosyltransferase OS=Vibrio europaeus OX=300876; GN = tgt PE=3 SV=1
MKLKFDLKKKDGVARRGQLTFERGTVQTPAFMPVGTYGTVKGMTPEEVKGTGAEILLGNTFHLWLRPGQEVMKMHGDLHDFMNWHGPILTDSGGFQVFSLGKMRTITEQGVHFRNPVNGDKIFMDAEKSMEIQKDLGSDIVMIFDECTPYPATHDEAKKSMEMSLRWAQRSRDHFDKLENPNNLFGIVQGGVYEDLRDVSVKGLTEIGFDGYAVGGLAVGEPKEDMHRVLEHTCPQLPEDKPRYLMGVGKPEDLVEGVRRGIDMFDCVMPTRNARNGHLFVTGGVIKIRNAKHKTDTTPLDPHCDCYTCQNYSKSYLHHLERCNEILGARLNTIHNLRYYQRLMESIRKAIDEDRFDEFVTEFYERRGREVPPLAKQQ

SEQ ID NO: 62144 - protein, 377 aa, Vibrio ezurae
  REGION 1..377: note = tr|U3B5M4|U3B5M4_9VIBR Queuine tRNA-ribosyltransferase OS=Vibrio ezurae NBRC 102218; OX = 1219080 GN=tgt PE=3 SV=1
MKFQLKKTDGKARRGQLEFERGSVQTPAFMPVGTYGTVKGMTPEEVKGTGAEILLGNTFHLWLRPGQEVMKLHGDLHDFMNWQGPILTDSGGFQVFSLGDLRKITEKGVHFRNPVNGDKIFMDAEKSMEIQKDLGSDIVMIFDECTPYPATHSEAKKSMEMSLRWAQRSRDHFNKLENPNALFGIVQGGVYEDLRDVSVEGLTKIDFDGYAVGGLAVGEPKEDMHRILEHTCPQLPTDKPRYLMGVGKPEDLVEGVRRGIDMFDCVMPTRNARNGHLFVTGGVIKIRNAKHKIDTTPLDPECDCYTCRNYSKSYLHHLDRCNEILGARLNTIHNLRYYQRLMESIRKAIDEDRFDAFVEEFYARRDRDVPPMLKADA

SEQ ID NO: 62145 - protein, 379 aa, Vibrio fluvialis
  REGION 1..379: note = tr|A0A0X8LNH3|A0A0X8LNH3_VIBFL Queuine tRNA-ribosyltransferase OS=Vibrio fluvialis OX=676 GN=tgt; PE = 3 SV=1
MKLKFELKKKDGTARRGQLTFERGTVQTPAFMPVGTYGTVKGMTPEEVAATGAQILLGNTFHLWLRPGQEVMKMHGDLHDFMNWQGPILTDSGGFQVFSLGDIRKITEEGVHFRNPVNGDKIFMDAEKSMEIQKDLGSDIVMIFDECTPYPATHDEAKKSMEMSLRWARRSRDHFDKLENPNNLFGIVQGGVYEDLRDVSVKGLTEIGFDGYAVGGLAVGEPKEDMHRVLEHTCPQLPEDKPRYLMGVGKPEDLVEGVRRGIDMFDCVMPTRNARNGHLFVTGGVIKIRNATHKTDTSPLDPHCDCYTCKNYSKSYLHHLDRCNEILGARLNTIHNLRYYQRLMESIRRAIDEDRFDQFVTEFYARRDREVPPLQKEKA

SEQ ID NO: 62146 - protein, 378 aa, Vibrio fluvialis
  REGION 1..378: note = tr|A0A1L9L6A7|A0A1L9L6A7_VIBFL Queuine tRNA-ribosyltransferase OS=Vibrio fluvialis OX=676 GN=tgt; PE = 3 SV=1
MKLKFDLKKKNGNARRGQLTFERGTVQTPAFMPVGTYGTVKGMTPEEVKETGAEILLGNTFHLWLRPGQEVMKMHGDLHDFMNWQGPILTDSGGFQVFSLGDIRKITEEGVHFRNPVNGDKIFMDAEKSMEIQKDLGSDIVMIFDECTPYPATHAEAKKSMEMSLRWAQRSRDHFDKLENPNNLFGIVQGGVYEDLRDVSVKGLTEIGFDGYAVGGLAVGEPKEDMHRVLEHTCPQLPEDKPRYLMGVGKPEDLVEGVRRGIDMFDCVMPTRNARNGHLFVTGGVIKIRNATHKTDTTPLDPHCDCYTCKNYSKSYLHHLDRCNEILGARLNTIHNLRYYQRLMESIRKAIDEDRFEQFVEEFYARRNREVPPLGKQA

SEQ ID NO: 62147 - protein, 378 aa, Vibrio fortis
  REGION 1..378: note = tr|A0A066UW24|A0A066UW24_9VIBR Queuine tRNA-ribosyltransferase OS=Vibrio fortis OX=212667 GN=tgt; PE = 3 SV=1
MKLKYELKKTNAGARRGQLQFERGTVETPAFMPVGTYGTVKGMTPEEVKDTGAEILLGNTFHLWLRPGQEIMKMHGDLHDFMNWQGPILTDSGGFQVFSLGAMRKITEEGVHFRNPVNGDKIFMDAEKSMEIQKDLGSDIVMIFDECTPYPATHKEAKDSMEMSLRWAERSRNHFDKLENPNSLFGIVQGGVYEDLRDVSVKGLTEIGFDGYAVGGLAVGEPKEDMHRILEHTCPQLPEDKPRYLMGVGKPEDLVEGVRRGIDMFDCVMPTRNARNGHLFVTEGVIKIRNAKHKTDTTPLDSECDCYTCKNYSKSYLHHLDRCNEILGARLNTIHNLRFYQRVMSDIRKAIDEDRFEEFVEEFYARMGREVPPLGKES

SEQ ID NO: 62148 - protein, 379 aa, Vibrio furnissii
  REGION 1..379: note = tr|F0LVX1|F0LVX1_VIBFN Queuine tRNA-ribosyltransferase OS=Vibrio furnissii (strain DSM 14383 / NCTC 11218 / VL 6966) OX=903510 GN=tgt PE=3 SV=1
MKLKFELKKKNGTARRGQLTFERGTVQTPAFMPVGTYGTVKGMTPEEVAATGAQILLGNTFHLWLRPGQEVMKMHGDLHDFMNWQGPILTDSGGFQVFSLGDIRKITEEGVHFRNPVNGDKIFMDAEKSMEIQKDLGSDIVMIFDECTPYPATHDEAKKSMEMSLRWARRSRDHFDKLENPNNLFGIVQGGVYEDLRDVSVKGLTEIGFDGYAVGGLAVGEPKEDMHRVLEHTCPQLPEDKPRYLMGVGKPEDLVEGVRRGIDMFDCVMPTRNARNGHLFVTGGVIKIRNATHKTDTSPLDPQCDCYTCKNYSKSYLHHLDRCNEILGARLNTIHNLRYYQRLMESIRRAIDEDRFDEFVTEFYARRDRDVPPLQKEKA

SEQ ID NO: 62149 - protein, 379 aa, Vibrio furnissii
  REGION 1..379: note = tr|A0A0Q2R264|A0A0Q2R264_VIBFU Queuine tRNA-ribosyltransferase OS=Vibrio furnissii OX=29494; GN = tgt PE=3 SV=1
MKLKFELKKKNGTARRGQLTFERGTVQTPAFMPVGTYGTVKGMTPEEVAATGAQILLGNTFHLWLRPGQEVMKMHGDLHDFMNWQGPILTDSGGFQVFSLGDIRKITEEGVHFRNPVNGDKIFMDAEKSMEIQKDLGSDIVMIFDECTPYPATHDEAKKSMEMSLRWARRSRDHFDKLENPNNLFGIVQGGVYEDLRDVSVKGLTEIGFDGYAVGGLAVGEPKEDMHRILEHTCPQLPEDKPRYLMGVGKPEDLVEGVRRGIDMFDCVMPTRNARNGHLFVTGGVIKIRNATHKTDTSPLDPQCDCYTCKNYSKSYLHHLDRCNEILGARLNTIHNLRYYQRLMESIRRAIDEDRFDEFVTEFYARRDRDVPPLQKEKA

SEQ ID NO: 62150 - protein, 378 aa, unidentified
  source 1..378: note = Vibrio galatheae
  REGION 1..378: note = tr|A0A0F4NPK5|A0A0F4NPK5_9VIBR Queuine tRNA-ribosyltransferase OS=Vibrio galatheae OX=579748; GN = tgt PE=3 SV=1
MKLKFDLKKKDGVARRGQLTFERGTVQTPAFMPVGTYGTVKGMTPEEVKGTGAEILLGNTFHLWLRPGQEIMKMHGDLHDFMNWHGPILTDSGGFQVFSLGKMRTITEQGVHFRNPVNGDKIFMDAEKSMEIQKDLGSDIVMIFDECTPYPATHDEAKKSMEMSLRWAQRSRDHFDKLENPNNLFGIVQGGVYEDLRDVSVKGLTEIGFDGYAVGGLAVGEPKEDMHRILEHTCPQLPEDKPRYLMGVGKPEDLVEGVRRGIDMFDCVMPTRNARNGHLFVTGGVIKIRNAKHKTDTTPLDPHCDCYTCQNYSKSYLHHLERCNEILGARLNTIHNLRYYQRLMESIRNAIDEDRFDEFVQEFYERRGREVPPLAKEQ

SEQ ID NO: 62151 - protein, 377 aa, Vibrio gazogenes
  REGION 1..377: note = tr|A0A1Z2SGX7|A0A1Z2SGX7_VIBGA Queuine tRNA-ribosyltransferase OS=Vibrio gazogenes OX=687 GN=tgt; PE = 3 SV=1
MKLKFELKKKQGNARRGQITFERGTVQTPAFMPVGTYGTVKGMTPEEVKDTGAEILLGNTFHLWLRPGQEVMKMHGDLHDFMNWQGPILTDSGGFQVFSLGDIRKITEEGVHFRNPVNGEKIFMDAEKSMEIQNDLGSDIVMIFDECTPYPATHAEAKQSMEMSLRWAKRSRNHFDHLENPNSLFGIVQGGVYEDLRDVSVAGLTALDFDGYAVGGLAVGEPKEDMHRILEHTCPQLPEDKPRYLMGVGKPEDLVEGVRRGIDMFDCVMPTRNARNGHLFVTGGVIKIRNAKHKTDTTPLDPHCDCYTCKHYSKSYLHHLDRCNEILGARLNTIHNLRYYQRLMESIRQAIEADRFDAFVEEFYARRERAVPPLAKA

SEQ ID NO: 62152 - protein, 377 aa, Vibrio gazogenes
  REGION 1..377: note = tr|A0A1M5G7C9|A0A1M5G7C9_VIBGA Queuine tRNA-ribosyltransferase OS=Vibrio gazogenes DSM 21264 = NBRC 103151 OX=1123492 GN=tgt PE=3 SV=1
MKLKFELKKKQGNARRGQITFERGTVQTPAFMPVGTYGTVKGMTPEEVKDTGAEILLGNTFHLWLRPGQEVMKMHGDLHDFMNWQGPILTDSGGFQVFSLGDIRKITEEGVHFRNPVNGEKIFMDAEKSMEIQNDLGSDIVMIFDECTPYPATHDEAKRSMEMSLRWAKRSRNHFDHLENPNSLFGIVQGGVYEDLRDVSVAGLTELDFDGYAVGGLAVGEPKEDMHRILEHTCPQLPEDKPRYLMGVGKPEDLVEGVRRGIDMFDCVMPTRNARNGHLFVTGGVIKIRNAKHKTDTTPLDPHCDCYTCKHYSKSYLHHLDRCNEILGARLNTIHNLRYYQRLMESIRQAIEADRFDAFVEEFYARRERAVPPLAKA

SEQ ID NO: 62153 - protein, 376 aa, unidentified
  source 1..376: note = Vibrio genomosp.
  REGION 1..376: note = tr|A0A1E5CY77|A0A1E5CY77_9VIBR Queuine tRNA-ribosyltransferase OS=Vibrio genomosp. F6 str. FF-238; OX = 1191298 GN=tgt PE=3 SV=1
MRLKYELKKTNGNARRGQLQFERGTVETPAFMPVGTYGTVKGMTPEEVKGTGAEILLGNTFHLWLRPGQEIMKLHGDLHDFMNWKGPILTDSGGFQVFSLGKTRKITEEGVHFRSPVNGDKIFMDAEKSMQIQYDLGSDIVMIFDECTPFPATHDEARISMERSIRWADRSRNEFDRQDNSNSLFGIVQGGVYEDLRDVSVEALTKIGFDGYAVGGLAVGEPKEDMHRILEHTCPQLPEDKPRYLMGVGKPEDLVEGVRRGIDMFDCVMPTRNARNGHLFVTGGVIKIRNAKHKTDTTPLDPQCDCYTCSNYSKSYLHHLDRCNEILGARLNTIHNLRYYQRLMQSIRNAIDEDRFDAFVEEFYARRDREVPPMNK

SEQ ID NO: 62154 - protein, 376 aa, unidentified
  source 1..376: note = Vibrio genomosp.
  REGION 1..376: note = tr|A0A4U1YJ91|A0A4U1YJ91_9VIBR Queuine tRNA-ribosyltransferase OS=Vibrio genomosp. F6 OX=723172; GN = tgt PE=3 SV=1
MRLKYELKKTNGNARRGQLQFERGTVETPAFMPVGTYGTVKGMTPEEVKDTGAEILLGNTFHLWLRPGQEIMKLHGDLHDFMNWKGPILTDSGGFQVFSLGKTRKITEEGVHFRSPVNGDKIFMDAEKSMQIQYDLGSDIVMIFDECTPFPATHDEARISMERSIRWADRSRNEFDRQDNTNSLFGIVQGGVYEDLRDVSVEALTKIGFDGYAVGGLAVGEPKEDMHRILEHTCPQLPEDKPRYLMGVGKPEDLVEGVRRGIDMFDCVMPTRNARNGHLFVTGGVIKIRNAKHKTDTTPLDPQCDCYTCSNYSKSYLHHLDRCNEILGARLNTIHNLRYYQRLMQSIRNAIDEDRFDAFVEEFYARRDREVPPMNK

SEQ ID NO: 62155 - protein, 378 aa, Vibrio halioticoli
  REGION 1..378: note = tr|V5F4G0|V5F4G0_9VIBR Queuine tRNA-ribosyltransferase OS=Vibrio halioticoli NBRC 102217; OX = 1219072 GN=tgt PE=3 SV=1
MKFQLKKTDGKARRGQLEFERGSVQTPAFMPVGTYGTVKGMTPEEVKGTGAEILLGNTFHLWLRPGQEVMKLHGDLHDFMNWQGPILTDSGGFQVFSLGDLRKITEKGVHFRNPVNGDKIFMDAEKSMEIQKDLGSDIVMIFDECTPYPATHSEAKKSMEMSLRWAQRSRDHFNKLENPNALFGIVQGGVYEDLRDVSVEGLTKIDFDGYAVGGLAVGEPKEDMHRILEHTCPQLPTDKPRYLMGVGKPEDLVEGVRRGIDMFDCVMPTRNARNGHLFVTGGVIKIRNAKHKIDTTPLDPECDCYTCRNYSKSYLHHLDRCNEILGARLNTIHNLRYYQRLMESIRKAIDEDRFDAFVEEFYARRDRDVPPMLKADAQ

SEQ ID NO: 62156 - protein, 377 aa, Vibrio hangzhouensis
  REGION 1..377: note = tr|A0A1H6AJK7|A0A1H6AJK7_9VIBR Queuine tRNA-ribosyltransferase OS=Vibrio hangzhouensis OX=462991; GN = tgt PE=3 SV=1
MKLQYELKKKNGHARRGQLTFERGTVQTPAFMPVGTYGTVKGMTPEEVKGTGAEILLGNTFHLWLRPGQEIMKMHGDLHDFMNWHGPILTDSGGFQVFSLGDIRKITEEGVHFRNPVNGDKIFMDAEKSMEIQKDLGSDVVMIFDECTPYPATHAEAKKSMEMSLRWAKRSRDHFDKLENPNSLFGIVQGSVYEDLRDVSVEGLTEIGFDGYAVGGLAVGEPKEDMHRVLEHTTPKLPEDKPRYLMGVGKPEDLVEGVRRGIDMFDCVMPTRNARNGHLFVTGGVIKIRNAKNKTDTGPLDEHCDCYTCKNYSKAYLHHLDRCNEILGARLNTIHNLRHYQLLMESIRTAIDEDRFDEFVEEFYARRNREVPPLNMK

SEQ ID NO: 62157 - protein, 378 aa, Vibrio harveyi
  REGION 1..378: note = tr|K5SW64|K5SW64_VIBHA Queuine tRNA-ribosyltransferase OS=Vibrio harveyi OX=669 GN=tgt; PE = 3 SV=1
MKLKFDLKKKNGNARRGQLTFERGTVQTPAFMPVGTYGTVKGMTPEEVKGTGAEILLGNTFHLWLRPGQEVMKMHGDLHDFMNWHGPILTDSGGFQVFSLGKMRKITEKGVHFRSPVNGDKIFMDAEKSMEIQKDLGSDIVMIFDECTPYPATHNEAKKSMEMSLRWAQRSRDHFNKLENPNNLFGIVQGGVYEDLRDVSIKGLTEIGFDGYAVGGLAVGEPKEDMHRILEHTCPQLPEDKPRYLMGVGKPEDLVEGVRRGIDMFDCVMPTRNARNGHLFVTGGVIKIRNAKHKTDTTPLDPHCDCYTCQHYSKSYLHHLERCNEILGARLNTIHNLRYYQRLMESIRKAIDEDRFDEFVTEFYERRGREVPPLAKEQ

SEQ ID NO: 62158 - protein, 378 aa, Vibrio harveyi
  REGION 1..378: note = tr|A0A380QGS7|A0A380QGS7_VIBHA Queuine tRNA-ribosyltransferase OS=Vibrio harveyi OX=669 GN=tgt; PE = 3 SV=1
MKLKFDLKKKNGNARRGQLTFERGTVQTPAFMPVGTYGTVKGMTPEEVKGTGAEILLGNTFHLWLRPGQEVMKMHGDLHDFMNWHGPILTDSGGFQVFSLGKMRKITEKGVHFRSPVNGDKIFMDAEKSMEIQKDLGSDIVMIFDECTPYPATHNEAKKSMEMSLRWAQRSRDHFDKLENPNNLFGIVQGGVYEDLRDVSIKGLTEIGFDGYAVGGLAVGEPKEDMHRILEHTCPQLPEDKPRYLMGVGKPEDLVEGVRRGIDMFDCVMPTRNARNGHLFVTGGVIKIRNAKHKTDTTPLDPHCDCYTCQHYSKSYLHHLERCNEILGARLNTIHNLRYYQRLMESIRKAIDEDRFDEFVTEFYERRGREVPPLAKEQ

SEQ ID NO: 62159 - protein, 378 aa, Vibrio hepatarius
  REGION 1..378: note = tr|A0A0M0HYP7|A0A0M0HYP7_9VIBR Queuine tRNA-ribosyltransferase OS=Vibrio hepatarius OX=171383; GN = tgt PE=3 SV=1
MKLKFELKKKDGVARRGQLTFERGTVQTPAFMPVGTYGTVKGMTPEEVKGTGAEILLGNTFHLWLRPGQEVMKMHGDLHDFMNWQGPILTDSGGFQVFSLGKMRTITEQGVHFRNPVNGDKIFMDAEKSMEIQKDLGSDIVMIFDECTPYPATHDEAKKSMEMSLRWAQRSRDHFDKLENPNNLFGIVQGGVYEDLRDVSVKGLTEIGFDGYAVGGLAVGEPKEDMHRILEHTCPQLPEDKPRYLMGVGKPEDLVEGVRRGIDMFDCVMPTRNARNGHLFVTGGVIKIRNAKHKTDTTPLDPHCDCYTCQNYSKSYLHHLERCNEILGARLNTIHNLRYYQRLMESIRKAIDEDRFDQFVEEFYARRDREVPPLAKEQ

SEQ ID NO: 62160 - protein, 395 aa, Vibrio ichthyoenteri
  REGION 1..395: note = tr|F9RW72|F9RW72_9VIBR Queuine tRNA-ribosyltransferase OS=Vibrio ichthyoenteri ATCC 700023 OX=870968 GN=tgt PE=3 SV=1
MGITPNILSDCFSDIGGFVKLKFDLKKKDGVARRGQLTFERGTVQTPAFMPVGTYGTVKGMTPEEVKETGAEILLGNTFHLWLRPGQEVMKMHGDLHDFMNWQGPILTDSGGFQVFSLGKMRKITEEGVHFRSPVNGDKIFMDAEKSMEIQKDLGSDIVMIFDECTPYPATHDEAKKSMEMSLRWAQRSRDHFDKLENPNSLFGIVQGGVYEDLRDVSVKGLTEIGYDGYAVGGLAVGEPKEDMHRILEHTCPQLPEDKPRYLMGVGKPEDLVEGVRRGIDMFDCVMPTRNARNGHLFVTGGVIKIRNATHKTDTTPLDPQCDCYTCKNYSKVYLHHLDRCNEILGARLNTIHNLRYYQRLMESIRTAIDEDRFDQFVEEFYARRNREVPPIGKQ

SEQ ID NO: 62161 - protein, 378 aa, Vibrio inusitatus
  REGION 1..378: note = tr|A0A4Y3HUI0|A0A4Y3HUI0_9VIBR Queuine tRNA-ribosyltransferase OS=Vibrio inusitatus NBRC 102082; OX = 1219070 GN=tgt PE=3 SV=1
MKFELKKNDGTARRGQLQFERGSVQTPAFMPVGTYGTVKGMTPEEVKGTGAEILLGNTFHLWLRPGQEVMKLHGDLHDFMNWQGPILTDSGGFQVFSLGDIRKITEKGVHFRNPVNGDKIFMDAEKSMEIQKDLGSDVVMIFDECTPYPATHNEAKKSMEMSLRWAQRSRDHFDKLENPNSLFGIVQGGVYEDLRDVSVEGLTKIGFDGYAVGGLAVGEPKEDMHRILEHTCPQLPEDKPRYLMGVGKPEDLVEGVRRGIDMFDCVMPTRNARNGHLFVTGGVIKIRNAKHKTDTTALDPECDCYTCQNYSKSYLHHLDRCNEILGSRLNTIHNLRYYQRLMESIRTAIDEDRFESFVEEFYARRDRDVPPMLKADAE

SEQ ID NO: 62162 - protein, 155 aa, unidentified
  source 1..155: note = Vibrio ishigakensis
  REGION 1..155: note = tr|A0A0B8NU00|A0A0B8NU00_9VIBR tRNA-guanine transglycosylase OS=Vibrio ishigakensis OX=1481914; GN = JCM19231_261 PE=4 SV=1
MHRVLEHTCPQLPIDKPRYLMGVGKPEDLVEGVRRGIDMFDCVMPTRNARNGHLFVTGGVIKIRNAKHKTDTSPLDPECDCYTCRNYSKSYLHHLDRCNEILGARLNTIHNLRYYQRLMESIRKAIDEDRFDTFVEEFYARRNREVPPLMKGDAQ

SEQ ID NO: 62163 - protein, 156 aa, unidentified
  source 1..156: note = Vibrio ishigakensis
  REGION 1..156: note = tr|A0A0B8NSZ0|A0A0B8NSZ0_9VIBR tRNA-guanine transglycosylase OS=Vibrio ishigakensis OX=1481914; GN = JCM19231_260 PE=4 SV=1
MKGTGAEILLGNTFHLWLRPGQEVMKMHGDLHDFMNWQGPILTDSGGFQVFSLGDIRKITEEGVHFRNPVNGDKIFMDAEKSMEIQYDLGSDVVMIFDECTPYPATHDEAKKSMEMSLRWAQRSRDHFNKLENPNALFGIVQGGVYEDLRDVSVKA

SEQ ID NO: 62164 - protein, 377 aa, unidentified
  source 1..377: note = Vibrio jasicida
  REGION 1..377: note = tr|A0A2S7VNU9|A0A2S7VNU9_9VIBR Queuine tRNA-ribosyltransferase OS=Vibrio jasicida OX=766224; GN = tgt PE=3 SV=1
MKLSFDLKKKNGNARRGQLTFERGTVQTPAFMPVGTYGTVKGMTPEEVKGTGAEILLGNTFHLWLRPGQEVMKMHGDLHDFMNWHGPILTDSGGFQVFSLGKMRKITEKGVHFRSPVNGDKIFMDAEKSMEIQKDLGSDIVMIFDECTPYPATHNEAKKSMEMSLRWAQRSRDHFDKLENPNNLFGIVQGGVYEDLRDVSVKGLTEIGFDGYAVGGLAVGEPKEDMHRILEHTCPQLPEDKPRYLMGVGKPEDLVEGVRRGIDMFDCVMPTRNARNGHLFVTGGVIKIRNAKHKTDTTPLDPHCDCYTCQNYSKSYLHHLERCNEILGARLNTIHNLRYYQRLMESIRTAIDEDRFDEFVQEFYARRDREVPPLSKA

SEQ ID NO: 62165 - protein, 378 aa, Vibrio kanaloae; identical to SEQ ID NO: 62130
  REGION 1..378: note = tr|A0A1E5DNF4|A0A1E5DNF4_9VIBR Queuine tRNA-ribosyltransferase OS=Vibrio kanaloae 5S-149; OX = 1191299 GN=tgt PE=3 SV=1

SEQ ID NO: 62166 - protein, 378 aa, Vibrio kanaloae; identical to SEQ ID NO: 62130
  REGION 1..378: note = tr|A0A4U1ZUW6|A0A4U1ZUW6_9VIBR Queuine tRNA-ribosyltransferase OS=Vibrio kanaloae OX=170673; GN = tgt PE=3 SV=1

SEQ ID NO: 62167 - protein, 378 aa, Vibrio lentus
  REGION 1..378: note = tr|A0A0L1L713|A0A0L1L713_9VIBR Queuine tRNA-ribosyltransferase OS=Vibrio lentus OX=136468 GN=tgt; PE = 3 SV=1
MKLKYELKKTNSGARRGQLQFERGTVETPAFMPVGTYGTVKGMTPEEVKDTGAEILLGNTFHLWLRPGQEIMKLHGDLHDFMNWKGPILTDSGGFQVFSLGATRKITEEGVHFRNPVNGDKIFMDAEKSMEIQKDLGSDIVMIFDECTPYPATHKEAKDSMEMSLRWAQRSRDHFDKQENPNSLFGIVQGGVYEDLRDVSVKGLTEIGFDGYAVGGLAVGEPKEDMHRILEHTCPQLPEDKPRYLMGVGKPEDLVEGVRRGIDMFDCVMPTRNARNGHLFVTEGVIKIRNAKHKMDTTPLDSECDCYTCKNYSKSYLHHLDRCNEILGARLNTIHNLRFYQRVMSDIRQSIDEDRFEEFVAEFYARMGREVPPLGKES

SEQ ID NO: 62168 - protein, 378 aa, Vibrio lentus; identical to SEQ ID NO: 62117
  REGION 1..378: note = tr|A0A1B9Q107|A0A1B9Q107_9VIBR Queuine tRNA-ribosyltransferase OS=Vibrio lentus OX=136468 GN=tgt; PE = 3 SV=1

SEQ ID NO: 62169 - protein, 377 aa, Vibrio mangrovi
  REGION 1..377: note = tr|A0A1Y6IQV5|A0A1Y6IQV5_9VIBR Queuine tRNA-ribosyltransferase OS=Vibrio mangrovi OX=474394; GN = tgt PE=3 SV=1
MKLKFELKKKHGNARRGQITFERGTVQTPVFMPVGTYGTVKGMTPEEVKDTGAEILLGNTFHLWLRPGQEIMKMHGDLHDFMNWQGPILTDSGGFQVFSLGDIRKITEEGVHFRNPVNGEKIFMDAEKSMEIQRDLGSDIVMIFDECTPYPATHTEAKQSMEMSLRWAKRSREHFDQLENPNSLFGIVQGGVYEDLRDVSVKGLTEIGFDGYAVGGLAVGEPKEDMHRILEHTCPQLPEDKPRYLMGVGKPEDLVEGVRRGIDMFDCVMPTRNARNGHLFVTGGVVKIRNAKHKTDTTPLDPHCDCYTCKHYSKSYLHHLDRCNEILGARLNTIHNLRYYQRLMASIRQAIEEDRFDAFVEEFYARRERDVPPLAKV

SEQ ID NO: 62170 - protein, 258 aa, Vibrio maritimus
  REGION 1..258: note = tr|A0A090TYX5|A0A090TYX5_9VIBR Queuine tRNA-ribosyltransferase OS=Vibrio maritimus OX=990268; GN = JCM19240_1494 PE=3 SV=1
MDAEKSMEIQKDLGSDVVMIFDECTPYPATHAEAKKSMEMSLRWAQRSRDHFDKLENENSLFGIVQGSVYEDLRDVSVKGLTDIGFDGYAVGGLAVGEPKEEMHRVLEFTTPKLPEDKPRYLMGVGKPEDLVEGVRRGIDMFDCVMPTRNARNGHLFVTGGVIKIRNATNKTDTGPLDENCDCYTCKNYSKAYLHHLDRCNEILGARLNTIHNLRHYQMLMESIRKAIDEDRFEQFVEEFYARRNREVPPLDMKVDAQ

SEQ ID NO: 62171 - protein, 381 aa, Vibrio maritimus
  REGION 1..381: note = tr|A0A090S1J3|A0A090S1J3_9VIBR Queuine tRNA-ribosyltransferase OS=Vibrio maritimus OX=990268; GN = tgt PE=3 SV=1
MKLQYELKKKDGHARRGQLTFERGTVQTPAFMPVGTYGTVKGMTPEEVKGTGAEILLGNTFHLWLRPGQEIMKMHGDLHDFMNWHGPILTDSGGFQVFSLGDIRKITEEGVHFRNPVNGDRIFMDAEKSMEIQKDLGSDVVMIFDECTPYPATHAEAKKSMEMSLRWAQRSRDHFDKLDNENSLFGIVQGSVYEDLREVSVKGLTDIGFDGYAVGGLAVGEPKEEMHRVLEFTTPKLPEDKPRYLMGVGKPEDLVEGVRRGIDMFDCVMPTRNARNGHLFVTGGVIKIRNATNKTDTGPLDENCDCYTCQNYSKAYLHHLDRCNEILGARLNTIHNLRHYQMLMESIRKAIDEDRFEQFVEEFYARRNREVPPLDMKVDAQ

SEQ ID NO: 62172 - protein, 386 aa, Vibrio mediterranei
  REGION 1..386: note = tr|A0A2C9P856|A0A2C9P856_9VIBR Queuine tRNA-ribosyltransferase OS=Vibrio mediterranei OX=689; GN = tgt PE=3 SV=1
MCLWQCGGFVKLQYELKKKNGHARRGQLTFERGTVQTPAFMPVGTYGTVKGMTPEEVKGTGAEILLGNTFHLWLRPGQEIMKMHGDLHDFMNWHGPILTDSGGFQVFSLGDIRKITEEGVHFRNPVNGDKIFMDAEKSMEIQKDLGSDVVMIFDECTPYPATHAEAKKSMEMSLRWAQRSRDHFDKLENPNSLFGIVQGSVYEDLRDVSVEGLTNIGFDGYAVGGLAVGEPKEDMHRVLEHTTPKLPEDKPRYLMGVGKPEDLVEGVRRGIDMFDCVMPTRNARNGHLFVTGGIVKIRNATNKTDTGPLDEHCDCYTCKNYSKAYLHHLDRCNEILGARLNTIHNLRYYQRLMESIRTAIDEDRFDEFVEEFYARRNREVPPLDMK

SEQ ID NO: 62173 - protein, 379 aa, unidentified
  source 1..379: note = Vibrio metoecus
  REGION 1..379: note = tr|A0A271VRJ5|A0A271VRJ5_9VIBR Queuine tRNA-ribosyltransferase OS=Vibrio metoecus OX=1481663; GN = tgt PE=3 SV=1
MKLTFELKKKNGNARRGQLTFERGTVQTPAFMPVGTYGTVKGMTPEEVKETGAQILLGNTFHLWLRPGQEVMKMHGDLHDFMNWQGPILTDSGGFQVFSLGDIRKITEEGVHFRNPVNGDKIFMDAEKSMEIQKDLGSDIVMIFDECTPYPATHDEAKKSMEMSLRWAKRSREHFDKLENPNNLFGIVQGGVYEDLRDVSVKGLTEIGFDGYAVGGLAVGEPKEDMHRVLEHTCPQLPEDKPRYLMGVGKPEDLVEGVRRGIDMFDCVMPTRNARNGHLFVTGGVIKIRNAAHKTDTTPLDPHCDCYTCKNYSKSYLHHLDRCNEILGARLNTIHNLRYYQRLMESIRKAIDEDRFDQFVAEFYARRNREVPPLQKDKA

SEQ ID NO: 62174 - protein, 379 aa, unidentified
  source 1..379: note = Vibrio metoecus
  REGION 1..379: note = tr|A0A0Q0MUQ0|A0A0Q0MUQ0_9VIBR Queuine tRNA-ribosyltransferase OS=Vibrio metoecus OX=1481663; GN = tgt PE=3 SV=1
MKLTFELKKKNGNARRGQLTFERGTVQTPAFMPVGTYGTVKGMTPEEVKETGAQILLGNTFHLWLRPGQEVMKMHGDLHDFMNWQGPILTDSGGFQVFSLGDIRKITEEGVHFRNPVNGDKIFMDAEKSMEIQKDLGSDIVMIFDECTPYPATHDEAKKSMEMSLRWAKRSRDHFDKLENPNNLFGIVQGGVYEDLRDVSVKGLTEIGFDGYAVGGLAVGEPKEDMHRVLEHTCPQLPEDKPRYLMGVGKPEDLVEGVRRGIDMFDCVMPTRNARNGHLFVTGGVIKIRNAVHKTDTTPLDPHCDCYTCKNYSKSYLHHLDRCNEILGARLNTIHNLRYYQRLMESIRKAIDEDRFDQFVAEFYARRNREVPPLQKDKA

SEQ ID NO: 62175 - protein, 379 aa, Vibrio metschnikovii
  REGION 1..379: note = tr|C9P6D6|C9P6D6_VIBME Queuine tRNA-ribosyltransferase OS=Vibrio metschnikovii CIP 69.14; OX = 675813 GN=tgt PE=3 SV=1
MKLTFELKKKNGNARRGQLTFERGTVQTPAFMPVGTYGTVKGMTPEEVKETGAEILLGNTFHLWLRPGQEVMKMHGDLHDFMNWQGPILTDSGGFQVFSLGEIRKITEEGVHFRNPVNGDKIFMDAEKSMEIQKDLGSDIVMIFDECTPYPATHDEAKKSMQMSLRWAQRSRDHFDKLNNTNSLFGIVQGGVYEDLRDESVKGLTQIGFDGYAVGGLAVGEPKPDMHRILEHTCPQLPEDKPRYLMGVGKPEDLVEGVRRGVDMFDCVMPTRNARNGHLFVTGGVIKIRNAVHKTDTTPLDPHCDCYTCKNYSKSYLHHLDRCNEILGARLNTIHNLRYYQRLMESIRKAIDEDRFDQFVEAFYARRQREVPPLQIEQA

SEQ ID NO: 62176 - protein, 379 aa, Vibrio metschnikovii; identical to SEQ ID NO: 62175
  REGION 1..379: note = tr|A0A380NVV2|A0A380NVV2_VIBME Queuine tRNA-ribosyltransferase OS=Vibrio metschnikovii OX=28172; GN = tgt PE=3 SV=1

SEQ ID NO: 62177 - protein, 395 aa, Vibrio mimicus
  REGION 1..395: note = tr|D2YHR4|D2YHR4_VIBMI Queuine tRNA-ribosyltransferase OS=Vibrio mimicus VM603 OX=671074; GN = tgt PE=3 SV=1
MIGNKPSDCFSDIGGFVKLKFELKKKNGNARRGQLTFERGTVQTPAFMPVGTYGTVKGMTPEEVKETGAQILLGNTFHLWLRPGQEVMKMHGDLHDFMNWQGPILTDSGGFQVFSLGDIRKITEEGVHFRNPVNGDKIFMDAEKSMEIQKDLGSDIVMIFDECTPYPATHDEAKKSMEMSLRWAKRSRDHFDKLENPNNLFGIVQGGVYEDLRDVSVKGLTEIGFDGYAVGGLAVGEPKEDMHRVLEHTCPQLPEDKPRYLMGVGKPEDLVEGVRRGIDMFDCVMPTRNARNGHLFVTGGVIKIRNAVHKTDTTPLDPHCDCYTCKNYSKSYLHHLDRCNEILGARLNTIHNLRYYQRLMESIRKAIDEDRFDQFVAEFYARRNREVPPLQKDKA

SEQ ID NO: 62178 - protein, 379 aa, Vibrio mimicus; identical to SEQ ID NO: 62174
  REGION 1..379: note = tr|A0A2J9V1H7|A0A2J9V1H7_VIBMI Queuine tRNA-ribosyltransferase OS=Vibrio mimicus OX=674 GN=tgt; PE = 3 SV=1

SEQ ID NO: 62179 - protein, 377 aa, Vibrio natriegens
  REGION 1..377: note = tr|A0A1B1E9Y4|A0A1B1E9Y4_VIBNA Queuine tRNA-ribosyltransferase OS=Vibrio natriegens OX=691 GN=tgt; PE = 3 SV=1
MKLKFDLKKKNGTARRGQLTFERGTVQTPAFMPVGTYGTVKGMTPEEVKGTGAEILLGNTFHLWLRPGQEVMKMHGDLHDFMNWHGPILTDSGGFQVFSLGKMRTITEQGVHFRNPVNGDKIFMDAEKSMEIQKDLGSDIVMIFDECTPYPATHDEAKKSMEMSLRWAQRSRDHFDKLENPNNLFGIVQGGVYEDLRDVSVKGLTEIGFDGYAVGGLAVGEPKEDMHRILEHTCPQLPEDKPRYLMGVGKPEDLVEGVRRGIDMFDCVMPTRNARNGHLFVTGGVIKIRNAKHKTDTTPLDPHCDCYTCQNYSKSYLHHLERCNEILGARLNTIHNLRYYQRLMESIRKAIDEDRFDEFVEEFYARRDREVPPLSKA

SEQ ID NO: 62180 - protein, 378 aa, Vibrio navarrensis
  REGION 1..378: note = tr|A0A099LSQ8|A0A099LSQ8_9VIBR Queuine tRNA-ribosyltransferase OS=Vibrio navarrensis OX=29495; GN = tgt PE=3 SV=1
MKLKFDLKKKNGNARRGQLTFERGTVQTPAFMPVGTYGTVKGMTPEEVKDTGAEILLGNTFHLWLRPGQEVMKMHGDLHDFMNWQGPILTDSGGFQVFSLGDIRKITEEGVHFRNPVNGDKIFMDAEKSMEIQKDLGSDIVMIFDECTPYPATHAEAKKSMEMSLRWAQRSRDHFDKLENPNNLFGIVQGGVYEDLRDVSVKGLTEIGFDGYAVGGLAVGEPKEDMHRVLEHTCPQLPEDKPRYLMGVGKPEDLVEGVRRGIDMFDCVMPTRNARNGHLFVTGGVIKIRNATHKTDTSALDPHCDCYTCKNYSKSYLHHLDRCNEILGARLNTIHNLRYYQRLMESIRKAIDEDRFEQFVEEFYARRNREVPPLGKQA

SEQ ID NO: 62181 - protein, 378 aa, unidentified
  source 1..378: note = Vibrio neocaledonicus
  REGION 1..378: note = tr|A0A4P8FVI9|A0A4P8FVI9_9VIBR Queuine tRNA-ribosyltransferase OS=Vibrio neocaledonicus; OX = 1208308 GN=tgt PE=3 SV=1
MKLKFDLKKKNGNARRGQLTFERGTVQTPAFMPVGTYGTVKGMTPEEVKGTGAEILLGNTFHLWLRPGQEVMKMHGDLHDFMNWHGPILTDSGGFQVFSLGKMRTITEEGVYFRNPVNGDKIFMDAEKSMEIQKDLGSDIVMIFDECTPYPATHDEAKKSMEMSLRWAQRSRDHFEKLENPNNLFGIVQGGVYEDLRDVSVKGLTEIGFDGYAVGGLAVGEPKEDMHRILEHTCPQLPEDKPRYLMGVGKPEDLVEGVRRGIDMFDCVMPTRNARNGHLFVTGGVIKIRNAKHKTDTTPLDPHCDCYTCQNYSKSYLHHLERCNEILGARLNTIHNLRYYQRLMESIRKAIDEDRFDEFVTEFYDRRGREVPPLAKEQ

SEQ ID NO: 62182 - protein, 378 aa, Vibrio neptunius
  REGION 1..378: note = tr|A0A0F4NZ32|A0A0F4NZ32_9VIBR Queuine tRNA-ribosyltransferase OS=Vibrio neptunius OX=170651; GN = tgt PE=3 SV=1
MKLKFDLKKKDGVARRGQLTFERGTVQTPAFMPVGTYGTVKGMTPEEVKGTGAEILLGNTFHLWLRPGQEIMKMHGDLHDFMNWHGPILTDSGGFQVFSLGDIRKITEEGVHFRNPVNGDKIFMDAEKSMEIQKDLGSDIVMIFDECTPYPATHAEAKKSMEMSLRWAQRSRDHFDKLENENNLFGIVQGGVYEDLRDVSVKGLTEIGFDGYAVGGLAVGEPKEDMHRILEHTCPQLPEDKPRYLMGVGKPEDLVEGVRRGIDMFDCVMPTRNARNGHLFVTGGVIKIRNAKHKTDTTPLDPECDCYTCQNYSKSYLHHLDRCNEILGARLNTIHNLRYYQRVMESIRKAIDEDRFDEFVKEFYERRGREVPPLAKEQ

SEQ ID NO: 62183 - protein, 378 aa, Vibrio nereis
  REGION 1..378: note = tr|A0A0M0HPP3|A0A0M0HPP3_VIBNE Queuine tRNA-ribosyltransferase OS=Vibrio nereis OX=693 GN=tgt; PE = 3 SV=1
MKLKFDLKKKDGTARRGQLTFERGTVQTPAFMPVGTYGTVKGMTPEEVKGTGAEILLGNTFHLWLRPGQEVMKMHGDLHDFMNWQGPILTDSGGFQVFSLGDIRKITEAGVHFRNPVNGDKIFMDAEKSMEIQNDLGSDIVMIFDECTPYPATHAEAKKSMEMSLRWAQRSRDHFNKLENPNNLFGIVQGGVYEDLRDVSVEGLTKIGFDGYAVGGLAVGEPKEDMHRILEHTCPQLPEDKPRYLMGVGKPEDLVEGVRRGIDMFDCVMPTRNARNGHLFVTGGVIKIRNAKHKTDTTPLDPHCDCYTCTHYSKSYLHHLDRCNEILGARLNTIHNLRYYQRLMESIRKAIDEDRFDEFVQEFYARRDREVPPLSKAE

SEQ ID NO: 62184 - protein, 376 aa, Vibrio nigripulchritudo
  REGION 1..376: note = tr|U4KCU9|U4KCU9_9VIBR Queuine tRNA-ribosyltransferase OS=Vibrio nigripulchritudo; OX = 28173 GN=tgt PE=3 SV=1
MKLKYELKKTNGNARRGQLTFERGSVQTPAFMPVGTYGTVKGMTPEEVKGTGAEILLGNTFHLWLRPGQEVMKMHGDLHDFMNWHGPILTDSGGFQVFSLGDIRKITEEGVHFRNPVNGDKIFMDAEKSMEIQKDLGSDVVMIFDECTPYPATHDEAKKSMEMSLRWAQRSRDHFDKLENPNSLFGIVQGGVYEDLRDVSVKGLTDIGFDGYAVGGLAVGEPKEDMHRVLEHTCPQLPIDKPRYLMGVGKPEDLVEGVRRGIDMFDCVMPTRNARNGHLFVTGGVIKIRNAKHKTDTTPLDPECDCYTCKNYSKAYLHHLDRCNEILGARLNTIHNLRYYQRVMESIRNAIDEDRFDQFVEEFYARRNREVPPLNK

SEQ ID NO: 62185 - protein, 376 aa, Vibrio nigripulchritudo; identical to SEQ ID NO: 62184
  REGION 1..376: note = tr|U4E6S3|U4E6S3_9VIBR Queuine tRNA-ribosyltransferase OS=Vibrio nigripulchritudo FTn2; OX = 1238441 GN=tgt PE=3 SV=1

SEQ ID NO: 62186 - protein, 378 aa, Vibrio orientalis
  REGION 1..378: note = tr|C9QL41|C9QL41_VIBOR Queuine tRNA-ribosyltransferase OS=Vibrio orientalis CIP 102891 = ATCC 33934 OX=675816 GN=tgt PE=3 SV=1
MKLKFDLKKKDGVARRGQLTFERGTVQTPAFMPVGTYGTVKGMTPEEVKGTGAEILLGNTFHLWLRPGQEVMKMHGDLHDFMNWHGPILTDSGGFQVFSLGKMRTITEQGVHFRNPVNGDKIFMDAEKSMEIQKDLGSDIVMIFDECTPYPATHNEAKKSMEMSLRWAQRSRDHFDKLENPNNLFGIVQGGVYEDLRDVSVKGLTEIGFDGYAVGGLAVGEPKEDMHRILEHTCPQLPEDKPRYLMGVGKPEDLVEGVRRGIDMFDCVMPTRNARNGHLFVTGGVIKIRNAKHKTDTTALDPHCDCYTCQNYSKSYLHHLERCNEILGARLNTIHNLRYYQRLMESIRTAIDEDRFDEFVQEFYERRGREVPPLAKEQ

SEQ ID NO: 62187 - protein, 378 aa, Vibrio owensii
  REGION 1..378: note = tr|A0A0C1YZW7|A0A0C1YZW7_9VIBR Queuine tRNA-ribosyltransferase OS=Vibrio owensii CAIM 1854 = LMG 25443 OX=1229493 GN=tgt PE=3 SV=1
MKLKFDLKKKNGNARRGQLTFERGTVQTPAFMPVGTYGTVKGMTPEEVKGTGAEILLGNTFHLWLRPGQEVMKMHGDLHDFMNWHGPILTDSGGFQVFSLGKMRKITEKGVHFRSPVNGDKIFMDAEKSMEIQKDLGSDIVMIFDECTPYPATHNEAKKSMEMSLRWAQRSRDHFDKLENPNNLFGIVQGGVYEDLRDVSIKGLTEIDFDGYAVGGLAVGEPKEDMHRILEHTCPQLPEDKPRYLMGVGKPEDLVEGVRRGIDMFDCVMPTRNARNGHLFVTGGVIKIRNAKHKTDTTPLDPHCDCYTCQHYSKSYLHHLERCNEILGARLNTIHNLRYYQRLMESIRKAIDEDRFDEFVTEFYERRGREVPPLAKEQ

SEQ ID NO: 62188 - protein, 378 aa, Vibrio owensii; identical to SEQ ID NO: 62157
  REGION 1..378: note = tr|A0A3G2PX59|A0A3G2PX59_9VIBR Queuine tRNA-ribosyltransferase OS=Vibrio owensii OX=696485 GN=tgt; PE = 3 SV=1

SEQ ID NO: 62189 - protein, 379 aa, unidentified
  source 1..379: note = Vibrio palustris
  REGION 1..379: note = tr|A0A1R4B8D5|A0A1R4B8D5_9VIBR Queuine tRNA-ribosyltransferase OS=Vibrio palustris OX=1918946; GN = tgt PE=3 SV=1
MKLQFELNKKDGTARRGKITFERGSVQTPAFMPVGTYGTVKGMTPEEVKGTGAEILLGNTFHLWLRPGQEVMKLHGDLHDFMNWQGPILTDSGGFQVFSLGDIRKITEQGVHFRNPVNGDKIFMDAEKSMEIQKDLGSDIVMIFDECTPYPATHAQAKASMQMSLRWAQRSRDHFDALENPNSLFGIVQGGVHEDLRDESVKGLTDIGFDGYAVGGLAVGEPKEEMHRMLEHTCPQLPEDKPRYLMGVGKPEDLVEGVRRGIDMFDCVMPTRNARNGHLFVTGGVIKIRNAKHKTDTTALDPECDCYTCQNYSKSYLHHLDRCNEILGARLNTIHNLRYYQRVMEGIRQAIDEDRFDSFVEEFYALRNREVPPLQKDNA

SEQ ID NO: 62190 - protein, 376 aa, unidentified
  source 1..376: note = Vibrio panuliri
  REGION 1..376: note = tr|A0A1Q9HCS2|A0A1Q9HCS2_9VIBR Queuine tRNA-ribosyltransferase OS=Vibrio panuliri OX=1381081; GN = tgt PE=3 SV=1
MKLKFDLKKTNGNARRGQLTFERGSVQTPAFMPVGTYGTVKGMTPEEVKETGAEILLGNTFHLWLRPGQEVMKMHGDLHDFMNWQGPILTDSGGFQVFSLGDIRKITEEGVHFRNPVNGDKIFMDAEKSMEIQKDLGSDIVMIFDECTPYPATHDEAKKSMEMSLRWAQRSRDHFDKLENQNNLFGIVQGGVYEDLRDVSVKGLTEIGFDGYAVGGLAVGEPKEDMHRILEHTCPQLPTDKPRYLMGVGKPEDLVEGVRRGIDMFDCVMPTRNARNGHLFVTGGVIKIRNATHKTDTTPLDPHCDCYTCKNYSKSYLHHLDRCNEILGARLNTIHNLRYYQRLMESIRAAIDEDRFDQFVEEFYARRNREVPPLGK

SEQ ID NO: 62191 - protein, 377 aa, Vibrio parahaemolyticus
  REGION 1..377: note = sp|Q87S36|TGT_VIBPA Queuine tRNA-ribosyltransferase; OS = Vibrio parahaemolyticus serotype O3:K6 (strain RIMD 2210633) OX=223926 GN=tgt PE=3 SV=1
MKLKFDLKKKNGNARRGQLTFERGTVQTPAFMPVGTYGTVKGMTPEEVKGTGAEILLGNTFHLWLRPGQEVMKMHGDLHDFMNWHGPILTDSGGFQVFSLGKMRTITEKGVHFRNPVNGDKIFMDAEKSMEIQKDLGSDIVMIFDECTPYPATHNEAKKSMEMSLRWAQRSRDHFDKLENPNNLFGIVQGGVYEDLRDVSVKGLTEIGFDGYAVGGLAVGEPKEDMHRILEHTCPQLPEDKPRYLMGVGKPEDLVEGVRRGIDMFDCVMPTRNARNGHLFVTGGVIKIRNAKHKTDTTPLDPHCDCYTCQNYSKSYLHHLERCNEILGARLNTIHNLRYYQRLMESIRKAIDEDRFDEFVQEFYARRDREVPPLSKA

SEQ ID NO: 62192 - protein, 377 aa, Vibrio parahaemolyticus; identical to SEQ ID NO: 62191
  REGION 1..377: note = tr|A0A0D1EJ04|A0A0D1EJ04_VIBPH Queuine tRNA-ribosyltransferase OS=Vibrio parahaemolyticus 49; OX = 1288779 GN=tgt PE=3 SV=1

SEQ ID NO: 62193 - protein, 394 aa, Vibrio pectenicida
  REGION 1..394: note = tr|A0A427U6Q4|A0A427U6Q4_9VIBR Queuine tRNA-ribosyltransferase OS=Vibrio pectenicida OX=62763; GN = tgt PE=3 SV=1
MLGTFRQAVSLTIGGLVKLQFDLKKKDGTARRGQLTFERGSVQTPAFMPVGTYGTVKGMTPEEVKDTGAEILLGNTFHLWLRPGQEVMKMHGDLHDFMNWQGPILTDSGGFQVFSLGDMRKITEQGVHFRSPVNGDKIFMDAEKSMEIQQDLGSDIVMIFDECTPYPATHDEAKKSMEMSLRWAQRSRDHFDKLENPNSLFGIVQGGVYEDLRDVSVKGLTEIGFDGYAVGGLAVGEPKEDMHRVLEHTCPQLPEDKPRYLMGVGKPEDLVEGVRRGIDMFDCVMPTRNARNGHLFVTGGVIKIRNAKHKTDTTPLDPECDCYTCQNYSKAYLHHLDRCNEILGARLNTIHNLRYYQRVMEGIRSAIDEDRFYEFVQEFYARRDREVPPLAKEQ

SEQ ID NO: 62194 - protein, 376 aa, Vibrio penaeicida
  REGION 1..376: note = tr|A0A3S0PSK9|A0A3S0PSK9_9VIBR Queuine tRNA-ribosyltransferase OS=Vibrio penaeicida OX=104609; GN = tgt PE=3 SV=1
MKLTYELKKTNGNARRGQLTFERGTVQTPAFMPVGTYGTVKGMTPEEVKGTGAEILLGNTFHLWLRPGQEVMKMHGDLHDFMNWHGPILTDSGGFQVFSLGDIRKITEEGVHFRNPVNGDRIFMDAEKSMEIQKDLGSDVVMIFDECTPYPATHDEAKKSMEMSLRWAQRSRDHFDKLDNQNSLFGIVQGGVYEDLRDVSVKGLTDIGFDGYAVGGLAVGEPKEDMHRVLEHTCPQLPEDKPRYLMGVGKPEDLVEGVRRGIDMFDCVMPTRNARNGHLFVTGGVIKIRNATHKTDTTPLDPECDCYTCQNYSKAYLHHLDRCNEILGSRLNTIHNLRYYQRVMESIRTAIDEDRFDQFVEDFYARRNREVPPLNK

SEQ ID NO: 62195 - protein, 42 aa, Vibrio ponticus
  REGION 1..42: note = tr|A0A090PKA4|A0A090PKA4_9VIBR tRNA-guanine transglycosylase OS=Vibrio ponticus OX=265668; GN = JCM19238_1518 PE=4 SV=1
MKLKFDLKKTNGNARRGQLTFERGTVQTPAFMPVGTYGTVKA

SEQ ID NO: 62196 - protein, 335 aa, Vibrio ponticus
  REGION 1..335: note = tr|A0A090P505|A0A090P505_9VIBR Queuine tRNA-ribosyltransferase OS=Vibrio ponticus OX=265668; GN = tgt PE=3 SV=1
MTPEEVKETGAEILLGNTFHLWLRPGQEVMKMHGDLHDFMNWQGPILTDSGGFQVFSLGDIRKITEEGVHFRNPVNGDKIFMDAEKSMEIQKDLGSDIVMIFDECTPYPATHDEAKKSMEMSLRWAQRSRDHFDKLENPNNLFGIVQGGVYEDLRDVSVKGLTEIGFDGYAVGGLAVGEPKEDMHRVLEHTCPQLPTDKPRYLMGVGKPEDLVEGVRRGIDMFDCVMPTRNARNGHLFVTGGVIKIRNATHKTDTTPLDPHCDCYTCKNYSKSYLHHLDRCNEILGARLNTIHNLRYYQRLMESIRSAIDEDRFDQFVEEFYARRNREVPPLGKQ

SEQ ID NO: 62197 - protein, 376 aa, Vibrio proteolyticus
  REGION 1..376: note = tr|U3BMY2|U3BMY2_VIBPR Queuine tRNA-ribosyltransferase OS=Vibrio proteolyticus NBRC 13287; OX = 1219065 GN=tgt PE=3 SV=1
MKLTFDLKKKNGNARRGQLTFERGTVQTPAFMPVGTYGTVKGMTPEEVKGTGAEILLGNTFHLWLRPGQEVMKMHGDLHDFMNWHGPILTDSGGFQVFSLGDIRKITEEGVHFRNPVNGDKIFMDAEKSMEIQKDLGSDIVMIFDECTPYPATHAEAKTSMEMSLRWAQRSRDHFDKLDNPNNLFGIVQGGVYEDLRDVSVKGLTEIGFDGYAVGGLAVGEPKEDMHRILEHTCPQLPEDKPRYLMGVGKPEDLVEGVRRGIDMFDCVMPTRNARNGHLFVTGGVIKIRNAKHKTDTSPLDPQCDCYTCQNYSKSYLHHLDRCNEILGARLNTIHNLRYYQRLMESIRKAIDEDRFDQFVEEFYARRNREVPPLSK

SEQ ID NO: 62198 - protein, 376 aa, unidentified
  source 1..376: note = Vibrio qinghaiensis
  REGION 1..376: note = tr|A0A223MVS7|A0A223MVS7_9VIBR Queuine tRNA-ribosyltransferase OS=Vibrio qinghaiensis OX=2025808; GN = tgt PE=3 SV=1
MKLTFELKKKNGNARRGQLTFERGTVQTPAFMPVGTYGTVKGMTPEEVKETGAEILLGNTFHLWLRPGQEVMKMHGDLHDFMNWQGPILTDSGGFQVFSLGDIRKITEEGVHFRNPVNGDKIFMDAEKSMEIQKDLGSDIVMIFDECTPYPATHDEAKKSMEMSLRWAQRSRDHFDKLENTNSLFGIVQGSVYEDLRDVSVKGLTEIGFDGYAVGGLAVGEPKEDMHRVLEHTCPQLPEDKPRYLMGVGKPEDLVEGVRRGIDMFDCVMPTRNARNGHLFVTGGVIKIRNAVHKTDTTALDPHCDCYTCKNYSKSYLHHLDRCNEILGARLNTIHNLRYYQRLMASIRLAIEEDRFDAFVEEFYARRNREVPPMGQ

SEQ ID NO: 62199 - protein, 377 aa, unidentified
  source 1..377: note = Vibrio quintilis
  REGION 1..377: note = tr|A0A1M7YZP1|A0A1M7YZP1_9VIBR Queuine tRNA-ribosyltransferase OS=Vibrio quintilis OX=1117707; GN = tgt PE=3 SV=1
MKLKFELKKKNGNARRGQIQFERGTVQTPAFMPVGTYGTVKGMTPEEVKDTGAEILLGNTFHLWLRPGQEIMKMHGDLHDFMNWQGPILTDSGGFQVFSLGDIRKITEEGVHFRNPVNGEKIFMDAEKSMEIQNDLGSDVVMIFDECTPYPATHDEARSSMEMSLRWAKRSRDHFDKLENPNSLFGIVQGSVYEDLRDISAKGLTDIGFDGYAVGGLAVGEPKEDMHRILEHTCPLLPEDKPRYLMGVGKPEDLVEGVRRGVDMFDCVMPTRNARNGHLFVTGGVVKIRNARHKTDTTPLDPECDCYTCKNYSKSYLHHLDRCNEILGARLNTIHNLRYYQRLMASIRQAIEADRFEEFVTDFYARRDRDVPPVGQV

SEQ ID NO: 62200 - protein, 377 aa, unidentified
  source 1..377: note = Vibrio renipiscarius
  REGION 1..377: note = tr|A0A0C2KDG9|A0A0C2KDG9_9VIBR Queuine tRNA-ribosyltransferase OS=Vibrio renipiscarius OX=1461322; GN = tgt PE=3 SV=1
MKLTFDLKKKDGVARRGQLTFERGTVQTPAFMPVGTYGTVKGMTPEEVKETGAEILLGNTFHLWLRPGQEVMKMHGDLHDFMNWQGPILTDSGGFQVFSLGKMRKITEEGVHFRSPVNGDKVFMDAEKSMEIQKDLGSDIVMIFDECTPYPATHDEAKKSMEMSLRWAQRSRDHFDKLENPNSLFGIVQGGVYEDLRDVSVKGLTEIGYDGYAVGGLAVGEPKEDMHRILEHTCPQLPEDKPRYLMGVGKPEDLVEGVRRGIDMFDCVMPTRNARNGHLFVTGGVIKIRNATHKTDTTPLDPQCDCYTCKNYSKAYLHHLDRCNEILGARLNTIHNLRYYQRLMESIRTAIDEDRFEQFVEEFYARRNREVPPIGKQ

SEQ ID NO: 62201 - protein, 378 aa, Vibrio rotiferianus; identical to SEQ ID NO: 62125
  REGION 1..378: note = tr|A0A2K7SS02|A0A2K7SS02_9VIBR Queuine tRNA-ribosyltransferase OS=Vibrio rotiferianus OX=190895; GN = tgt PE=3 SV=1

SEQ ID NO: 62202 - protein, 377 aa, Vibrio ruber
  REGION 1..377: note = tr|A0A1R4LMY5|A0A1R4LMY5_9VIBR Queuine tRNA-ribosyltransferase OS=Vibrio ruber DSM 16370; OX = 1123498 GN=tgt PE=3 SV=1
MKLKFELKKKQGNARRGQITFERGTVQTPVFMPVGTYGTVKGMTPEEVKETGAEILLGNTFHLWLRPGQEVMKMHGDLHDFMNWQGPILTDSGGFQVFSLGDIRKITEEGVHFRNPVNGEKIFMDAEKSMEIQNDLGSDIVMIFDECTPYPATHTEAKQSMEMSLRWAKRSREHFDQLENPNSLFGIVQGGVYEDLRDVSVAGLTEIGFDGYAVGGLAVGEPKEDMHRILEHTCPQLPEDKPRYLMGVGKPEDLVEGVRRGIDMFDCVMPTRNARNGHLFVTGGVIKIRNAKHKTDTTPLDPHCDCYTCKHYSKSYLHHLDRCNEILGARLNTIHNLRYYQRLMASIREAIEADRFDVFVEEFYARRERAVPPLAKA

SEQ ID NO: 62203 - protein, 381 aa, Vibrio rumoiensis
  REGION 1..381: note = tr|A0A1E5E5J7|A0A1E5E5J7_9VIBR Queuine tRNA-ribosyltransferase OS=Vibrio rumoiensis 1S-45; OX = 1188252 GN=tgt PE=3 SV=1
MEYELIKKDGVARRGRLTFKRGSVETPAFMPVGTYGTVKGMTPEEVKDTGAEILLGNTFHLWLRPGQEIMKLHGDLHDFMNWHGPILTDSGGFQVFSLGAMRKITEEGVHFRNPVNGDRIFMDAEKSMEIQKDLGSDIVMIFDECTPYPATHEEAKKSMEMSLRWAQRSRDHFDKLENPNSLFGIVQGGVYGDLRDVSVKGLTEIGFDGYAVGGLAVGEPKEDMHHMLEHTCPQLPEDKPRYLMGVGKPEDLVEGVRRGIDMFDCVMPTRNARNGHLFVTGGVVKIRNASHKTDTSPLDPHCDCYTCKNYSKSYLHHLDRCNEILGARLNTIHNLRYYQRLMASIRKAIDEDRFDEFVQEFYARRDREVPPLQKEIRSSAQ

SEQ ID NO: 62204 - protein, 377 aa, Vibrio sagamiensis; identical to SEQ ID NO: 62109
  REGION 1..377: note = tr|A0A511QJ79|A0A511QJ79_9VIBR Queuine tRNA-ribosyltransferase OS=Vibrio sagamiensis NBRC 104589; OX = 1219064 GN=tgt PE=3 SV=1

SEQ ID NO: 62205 - protein, 377 aa, Vibrio scophthalmi
  REGION 1..377: note = tr|A0A1C7F633|A0A1C7F633_9VIBR Queuine tRNA-ribosyltransferase OS=Vibrio scophthalmi OX=45658; GN = tgt PE=3 SV=1
MKLKFDLKKKDGVARRGQLIFERGTVQTPAFMPVGTYGTVKGMTPEEVKETGAEILLGNTFHLWLRPGQEVMKMHGDLHDFMNWQGPILTDSGGFQVFSLGKMRKITEEGVHFRSPVNGDKIFMDAEKSMEIQKDLGSDIVMIFDECTPYPATHDEAKKSMEMSLRWAQRSRDHFDKLENPNSLFGIVQGGVYEDLRDVSVKGLTEIGYDGYAVGGLAVGEPKEDMHRILEHTCPQLPEDKPRYLMGVGKPEDLVEGVRRGIDMFDCVMPTRNARNGHLFVTGGVIKIRNATHKTDTTPLDPQCDCYTCKNYSKAYLHHLDRCNEILGARLNTIHNLRYYQRLMESIRTAIDEDRFDQFVEEFYARRNREVPPIGKQ

SEQ ID NO: 62206 - protein, 377 aa, Vibrio scophthalmi
  REGION 1..377: note = tr|A0A1B1NRA3|A0A1B1NRA3_9VIBR Queuine tRNA-ribosyltransferase OS=Vibrio scophthalmi OX=45658; GN = tgt PE=3 SV=1
MKLKFDLKKKDGVARRGQLTFERGTVQTPAFMPVGTYGTVKGMTPEEVKETGAEILLGNTFHLWLRPGQEVMKMHGDLHDFMNWQGPILTDSGGFQVFSLGKMRKITEEGVHFRSPVNGDKIFMDAEKSMEIQKDLGSDIVMIFDECTPYPATHDEAKKSMEMSLRWAQRSRDHFDKLENPNSLFGIVQGGVYEDLRDVSVKGLTEIGYDGYAVGGLAVGEPKEDMHRILEHTCPQLPEDKPRYLMGVGKPEDLVEGVRRGIDMFDCVMPTRNARNGHLFVTGGVIKIRNATHKTDTTPLDPQCDCYTCKNYSKAYLHHLDRCNEILGARLNTIHNLRYYQRLMESIRTAIDEDRFDQFVEEFYARRNREVPPIGKQ

SEQ ID NO: 62207 - protein, 377 aa, Vibrio shilonii; identical to SEQ ID NO: 62120
  REGION 1..377: note = tr|A6D750|A6D750_9VIBR Queuine tRNA-ribosyltransferase OS=Vibrio shilonii AK1 OX=391591; GN = tgt PE=3 SV=1

SEQ ID NO: 62208 - protein, 378 aa, Vibrio sinaloensis; identical to SEQ ID NO: 62128
  REGION 1..378: note = tr|A0A0A5I033|A0A0A5I033_9VIBR Queuine tRNA-ribosyltransferase OS=Vibrio sinaloensis OX=379097; GN = tgt PE=3 SV=1

SEQ ID NO: 62209 - protein, 378 aa, Vibrio sinaloensis
  REGION 1..378: note = tr|E8MCY4|E8MCY4_9VIBR Queuine tRNA-ribosyltransferase OS=Vibrio sinaloensis DSM 21326; OX = 945550 GN=tgt PE=3 SV=1
MKLKFDLKKKDGVARRGQLTFERGTVQTPAFMPVGTYGTVKGMTPEEVKGTGAEILLGNTFHLWLRPGQEIMKMHGDLHDFMNWHGPILTDSGGFQVFSLGKMRTITEEGVHFRNPVNGDKIFMDAEKSMEIQKDLGSDIVMIFDECTPYPATHDEAKKSMEMSLRWAQRSRDHFDKLENPNNLFGIVQGGVYEDLRDVSVKGLTDIGFDGYAVGGLAVGEPKEDMHRILEHTCPQLPEDKPRYLMGVGKPEDLVEGVRRGIDMFDCVMPTRNARNGHLFVTGGVIKIRNAKHKTDTTPLDPHCDCYTCQNYSKSYLHHLERCNEILGARLNTIHNLRYYQRLMESIRSAIDEDRFDEFVKEFYERRGREVPPLSKEQ

SEQ ID NO: 62210 - protein, 377 aa, Vibrio sp.
  REGION 1..377: note = tr|A0A1A6KFA9|A0A1A6KFA9_9VIBR Queuine tRNA-ribosyltransferase OS=Vibrio sp. UCD-FRSSP16_10; OX = 1853257 GN=tgt PE=3 SV=1
MKFELKKTDGTARRGQLQFERGSVQTPAFMPVGTYGTVKGMTPEEVTETGAEILLGNTFHLWLRPGQEVMKLHGDLHDFMNWQGPILTDSGGFQVFSLGDLRKITEQGVHFRNPVNGDKIFMDAEKSMEIQKDLGSDIVMIFDECTPYPATHDEAQKSMEMSLRWAQRSRDHFDKLENTNSLFGIVQGGVYEDLRDVSVEGLTNIGFDGYAVGGLAVGEPKEDMHRILEHTCPQLPQDKPRYLMGVGKPEDLVEGVRRGIDMFDCVMPTRNARNGHLFVTGGVIKIRNAKHKTDTTPLDPECDCYTCRNYSKSYLHHLDRCNEILGSRLNTIHNLRYYQRLMESIRKAIDEDRFDAFVEEFYARRDRDVPPMLKAEA

SEQ ID NO: 62211 - protein, 377 aa, Vibrio sp.; identical to SEQ ID NO: 62120
  REGION 1..377: note = tr|A0A084T9F8|A0A084T9F8_9VIBR Queuine tRNA-ribosyltransferase OS=Vibrio sp. ER1A OX=1517681; GN = tgt PE=3 SV=1

SEQ ID NO: 62212 - protein, 377 aa, unidentified
  source 1..377: note = Vibrio spartinae
  REGION 1..377: note = tr|A0A1N6LZV4|A0A1N6LZV4_9VIBR Queuine tRNA-ribosyltransferase OS=Vibrio spartinae OX=1918945; GN = tgt PE=3 SV=1
MKLKFELKKKQGNARRGQITFERGTVQTPAFMPVGTYGTVKGMTPEEVKETGAEILLGNTFHLWLRPGQEVMKMHGDLHDFMNWQGPILTDSGGFQVFSLGDIRKITEEGVHFRNPVNGEKIFMDAEKSMEIQNDLGSDIVMIFDECTPYPATHAEAKQSMEMSLRWAKRSRDHFDQLENPNSLFGIVQGGVYEDLRDVSAAGLTALDFDGYAVGGLAVGEPKEDMHRILEHTCPQLPEDKPRYLMGVGKPEDLVEGVRRGIDMFDCVMPTRNARNGHLFVTGGVIKIRNAKHKTDTTPLDPHCDCYTCKHYSKSYLHHLDRCNEILGARLNTIHNLRYYQRLMESIRQAIEADRFDAFVEEFYARRERAVPPLAKA

SEQ ID NO: 62213 - protein, 378 aa, Vibrio splendidus; identical to SEQ ID NO: 62117
  REGION 1..378: note = tr|A0A0P6YGG8|A0A0P6YGG8_VIBSP Queuine tRNA-ribosyltransferase OS=Vibrio splendidus OX=29497; GN = tgt PE=3 SV=1

SEQ ID NO: 62214 - protein, 378 aa, Vibrio splendidus
  REGION 1..378: note = tr|A0A2N7KYU7|A0A2N7KYU7_VIBSP Queuine tRNA-ribosyltransferase OS=Vibrio splendidus OX=29497; GN = tgt PE=3 SV=1
MKLKYELKKTNSGARRGQLQFERGSVETPAFMPVGTYGTVKGMTPEEVKDTGAEILLGNTFHLWLRPGQEIMKLHGDLHDFMNWKGPILTDSGGFQVFSLGATRKITEEGVHFRNPVNGDKIFMDAEKSMEIQKDLGSDIVMIFDECTPYPATHKEAKDSMEMSLRWAQRSRNHFDEQENPNSLFGIVQGGVYEDLRDVSVKGLTEIGFDGYAVGGLAVGEPKEDMHRILEHTCPQLPEDKPRYLMGVGKPEDLVEGVRRGIDMFDCVMPTRNARNGHLFVTEGVIKIRNAKHKTDTTPLDSDCDCYTCKNYSKSYLHHLDRCNEILGARLNTIHNLRFYQRIMSDIRQSIDEDRFEEFVAEFYARMGREVPPLGKES

SEQ ID NO: 62215 - protein, 378 aa, Vibrio superstes
  REGION 1..378: note = tr|A0A511QMB0|A0A511QMB0_9VIBR Queuine tRNA-ribosyltransferase OS=Vibrio superstes NBRC 103154; OX = 1219062 GN=tgt PE=3 SV=1
MKFELKKTDGVARRGQLDFERGSVQTPAFMPVGTYGTVKGMTPEEVKGTGAEILLGNTFHLWLRPGQEVMKLHGDLHDFMNWQGPILTDSGGFQVFSLGDIRKITEKGVHFRNPVNGDKIFMDAEKSMEIQKDLGSDVVMIFDECTPYPATHNEAQKSMEMSLRWAQRSRDHFDKLENPNSLFGIVQGGVYEDLRDVSVEGLTKIGFDGYAVGGLAVGEPKEDMHRILEHTCPQLPIDKPRYLMGVGKPEDLVEGVRRGIDMFDCVMPTRNARNGHLFVTGGVIKIRNAKHKTDTTPLDPECDCYTCQNYSKSYLHHLDRCNEILGSRLNTIHNLRYYQRLMESIRTAIDEDRFESFVEEFYARRDRDVPPMLKADAE

SEQ ID NO: 62216 - protein, 376 aa, Vibrio tapetis
  REGION 1..376: note = tr|A0A2N8ZF16|A0A2N8ZF16_9VIBR Queuine tRNA-ribosyltransferase OS=Vibrio tapetis subsp. tapetis; OX = 1671868 GN=tgt PE=3 SV=1
MKLKYELKKKNGNARRGQLTFERGTVQTPAFMPVGTYGTVKGMTPEEVKGTGAEILLGNTFHLWLRPGQEIMKLHGDLHDFMNWKGPILTDSGGFQVFSLGATRKITEEGVHFRNPVNGDKVFMDAEKSMQIQYDLGSDVVMIFDECTPYPATHDEAKKSMEMSLRWAQRSRDEFDRQENQNSLFGIIQGGVYEDLRDVSVKGLTDIGFDGYAVGGLAVGEPKEDMHRILEHTCPQIPEDKPRYLMGVGKPEDLVEGVRRGIDMFDCVMPTRNARNGHLFVTGGVIKIRNAKHKMDTTPLDPHCDCYTCQNYSKSYLHHLDRCNEILGARLNTIHNLRYYQRVMEGIRTAIDEDRFDEYVEEFYALRDREVPPLSK

SEQ ID NO: 62217 - protein, 378 aa, Vibrio tasmaniensis
  REGION 1..378: note = sp|B7VJR8|TGT_VIBTL Queuine tRNA-ribosyltransferase; OS = Vibrio tasmaniensis (strain LGP32) OX=575788 GN=tgt; PE = 3 SV=1
MKLKYELKKTNSGARRGQLQFERGTVETPAFMPVGTYGTVKGMTPEEVKDTGAEILLGNTFHLWLRPGQEIMKLHGDLHDFMNWKGPILTDSGGFQVFSLGATRKITEEGVHFRNPVNGDKIFMDAEKSMEIQKDLGSDIVMIFDECTPYPATHKEAKDSMEMSLRWAQRSRDHFDKQENPNSLFGIVQGGVYEDLRDVSVKGLTEIGFDGYAVGGLAVGEPKEDMHRILEHTCPQLPEDKPRYLMGVGKPEDLVEGVRRGIDMFDCVMPTRNARNGHLFVTEGVIKIRNAKHKTDTTPLDSDCDCYTCKNYSKSYLHHLDRCNEILGARLNTIHNLRFYQRVMSDIRQSIDEDRFEEFVAEFYARMGREVPPLGKES

SEQ ID NO: 62218 - protein, 378 aa, Vibrio tasmaniensis; identical to SEQ ID NO: 62217
  REGION 1..378: note = tr|A0A2N7NEG8|A0A2N7NEG8_9VIBR Queuine tRNA-ribosyltransferase OS=Vibrio tasmaniensis OX=212663; GN = tgt PE=3 SV=1

SEQ ID NO: 62219 - protein, 377 aa, unidentified
  source 1..377: note = Vibrio thalassae
  REGION 1..377: note = tr|A0A240EHD2|A0A240EHD2_9VIBR Queuine tRNA-ribosyltransferase OS=Vibrio thalassae OX=1243014; GN = tgt PE=3 SV=1
MKLQYELKKKNGHARRGQLTFERGTVQTPAFMPVGTYGTVKGMTPEEVKGTGAEILLGNTFHLWLRPGQEVMKMHGDLHDFMNWQGPILTDSGGFQVFSLGDIRKITEEGVHFRNPVNGDKIFMDAEKSMEIQKDLGSDIVMIFDECTPYPATHAEAKKSMEMSLRWAQRSRDHFDQLENPNSLFGIVQGSVYEDLRDVSVEGLTNIGFDGYAVGGLAVGEPKEDMHRVLEHTTPKLPEDKPRYLMGVGKPEDLVEGVRRGIDMFDCVMPTRNARNGHLFVTGGIVKIRNATNKTDTGPLDEHCDCYTCKNYSKAYLHHLDRCNEILGARLNTIHNLRYYQRLMESIRTAIDEDRFDAFVEEFYARRNREVPPLDMK

SEQ ID NO: 62220 - protein, 378 aa, unidentified; identical to SEQ ID NO: 62130
  source 1..378: note = Vibrio toranzoniae
  REGION 1..378: note = tr|A0A109D8H5|A0A109D8H5_9VIBR Queuine tRNA-ribosyltransferase OS=Vibrio toranzoniae OX=1194427; GN = tgt PE=3 SV=1

SEQ ID NO: 62221 - protein, 378 aa, Vibrio tubiashii
  REGION 1..378: note = tr|A0A0A5IA03|A0A0A5IA03_9VIBR Queuine tRNA-ribosyltransferase OS=Vibrio tubiashii OX=29498; GN = tgt PE=3 SV=1
MKLKFDLKKKDGVARRGQLTFERGTVQTPAFMPVGTYGTVKGMTPEEVKGTGAEILLGNTFHLWLRPGQEVMKMHGDLHDFMNWQGPILTDSGGFQVFSLGKMRTITEQGVHFRNPVNGDKIFMDAEKSMEIQKDLGSDIVMIFDECTPYPATHDEAKKSMEMSLRWAQRSRDHFDKLDNPNNLFGIVQGGVYEDLRDVSVKGLTEIGFDGYAVGGLAVGEPKEDMHRILEHTCPQLPEDKPRYLMGVGKPEDLVEGVRRGIDMFDCVMPTRNARNGHLFVTGGVIKIRNAKHKTDTTALDPHCDCYTCQNYSKSYLHHLERCNEILGARLNTIHNLRYYQRLMESIRNAIDEDRFDEFVQEFYERRGREVPPLAKEQ

SEQ ID NO: 62222 - protein, 378 aa, Vibrio tubiashii
  REGION 1..378: note = tr|F9TBP2|F9TBP2_9VIBR Queuine tRNA-ribosyltransferase OS=Vibrio tubiashii ATCC 19109; OX = 1051646 GN=tgt PE=3 SV=1
MKLKFDLKKKDGVARRGQLTFERGTVQTPAFMPVGTYGTVKGMTPEEVKGTGAEILLGNTFHLWLRPGQEVMKMHGDLHDFMNWHGPILTDSGGFQVFSLGKMRTITEQGVHFRNPVNGDKIFMDAEKSMEIQKDLGSDIVMIFDECTPYPATHDEAKKSMEMSLRWAQRSRDHFDKLENPNNLFGIVQGGVYEDLRDVSVKGLTDIGFDGYAVGGLAVGEPKEDMHRILEHTCPQLPEDKPRYLMGVGKPEDLVEGVRRGIDMFDCVMPTRNARNGHLFVTGGVIKIRNAKHKTDTTPLDPHCDCYTCQNYSKSYLHHLERCNEILGARLNTIHNLRYYQRLMESIRKAIDEDRFDEFVTEFYERRGREVPPLAKEQ

SEQ ID NO: 62223 - protein, 381 aa, Vibrio variabilis
  REGION 1..381: note = tr|A0A090S8F0|A0A090S8F0_9VIBR Queuine tRNA-ribosyltransferase OS=Vibrio variabilis OX=990271; GN = tgt PE=3 SV=1
MKLQYELKKKDGHARRGQLTFERGTVQTPAFMPVGTYGTVKGMTPEEVRGTGAEILLGNTFHLWLRPGQEIMKLHGDLHDFMNWHGPILTDSGGFQVFSLGDIRKITEEGVHFRNPVNGDRIFMDAEKSMEIQKDLGSDVVMIFDECTPYPATHAEAKKSMEMSLRWAQRSRDHFDKLDNENSLFGIVQGSVYEDLREVSVKGLTDIGFDGYAVGGLAVGEPKEEMHRVLEFTTPKLPEDKPRYLMGVGKPEDLVEGVRRGIDMFDCVMPTRNARNGHLFVTGGVIKIRNATNKTDTGPLDENCDCYTCQNYSKAYLHHLDRCNEILGARLNTIHNLRHYQMLMESIRKAIDEDRFEQFVEEFYARRNREVPPLDMKVDAQ

SEQ ID NO: 62224 - protein, 378 aa, Vibrio vulnificus; identical to SEQ ID NO: 62146
  REGION 1..378: note = sp|Q8DEY0|TGT_VIBVU Queuine tRNA-ribosyltransferase; OS = Vibrio vulnificus (strain CMCP6) OX=216895 GN=tgt PE=3; SV = 2

SEQ ID NO: 62225 - protein, 378 aa, Vibrio vulnificus; identical to SEQ ID NO: 62146
  REGION 1..378: note = tr|A0A087IHZ2|A0A087IHZ2_VIBVL Queuine tRNA-ribosyltransferase OS=Vibrio vulnificus OX=672 GN=tgt; PE = 3 SV=1

SEQ ID NO: 62226 - protein, 376 aa, unidentified
  source 1..376: note = Vibrio xiamenensis
  REGION 1..376: note = tr|A0A1G7W5U2|A0A1G7W5U2_9VIBR Queuine tRNA-ribosyltransferase OS=Vibrio xiamenensis OX=861298; GN = tgt PE=3 SV=1
MKLQFNLNKKNGNARRGQLTFERGTVQTPAFMPVGTYGTVKGMTPEEVKATGAEILLGNTFHLWLRPGQEVMKMHGDLHDFMNWQGPILTDSGGFQVFSLGDIRKITEEGVHFRNPVNGDKIFMDAEKSMEIQKDLGSDIVMIFDECTPYPATHDEAKKSMEMSLRWAQRSRDHFDKLENPNNLFGIVQGGVYEDLRDVSVKGLTEIGFDGYAVGGLAVGEPKEDMHRILEHTCPQLPEDKPRYLMGVGKPEDLVEGVRRGIDMFDCVMPTRNARNGHLFVTGGVIKIRNAVHKTDTSPLDPHCDCYTCKNYSKSYLHHLDRCNEILGARLNTIHNLRYYQRLMESIRQAIDEDRFDDFVTEFYERRGREVSPLGK

SEQ ID NO: 62227 - protein, 376 aa, unidentified; identical to SEQ ID NO: 62154
  source 1..376: note = Vibrionales bacterium
  REGION 1..376: note = tr|A0A366XPN5|A0A366XPN5_9GAMM Queuine tRNA-ribosyltransferase OS=Vibrionales bacterium C3R12; OX = 2267228 GN=tgt PE=3 SV=1

SEQ ID NO: 62228 - protein, 387 aa, unidentified
  source 1..387: note = Vibrionales bacterium
  REGION 1..387: note = tr|A5L7R7|A5L7R7_VIBBS Queuine tRNA-ribosyltransferase OS=Vibrionales bacterium (strain SWAT-3) OX=391574 GN=tgt PE=3 SV=1
MFLWHIGGFVKLKYELKKTIAGARRGQLQFERGTVETPAFMPVGTYGTVKGMTPEEVKDTGAEILLGNTFHLWLRPGQEIMKMHGDLHDFMNWQGPILTDSGGFQVFSLGAMRKITEEGVHFRNPVNGDKIFMDAEKSMEIQKDLGSDIVMIFDECTPYPATHKEAKDSMEMSLRWAERSRNHFDKLENPNSLFGIVQGGVYEDLRDVSVKGLTEIGFDGYAVGGLAVGEPKEDMHRILEHTCPQLPEDKPRYLMGVGKPEDLVEGVRRGIDMFDCVMPTRNARNGHLFVTEGVIKIRNAKHKTDTTPLDSECDCYTCKNYSKSYLHHLDRCNEILGARLNTIHNLRFYQRVMSDIRQSIDEDRFEEFVAEFYARMGREVPPLGKES

SEQ ID NO: 62229 - protein, 380 aa, unidentified
  source 1..380: note = Vibrionimonas magnilacihabitans
  REGION 1..380: note = tr|A0A2S8SG31|A0A2S8SG31_9BACT Queuine tRNA-ribosyltransferase OS=Vibrionimonas magnilacihabitans; OX = 669455 GN=tgt PE=3 SV=1
MAALTFELQASGIAGSEARAGKIRTDHGEIITPIFMPVGTVGSVKAVTKQQLKDDVQAQIILGNTYHLYLRPGTGVLEAAGGLHRFNGWDRPILTDSGGYQVFSLAGNRKIKEEGVWFQSHIDGSRHLFSPESVMDIQRSIGADIMMAFDECQPYPSEYHYAKKSMELTHRWLDRCIQRLAETPDKYGYTQNLFPIVQGSTYKDLRDASCDYIASKNAVGNAIGGLSVGEPEDMMYEFTESCASRLPFNKPRYLMGVGTPWNILECIHRGIDLFDCVMPTRNGRNGMLFTTQGVVNIRNKKWATDFSPIDPGLPNEMSQYYTKAYLRHLFVSEELLGLQLASLQNLSFYLWLVGEARKHILGGDFVSWKNEMVQIVKQRL

SEQ ID NO: 62230 - protein, 376 aa, unidentified
  source 1..376: note = Vicingus serpentipes
  REGION 1..376: note = tr|A0A5C6RTV0|A0A5C6RTV0_9FLAO Queuine tRNA-ribosyltransferase OS=Vicingus serpentipes OX=1926625; GN = tgt PE=3 SV=1
MDFKLEKKDINSKARAGTITTAHGEIKTPIFMPVGTAGTVKGVHQHEIKDDIKAQIILGNTYHLYLRPKLDILKSAGGLHKFINWDKPILTDSGGYQVYSLSGRRKIKEEGATFSSHIDGSKHLFTPEYVMDIQRTIGADIIMAFDECTPYPCDYKYAKNSMHMTHRWLKRCCERFDSTEPLYGYDQTLFPIVQGSTYKDLRKQSAEKIASFEREGNAIGGLSVGEPDDEMYEMCEVVTNILPEDKPRYLMGVGTPINLLENIALGIDMFDCVMPTRNARNGMLFTSQGTINIKNKKWENDLSPIDPDGTSYVDSFYSKAYLRHLIISKEILGAQIATIHNLAFYLWLVTEAREQILAGTFYDWKAKMVKQLGQKL

SEQ ID NO: 62231 - protein, 360 aa, unidentified
  source 1..360: note = Victivallales bacterium
  REGION 1..360: note = tr|A0A2S0KWE4|A0A2S0KWE4_9BACT Queuine tRNA-ribosyltransferase OS=Victivallales bacterium CCUG 44730 OX=2094242 GN=tgt PE=3 SV=1
MFEVLSRCGNARRGVLTTRRGTVQTPVFMPVGTRASVKAMSPAELEELGAEIILGNTYHLFLRPGMELMAKAGGLHRFSSWKRSILTDSGGFQVFSLATLRKMEPDGVRFASHIDGTRFFLGPRESMAIQRTLDSDIVMAFDECTPYPATFEQAEKSLAVTTRWERMSREQPLNDGQIRFGIVQGSVYPELRKRAAESLVEIGFDGYAIGGVSVGESEPEMMLAVDAAAPHLPDNAPRYLMGVGTPRQIVESVARGVDMFDCVMPTRLGRHGSAFVGGGGTIPVKAGRYADDFTPIDPECSCYACRNFTRAYIRHLFNVGEILGVRLVTLHNLHYFLNLMRRIRASIENGTFEELRKEFQ

SEQ ID NO: 62232 - protein, 366 aa, Victivallis vadensis
  REGION 1..366: note = tr|A0A2U1AVW1|A0A2U1AVW1_9BACT Queuine tRNA-ribosyltransferase OS=Victivallis vadensis OX=172901; GN = tgt PE=3 SV=1
MPGIFELLKKDSASAARRGRLTTRRGVIETPVFMPVGTRATVKAMSPAELEELGAQIILGNTYHLFLRPGMEIIAAAGGLHRFENWNRSILTDSGGFQVFSLTGLRKMEPDGVRFASHIDGTRFFLGPVESMRIQRTLDSDIVMAFDECTPYPATRQQAEKSLAITTRWERMSREQPLNDGQIRFGIVQGSVFPDLREQAAKSIVGIGFDGYAIGGVSVGESEPEMMAAVDAAAPHLPENAPRYLMGVGTPRQIVESVARGVDMFDCVMPTRLARHGSAFIGNDTIPVKAGRYAKDFTPIDPQCTCYACRNFTKAYIRHLFNVGEILGVRLVTMHNLHYFINLMRRIRTSIEEGTFDLLRREFQAR

SEQ ID NO: 62233 - protein, 379 aa, Virgibacillus chiguensis
  REGION 1..379: note = tr|A0A1M5M6T5|A0A1M5M6T5_9BACI Queuine tRNA-ribosyltransferase OS=Virgibacillus chiguensis; OX = 411959 GN=tgt PE=3 SV=1
MTPITYELKKTCKQTGARLGRVHTPHGSFDTPTFMPVGTLATVKTMSPEELTEINANIILSNTYHLWLRPGEDIIKEAGGLHQFMNWDGAILTDSGGFQVFSLSENRHITEEGVHFRSHLNGEKLFLSPEKAIQIQNALGSDIMMALDECPPYPAEYDYMKSSVERTSRWAERCLKAHERTDEQGLFGIIQGGEYEALRKQSARDLISLDFPGYAIGGLSVGEPKDVMNRVLEFTTPLMPSNKPRYLMGVGSPDSLIDGAIRGVDMFDCVLPTRIARNGTCMTANGRLVVRNAKHARDFSPIDENCDCHVCKNYTRAYIRHLIKCNETFGFRLTTYHNLYFLLKLMEQVRKAISEDRLGSFREEFFEQYGFNKPNARNF

SEQ ID NO: 62234 - protein, 379 aa, Virgibacillus dokdonensis; identical to SEQ ID NO: 62233
  REGION 1..379: note = tr|A0A3E0WQP8|A0A3E0WQP8_9BACI Queuine tRNA-ribosyltransferase OS=Virgibacillus dokdonensis; OX = 302167 GN=tgt PE=3 SV=1

SEQ ID NO: 62235 - protein, 379 aa, Virgibacillus dokdonensis
  REGION 1..379: note = tr|A0A2K9J8N3|A0A2K9J8N3_9BACI Queuine tRNA-ribosyltransferase OS=Virgibacillus dokdonensis; OX = 302167 GN=tgt PE=3 SV=1
MTPITYELKKTCKQTGARLGRVHTPHGSFDTPTFMPVGTLATVKTMSPEELAEINANIILSNTYHLWLRPGEDIIKEAGGLHQFMNWNGAILTDSGGFQVFSLSENRHITEEGVHFRSHLNGEKLFLSPEKAIQIQNALGSDIMMALDECPPYPAEYQYMKSSVERTSRWAERCLKAHERKGEQGLFGIIQGGEYEALRKQSARDLISLDFPGYAIGGLSVGEPKDVMNRVLEFTTPFMPSHKPRYLMGVGSPDSLIDGAIRGVDMFDCVLPTRIARNGTCMTSNGRLVVRNAKYARDFAPIDKNCDCYVCKNYTRAYIRHLIKCNETFGFRLTTYHNLYFLLKLMEQVRKAISEDRLGSFREEFFEQYGFNKPNARNF

SEQ ID NO: 62236 - protein, 379 aa, Virgibacillus halodenitrificans
  REGION 1..379: note = tr|A0A1J0H0Y2|A0A1J0H0Y2_VIRHA Queuine tRNA-ribosyltransferase OS=Virgibacillus halodenitrificans; OX = 1482 GN=tgt PE=3 SV=1
MTPITYELIKTCKQTGARLGRVHTPHGSFDTPTFMPVGTLATVKTMSPEELKNINANIILSNTYHLWLRPGEDIVREAGGLHKFMNWDGAILTDSGGFQVFSLSDMREIKEEGVHFRNHLNGEKLFLSPEKAMHIQNALGSDIMMAFDECPPYPATYEYMKSSVERTSRWAERCLEAHGRPQDQGLFGIVQGGEYEDLRKQSARDLVSLDFPGYAIGGLSVGEPKDVMNRVLEFTTPVLPSDKPRYLMGVGSPDSLIDGAIRGIDMFDCVLPTRIARNGTCMTSKGRLVVRNAKYARDFGPLDENCDCHVCKKYSRAYIRHLIKCNETFGFRLTTYHNLYFLVKLMGQVRKAISDDRLGDFKEDFFEQYGLNKPNAKNF

SEQ ID NO: 62237 - protein, 379 aa, unidentified
  source 1..379: note = Virgibacillus indicus
  REGION 1..379: note = tr|A0A265NDJ2|A0A265NDJ2_9BACI Queuine tRNA-ribosyltransferase OS=Virgibacillus indicus; OX = 2024554 GN=tgt PE=3 SV=1
MTAITYELFKTCKQTGARLGRVHTPHGSFDTPTFMPVGTLATVKTMSPEDLKEMNANIILSNTYHLWLRPGEDIIKEAGGLHKFMNWDGAILTDSGGFQVFSLSDMRKIKEEGVHFRNHLSGEKLFLSPEKAMQIQNALGSDIMMAFDECPPYPATHEYMKASVERTSRWAERCLNAHERKDVQGLFGIIQGGEFEDLRKQSAEDLVSLDFPGYAVGGLSVGEPKDVMNHVLEFTTPLMPPNKPRYLMGVGSPDSLIDGAIRGIDMFDCVLPTRIARNGTCMTSNGRLVVRNAKYARDFGPIDENCDCHVCKNYSRAYIRHLIKCNETFGFRLTTYHNLHFLLKLMEQVRTAISEDRLGDFKDAFFEQYGLNQPNAKNF

SEQ ID NO: 62238 - protein, 379 aa, unidentified
  source 1..379: note = Virgibacillus massiliensis
  REGION 1..379: note = tr|A0A024QB24|A0A024QB24_9BACI Queuine tRNA-ribosyltransferase OS=Virgibacillus massiliensis; OX = 1462526 GN=tgt PE=3 SV=1
MTPITYELIKTCKQTGARLGRVHTPHGSFDTPVFMPVGTLATVKTMSPEELKEMNANIILSNTYHLWLRPGQDIIKEAGGLHRFMNWNGAILTDSGGFQVFSLSDMRDIKEEGVHFRNHLSGEKLFLSPEKAMSIQNDLGSDIMMAFDECPPYPAEHQYMKDSVERTSRWAERCLTAHQRKDDQGLFGIIQGGEYEDLRKQSASDLVSLDFPGYAIGGLSVGEPKAVMNKVLEFTTPLLPANKPRYLMGVGSPDSLIDGALRGVDMFDCVLPTRIARNGTCMTSNGRLVVRNAKYARDFTPIDENCDCHVCRNYTRAYIRHLIKCNETFGFRLTTYHNLHFLLKLMEQVRTAISEDRLGSFKEEFFEQYGFNKPNARNF

SEQ ID NO: 62239 - protein, 379 aa, Virgibacillus necropolis
  REGION 1..379: note = tr|A0A221MBY1|A0A221MBY1_9BACI Queuine tRNA-ribosyltransferase OS=Virgibacillus necropolis; OX = 163877 GN=tgt PE=3 SV=1
MTPITYELIKTCKQTGARLGKVHTPHGSFDTPMFMPVGTLATVKTMSPEELKEMEARIILSNTYHLWLRPGEDIIKEAGGLHRFMNWDRPILTDSGGFQVFSLSKIREIQEEGVHFRNHISGEKLFLSPEKAMQIQNALGSDIMMAFDECPPYPASFDYMKSSVERTSRWAERCLEAHQNPTTQGLFGIIQGGEYEELRKQSAKDLASLDLPGYAIGGLSVGEPKDIMNRMLEYTTPLMPSTKPRYLMGVGSPDSLIDGSIRGIDMFDCVLPTRIARNGTCMTSTGRLVVRNAKYARDFSPIDENCDCHVCKNYTRAYIRHLIKSKETFGFRLTTYHNLHFLLKLMEQVRTAISEDRLGDFKEAFFEQYGLNQPNAKNF

SEQ ID NO: 62240 - protein, 379 aa, Virgibacillus pantothenticus
  REGION 1..379: note = tr|A0A0L0QPY3|A0A0L0QPY3_VIRPA Queuine tRNA-ribosyltransferase OS=Virgibacillus pantothenticus; OX = 1473 GN=tgt PE=3 SV=1
MTPITYELKKTCKQTGARLGRVHTPHGSFDTPAFMPVGTLATVKTMSPEELTEMNANIILSNTYHLWLRPGQDIIKEAGGLHQFMNWDGAILTDSGGFQVFSLSEMRNITEEGVHFRSHLNGEKLFLSPEKAINIQNDLGSDIMMALDECPPYPADHAYMKSSVERTSRWAERCLHAHQRKDEQGLFGIIQGGEYEDLRKQSANDLISLDFPGYAIGGLSVGEPKDVMNRVLEFTTPLMPDDKPRYLMGVGSPDSLIDGAVRGVDMFDCVLPTRIARNGTCMTSNGRLVVRNAKYARDFSPIDENCDCHVCKNYTRAYIRHLIKCNETFGFRLTTYHNLYFLLKLMEQVRKAISEDRLGSFREEFFEQYGFNKPNARNF

SEQ ID NO: 62241 - protein, 379 aa, unidentified
  source 1..379: note = Virgibacillus phasianinus
  REGION 1..379: note = tr|A0A220U5U0|A0A220U5U0_9BACI Queuine tRNA-ribosyltransferase OS=Virgibacillus phasianinus; OX = 2017483 GN=tgt PE=3 SV=1
MTAITYELIKTCKQTGARLGKVHTPHGSFDTPMFMPVGTLATVKTMSPEELKEIDAKIILSNTYHLWLRPGSDIIKDAGGLHKFMNWDRPILTDSGGFQVFSLSKIRDIKEEGVHFRNHISGEKLFLSPEKAMQIQNDLGSDIMMAFDECPPYPASYDYMKASVERTSRWAERCLSAHQSPGNQGLFGIIQGGEYEDLRKQSAQDLASLDLPGYAIGGLSVGEPKNIMNRMLEYTTPLMPANKPRYLMGVGSPDSLIDGSIRGIDMFDCVLPTRIARNGTCMTSTGRLVVRNAKYARDFSPIDENCGCHVCKNYTRAYIRHLIKCNETFGFRLTTYHNLHFLLKLMEQVREAISEDRLGDFKEAFFEKYGFNQPNAKNF

SEQ ID NO: 62242 - protein, 379 aa, unidentified
  source 1..379: note = Virgibacillus profundi
  REGION 1..379: note = tr|A0A2A2IAB2|A0A2A2IAB2_9BACI Queuine tRNA-ribosyltransferase OS=Virgibacillus profundi; OX = 2024555 GN=tgt PE=3 SV=1
MTPITYEFIKTCKQTGARLGRVHTPHGSFDTPTFMPVGTLATVKTMSPEDLKEMNANIILSNTYHLWLRPGEDIIKEAGGLHKFMNWDRTILTDSGGFQVFSLSDMREIKEEGVHFRNHLNGAKLFLSPEKAMQIQNDLGSDIMMAFDECPPYPATYDYMKSSVERTSRWAERCLEAHERKDIQGLFGIIQGGEYEALRKQSAEDLVSMNFPGYAIGGLSVGEPKDIMNRVLEFTTPLLPSDKPRYLMGVGSPDSLIDGAIRGIDMFDCVLPTRIARNGTCMTSNGRLVVRNAKYARDFGPIDENCDCHVCKNYSRAYVRHLIKCNETFGFRLTTYHNLHFLLKLMEQVRTAISEDRLGDFKEAFFEQYGLNQPNAKNF

SEQ ID NO: 62243 - protein, 379 aa, Virgibacillus salinus
  REGION 1..379: note = tr|A0A1H1B4G3|A0A1H1B4G3_9BACI Queuine tRNA-ribosyltransferase OS=Virgibacillus salinus OX=553311; GN = tgt PE=3 SV=1
MTAITYEHIKTCKQTGARLGKVHTPHGSFDTPTFMPVGTLATVKTMSPEELQQMNANIILSNTYHLWLRPGEDIIREAGGLHKFMNWDGAILTDSGGFQVFSLSKMRDIKEEGVHFRSHLSGEKLFLSPEKAMEIQNALGSDIMMAFDECPPYPATHNYMKASVERTSRWAERCLNSHQRPSDQGLFGIIQGGEYEELRKQSAADLTSMDFPGYAIGGLSVGEPKDVMNRVLEFTTPLLPSNKPRYLMGVGSPDSLIDGAIRGIDMFDCVLPTRIARNGTCMTSNGRLVVRNAKYARDFSPIDENCDCHVCKNYSRAYIRHLVKCNETFGFRLTTYHNLFFLLKLMEQVRAAINDDRLGDFKEAFFEQYGLNQPNAKNF

SEQ ID NO: 62244 - protein, 379 aa, Virgibacillus soli; identical to SEQ ID NO: 52054
  REGION 1..379: note = tr|A0A0Q9XXK9|A0A0Q9XXK9_9BACI Queuine tRNA-ribosyltransferase OS=Virgibacillus soli OX=480284; GN = tgt PE=3 SV=1

SEQ ID NO: 62245 - protein, 379 aa, Virgibacillus sp.
  REGION 1..379: note = tr|A0A075JNP0|A0A075JNP0_9BACI Queuine tRNA-ribosyltransferase OS=Virgibacillus sp. SK37; OX = 403957 GN=tgt PE=3 SV=1
MTPITYELIKTCKQTGARLGRVHTPHGSFDTPTFMPVGTLATVKTMSPEELKNINANIILSNTYHLWLRPGEDIVREAGGLHKFMNWDGAILTDSGGFQVFSLSDMREIKEEGVHFRNHLNGEKLFLSPEKAMHIQNALGSDIMMAFDECPPYPATYDYMKSSVERTSRWAERCLEAHGRPQDQGLFGIVQGGEYEDLRKQSARDLISMDFPGYAIGGLSVGEPKDVMNRVLEFTTPVLPTNKPRYLMGVGSPDSLIDGAIRGIDMFDCVLPTRIARNGTCMTSKGRLVVRNAKYARDFSPIDENCDCHVCKNYSRAYIRHLIKCNETFGFRLTTYHNLYFLVKLMGQVRKAISDDRLGDFKEDFFEQYGLNKPNAKNF

SEQ ID NO: 62246 - protein, 378 aa, Virgibacillus sp.; identical to SEQ ID NO: 61575
  REGION 1..378: note = tr|A0A268I4T0|A0A268I4T0_9BACI Queuine tRNA-ribosyltransferase OS=Virgibacillus sp. 7505; OX = 2022548 GN=tgt PE=3 SV=1

SEQ ID NO: 62247 - protein, 380 aa, Viridibacillus arenosi
  REGION 1..380: note = tr|W4EQB5|W4EQB5_9BACL Queuine tRNA-ribosyltransferase OS=Viridibacillus arenosi FSL R5-213 OX=1227360 GN=tgt PE=3 SV=1
MSQAIRYELIKTDKQTGARLGIVHTPHGSFETPAFMPVGTQASVKTMSPEEVKDMGAGIILSNTYHLWLRPGHEIVREAGGLHKFMNWDRPILTDSGGFQVFSLSHIRKIEEEGVHFRNHLNGDKLFLSPEKAMEIQNALGADIMMAFDECPPFPATFEYMKASVERTSRWAERCLEAHARPQDQGLFGIVQGGEFEELRKQSAKDLVSMDFPGYAIGGLSVGEPKDIMNRMLEYTTPLLPAEKPRYLMGVGSPDSLIDGAIRGIDMFDCVLPTRIARNGTCMTSEGRLVIKNAKFARDFGPLDPNCDCYTCRNYSRAYIRHLLKAEETFGIRLTSYHNLYFLQDLMRNVRQAIREDRLGDFREEFFEAYGFNKPNAKNF

SEQ ID NO: 62248 - protein, 380 aa, Viridibacillus arvi
  REGION 1..380: note = tr|A0A0M0LNL0|A0A0M0LNL0_9BACL Queuine tRNA-ribosyltransferase OS=Viridibacillus arvi OX=263475; GN = tgt PE=3 SV=1
MSQAIRYELIKTDKQTGARLGIVHTPHGSFETPAFMPVGTQASVKTMSPEEVKDMGAGIILSNTYHLWLRPGHDIVREAGGLHKFMNWDRPILTDSGGFQVFSLSHIRKIEEEGVHFRNHLNGDKLFLSPEKAMEIQNALGADIMMAFDECPPFPATFEYMKASVERTSRWAERCLEAHARPHDQGLFGIVQGGEFEELRKQSAKDLVSMDFPGYAIGGLSVGEPKDIMNRMLEYTTPLLPAEKPRYLMGVGSPDSLIDGAIRGIDMFDCVLPTRIARNGTCMTSEGRLVIKNAKFARDFGPLDPNCDCYTCRNYSRAYIRHLLKAEETFGIRLTSYHNLYFLQDLMRNVRQAIREDRLGDFREEFFEAYGFNKPNAKNF

SEQ ID NO: 62249 - protein, 380 aa, Viridibacillus sp.
  REGION 1..380: note = tr|A0A2N0EXT9|A0A2N0EXT9_9BACL Queuine tRNA-ribosyltransferase OS=Viridibacillus sp. OK051; OX = 1884360 GN=tgt PE=3 SV=1
MSQAIRYELIKTDKQTGARLGIVHTPHGSFETPAFMPVGTQASVKTMSPEEVKDMGAGIILSNTYHLWLRPGHDIVREAGGLHKFMNWDRPILTDSGGFQVFSLSHIRKIEEEGVHFRNHLNGDKLFLSPEKAMEIQNALGADIMMAFDECPPFPATFEYMKASVERTSRWAERCLAAHARPQDQGLFGIVQGGEFEELRKQSAKDLVSMDFPGYAIGGLSVGEPKDIMNRMLEYTTPLLPSEKPRYLMGVGSPDSLIDGAIRGIDMFDCVLPTRIARNGTCMTSEGRLVIKNAKFARDFGPLDPNCDCYTCRNYSRAYIRHLLKAEETFGIRLTSYHNLYFLQDLMRNVRQAIREDRLGDFREEFFEAYGFNKPNAKNF

SEQ ID NO: 62250 - protein, 376 aa, unidentified
  source 1..376: note = Vitellibacter aquimaris
  REGION 1..376: note = tr|A0A137RFU3|A0A137RFU3_9FLAO Queuine tRNA-ribosyltransferase OS=Vitellibacter aquimaris; OX = 1548749 GN=tgt PE=3 SV=1
MHFKLEATDLQSSARAATITTDHGVIETPIFMPVGTVGTVKGVHQRELKQDINPDIILGNTYHLYLRPQTPVLEKAGGLHKFMNWDRNILTDSGGYQVYSLSANRKIKEEGVKFKSHIDGSYHVFTPENVMEIQRTIGADIIMAFDECTPYPCEYNYAKRSMHMTHRWLDRCIKHLEKTPLKYDYGQTFFPIVQGSTYKDLRRQSAEYIASVGAEGNAIGGLSVGEPADEMYEMTAVVTEILPKEKPRYLMGVGTPVNILENIALGIDMFDCVMPTRNGRNGMLFTSEGIINIKNKKWEADLSVIDPMGITWVDTDYSKAYLRHLFTVNEMLGRQIATIHNLGFYLWLVREARKHILAGDFAEWKTGMVKKLDQRL

SEQ ID NO: 62251 - protein, 394 aa, unidentified
  source 1..394: note = Vitiosangium sp.
  REGION 1..394: note = tr|A0A2T4V2V9|A0A2T4V2V9_9DELT Queuine tRNA-ribosyltransferase OS=Vitiosangium sp. GDMCC 1.1324; OX = 2138576 GN=tgt PE=3 SV=1
MGEPRKEKGDTRVPPSLVRYELLHEDASGTRARRGRLHTPHGQIETPIFMPVGTVGSVKGVGPDELLTIDAQIILGNTYHLMLRPGDDLVGEMGGLHRFISWNRPMLTDSGGFQVFSLAEKRKITEEGAAFQSHLDGRHILLTPERSIEIQETLGADIIMAFDECPPSTEDRAYMEKSLARTTRWLHRCVKAWSRERSSLFGIVQGGLNKDLRKAHAEEVCAVDLPGFALGGYSVGETPEAMHEGVAFSAPLLPRDKPRYLMGVGTPVDLVTCVEHGVDMFDCVLPTRCARNGLLFTSEGKVTIRNATYAKDPRPADPACSCYTCRNFSRSYLRHLFVAGEILAMRLNTLHNLHYFLDLMKQVRQAIAEDRYATFARDFREKARAQEAERTRPK

SEQ ID NO: 62252 - protein, 392 aa, unidentified
  source 1..392: note = Vitiosangium sp.
  REGION 1..392: note = tr|A0A2T4V332|A0A2T4V332_9DELT Queuine tRNA-ribosyltransferase OS=Vitiosangium sp. GDMCC 1.1324; OX = 2138576 GN=tgt PE=3 SV=1
MAVRFELVTTDPTGARAGVLHTRRGSIPTPVFMPVATHASFRHLGMEEVKATGSKILLSNTYHLMLKPGIDVFNRFGGIHPFMQWDGAVLTDSGGFQIFSLPEDRLITEKGAHFRSFHDNSRQLLSPESSIAMQQAINSEIMMVLDVCIDSRTDEAGTREAMERTHRWAVRSLAAKNKVDTGQALFAIVQGGVHPNLRDESAAFLTQHPFDGFAIGGLAVGETNEERKAMTARAAASLPQDKPRYLMGVGTPTDLLEAVLRGVDMFDCIIPTKMAQQGYAYTFQGLVRITRQVFRLSDEPLDPTCDCYVCKRYSRGYLQHLMSGKHHTGSRMLSVHNVHHYQQLTWKMRDAILQGSYAQAYRELKQLVATPKDLNDAKLAVGAGANTLKEVG

SEQ ID NO: 62253 - protein, 381 aa, Vitreoscilla filiformis
  REGION 1..381: note = tr|A0A221KCC7|A0A221KCC7_VITFI Queuine tRNA-ribosyltransferase OS=Vitreoscilla filiformis OX=63; GN = tgt PE=3 SV=1
MLHFDLLKTDGHARRGRLTLNHGVVETPIFMPVGTYGTVKGVLPQSLYDMGAQIILGNTFHLWMRPGLDVMASFGGLHGFENWTKPILTDSGGFQVWSLGEMRKISEEGVKFASPVNGDKLFLTPEVSMQIQTVLNSDIVMQFDECTPYETKGHLTTEKEARSSMELSRRWAQRCITEFERLQNPNALFGIVQGGMFEHLRQESLEALVEMDLPGYAIGGVSVGEPKEDMRRIMAHTPHRLPAHKPRYLMGVGTPEDLVEGVACGVDMFDCVMPTRNARNGHLFTRFGDLKIRNARHKSDHRPIDETCTCYACKGDGHSGGFSRAYLHHLDRCGEMLGPMLATIHNLHYYLNLMTEVRAALDAGTFQQFRQQFAADRARGV

SEQ ID NO: 62254 - protein, 370 aa, Vitreoscilla sp.
  REGION 1..370: note = tr|A0A2L0PJY7|A0A2L0PJY7_VITS1 Queuine tRNA-ribosyltransferase OS=Vitreoscilla sp. (strain C1); OX = 96942 GN=tgt PE=3 SV=1
MLKFELLKQDGLARRGRITLNHGTVETPVFQPVGTYGTVKAMTPKDLDDINAQIILGNTYHLWLRPGLDVIREFGGLHDFMGWQKPILTDSGGFQVFSLSDMRKLTEEGCTFKNPINGDKLFLSPEISMQIQTVLNSDIVMQLDECTPGDASAQAAQKSLQMSLRWAERSKNEFDRLNNPNALFGIVQGAMYEDLRDESLAGLNELDFDGVAIGGLSVGEAKENMYRILQHIGPQLPANKPHYLMGVGTPEDLIEGVANGVDMFDCVMPTRNARNGWLFTRFGDLKIKNAVHKLDKRPIDETCTCYTCRNFSRGYLHHLHRVGEILGAQLNTIHNLHYYQQLMQDVRDAIDAGQFAAFRVQFAAERARGV

SEQ ID NO: 62255 - protein, 371 aa, Vogesella indigofera
  REGION 1..371: note = tr|A0A495B588|A0A495B588_VOGIN Queuine tRNA-ribosyltransferase OS=Vogesella indigofera OX=45465; GN = tgt PE=3 SV=1
MLKFTLHKTSGGARRGTLELNHGKVETPVFQPVGTYGSVKAMSPHELHDIKAQIILGNTFHLWLRPGLDIIEKFGGLHQFIGWDKPILTDSGGFQVFSLGALNKITEEGVTFQSPVNGDKLFLSPEKSMEIQKVLNSDIVMIFDECTPGQVDHATAAKSMRMSLRWAERSRRAFDELKNPNALFGIVQGNLYKDLRQESLDGLMQIGFDGIAIGGLSVGEPKPEMYRMLTELKDMLPAEKPHYLMGVGTPEDLVHGVANGIDMFDCVMPTRNARNGWLFTQWGDLKIKNARYKDDKKPLDEQCECYACRHFSRAYLHHLHRTGEILGARLNTIHNLHYYQVLMQEMRDAIDADQFEDWKAGFHERRARGVN

SEQ ID NO: 62256 - protein, 371 aa, Vogesella sp.
  REGION 1..371: note = tr|A0A1C6LFS4|A0A1C6LFS4_9NEIS Queuine tRNA-ribosyltransferase OS=Vogesella sp. LIG4 OX=1192162; GN = tgt PE=3 SV=1
MLKFTVHKTSGGARRGTLELNHGTVETPVFQPVGTYGSVKAMSPHELTDIGAQIILGNTFHLWLRPGLEIIEQFGGLHDFIGWDKPILTDSGGFQVFSLGAMNKISEEGVTFQSPVNGDKLFLSPEKSMEIQKVLNSDIVMIFDECTPGQVDHATAAKSMRMSLRWAERSRRAFDELKNPNALFGIVQGNLYTDLRQESLDGLMNIGFDGIAIGGLSVGEPKPEMYRMLTELKDMLPAGKPHYLMGVGTPEDLVHGVANGIDMFDCVMPTRNARNGWIFTQWGDVKIKNARYKADKKPLDEHCGCYTCRHFSRAYLHHLHRTGEILGARLNTIHNLYYYQALMQEMRDAIEADQFEDWKAGFHQRRASGVN

SEQ ID NO: 62257 - protein, 371 aa, Vogesella sp.
  REGION 1..371: note = tr|A0A0J5GDV6|A0A0J5GDV6_9NEIS Queuine tRNA-ribosyltransferase OS=Vogesella sp. EB OX=1526735; GN = tgt PE=3 SV=1
MLKFTLHKTSGGARRGTLELNHGKVETPVFQPVGTYGSVKAMSPHELHDIKAQIILGNTFHLWLRPGLDIIEKFGGLHQFIGWDKPILTDSGGFQVFSLGALNKITEEGVTFQSPVNGDKLFLSPEKSMEIQKVLNSDIVMIFDECTPGQVDHATAAKSMRMSLRWAERSRRAFDELKNPNALFGIVQGNLYKDLRQESLDGLIQIGFDGIAIGGLSVGEPKPEMYRMLTELKDMLPAEKPHYLMGVGTPEDLVHGVANGIDMFDCVMPTRNARNGWLFTQWGDLKIKNARYKDDKKPLDEQCECYACRHFSRAYLHHLHRTGEILGARLNTIHNLHYYQVLMQEMRDAIDADRFEDWKAGFHERRARGVN

SEQ ID NO: 62258 - protein, 383 aa, Volucribacter psittacicida
  REGION 1..383: note = tr|A0A4R1FXR2|A0A4R1FXR2_9PAST Queuine tRNA-ribosyltransferase OS=Volucribacter psittacicida; OX = 203482 GN=tgt PE=3 SV=1
MQYQLDKTDGRARRGRLIFQRPQGEFTVETPAFMPVGTYGTVKGMTPEEVRATGAEILLGNTFHLWLRPGQEIMRKHGDLHDFMQWHRPILTDSGGFQVFSLGKLRKISEEGVQFQNPINGERIFLSPEKSMEIQYDLGSDIVMIFDECTPYPATFDYAKQSMEMSLRWAKRSRDRFDQLGNNNALFGIIQGGVYEELRKISVEGLIEIGFDGYAVGGLAVGEPKEDMHRILEYITPKIPADKPRYLMGVGKPEDLVEGVRRGIDMFDCVMPTRNARNGHLFVSDGIVKIRNAKYRDDTSPLDPECDCYTCQHYTKSYLYHLDKCGEILGARLNTIHNLRYYQRLMAQIRQAIEQQRFEQFVQEFYAKIGKPVPPLNQYHSAE

SEQ ID NO: 62259 - protein, 377 aa, Vulcanibacillus modesticaldus
  REGION 1..377: note = tr|A0A1D2YX14|A0A1D2YX14_9BACI Queuine tRNA-ribosyltransferase OS=Vulcanibacillus modesticaldus; OX = 337097 GN=tgt PE=3 SV=1
MSAIRYELIKKDKKTGARLGRLHTPHGVIETPIFMPVGTQATVKAMSPEELKDMNAQIILSNTYHLFIRPGHDLVKEAGGLHKFMNWDRPILTDSGGFQVFSLSDLRKITEEGVHFRNHLSGEKLFISPEKSIEIQNALGADIIMAFDECPPYPAEREYVKNSLERTTRWAERSLNAHSRPNEQALFGIVQGGMYRDLREQSAKELTSLDFPGYAVGGLSVGEPKELMYEVLEYTTPLLPENKPRYLMGVGDPESLFEGVIRGIDMFDCVLPTRIARNGTTMTSEGRVVIKNAQYARDFTPLDPNCGCYTCQNYSRAYIRHLLKADEIFGLRLTSYHNLYFLLDLMKNIRQAILEDRLLEYKEEFFEQYGINKLRSF

SEQ ID NO: 62260 - protein, 369 aa, unidentified
  source 1..369: note = Vulcaniibacterium tengchongense
  REGION 1..369: note = tr|A0A3N4VW60|A0A3N4VW60_9GAMM Queuine tRNA-ribosyltransferase OS=Vulcaniibacterium tengchongense; OX = 1273429 GN=tgt PE=3 SV=1
MSRMSFELLRTDGAARRGRLTFPRGTVETPAFMPVGTYGSVKGVLPAQVRELGAQMILGNTFHLFLRPGLDVIGDHGGLHGFARWDGPILTDSGGFQVFSLAHRRKITEQGVTFAAPTDGSKVFLGPEESMRIQKVLDSDVVMIFDECTPYPASEEVARKSMELSLRWAERSKRAHEGNDAALFGIVQGGVHHELRTRSAQGLKAIGFDGYAIGGLAVGEPEAERNAMLEHTCPQLPEDRPRYLMGVGRPEDLVEGVARGIDMFDCVMPTRNARNGHYFTAAGTVRVRNAKYERDLRPIEEGCDCVACAGGFSRAYLRHLDRCNEMLAPMLGTLHNLRYYQRLMAQMREAIAQGTFAAFRESFHAARRG

SEQ ID NO: 62261 - protein, 379 aa, unidentified
  source 1..379: note = Vulgatibacter incomptus
  REGION 1..379: note = tr|A0A0K1PB55|A0A0K1PB55_9DELT Queuine tRNA-ribosyltransferase OS=Vulgatibacter incomptus; OX = 1391653 GN=tgt PE=3 SV=1
MSLDFELLKVDPESAARRGRLRLPHGVVETPIFMPVGTAASVKAIAPDDLERIGAQIILGNTYHLFLRPGHELVRRHGGLHGFMTWPKPILTDSGGFQVYSLAAARKISEEGVVFRSHLDGSRKLLTPELSIEVQEALGADVIMAFDECPPAGSDRRYFEDSLARTTRWAKRCKDAWHPEGKSSLFGIVQGGLHPDLRRRHAEELAELDLPGYALGGYSVGEPIPSMYESVSTSAPNLPADKPRYLMGVGTPEDLVTCVGLGIDMFDCVLPTRTARNARLYTSEGIVNIKNARYADDPAPLDPACDCYTCKNFSRAYLRHLYAAQELLAYRLNSIHNLAFFLDLMARVRAAIEEGRYAAWSKAWLEERSLRLREQKERA

SEQ ID NO: 62262 - protein, 365 aa, Waddlia chondrophila
  REGION 1..365: note = tr|D6YTW9|D6YTW9_WADCW Queuine tRNA-ribosyltransferase OS=Waddlia chondrophila (strain ATCC VR-1470 / WSU 86-1044) OX=716544 GN=tgt PE=3 SV=1
MKFHLIKSDLESKARLGELETAHGKIPTPIFMPVGTRGAVKTITNQHLLEMDAKIILGNTYHLMLRPGMEIMKKAGGLHRLMNWDRPILTDSGGFQVFSLSSLNKVTEEGVYFQSHIDGSRHFLGPEESMEIQKAIGSDIVMAFDECSPYPASRDRIEKAMERTLRWEKRSRDYELGEHQALFAITQGGMFSDLREQSTKELAKIDFDGYAIGGLSVGEPAEMMYEMLDVSEPYLPKDKPRYLMGVGTPRNIIEAVMRGVDLFDCVLPTRNARNGTAFTWSGKVSIKAGKYAEDFTPLDPNLDCYTSQFSKAYIRHLLNVNEITGLSLVTMQNLSFYLDFMEKIRQAIQNETLSEFYANICEIYP

SEQ ID NO: 62263 - protein, 365 aa, Waddlia chondrophila; identical to SEQ ID NO: 62262
  REGION 1..365: note = tr|F8LE39|F8LE39_9BACT Queuine tRNA-ribosyltransferase OS=Waddlia chondrophila 2032/99; OX = 765953 GN=tgt PE=3 SV=1

SEQ ID NO: 62264 - protein, 257 aa, unidentified
  source 1..257: note = Waddliaceae bacterium
  REGION 1..257: note = tr|A0A2E3LUU9|A0A2E3LUU9_9BACT Queuine tRNA-ribosyltransferase (Fragment) OS=Waddliaceae bacterium OX=2026802 GN=tgt PE=3 SV=1
MGRLNFRVEKVAEGTRARLGSIETEHGTIQTPIFMPVGTRAAVKTVTNEQLKDIGAQIILGNTYHLMLKPGMEIMEKAGGLHRFMNWDRPILTDSGGFQVFSLSKLNKISEEGVRFRSHIDGKEFFLGPNESMSIQKTLGSDIVMAFDQCPPYPCGRSDLEQSLERTLSWAKICRDFTLQEHQNLFGIVQGGVHADLRKYCAEELCKLDFEGFAIGGVSVGEPVEEMYAAVDASIPFLPEEKPRYLMGVGTPRNIIE

SEQ ID NO: 62265 - protein, 113 aa, unidentified
  source 1..113: note = Waddliaceae bacterium
  REGION 1..113: note = tr|A0A2E3M140|A0A2E3M140_9BACT tRNA guanosine(34) transglycosylase Tgt (Fragment) OS=Waddliaceae bacterium; OX = 2026802 GN=tgt PE=4 SV=1
EAVRRGVDMFDCVMPTRNARNGTAFTWSGKVNIKAGRYAEDFSPLDPELDCYTSQFSKAYIRHLLNVDEITGLTLVTIQNLAFYLDFVKKLRQSIQNNTFDEFYLKVCNIYPN

SEQ ID NO: 62266 - protein, 376 aa, Weeksella virosa
  REGION 1..376: note = tr|F0NXH7|F0NXH7_WEEVC Queuine tRNA-ribosyltransferase OS=Weeksella virosa (strain ATCC 43766 / DSM 16922 / JCM 21250 / NBRC 16016 / NCTC 11634 / CL345/78) OX=865938GN=tgt PE=3 SV=1
MKFSIEQRDPLSKARAAVVTTDHGEIETPIFMPVGTVGTVKAVQQKELVSDINAQIILGNTYHLYLRPGTEILHKAGGLHQFMNWEKPILTDSGGFQVFSLASSRKKSENGVRFKSHIDGSYHLFTPEKSMEIQRYIGGDIIMAFDELTGIPAEYHDAKRAMNVTHRWLERCRVWLDNNPEFYKHKQTLFPIVQGNDFKDLRQESAKYISDFNAEGNAIGGLSVGEPEEVMYEMTDLVTDILPKEKPRYLMGVGTPWNILEGIALGVDMFDCVMPTRNARNGMLFTWNGVMNMKNAKWKDNFDALDENGTSFVDHYYSKAYVRHLFNAQEFLGKQIASLHNLAFYLDLVRVAREHLLAGDFTQWKNQIIPQLKTRL

SEQ ID NO: 62267 - protein, 381 aa, unidentified
  source 1..381: note = Weissella bombi
  REGION 1..381: note = tr|A0A1C4BUL1|A0A1C4BUL1_9LACT Queuine tRNA-ribosyltransferase OS=Weissella bombi OX=1505725; GN = tgt PE=3 SV=1
MSDYAVKYELLHVEKHTGARLGKITTPHGEVMTPMFMPVGTQATVKGVSPRELKEINSQFILSNTYHLWLRPGDELIAKAGGLHKFMNWDGPILTDSGGFQVWSLSDHNSITEDGVTFRNHLNGDKMFLSPEVAMRIQNNLGSDVMMQLDEAIPYFETYDYVKNSVERTSRWAERAQKAHKRPNDQALFGIVQGAGFRELRKQSAQDLVSLDLPGYAIGGLSVGESKAEMNRVLDFTVPFLPENKPRYLMGVAAPDSLIDASIRGIDMFDCVLPTRIGRKGTLLTSHGRVVIKNAKYKDDFSLIDPETEDYGSQHFTKAYLHHLFKTNELYGQTIASVHNLRYLLKLMEDVRQAIAEDRLLEFREETLSKYGYFEPNARLF

SEQ ID NO: 62268 - protein, 381 aa, Weissella cibaria
  REGION 1..381: note = tr|A0A2S1KSI1|A0A2S1KSI1_9LACT Queuine tRNA-ribosyltransferase OS=Weissella cibaria OX=137591; GN = tgt PE=3 SV=1
MTDYAVKYELLHVEKHTGARLGKITTPHGEVMTPMFMPVGTQATVKNVSPRELKEIKSQFILSNTYHLWVRPGDELIAEAGGLHKFMNWDGPILTDSGGFQVWSLSERNNIKEEGVTFRNHVNGEEMFLSPEVAMRIQNNLGSDVMMQLDEAIPYFETYDYVKNSVERTSRWAERALAAHRRPEDQALFGIVQGAGFRELRKQSASDLVSLDLPGYAVGGLSVGETKEEMNRVLDFTVPFLPENKPRYLMGVAAPDSLIDGAIRGIDMFDSVLPTRIARKGTLMTSKGRIVITNSKYKNDFSLIDPETEDYGSQNFTKAYLHHLFKADELYAQNIASVHNLRYLLKLMEDMRQAIAEDRLLEFREEVMENYGYKNPNARLF

SEQ ID NO: 62269 - protein, 381 aa, Weissella cibaria
  REGION 1..381: note = tr|A0A0D1K6C8|A0A0D1K6C8_9LACT Queuine tRNA-ribosyltransferase OS=Weissella cibaria OX=137591; GN = tgt PE=3 SV=1
MSDYAVKYELLHVEKHTGARLGKITTPHGEVMTPMFMPVGTQATVKNVSPRELKEIKSQFILSNTYHLWVRPGDELIAEAGGLHKFMNWDGPILTDSGGFQVWSLSERNNIKEEGVTFRNHVNGEEMFLSPEVAMRIQNNLGSDVMMQLDEAIPYFETYDYVKNSVERTSRWAERALAAHRRPEDQALFGIVQGAGFRELRKQSASDLVSLDLPGYAVGGLSVGETKEEMNRVLDFTVPFLPENKPRYLMGVAAPDSLIDGAIRGIDMFDSVLPTRIARKGTLMTSKGRIVITNSKYKNDFSLIDPETEDYGSQNFTKAYLHHLFKADELYAQNIASVHNLRYLLKLMEDMRQAIAEDRLLEFREEVMENYGYKNPNARLF

SEQ ID NO: 62270 - protein, 381 aa, Weissella confusa
  REGION 1..381: note = tr|A0A5E8F927|A0A5E8F927_WEICO Queuine tRNA-ribosyltransferase OS=Weissella confusa LBAE C39-2; OX = 1127131 GN=tgt PE=3 SV=1
MSDYAVKYELLHVEKHTGARLGKITTPHGEVMTPMFMPVGTQATVKNVSPRELKEIKSQFILSNTYHLWVRPGDELIAEAGGLHKFMNWDGPILTDSGGFQVWSLSERNNIKEEGVTFRNHVNGEEMFLSPEVAMRIQNNLGSDVMMQLDEAIPYFETYDYVKNSVERTSRWAERAMAAHRRPEDQALFGIVQGAGFRELRKQSARDLVSLDLPGYAVGGLSVGETKEEMNRVLDFTVPFLPENKPRYLMGVAAPDSLIDGAIRGIDMFDSVLPTRIARKGTLMTSKGRIVITNSKYKNDFSLIDPETEDYGSQNFTKAYLHHLFKADELYAQNIASVHNLRYLLKLMEDMRQAIAEDRLLEFREEVMANYGYNNANARLF

SEQ ID NO: 62271 - protein, 381 aa, Weissella confusa; identical to SEQ ID NO: 62270
  REGION 1..381: note = tr|A0A0R2FBF2|A0A0R2FBF2_WEICO Queuine tRNA-ribosyltransferase OS=Weissella confusa OX=1583; GN = tgt PE=3 SV=1

SEQ ID NO: 62272 - protein, 382 aa, Weissella halotolerans
  REGION 1..382: note = tr|A0A0R2GAE8|A0A0R2GAE8_9LACT Queuine tRNA-ribosyltransferase OS=Weissella halotolerans DSM 20190 OX=1123500 GN=tgt PE=3 SV=1
MAQTSAIKYELLHVEKHTGARLGKITTPHGEVMTPMFMPVGTQASVKNISPRELKEIHSQFILANTYHLWLRPGDDLIAQAGGLHKFMDWDGPILTDSGGFQVWSLSDHNQISEEGVTFRNHLDGRKMFLSPEVAMRIQNNLGSDIMMQLDEAIPYFESYDYVKNSVERTTRWAERALKAHKRPDDQALFGIVQGAGFKDLRKASADSLVALDLPGYAVGGLSVGESKPEMNRVLDFTVPWLPEDKPRYLMGVAAPDSLVDGVIRGIDMFDCVLPTRIGRNGTLMTKHGRIVITNAKYKNDFSPIDPDLDDYASTHFTKAYLHHLIKANELLGQNLASLHNLRYLLKLMEDMRQAIAEDRLLDFRAELMENYGYNKPNARLF

SEQ ID NO: 62273 - protein, 381 aa, Weissella hellenica
  REGION 1..381: note = tr|A0A4Y4G887|A0A4Y4G887_WEIHE Queuine tRNA-ribosyltransferase OS=Weissella hellenica OX=46256; GN = tgt PE=3 SV=1
MSDYAVKYELLHVEKHTGARLGKITTPHGEVMTPMFMPVGTQATVKGVSPRELKEINSQFILSNTYHLWLRPGDELIAQAGGLHKFMNWDGPILTDSGGFQVWSLSDHNHITEDGVTFRNHLNGDKMFLSPEVAMRIQNNLGSDVMMQLDEAIPYFETYDYVKNSVERTSRWAERAQIAHKRPDDQALFGIVQGAGFRELRKQSAQDLVSLDLPGYAIGGLSVGESKAEMNRVLDFTVPFLPSNKPRYLMGVAAPDSLIDASIRGIDMFDCVLPTRIGRKGTLLTSNGRIVIKNAKYKNDFSLIDPETEDYGSQHFTKAYLHHLFKTNELYGQTIASVHNLRYLLKLMEDMRQAIAEDRLLEFREETLSKYGYFEPNARLF

SEQ ID NO: 62274 - protein, 381 aa, Weissella hellenica
  REGION 1..381: note = tr|A0A5B8TVL7|A0A5B8TVL7_WEIHE Queuine tRNA-ribosyltransferase OS=Weissella hellenica OX=46256; GN = tgt PE=3 SV=1
MSDYAVKYELLHVEKHTGARLGKITTPHGEVMTPMFMPVGTQATVKGVSPRELKEINSQFILSNTYHLWLRPGDELIAQAGGLHKFMNWDGPILTDSGGFQVWSLSDHNHITEDGVTFRNHLNGDEMFLSPEVAMRIQNNLGSDVMMQLDEAIPYFETYDYVKNSVERTSRWAERAQIAHRRPEDQALFGIVQGAGFRELRKQSAQDLVSLDLPGYAIGGLSVGESKAEMNRVLDFTVPFLPSNKPRYLMGVAAPDSLIDASIRGIDMFDCVLPTRIGRKGTLLTSNGRVVIKNAKYKNDFSLIDSETEDYGSQHFTKAYLHHLFKTNELYGQTIASVHNLRYLLKLMEDMRQAIAEDRLLEFREETLSKYGYFEPNARLF

SEQ ID NO: 62275 - protein, 381 aa, unidentified
  source 1..381: note = Weissella jogaejeotgali
  REGION 1..381: note = tr|A0A1L6RC32|A0A1L6RC32_9LACT Queuine tRNA-ribosyltransferase OS=Weissella jogaejeotgali; OX = 1631871 GN=tgt PE=3 SV=1
MSDYAVKYELLHVEKHTGARLGKITTPHGEVMTPMFMPVGTQATVKGVSPRELKEINSQFILSNTYHLWLRPGDELIAKAGGLHKFMNWDGPILTDSGGFQVWSLSDHNHITEDGVTFRNHLNGDEMFLSPEVAMRIQNNLGSDVMMQLDEAIPYFETYDYVKNSVERTSRWAERAQKAHKREQDQALFGIVQGAGFRELRKQSAQDLVSLDLPGYAIGGLSVGESKPEMNRVLDFTVPFLPENKPRYLMGVAAPDSLIDAAIRGIDMFDCVLPTRIGRKGTLMTSNGRIVIKNAKYKDDFSLIDPETEDYGSQHFTKAYLHHLFKTNELYGQTIASVHNLRYLLKLMEDVRQAIAEDRLLEFREETLRKYGYFEPNARLF

SEQ ID NO: 62276 - protein, 404 aa, Weissella kandleri
  REGION 1..404: note = tr|A0A0R2JCL6|A0A0R2JCL6_9LACT Queuine tRNA-ribosyltransferase OS=Weissella kandleri OX=1616; GN = tgt PE=3 SV=1
MQQYSKFDQFLMEKYPLKEEYLNDPDRPVIYELLHVEKHTGARLGRIYTRHGIVHTPMFMPVGTQASVKNVSPRDLEAINTQFILSNTYHLWVRPGDDLIAKAGGLHKFMQWNGPILTDSGGFQVWSLAKNNKISEEGVDFKNHVDGASMFLSPEVAMRIQNNLGSDVMMQLDEAIPYFETYDYVKNSVERTTRWAKRAKIAHARPNDQALFGIIQGAGFKDLRRLSAEGLVDLDLPGYAVGGLSVGESKEEMNRVLDFTVDWMPADKPRYLMGVAAPDSLIDSAIRGIDMFDCVLPTRIARNGSLMTKNGRIVITNGRYKDDFSLIDADTEDYGSQNFTKAYLHHLFKANELLGQNIASVHNLRYLLKLMEEMREAIYNDELIEFREQVLEDYGYNKPNARLF

SEQ ID NO: 62277 - protein, 404 aa, Weissella koreensis
  REGION 1..404: note = tr|F8HYT2|F8HYT2_WEIKK Queuine tRNA-ribosyltransferase OS=Weissella koreensis (strain KACC 15510) OX=1045854 GN=tgt PE=3 SV=1
MRQYSEFDQFLMEKYPLKEELMNDPKRPVVYELLHVEKHTGARLGRIYTRHGVVHTPMFMPVGTQASVKNVSPRDLEDINSQFILSNTYHLWVRPGDELIAKAGGLHKFMQWNGPILTDSGGFQVWSLSKNNKISEKGVDFKNHVDGSQMFLSPEVAMSIQNNLGSDVMMQLDEAIPYFETYDYVKNSVERTTRWAKRAKEAHNRPNDQALFGIIQGAGFKDLRKLSADGLIDLDLPGYAVGGLSVGESKEEMNRVLDFTVDWMPADKPRYLMGVAAPDSLIDSAIRGIDMFDCVLPTRIARNGSLMTKHGRIVITNSKYKDDFSLIDEDTEDYGSNTFTKAYLHHLFKANELYGQNIASVHNLRYLLKLMEEMREAIYHDELLDFRAQVLEDYGYNQPNARLF

SEQ ID NO: 62278 - protein, 404 aa, Weissella koreensis; identical to SEQ ID NO: 62277
  REGION 1..404: note = tr|J1GN31|J1GN31_9LACT Queuine tRNA-ribosyltransferase OS=Weissella koreensis KCTC 3621; OX = 1123721 GN=tgt PE=3 SV=1

SEQ ID NO: 62279 - protein, 382 aa, Weissella minor
  REGION 1..382: note = tr|A0A0R2JTD2|A0A0R2JTD2_9LACT Queuine tRNA-ribosyltransferase OS=Weissella minor OX=1620 GN=tgt; PE = 3 SV=1
MTDDYAVKYELLHVEKHTGARLGKITTPHGEVMTPMFMPVGTQASVKNVSPRELHEINSQFILSNTYHLWLRPGDDLIAEAGGLHKFMDWDGPILTDSGGFQVWSLSDHNSISEEGVTFRNHLNGEKMFLSPEVAMRIQNNLGSDVMMQLDEAIPYFESYDYVKNSVERTSRWAERAIAAHKRPEDQALFGIVQGAGFKQLRKQSAEDLVSLDLPGYAVGGLSVGESKEEMNRVLDFTVPWLPENKPRYLMGVAAPDSLVDGVMRGIDMFDCVLPTRIGRNGTLMTKYGRIVITNSKYKNDFSPIDPDLDDYGSTHFTKAYLHHLFKSNELLGQNIASVHNLRYLLKLMEDMREAIAEDRLLEFRAELMENYGYNKENARLF

SEQ ID NO: 62280 - protein, 403 aa, unidentified
  source 1..403: note = Weissella oryzae
  REGION 1..403: note = tr|A0A069CS98|A0A069CS98_WEIOS Queuine tRNA-ribosyltransferase OS=Weissella oryzae (strain DSM 25784 / JCM 18191 / SG25) OX=1329250 GN=tgt PE=3 SV=1
MKRSKFDEYLLEKYPINEAYVNDPNRPVIYELLHVEKDTGARLGRIYTRHGIVHTPMFMPVGTQATVKNVSPRDLDEINAQFVLSNTYHLWLRPGDDIVAAAGGLHKFMNYNGPMLTDSGGFQVWSLAKHNSIAEEGVTFKNHLNGDQMFLSPEVAMRIQNNLGSDVMMQLDEAIPYFESYDYVKNSVERTTRWAERAKIAHKRPQDQALFGIIQGAGFKELRKLSAEGLVALDLPGYAVGGLSVGETKEEMNRVLDFTMPMLPADKPRYLMGVAAPDSLIDGAIRGVDMFDSVLPTRIGRKGTLMTSHGRIVIRNHKYQNDFSLIDPETEDYGSQTFSKAYLHHLFKTNELYGQNIASVHNLRYLLKLMEDMRQAIDEDRLLAFRADLMEKYGYNKANARLF

SEQ ID NO: 62281 - protein, 381 aa, Weissella paramesenteroides
  REGION 1..381: note = tr|C5RD22|C5RD22_WEIPA Queuine tRNA-ribosyltransferase OS=Weissella paramesenteroides ATCC 33313 OX=585506 GN=tgt PE=3 SV=1
MSDYAVKYELLHVEKHTGARLGKITTPHGEVMTPMFMPVGTQATVKGVSPRELKEIKSQFILSNTYHLWLRPGDELIAQAGGLHKFMNWDGPILTDSGGFQVWSLSDHNHITEEGVTFRNHLNGDEMFLSPEVAMRIQNNLGSDVMMQLDEAIPYFETYDYVKNSVERTSRWAERAQKAHKREQDQALFGIVQGAGFKELRKQSAQDLVSLDLPGYAIGGLSVGESKPEMNRVLDFTVPFLPEHKPRYLMGVAAPDSLIDAVIRGIDMFDCVLPTRIGRKGTLMTSNGRVVIKNAKYKDDFSLIDPETEDYGSQHFTKAYLHHLFKTNELYGQTIASVHNLRYLLKLMEDMRQAIAGDRLLEFREETLRKYGYFEPNARLF

SEQ ID NO: 62282 - protein, 381 aa, Weissella paramesenteroides
  REGION 1..381: note = tr|A0A4Q7ITE7|A0A4Q7ITE7_WEIPA Queuine tRNA-ribosyltransferase OS=Weissella paramesenteroides; OX = 1249 GN=tgt PE=3 SV=1
MSDYAVKYELLHVEKHTGARLGKITTPHGEVMTPMFMPVGTQATVKGVSPRELKEIKSQFILSNTYHLWLRPGDELIAQAGGLHKFMNWDGPILTDSGGFQVWSLSDHNHITEEGVTFRNHLNGDEMFLSPEVAMRIQNNLGSDVMMQLDEAIPYFETYDYVKNSVERTSRWAERAQKAHKREQDQALFGIVQGAGFKELRKQSAQDLVSLDLPGYAIGGLSVGESKPEMNRVLDFTVPFLPENKPRYLMGVAAPDSLIDAAIRGIDMFDCVLPTRIGRKGTLMTSNGRVVIKNAKYKDDFSLIDSETEDYGSQHFTKAYLHHLFKTNELYGQTIASVHNLRYLLKLMEDMRQAIAEDRLLEFREETLRKYGYFEPNARLF

SEQ ID NO: 62283 - protein, 404 aa, Weissella soli
  REGION 1..404: note = tr|A0A288QW75|A0A288QW75_9LACT Queuine tRNA-ribosyltransferase OS=Weissella soli OX=155866 GN=tgt; PE = 3 SV=1
MRQFSEFDRYLLEKFPIKEEYLNDPDRPLIYELLHVEKHTGTRLGRIYTRHGIVHTPMFMPVGTQASVKNVSPRDLEEINAQFILSNTYHLWVRPGDDLIAEAGGLHKFMQWDGPILTDSGGFQVWSLSKNNKISEEGVTFKNHVDGAEMFLSPEVAMRIQNNLGSDIMMQLDEAIPYFESYEYVQNSVERTTRWAERAKAAHARPKDQSLFGIVQGAGFKELRKLSAEGLVALDLPGYAVGGLSVGESKEEMNRVLDFTMPLLPADKPRYLMGVAAPDSLFDSAMRGIDMFDSVLPTRIGRNGTLMTDNGRIVITNGKFARDFSLIDEHTDDFGSQHFTKAYLHHLFKANELYAQNIASVHNLRYLLKLMEDMRKSILEDNFLEFRAEVLEKYGYNKPNARLF

SEQ ID NO: 62284 - protein, 404 aa, Weissella soli
  REGION 1..404: note = tr|A0A5B8SPX8|A0A5B8SPX8_9LACT Queuine tRNA-ribosyltransferase OS=Weissella soli OX=155866 GN=tgt; PE = 3 SV=1
MRQFSEFDRYLLEKFPIKEEYLNDPDRPLIYELLHVEKHTGTRLGRIYTRHGIVHTPMFMPVGTQASVKNVSPRDLEEINAQFILSNTYHLWVRPGDDLIAEAGGLHKFMQWDGPILTDSGGFQVWSLSKNNKISEEGVTFKNHVDGAEMFLSPEVAMRIQNNLGSDIMMQLDEAIPYFESYEYVQNSVERTTRWAERAKVAHARPKDQSLFGIVQGAGFKDLRELSAEGLVALDLPGYAVGGLSVGESKEEMNRVLDFTMPLLPADKPRYLMGVAAPDSLFDSAMRGIDMFDSVLPTRIGRNGTLMTDNGRIVITNGKFARDFSLIDEHTDDFGSQHFTKAYLHHLFKANELYAQNIASVHNLRYLLKLMEDMRKSILEDNFLEFRAEVLEKYGYNKPNARLF

SEQ ID NO: 62285 - protein, 381 aa, Weissella sp.; identical to SEQ ID NO: 62269
  REGION 1..381: note = tr|A0A139QJS7|A0A139QJS7_9LACT Queuine tRNA-ribosyltransferase OS=Weissella sp. DD23 OX=1777865; GN = tgt PE=3 SV=1

SEQ ID NO: 62286 - protein, 381 aa, Weissella sp.
  REGION 1..381: note = tr|A0A4P6YVG2|A0A4P6YVG2_9LACT Queuine tRNA-ribosyltransferase OS=Weissella sp. 26KH-42; OX = 2506420 GN=tgt PE=3 SV=1
MTEPAIKYRLIHEDKHTGARLGEIITPHGTYPTPMFMPVGTQASVKNISTRELKEMGAEFILGNTYHLWLRPGDELIAEAGGLHKFMNWDQPILTDSGGFQVFSLAGNRSIKEEGVTFKNHLNGDTMFLSPEKAMSIENNLGSDVMMSLDEAIPYFETYDYVKNSVERTSRWAERGLNAHRRPEDQGLFGIVQGAGFKSLRKQSAADLVSMDFPGYAVGGLSVGESKVEMNRVLDFTTPLLPADKPRYLMGVGSADSLIDGAMRGIDMFDCVLPTRIARKGTLMTHHGRLVVKNGKYKADFRPIDDECDCYVCQNYTRAYLRHLFNANELHGQNLASYHNLYFLLKMMEDLRTAIANDQVLEFREMVFAQYGFDQVNARNF

SEQ ID NO: 62287 - protein, 381 aa, Weissella thailandensis
  REGION 1..381: note = tr|A0A512PW70|A0A512PW70_9LACT Queuine tRNA-ribosyltransferase OS=Weissella thailandensis; OX = 89061 GN=tgt PE=3 SV=1
MSDYAVKYELLHVEKHTGARLGKITTPHGEVMTPMFMPVGTQATVKGVSPRELKEINSQFILSNTYHLWLRPGDELIARAGGLHKFMNWDGPILTDSGGFQVWSLSDHNHITEDGVTFRNHLNGDEMFLSPEVAMRIQNNLGSDVMMQLDEAIPYFETYDYVKNSVERTSRWAERAQKAHKREQDQALFGIVQGAGFRELRKQSAQDLVSLDLPGYAIGGLSVGESKPEMNRVLDFTVPFLPENKPRYLMGVAAPDSLIDAAIRGIDMFDCVLPTRIGRKGTLMTSNGRIVIKNAKYKDDFSLIDPETEDYGSQHFTKAYLHHLFKTNELYGQTIASVHNLRYLLKLMEDVRQAIAEDRLLEFREETLRKYGYFEPNARLF

SEQ ID NO: 62288 - protein, 381 aa, Weissella thailandensis; identical to SEQ ID NO: 62275
  REGION 1..381: note = tr|G0UF51|G0UF51_9LACT Queuine tRNA-ribosyltransferase OS=Weissella thailandensis fsh4-2; OX = 1056112 GN=tgt PE=3 SV=1

SEQ ID NO: 62289 - protein, 382 aa, Weissella viridescens
  REGION 1..382: note = tr|A0A0R2H275|A0A0R2H275_WEIVI Queuine tRNA-ribosyltransferase OS=Weissella viridescens OX=1629; GN = tgt PE=3 SV=1
MAEDYAVKYELLHVEKHTGARLGKITTPHGEVMTPMFMPVGTQATVKNVSTRELREIHSQFILANTYHLWLRPGDELIAQAGGLHKFMDWDGPILTDSGGFQVWSLSQHNKISEEGVTFRNHLNGEKMFLSPEVAMRIQNNLGSDVMMQLDEAIPYFETYDYVKNSVERTSRWAERAMAAHKRPEDQALFGIVQGAGFKQLRKQSANDLVSLDLPGYAVGGLSVGESKEEMNRVLDFTVPWLPENKPRYLMGVAAPDSLVDGVMRGIDMFDCVLPTRIGRNGTLMTKHGRVVITNAKYKNDFSPIDLDLDDYGSTHYTKAYLHHLFNANELLGQNIASVHNLRYLLKLMEDMRQAIAEDRLLDFRAELMENYGYNKKNARLF

SEQ ID NO: 62290 - protein, 198 aa, Weissella viridescens
  REGION 1..198: note = tr|A0A380P0Q0|A0A380P0Q0_WEIVI Queuine tRNA-ribosyltransferase OS=Weissella viridescens OX=1629; GN = tgt_1 PE=4 SV=1
MTPMFMPVGTQATVKNVSTRELREIHSQFILANTYHLWLRPGDELIAQAGGLHKFMDWDGPILTDSGGFQVWSLSQHNKISEEGVTFRNHLNGEKMFLSPEVAMRIQNNLGSDVMMQLDEAIPYFETYDYVKIQLNVHHVGLNEPWRHTSDLKIKRYLVLCKEQDLSNCVSNLLMIWFLWICRDMRLVDYQLVSLRKK

SEQ ID NO: 62291 - protein, 376 aa, Wenxinia marina
  REGION 1..376: note = tr|A0A0D0PBD5|A0A0D0PBD5_9RHOB Queuine tRNA-ribosyltransferase OS=Wenxinia marina DSM 24838; OX = 1123501 GN=tgt PE=3 SV=1
MTDRFSFALHATDGAARTGAISTPRGTIRTPAFMPVGTAATVKAMLPDSVAATGADILLGNTYHLMLRPGAERVARLGGLHSFMNWDRPILTDSGGFQVMSLADLRRLTEEGVTFRSHVDGSKHFLSPETSMEIQRLLGSDIVMAFDECPALPADEARVAESMRLSMRWAERSKAAFGDRPGHALFGIQQGGVTRELRQESAEALTRIGFDGYAVGGLAVGEGQEAMFGVLDYAPGMLPADRPRYLMGVGKPDDIVGAVKRGIDMMDCVLPSRSGRTGQAWTRRGQVNLRNARHADDPRPLDEACTCPACRGYSRAYLHHVVRAKEMIAGMLLTWHNLHYYQELMAGMRDAIAAGRFAAFEAEFHAARAAGDIEPV

SEQ ID NO: 62292 - protein, 376 aa, unidentified
  source 1..376: note = Wenxinia saemankumensis
  REGION 1..376: note = tr|A0A1M5ZZ43|A0A1M5ZZ43_9RHOB Queuine tRNA-ribosyltransferase OS=Wenxinia saemankumensis; OX = 1447782 GN=tgt PE=3 SV=1
MTDRFSFALHATDGAARTGLISTPRGGIRTPAFMPVGTAATVKAMLPGSVRQTGADILLGNTYHLMLRPGAERVARLGGLHRFMNWDRPILTDSGGFQVMSLASLRKLTEEGVTFASHIDGSKHMLSPETSMEIQRLLGSDIVMAFDECPALPADRARIEESMRLSMRWAQRSRDAFGDRPGHALFGIQQGGLEPDLREESAEALTGIGFDGYAIGGLAVGEGQEAMFACLDHAPGALPVDKPRYLMGVGKPDDIVGAVKRGVDMMDCVLPSRSGRTGQAWTRRGQVNLRNARHADDPRPLDAACTCPACTGYSRAYLHHVVRAGEMIAGMLLTWHNLHYYQELMGGMRDAIAAGRFAAWEAGFHAARAEGDIERL

SEQ ID NO: 62293 - protein, 376 aa, unidentified
  source 1..376: note = Wenyingzhuangia fucanilytica
  REGION 1..376: note = tr|A0A1B1Y784|A0A1B1Y784_9FLAO Queuine tRNA-ribosyltransferase OS=Wenyingzhuangia fucanilytica; OX = 1790137 GN=tgt PE=3 SV=1
MKFKIEALDPQSKARAGEVTTDHGVIETPIFMPVGTMGTVKGVHQRELKEEINPDIILGNTYHLYLRPKTDVLEAAGGLHKFMNWDRPILTDSGGYQVYSLSGRRKIKEEGVKFKSHIDGSYHFFSPENVMEIQRKIGADIIMAFDECTPYPCDYNYAKRSMHMTHRWLNRCINHLEKVPYRYDYAQTFFPIVQGSTYTDLRKQSAEYIANAGAEGNAIGGLSVGEPAEEMYAMTDVVCSILPEDKPRYLMGVGTPINILENIALGVDMFDCVMPTRNARNGMLFTSEGHINIKNKKWENDFSPVDPAGITWVDTEYSKAYLRHLFVSNEFLGKQIATIHNLGFYLWLVREARKHIIAGDFREWKDKMVKQMDNRL

SEQ ID NO: 62294 - protein, 376 aa, unidentified
  source 1..376: note = Wenyingzhuangia marina
  REGION 1..376: note = tr|A0A1M5S437|A0A1M5S437_9FLAO Queuine tRNA-ribosyltransferase OS=Wenyingzhuangia marina; OX = 1195760 GN=tgt PE=3 SV=1
MKFKIEALDPKSKARAGEITTDHGVIETPIFMPVGTMGTVKGVHQRELKEEINPDIILGNTYHLYLRPKTDVLEAAGGLHKFMNWDRPILTDSGGYQVYSLSGRRKIKEEGVKFKSHIDGSYHFFSPENVMEIQRKIGADIIMAFDECTPYPCDYNYAKRSMHMTHRWLNRCIDHLEKVPYRYDYAQTFFPIVQGSTYTDLRKQSAEYIANAGAEGNAIGGLSVGEPAEEMYAMTDVVCSILPEDKPRYLMGVGTPINILENIALGVDMFDCVMPTRNARNGMLFTSEGHINIKNKKWENDFSPVDPAGITWVDTEYSKAYLRHLFVSNEFLGKQIATIHNLGFYLWLVREARKHIIAGDFREWKDKMVKQMDNRL

SEQ ID NO: 62295 - protein, 368 aa, unidentified
  source 1..368: note = Wenzhouxiangella marina
  REGION 1..368: note = tr|A0A0K0XY05|A0A0K0XY05_9GAMM Queuine tRNA-ribosyltransferase OS=Wenzhouxiangella marina; OX = 1579979 GN=tgt PE=3 SV=1
MQFSLLATDGQARRGRLQFDRGSVETPAFMPVGTYGTVKAMTPEELRELGAEIILGNTFHLMLRPGTEVISAHGDLHDFMGWSGPILTDSGGFQVWSLADLRKMDERGVTFASPVDGSRVFLGPEESMAVQRALGSDIVMIFDECTPWPATHEQAAESMRRSLRWAERSKQAHGDSDSALFGIVQGGMYEDLRVESASGLIGIGFDGYAIGGLSVGEPEEDRNRVLEATCPALPDDRPRYLMGVGRPEDILEAVLRGVDMFDCVMPTRNARNGHLFTRRGVLKIRNARYERDTRPIDEDCQCYTCRHYSRAYVKHLQKCNEILGHRLATIHNLHYYQDLMKAIRSAIEAGELQALAVSLRADWQAGIP

SEQ ID NO: 62296 - protein, 368 aa, unidentified
  source 1..368: note = Wenzhouxiangella sediminis
  REGION 1..368: note = tr|A0A3E1KBN4|A0A3E1KBN4_9GAMM Queuine tRNA-ribosyltransferase OS=Wenzhouxiangella sediminis; OX = 1792836 GN=tgt PE=3 SV=1
MEFDLLATDGGARRGRLTFGRGTVETPAFMPVGTYGTVKAMTPEELREIGAEIVLGNTFHLMLRPGTEVIAAHGDLHDFMGWDGPILTDSGGFQVFSLADLRKMTEEGVTFASPVDGSKVFLGPEDSMAVQRALGSDIVMIFDECTPYPASEQEARDSMERSLRWAERSRRAHGDNPAALFGIVQGGMYPPLRRRSVEGLLDIGFDGYAIGGLSVGESESERESILEATCPLLPADRPRYLMGVGRPEDLVAAVARGVDMFDCVMPTRNARNGYLFTSRGIVKIRNARHERDTGPVDPDCDCYTCRRFSRAYLKHLNKCNEILGHRLATIHNLHYYQSLMRQMRQAIEAGNFEQLARSLADGWSARDP

SEQ ID NO: 62297 - protein, 368 aa, unidentified
  source 1..368: note = Wenzhouxiangella sp.
  REGION 1..368: note = tr|A0A372BVY2|A0A372BVY2_9GAMM Queuine tRNA-ribosyltransferase OS=Wenzhouxiangella sp. 15181; OX = 2301224 GN=tgt PE=3 SV=1
MRFELLGADGEARRGRLTFERGTVETPAFMPVGTYGTVKAMTPEELRGIGAEIILGNTFHLMLRPGTDVIAAHGDLHDFMGWDGPILTDSGGFQVFSLAELRKMDEKGVTFASPVDGSKVFLGPEESMTVQRALGSDIVMIFDECTPYPATEQQARDSMERSLRWAERSKQAHADNPAALFGIVQGGMYPDLRRRSVEGLREIGFDGYAIGGLSVGESEGERESILSTTCPLLPRDVPRYLMGVGRPQDLVAAVARGIDMFDCVMPTRNARNGHLFTSRGVIKIRNARHARDTGPVDPDCDCYTCSRFSRAYLKHLNKCNEILGHRLATIHNLYYYQSLMRRMREAIEAGRFDELATELEAGWSGEYS

SEQ ID NO: 62298 - protein, 364 aa, unidentified; identical to SEQ ID NO: 57410
  source 1..364: note = Westiellopsis prolifica
  REGION 1..364: note = tr|A0A4Q9JFM2|A0A4Q9JFM2_9CYAN Queuine tRNA-ribosyltransferase OS=Westiellopsis prolifica IICB1; OX = 1970206 GN=tgt PE=3 SV=1

SEQ ID NO: 62299 - protein, 420 aa, Williamsia limnetica
  REGION 1..420: note = tr|A0A318RNS2|A0A318RNS2_9NOCA Queuine tRNA-ribosyltransferase OS=Williamsia limnetica OX=882452; GN = tgt PE=3 SV=1
MSDTDQGPDRTFTVGTSLSGTLGRTGVISTPHGQINTPAFVPVGTKATVKTVVPEAVRDLGAQAVLANAYHLYLQPGPDIIDEAGGLGKFMNWPGPTYTDSGGFQVMSLGAGFKKVIAMDVTGMQNDEVIAEGKERLARVDDDGVTFKSHLDGSTHRFTPEISMQIQHQLGADIIFGFDELTTLMNTRAYQETSLERTRLWAIRCLAEHNRLTAARAHRPVQSLWGVIQGAQYEDLRRKAARDLRAMSDIDVAEGGRGFGGYGIGGALEKQNLGTIVRWVNEELPEDKARHLLGISEPDDIFTAIESGIDTFDCVSPSRVARNGAIYSLDGRYNVTNSRFRRDFRPLDPEMDNYTTQYTRAYIHHLFKAKEGLAATLCTIHNEHFIVTLVERARQAIIDGTYYEYRDEFLRRYYAGAEKA

SEQ ID NO: 62300 - protein, 420 aa, Williamsia marianensis
  REGION 1..420: note = tr|A0A315TCD9|A0A315TCD9_9NOCA Queuine tRNA-ribosyltransferase OS=Williamsia marianensis; OX = 322609 GN=tgt PE=3 SV=1
MNDPQQGPDRSFTLGTSLAGTLGRTGTINTPHGQIKTPAFVPVGTKATVKTVVPEAVRDLGAQAVLANAYHLYLQPGPHIIDEAGGLGKFMNWSGPTYTDSGGFQVMSLGAGFKKVIAMDVTGMQNDEVIAEGKERLARVDDDGVKFKSHLDGSPHRFTPEVSMQIQHQLGADIIFAFDELTTLMNTREYQETSLERTRLWAIRCLAEHNRLTAERSHRPTQSLWGVLQGAQYEDLRRKAARDLVAMSERDVDNGGRGFGGYGIGGALEKQNLGTIVRWVNEELPQDKARHLLGISEPDDIFTAIENGVDTFDCVSPSRVARNGAIYSLDGRYNVTNSRFRNDFGPLDPEIENYTTQYTRAYIHHLFKAKEGLAATLCTIHNEHFIVTLVERARQAIEDGTYFEFRDEFLGRYYAQAKTS

SEQ ID NO: 62301 - protein, 420 aa, Williamsia marianensis
  REGION 1..420: note = tr|A0A2G3PV16|A0A2G3PV16_9NOCA Queuine tRNA-ribosyltransferase OS=Williamsia marianensis; OX = 322609 GN=tgt PE=3 SV=1
MNDPQQGPDRSFTLGTSLPGTLGRTGTIDTPHGQIKTPAFVPVGTKATVKTVVPEAVRDLGAQAVLANAYHLYLQPGPHIIDEAGGLGKFMNWPGPTYTDSGGFQVMSLGAGFKKVIAMDVTGMQNDEVIAEGKERLARVDDDGVTFKSHLDGSSHRFTPEVSMQIQHQLGADIIFAFDELTTLMNTREYQETSLERTRLWAVRCLAEHNRLTAERSHRPTQSLWGVLQGAQYEDLRRKAARDLVAMSERDVDNGGRGFGGYGIGGALEKQNLGTIVRWVNEELPQDKARHLLGISEPDDIFTAIENGVDTFDCVSPSRVARNGAIYSLDGRYNVTNSRFRNDFRPLDPEIENYTTQYTRAYIHHLFKAKEGLAATLCTIHNEHFIVTLVERARQAIEDGTYFEFRDEFLGRYYAQAKTS

SEQ ID NO: 62302 - protein, 420 aa, Williamsia muralis
  REGION 1..420: note = tr|A0A495K7N0|A0A495K7N0_9NOCA Queuine tRNA-ribosyltransferase OS=Williamsia muralis OX=85044; GN = tgt PE=3 SV=1
MNDPQQGPDRSFTLGTSLAGTLGRTGTINTPHGQIKTPAFVPVGTKATVKTVVPEAVRDLGAQAVLANAYHLYLQPGPHIIDEAGGLGKFMNWPGPTYTDSGGFQVMSLGAGFKKVIAMDVTGMQNDEVIAEGKERLARVDDDGVTFKSHLDGSPHRFTPEVSMQIQHQLGADIIFAFDELTTLMNTREYQETSLERTRLWAIRCLAEHNRLTAERSHRPTQSLWGVLQGAQYEDLRRKAARDLVAMSERDVDNGGRGFGGYGIGGALEKQNLGTIVRWVNEELPQDKARHLLGISEPDDIFTAIENGVDTFDCVSPSRVARNGAIYSLDGRYNVTNSRFRNDFGPLDPEIENYTTQYTRAYIHHLFKAKEGLAATLCTIHNEHFIVTLVERARQAIEDGTYFEFRDEFLGRYYAQAKTS

SEQ ID NO: 62303 - protein, 432 aa, Williamsia sp.
  REGION 1..432: note = tr|V8D1H7|V8D1H7_9NOCA Queuine tRNA-ribosyltransferase OS=Williamsia sp. D3 OX=1313067; GN = tgt PE=3 SV=1
MPGGAAHWEDASVNDPQHGPDRSFTLGTSLAGTLGRTGTISTPHGQIKTPAFVPVGTKATVKTVVPEAVRDLGAQAVLANAYHLYLQPGPHIIDEAGGLGKFMNWPGPTYTDSGGFQVMSLGAGFKKVIAMDVTGMQNDEVIAEGKERLARVDDDGVTFKSHLDGSPHRFTPEVSMQIQHQLGADIIFAFDELTTLMNTREYQETSLERTRLWAIRCLAEHNRLTAERSHRPTQSLWGVLQGAQYEDLRRKAARDLVAMSERDVDNGGRGFGGYGIGGALEKQNLGTIVRWVNEELPQDKARHLLGISEPDDIFTAIENGVDTFDCVSPSRVARNGAIYSLDGRYNVTNSRFRNDFGPLDPEIENYTTQYTRAYIHHLFKAKEGLAATLCTIHNEHFIVTLVERARQAIEDGTYFEFRDEFLGRYYAQAKTS

SEQ ID NO: 62304 - protein, 424 aa, Williamsia sp.
  REGION 1..424: note = tr|A0A0Q5R6X4|A0A0Q5R6X4_9NOCA Queuine tRNA-ribosyltransferase OS=Williamsia sp. Leaf354; OX = 1736349 GN=ASG12_03080 PE=3 SV=1
MPDPDTTDRSATTPDHSFVFGTELAGTLGRTGVIRTPHGDIRTPAFIPVGTKATVKTVVPEAVADLGAQAVLANAYHLYLQPGPEIVDAAGGLGRFMNWPGPTYTDSGGFQVMSLGVGFKKVISMEVRETENDDVIAPGKERLARVDDDGVTFKSHLDGTTHRFSPEVSMQIQHQLGADIIFAFDELTTLMNTRAYQVDSLERTRLWAIRCLDEHNRLTRERHDRPLQSLWGVVQGAQYEDLRRAAARGLMEASRRDQDAGGRGFGGYGIGGALEKENLGQIVGWVNDELPRDTAKHLLGISEPDDIFTAIENGIDTFDCVSPSRVARNGAIYSFDGRYNITNSRFRADFSPMEPELENYSTQYSRAYIHHLFKAKEGLASTLCTIHNEHFIVTLVDRARQAIEDGNYIEYRDAFLARYYAGSS

SEQ ID NO: 62305 - protein, 418 aa, unidentified
  source 1..418: note = Williamsia sterculiae
  REGION 1..418: note = tr|A0A1N7F724|A0A1N7F724_9NOCA Queuine tRNA-ribosyltransferase OS=Williamsia sterculiae; OX = 1344003 GN=tgt PE=3 SV=1
MGHGLPADAAFRVQARLPGTLGRVGVLVTPHGEIRTPAFVPVGTKATVKTVLPESVAAVGAQAVLANAYHLYLQPGSEIVDLAGGLGRFMNWSGPTFTDSGGFQVMSLGAGFKKVIAMDVTGLQDDAVIAEGKERLALVDDDGVTFKSHLDGSRHRFTPESSMRIQHELGADIIFAFDELTTLMNTRAYQVDSLERTRQWAIRCLIAHNDLSRERTHRPLQSLWGVLQGAQYEDLRRKAARDLAEISDRDVDAGGRGFGGYGIGGALEKQNLGTIVRWVNEELPEHKPKHLLGISEPDDIFTAIENGVDTFDCVSPSRVARNGAIYSRDGRYNITNSRFKRDFGPLDPEVENYTSRYSRAYIHHLFKAKEGLASTLCTIHNEHFIVSLVDRARQAIIDGDYEAFRDDFLGRYYAGAHT

SEQ ID NO: 62306 - protein, 376 aa, unidentified
  source 1..376: note = Williamwhitmania taraxaci
  REGION 1..376: note = tr|A0A1G6JHI2|A0A1G6JHI2_9BACT Queuine tRNA-ribosyltransferase OS=Williamwhitmania taraxaci; OX = 1640674 GN=tgt PE=3 SV=1
MKFTLLKTDKECKARRGRLETDHGTIETPIFMPVGTAGTVKGVLQRDVKTEVKAEIILGNTYHLYLRPGLDVLEKAGGLHKFMAWDMPILTDSGGFQVFSLAHNRKLNTNGCEFRSHIDGSKHLFTPENVVDIQRKIGADIIMAFDECPPGTADFAYAAKSLDITQQWLERGLKHFDSTDPKYGYSQTFFPIVQGCVYPDLRRKAAEGAAKFYREGYAIGGLSVGEPEEVMYEMIEVVEPILPSDRPRYLMGVGTPANILEAIARGVDMFDCVMPTRNGRNGMLFTREGIINIKNLRWKDDFSPIDPDGTNYVDTTFSKAYLRHLFVANEMLGPQLASIHNLSFYLWLVNEARLKIEEGTFLSWKNMMIKKLTTRL

SEQ ID NO: 62307 - protein, 376 aa, Winogradskyella arenosi
  REGION 1..376: note = tr|A0A368ZF12|A0A368ZF12_9FLAO Queuine tRNA-ribosyltransferase OS=Winogradskyella arenosi; OX = 533325 GN=tgt PE=3 SV=1
MKFQRVAQDKQSKARAGVITTDHGKIETPIFMPVGTVASVKGVHQRELKNDINPDIILGNTYHLYLRPQTPILEQAGGLHKFMNWDRNILTDSGGYQVYSLSSNRKIKEEGVKFKSHIDGSYHVFTPENVMEVQRSIGADIIMAFDECTPYPCDYNYAKRSMHMTHRWLERCLTHLKKTPFTYDYEQTFFPIVQGSTYKDLRKQSAEYIANAGAEGNAIGGLSVGEPAEEMYAMTDVVCSILPEDKPRYLMGVGTPINILENIALGVDMFDCVMPTRNARNGMLFTAHGSINIKNLKWANDFSPIDEMGITFVDTEYSKAYLRHLFTVNELLGKQIATIHNLGFYLWLTREARKHIIAGDFREWKDKMVKQMDNRL

SEQ ID NO: 62308 - protein, 376 aa, unidentified
  source 1..376: note = Winogradskyella aurantia
  REGION 1..376: note = tr|A0A265UR63|A0A265UR63_9FLAO Queuine tRNA-ribosyltransferase OS=Winogradskyella aurantia; OX = 1915063 GN=tgt PE=3 SV=1
MEFKQLANDKESKARAGLITTDHGTIETPIFMPVGTVASVKGVHQRELKNDINPDIILGNTYHLYLRPQTTILEEAGGLHKFMNWDRNILTDSGGYQVYSLSANRKIKEEGVKFKSHIDGSYHVFTPENVMEIQRSIGADIIMAFDECTPYPCDYNYAKRSMHMTHRWLDRCMQHLKTLPFKYDYAQTFFPIVQGSTYKDLRRQSAEYIANVGAEGNAIGGLSVGEPAEEMYAMTEVVCDILPQDKPRYLMGVGTPINILENIALGVDMFDCVMPTRNARNGMLFTANGTINIKNKKWENDFSPIDDMGITFVDTDYSKAYLKHLFSVNELLGKQIATIHNLGFYLWLVREARKHIIDGDFGVWKDIMVKQMDKRL

SEQ ID NO: 62309 - protein, 376 aa, Winogradskyella epiphytica
  REGION 1..376: note = tr|A0A2V4WUI3|A0A2V4WUI3_9FLAO Queuine tRNA-ribosyltransferase OS=Winogradskyella epiphytica; OX = 262005 GN=tgt PE=3 SV=1
MKFQRVAQDKQSKARAGTITTDHGTIETPIFMPVGTVGSVKGVHQRELKNDINPDIILGNTYHLYLRPQTPILEKAGGLHKFMNWDRNILTDSGGYQVYSLSANRKIKEEGVKFKSHIDGSYHTFTPENVMEVQRSIGADIIMAFDECTPYPCDYNYAKRSMHMTHRWLERCLTHLKKTPFKYDYEQTFFPIVQGSTYKDLRQQSAEYIANAGAQGNAIGGLSVGEPAEEMYAMTEVVCDILPEDKPRYLMGVGTPINILENIALGVDMFDCVMPTRNARNGMLFTAHGSINIKNLKWAEDFSPIDEMGITFVDTEYTKAYLRHLFTVNELLGKQIATIHNLGFYLWLTREARKHIIAGDFREWKDKMVKQMDNRL

SEQ ID NO: 62310 - protein, 376 aa, Winogradskyella eximia
  REGION 1..376: note = tr|A0A3D9H009|A0A3D9H009_9FLAO Queuine tRNA-ribosyltransferase OS=Winogradskyella eximia; OX = 262006 GN=tgt PE=3 SV=1
MKFQRVANDKQTKARAGSITTDHGTIETPIFMPVGTVASVKGVHQRELKDDINPDIILGNTYHLYLRPQTPILEQAGGLHKFMNWDRNILTDSGGYQVYSLSSNRKIKEEGVKFKSHIDGSYHVFTPENVMEVQRKIGADIIMAFDECTPYPCDYNYAKRSMHMTHRWLERCLTHLKKTPLTYDYDQTFFPIVQGSTYKDLRQQSAEYIANAGAEGNAIGGLSVGEPAEEMYAMTDVVCSILPEDKPRYLMGVGTPINILENIALGVDMFDCVMPTRNARNGMLFTAHGSINIKNLKWANDFSPIDEMAITFVDTEYSKAYLRHLFTVNELLGKQIATIHNLGFYLWLTREARKHIIAGDFRAWKEKMVKQMDNRL

SEQ ID NO: 62311 - protein, 376 aa, unidentified
  source 1..376: note = Winogradskyella jejuensis
  REGION 1..376: note = tr|A0A1M5JG18|A0A1M5JG18_9FLAO Queuine tRNA-ribosyltransferase OS=Winogradskyella jejuensis; OX = 1089305 GN=tgt PE=3 SV=1
MDFKKIATDAGSKARAGEITTDHGKIETPIFMPVGTVASVKGVHQRELKNDINPDIILGNTYHLYLKPQTKILEQAGGLHKFMNWDRNILTDSGGYQVYSLSANRKIKEEGVKFKSHIDGSTHMFTPENVMEIQRSIGADIIMAFDECTPYPCDYNYAKRSMHMTHRWLDRCINHLDKTPFTYDYAQTFFPIVQGSTYKDLRRQSAEYIANAGAEGNAIGGLSVGEPAEEMYAMTDVVCEILPEDKPRYLMGVGTPINILENIALGVDMFDCVMPTRNARNGMLFTAHGTINIKNAKWAEDFSPIDEMGITFVDTEYSKAYLKHLFSVNELLGKQIATIHNLGFYLWLVREARKHIIAGDFREWKDKMVKQMDKRL

SEQ ID NO: 62312 - protein, 376 aa, Winogradskyella pacifica
  REGION 1..376: note = tr|A0A3D9MYK6|A0A3D9MYK6_9FLAO Queuine tRNA-ribosyltransferase OS=Winogradskyella pacifica; OX = 664642 GN=tgt PE=3 SV=1
MKFQRVAKDTQSKARAGTITTDHGTIETPIFMPVGTVASVKGVHQRELKNDINPDIILGNTYHLYLRPQTPILEQAGGLHKFMNWDRNILTDSGGYQVYSMSSNRKIKEEGVKFKSHIDGSYHVFTPENVMEVQRSIGADIIMAFDECTPYPCDYNYAKRSMHMTHRWLERCLTHLKKTPFKYDYEQTFFPIVQGSCYKDLREQSAEYIANAGAEGNAIGGLSVGEPAEEMYAMTDIVCNILPEDKPRYLMGVGTPINILENIALGVDMFDCVMPTRNARNGMLFTAHGSINIKNLKWANDFSPVDEMGITFVDTEYSKAYLRHLFTVNELLGKQIATIHNLGFYLWLTREARKHIIAGDFRAWKDKMVKQMDNRL

SEQ ID NO: 62313 - protein, 376 aa, unidentified
  source 1..376: note = Winogradskyella psychrotolerans
  REGION 1..376: note = tr|S7X0R0|S7X0R0_9FLAO Queuine tRNA-ribosyltransferase OS=Winogradskyella psychrotolerans RS-3 OX=641526 GN=tgt PE=3 SV=1
MKFQRVAKDTQSKARAGTITTDHGIIETPIFMPVGTVASVKGVHQRELKNDINPDIILGNTYHLYLRPQTPILEQAGGLHKFMNWDRNILTDSGGYQVYSMSSNRKIKEEGVKFKSHIDGSYHVFTPENVMEVQRSIGADIIMAFDECTPYPCDYNYAKRSMHMTHRWLERCLTHLKKTPFKYDYEQTFFPIVQGSCYKDLREQSAEYIANAGAAGNAIGGLSVGEPAEEMYAMTDIVCSILPEDKPRYLMGVGTPINILENIALGVDMFDCVMPTRNARNGMLFTAHGSINIKNLKWADDFSPVDEMGITFVDTEYSKAYLRHLFTVNELLGKQIATIHNLGFYLWLTREARKHIIAGDFRAWKDKMVKQMDNRL

SEQ ID NO: 62314 - protein, 376 aa, Winogradskyella sp.
  REGION 1..376: note = tr|A0A1Y0MJW6|A0A1Y0MJW6_9FLAO Queuine tRNA-ribosyltransferase OS=Winogradskyella sp. PC-19; OX = 754417 GN=tgt PE=3 SV=1
MDFKKIAIDAGSKARAGEIKTDHGKIETPIFMPVGTVATVKGVHQRELKNDINPDIILGNTYHLYLRPQTKILEEAGGLHKFMNWDRNILTDSGGYQVYSLSANRKIKEEGVKFKSHIDGSMHMFTPENVMEIQRSIGADIIMAFDECTPYPCDYNYAKRSMHMTHRWLDRCINHLEKTPFKYDYEQTFFPIVQGSTYKDLRKQSAEYIANAGAQGNAIGGLSVGEPAEEMYGMTEVVCDILPEDKPRYLMGVGTPINILENIALGVDMFDCVMPTRNARNGMLFTAHGTINIKNAKWANDFSPIDDMGITYVDTDYSKAYLKHLFTVNELLGKQIATIHNLGFYLWLVREARKHIIAGDFRVWKDKMVKQMDKRL

SEQ ID NO: 62315 - protein, 376 aa, Winogradskyella sp.
  REGION 1..376: note = tr|A0A024FDD7|A0A024FDD7_9FLAO Queuine tRNA-ribosyltransferase OS=Winogradskyella sp. PG-2; OX = 754409 GN=tgt PE=3 SV=1
MKFQRLANDKATKARAGSITTDHGVIETPIFMPVGTVASVKGVHQRELKNDINPDIILGNTYHLYLRPQTPILEKAGGLHKFMNWDRNILTDSGGYQVYSLSANRKIKEEGVKFKSHIDGSYHVFTPENVMEVQRSIGADIIMAFDECTPYPCDYNYAKRSMHMTHRWLERCLTHLKKTPLKYDYEQTFFPIVQGSTYKDLRKQSAEYIANAGAEGNAIGGLSVGEPAEEMYAMTDVVCSILPEDKPRYLMGVGTPINILENIALGVDMFDCVMPTRNARNGMLFTAHGSINIKNLKWADDFSPIDEMGITFVDTEYSKAYLRHLFTVNELLGKQIATIHNLGFYLWLTREARKHIIEGDFGVWKDKMVKQMDKRL

SEQ ID NO: 62316 - protein, 376 aa, Winogradskyella thalassocola
  REGION 1..376: note = tr|A0A1G8BV95|A0A1G8BV95_9FLAO Queuine tRNA-ribosyltransferase OS=Winogradskyella thalassocola; OX = 262004 GN=tgt PE=3 SV=1
MKFTRVANDKETKARAGSITTDHGTIETPIFMPVGTVGSVKGVHQRELKNDINPDIILGNTYHLYLRPQTPILEQAGGLHKFMNWDRNILTDSGGYQVYSMSSNRKIKEEGVKFKSHIDGSYHVFTPENVMEVQRSIGADIIMAFDECTPYPCDYNYAKRSMHMTHRWLERCLTHLKKTPFKYDYEQTFFPIVQGSCYKDLREQSAEYIANAGAAGNAIGGLSVGEPAEEMYAMTDIVCSILPEDKPRYLMGVGTPINILENIALGVDMFDCVMPTRNARNGMLFTAHGSINIKNLKWADDFSPVDEMGITFVDTEYTKAYLRHLFTVNELLGKQIATIHNLGFYLWLTREARKHIIAGDFRAWKDKMVKQMDNRL

SEQ ID NO: 62317 - protein, 376 aa, unidentified
  source 1..376: note = Winogradskyella wandonensis
  REGION 1..376: note = tr|A0A4R1KNG2|A0A4R1KNG2_9FLAO Queuine tRNA-ribosyltransferase OS=Winogradskyella wandonensis; OX = 1442586 GN=tgt PE=3 SV=1
MNFTRIAADKNSKARAGEITTDHGKIETPIFMPVGTVATVKGVHQRELKNDINPDIILGNTYHLYLRPQTQILEKAGGLHKFMNWDRNILTDSGGYQVYSLSANRKIKEEGVKFKSHIDGSMHLFTPENVMEIQRSIGADIIMAFDECTPYPCDYKYAQRSMHMTHRWLERCLTHLKKTPFKYDYSQAFFPIVQGSTYKDLRKQSAEYIAGVGAEGNAIGGLSVGEPAEEMYAMTDVVCDILPEDKPRYLMGVGTPINILENIALGVDMFDCVMPTRNARNGMLFTAHGTINIKNRKWADDFSPIDEMGITFVDTEYSKAYLKHLFSVNELLGKQIATIHNLGFYLWLVREARKHIIEGDFRTWKDKMVKQMDKRL

SEQ ID NO: 62318 - protein, 375 aa, unidentified
  source 1..375: note = Woeseia oceani
  REGION 1..375: note = tr|A0A193LE68|A0A193LE68_9GAMM Queuine tRNA-ribosyltransferase OS=Woeseia oceani OX=1548547; GN = tgt PE=3 SV=1
MKLRIDARCGAARTGVLEFRRGTVRTPAFMPVGTYGSVKSVTPEEVRASGADILLGNTFHLMLRPGAEIVRAHGGLHEFIHWDRPILTDSGGFQVFSLAAMRKLSPEGVSFRSPVNGDEVFLTPERSMEVQHALNADVTMIFDECTPYPATEREAATSMRLSLDWARRSRQRFDELRAANPERGEALFGIVQGGIYDELRQESLQGLQGIGFDGYAIGGLAVGEPEDERLAVMDALCPTLPDDRPRYLMGVGTPLDIAEAVSRGVDMFDCVMPTRHARNGHLFTSEGVIRIRNARHTSDTGPLDPACDCYTCQNYSRAYLRHLEKCGEMLGPRLCTIHNLHYYQRLMTDLRAAITAGELPAAVARLKSVYQQSRG

SEQ ID NO: 62319 - protein, 372 aa, unidentified
  source 1..372: note = Woeseia sp.
  REGION 1..372: note = tr|A0A2E6ECK1|A0A2E6ECK1_9GAMM Queuine tRNA-ribosyltransferase OS=Woeseia sp. OX=1980636 GN=tgt; PE = 3 SV=1
MKFEVHQRSGSARTGTMYFRRGKVRTPAFMPVGTYGSVKSVTPEEVANLGAEMILGNTFHLLLRPGMQIIRGHGGLHEFMNWNGPILTDSGGFQVFSLAEMRELSEEGVCFRSPIDGDKVFLTPERSMEIQHDLNADVAMVFDECTKYPASESDALESMELSLRWAQRSRDRFDGLKEKEPDRGEALFGIVQGGIYEKLRRDSLNGLTEIGFDGYAVGGLAVGETAEEREIVLDALVPRIPKTHPRYLMGVGTPLDIAEAVSRGIDMFDCVMPTRHARTGHLFTSEGVVKIRNAKYTDNQGPLDPNCSCYTCKNYSLAYLRHLEKCGEVLGLRLHTIHNLTYYQKLMERLRHAIARKQLDILLVELRNLYGG

SEQ ID NO: 62320 - protein, 372 aa, unidentified
  source 1..372: note = Woeseia sp.
  REGION 1..372: note = tr|A0A2E6ZJE6|A0A2E6ZJE6_9GAMM Queuine tRNA-ribosyltransferase OS=Woeseia sp. OX=1980636 GN=tgt; PE = 3 SV=1
MNFSVENHCGAARSGVLKLRHGEIQTPVFMPVGTYGAVKGVSPEELEGNGAQIILGNTFHLMLRPGVEVIRAHGGLHEFINWKRPILTDSGGFQVFSLASIRKLSENGVCFRSPVNGDEVMLTPEKSMEVQHELNADITMIFDECTAYPISKIEAQKSMQLSLRWASRSRIRFDELKKIEPDRGDALFGIIQGGMYNDLRQESLDELEKIGFDGYAFGGLAVGESKDERHDVLSSLMPSMPADKPRYLMGVGTPVDIAEGVLRGIDMFDCVIPTRHARNAQLYTSRGKINIRHAKYKDDTSPPDVDCNCYTCTNYSIGYLRHLEKCGEMLGSRLATIHNLHYYHNLMNNIRNSIISGKLPEFVAKLRDIYDN

SEQ ID NO: 62321 - protein, 395 aa, unidentified
  source 1..395: note = Woeseiaceae bacterium
  REGION 1..395: note = tr|A0A2D9M2D5|A0A2D9M2D5_9GAMM Queuine tRNA-ribosyltransferase OS=Woeseiaceae bacterium; OX = 2026806 GN=tgt PE=3 SV=1
  VARIANT 77: note = Xaa can be any naturally occurring amino acid
  VARIANT 175: note = Xaa can be any naturally occurring amino acid
  VARIANT 180: note = Xaa can be any naturally occurring amino acid
  VARIANT 182..184: note = Xaa can be any naturally occurring amino acid
  VARIANT 186: note = Xaa can be any naturally occurring amino acid
  VARIANT 189..191: note = Xaa can be any naturally occurring amino acid
  VARIANT 290: note = Xaa can be any naturally occurring amino acid
  VARIANT 315: note = Xaa can be any naturally occurring amino acid
MSRMFDFKVLHSTGAARRGQMRTAHGIVETPAFMPVGTGGAVKSVTQRNLQELGAQMLMANTYHLYLRPGAELIARXGGLHRFMAWDRPIMTDSGGYQVFSLASRRTINDDGATFQSHIDGRECHLTPEDVATIQWRLGSDIAMVFDECEAYPSSVEATRRAMERTLRWASRARXRFVSXQXXXAXQPXXXSPNPEQAQFGIIQGGIYKELRASSVEHTVSLGFDAYAIGGLSVGEPYELMYDVVAETAPQLPQDRPRYLMGAGMPDDLVEAAARGIDLFDCVLPTRNAXNGQLFTSTGCLNIKQARYKEDDRPXDETCQCQVCSHHSRAYLRHLFVTHEMTAATLNTLHNLHFYLDTMRRIRDAIMFGSLEELRHEFRLIYPRTPGRESQEAMS

SEQ ID NO: 62322 - protein, 373 aa, unidentified
  source 1..373: note = Woeseiaceae bacterium
  REGION 1..373: note = tr|A0A2E5CIV6|A0A2E5CIV6_9GAMM Queuine tRNA-ribosyltransferase OS=Woeseiaceae bacterium; OX = 2026806 GN=tgt PE=3 SV=1
  VARIANT 4: note = Xaa can be any naturally occurring amino acid
  VARIANT 10..11: note = Xaa can be any naturally occurring amino acid
  VARIANT 16: note = Xaa can be any naturally occurring amino acid
  VARIANT 32: note = Xaa can be any naturally occurring amino acid
  VARIANT 35: note = Xaa can be any naturally occurring amino acid
  VARIANT 41: note = Xaa can be any naturally occurring amino acid
  VARIANT 46: note = Xaa can be any naturally occurring amino acid
  VARIANT 67: note = Xaa can be any naturally occurring amino acid
  VARIANT 78: note = Xaa can be any naturally occurring amino acid
  VARIANT 83: note = Xaa can be any naturally occurring amino acid
  VARIANT 116: note = Xaa can be any naturally occurring amino acid
  VARIANT 160: note = Xaa can be any naturally occurring amino acid
  VARIANT 164: note = Xaa can be any naturally occurring amino acid
  VARIANT 175: note = Xaa can be any naturally occurring amino acid
  VARIANT 178: note = Xaa can be any naturally occurring amino acid
  VARIANT 184: note = Xaa can be any naturally occurring amino acid
  VARIANT 186: note = Xaa can be any naturally occurring amino acid
  VARIANT 227: note = Xaa can be any naturally occurring amino acid
  VARIANT 248: note = Xaa can be any naturally occurring amino acid
  VARIANT 265: note = Xaa can be any naturally occurring amino acid
  VARIANT 290..291: note = Xaa can be any naturally occurring amino acid
  VARIANT 307..308: note = Xaa can be any naturally occurring amino acid
  VARIANT 324: note = Xaa can be any naturally occurring amino acid
  VARIANT 348: note = Xaa can be any naturally occurring amino acid
  VARIANT 353: note = Xaa can be any naturally occurring amino acid
  VARIANT 356..357: note = Xaa can be any naturally occurring amino acid
  VARIANT 360: note = Xaa can be any naturally occurring amino acid
  VARIANT 364: note = Xaa can be any naturally occurring amino acid
  VARIANT 371: note = Xaa can be any naturally occurring amino acid
MRFXIINEDXXARTGXISLRRGEIQTPAFMPXGTXGAVKSXTPEEXSESSTDIILSNTFHLMLRPGXEIIKKHGGLHXFMNWXGPILTDSGGFQVFSLEKKRKITKDGVHFQSPIXGAKVFLSPELSIDAQHHLDSDIVMIFDECTIYPATKKEAKDSMXLSIXWAKRSKNSFLXLKXDQAEEXAXLFGIVQGGMYNDLRLESLEKLHDIGFDGYAIGGLAVGEPEXEREAILENLIPHMKKNKPRYXMGVGFPVDIAKSVHLGXDMFDCVIPTRHARNGHLFTSLGIIXXRNSSFKDDTDKLDPIXXCYVCRNYSRSYLRHLXKINEMLGSRLCTIHNVHYYQNLMXEIRAXIEXXTLXAYIXELESIFXRK

SEQ ID NO: 62323 - protein, 243 aa, Wohlfahrtiimonas chitiniclastica
  REGION 1..243: note = tr|A0A162TP03|A0A162TP03_9GAMM Queuine tRNA-ribosyltransferase OS=Wohlfahrtiimonas chitiniclastica OX=400946 GN=BMY_0162 PE=3 SV=1
MEIQRRLGSDIVMAFDECTPYPADYETARKSMEMSMRWAKRSKDAFEGNPNALFGIIQGGMHEDLRTRSLEALLEIDFHGYAVGGLAVGEPMDERHRILEHLTPQMRDDKPRYLMGVGKPEDLIEGVERGIDMFDCVMPTRNARNGHLFTRYGDVRIRNQKYQFDTNPVDPSCTCYTCQNFSRSYLRHLDKTKELLGAHLNSIHNIHYYLQLMQEIRDSIEAGKFQEFKRQFYSDRQTIGKEA

SEQ ID NO: 62324 - protein, 370 aa, Wohlfahrtiimonas chitiniclastica
  REGION 1..370: note = tr|A0A256CQ19|A0A256CQ19_9GAMM Queuine tRNA-ribosyltransferase OS=Wohlfahrtiimonas chitiniclastica OX=400946 GN=tgt PE=3 SV=1
MEFSLLSTDGGARRGRLTFERGVIETPIFMPVGTIATVKGLTPNNLLDANAQIILGNTFHLWLRPGLDVINAHGDLHDFMRWDKPILTDSGGFQVFSLAELRKITEEGVTFRSPFDGKKCFLDPETSMEIQRRLGSDIVMAFDECTPYPADYETARKSMEMSMRWAKRSKDAFEGNPNALFGIIQGGMHEDLRTRSLEALLEIDFHGYAVGGLAVGEPMDERHRILEHLTPQMRDDKPRYLMGVGKPEDLIEGVERGIDMFDCVMPTRNARNGHLFTRYGDVRIRNQKYQFDTNPVDPSCTCYTCQNFSRSYLRHLDKTKELLGAHLNSIHNIHYYLQLMQEIRDSIEAGKFQEFKRQFYSDRQTIGKEA

SEQ ID NO: 62325 - protein, 370 aa, Wohlfahrtiimonas sp.
  REGION 1..370: note = tr|A0A256CCN9|A0A256CCN9_9GAMM Queuine tRNA-ribosyltransferase OS=Wohlfahrtiimonas sp. G9077; OX = 1980118 GN=tgt PE=3 SV=1
MEFSLLSTDGGARRGRLTFERGVIETPIFMPVGTIATVKGLTPNNLLEANAQIILGNTFHLWLRPGLDVINAHGDLHDFMRWDKPILTDSGGFQVFSLAELRKITEEGVTFRSPFDGKKCFLDPETSMEIQRRLGSDIVMAFDECTPYPADYETARKSMEMSMRWAKRSKDAFEGNPNALFGIIQGGMHEDLRTRSLEALLEIDFHGYAVGGLAVGEPMDERHRILEHLTPQMRDDKPRYLMGVGKPEDLIEGVERGIDMFDCVMPTRNARNGHLFTRYGDVRIRNQKYQFDTNPVDPSCTCYTCQNFSRSYLRHLDKTKELLGAHLNSIHNIHYYLQLMQEIRDSIEAGKFQEFKRQFYSDRQTIGKEA

SEQ ID NO: 62326 - protein, 403 aa, unidentified
  source 1..403: note = Wolbachia endosymbiont
  REGION 1..403: note = tr|A0A176Q8N1|A0A176Q8N1_9RICK Queuine tRNA-ribosyltransferase OS=Wolbachia endosymbiont of Laodelphax striatellus OX=368602 GN=tgt PE=3 SV=1
MEKFSFRITKQSGSARVSIIKTPNGNIETPAFIFCATKAAIKAADIERIREAGTQIILSNTYHLMLQPGEDTVAKLGGLHKMMGWNGPMLTDSGGYQIFSLGHGSVSEEIKGIRQKQKTLIKINEDGAIFRSYINGKTYCLTPEKSIQIQQKLGADLILVLDECTPFHVSKEYTRKSMLMSHRWAERSLNEFEKNNNGKQALYGISQGGIYQDLRRESCDFINDLPFFGQAIGGSLGQSKEQMYDVVSFTMQHLKKDRPTHLLGIGGIVDIFRAVEFGVDTFDCVHPTRLARHGGALVKVKNRDSISSKCKEHINLRNQRFELDDNPIESDCLCFTCRKHSRAYIHHLLKAKELLAYTLVTIHNVFFMNKLMVSIREAILNDRLDQEKNNWISEIPLHCELYT

SEQ ID NO: 62327 - protein, 403 aa, unidentified
  source 1..403: note = Wolbachia endosymbiont
  REGION 1..403: note = tr|A0A3B0JN17|A0A3B0JN17_9RICK Queuine tRNA-ribosyltransferase OS=Wolbachia endosymbiont of Aleurodicus floccissimus OX=2152762 GN=tgt PE=3 SV=1
MEKFSFRITKQSGSARVGTIKTPNGNIETPAFIFCATKAAIKAADIERIREAGTQIILSNTYHLMLQPGEDTVAKLGGLHKMMGWNGPMLTDSGGYQIFSLGHGSVSEEIKGIRQKQKTLIKINEDGAIFRSYINGKTYCLTPERSIQIQQKLGADLILVLDECTPFHVSKEYTRKSMLMSHRWAERSLNEFEKNNDGKQALYGISQGGVYQYLRGESCDFINNLPFFGQAIGGSLGQSKEQMYDVVSFTMERLKKERPTHLLGIGGIVDIFRAVELGVDTFDCVHPTRLARHGGALVKVKNRDSISSKCKEHINLRNQRFELDNNPIENDCLCFTCRKHSRAYIHHLLKAKELLAYTLVTIHNVFFMNELMESIRQAILNDRLDQEKNNWVSEVPLHCELYT

SEQ ID NO: 62328 - protein, 403 aa, Wolbachia pipientis
  REGION 1..403: note = tr|A0A518LRY0|A0A518LRY0_WOLPI Queuine tRNA-ribosyltransferase OS=Wolbachia pipientis OX=955; GN = tgt PE=3 SV=1
MEKFSFRITKQSGSARVGIIKTPNGNIETPAFIFCATKAAIKASDIERIREAGTQIILSNTYHLMLQPGEDTVAKLGGLHKMMGWNGPMLTDSGGYQIFSLGHGSVSEEIKGIRQKQKTLIKINEDGAIFRSYINGKTYCLTPEKSIQIQQKLGADLILVLDECTPFHVSKEYTRKSMLMSHRWAERSLNEFEKNNDGKQALYGISQGGVYQDLRGESCNFINNLPFFGQAIGGSLGQSKEQMYDVVSFTMEHLKKDRPTHLLGIGGIVDIFRGVELGVDTFDCVHPTRLARHGGALVKVKNRDSISSKCKEHINLRNQRFELDDNPIENDCLCFTCRKHSRAYIHHLLKAKELLAYTLVTIHNVFFMNKLMESIRQAILNDRLDQEKNNWISEIPLHCELYT

SEQ ID NO: 62329 - protein, 404 aa, Wolbachia pipientis
  REGION 1..404: note = tr|A0A1V2N5B8|A0A1V2N5B8_WOLPI Queuine tRNA-ribosyltransferase OS=Wolbachia pipientis wVitA; OX = 1379786 GN=tgt PE=3 SV=1
MKEEFSFKRIKQSGSARVGTIKTPNGSVETPAFIFCATKAAIKAADIERISEAGTQIILSNTHHLMLQPGENTVAKLGGLRKMIGWNGPMLTDSGGYQIFSLGHGSVSEEIKGIRKKQKTLIKINEDGAIFRSYINGKIYCLTPEKSVQIQQKLGADLILVLDECTPFHVSKEYTAKSMLMSHRWAERSLNEFEKNNNGKQALYGISQGGVYQDLRRESCDFINDLPFFGQAIGGSLGQSKEQMHDVVSFTMDHLKKDRPTHLLGIGGIVDIFRGVELGIDTFDCVHPTRLARHGGALVKVKNRNSISSKCKEHINLRNQRFELDNNPIESDCLCFTCRKHSRAYIHHLLKAKELLAYTLVTIHNIFFMNKLMASIRQAILDDRLDREKNNWISETPLHCELYT

SEQ ID NO: 62330 - protein, 405 aa, Wolbachia sp.
  REGION 1..405: note = tr|C0R3J8|C0R3J8_WOLWR Queuine tRNA-ribosyltransferase OS=Wolbachia sp. subsp. Drosophila simulans (strain wRi) OX=66084 GN=tgt PE=3 SV=1
MKEEFAFKIIKQSGSARVGIIKTPNGNIETPAFIFCATKAAIKAADIERIREEGTQIILSNTYHLMLQPGENTVAKLGGLHKMMGWNGPMLTDSGGYQIFSLGHGSVSEEIKGIRKKQKTLIKINEDGAIFRSYINGKTYCLTPEKSIQIQQKLGADLILVLDECTPFHVSKEYTAKSMLMSHRWAERSLNEFEKNNNGKQALYGISQGGIYHDLRRESCDFINNLPFFGQAIGGSLGQSKEQMYDVVSFTMDHLKKDRPTHLLGIGGIVDIFHGVSLGIDTFDCVHPTRLARHGGALIKVKNRDSISSKCKEHINLRNQQFELDDNPIESDCLCFTCRKHSRAYIHHLLKAKELLAYTLVTIHNIFFMNKLMASIRQAILDDRLDQEKNNWISEIPLHFDLASL

SEQ ID NO: 62331 - protein, 410 aa, Wolbachia sp.
  REGION 1..410: note = tr|A0A3D1L396|A0A3D1L396_WOLSP Queuine tRNA-ribosyltransferase OS=Wolbachia sp. OX=956 GN=tgt; PE = 3 SV=1
MSSTHKIANGSLSQPIYDEKCFAFSVHKQSGSARVGTIKTPHGDIETPAFIFCATKAAIKAADIERINEAGTQIILSNTYHLMLQPGEDTVAKLGGLHKMMGWNKPMLTDSGGYQIFSLGHGSVSDEIKGIRSKQKTLIKINEDGAIFRSYINGKIYCLTPEKSIQIQQKLGADLIVVLDECTPFHVSKEYTEKSMLMSHKWAERCLTELEKSNCSKQALYGISQGGIYQDLRRESCDFINSLPFFGQAIGGSLGQSKQQMYDVVSFTIEHLKKDRPTHLLGIGGIVDIFHGVNLGIDTFDCVHPTRLARHGGALVKIKNRNSLSSQCKEHINLRNQQFELDENPIESDCSCFTCQRYSRAYIHHLLKARELLAYTLVTIHNVFFMNKLMEAIRQAILEGRLDQERNNWI

SEQ ID NO: 62332 - protein, 377 aa, Wolinella succinogenes; identical to SEQ ID NO: 56025
  REGION 1..377: note = sp|Q7M8N8|TGT_WOLSU Queuine tRNA-ribosyltransferase; OS = Wolinella succinogenes (strain ATCC 29543 / DSM 1740 / LMG 7466 / NCTC 11488 / FDC 602W) OX=273121 GN=tgt PE=3SV=1

SEQ ID NO: 62333 - protein, 384 aa, Xanthobacter autotrophicus
  REGION 1..384: note = tr|A7IN98|A7IN98_XANP2 Queuine tRNA-ribosyltransferase OS=Xanthobacter autotrophicus (strain ATCC BAA-1158 / Py2) OX=78245 GN=tgt PE=3 SV=1
MTAHTPVDTFSFTLSATDGAARTGFVSTPRGAIRTPAFMPVGTAATVKGLYFDQVKQTGADIVLANTYHLMLRPGAERIAKLGGLHSFMRWDGPILTDSGGFQVMSLSSLRKMSEQGVTFRSHVDGAYFEMSPERSVEIQGLLGADIQMQLDECVRLPCTDEEAARAMRLSLRWAERSKRAFEAQPKGRALFGIVQGGAVPALRVESARALADMDFPGYSIGGLAVGEPQEVMLAMIETVEPHLPVNKPRYLMGVGTPDDLLESVARGIDMFDCVMPTRSGRHALAFTRFGRINLKNARHADDPRPLDEESDCPALRDYSRAYLHHLVRCEEMLGSMLLTWANVHYYEQLMAGARAAIAEGRYADYMAQVKDGWARGDIPVWAG

SEQ ID NO: 62334 - protein, 383 aa, Xanthobacter tagetidis
  REGION 1..383: note = tr|A0A3L7A0N4|A0A3L7A0N4_9RHIZ Queuine tRNA-ribosyltransferase OS=Xanthobacter tagetidis OX=60216; GN = tgt PE=3 SV=1
MTAALTSDTFSFTLSATSGAARTGLVATPRGTIRTPAFMPVGTVATVKGLYFDQVKQAGADIVLANTYHLMLRPGAERVAKLGGLHRFMGWDGPILTDSGGFQVMSLSSLRKMSEQGVTFRSHVDGTLHEMSPERSIEIQGLLGADIQMQLDECVRLPCEDAEAERAMRLSLRWAERSKRAFEAQPKGRALFGIVQGGAVPALRVESARALAEMDFPGYSIGGLAVGEPQEVMLAMIETVAPHLPADKPRYLMGVGTPDDLLQAVARGIDMFDCVMPTRSGRHALAFTRFGRINLKNARHAEDPRPLDEASDCPALRDYSRAYLHHLVRCEEMLGAMLISWANIHYYQQLMAGARAAIAAGRYADYVAETKGGWARGDIPPVG

SEQ ID NO: 62335 - protein, 378 aa, unidentified
  source 1..378: note = Xanthobacteraceae bacterium
  REGION 1..378: note = tr|A0A521W173|A0A521W173_9RHIZ Queuine tRNA-ribosyltransferase OS=Xanthobacteraceae bacterium; OX = 2021379 GN=tgt PE=3 SV=1
MSLPNHFRLQATDGAARAGALTTPHGVVRTPAFMPVGTLGAMKGVHWREVRDAGADIVLANTYHLMLRPGAERIAALGGLQKFTTWPGPILTDSGGFQVMSLAQLRKVTEEGVAFRSHIDGASVDLSPERAIEVQRLLGSDIAMQLDECVRLPAGRDEIARAMELSLRWAARSRRAFEIATPGAMLFGIVQGGDVPDLRHHSAAGLIDIGFHGYAIGGLAVGEPQAVMLAMLEETAPLLPTERPRYLMGVGTPEDILEAVGRGIDMFDCVLPTRNGRHGLAFTRRGPVNLRNARHAEDPRPLDDESPWPATRTYARAYLHHLVKANETLGAMLLSEINIAYYQSLMAGIRAAIAAGTFTSFRDAARENWARGDIAPRA

SEQ ID NO: 62336 - protein, 376 aa, unidentified
  source 1..376: note = Xanthomarina gelatinilytica
  REGION 1..376: note = tr|M7MFX5|M7MFX5_9FLAO Queuine tRNA-ribosyltransferase OS=Xanthomarina gelatinilytica; OX = 1137281 GN=tgt PE=3 SV=1
MIFELKGKDTQSKARAGEITTDHGKIETPIFMPVGTVASVKGVHQRELKNDINPDIILGNTYHLYLRPQTKILEKAGGLHKFMNWDRNILTDSGGYQVYSLSANRKIKEEGVKFKSHIDGSYHTFTPENVMEIQRSIGADIIMAFDECTPYPCDYHYAKRSMHMTHRWLDRCMTHLEKTPFKYGYSQTFFPIVQGSTYKDLRMQSAEYIANAGAEGNAIGGLSVGEPAEEMYAMTEVVTTILPEDKPRYLMGVGTPINILENIALGVDMFDCVMPTRNARNGMLFTAHGTINIKNKKWEADFSPVDELGITFVDTDYTKAYLRHLFSVNERLGAQIATIHNLGFYMWLVREARKHILAGDFRTWKDMMVKQMDKRL

SEQ ID NO: 62337 - protein, 376 aa, unidentified; identical to SEQ ID NO: 62336
  source 1..376: note = Xanthomarina sp.
  REGION 1..376: note = tr|A0A2D8CVZ1|A0A2D8CVZ1_9FLAO Queuine tRNA-ribosyltransferase OS=Xanthomarina sp. OX=1931211; GN = tgt PE=3 SV=1

SEQ ID NO: 62338 - protein, 377 aa, unidentified
  source 1..377: note = Xanthomonadaceae bacterium
  REGION 1..377: note = tr|A0A2M9EA67|A0A2M9EA67_9GAMM Queuine tRNA-ribosyltransferase OS=Xanthomonadaceae bacterium NML91-0213 OX=2032582 GN=tgt PE=3 SV=1
MSRLRFDLLTRDGAARRGRLAFPRGTVETPAFMPVGTYGTVKGMLPDQVRALGAEIILGNTFHLYLRPGLEVIEAHGGLHGFARWDGPILTDSGGFQVFSLAHKRRITEAGVTFAAPTDGSKVFLGPEESMHIQKVLGSDIVMIFDECPPVHVDGKPVDRAVVDRSMELSLRWAERSKRAHEGNDAALFGIVQGGVHHDLRSRSAEGLKAIGFDGYAIGGLAVGETEAERNAMLDHTAPQLPEDRPRYLMGVGRPEDLVEAVARGVDMFDCVMPTRNARNGHYFTSTGAVRIRNAKYERDLRPIEEGCGCAACAGGYSRAYLRHLDRCNEMLGPILGTLHNLWHYQQLMAGMRAAIEAGTFGAFRESFYARRAAGSG

SEQ ID NO: 62339 - protein, 375 aa, unidentified
  source 1..375: note = Xanthomonadaceae bacterium
  REGION 1..375: note = tr|A0A1E4LB16|A0A1E4LB16_9GAMM Queuine tRNA-ribosyltransferase OS=Xanthomonadaceae bacterium SCN 69-48 OX=1660171 GN=tgt PE=3 SV=1
MSRMTFQLLGTDGTARRGRITFPRGVIETPAFMPVGTYGSVKGVLPQQVRDLGAQIILGNTFHLFLRPGLEVIEAHGGLHGFARWDGPILTDSGGFQVFSLAHRRKITEAGVTFAAPTDGRKVFLGPEESMHIQKVLGSDIVMIFDECPPVNDKHGQPVHRRVVEKSMELSLRWAERSKKAHEGNDAALFGIVQGGVHHDLRTLSAEGLQQIGFDGYAVGGLAVGESEDERNAMLDHTCPQLPQDRPRYLMGVGRPEDLVEAVARGIDMFDCVMPTRNARNGHFFTSTGVVRVRNSQYEHDLRPIEEGCDCVACAGGFSRSYLRHLDRCNEMLGPVLGTLHNLRYYQRLMAQMREAIAAGTFADFRESFYAARRG

SEQ ID NO: 62340 - protein, 373 aa, unidentified
  source 1..373: note = Xanthomonadales bacterium
  REGION 1..373: note = tr|A0A1Q4FR80|A0A1Q4FR80_9GAMM Queuine tRNA-ribosyltransferase OS=Xanthomonadales bacterium 63-13; OX = 1895867 GN=tgt PE=3 SV=1
MKFDLLATDSTARRGRLTFQRGTIETPAFMPVGTYGTVKAMTPRDVEETGAEIILGNTFHLFLRPGLDVIGDFSGLHRFIGWHKPILTDSGGFQVFSLAHKRKITEEGVTFASPVDGAKVFLSPEESMRIQQVLDSDIAMIFDECTPYPATEQVARESMELSLRWAARSRRAFDEHGNPNSLFGIVQGSVYPDLRKRSAHGLVEIGFDGYAIGGLAVGEPEEERNATLESIEAHLPADKPRYLMGVGRPEDIVEAVRRGVDMFDCVMPTRNARNGFLFTRHGTLRIRNAKFACDTRVIEEGCACYACRSGFSRAYLRHLDRCGEILASQLATIHNLHHYQELMRGLRAAIEASRLDAFVAGFYALRASEGEAI

SEQ ID NO: 62341 - protein, 380 aa, unidentified
  source 1..380: note = Xanthomonadales bacterium
  REGION 1..380: note = tr|A0A3N5L9G6|A0A3N5L9G6_9GAMM Queuine tRNA-ribosyltransferase OS=Xanthomonadales bacterium; OX = 2006849 GN=tgt PE=3 SV=1
MRFELLAGDGLARRGRLHLRRGTVETPVFMPVGTYGTVKAMTPEELTGLGAEIVLGNTFHLMLRPGSDVVRAHGGLHGFMHWPGPILTDSGGFQVFSLAELRKLSEQGVHFRSPVNGDPVFLSPEVSMSVQTDLDSDVVMVFDECPPYPATEAEARRSMELSMRWARRSQAAFRELANPNALFGIVQGGTHLALRLESLETLAGIGFDGYAVGGLAVGEPAAERNAVLEALAPRMPAGQPRYLMGVGTPADIVQAVARGVDMFDCVMPTRNARNGHLFTSGGVVKIRNAAHQRDTRPLDPACDCYTCRNYTRAYLRHLDRCNEILGARLHTIHNLHYYIGLMRRIRMAVEQGDYARFAAAFLAGPEGGAGSSGTASAPRV

SEQ ID NO: 62342 - protein, 392 aa, Xanthomonas albilineans
  REGION 1..392: note = tr|D2UE22|D2UE22_XANAP Queuine tRNA-ribosyltransferase OS=Xanthomonas albilineans (strain GPE PC73 / CFBP 7063) OX=380358 GN=tgt PE=3 SV=1
MSFSISDFSPFSAMSRLQFQLHTTDGAARRGRLTFPRGAVETPAFMPVGTYGSVKGVLPEQIKALGAQIILGNTFHLYLRPGLEVIGDHGGLHGFARWDGPILTDSGGFQVFSLAHRRKISEQGVTFAAPTDGAKVFLGPEESMQIQKVLDADIVMIFDECTPYPATEEVARRSMELSLRWARRSRNAHDALGNDAALFGIVQGGVHADLRSRSIEGLRTIGFDGYAIGGLAVGEPEHERNAMLEHLHPQLPADRPRYLMGVGRPEDLVEGVARGVDMFDCVMPTRNARNGHYFTSFGTVRIRNAKYERDLDPIEPGCGCYACSSGYTRAYLRHLDRCNEMLAPMLGTLHNLWYYQNLMAQMRAAIAAGTFAQFRRSFYAARGVEATLLPSE

SEQ ID NO: 62343 - protein, 381 aa, Xanthomonas alfalfae
  REGION 1..381: note = tr|A0A1S1XFP6|A0A1S1XFP6_9XANT Queuine tRNA-ribosyltransferase OS=Xanthomonas alfalfae OX=366650; GN = tgt PE=3 SV=1
MSRLQFQLQATDGHARRGRLTFPRGTVETPAFMPVGTYGSVKGILPEQIRALGAEIILGNTFHLYLRPGLEVIGDHGGLHGFARWDGPILTDSGGFQVFSLAHRRKITEQGVTFSSPTDGARVFLGPEESMKIQKVLDSDIVMIFDECTPYPATEDVARRSMELSLRWAQRSRDAHDGLGNDAALFGIVQGGVHPDLRSRSLDGLQGIGFDGYAIGGLAVGEPEHERNAMLEHLHPRLPAERPRYLMGVGRPEDLVEGVARGVDMFDCVMPTRNARNGHYFTSFGTVRIRNAKYERDLDTIEPGCGCHACSSGYTRAYLRHLDRCNEMLAPMLGTLHNLWYYEKLMADMRAAIASGTFVEFRRSFYAARGAITPPLPGETS

SEQ ID NO: 62344 - protein, 381 aa, Xanthomonas arboricola
  REGION 1..381: note = tr|A0A2N9DA93|A0A2N9DA93_9XANT Queuine tRNA-ribosyltransferase OS=Xanthomonas arboricola pv. fragariae OX=487822 GN=tgt PE=3 SV=1
MSRLQFQLQATDGHARRGRLTFPRGTVETPAFMPVGTYGSVKGILPEQIRALGAEIILGNTFHLYLRPGLDVIGDHGGLHGFARWDGPILTDSGGFQVFSLAHRRKITEQGVTFASPTDGARVFLGPEESMQIQKVLDSDIVMIFDECTPYPATEEVARRSMELSLRWAQRSRQAHDGLGNDAALFGIVQGGVHPDLRSRSLDGLQGIGFDGYAIGGLAVGEPEHERNAMLEHLHPRLPAERPRYLMGVGRPEDLVEGVARGVDMFDCVMPTRNARNGHYFTSFGTVRIRNAKYERDLDTIEPGCGCHACSSGYTRSYLRHLDRCNEMLAPMLGTLHNLWYYEKLMADLRAAIASGTFAEFRRSFYAARGAITPPLPGETS

SEQ ID NO: 62345 - protein, 381 aa, Xanthomonas arboricola
  REGION 1..381: note = tr|A0A0E3YM67|A0A0E3YM67_9XANT Queuine tRNA-ribosyltransferase OS=Xanthomonas arboricola OX=56448; GN = tgt PE=3 SV=1
MSRLQFQLQATDGHARRGRLTFPRGTVETPAFMPVGTYGSVKGILPEQIRALGAEIILGNTFHLYLRPGLDVIGDHGGLHGFARWDGPILTDSGGFQVFSLAHRRKITEQGVTFASPTDGARVFLGPEESMQIQKVLDSDIVMIFDECTPYPATEEVARRSMELSLRWAQRSRQAHDGLGNDAALFGIVQGGVHPDLRSRSLDGLQCIGFDGYAIGGLAVGEPEHERNAMLEHLHPRLPADRPRYLMGVGRPEDLVEGVARGVDMFDCVMPTRNARNGHYFTSFGTVRIRNAKYERDLDTIEPGCGCHACSSGYTRSYLRHLDRCNEMLAPMLGTLHNLWYYEKLMADLRAAIASGTFAEFRRSFYAARGAITPPLPGETS

SEQ ID NO: 62346 - protein, 381 aa, Xanthomonas axonopodis
  REGION 1..381: note = tr|A0A2S6XZ26|A0A2S6XZ26_9XANT Queuine tRNA-ribosyltransferase OS=Xanthomonas axonopodis pv. begoniae OX=473403 GN=tgt PE=3 SV=1
MSRLQFQLQATDGHARRGRLTFPRGTVQTPAFMPVGTYGSVKGILPEQIHALGAEIILGNTFHLYLRPGLEVIGDHGGLHGFARWDGPILTDSGGFQVFSLAHRRKITEQGVTFSSPTDGARVFLGPEESMQIQKVLDSDIVMIFDECTPYPATEEVARRSMELSLRWAQRSRDAHDGLGNDAALFGIVQGGVHPDLRSRSLDGLQGIGFDGYAIGGLAVGEPEHERNAMLEHLHPRLPAERPRYLMGVGRPEDLVEGVARGVDMFDCVMPTRNARNGHYFTSFGTVRIRNAKYERDLDTIEPGCGCHACSSGYTRAYLRHLDRCNEMLAPMLGTLHNLWYYEKLMADMRAAIAAGTFVEFRRSFYAARGATTPPLPGEAS

SEQ ID NO: 62347 - protein, 381 aa, Xanthomonas axonopodis
  REGION 1..381: note = sp|Q8PJL7|TGT_XANAC Queuine tRNA-ribosyltransferase; OS = Xanthomonas axonopodis pv. citri (strain 306) OX=190486; GN = tgt PE=3 SV=1
MSRLQFQLQATDGHARRGRLTFPRGTVETPAFMPVGTYGSVKGILPEQIRALGAEIILGNTFHLYLRPGLEVIGDHGGLHGFARWDGPILTDSGGFQVFSLAHRRKITEQGVTFSSPTDGARVFLGPEESMKIQKVLDSDIVMIFDECTPYPATEDVARRSMELSLRWAQRSRDAHDGLGNDAALFGIVQGGVHPDLRSRSLDGLQAIGFDGYAIGGLAVGEPEHERNAMLEHLHPRLPAERPRYLMGVGRPEDLVEGVARGVDMFDCVMPTRNARNGHYFTSFGTVRIRNAKYERDLDTIEPGCGCHACSSGYTRAYLRHLDRCNEMLAPMLGTLHNLWYYEKLMADMRAAIASGTFVEFRRSFYAARGATTPPLPGETS

SEQ ID NO: 62348 - protein, 381 aa, Xanthomonas bromi
  REGION 1..381: note = tr|A0A1C3NR63|A0A1C3NR63_9XANT Queuine tRNA-ribosyltransferase OS=Xanthomonas bromi OX=56449; GN = tgt PE=3 SV=1
MSRLQFQLQATDGHARRGRLTFPRGTVETPAFMPVGTYGSVKGILPEQIRALGAEIILGNTFHLYLRPGLEVIGDHGGLHGFARWDGPILTDSGGFQVFSLAHRRKITEQGVTFSSPTDGARVFLGPEESMKIQKVLDSDIVMIFDECTPYPATEEVARRSMELSLRWAQRSRDAHDGLDNDAALFGIVQGGVHPDLRSRSLEGLQGIGFDGYAIGGLAVGEPEHERNAMLEHLHPRLPAERPRYLMGVGRPEDLVEGVARGVDMFDCVMPTRNARNGHYFTSFGTVRIRNAKYERDLDTIEPGCGCHACSSGYTRSYLRHLDRCNEMLAPMLGTLHNLWYYEKLMADMRAAIASGTFVQFRRSFYAARGATTPPLPGETS

SEQ ID NO: 62349 - protein, 381 aa, Xanthomonas campestris
  REGION 1..381: note = sp|Q8P868|TGT_XANCP Queuine tRNA-ribosyltransferase; OS = Xanthomonas campestris pv. campestris (strain ATCC 33913 / DSM 3586 / NCPPB 528 / LMG 568 / P 25) OX=190485; GN = tgt PE=3 SV=1
MSRLQFQLQTTDGHARRGRLTFPRGTVETPAFMPVGTYGSVKGILPEQIRALGAEIILGNTFHLYLRPGLDVIGDHGGLHGFARWDGPILTDSGGFQVFSLAHRRKITEQGVTFSSPNDGARVFLGPEESMQIQKVLDSDIVMIFDECTPYPATEDVARRSMELSLRWAQRSRQAHDGLGNDAALFGIVQGGVHPDLRSRSLDGLQAIGFDGYAIGGLAVGEPEHERNAMLEHLHPRLPAERPRYLMGVGRPEDLVEGVARGVDMFDCVMPTRNARNGHYFTSFGTVRIRNAKYERDLDTIEPGCGCHACSSGYTRAYLRHLDRCNEMLAPMLGTLHNLWYYEKLMADMRAAIAAGTFVEFRRSFYAARGATTPPLPGESS

SEQ ID NO: 62350 - protein, 381 aa, Xanthomonas campestris
  REGION 1..381: note = sp|B0RRR1|TGT_XANCB Queuine tRNA-ribosyltransferase; OS = Xanthomonas campestris pv. campestris (strain B100); OX = 509169 GN=tgt PE=3 SV=1
MSRLQFQLQTTDGHARRGRLTFPRGTVETPAFMPVGTYGSVKGILPEQIRALGAEIILGNTFHLYLRPGLDVIGDHGGLHGFARWDGPILTDSGGFQVFSLAHRRKITEQGVTFSSPTDGARVFLGPEESMQIQKVLDSDIVMIFDECTPYPATEDVARRSMELSLRWAQRSRQAHDGLGNDAALFGIVQGGVHPDLRSRSLDGLQAIGFDGYAIGGLAVGEPEHERNAMLEHLHPRLPAERPRYLMGVGRPEDLVEGVARGVDMFDCVMPTRNARNGHYFTSFGTVRIRNAKYERDLDTIEPGCGCHACSSGYTRAYLRHLDRCNEMLAPMLGTLHNLWYYEKLMADMRAAIAAGTFVEFRRSFYAARGATTPPLPGESS

SEQ ID NO: 62351 - protein, 381 aa, unidentified
  source 1..381: note = Xanthomonas cannabis
  REGION 1..381: note = tr|A0A0B2CFK0|A0A0B2CFK0_9XANT Queuine tRNA-ribosyltransferase OS=Xanthomonas cannabis pv. cannabis OX=1885894 GN=tgt PE=3 SV=1
MSRLQFQLQTTDGHARRGRLTFPRGTVETPAFMPVGTYGSVKGILPEQIRALGAEIILGNTFHLYLRPGLEVIGDHGGLHGFARWDGPILTDSGGFQVFSLAHRRKITEQGVTFSSPTDGARVFLGPEESMKIQKVLDSDIVMIFDECTPYPATEEVARRSMELSLRWAQRSREAHDGLSNDAALFGIVQGGVHPDLRSRSLDGLHAIGFDGYAIGGLAVGEPEHERNAMLEHLHPQLPADRPRYLMGVGRPEDLVEGVARGVDMFDCVMPTRNARNGHYFTSFGTVRIRNAKYERDLDTIEPGCGCHACSSGYTRAYLRHLDRCNEMLAPMLGTLHNLWYYEKLMADMRAAIASGTFVQFRRSFYAARGATTPPLPGETS

SEQ ID NO: 62352 - protein, 381 aa, Xanthomonas citri
  REGION 1..381: note = tr|A0A2R2WLM9|A0A2R2WLM9_XANCI Queuine tRNA-ribosyltransferase OS=Xanthomonas citri pv. aurantifolii OX=76802 GN=tgt PE=3 SV=1
MSRLQFQLQATDGHARRGRLTFPRGTVETPAFMPVGTYGSVKGILPEQIRALGAEIILGNTFHLYLRPGLEVIGDHGGLHGFARWDGPILTDSGGFQVFSLAHRRKITEQGVTFSSPTDGARVFLGPEESMKIQKVLDSDIVMIFDECTPYPATEDVARRSMELSLRWAQRSRDAHDGLGNDAALFGIVQGGVHPDLRSRSLDGLQAIGFDGYAIGGLAVGEPEHERNAMLEHLHPRLPAERPRYLMGVGRPEDLVEGVARGVDMFDCVMPTRNARNGHYFTSFGTVRIRNAKYERDLDTIEPGCGCHACSSGYTRAYLRHLDRCNEMLAPMLGTLHNLWYYEKLMADMRAAIAAGTFVEFRRSFYAARGATTPPLPGETS

SEQ ID NO: 62353 - protein, 381 aa, Xanthomonas citri
  REGION 1..381: note = tr|A0A220WGC2|A0A220WGC2_XANCI Queuine tRNA-ribosyltransferase OS=Xanthomonas citri pv. vignicola; OX = 473426 GN=tgt PE=3 SV=1
MSRLQFQLQATDGHARRGRLTFPRGTVETPAFMPVGTYGSVKGILPEQIRALGAEIILGNTFHLYLRPGLEVIGDHGGLHGFARWDGPILTDSGGFQVFSLAHRRKITEQGVTFSSPTDGARVFLGPEESMKIQEVLDSDIVMIFDECTPYPATEDVARRSMELSLRWAQRSRDAHDGLGNDAALFGIVQGGVHPDLRSRSLDGLQAIGFDGYAIGGLAVGEPEHERNAMLEHLHPRLPAERPRYLMGVGRPEDLVEGVARGVDMFDCVMPTRNARNGHYFTSFGTVRIRNAKYERDLDTIEPGCGCHACSSGYTRAYLRHLDRCNEMLAPMLGTLHNLWYYEKLMADMRAAIAAGTFVEFRRSFYAARGATTPPLPGETS

SEQ ID NO: 62354 - protein, 398 aa, Xanthomonas codiaei
  REGION 1..398: note = tr|A0A2S7C882|A0A2S7C882_9XANT Queuine tRNA-ribosyltransferase OS=Xanthomonas codiaei OX=56463; GN = tgt PE=3 SV=1
MSRLQFQLQTTDGHARRGRLTFPRGTVETPAFMPVGTYGSVKGILPEQIRALGAEIILGNTFHLYLRPGLDVIGDHGGLHGFARWDGPILTDSGGFQVFSLAHRRKITEQGVTFSSPTDGARVFLGPEESMQIQKVLDSDIVMIFDECTPYPATEEVARRSMELSLRWAQRSRDAHDGLGNDAALFGIVQGGVHPDLRSRSLEGLQGIGFDGYAIGGLAVGEPEHERNAMLEHLHPRLPAERPRYLMGVGRPEDLVEGVARGVDMFDCVMPTRNARNGHYFTSFGTVRIRNAKYERDLDTIEPGCGCHACSSGYTRSYLRHLDRCNEMLAPMLGTLHNLWYYEKLMADMRAAIAAGTFVQFRRSFYAARGATTPPLPGKPAEPCRPCPRRGRGGTRMA

SEQ ID NO: 62355 - protein, 381 aa, Xanthomonas cucurbitae
  REGION 1..381: note = tr|A0A2S7DU00|A0A2S7DU00_9XANT Queuine tRNA-ribosyltransferase OS=Xanthomonas cucurbitae OX=56453; GN = tgt PE=3 SV=1
MSRLQFQLQTTDGHARRGRLTFPRGTVETPAFMPVGTYGSVKGILPEQIRALGAEIILGNTFHLYLRPGLEVIGDHGGLHGFARWDGPILTDSGGFQVFSLAHRRKITEQGVTFSSPTDGARVFLGPEESMQIQKVLDSDIVMIFDECTPYPATEEVARRSMELSLRWAQRSRDAHDGLGNDAALFGIVQGGVHPDLRSRSLEGLQGIGFDGYAIGGLAVGEPEHERNAMLEHLHPRLPAERPRYLMGVGRPEDLVEGVARGVDMFDCVMPTRNARNGHYFTSFGTVRIRNAKYERDLDTIEPGCGCHACSSGYTRAYLRHLDRCNEMLAPMLGTLHNLWYYEKLMADMREAIAAGTFVQFRRSFYAARGATTPPLPGETS

SEQ ID NO: 62356 - protein, 381 aa, Xanthomonas cynarae
  REGION 1..381: note = tr|A0A2S7ATE4|A0A2S7ATE4_9XANT Queuine tRNA-ribosyltransferase OS=Xanthomonas cynarae OX=109214; GN = tgt PE=3 SV=1
MSRLQFQLQATDGHARRGRLTFPRGTVETPAFMPVGTYGSVKGILPEQIRALGAEIILGNTFHLYLRPGLDVIGDHGGLHGFARWDGPILTDSGGFQVFSLAHRRKITEQGVTFSSPTDGARVFLGPEESMQIQKVLDSDIVMIFDECTPYPATEEVARRSMELSLRWAQRSRDAHDGLGNDAALFGIVQGGVHPDLRSRSLDGLQAIGFDGYAIGGLAVGEPEHERNAMLEHLHPRLPAERPRYLMGVGRPEDLVEGVARGVDMFDCVMPTRNARNGHYFTSFGTVRIRNAKYERDLDTIEPGCGCHACSSGYTRSYLRHLDRCNEMLAPMLGTLHNLWYYEKLMADLRAAIASGTFVEFRRSFYAARGAITPPLPGETS

SEQ ID NO: 62357 - protein, 381 aa, Xanthomonas dyei
  REGION 1..381: note = tr|A0A2S7BZR3|A0A2S7BZR3_9XANT Queuine tRNA-ribosyltransferase OS=Xanthomonas dyei OX=743699; GN = tgt PE=3 SV=1
MSRLQFQLQTTDGHARRGRLTFPRGTVETPAFMPVGTYGSVKGILPEQIRALGAEIILGNTFHLYLRPGLDVIGDHGGLHGFARWDGPILTDSGGFQVFSLAHRRKITEQGVTFSSPTDGARVFLGPEESMQIQKVLDSDIVMIFDECTPYPATEEVARRSMELSLRWAQRSRDAHDGLGNDAALFGIVQGGVHPDLRSRSLEGLHAIGFDGYAIGGLAVGEPEHERNAMLEHLHPQLPADRPRYLMGVGRPEDLVEGVARGVDMFDCVMPTRNARNGHYFTSFGTVRIRNAKYERDLDTIEPGCGCHACSSGYTRAYLRHLDRCNEMLAPMLGTMHNLWYYEKLMADMRAAIAAGTFVQFRRSFYAARGATTPPLPGETS

SEQ ID NO: 62358 - protein, 381 aa, Xanthomonas euvesicatoria
  REGION 1..381: note = tr|A0A2S7EA76|A0A2S7EA76_XANEU Queuine tRNA-ribosyltransferase OS=Xanthomonas euvesicatoria pv. citrumelonis OX=189396 GN=tgt PE=3 SV=1
MSRLQFQLQATDGHARRGRLTFPRGTVETPAFMPVGTYGSVKGILPEQIRALGAEIILGNTFHLYLRPGLEVIGDHGGLHGFARWDGPILTDSGGFQVFSLAHRRKITEQGVTFSSPTDGARVFLGPEESMEIQKVLDSDIVMIFDECTPYPATEDVARRSMELSLRWAQRSRDAHDGLGNDAALFGIVQGGVHPDLRSRSLDGLQGIGFDGYAIGGLAVGEPEHERNAMLEHLHPRLPAERPRYLMGVGRPEDLVEGVARGVDMFDCVMPTRNARNGHYFTSFGTVRIRNAKYERDLDTIEPGCGCHACSSGYTRAYLRHLDRCNEMLAPMLGTLHNLWYYEKLMADMRAAIASGTFVEFRRSFYAARGATTPPLPGETS

SEQ ID NO: 62359 - protein, 381 aa, unidentified
  source 1..381: note = Xanthomonas floridensis
  REGION 1..381: note = tr|A0A1A9MBK5|A0A1A9MBK5_9XANT Queuine tRNA-ribosyltransferase OS=Xanthomonas floridensis; OX = 1843580 GN=tgt PE=3 SV=1
MSRLQFQLQTTDGHARRGRLTFPRGTVETPAFMPVGTYGSVKGILPEQIRALGAEIILGNTFHLYLRPGLEVIGDHGGLHGFARWDGPILTDSGGFQVFSLAHRRKITEQGVTFSSPTDGARVFLGPEESMQIQKVLDSDIVMIFDECTPYPATEEVARRSMELSLRWAQRSRDAHDGLGNDAALFGIVQGGVHPDLRTRSLEGLRAIGFDGYAIGGLAVGEPEHERNAMLEHLHPRLPADRPRYLMGVGRPEDLIEGVARGVDMFDCVMPTRNARNGHYFTSFGTVRIRNAKYERDLDTIEPGCGCHACSSGYTRSYLRHLDRCNEMLAPMLGTLHNLWYYEKLMADMRAAIAAGTFVQFRRSFYAARGATTPPLPGETS

SEQ ID NO: 62360 - protein, 381 aa, Xanthomonas fragariae
  REGION 1..381: note = tr|A0A1Y6HL40|A0A1Y6HL40_9XANT Queuine tRNA-ribosyltransferase OS=Xanthomonas fragariae OX=48664; GN = tgt PE=3 SV=1
MSRLQFQLQTTEGNARRGRLTFPRGTVETPAFMPVGTYGSVKGILPEQIRALGAEIILGNTFHLYLRPGLEVIGDHGGLHGFARWDGPILTDSGGFQVFSLAHRRKITDQGVTFSSPTDGARVFLGPEESMQIQKVLDSDIVMIFDECTPYPATEDVARRSMELSLRWAQRSRDAHDGLGNDAALFGIVQGGVHPDLRSRSLDGLQGIGFDGYAIGGLAVGEPEHERNAMLEHLHPRLPAERPRYLMGVGRPEDLVEGVARGVDMFDCVMPTRNARNGHYFTSFGTVRIRNAKYERDPDTIEPGCGCHACSSGYTRSYLRHLDRCGEMLAPMLGTLHNLWYYEKLMSDMRTAIASGTFVEFRRSFYAARGATTPRLPGESS

SEQ ID NO: 62361 - protein, 381 aa, Xanthomonas gardneri
  REGION 1..381: note = tr|F0C169|F0C169_9XANT Queuine tRNA-ribosyltransferase OS=Xanthomonas gardneri ATCC 19865; OX = 925777 GN=tgt PE=3 SV=1
MSRLQFQLQATDGHARRGRLTFPRGTVETPAFMPVGTYGSVKGILPEQIRALGAEIILGNTFHLYLRPGLDVIGDHGGLHGFARWDGPILTDSGGFQVFSLAHRRKITEQGVTFSSPTDGARVFLGPEESMQIQKVLDSDIVMIFDECTPYPATEEVARRSMELSLRWAQRSRDAHDGLGNDAALFGIVQGGVHPDLRSRSLDGLQGIGFDGYAIGGLAVGEPEHERNAMLEHLHPRLPAERPRYLMGVGRPEDLVEGVARGVDMFDCVMPTRNARNGHYFTSFGTVRIRNAKYERDLDTIEPGCGCHACSSGYTRSYLRHLDRCNEMLAPMLGTLHNLWYYEKLMADLRAAIAAGTFVEFRRSFYAARGAITPPLPGETS

SEQ ID NO: 62362 - protein, 381 aa, Xanthomonas gardneri
  REGION 1..381: note = tr|A0A1L5Y1X1|A0A1L5Y1X1_9XANT Queuine tRNA-ribosyltransferase OS=Xanthomonas gardneri OX=90270; GN = tgt PE=3 SV=1
MSRLQFQLQATDGHARRGRLTFPRGTVETPAFMPVGTYGSVKGILPEQIRALGAEIILGNTFHLYLRPGLDVIGDHGGLHGFARWDGPILTDSGGFQVFSLAHRRKITEQGVTFSSPTDGARVFLGPEESMQIQKVLDSDIVMIFDECTPYPATEEVARRSMELSLRWAQRSREAHDGLGNDAALFGIVQGGVHPDLRSRSLDGLQGIGFDGYAIGGLAVGEPEHERNAMLEHLHPRLPAERPRYLMGVGRPEDLVEGVARGVDMFDCVMPTRNARNGHYFTSFGTVRIRNAKYERDLDTIEPGCGCHACSSGYTRSYLRHLDRCNEMLAPMLGTLHNLWYYEKLMADLRAAIASGTFVEFRRSFYAARGAITPPLPGEAS

SEQ ID NO: 62363 - protein, 381 aa, Xanthomonas hortorum
  REGION 1..381: note = tr|V7ZCS2|V7ZCS2_9XANT Queuine tRNA-ribosyltransferase OS=Xanthomonas hortorum pv. carotae str. M081 OX=863365 GN=tgt PE=3 SV=1
MSRLQFQLQATDGHARRGRLTFPRGTVETPAFMPVGTYGSVKGILPEQIRALGAEIILGNTFHLYLRPGLDVIGDHGGLHGFARWDGPILTDSGGFQVFSLAHRRKITEQGVTFSSPTDGARVFLGPEESMQIQKVLDSDIVMIFDECTPYPATEEVARRSMELSLRWAQRSRDAHDGLGNDAALFGIVQGGVHPDLRSRSLDGLQGIGFDGYAIGGLAVGEPEHERNAMLEHLHPRLPAERPRYLMGVGRPEDLVEGVARGVDMFDCVMPTRNARNGHYFTSFGTVRIRNAKYERDLDTIEPGCGCHACSSGYTRSYLRHLDRCNEMLAPMLGTLHNLWYYEKLMADLRAAIASGTFVEFRRSFYAARGGATPPLPGETS

SEQ ID NO: 62364 - protein, 381 aa, Xanthomonas hortorum
  REGION 1..381: note = tr|A0A2S7E0H5|A0A2S7E0H5_9XANT Queuine tRNA-ribosyltransferase OS=Xanthomonas hortorum pv. hederae OX=453603 GN=tgt PE=3 SV=1
MSRLQFQLQATDGHARRGRLTFPRGTVETPAFMPVGTYGSVKGVLPEQIRALGAEIILGNTFHLYLRPGLDVIGDHGGLHGFARWDGPILTDSGGFQVFSLAHRRKITEQGVTFSSPTDGARVFLGPEESMQIQKVLDSDIVMIFDECTPYPATEDVARRSMELSLRWAQRSRDAHDGLGNDAALFGIVQGGVHPDLRSRSLDGLQGIGFDGYAIGGLAVGEPEHERNAMLEHLHPRLPAERPRYLMGVGRPEDLVEGVARGVDMFDCVMPTRNARNGHYFTSFGTVRIRNAKYERDLDTIEPGCGCHACSSGYTRSYLRHLDRCNEMLAPMLGTLHNLWYYEKLMADLRAAIASGTFVEFRRSFYAARGAITPPLPGETS

SEQ ID NO: 62365 - protein, 381 aa, unidentified
  source 1..381: note = Xanthomonas hyacinthi
  REGION 1..381: note = tr|A0A2S7F1F7|A0A2S7F1F7_9XANT Queuine tRNA-ribosyltransferase OS=Xanthomonas hyacinthi OX=56455; GN = tgt PE=3 SV=1
MSRLQFQLDTSDGAARRGRLTFPRGTVETPAFMPVGTYGSVKGVLPEQIRALGAQIILGNTFHLYLRPGLDVIGDHGGLHGFARWDGPILTDSGGFQVFSLAHRRKISEQGVTFASPTDGAKVFLGPEESMRIQKVLDSDIVMIFDECTPYPATEDVARRSMELSLRWAQRSRDAHEALSNDAALFGIVQGGVHADLRTRSIEGLQAIGFDGYAIGGLAVGEPEHERNAMLEHLHPRLPADRPRYLMGVGRPEDLVEGVARGVDMFDCVMPTRNARNGHYFTAFGTVRIRNARYERDLAPIEPGCGCHACSGGYTRSYLRHLDRCNEMLAPMLGTLHNLWYYQKLMADMRAAIAAGTFARFRRSFYAARGAEATAFPSEQG

SEQ ID NO: 62366 - protein, 381 aa, Xanthomonas melonis
  REGION 1..381: note = tr|A0A2S7DEF3|A0A2S7DEF3_9XANT Queuine tRNA-ribosyltransferase OS=Xanthomonas melonis OX=56456; GN = tgt PE=3 SV=1
MSRLQFQLQTTDGHARRGRLTFPRGTVETPAFMPVGTYGSVKGILPEQIRALGAEIILGNTFHLYLRPGLDVIGDHGGLHGFARWDGPILTDSGGFQVFSLAHRRKITEQGVTFASPTDGARVFLGPEESMQIQKVLDSDIVMIFDECTPYPATEEVARRSMELSLRWAQRSRQAHDGLGNDAALFGIVQGGVHPDLRTRSLEGLRAIGFDGYAIGGLAVGEPEHERNAMLEHLHPRLPADRPRYLMGVGRPEDLVEGVARGVDMFDCVMPTRNARNGHYFTSFGTVRIRNAKYERDLDTIEPGCGCHACSSGYTRSYLRHLDRCNEMLAPMLGTLHNLWYYEKLMADMRAAIASGTFVQFRRSFYAARGATTPPLPGETS

SEQ ID NO: 62367 - protein, 381 aa, unidentified
  source 1..381: note = Xanthomonas nasturtii
  REGION 1..381: note = tr|A0A3E1KIF3|A0A3E1KIF3_9XANT Queuine tRNA-ribosyltransferase OS=Xanthomonas nasturtii; OX = 1843581 GN=tgt PE=3 SV=1
MSRLQFQLQATDGHARRGRLTFPRGTVETPAFMPVGTYGSVKGILPEQIRALGAEIILGNTFHLYLRPGLDVIGDHGGLHGFARWDGPILTDSGGFQVFSLAHRRKITEQGVTFSSPTDGARVFLGPEESMQIQKVLDSDIVMIFDECTPYPATEEVARRSMELSLRWAQRSRDAHDGLGNDAALFGIVQGGVHPDLRSRSLDGLRAIGFDGYAIGGLAVGEPEHERNAMLEHLHPRLPAERPRYLMGVGRPEDLVEGVARGVDMFDCVMPTRNARNGHYFTSFGTVRIRNAKYERDLDTIEPGCGCHACCSGYTRSYLRHLDRCNEMLAPMLGTLHNLWYYEKLMSDLRAAIASGTFVEFRRSFYAARGAITPPLPGETS

SEQ ID NO: 62368 - protein, 381 aa, Xanthomonas oryzae
  REGION 1..381: note = sp|B2SIN8|TGT_XANOP Queuine tRNA-ribosyltransferase; OS = Xanthomonas oryzae pv. oryzae (strain PXO99A) OX=360094; GN = tgt PE=3 SV=1
MSRLQFQLQATDGHARRGRLTFPRGTVETPAFMPVGTYGSVKGILPEHIRALGAEIILGNTFHLYLRPGLDVIGDHGGLHGFARWDGPILTDSGGFQVFSLAHRRKITEQGVTFSSPTDGARVFLGPEESMKIQKVLDSDIVMIFDECTPYPATEDLARRSMELSLRWAQRSRDAHDGLGNDAALFGIVQGGVHPDLRSRSLDGLQSIGFDGYAIGGLAVGEPEHERNAMLEHLHPRLPAECPRYLMGVGRPEDLVEGVARGVDMFDCVMPTRNARNGHYFTSFGTVRIRNAKYERDLDTIEPGCGCHACSSGYTRSYLRHLDRCNEMLAPMLGTLHNLWYYEKLMADMRAAIASGTFVEFRRSFYAARGATTPPLPGETS

SEQ ID NO: 62369 - protein, 381 aa, Xanthomonas oryzae; identical to SEQ ID NO: 62368
  REGION 1..381: note = sp|Q5GZY3|TGT_XANOR Queuine tRNA-ribosyltransferase; OS = Xanthomonas oryzae pv. oryzae (strain KACC10331 / KXO85) OX=291331 GN=tgt PE=3 SV=1

SEQ ID NO: 62370 - protein, 381 aa, Xanthomonas perforans; identical to SEQ ID NO: 62358
  REGION 1..381: note = tr|A0A0G9AIL3|A0A0G9AIL3_9XANT Queuine tRNA-ribosyltransferase OS=Xanthomonas perforans OX=442694; GN = tgt PE=3 SV=1

SEQ ID NO: 62371 - protein, 381 aa, Xanthomonas phaseoli
  REGION 1..381: note = tr|A0A1V9HCW1|A0A1V9HCW1_9XANT Queuine tRNA-ribosyltransferase OS=Xanthomonas phaseoli pv. dieffenbachiae OX=92828 GN=tgt PE=3 SV=1
MSRLQFQLQATDGHARRGRLTFPRGTVQTPAFMPVGTYGSVKGILPEQIRALGAEIILGNTFHLYLRPGLEVIGDHGGLHGFARWDGPILTDSGGFQVFSLAHRRKITEQGVTFSSPTDGARVFLGPEESMQIQKVLDSDIVMIFDECTPYPATEEVARRSMELSLRWAQRSRDAHDGLGNDAALFGIVQGGVHPDLRSRSLEGLQGIGFDGYAIGGLAVGEPEHERNAMLEHLHPRLPAERPRYLMGVGRPEDLVEGVARGVDMFDCVMPTRNARNGHYFTSFGTVRIRNAKYERDLDTIEPGCGCHACSSGYTRAYLRHLDRCNEMLAPMLGTLHNLWYYEKLMADMRAAIAAGTFVEFRRSFYAARGATTPPLPGEAS

SEQ ID NO: 62372 - protein, 381 aa, Xanthomonas phaseoli
  REGION 1..381: note = tr|A0A1V9HMJ7|A0A1V9HMJ7_9XANT Queuine tRNA-ribosyltransferase OS=Xanthomonas phaseoli pv. syngonii LMG 9055 OX=1437878 GN=tgt PE=3 SV=1
MSRLQFQLQATDGHARRGRLTFPRGTVQTPAFMPVGTYGSVKGILPEQIRALGAEIILGNTFHLYLHPGLEVIGDHGGLHGFARWDGPILTDSGGFQVFSLAHRRKITEQGVTFSSPTDGARVFLGPEESMQIQKVLDSDIVMIFDECTPYPATEEVAGRSMELSLRWAQRSRDAHDGLGNDAALFGIVQGGVHPDLRSRSLDGLQGIGFDGYAIGGLAVGEPEPERNAMLEHLHPRLPADRPRYLMGVGRPEDLVEGVARGVDMFDCVMPTRNARNGHYFTSFGTVRIRNAKYERDLDTIEPGCGCHACSSGYTRAYLRHLDRCNEMLAPMLGTLHNLWYYEKLMADMRAAIAAGTFVEFRRSFYAARGATTPPLPGEAS

SEQ ID NO: 62373 - protein, 381 aa, Xanthomonas pisi
  REGION 1..381: note = tr|A0A2S7CT32|A0A2S7CT32_9XANT Queuine tRNA-ribosyltransferase OS=Xanthomonas pisi OX=56457; GN = tgt PE=3 SV=1
MSRLQFQLQSTDGHARRGRLTFPRGTVETPAFMPVGTYGSVKGILPEQIRALGAEIILGNTFHLYLRPGLDVIGDHGGLHGFARWDGPILTDSGGFQVFSLAHRRKITEQGVTFSSPTDGARVFLGPEESMQIQKVLDSDIVMIFDECTPYPATEEVARRSMELSLRWAQRSRDAHDGLGNDAALFGIVQGGVHPDLRSRSLDGLQGIGFDGYAIGGLAVGEPEHERNAMLEHLHPRLPADRPRYLMGVGRPEDLVEGVARGVDMFDCVMPTRNARNGHYFTSFGTVRIRNAKYERDLDTIEPGCGCHACSSGYTRSYLRHLDRCNEMLAPMLGTLHNLWYYEKLMADMRAAIAAGTFVQFRRSFYAARGATTPPLPGETS

SEQ ID NO: 62374 - protein, 381 aa, Xanthomonas populi
  REGION 1..381: note = tr|A0A2S7F2H9|A0A2S7F2H9_9XANT Queuine tRNA-ribosyltransferase OS=Xanthomonas populi OX=53414; GN = tgt PE=3 SV=1
MSRLQFQLQANDGHARRGRLTFPRGTVETPAFMPVGTYGSVKGILPEQIRALGAEIILGNTFHLYLRPGLDVIGDHGGLHGFARWNGPVLTDSGGFQVFSLAHRRKITEQGVTFSSPTDGARVFLGPEESMQIQKVLDSDIVMIFDECTPYPATEDVARRSMELSLRWAQRSRQAHDVLGNDAALFGIVQGGVHPDLRSRSLDGLQGIGFDGYAIGGLAVGEPEHERNAMLEHLHPRLPVERPRYLMGVGRPEDLVEGVARGVDMFDCVMPTRNARNGHYFTSFGTVRIRNAKYERDLDTIEPGCGCHACSSGYTRSYLRHLDRCNEMLAPMLGTLHNLWYYEKLMAQMRAAIASGTFVEFRRSFYAARGAITPPLPGEIS

SEQ ID NO: 62375 - protein, 381 aa, unidentified
  source 1..381: note = Xanthomonas prunicola
  REGION 1..381: note = tr|A0A2N3RHL6|A0A2N3RHL6_9XANT Queuine tRNA-ribosyltransferase OS=Xanthomonas prunicola; OX = 2053930 GN=tgt PE=3 SV=1
MSRLQFQLQATDGHARRGRLTFPRGTVETPAFMPVGTYGSVKGILPEQIRALGAEIILGNTFHLYLRPGLDVIGDHGGLHGFARWDGPILTDSGGFQVFSLAHRRKITEQGVTFSSPTDGARVFLGPEESMKIQKVLDSDIVMIFDECTPYPATEDVARRSMELSLRWAQRSRDAHDGLGNDAALFGIVQGGVHPDLRSRSLDGLQGIGFDGYAIGGLAVGEPEHERNAMLEHLHPRLPSERPRYLMGVGRPEDLVEGVARGVDMFDCVMPTRNARNGHYFTSFGTVRIRNAKYERDLDTIEPGCGCHACSSGYTRSYLRHLDRCNEMLAPMLGTLHNLWYYEKLMADLRAAIASGTFVQFRRSFYAARGATTPPLPGEAS

SEQ ID NO: 62376 - protein, 381 aa, Xanthomonas sacchari
  REGION 1..381: note = tr|A0A0A8E2D4|A0A0A8E2D4_9XANT Queuine tRNA-ribosyltransferase OS=Xanthomonas sacchari OX=56458; GN = tgt PE=3 SV=1
MSRLQFQLHTTDGAARRGRLTFPRGTVETPAFMPVGTYGSVKGVLPEQIKALGAQIILGNTFHLYLRPGLDVIGDHGGLHGFARWDGPILTDSGGFQVFSLAHRRKISEQGVTFASPTDGAKVFLGPEESMKIQRVLDSDIVMIFDECTPYPATEDVARRSMELSLRWAQRSRDAHDALGNDAALFGIVQGGVHADLRSRSIEGLQAIGFDGYAIGGLAVGEPEHERNAMLEHLHPRLPGDRPRYLMGVGRPEDLVEGVARGVDMFDCVMPTRNARNGHYFTSFGTVRIRNAKYERDLDPIEPGCGCHACSSGYTRAYLRHLDRCNEMLAPMLGTLHNLWYYQKLMADMRAAIAAGTFAQFRRSFYAARGVEATPLPSEQG

SEQ ID NO: 62377 - protein, 381 aa, Xanthomonas sacchari
  REGION 1..381: note = tr|A0A5D1A4U1|A0A5D1A4U1_9XANT Queuine tRNA-ribosyltransferase OS=Xanthomonas sacchari OX=56458; GN = tgt PE=3 SV=1
MSRLQFQLHTTDGAARRGRLTFPRGTVETPAFMPVGTYGSVKGVLPEQIKALGAQIILGNTFHLYLRPGLDVIGDHGGLHGFARWDGPILTDSGGFQVFSLAHRRKISEQGVTFASPTDGAKVFLGPEESMKIQRVLDSDIVMIFDECTPYPATEDVARRSMELSLRWAQRSRDAHDALGNDAALFGIVQGGVHADLRSRSIEGLQAIGFDGYAIGGLAVGEPEHERNAMLEHLHPRLPGDRPRYLMGVGRPEDLVEGVARGVDMFDCVMPTRNARNGHYFTSFGTVRIRNARYERDLDPIEPGCGCHACSSGYTRAYLRHLDRCNEMLAPMLGTLHNLWYYQKLMADMRAAIAAGTFARFRRSFYAARGMEATPLPTEHG

SEQ ID NO: 62378 - protein, 381 aa, Xanthomonas sp.
  REGION 1..381: note = tr|A0A3A5ER12|A0A3A5ER12_9XANT Queuine tRNA-ribosyltransferase OS=Xanthomonas sp. CFBP 7698; OX = 2082399 GN=tgt PE=3 SV=1
MSRLQFQLQTTDGHARRGRLTFPRGTVETPAFMPVGTYGSVKGILPEQIRALGAEIILGNTFHLYLRPGLDVIGDHGGLHGFARWDGPILTDSGGFQVFSLAHRRKITEQGVTFSSPTDGARVFLGPEESMKIQKVLDSDIVMIFDECTPYPATEEVARRSMELSLRWAQRSREAHDGLGNDAALFGIVQGGVHPGLRSRSLDGLHAIGFDGYAIGGLAVGEPEHERNAMLEHLHPQLPADRPRYLMGVGRPEDLVEGVARGVDMFDCVMPTRNARNGHYFTSFGTVRIRNAKYERDLDTIEPGCGCHACSSGYTRSYLRHLDRCNEMLAPMLGTLHNLWYYEKLMADMRAAIASGTFVEFRRSFYAARGATTPPLPGETS

SEQ ID NO: 62379 - protein, 381 aa, Xanthomonas sp.
  REGION 1..381: note = tr|A0A0Q5G4E3|A0A0Q5G4E3_9XANT Queuine tRNA-ribosyltransferase OS=Xanthomonas sp. Leaf131; OX = 1736270 GN=tgt PE=3 SV=1
MSRLQFQLQATDGHARRGRLTFPRGTVETPAFMPVGTYGSVKGILPEQIHALGAEIILGNTFHLYLRPGLEVIGDHGGLHGFARWDGPILTDSGGFQVFSLAHRRKITEQGVTFSSPTDGARVFLGPEESMKIQKVLDSDIVMIFDECTPYPATEEVARRSMELSLRWAQRSREAHDGLGNDAALFGIVQGGVHPDLRSRSLDGLQGIGFDGYAIGGLAVGEPEHERNAMLEHLHPRLPAERPRYLMGVGRPEDLVEGVARGVDMFDCVMPTRNARNGHYFTSFGTVRIRNAKYERDLDTIEPGCGCHACSSGYTRSYLRHLDRCNEMLAPMLGTLHNLWYYEKLMADLRAAIASGTFVEFRRSFYAARGAITPPLPGETS

SEQ ID NO: 62380 - protein, 381 aa, Xanthomonas theicola
  REGION 1..381: note = tr|A0A2S6ZD98|A0A2S6ZD98_9XANT Queuine tRNA-ribosyltransferase OS=Xanthomonas theicola OX=56464; GN = tgt PE=3 SV=1
MSRLQFQLDTTDGAARRGRLTFPRGTVETPAFMPVGTYGSVKGVLPEQIRALGAQIILGNTFHLYLRPGLDVIGDHGGLHGFARWDGPILTDSGGFQVFSLAHRRKISEQGVTFASPTDGAKVFLGPEESMRIQKVLDSDVVMIFDECTPYPATEDVARRSMELSLRWAQRSRDAHDGLGNDAALFGIVQGGVHADLRTRSIEGLQAIGFDGYAIGGLAVGEPEHERNAMLEHLHPRLPADHPRYLMGVGRPEDLVEGVARGVDMFDCVMPTRNARNGHYFTAFGTVRIRNARYERDLSPIEPGCGCHACSGGYTRSYLRHLDRCNEMLAPMLGTLHNLWYYQKLMADMRAAIAAGTFAQFRRSFYAARGVEAAPLPSEQG

SEQ ID NO: 62381 - protein, 381 aa, Xanthomonas translucens
  REGION 1..381: note = tr|A0A1M4ILY0|A0A1M4ILY0_XANCT Queuine tRNA-ribosyltransferase OS=Xanthomonas translucens pv. graminis OX=134874 GN=tgt PE=3 SV=1
MSRLQFQLDTTDGAARRGRLTFPRGTVETPAFMPVGTYGSVKGVLPEQIKALGAQIILGNTFHLYLRPGLDVIGDHGGLHGFARWDGPILTDSGGFQVFSLAHRRKISEQGVTFASPTDGAKVFLGPEESMRIQKVLDSDIVMIFDECTPYPATEDVARRSMELSLRWAQRSREAHDGLDNDAALFGIVQGGVHADLRTRSIEGLQAIGFDGYAIGGLAVGEPEHERNAMLEHLHPRLPAERPRYLMGVGRPEDLVEGVARGVDMFDCVMPTRNARNGHYFTAFGTVRIRNARYERDLAPIEPGCGCHACSGGYTRSYLRHLDRCNEMLAPMLGTLHNLWYYQKLMADMRAAIATGTFAQFRRSFYAARGAEATPLPSEQG

SEQ ID NO: 62382 - protein, 380 aa, Xanthomonas translucens
  REGION 1..380: note = tr|A0A0K2ZJA5|A0A0K2ZJA5_XANCT Queuine tRNA-ribosyltransferase OS=Xanthomonas translucens pv. phlei OX=487906 GN=tgt PE=3 SV=1
MSRLQFQLDTTDGAARRGRLTFPRGTVETPAFMPVGTYGSVKGVLPEQIKALGAQIILGNTFHLYLRPGLDVIGDHGGLHGFARWDGPILTDSGGFQVFSLAHRRKISEQGVTFASPTDGAKVFLGPEESMRIQKVLDSDIVMIFDECTPYPATEDVARRSMELSLRWAQRSREAHDGLDNDAALFGIVQGGVHADLRTRSIEGLQAIGFDGYAIGGLAVGEPEHERNAMLEHLHPRLPADRPRYLMGVGRPEDLVEGVARGVDMFDCVMPTRNARNGHYFTSFGTVRIRNARYERDLAPIEPGCGCHACSGGYTRSYLRHLDRCNEMLAPMLGTLHNLWYYQKLMADMRAAIAAGTFAQFRRSFYAARGVEATPLPSEQ

SEQ ID NO: 62383 - protein, 381 aa, Xanthomonas vasicola
  REGION 1..381: note = tr|A0A2P5ZJK1|A0A2P5ZJK1_XANVA Queuine tRNA-ribosyltransferase OS=Xanthomonas vasicola OX=56459; GN = tgt PE=3 SV=1
MSRLQFQLQATDGHARRGRLTFPRGTVETPAFMPVGTYGSVKGILPEQIRALGAEIILGNTFHLYLRPGLDVIGDHGGLHRFARWDGPILTDSGGFQVFSLAHRRKITEQGVTFSSPTDGARVFLGPEESMQIQKVLDSDIVMIFDECTPYPATEEVARRSMELSLRWAQRSRDAHDGLGNDAALFGIVQGGVHPDLRSRSLDGLQGIGFDGYAIGGLAVGEPEHERNAMLEHLHPRLPSERPRYLMGVGRPEDLVEGVARGVDMFDCVMPTRNARNGHYFTSFGTVRIRNAKYERDLDTIEPGCGCHACSSGYTRSYLRHLDRCNEMLAPMLGTLHNLWYYEKLMADMRAAIASGTFVEFRRSFYAARGATTPPLPGETS

SEQ ID NO: 62384 - protein, 381 aa, Xanthomonas vasicola
  REGION 1..381: note = tr|A0A5K1N3F8|A0A5K1N3F8_XANVA Queuine tRNA-ribosyltransferase OS=Xanthomonas vasicola pv. vasculorum NCPPB 206 OX=1094181 GN=tgt PE=4 SV=1
MSRLQFQLQATDGHARRGRLTFPRGTVETPAFMPVGTYGSVKGILPEQIRALGAEIILGNTFHLYLRPGLDVIGDHGGLHRFARWDGPILTDSGGFQVFSLAHRRKITEQGVTFSSPNDGARVFLGPEESMQIQKVLDSDIVMIFDECTPYPATEEVARRSMELSLRWAQRSRDAHDGLGSDAALFGIVQGGVHPDLRSRSLDGLQGIGFDGYAIGGLAVGEPEHERNAMLEHLHPRLPAERPRYLMGVGRPEDLVEGVARGVDMFDCVMPTRNARNGHYFTSFGTVRIRNAKYERDLDTIEPGCGCHACSSGYTRSYLRHLDRCNEMLAPMLGTLHNLWYYEKLMADMRAAIASGTFVEFRRSFYAARGATTPPLPGETS

SEQ ID NO: 62385 - protein, 381 aa, Xanthomonas vesicatoria
  REGION 1..381: note = tr|F0BB49|F0BB49_9XANT Queuine tRNA-ribosyltransferase OS=Xanthomonas vesicatoria ATCC 35937 OX=925775 GN=tgt PE=3 SV=1
MSRLQFQLQATDGHARRGRLTFPRGTVETPAFMPVGTYGSVKGILPEQIRALGAEIILGNTFHLYLRPGLDVIGDHGGLHGFARWDGPILTDSGGFQVFSLAHRRKITEQGVTFASPTDGARVFLGPEESMQIQKVLDSDIVMIFDECTPYPATEEVARRSMELSLRWAQRSRDAHDGLGNDAALFGIVQGGVHPDLRTRSLEGLHAIGFDGYAIGGLAVGEPEHERNAMLEHLHPRLPAERPRYLMGVGRPEDLVEGVARGVDMFDCVMPTRNARNGHYFTSFGTVRIRNAKYERDLDTIEPGCGCHACSSGYTRSYLRHLDRCNEMLAPMLGTLHNLWYYEKLMADMRAAIAAGTFVQFRRSFYAARGATTPPLPGETS

SEQ ID NO: 62386 - protein, 381 aa, Xanthomonas vesicatoria
  REGION 1..381: note = tr|A0A1L5QPN8|A0A1L5QPN8_9XANT Queuine tRNA-ribosyltransferase OS=Xanthomonas vesicatoria; OX = 56460 GN=tgt PE=3 SV=1
MSRLQFQLQATDGHARRGRLTFPRGTVETPAFMPVGTYGSVKGILPEQIRALGAEIILGNTFHLYLRPGLDVIGDHGGLHGFARWDGPILTDSGGFQVFSLAHRRKITEQGVTFASPTDGARVFLGPEESMQIQKVLDSDIVMIFDECTPYPATEEVARRSMELSLRWAQRSRDAHDGLGNDAALFGIVQGGVHPDLRTRSLESLHAIGFDGYAIGGLAVGEPEHERNAMLEHLHPRLPAERPRYLMGVGRPEDLVEGVARGVDMFDCVMPTRNARNGHYFTSFGTVRIRNAKYERDLDTIEPGCGCHACSSGYTRSYLRHLDRCNEMLAPMLGTLHNLWYYEKLMADMRAAIAAGTFVQFRRSFYAARGATTPPLPGETS

SEQ ID NO: 62387 - protein, 368 aa, Xenococcus sp.
  REGION 1..368: note = tr|L8M1U0|L8M1U0_9CYAN Queuine tRNA-ribosyltransferase OS=Xenococcus sp. PCC 7305; OX = 102125 GN=tgt PE=3 SV=1
MGFSFQLQANCNHSQARAGVFSTPHGIVETPRFMPVGTLATVKGITPRQLQDASAQMILANTYHLHLQPGEDIIAEAGGLHSFMAWDKPILTDSGGFQVFSLSELRKISEEGVIFRSPRDGNMIEITPERSIQIQNALGADVIMAFDECPPSDASQEEVAAATDRTNRWLKRCIAAHENPKTQALFGIVQGGIHLDLRSQAVEELTALDLPGYAIGGVSVGEAPELINATVQHTAPLLPVDKPRYLMGVGTYREMVQAIASGIDLFDCVIPTRFGRHGTALVQGNRINIKNAQYKRDYQPLDETCPCYACTNFTRAYLNHLVRSQEMLGYILLSLHNITELIRFTQQIRQAIFNDTFVSQFSHWIDVD

SEQ ID NO: 62388 - protein, 371 aa, Xenophilus sp.
  REGION 1..371: note = tr|A0A254VKS7|A0A254VKS7_9BURK Queuine tRNA-ribosyltransferase OS=Xenophilus sp. AP218F; OX = 2014876 GN=tgt PE=3 SV=1
MLKFTVHKTSGGARRGTLELNHGTVETPVFQPVGTYGSVKAMSPVELNDIGAQIILGNTFHLWLRPGLEIVEQFGGLHDFIGWDKPILTDSGGFQVFSLSDMRKLTEEGCTFQSPINGDKLFLSPEISMKIQTVLNSDIVMQLDECTPGQVDHATAQKSLQMSLRWAERSRRAFDDLKNPNALFGIVQGNLYTDLRRESLEGLMQIGFDGIAIGGLSVGEPKPEMYRMLTELKDMLPADKPHYLMGVGTPEDLVHGVANGVDMFDCVMPTRNARNGWIFTQWGDVKIKNARYKDDKRPLDEACECYTCRNFSRAYLHHLHRVGEILGARLNTIHNLYYYQELMRQIRKSIEEDRFEDFRLEFAAHRARGVN

SEQ ID NO: 62389 - protein, 374 aa, Xenorhabdus beddingii
  REGION 1..374: note = tr|A0A1Y2SQL7|A0A1Y2SQL7_9GAMM Queuine tRNA-ribosyltransferase OS=Xenorhabdus beddingii OX=40578; GN = tgt PE=3 SV=1
MKFELQKTDGNARRGRLIFERGVVETPAFMPVGTYGTVKGMTPEEVKETGAQILLGNTFHLWLRPGQEIMKLHGDLHDFMQWQGPILTDSGGFQVFSLGAMRKIKEEGVHFRNPINGTPVFLSPEKSMEIQYDLGSDIVMIFDECTPYPADWDYAKRSMEMSLRWAARSRQRFDEMGNKNALFGIIQGGVYEDLRDVSIKGLVEIGFDGYAVGGLAVGEPKEDMHRILEHVCPQIPQDKPRYLMGVGKPEDLVEGVRRGIDMFDCVMPTRNARNGHLFVTEGVIKIRNAKHKEDTSPLDEHCDCYTCRNYSRAYLHHLDRCNEILGARLNTIHNLRYYQRLMAEIRKAIEEDRLEQFVEAFYQRIGKPVPPLKR

SEQ ID NO: 62390 - protein, 374 aa, Xenorhabdus bovienii
  REGION 1..374: note = tr|A0A077PM60|A0A077PM60_XENBV Queuine tRNA-ribosyltransferase OS=Xenorhabdus bovienii str. kraussei Quebec OX=1398203 GN=tgt PE=3 SV=1
MKFELQKTDGNARRGRLIFDRGVVETPAFMPVGTYGTVKGMTPEEVKEIGAQILLGNTFHLWLRPGQEIMKLHGDLHDFMQWHGPILTDSGGFQVFSLGAMRKIKEEGVHFRNPINGTPVFLSPEKSMEIQYDLGSDIVMIFDECTPYPADWDYAKRSMEMSLRWAARSRQRFNELGNKNALFGIIQGSVYEDLRDVSVKGLVEIGFDGYAVGGLAVGEPKEDMHRILEHVCPQIPQDKPRYLMGVGKPEDLVEGVRRGIDMFDCVMPTRNARNGHLFVTEGVIKIRNAKHKEDTSTLDEHCDCYTCRHYSRAYLHHLDRCNEILGARLNTIHNLRYYQRLMAGIRKAIEENKLEQFVEEFYQRIGKPVPPLNI

SEQ ID NO: 62391 - protein, 374 aa, Xenorhabdus bovienii
  REGION 1..374: note = tr|A0A077PEH0|A0A077PEH0_XENBV Queuine tRNA-ribosyltransferase OS=Xenorhabdus bovienii str. oregonense OX=1398202 GN=tgt PE=3 SV=1
MKFELQKTDGNARRGRLIFDRGVVETPAFMPVGTYGTVKGMTPEEVKETGAQILLGNTFHLWLRPGQEIMKLHGDLHDFMQWHGPILTDSGGFQVFSLGAMRKIKEEGVHFRNPINGTPVFLSPEKSMEIQHDLGSDIVMIFDECTPYPADWDYAKRSMEMSLRWAARSRQRFNELGNKNALFGIIQGSVYEDLRDVSVKGLVEIGFDGYAVGGLAVGEPKEDMHRILEHVCPQIPQDKPRYLMGVGKPEDLVEGVRRGIDMFDCVMPTRNARNGHLFVTEGVIKIRNAKHKEDTSTLDEHCDCYTCRHYSRAYLHHLDRCNEILGARLNTIHNLRYYQRLMAGIRKAIEENKLEQFVEEFYQRIGKPVPSLNI

SEQ ID NO: 62392 - protein, 374 aa, Xenorhabdus budapestensis
  REGION 1..374: note = tr|A0A2D0J1H2|A0A2D0J1H2_XENBU Queuine tRNA-ribosyltransferase OS=Xenorhabdus budapestensis; OX = 290110 GN=tgt PE=3 SV=1
MKFELQKTDGHARRGRLIFDRGVVETPAFMPVGTYGTVKGMTPEEVKETGAQILLGNTFHLWLRPGQEIMKLHGDLHDFMQWQGPILTDSGGFQVFSLGAMRKIKEEGVHFRNPINGTPVFLSPEKSMEIQYDLGSDIVMIFDECTPYPADWDYAKRSMEMSLRWAARSRQRFDELGNKNALFGIIQGSVYEDLRDVSVKGLVEIGFDGYAVGGLAVGEPKEDMHRILEHVCPQIPQNKPRYLMGVGKPEDLVEGVRRGIDMFDCVMPTRNARNGHLFVTEGVIKIRNAKHKEDTSPLDEHCDCYTCRNYSRAYLHHLDRCNEILGARLNTIHNLRYYQRLMAGIRKAIEEDKLEQFVEEFYQRIGKPVPPLNV

SEQ ID NO: 62393 - protein, 374 aa, Xenorhabdus cabanillasii
  REGION 1..374: note = tr|A0A3D9UED5|A0A3D9UED5_9GAMM Queuine tRNA-ribosyltransferase OS=Xenorhabdus cabanillasii; OX = 351673 GN=tgt PE=3 SV=1
MKFELQKTDGRARRGRLIFDRGVVETPAFMPVGTYGTVKGMTPEEVKETGAQILLGNTFHLWLRPGQEIMKLHGDLHDFMQWQGPILTDSGGFQVFSLGAMRKIKEEGVHFRNPINGTPVFLSPEKSMEIQYDLGSDIVMIFDECTPYPADWDYAKRSMEMSLRWAARSRQRFDELGNKNALFGIIQGSVYEDLRDVSVKGLVEIGFDGYAVGGLAVGEPKEDMHRILEHVCPQIPQDKPRYLMGVGKPEDLVEGVRRGIDMFDCVMPTRNARNGHLFVTEGVIKIRNAKHKEDTSPLDEHCDCYTCRNYSRAYLHHLDRCNEILGARLNTIHNLRYYQRLMAGIRKAIEEGKLEQFVEEFYQRIGKPVPPLNV

SEQ ID NO: 62394 - protein, 374 aa, Xenorhabdus cabanillasii; identical to SEQ ID NO: 62393
  REGION 1..374: note = tr|W1IXY3|W1IXY3_9GAMM Queuine tRNA-ribosyltransferase OS=Xenorhabdus cabanillasii JM26; OX = 1427517 GN=tgt PE=3 SV=1

SEQ ID NO: 62395 - protein, 374 aa, Xenorhabdus doucetiae
  REGION 1..374: note = tr|A0A068QPG6|A0A068QPG6_9GAMM Queuine tRNA-ribosyltransferase OS=Xenorhabdus doucetiae OX=351671; GN = tgt PE=3 SV=1
MKFELQKTDGNARRGRLVFDRGVVETPAFMPVGTYGTVKGMTPEEVKETGAQILLGNTFHLWLRPGQEIMKLHGDLHDFMQWQGPILTDSGGFQVFSLGAMRKIKEEGVHFRNPINGTPVFLSPEKSMEIQYDLGSDIVMIFDECTPYPADWDYAKRSMEMSLRWAARSRQRFDELGNKNALFGIIQGSVYEDLRDVSIKGLVEIGFDGYAVGGLAVGEPKEDMHRILEHVCPQIPQDKPRYLMGVGKPEDLVEGVRRGIDMFDCVMPTRNARNGHLFVTEGVIKIRNAKHKEDTSPLDEHCDCYTCRNYSRAYLHHLDRCNEILGARLNTIHNLRYYQRLMAGIRQAIEEGKLEPFVETFYQQIGKPVPPLNI

SEQ ID NO: 62396 - protein, 374 aa, unidentified
  source 1..374: note = Xenorhabdus eapokensis
  REGION 1..374: note = tr|A0A1Q5TVU7|A0A1Q5TVU7_9GAMM Queuine tRNA-ribosyltransferase OS=Xenorhabdus eapokensis; OX = 1873482 GN=tgt PE=3 SV=1
MKFELQKTDGNARRGRLIFDRGVVETPAFMPVGTYGTVKGMTPEEVKETGAQILLGNTFHLWLRPGQEIMKLHGDLHDFMQWHGPILTDSGGFQVFSLGAMRKIKEEGVHFRNPINGTPVFLSPEKSMEIQYDLGSDIVMIFDECTPYPADWDYAKRSMEMSLRWAARSRQRFNELGNKNALFGIIQGSVYEDLRDVSIKGLVEIGFDGYAVGGLAVGEPKEDMHRILEHVCPQIPQDKPRYLMGVGKPEDLVEGVRRGIDMFDCVMPTRNARNGHLFVTEGVIKIRNAKHKEDISPLDEHCDCYTCRNYSRAYLHHLDRCNEILGARLNTIHNLRYYQRLMAGIRQAIEEGKLAQFVETFYQQIGKPVPPLNI

SEQ ID NO: 62397 - protein, 374 aa, Xenorhabdus ehlersii
  REGION 1..374: note = tr|A0A2D0IQB7|A0A2D0IQB7_9GAMM Queuine tRNA-ribosyltransferase OS=Xenorhabdus ehlersii OX=290111; GN = tgt PE=3 SV=1
MKFELQKTDGNARRGRLIFDRGVVETPAFMPVGTYGTVKGMTPEEVKETGAQILLGNTFHLWLRPGQEIMKLHGDLHDFMQWQGPILTDSGGFQVFSLGAMRKIKEEGVHFRNPINGTPVFLSPEKSMEIQYDLGSDIVMIFDECTPYPADWDYAKRSMEMSLRWAARSRQRFDELDNKNALFGIIQGSVYEDLRDISIKGLVEIGFDGYAVGGLAVGEPKEDMHRILEHVCPQIPLDKPRYLMGVGKPEDLVEGVRRGIDMFDCVMPTRNARNGHLFVTEGVIKIRNAKHKEDTSPLDEHCDCYTCRNYSRAYLHHLDRCNEILGARLNTIHNLRYYQRLMAGIRQAIEEGKLEQFVETFYQQIGKPVPPLNI

SEQ ID NO: 62398 - protein, 374 aa, Xenorhabdus hominickii
  REGION 1..374: note = tr|A0A2G0Q8M0|A0A2G0Q8M0_9GAMM Queuine tRNA-ribosyltransferase OS=Xenorhabdus hominickii; OX = 351679 GN=tgt_2 PE=3 SV=1
MKFELQKTDGNARRGRLIFDRGVVETPAFMPVGTYGTVKGMTPEEVKETGAQILLGNTFHLWLRPGQEIMKLHGDLHDFMQWHGPILTDSGGFQVFSLGAMRKIKEEGVHFRNPINGTPVFLSPEKSMEIQHDLGSDIVMIFDECTPYPADWDYAKRSMEMSLRWAARSRQRFDELSNKNALFGIIQGSVYEDLRDVSVKGLVEIGFDGYAVGGLAVGEPKEDMHRILEHVCPQIPQDKPRYLMGVGKPEDLVEGVRRGIDMFDCVMPTRNARNGHLFVTEGVIKIRNAKHKEDTSSLDEHCDCYTCRNYSRAYLHHLDRCNEILGARLNTIHNLRYYQRLMAGIRKAIEEDKLKQFVEEFYQRIGKPVPSLNI

SEQ ID NO: 62399 - protein, 374 aa, Xenorhabdus innexi
  REGION 1..374: note = tr|A0A1N6N1C6|A0A1N6N1C6_9GAMM Queuine tRNA-ribosyltransferase OS=Xenorhabdus innexi OX=290109; GN = tgt PE=3 SV=1
MKFELQKTDGHARRGRLIFDRGIVETPAFMPVGTYGTVKGMTPEEVKDTGAQILLGNTFHLWLRPGQEIMKLHGDLHDFMQWHGPILTDSGGFQVFSLGAMRKIKEEGVHFRNPINGTPVFLSPEKSMEIQHDLGSDIVMIFDECTPYPADWDYAKRSMEMSLRWAARSRQRFDELGNKNALFGIIQGSVYEDLRDVSVKGLVEIGFDGYAVGGLAVGEPKEDMHRILEHVCPQIPQDKPRYLMGVGKPEDLVEGVRRGVDMFDCVMPTRNARNGHLFVTEGVIKIRNAKHKEDTSPLDEHCDCYTCRNYSRAYLHHLDRCNEILGARLNTIHNLRYYQRLMAGIRKAIEEDRLEQFVEEFYQQIGKPVPPLNV

SEQ ID NO: 62400 - protein, 374 aa, unidentified
  source 1..374: note = Xenorhabdus ishibashii
  REGION 1..374: note = tr|A0A2D0KIS9|A0A2D0KIS9_9GAMM Queuine tRNA-ribosyltransferase OS=Xenorhabdus ishibashii; OX = 1034471 GN=tgt PE=3 SV=1
MKFELQKTDGNARRGRLIFDRGVVETPAFMPVGTYGTVKGMTPEEVEETGAQILLGNTFHLWLRPGQEIMKLHGDLHDFMQWQGPILTDSGGFQVFSLGAMRKIKEEGVHFRNPINGTPVFLSPEKSMEIQYDLGSDIVMIFDECTPYPADWDYAKRSMEMSLRWAARSRQRFNELGNKNALFGIIQGSVYEDLRDVSIKGLVEIGFDGYAVGGLAVGEPKEDMHRILEHVCPQIPQDKPRYLMGVGKPEDLVEGVRRGIDMFDCVMPTRNARNGHLFVTEGVIKIRNAKHKEDTSPLDEHCDCYTCRNYSRAYLHHLDRCNEILGARLNTIHNLRYYQRLMAGIRQAIEEGKLEQFVETFYQQIGKPVPPLNI

SEQ ID NO: 62401 - protein, 374 aa, Xenorhabdus japonica
  REGION 1..374: note = tr|A0A1I4YKX4|A0A1I4YKX4_9GAMM Queuine tRNA-ribosyltransferase OS=Xenorhabdus japonica OX=53341; GN = tgt PE=3 SV=1
MKFELQKTDGNARRGRLIFDRGVVETPAFMPVGTYGTVKGMTPEEVEETGAQILLGNTFHLWLRPGQEIMKLHGDLHDFMQWQGPILTDSGGFQVFSLGAMRKIKEEGVHFRNPINGTPVFLSPEKSMEIQYDLGSDIVMIFDECTPYPADWDYAKRSMEMSLCWAARSRQRFDELDNKNALFGIIQGSVYEDLRDVSIKGLVEIGFDGYAVGGLAVGEPKEDMHRILEHVCPQIPQDKPRYLMGVGKPEDLVEGVRRGIDMFDCVMPTRNARNGHLFVTEGVIKIRNAKHKEDTSSLDEHCDCYTCRNYSRAYLHHLDRCNEILGARLNTIHNLRYYQRLMAGIRKAIEEDKLEQFVEEFYQQISKPVPPLNI

SEQ ID NO: 62402 - protein, 374 aa, unidentified
  source 1..374: note = Xenorhabdus khoisanae
  REGION 1..374: note = tr|A0A0J5FVD5|A0A0J5FVD5_9GAMM Queuine tRNA-ribosyltransferase OS=Xenorhabdus khoisanae OX=880157; GN = tgt PE=3 SV=1
MKFELQKTDGNARRGRLIFERGVVETPAFMPVGTYGTVKGMTPEEVKETGAQILLGNTFHLWLRPGQEIMKLHGDLHDFMQWQGPILTDSGGFQVFSLGAMRKIKEEGVHFRNPINGTPVFLSPEKSMEIQYDLGSDIVMIFDECTPYPADWDYAKRSMEMSLRWAARSRQRFDELSNKNALFGIIQGSVYEDLRDVSIKGLVEIGFDGYAVGGLAVGEPKEDMHRILEHVCPQIPQDKPRYLMGVGKPEDLVEGVRRGIDMFDCVMPTRNARNGHLFVTEGVIKIRNAKHKEDTSPLDEHCDCYTCRNYSRAYLHHLDRCNEILGARLNTIHNLRYYQRLMAGIRKAIEEGKLEQFVEAFYQRIGKSVPPLNI

SEQ ID NO: 62403 - protein, 374 aa, Xenorhabdus koppenhoeferi
  REGION 1..374: note = tr|A0A1I7G6X7|A0A1I7G6X7_9GAMM Queuine tRNA-ribosyltransferase OS=Xenorhabdus koppenhoeferi; OX = 351659 GN=tgt PE=3 SV=1
MKFELQKTDGNARRGRLVFERGVVETPAFMPVGTYGTVKGMTPEEVKETGAQILLGNTFHLWLRPGQEIMKLHGDLHDFMQWQGPILTDSGGFQVFSLGAMRKIKEEGVHFRNPINGTPVFLSPEKSMEIQYDLGSDIVMIFDECTPYPADWDYAKRSMEMSLRWAARSRQRFDELNNKNALFGIIQGSVYEDLRDVSVKGLVEIGFDGYAVGGLAVGEPKEDMHRILEHVCPQIPQDKPRYLMGVGKPEDLVEGVRRGIDMFDCVMPTRNARNGHLFVTEGVIKIRNAKHKEDTSSLDEHCDCYTCRNYSRAYLHHLDRCNEILGARLNTIHNLRYYQRLMAGIRKAIEEGKLEQFVEEFYQQIGKPVPPLNI

SEQ ID NO: 62404 - protein, 374 aa, Xenorhabdus kozodoii
  REGION 1..374: note = tr|A0A2D0L1N3|A0A2D0L1N3_9GAMM Queuine tRNA-ribosyltransferase OS=Xenorhabdus kozodoii OX=351676; GN = tgt PE=3 SV=1
MKFELQKTDGHARRGRLIFDRGVVETPAFMPVGTYGTVKGMTPEEVKETGAQILLGNTFHLWLRPGQEIMKLHGDLHDFMQWQGPILTDSGGFQVFSLGAMRKIKEEGVHFRNPINGTPVFLSPEKSMEIQYDLGSDIVMIFDECTPYPADWDYAKRSMEMSLRWAARSRQRFDELGNKNALFGIIQGSVYEDLRDISIKGLVEIGFDGYAVGGLAVGEPKEDMHRILEHVCPQIPQDKPRYLMGVGKPEDLVEGVRRGIDMFDCVMPTRNARNGHLFVTEGVIKIRNAKHKEDTSPLDEHCDCYTCRNYSRAYLHHLDRCNEILGARLNTIHNLRYYQRLMAGIRKAIEEGKLEQFVEAFYQQVGKSVPPLTI

SEQ ID NO: 62405 - protein, 374 aa, Xenorhabdus mauleonii
  REGION 1..374: note = tr|A0A1I3QE72|A0A1I3QE72_9GAMM Queuine tRNA-ribosyltransferase OS=Xenorhabdus mauleonii OX=351675; GN = tgt PE=3 SV=1
MKFELQKTDGNARRGRLVFERGVVETPAFMPVGTYGTVKGMTPEEVKDTGAQILLGNTFHLWLRPGQEIMKLHGDLHDFMQWQGPILTDSGGFQVFSLGAMRKIKEEGVHFRNPINGTPVFLSPEKSMEIQYDLGSDIVMIFDECTPYPADWDYAKRSMEMSLRWAARSRQRFDELNNKNALFGIIQGSVYEDLRDVSVKGLVEIGFDGYAVGGLAVGEPKEDMHRILEHVCPQIPQDKPRYLMGVGKPEDLVEGVRRGIDMFDCVMPTRNARNGHLFVTEGVIKIRNAKHKEDTSPLDEHCDCYTCRNYSRAYLHHLDRCNEILGARLNTIHNLRYYQRLMAGIRKAIEEGKLEQFVEEFYQQIGKPVPPLNI

SEQ ID NO: 62406 - protein, 374 aa, Xenorhabdus miraniensis
  REGION 1..374: note = tr|A0A2D0JNF7|A0A2D0JNF7_9GAMM Queuine tRNA-ribosyltransferase OS=Xenorhabdus miraniensis; OX = 351674 GN=tgt PE=3 SV=1
MKFELQKTDGNARRGRLIFERGVVETPAFMPVGTYGTVKGMTPEEVKETGAQILLGNTFHLWLRPGQEIMKLHGDLHDFMQWQGPILTDSGGFQVFSLGAMRKIKEEGVHFRNPINGTPVFLSPEKSMEIQYDLGSDIVMIFDECTPYPADWDYAKRSMEMSLRWAARSRQRFDELGNKNALFGIIQGSVYEDLRDVSIKGLVEIGFDGYAVGGLAVGEPKEDMHRILEHVCPQIPQDKPRYLMGVGKPEDLVEGVRRGIDMFDCVMPTRNARNGHLFVTEGVIKIRNAKHKEDTSPLDEHCDCYTCRNYSRAYLHHLDRCNEILGARLNTIHNLRYYQRLMAGIRKAIEEDRLEQFVEEFYQRIGKPVPPLTI

SEQ ID NO: 62407 - protein, 374 aa, Xenorhabdus nematophila
  REGION 1..374: note = tr|D3VK78|D3VK78_XENNA Queuine tRNA-ribosyltransferase OS=Xenorhabdus nematophila (strain ATCC 19061 / DSM 3370 / LMG 1036 / NCIB 9965 / AN6); OX = 406817 GN=tgt PE=3 S V=1
MKFELQKTDGNARRGRLVFERGVVETPAFMPVGTYGTVKGMTPEEVKETGAQILLGNTFHLWLRPGQEIMKLHGDLHDFMQWQGPILTDSGGFQVFSLGAMRKIKEEGVHFRNPINGTPVFLSPEKSMEIQYDLGSDIVMIFDECTPYPADWDYAKRSMEMSLRWAARSRQRFDELNNKNALFGIIQGSVYEDLRDVSVKGLVEIGFDGYAVGGLAVGEPKEDMHRILEHVCPQIPQDKPRYLMGVGKPEDLVEGVRRGIDMFDCVMPTRNARNGHLFVTEGVIKIRNAKHKEDTSSLDEHCDCYTCRNYSRAYLHHLDRCNEILGARLNTIHNLRYYQRLMAGIRKAIEEGKLEQFVEAFYQQMGKPVPPLNI

SEQ ID NO: 62408 - protein, 374 aa, Xenorhabdus nematophila; identical to SEQ ID NO: 62407
  REGION 1..374: note = tr|A0A0A8NSJ9|A0A0A8NSJ9_XENNE Queuine tRNA-ribosyltransferase OS=Xenorhabdus nematophila str. Websteri OX=1437826 GN=tgt PE=3 SV=1

SEQ ID NO: 62409 - protein, 374 aa, Xenorhabdus poinarii
  REGION 1..374: note = tr|A0A068QZH8|A0A068QZH8_9GAMM Queuine tRNA-ribosyltransferase OS=Xenorhabdus poinarii G6; OX = 1354304 GN=tgt PE=3 SV=1
MEFELQKTDGNARRGRLIFERGVVETPAFMPVGTYGTVKGMTPEEVKETGAQILLGNTFHLWLRPGQEIMKLHGDLHDFMQWHGPILTDSGGFQVFSLGAMRKIKEEGVHFRNPINGTPVFLSPEKSMEIQYDLGSDIVMIFDECTPYPADWDYAKRSMEMSLRWAARSRQRFDELGNKNALFGIIQGSVYEDLRDVSIKGLVEIGFDGYAVGGLAVGEPKADMHRILAHVCPQIPQDKPRYLMGVGKPEDLVEGVRRGIDMFDCVMPTRNARNGHLFVTEGVIKIRNAKHKEDTSPLDEHCDCYTCRNYSRAYLHHLDRCNEILGARLNTIHNLRYYQRLMAGIRKAIEEGKLSQFVDAFYQQIGKPVPPLNI

SEQ ID NO: 62410 - protein, 374 aa, Xenorhabdus sp.
  REGION 1..374: note = tr|A0A2D0L8A3|A0A2D0L8A3_9GAMM Queuine tRNA-ribosyltransferase OS=Xenorhabdus sp. KJ12.1; OX = 1851571 GN=tgt PE=3 SV=1
MKFELQKTDGHARRGRLIFDRGVVETPAFMPVGTYGTVKGMTPEEVKDTGAQILLGNTFHLWLRPGQEIMKLHGDLHDFMQWHGPILTDSGGFQVFSLGAMRKIKEEGVHFRNPINGTPVFLSPEKSMEIQHDLGSDIVMIFDECTPYPADWDYAKRSMEMSLRWAARSRQRFDELGNKNALFGIIQGSVYEDLRDVSVKGLVEIGFDGYAVGGLAVGEPKEDMHRILEHVCPQIPQDKPRYLMGVGKPEDLVEGVRRGIDMFDCVMPTRNARNGHLFVTEGVIKIRNAKHKEDTSPLDEHCDCYTCRNYSRAYLHHLDRCNEILGARLNTIHNLRYYQRLMAGIRQAIEEDRLEQFVEEFYQRIGKPVPPLNV

SEQ ID NO: 62411 - protein, 374 aa, Xenorhabdus sp.
  REGION 1..374: note = tr|A0A0M0TAX3|A0A0M0TAX3_9GAMM Queuine tRNA-ribosyltransferase OS=Xenorhabdus sp. GDc328; OX = 742178 GN=tgt PE=3 SV=1
MKFELQKTDGNARRGRLIFDRGVVETPAFMPVGTYGTVKGMTPEEVKETGAQILLGNTFHLWLRPGQEIMKLHGDLHDFMQWQGPILTDSGGFQVFSLGAMRKIKEEGVHFRNPINGTPVFLSPEKSMEIQYDLGSDIVMIFDECTPYPADWDYAKRSMEMSLRWAARSRQRFDELDNKNALFGIIQGSVYEDLRDISIKGLVEIGFDGYAVGGLAVGEPKEDMHRILEYVCPQIPQDKPRYLMGVGKPEDLVEGVRRGIDMFDCVMPTRNARNGHLFVTEGVIKIRNAKHKEDTSPLDEHCDCYTCRNYSRAYLHHLDRCNEILGARLNTIHNLRYYQRLMAGIRQAIEEGKLEQFVEAFYQQIGKPVPPLNI

SEQ ID NO: 62412 - protein, 374 aa, Xenorhabdus stockiae; identical to SEQ ID NO: 62410
  REGION 1..374: note = tr|A0A2D0KSG0|A0A2D0KSG0_9GAMM Queuine tRNA-ribosyltransferase OS=Xenorhabdus stockiae OX=351614; GN = tgt PE=3 SV=1

SEQ ID NO: 62413 - protein, 374 aa, Xenorhabdus szentirmaii
  REGION 1..374: note = tr|W1J1G5|W1J1G5_9GAMM Queuine tRNA-ribosyltransferase OS=Xenorhabdus szentirmaii DSM 16338 OX=1427518 GN=tgt PE=3 SV=1
MKFELQKTDGNARRGRLIFDRGVVETPAFMPVGTYGTVKGMTPEEVKETGAQILLGNTFHLWLRPGQEIMKLHGDLHDFMQWQGPILTDSGGFQVFSLGAMRKIKEEGVHFRNPINGTPVFLSPEKSMEIQYDLGSDIVMIFDECTPYPADWDYAKRSMEMSLRWAARSRQRFDELNNKNALFGIIQGSVYEDLRDVSVKGLVEIGFDGYAVGGLAVGEPKEDMHRILEHVCPQIPQDKPRYLMGVGKPEDLVEGVRRGIDMFDCVMPTRNARNGHLFVTEGVIKIRNAKHKEDTSPLDEHCDCYTCRNYSRAYLHHLDRCNEILGARLNTIHNLRYYQRLMAGIRKAIEEGKLEQFVGEFYQRIGKPVPSLNI

SEQ ID NO: 62414 - protein, 374 aa, unidentified
  source 1..374: note = Xenorhabdus thuongxuanensis
  REGION 1..374: note = tr|A0A1Q5TQP9|A0A1Q5TQP9_9GAMM Queuine tRNA-ribosyltransferase OS=Xenorhabdus thuongxuanensis; OX = 1873484 GN=tgt PE=3 SV=1
MKFELQKTDGNARRGRLIFDRGVVETPAFMPVGTYGTVKGMTPEEVKETGAQILLGNTFHLWLRPGQEIMKLHGDLHDFMQWQGPILTDSGGFQVFSLGAMRKIKEEGVHFRNPINGTPVFLSPEKSMEIQYDLGSDIVMIFDECTPYPADWDYAKRSMEMSLRWAARSRQRFNELGNKNALFGIIQGSVYEDLRDISIKGLVEIGFDGYAVGGLAVGEPKEDMHRILEHVCPQIPQDKPRYLMGVGKPEDLVEGVRRGIDMFDCVMPTRNARNGHLFVTEGVIKIRNAKHKEDISPLDEHCDCYTCRNYSRAYLHHLDRCNEILGARLNTIHNLRYYQRLMAGIRQAIEEGKLEQFVETFYQQIGKPVPPLNI

SEQ ID NO: 62415 - protein, 374 aa, Xenorhabdus vietnamensis
  REGION 1..374: note = tr|A0A1Y2SI92|A0A1Y2SI92_9GAMM Queuine tRNA-ribosyltransferase OS=Xenorhabdus vietnamensis; OX = 351656 GN=tgt PE=3 SV=1
MKFELQKTDGNARRGRLIFDRGVVETPAFMPVGTYGTVKGMTPEEVKETGAQILLGNTFHLWLRPGQEIMKLHGDLHDFMQWQGPILTDSGGFQVFSLGAMRKIKEEGVHFRNPINGTPVFLSPEKSMEIQYDLGSDIVMIFDECTPYPAEWDYAKRSMEMSLRWAARSRQRFDELGNENALFGIIQGSVYEDLRDVSIKGLVEIGFDGYAVGGLAVGEPKEDMHRILEHVCPQIPQDKPRYLMGVGKPEDLVEGVRRGIDMFDCVMPTRNARNGHLFVTEGVIKIRNAKHKEDTSPLDEHCDCYTCRNYSRAYLHHLDRCNEILGARLNTIHNLRYYQRLMAGIRKAIEEGKLEQFVEEFYQQIGKPVPPLNI

SEQ ID NO: 62416 - protein, 376 aa, unidentified
  source 1..376: note = Xinfangfangia sp.
  REGION 1..376: note = tr|A0A3P5XD84|A0A3P5XD84_9RHOB Queuine tRNA-ribosyltransferase OS=Xinfangfangia sp. CIP 111625; OX = 2483812 GN=tgt PE=3 SV=1
MTERFGFTLKATDGKARTGVIHTPRGEIRTPAFMPVGTAATVKAMLPGSVRETGADILLGNTYHLMLRPGAERIARLGGLHRFMNWERPILTDSGGFQVMSLASLRKLTEEGVRFSSHIDGSKHMLSPERSMEIQKLLGSDIVMCFDECPALPATDEVVAKSMRLSMRWAQRSRDAFGDRPGHALFGIMQGGVTRDLREESAKALVEIGFDGYAVGGLAVGEGQEAMFDVLDYAPGFLPEDKPRYLMGVGKPDDIVGAVERGIDMMDCVLPSRSGRTGQAWTRRGQVNLRNARHQDDPRPLDEDCTCPACRGYSRAYLHHVLRAQEIIASMLLTWHNLHYYQELMQGLRDAIAEGRLAAFVAGFHAQRAGGDIGPL

SEQ ID NO: 62417 - protein, 384 aa, Xylella fastidiosa
  REGION 1..384: note = sp|Q9PGS5|TGT_XYLFA Queuine tRNA-ribosyltransferase; OS = Xylella fastidiosa (strain 9a5c) OX=160492 GN=tgt PE=3; SV = 2
MSRLQFQLQATDGAARRGQLSFPCGTVQTPAFMPVGTYGAVKGVLPGQLCDLGAEIILGNTFHLFLRPGLEVIADHGGLHGFMRWNGPILTDSGGFQVFSLAHRRKISEQGVTFAAPTDGAQVFLGPEESMKIQKVLNSDIVMIFDECTPYPATEDVARDSMELSLRWAQRSRDAHDALDNDAALFGIIQGGVHPDLRGRSLDGLQAIGFDGYGIGGLAVGESESERNVILEYLHPRVPADRPRYLMGVGRPEDLVESVARGVDMFDCVMPTRHARNGQYFTGFGTVKIRNACYARDVDPIEPGCGCPACVGGYTRAYLRHLDRCNEMLASMLGTLHNLWYYETLMANMRAAITAGTFFAFRRSFYLARGLDLPPLPEVAGCAG

SEQ ID NO: 62418 - protein, 384 aa, Xylella fastidiosa
  REGION 1..384: note = sp|B0U1P6|TGT_XYLFM Queuine tRNA-ribosyltransferase; OS = Xylella fastidiosa (strain M12) OX=405440 GN=tgt PE=3; SV = 1
MSRLQFQLQATDGAARRGQLSFPCGTVQTPAFMPVGTYGAVKAVLPGQLCDLGAEIILGNTFHLFLRPGLEVIADHGGLHGFMRWNGPILTDSGGFQVFSLAHRRKISEQGVTFAAPTDGAQVFLGPEESMKIQKVLNSDVVMIFDECTPYPATEDVARDSMELSLRWAQRSRDAHDALDNDAALFGIIQGGVHPDLRGRSLDGLQAIGFDGYAIGGLAVGESESERNVILEYLHPRLPVDRPRYLMGVGRPEDLVESVARGVDMFDCVMPTRHARNGQYFTGFGTVKIRNACYARDVDPIEPGCGCPACVGGYTRAYLRHLDRCNEMLASMLGSLHNLWYYETLMANMRAAITAGTFFTFRHSFYLARGLDPPPLPEVASCAG

SEQ ID NO: 62419 - protein, 380 aa, unidentified
  source 1..380: note = Xylella taiwanensis
  REGION 1..380: note = tr|Z9JKL1|Z9JKL1_9GAMM Queuine tRNA-ribosyltransferase OS=Xylella taiwanensis OX=1444770; GN = tgt PE=3 SV=1
MSLLQFQLQATDGAARRGQLSFPCGTVQTPAFMPVGTYGAVKGVLPRQLCDLGAEIILGNTFHLFLRPGLEVIADHGGLRGFMRWDGPILTDSGGFQVFSLAHRRKITEQGVTFAAPTDGAQVFLGPEESMRIQKVLNSDVVMIFDECTPYPATEDVARCSMELSLRWAQRSRDAHDALGNDAALFGIVQGGVHPDLRGRSLDGLQAIGFDGYAIGGLAVGEPECERNAILEYLHPRLPAHRPRYLMGVGRPEDLVESVARGVDMFDCVMPTRHARNGHYFTGFGTVRIRNACYARDLDPIESGCGCPTCVGGYTRAYLRHLDRCNEMLASMLGTLHNLWYYEKLMADMRAAIAAGAFLAFRRSFYAARGLEPPPLSDRC

SEQ ID NO: 62420 - protein, 390 aa, Xylophilus ampelinus
  REGION 1..390: note = tr|A0A318SF62|A0A318SF62_9BURK Queuine tRNA-ribosyltransferase OS=Xylophilus ampelinus OX=54067; GN = tgt PE=3 SV=1
MLSFDLLATDPASHARRGTLTLNHGVVQTPIFMPVGTYGTVKGVMPRSLEEMGAQIILGNTFHLWMRPGLDVMASFGGLHPFEKWNKPILTDSGGFQVWSLGAMRKISEEGVKFASPVNGDRLFLTPEVSMRIQTVLNSDIVMQFDECTPYDTQGHITTEAEARTSMELSLRWARRCQGEFARLENPNALFGIVQGGMFGHLRQESLDRLVEMDFPGYAIGGVSVGEPKEEMLRVMAHTPHRLPAHKPRYLMGVGTPEDLVQGVADGVDMFDCVMPTRNARNGTLFSRYGDLKIRNARHKTDPKPLDTSCTCHACAGTTGVSWDDGGRGGFSRAYLHHLDRCGEMLGPMLTTIHNLHYYLQLMREIRDALDAGRFAAFRAQFKADRARGV

SEQ ID NO: 62421 - protein, 395 aa, Xylophilus sp.
  REGION 1..395: note = tr|A0A0Q4G863|A0A0Q4G863_9BURK Queuine tRNA-ribosyltransferase OS=Xylophilus sp. Leaf220; OX = 1735686 GN=tgt PE=3 SV=1
MSALPRLQFDLLATDPASHARRGTLTLNHGVVQTPIFMPVGTYGTVKGVMPRSLDEMGAQIILGNTFHLWMRPGLDVMESFGGLHQFEKWDKPILTDSGGFQVWSLGAMRKISEEGVKFASPVNGDRLFLTPEVSMQIQTVLNSDIVMQFDECTPYDTQGHITTEAEARTSMELSLRWARRCQSEFARLENPNALFGIVQGGMFENLRQESLDQLVEMDFPGYAIGGVSVGEPKDEMLRVMAHTPHRLPAHKPRYLMGVGTPEDLVQGVADGVDMFDCVMPTRNARNGTLFSRYGDLKIRNARHKTDPQPLDTSCTCHACAGTTGVSWDDGGRGGFSRAYLHHLDRCGEMLGPMLTTIHNLHYYLQLMQEIRDALDAGRFGEFRAQFKADRARGV

SEQ ID NO: 62422 - protein, 375 aa, Yangia pacifica
  REGION 1..375: note = tr|A0A1I6QIF0|A0A1I6QIF0_9RHOB Queuine tRNA-ribosyltransferase OS=Yangia pacifica OX=311180; GN = tgt PE=3 SV=1
MSLTSFTLSGRDGAARTGVISTPRGEIRTPAFMPVGTAATVKAMLPESVRATGADILLGNTYHLMLRPGAERVARLGGLHKFMNWERPILTDSGGFQVMSLSGLRKLTEEGVTFKSHIDGSKHMLSPESSMEIQRLLGSDIVMCFDECPALPADRKRIEQSMRLSMRWAQRSRDAFGDRPGHMLFGIQQGGLEEDLRGESAEALTSIGFDGYAVGGLAVGEGQEAMFKVLDFAPGQLPEDKPRYLMGVGKPDDIVGAVKRGIDMMDCVLPSRSGRTGQAWTRRGMVNIKNARHQDDPRPLDEHCTCPACRSYSRAYLHHVYRAGEMISGMLLTWHNLHYYQELMQGLRDAIAGGTFAAFEDQFHAQRAEGDIPVL

SEQ ID NO: 62423 - protein, 375 aa, Yangia pacifica
  REGION 1..375: note = tr|A0A2U8HHD2|A0A2U8HHD2_9RHOB Queuine tRNA-ribosyltransferase OS=Yangia pacifica OX=311180; GN = tgt PE=3 SV=1
MSLTSFTLHGRDGAARTGVISTPRGEIRTPAFMPVGTAATVKAMLPENVRATGADILLGNTYHLMLRPGAERVARLGGLHKFMNWERPILTDSGGFQVMSLSGLRKLTEEGVTFKSHIDGSKHMLSPESSMEIQRLLGSDIVMCFDECPALPADRKRIEQSMRLSMRWAQRSRDAFGDRPGHMLFGIQQGGLEEDLRGESAEALTSIGFDGYAVGGLAVGEGQEAMFKVLDFAPGQLPEDKPRYLMGVGKPDDIVGAVKRGIDMMDCVLPSRSGRTGQAWTRHGMVNIKNARHQDDPRPLDEDCSCPACRSYSRAYLHHVYRAGEMISGMLLTWHNLHYYQELMQGMRDAIAGGTFAAFEEQFHAQRAEGDIPPL

SEQ ID NO: 62424 - protein, 375 aa, Yangia sp.
  REGION 1..375: note = tr|A0A1B1PR70|A0A1B1PR70_9RHOB Queuine tRNA-ribosyltransferase OS=Yangia sp. CCB-MM3 OX=1792508; GN = tgt PE=3 SV=1
MSQTSFTLSGRDGAARTGVISTPRGEIRTPAFMPVGTAATVKAMLPESVRATGADILLGNTYHLMLRPGAERVARLGGLHKFMNWERPILTDSGGFQVMSLAGLRKLTEEGVTFKSHIDGSKHMLSPESSMEIQRLLGSDIVMCFDECPALPADRKRIEESMRLSMRWAQRSRDAFGDRPGHMLFGIQQGGLEEDLRGESAEALKSIGFDGYAVGGLAVGEGQEAMFKVLDFAPGQLPEDKPRYLMGVGKPDDIVGAVKRGIDMMDCVLPSRSGRTGQAWTRRGMVNIKNARHQDDPRPLDEHCSCPACRSYSRAYLHHVYRAGEMISGMLLTWHNLHYYQELMQGLRDAIASGTFAAFEEEFHAQRAEGDIPSL

SEQ ID NO: 62425 - protein, 375 aa, Yangia sp.; identical to SEQ ID NO: 53879
  REGION 1..375: note = tr|A0A2E1D8F1|A0A2E1D8F1_9RHOB Queuine tRNA-ribosyltransferase OS=Yangia sp. OX=2024862 GN=tgt; PE = 3 SV=1

SEQ ID NO: 62426 - protein, 374 aa, Yersinia aldovae
  REGION 1..374: note = tr|A0A0T9UH31|A0A0T9UH31_YERAL Queuine tRNA-ribosyltransferase OS=Yersinia aldovae OX=29483; GN = tgt PE=3 SV=1
MKYELQTTDGRARRGRLVFERGVVETPAFMPVGTYGTVKGMTPEEVKETGAQILLGNTFHLWLRPGQEIMKLHGDLHDFMQWHGPILTDSGGFQVFSLGAMRKIKEEGVTFQNPINGDKVFLSPEKSMEIQYDLGSDIVMIFDECTPYPADWDYAKRSMEMSLRWAKRSRDRFDELNNKNALFGIIQGGIYEDLRDVSVKGLVDIGFDGYAVGGLAVGEPKEDMHRILEHVCPQIPADKPRYLMGVGKPEDLVEGVRRGIDMFDCVMPTRNARNGHLFVTDGVVKIRNAKHKSDTATLDEHCDCYTCRNYSRAYLHHLDRCNEILGARLNTIHNLRYYQRLMAGLRQAIEEGKLESFVEDFYGRIGKPVPSLSV

SEQ ID NO: 62427 - protein, 374 aa, Yersinia bercovieri
  REGION 1..374: note = tr|A0A2G4U2U5|A0A2G4U2U5_YERBE Queuine tRNA-ribosyltransferase OS=Yersinia bercovieri OX=634; GN = tgt PE=3 SV=1
MKYELQKTDGRARRGRLIFERGVVETPAFMPVGTYGTVKGMTPEEVKESGAQILLGNTFHLWLRPGQEIMKLHGDLHDFMQWHGPILTDSGGFQVFSLGAMRKIKEEGVTFQNPINGDKVFLSPEKSMEIQNDLGSDIVMIFDECTPYPADWDYAKRSMEMSLRWAARSRQRFDELNNKNALFGIIQGGVYEDLRDVSVKGLVDIGFDGYAVGGLAVGEPKEDMHRILEHVCPQIPADKPRYLMGVGKPEDLVEGVRRGIDMFDCVMPTRNARNGHLFVTDGVVKIRNAKHKSDTATLDEHCDCYTCRNYSRAYLHHLDRCNEILGARLNTIHNLRYYQRLMAGLRQAIEEGKLESFVEDFYGRIGKPVPPLNV

SEQ ID NO: 62428 - protein, 378 aa, Yersinia enterocolitica
  REGION 1..378: note = sp|A1JNT0|TGT_YERE8 Queuine tRNA-ribosyltransferase; OS = Yersinia enterocolitica serotype O:8 / biotype 1B (strain NCTC 13174 / 8081) OX=393305 GN=tgt PE=3 SV=1
MKYELQKTDGRARRGRLVFERGVVETPAFMPVGTYGTVKGMTPEEVKETGAQILLGNTFHLWLRPGQEIMKLHGDLHDFMQWHGPILTDSGGFQVFSLGAMRKIKEEGVTFQNPINGDKVFLSPEKSMEIQYDLGSDIVMIFDECTPYPADWDYAKRSMEMSLRWAKRSRDRFDELNNKNALFGIIQGGVYEDLRDVSVKGLVDIGFDGYAVGGLAVGEPKEDMHRILEHVCPQIPADKPRYLMGVGKPEDLVEGVRRGIDMFDCVMPTRNARNGHLFVTDGVVKIRNAKHKSDTATLDEHCDCYTCRNYSRAYLHHLDRCNEILGARLNTIHNLRYYQRLMASLRQAIEEGKLESFVEYFYGRIGKPVPPLSPQLTD

SEQ ID NO: 62429 - protein, 310 aa, Yersinia enterocolitica
  REGION 1..310: note = tr|F4N7I4|F4N7I4_YEREN Queuine tRNA-ribosyltransferase OS=Yersinia enterocolitica W22703; OX = 913028 GN=tgt PE=3 SV=1
MKYELQKTDGRARRGRLVFERGVVETPAFMPVGTYGTVKGMTPEEVKETGAQILLGNTFHLWLRPGQEIMKLHGDLHDFMQWHGPILTDSGGFQVFSLGAMRKIKEEGVTFQNPINGDKVFLSPEKSMEIQYDLGSDIVMIFDECTPYPADWDYAKRSMEMSLRWAKRSRDRFDELNNKNALFGIIQGGVYEDLRDVSVKGLVDIGFDGYAVGGLAVGEPKEDMHRILEHVCPQIPADKPRYLMGVGKPEDLVEGVRRGIDMFDCVMPTRNARNGHLFVTDGVVKIRNAKHKSDTATLDEHCDCYTCRKL

SEQ ID NO: 62430 - protein, 374 aa, Yersinia entomophaga
  REGION 1..374: note = tr|A0A3S6EVC5|A0A3S6EVC5_YERET Queuine tRNA-ribosyltransferase OS=Yersinia entomophaga OX=935293; GN = tgt PE=3 SV=1
MKYELQKTDGRARRGRLVFERGVVETPAFMPVGTYGTVKGMTPEEVKETGAQILLGNTFHLWLRPGQEIMKLHGDLHDFMQWHGPILTDSGGFQVFSLGAMRKIKEEGVHFKNPINGDSVFLSPEKSMEIQYDLGSDIVMIFDECTPYPADWDYAKRSMEMSLRWAARSRQRFDELNNKNALFGIIQGGVYEDLRDVSVKGLVDIGFDGYAVGGLAVGEPKEDMHRILEHVCPQIPADKPRYLMGVGKPEDLVEGVRRGIDMFDCVMPTRNARNGHLFVTDGVVKIRNAKHKDDTSTLDAECDCYTCRNYSRAYLHHLDRCNEILGARLNTIHNLRYYQRLMAGLRQAIEDGKLESFVEDFYGRIGKPVPPLNV

SEQ ID NO: 62431 - protein, 378 aa, Yersinia frederiksenii
  REGION 1..378: note = tr|A0A0B6FKG9|A0A0B6FKG9_YERFR Queuine tRNA-ribosyltransferase OS=Yersinia frederiksenii Y225; OX = 1454377 GN=tgt PE=3 SV=1
MKYELQKTDGRARRGRLIFERGVVETPAFMPVGTYGTVKGMTPEEVAETGAQILLGNTFHLWLRPGQEIMKLHGDLHDFMQWHGPILTDSGGFQVFSLGAMRKIKEEGVTFQNPINGDKVFLSPEKSMEIQNDLGSDIVMIFDECTPYPADWDYAKRSMEMSLRWAARSRQRFDELNNKNALFGIIQGGVYEDLRDVSVKGLVDIGFDGYAVGGLAVGEPKEDMHRILEHVCPQIPEDKPRYLMGVGKPEDLVEGVRRGIDMFDCVMPTRNARNGHLFVTDGVVKIRNAKHKSDTATLDEHCDCYTCRNYSRAYLHHLDRCNEILGARLNTIHNLRYYQRLMAGLRQAIEEGKLENFVEDFYGRIGKPVPPLSPQVSV

SEQ ID NO: 62432 - protein, 374 aa, Yersinia frederiksenii
  REGION 1..374: note = tr|A0A0T9ULT8|A0A0T9ULT8_YERFR Queuine tRNA-ribosyltransferase OS=Yersinia frederiksenii OX=29484; GN = tgt PE=3 SV=1
MKYELLQTDGRARRGRLIFDRGVVETPAFMPVGTYGTVKGMTPEEVKETGAQILLGNTFHLWLRPGQEIMKLHGDLHDFMQWPGPILTDSGGFQVFSLGAMRKIKEEGVTFQNPINGDKVFLSPEKSMEIQYDLGSDIVMIFDECTPYPADWDYAKRSMEMSLRWAARSRQRFDELNNKNALFGIIQGGVYEDLRDVSVKGLVDIGFDGYAVGGLAVGEPKEDMHRILEHVCPQIPADKPRYLMGVGKPEDLVEGVRRGIDMFDCVMPTRNARNGHLFVTDGVVKIRNAKHKSDTATLDEHCDCYTCRNYSRAYLHHLDRCNEILGARLNTIHNLRYYQRLMAGLRQAIEEGKLESFVEDFYGRIGKPVPPLNV

SEQ ID NO: 62433 - protein, 378 aa, unidentified
  source 1..378: note = Yersinia hibernica
  REGION 1..378: note = tr|A0A481QFW7|A0A481QFW7_9GAMM Queuine tRNA-ribosyltransferase OS=Yersinia hibernica OX=2339259; GN = tgt PE=3 SV=1
MKYELQQTDGRARRGRLVFERGVVETPAFMPVGTYGTVKGMTPEEVKETGAQILLGNTFHLWLRPGQEIMKLHGDLHDFMQWHGPILTDSGGFQVFSLGAMRKIKEEGVTFQNPINGDKVFLSPEKSMEIQYDLGSDIVMIFDECTPYPADWDYAKRSMEMSLRWAARSRQRFDELNNKNALFGIIQGGVYEDLRDVSVKGLVEIGFDGYAVGGLAVGEPKEDMHRILEHVCPQIPADKPRYLMGVGKPEDLVEGVRRGIDMFDCVMPTRNARNGHLFVTDGVVKIRNAKHKSDTATLDEHCDCYTCRNYSRAYLHHLDRCNEILGARLNTIHNLRYYQRLMAGLRQAIEEGKLERFVEDFYGRIGKPVPPLSPQLSV

SEQ ID NO: 62434 - protein, 374 aa, Yersinia intermedia
  REGION 1..374: note = tr|A0A0H5LV20|A0A0H5LV20_YERIN Queuine tRNA-ribosyltransferase OS=Yersinia intermedia OX=631; GN = tgt PE=3 SV=1
MKYELQQTDGRARRGRLIFDRGVVETPAFMPVGTYGTVKGMTPEEVKETGAQILLGNTFHLWLRPGQEIMKLHGDLHDFMQWPGPILTDSGGFQVFSLGAMRKIKEEGVTFQNPINGDKVFLSPEKSMEIQYDLGSDIVMIFDECTPYPADWDYAKRSMEMSLRWAARSRQRFDELNNKNALFGIIQGGVYEDLRDVSVKGLVDIGFDGYAVGGLAVGEPKEDMHRILEHVCPQIPADKPRYLMGVGKPEDLVEGVRRGIDMFDCVMPTRNARNGHLFVTDGVVKIRNAKHKSDTATLDEHCDCYTCRNYSRAYLHHLDRCNEILGARLNTIHNLRYYQRLMAGLRQAIEEGKLESFVEDFYGRIGKPVPPLNV

SEQ ID NO: 62435 - protein, 374 aa, Yersinia intermedia
  REGION 1..374: note = tr|A0A0T9M785|A0A0T9M785_YERIN Queuine tRNA-ribosyltransferase OS=Yersinia intermedia OX=631; GN = tgt PE=3 SV=1
MKYELQKTDGRARRGRLVFERGVVETPAFMPVGTYGTVKGMTPEEVKETGAQILLGNTFHLWLRPGQEIMKLHGDLHDFMQWHGPILTDSGGFQVFSLGAMRKIKEEGVTFQNPINGDKVFLSPEKSMEIQYDLGSDIVMIFDECTPYPADWDYAKRSMEMSLRWAARSRQRFDELNNKNALFGIIQGGVYEDLRDVSVKGLVDIGFDGYAVGGLAVGEPKEDMHRILEHVCPQIPADKPRYLMGVGKPEDLVEGVRRGIDMFDCVMPTRNARNGHLFVTDGVVKIRNAKHKNDVATLDEHCDCYTCRNYSRAYLHHLDRCNEILGARLNTIHNLRYYQRLMAGLRQAIEEGKLEVFVEDFYGRIGKPVPPLNA

SEQ ID NO: 62436 - protein, 374 aa, Yersinia kristensenii
  REGION 1..374: note = tr|A0A0T9TJ48|A0A0T9TJ48_YERKR Queuine tRNA-ribosyltransferase OS=Yersinia kristensenii OX=28152; GN = tgt PE=3 SV=1
MKYELQKTDGRARRGRLIFERGVVETPAFMPVGTYGTVKGMTPEEVKETGAQILLGNTFHLWLRPGQEIMKLHGDLHDFMQWHGPILTDSGGFQVFSLGAMRKIKEEGVTFQNPINGDKVFLSPEKSMEIQNDLGSDIVMIFDECTPYPADWDYAKRSMEMSLRWAARSRQRFDELNNKNALFGIIQGGVYEDLRDVSVKGLVDIGFDGYAVGGLAVGEPKEDMHRILEHVCPQIPADKPRYLMGVGKPEDLVEGVRRGIDMFDCVMPTRNARNGHLFVTDGVVKIRNAKHKSDTATLDEHCDCYTCRNYSRAYLHHLDRCNEILGARLNTIHNLRYYQRLMAGLRQAIEEGKLESFVEDFYGLIGKPVPPLNV

SEQ ID NO: 62437 - protein, 378 aa, Yersinia kristensenii
  REGION 1..378: note = tr|A0A0T9M4S8|A0A0T9M4S8_YERKR Queuine tRNA-ribosyltransferase OS=Yersinia kristensenii OX=28152; GN = tgt PE=3 SV=1
MKYELQKTDGRARRGRLVFERGVVETPAFMPVGTYGTVKGMTPEEVAETGAQILLGNTFHLWLRPGQEIMKLHGDLHDFMQWHGPILTDSGGFQVFSLGAMRKIKEEGVTFQNPINGDKVFLSPEKSMEIQNDLGSDIVMIFDECTPYPADWDYAKRSMEMSLRWAARSRQRFDELNNKNALFGIIQGGVYEDLRDVSVKGLVDIGFDGYAVGGLAVGEPKEDMHRILEHVCPQIPEDKPRYLMGVGKPEDLVEGVRRGIDMFDCVMPTRNARNGHLFVTDGVVKIRNAKHKSDTATLDEHCDCYTCRNYSRAYLHHLDRCNEILGARLNTIHNLRYYQRLMAGLRQAIEEGKLENFVEDFYGRIGKPVPPLSSQVSV

SEQ ID NO: 62438 - protein, 374 aa, Yersinia massiliensis; identical to SEQ ID NO: 62434
  REGION 1..374: note = tr|A0A0T9PK36|A0A0T9PK36_9GAMM Queuine tRNA-ribosyltransferase OS=Yersinia massiliensis OX=419257; GN = tgt PE=3 SV=1

SEQ ID NO: 62439 - protein, 374 aa, Yersinia massiliensis
  REGION 1..374: note = tr|A0A2R4NSX9|A0A2R4NSX9_9GAMM Queuine tRNA-ribosyltransferase OS=Yersinia massiliensis OX=419257; GN = tgt PE=3 SV=1
MKYELQQTDGRARRGRLIFDRGVVETPAFMPVGTYGTVKGMTPEEVKETGAQILLGNTFHLWLRPGQEIMKLHGDLHDFMQWSGPILTDSGGFQVFSLGAMRKIKEEGVTFQNPINGDKVFLSPEKSMEIQYDLGSDIVMIFDECTPYPADWDYAKRSMEMSLRWAARSRQRFDELNNKNALFGIIQGGVYEDLRDVSVKGLVDIGFDGYAVGGLAVGEPKEDMHRILEHVCPQIPADKPRYLMGVGKPEDLVEGVRRGIDMFDCVMPTRNARNGHLFVTDGVVKIRNAKHKSDTATLDEHCDCYTCRNYSRAYLHHLDRCNEILGARLNTIHNLRYYQRLMAGLRQAIEEGKLESFVEDFYGRIGKPVPPLNV

SEQ ID NO: 62440 - protein, 374 aa, Yersinia mollaretii
  REGION 1..374: note = tr|A0A0U1I2Z1|A0A0U1I2Z1_YERMO Queuine tRNA-ribosyltransferase OS=Yersinia mollaretii OX=33060; GN = tgt PE=3 SV=1
MKYELQKTDGRARRGRLIFERGVVETPAFMPVGTYGTVKGMTPEEVKETGAQILLGNTFHLWLRPGQEIMKLHGDLHDFMNWHGPILTDSGGFQVFSLGAMRKIKEEGVTFQNPINGDKVFLSPEKSMEIQNDLGSDIVMIFDECTPYPADWDYAKRSMEMSLRWAARSRQRFDELNNKNALFGIIQGGVYEDLRDVSVKGLVEIGFDGYAVGGLAVGEPKEDMHRILEHVCPQIPADKPRYLMGVGKPEDLVEGVRRGIDMFDCVMPTRNARNGHLFVTDGVVKIRNAKHKSDTATLDEHCDCYTCRNYSRAYLHHLDRCNEILGARLNTIHNLRYYQRLMAGLRQAIEEGKLESFVEDFYGRIGKPVPPLNV

SEQ ID NO: 62441 - protein, 374 aa, Yersinia mollaretii
  REGION 1..374: note = tr|A0A0U1K871|A0A0U1K871_YERMO Queuine tRNA-ribosyltransferase OS=Yersinia mollaretii OX=33060; GN = tgt PE=3 SV=1
MKYELQKTDGRARRGRLIFERGVVETPAFMPVGTYGTVKGMTPEEVKETGAQILLGNTFHLWLRPGQEIMKLHGDLHDFMNWHGPILTDSGGFQVFSLGAMRKIKEEGVTFQNPINGDKVFLSPEKSMEIQNDLGSDIVMIFDECTPYPAEWDYAKRSMEMSLRWAARSRQRFDELNNKNALFGIIQGGVYEDLRDVSVKGLVEIGFDGYAVGGLAVGEPKEDMHRILEHVCPQIPADKPRYLMGVGKPEDLVEGVRRGIDMFDCVMPTRNARNGHLFVTDGVVKIRNAKHKSDTATLDEHCDCYTCRNYSRAYLHHLDRCNEILGARLNTIHNLRYYQRLMAGLRQAIEEGKLESFVEDFYGRIGKPVPPLNV

SEQ ID NO: 62442 - protein, 374 aa, Yersinia nurmii; identical to SEQ ID NO: 62430
  REGION 1..374: note = tr|A0A0T9L781|A0A0T9L781_9GAMM Queuine tRNA-ribosyltransferase OS=Yersinia nurmii OX=685706; GN = tgt PE=3 SV=1

SEQ ID NO: 62443 - protein, 374 aa, Yersinia pekkanenii
  REGION 1..374: note = tr|A0A0T9NJR3|A0A0T9NJR3_9GAMM Queuine tRNA-ribosyltransferase OS=Yersinia pekkanenii OX=1288385; GN = tgt PE=3 SV=1
MKYELQKTDGRARRGRLIFERGVVETPAFMPVGTYGTVKGMTPEEVKETGAQILLGNTFHLWLRPGQAIIKAHGDLHDFMQWHGPILTDSGGFQVFSLGAMRKIKEEGVTFQNPINGDKVFLSPEKSMEIQYDLGSDIVMIFDECTPYPADWDYAKGSMEMSLRWAARSRQRFDELDNKNALFGIIQGGVYEDLRDVSVKGLVDIGFDGYAVGGLAVGEPKEDMHRILEHVCPQIPADKPRYLMGVGKPEDLVEGVRRGIDMFDCVMPTRNARNGHLFVTDGVVKIRNAKHKDDTATLDEHCDCYTCRNYSRAYLHHLDRCNEILGARLNTIHNLRYYQRLMAGLRQAIEEGKLESFVEDFYGRIGKPIPPLNA

SEQ ID NO: 62444 - protein, 374 aa, Yersinia pestis
  REGION 1..374: note = sp|Q8ZC33|TGT_YERPE Queuine tRNA-ribosyltransferase; OS = Yersinia pestis OX=632 GN=tgt PE=3 SV=1
MKYELQKTDGRARRGRLVFERGVVETPAFMPVGTYGTVKGMTPEEVKETGAQILLGNTFHLWLRPGQEIMKLHGDLHDFMQWHGPILTDSGGFQVFSLGAMRKIKEEGVHFKNPINGDSVFLSPEKSMEIQYDLGSDIVMIFDECTPYPADWDYAKRSMEMSLRWAARSRQRFDELNNKNALFGIIQGGVYEDLRDVSVKGLVDIGFDGYAVGGLAVGEPKEDMHRILEHVCPQIPEDKPRYLMGVGKPEDLVEGVRRGIDMFDCVMPTRNARNGHLFVTDGVVKIRNAKHKDDTATLDEHCDCYTCRHYSRAYLHHLDRCNEILGARLNTIHNLRYYQRLMAGLRQAIEEGKLEHFVEDFYGRIGKPVPPLNV

SEQ ID NO: 62445 - protein, 374 aa, Yersinia pestis; identical to SEQ ID NO: 62444
  REGION 1..374: note = sp|Q1C4H4|TGT_YERPA Queuine tRNA-ribosyltransferase; OS = Yersinia pestis bv. Antiqua (strain Antiqua) OX=360102; GN = tgt PE=3 SV=1

SEQ ID NO: 62446 - protein, 374 aa, Yersinia pseudotuberculosis
  REGION 1..374: note = tr|A0A3G5KI52|A0A3G5KI52_YERPU Queuine tRNA-ribosyltransferase OS=Yersinia pseudotuberculosis; OX = 633 GN=tgt PE=3 SV=1
MKYELQKTDGRARRGRLVFERGVVETPAFMPVGTYGTVKGMTPEEVKETGAQILLGNTFHLWLRPGQEIMKLHGDLHDFMQWHGPILTDSGGFQVFSLGAMRKIKEEGVHFKNPINGDSVFLSPEKSMEIQYDLGSDIVMIFDECTLYPADWDYAKRSMEMSLRWAARSRQRFDELNNKNALFGIIQGGVYEDLRDVSVKGLVDIGFDGYAVGGLAVGEPKEDMHRILEHVCPQIPEDKPRYLMGVGKPEDLVEGVRRGIDMFDCVMPTRNARNGHLFVTDGVVKIRNAKHKDDTATLDEHCDCYTCRHYSRAYLHHLDRCNEILGARLNTMHNLRYYQRLMAGLRQAIEEGKLEHFVEDFYGRIGKPVPPLNV

SEQ ID NO: 62447 - protein, 374 aa, Yersinia pseudotuberculosis; identical to SEQ ID NO: 62444
  REGION 1..374: note = sp|B1JIE9|TGT_YERPY Queuine tRNA-ribosyltransferase; OS = Yersinia pseudotuberculosis serotype O:3 (strain YPIII); OX = 502800 GN=tgt PE=3 SV=1

SEQ ID NO: 62448 - protein, 378 aa, Yersinia rohdei
  REGION 1..378: note = tr|A0A0U1HRQ7|A0A0U1HRQ7_YERRO Queuine tRNA-ribosyltransferase OS=Yersinia rohdei OX=29485 GN=tgt; PE = 3 SV=1
MKYELQKTDGRARRGRLVFERGVVETPAFMPVGTYGTVKGMTPEEVKETGAQILLGNTFHLWLRPGQEIMKLHGDLHDFMQWHGPILTDSGGFQVFSLGAMRKIKEEGVTFQNPINGDKVFLSPEKSMEIQNDLGSDIVMIFDECTPYPADWDYAKRSMEMSLRWAARSRQRFDELNNKNALFGIIQGGVYEDLRDVSVKGLVDIGFDGYAVGGLAVGEPKEDMHRILEHVCPQIPEDKPRYLMGVGKPEDLVEGVRRGIDMFDCVMPTRNARNGHLFVTDGVVKIRNAKHKSDTATLDEHCDCYTCRNYSRAYLHHLDRCNEILGARLNTIHNLRYYQRLMAGLRQAIEEGKLESFVEDFYGRIGKPVPPLSPQLSV

SEQ ID NO: 62449 - protein, 374 aa, Yersinia ruckeri
  REGION 1..374: note = tr|A0A085U573|A0A085U573_YERRU Queuine tRNA-ribosyltransferase OS=Yersinia ruckeri OX=29486; GN = tgt PE=3 SV=1
MKYELQKTDGRARRGRLVFERGVVETPAFMPVGTYGTVKGMTPEEVKETGAQILLGNTFHLWLRPGQEIMKLHGDLHDFMQWHGPILTDSGGFQVFSLGAMRKIKEEGVHFKNPINGDSVFLSPEKSMEIQYDLGSDIVMIFDECTPYPADWDYAKRSMEMSLRWAARSRQRFNELNNKNALFGIIQGGVYEDLRDVSVKGLVDIGFDGYAVGGLAVGEPKEDMHRILEHVCPQIPADKPRYLMGVGKPEDLVEGVRRGIDMFDCVMPTRNARNGHLFVTDGVVKIRNAKHKDDTSTLDAECDCYTCRNYSRAYLHHLDRCNEILGARLNTIHNLRYYQRLMAGLRQAIEEGKLESFVEDFYGRIGKPIPPLNV

SEQ ID NO: 62450 - protein, 374 aa, Yersinia similis
  REGION 1..374: note = tr|A0A0T9QSW1|A0A0T9QSW1_9GAMM Queuine tRNA-ribosyltransferase OS=Yersinia similis OX=367190; GN = tgt PE=3 SV=1
MKYELQKTDGRARRGRLVFERGVVETPAFMPVGTYGTVKGMTPEEVKETGAQILLGNTFHLWLRPGQEIMKLHGDLHDFMQWHGPILTDSGGFQVFSLGAMRKIKEEGVHFKNPINGDSVFLSPEKSMEIQYDLGSDIVMIFDECTPYPADWDYAKRSMEMSLRWATRSRQRFDELNNKNALFGIIQGGVYEDLRDVSVKGLVDIGFDGYAVGGLAVGEPKEDMHRILEHVCPQIPEDKPRYLMGVGKPEDLVEGVRRGIDMFDCVMPTRNARNGHLFVTDGVVKIRNAKHKDDTATLDEHCDCYTCRHYSRAYLHHLDRCNEILGARLNTIHNLRYYQRLMAGLRQAIEEGKLEHFVEDFYGRIGKPVPPLNV

SEQ ID NO: 62451 - protein, 374 aa, unidentified
  source 1..374: note = Yersinia wautersii
  REGION 1..374: note = tr|A0A0E8XFF7|A0A0E8XFF7_9GAMM Queuine tRNA-ribosyltransferase OS=Yersinia wautersii OX=1341643; GN = tgt PE=3 SV=1
MKYELQKTDGRARRGRLVFERGVVETPAFMPVGTYGTVKGMTPEEVKETGAQILLGNTFHLWLRPGQEIMKLHGDLHDFMQWHGPILTDSGGFQVFSLGAMRKIKEEGVHFKNPINGDSVFLSPEKSMEIQYDLGSDIVMIFDECTPYPADWDYAKRSMEMSLRWAARSRQRFDELNNKNALFGIIQGGVYEDLRDVSVKGLVDIGFDGYAVGGLAVGEPKEDMHRILEHVCPQIPEDKPRYLMGVGKPEDLVEGVRRGIDMFDCVMPTRNARNGHLFVTDGVVKIRNAKHKDDTATLDEHCDCYTCRHYSRAYLHHLDRCNEILGARLNTMHNLRYYQRLMAGLRQAIEEGKLEHFVEDFYGRIGKPVPPLNV

SEQ ID NO: 62452 - protein, 374 aa, unidentified
  source 1..374: note = Yersiniaceae bacterium
  REGION 1..374: note = tr|A0A2N5EAV1|A0A2N5EAV1_9GAMM Queuine tRNA-ribosyltransferase OS=Yersiniaceae bacterium 2016Iso4; OX = 2060068 GN=tgt PE=3 SV=1
MKYELIKKEGRARRGRLVFERGVVETPAFMPVGTYGTVKGMTPEEVKESGAQILLGNTFHLWLRPGQEIMKLHGDLHDFMQWHGPILTDSGGFQVFSLGAMRKIKEEGVYFRNPINGDPVFLSPEKSMEIQYDLGSDIVMIFDECTPYPADWDYAKRSMEMSLRWAARSRKRFDELNNNNALFGIIQGSVYEDLRDVSVKGLVEIGFDGYAVGGLAVGEPKEDMHRILEHVCPQIPEDKPRYLMGVGKPEDLVEGVRRGIDMFDCVMPTRNARNGHLFVTDGVVKIRNAKHKEDTSPLDPECDCYTCRNYSRAYLHHLDRCNEILGARLNTIHNLRYYQRVMAGLRQAIDEGKLAQFVTDFYQRIGKPVPPLDA

SEQ ID NO: 62453 - protein, 374 aa, unidentified
  source 1..374: note = Yersiniaceae bacterium
  REGION 1..374: note = tr|A0A2N5E9S5|A0A2N5E9S5_9GAMM Queuine tRNA-ribosyltransferase OS=Yersiniaceae bacterium 2015Iso6; OX = 2060067 GN=tgt PE=3 SV=1
MKYELIKKEGRARRGRLVFDRGVVETPAFMPVGTYGTVKGMTPEEVKESGAQILLGNTFHLWLRPGQEIMKLHGDLHDFMQWHGPILTDSGGFQVFSLGAMRKIKEEGVYFRNPINGDPVFLSPEKSMEIQYDLGSDIVMIFDECTPYPADWDYAKRSMEMSLRWAARSRKRFDELNNNNALFGIIQGSVYEDLRDVSVKGLVEIGFDGYAVGGLAVGEPKEDMHRILEHVCPQIPEDKPRYLMGVGKPEDLVEGVRRGIDMFDCVMPTRNARNGHLFVTEGVVKIRNAKHKEDTSPLDPECDCYTCRNYSRAYLHHLDRCNEILGARLNTIHNLRYYQRVMAGLRQAIDEGKLAQFVTDFYQRIGKPVPPLDA

SEQ ID NO: 62454 - protein, 375 aa, Yokenella regensburgei
  REGION 1..375: note = tr|A0A2X2Q5Y3|A0A2X2Q5Y3_9ENTR Queuine tRNA-ribosyltransferase OS=Yokenella regensburgei; OX = 158877 GN=tgt PE=3 SV=1
MKFELDTTDGRARRGRLVFDRGVVETPAFMPVGTYGTVKGMTPEEVEATGAQIILGNTFHLWLRPGQEIMKLHGDLHDFMQWKGPILTDSGGFQVFSLGDIRKITEQGVHFRNPINGDPIFLDPEKSMEIQYDLGSDIVMIFDECTPYPADWDYAKRSMEMSLRWAKRSRDRFDGLGNKNALFGIIQGSVYEDLRDISVKGLVEIGFDGYAVGGLAVGEPKEDMHRILEHVCPQIPTDKPRYLMGVGKPEDLVEGVRRGIDMFDCVMPTRNARNGHLFVTDGVVKIRNAKYKSDTSPLDAECDCYTCRNYSRAYLHHLDRCNEILGARLNTIHNLRYYQRLMAGLRKAIEEGKLESFVTDFYQRQGRPVPPLNVD

SEQ ID NO: 62455 - protein, 375 aa, Yokenella regensburgei; identical to SEQ ID NO: 62454
  REGION 1..375: note = tr|G9Z456|G9Z456_9ENTR Queuine tRNA-ribosyltransferase OS=Yokenella regensburgei ATCC 43003 OX=1002368 GN=tgt PE=3 SV=1

SEQ ID NO: 62456 - protein, 376 aa, unidentified
  source 1..376: note = Yoonia litorea
  REGION 1..376: note = tr|A0A1I6MCG2|A0A1I6MCG2_9RHOB Queuine tRNA-ribosyltransferase OS=Yoonia litorea OX=1123755; GN = tgt PE=3 SV=1
MTATFSFDLKATDGKARTGVINTPRGDIRTPAFMPVGTAATVKAMMPESVAATGADILLGNTYHLMLRPTAERIDRLGGLHQFMNWDKPILTDSGGFQVMSLSDLRKLTEEGVTFKSHIDGSRHHLTPERSMEIQKLLGSDIVMCFDECPALPADRKRIQESMELSMRWAQRSRDAFGDRPGHALFGIQQGGLEEDLRGRSAEALRAIEFDGYAVGGLAVGEGQEAMFKVLDFAPDQLPVDKPRYLMGVGKPDDIVGAVKRGIDMMDCVLPSRSGRTGQAFTRRGVVNIKNARHADDPRPLDAECTCPACSNYSRAYLHHVFRAQEMISGMLLTWHNLHYFQEIMAGMRTAIAAGAFADWEADFHAGRAKGDIAPL

SEQ ID NO: 62457 - protein, 377 aa, unidentified
  source 1..377: note = Yoonia maricola
  REGION 1..377: note = tr|A0A2M8WKR4|A0A2M8WKR4_9RHOB Queuine tRNA-ribosyltransferase OS=Yoonia maricola OX=420999; GN = tgt PE=3 SV=1
MTKRFSFSLNATDGKARTGVISTPRGDIRTPAFMPVGTAATVKAMMPESVAATGADILLGNTYHLMLRPTAERIDRLGGLHKFMNWDKPILTDSGGFQVMSLADLRKMTEKGVTFKSHIDGSRHELTPERSMDIQKLLGSDIVMCFDECPALPADRKRIAQSMELSMRWAQRSRDAFGDRPGHALFGIQQGGLEEDLRAQSAEALKAVEFDGYAVGGLAVGEGQEAMFGVLDFAPDQLPVDKPRYLMGVGKPDDIVGAVKRGIDMMDCVLPSRSGRTGQLFTRRGVVNIKNARHADDPRPLDAQCTCPTCANYTRAYLHHVFRAHEMISGMLLTWHNLHYFQEIMQGMRDAIAAARFAAWETEFHETRALGDIDPTC

SEQ ID NO: 62458 - protein, 376 aa, unidentified
  source 1..376: note = Yoonia maritima
  REGION 1..376: note = tr|A0A2T0W1Q2|A0A2T0W1Q2_9RHOB Queuine tRNA-ribosyltransferase OS=Yoonia maritima OX=1435347; GN = tgt PE=3 SV=1
MTKRFSFSLNATDGKARTGVISTPRGDIRTPAFMPVGTAATVKAMMPESVAATGADILLGNTYHLMLRPTAERIDRLGGLHKFMNWDKPILTDSGGFQVMSLADLRKLTEKGVTFKSHIDGSKHELTPERSMEIQRLLGSDIVMCFDECPALPADRTRINESMQLSMRWAARSREAFGDRPGHALFGIQQGGLEEDLRAESAQALRDIEFDGYAVGGLAVGEGQEAMFSVLDFAPDQLPTDKPRYLMGVGKPDDIVGAVKRGIDMMDCVLPSRSGRTGQVFTRRGVLNIKNARHMDDPRPLDEQCTCPACSNYSRAYLHHVFRAQEMISGMLLTWHNLHYFQEIMQGMRDAIAVGAFGAWEADFHAQRALGDIAPL

SEQ ID NO: 62459 - protein, 376 aa, unidentified
  source 1..376: note = Yoonia rosea
  REGION 1..376: note = tr|A0A1R3WEN4|A0A1R3WEN4_9RHOB Queuine tRNA-ribosyltransferase OS=Yoonia rosea OX=287098 GN=tgt; PE = 3 SV=1
MTQRFSFALNATDGKARTGVISTPRGDIRTPAFMPVGTAATVKAMMPESVAATGADILLGNTYHLMLRPTAERIDRLGGLHKFMNWDKPILTDSGGFQVMSLAELRKLTEKGVTFKSHIDGSKHELTPERSMEIQKLLGSDIVMCFDECPALPADRKRIAESMELSMRWAQRSRDAFGDRPGHALFGIQQGGLEEDLRAQSAEALKAVEFDGYAVGGLAVGEGQEAMFGVLDFAPDQLPVDKPRYLMGVGKPDDIVGAVKRGIDMMDCVLPSRSGRTGQLFTRRGVINIKNARHADDPRPLDEHCTCPACSHYSRAYLHHVFRAQEMISGMLLTWHNLHYFQEIMQGMRDAIAAGRFADWEAEFHATRALGDVPPL

SEQ ID NO: 62460 - protein, 378 aa, unidentified
  source 1..378: note = Yoonia sediminilitoris
  REGION 1..378: note = tr|A0A2T6KRC6|A0A2T6KRC6_9RHOB Queuine tRNA-ribosyltransferase OS=Yoonia sediminilitoris; OX = 1286148 GN=tgt PE=3 SV=1
MWDLMKFSFDLHATDGKARTGVIHTARGDIRTPAFMPVGTAATVKAMMPESVAATGADILLGNTYHLMLRPTAERIDRLGGLHKFMNWHKPILTDSGGFQVMSLSDLRKLTEEGVTFKSHIDGSKHHLTPERSMEIQKLLGSDIVMCFDECPALPADRKRLTESMELSMRWAQRSRDAFGDRPGHALFGIQQGGLEEDLRAQSAEALRAIEFDGYAVGGLAVGEGQEAMFSVLDFAPDQLPQDKPRYLMGVGKPDDIVGAVKRGIDMMDCVLPSRSGRTGQVFTRRGVVNIKNARHADDPRPLDEHCTCPACSHYSRAYLHHVFRAQEMISGMLLTWHNLHYFQDIMQGMRSAISTGAFDAWEADFHGNRALGDIPPC

SEQ ID NO: 62461 - protein, 376 aa, unidentified
  source 1..376: note = Yoonia tamlensis
  REGION 1..376: note = tr|A0A1I6G4C1|A0A1I6G4C1_9RHOB Queuine tRNA-ribosyltransferase OS=Yoonia tamlensis OX=390270; GN = tgt PE=3 SV=1
MTQSFSFSLNATDGKARTGVISTPRGDIRTPAFMPVGTAATVKAMMPESVAATGADILLGNTYHLMLRPTAERIANLGGLHKFMNWDKPILTDSGGFQVMSLSDLRKMSEKGVTFRSHIDGSKHELTPERSMEIQKLLGSDIVMCFDECPALPADRTRINESMQMSMRWAQRSRDAFGDRPGYALFGIQQGGLEEDLRAESAAALRDIEFDGYAVGGLAVGEGQEAMFNVLDFAPDQLPTDKPRYLMGVGKPDDIVGAVKRGIDMMDCVLPSRSGRTGQIFTRHGVLNIKNARHADDPRPLDENCGCPACRNYSRAYLHHVFRAQEMISGMLLTWHNLHYFQDIMQGMRDAIATGSFAAWEADFHAGRAQGDIEPL

SEQ ID NO: 62462 - protein, 376 aa, unidentified
  source 1..376: note = Yoonia vestfoldensis
  REGION 1..376: note = tr|A0A1Y0EA56|A0A1Y0EA56_9RHOB Queuine tRNA-ribosyltransferase OS=Yoonia vestfoldensis OX=245188; GN = tgt PE=3 SV=1
MTDRFSFDLHATDGKARSGVIRTPRGEIRTPAFMPVGTAATVKAMLPESVAATGADILLGNTYHLMLRPTAERIAALGGLHAFMNWDKPILTDSGGFQVMSLAGLRKLTEEGVTFKSHIDGSRHHLSPERSMEIQALLGSDIVMCFDECPALPADRDRIKSSMDLSMRWAQRSRDAFGDRPGHALFGIQQGGLEQDLREESANALRAIEFDGYAVGGLAVGEGQEAMFGVLDYAPDQLPVDKPRYLMGVGKPDDIVGAVKRGIDMMDCVLPSRSGRTGQAFTRHGVVNIKNARHQDDPRPLDEACTCPACRGYSRAYLHHVFRANEMISGMLLTWHNLHYFQDIMAGMRAAISAGSFAAWEAEFHRQRAQGDIDPL

SEQ ID NO: 62463 - protein, 376 aa, unidentified
  source 1..376: note = Yoonia vestfoldensis
  REGION 1..376: note = tr|A3V467|A3V467_9RHOB Queuine tRNA-ribosyltransferase OS=Yoonia vestfoldensis SKA53; OX = 314232 GN=tgt PE=3 SV=1
MTQRFSFDLHATDGKARTGAISTPRGVIRTPAFMPVGTAATVKAMLPESVAATGADILLGNTYHLMLRPTAERIARLGGLHKFMNWDKPILTDSGGFQVMSLAGLRKLTEEGVTFKSHIDGSRHHLSPERSMEIQALLGSDIVMCFDECPALPADRDRIKSSMDLSMRWAQRSRDAFGDRPGHALFGIQQGGLEQDLREESAQALQAIGFDGYAVGGLAVGEGQEAMFGVLDYAPDQLPVDKPRYLMGVGKPDDIVGAVKRGIDMMDCVLPSRSGRTGQAFTRHGVVNIKNARHQDDPRPLDEACTCPACRGYSRAYLHHVFRANEMISGMLLTWHNLHYFQQIMAGMRDAISAGTFAAWEADFHALRAQGDIDPL

SEQ ID NO: 62464 - protein, 375 aa, unidentified
  source 1..375: note = Youhaiella tibetensis
  REGION 1..375: note = tr|A0A5B9DN95|A0A5B9DN95_9RHIZ Queuine tRNA-ribosyltransferase OS=Youhaiella tibetensis; OX = 1447062 GN=tgt PE=3 SV=1
MKQVNFSLLATDGNARRGRIDTPRGDIQTPAFMPVGTAGTVKAMYPEQVRETGADILLGNTYHLMLRPGAERVASLGGLHTFMDWERPILTDSGGFQVMSLAKLRKLDEKGVTFRSHIDGSAYSLTPERSIEIQTLLDSDIIMQLDECIPLPSETREIERAMELSLRWADRSKTAFNNQANRALFGIVQGGDDLRLRAKSAAGLQSIGFDGYAVGGLAVGEPQEVMFEVLSGVCPLLPSDRPRYLMGVGKPDDILGAIERGIDMFDCVHPTRAGRHGHIYTRFGVINMKNARHKDDARPVDEQSPNRNCRRFSRAYLHHLVKTEEILGAMILSQINLAYYQELVAGARAAIEAGTFSEYAEATRAGWAGGDLPPL

SEQ ID NO: 62465 - protein, 376 aa, unidentified
  source 1..376: note = Youngiibacter fragilis
  REGION 1..376: note = tr|V7I250|V7I250_9CLOT Queuine tRNA-ribosyltransferase OS=Youngiibacter fragilis 232.1; OX = 994573 GN=tgt PE=3 SV=1
MYTLLKTEGSARRGRLTTPHGTIETPVFMNVGTLAAIKGAVSSMDLKEIGCQVELSNTYHLHLRPGDKVVRKLGGLHRFMNWDRPILTDSGGFQVFSLASMRKIKEEGVYFSSHIDGSKIFMGPEESMRIQSNLASTIAMAFDECVENPAPREYVERSVERTTRWLDRCRKEMDRLNSLEDTINRKQMLFAINQGGTYKDLRVLHARQISGMDMDGFAIGGLAVGETHDEMYDVIEAVVPYLPKDKPIYLMGVGLPENILEAVDRGVDFFDCVLPARNGRHGHVFTNSGRLNLNNARFETDDAPIDTTCSCPTCRNYTRGYIRHLFKAKEMLAMRLCVLHNLHFYNTMMEEIRDALDSGTFREYKVQKLAMVRGKL

SEQ ID NO: 62466 - protein, 376 aa, unidentified
  source 1..376: note = Youngimonas vesicularis
  REGION 1..376: note = tr|A0A4S3M9M9|A0A4S3M9M9_9RHOB Queuine tRNA-ribosyltransferase OS=Youngimonas vesicularis; OX = 1294297 GN=tgt PE=3 SV=1
MAEKFSFQLMATDGKARRGVIRTPRGEIRTPAFMPVGTAATVKAMMPESVAATGADILLGNTYHLMLRPTAERVDRLGGLHKFMNWSKPILTDSGGFQVMSLSDLRKLTEEGVTFKSHVDGSRHFLSPERSMEIQRLLGSDIVMCFDECPALPADEKRVAQSMRLSMRWAQRSRDAFGDRPGHALFGIMQGGVTPELREESAKALVEIGFDGYAVGGLAVGEGQEAMFGVLDYAPDFLPQDKPRYLMGVGKPDDIVGAVKRGIDMMDCVLPSRSGRTGQAWTRHGMVNIKNARHQDDPRPLDEDCTCPACRNYSRAYLHHVFRAKEMICGMLLTWHNLHYYQELMQGMRDAIEAGRFAAWEAEFHAQRAQGDIAPL

SEQ ID NO: 62467 - protein, 375 aa, Zavarzinia compransoris
  REGION 1..375: note = tr|A0A317DZE8|A0A317DZE8_9PROT Queuine tRNA-ribosyltransferase OS=Zavarzinia compransoris; OX = 1264899 GN=tgt PE=3 SV=1
MTALDFGFTVEARDGMARAGHVRTARGVIRTPAFMPVGTAATVKACMPETVRAAGADIILGNTYHLMLRPGAERVARLGGLHAFMNWPHPILTDSGGFQVMSLSSLRKITEEGVTFQSHIDGSKHAMSPERSIEIQRLLDSDIAMQLDECVALPATRDEAARAMELSLRWARRSKTAFYASEPPPGRAIFGIVQGGTDADLRRASAEGLVEIGFPGYALGGLAVGEPQAEMFATIAATTPHLPGDKPRYLMGVGKPADIVGAVARGIDMFDCVIPTRSGRNGQAFTRSGALNIRNAKFAEDKRPLDERCHCPACRAYSRAYLHHLVKAEEILGAMLMTAHNLRHYQDLTAGLRTAIRRGRLDAFVEAFEGGGADY

SEQ ID NO: 62468 - protein, 375 aa, Zavarzinia sp.
  REGION 1..375: note = tr|A0A317E4U3|A0A317E4U3_9PROT Queuine tRNA-ribosyltransferase OS=Zavarzinia sp. HR-AS OX=2211142; GN = tgt PE=3 SV=1
MTAVDFGFSVEARDGMARAGHVRTARGVIRTPAFMPVGTAATVKAAWPETVRKAGADILLGNTYHLMLRPGAERVARLGGLHKFMNWPHPILTDSGGFQVMSLSSLRKITEEGVTFRSHHDGSSHAMSPERSIEIQRLLDSDIAMQLDECVALPASRDETARAMELSLRWARRSKDAFLASAPPPGRAIFGIVQGGTEFDLRRASAEGLVEIGFPGYALGGLAVGEPQPVMFETIAATTPHLPQDRPRYLMGVGKPSDIVGAVARGIDMFDCVIPTRSGRNGQAFTRQGTLNIRNAKHAEDQGPLDSRCHCPACRDYSRAYIHHLVKSQEILGAMLMTAHNLTYYQDLMVGLRSAIRRGRLAAFVEAFEAGGADY

SEQ ID NO: 62469 - protein, 386 aa, Zeaxanthinibacter enoshimensis
  REGION 1..386: note = tr|A0A4R6TR08|A0A4R6TR08_9FLAO Queuine tRNA-ribosyltransferase OS=Zeaxanthinibacter enoshimensis; OX = 392009 GN=tgt PE=3 SV=1
MPIFATEIYDLKFTLQHTDPQSKARAASLQTDHGTIETPIFMPVGTVASVKGVHQRELREEVNPDIILANTYHLYLRPKTDILEKAGGLHKFMGWDRNILTDSGGYQVYSLSANRKIKEEGVKFKSHIDGSYHVFTPENVMEIQRTIGADIIMAFDECTPYPCDYKYAKRSMHMTHRWLDRCIAHLEKVPPKYGFDQTFFPIVQGSTYKDLRLQSAEYIANSGCEGNAIGGLSVGEPAEEMYAMTEVVCGVLPEDKPRYLMGVGTPINILENIALGIDMFDCVMPTRNARNGMLFTAEGTINIKNKKWEDDFSPLDPAGTTFVDHEYSKAYLRHLFAANEYLGKQIATIHNLGFYMWLVREARKHILAGDFASWKNQMVRNMDKRL

SEQ ID NO: 62470 - protein, 374 aa, unidentified
  source 1..374: note = Zetaproteobacteria bacterium
  REGION 1..374: note = tr|A0A2A5F1M2|A0A2A5F1M2_9PROT Queuine tRNA-ribosyltransferase OS=Zetaproteobacteria bacterium; OX = 2026807 GN=tgt PE=3 SV=1
MSSLHFEILAQDSEGHARRGRIQLPHGMVETPVFMPVGTQATVKSLTPADLEDDIQASIILGNTYHLMLRPGADIVEKMGGLHKFMAWNRPILTDSGGFQVWSLGDLRKIEENGVRFRSHIDGSSWFLGPKESMAIQRQLGSDIVMAFDECTPYPATHEEARKSMQMSMRWAEQCREYLPVNDKQALFGIVQGGMYADLRRESLHAIADMDFEGIALGGLSVGEPKEEMMATLDTLAPYLPKDKPHYVMGVGTPDDLIEGIDRGIDMFDCVMPSRNARNGTLFTNHGKINIKNLKHQTDASPIMEGCTCYTCQNFSRAYLRHLYMAKELLSARLNTLHNLHYYCDLMQRARDALEAGRWISFHDDFLSTYRHNP

SEQ ID NO: 62471 - protein, 382 aa, unidentified
  source 1..382: note = Zetaproteobacteria bacterium
  REGION 1..382: note = tr|A0A3N5JVW2|A0A3N5JVW2_9PROT Queuine tRNA-ribosyltransferase OS=Zetaproteobacteria bacterium; OX = 2026807 GN=tgt PE=3 SV=1
MRFTLLKSNSACGPRRGRIQTAHGTVETPVFMPVGTQGTVKTLDPRDLHAESCEILLCNTYHLYLRPGHEIVKTLGGLHRFMGWDRAILTDSGGFQVLSLAALRRISEDGVSFQSHLDGSRHVLTPEKAVEIQLALGVDILMALDECPPHDADAAYHQSSMERTLRWAARCRAAHPGDEPALFGIVQGGTQPELRARSAEETRRIGFSGYALGGLGIGEGSAAMYATVEETATLLPADAPRYLMGVGTPQDLLECIARGVDLFDCVLPTRNARNGTLFTGTGRVNIKGAAHARDERPVDAECACYTCRHFSRAYLRHLYVAGEILGLRLNTIHNVHYYLDLMRQARQAVAAGRFLAWKEAALARMRAEPTTSQHAQEIRTDD

SEQ ID NO: 62472 - protein, 376 aa, unidentified
  source 1..376: note = Zhengella mangrovi
  REGION 1..376: note = tr|A0A2G1QHQ0|A0A2G1QHQ0_9RHIZ Queuine tRNA-ribosyltransferase OS=Zhengella mangrovi OX=1982044; GN = tgt PE=3 SV=1
MSETFQFRLLASDGGARRGEITMPRGTIRTPAFMPVGTGGTVKAMYMDQVRELGADIILGNTYHLMLRPGAERVARLGGLHDFARWPYPILTDSGGFQVMSLAALRKLDERGVTFKSHIDGVKYDMTPERSIEIQGLLDSDIQMQLDECIRLPAERDDVERAMELSLRWADRCKAAFGDQPGKAMFGIVQGGDVPDLRVRSAQALAAMDLKGYAVGGLAVGEPQAVMLEMLEAVCPVLPAEKPRYLMGVGTPDDMLKSVARGIDMFDCVMPTRAGRHGLAYTRFGKINLRNARHADDPRPLDAESDCPAARDYSRAYLHHLVRSGEALGGMLLTWNNLAYYQRLMQGARDAIEAGRYGNYVAQTQAGWERGDLPAL

SEQ ID NO: 62473 - protein, 420 aa, Zhihengliuella halotolerans
  REGION 1..420: note = tr|A0A4Q8AAG3|A0A4Q8AAG3_9MICC Queuine tRNA-ribosyltransferase OS=Zhihengliuella halotolerans; OX = 370736 GN=tgt PE=3 SV=1
MSADVPSSHPRQGEFGFTVGARLDGTRARTGVIRTPHGEIATPAFIAVGTKATVKAVTPEAVADFGAQAVLANAYHLYLQPGSDVLDAAGGLGRFMNWPGPTFTDSGGFQVMSLGSGFKKVIDMKATTPSGSDDAVAPGKERLANVDDDGVWFKSHLNGDVHRFTPEVSMNVQHEIGADIMFAFDELTTLHNSRAYQEESLERTRLWAERCITEHFRLTDTRVGKEYQGLFGVIQGAQYEDLRRKACRDLAAMPFDGFGIGGALEKENLGTIVGWCADELPEDKPRHLLGISEPDDIFTAIENGADTFDCVSPTRVARNSAFYTQHGRFNLSGQRYKLDFTPLQAGCDCYTCTHYTRAYIHHLHKAKELLSHTLISIHNERFVVRLVDEARAAIETGTFFELKERVLGEYYAGNPDPQGA

SEQ ID NO: 62474 - protein, 383 aa, unidentified
  source 1..383: note = Zhizhongheella caldifontis
  REGION 1..383: note = tr|A0A2S5SVT2|A0A2S5SVT2_9BURK Queuine tRNA-ribosyltransferase OS=Zhizhongheella caldifontis; OX = 1452508 GN=tgt PE=3 SV=1
MTTSPLPHGLHFDVLKTEGHARRGRLTLNHGVVETPIFMPVGTYGTVKGVMPRSLEEMGAQIILGNTFHLWLRPGLDIIRQFGGLHRFEGWTKPILTDSGGFQVWSLGEMRKISEEGVKFASPVNGDKLFLTPEVSMQVQHALDSDIVMQFDECTPYETKGHITTEREARSSMELSLRWAKRCRAEFERLGNRNALFGIVQGGMFEHLRQESLEQLVEMDLPGYAIGGVSVGEPKEDMLRIMAHTPHRLPAGKPRYLMGVGTPEDLVEGVAAGVDMFDCVMPTRNARNGHLFTRFGDLKIRNARHKTDERPIDETCSCYTCKNFSRAYLHHLDRCGEMLGPMLTSIHNLHYYLNLMREVRESLDAGRFQAFRETFRADRQRGV

SEQ ID NO: 62475 - protein, 390 aa, unidentified
  source 1..390: note = Zhongshania aliphaticivorans
  REGION 1..390: note = tr|A0A127M4F0|A0A127M4F0_9GAMM Queuine tRNA-ribosyltransferase OS=Zhongshania aliphaticivorans; OX = 1470434 GN=tgt PE=3 SV=1
MSDCRMKFALKTTDGMARRGCLDFPRGKVETPAFMPVGTYGTVKGMLPRDIHEIGADIILGNTFHLSLRPGTEVVKAHGSLHDFIGWSGPILTDSGGFQVWSLGKLRKITEAGVSFKSPVDGSSVYLDPETSMQIQRDLGSDIVMIFDECTPYPATEAEARTSMELSLRWGARSKAAHAGNDAALFGIIQGGMYPELRRESLAGLAEVGFDGYAIGGLSVGEPKDEMLKVLDSLADHLPTDKPRYLMGVGKPSDILEAVMRGVDMFDCVMPTRNARNGHLFTSTGVIKIRNAAHKTSTAPLDANCDCYTCQNFSRAYLHHLDKCKEILGAQLNTIHNLRYYQNHMAAIRLAIEEGRLAQFAAEYYASQEVRPDQAEQPAQRSEENDESGA

SEQ ID NO: 62476 - protein, 374 aa, Zhongshania sp.
  REGION 1..374: note = tr|A0A3N0C711|A0A3N0C711_9GAMM Queuine tRNA-ribosyltransferase OS=Zhongshania sp. DSW25-10; OX = 2304603 GN=tgt PE=3 SV=1
MTECRMRFDVKASDGLARRGTLDFPRGKVQTPAFMPVGTYGTVKGMLPRDIKEIGAEIILGNTFHLSLRPGTEVVKAHGDLHDFTGWQGPILTDSGGFQVWSLGKLRKISEAGVSFKSPVNGSDVYLDPETSMQIQRDLGADIVMIFDECTPYPATETEARSSMELSLRWAARSKTAHEGNDAALFGIVQGGMYPELRRESLQGLKDIDFDGFAIGGLSVGEPKDEMLMVLDSLAEHMPEDKPRYLMGVGKPSDILEAVMRGVDMFDCVMPTRNARNGHLFTSTGVIKIRNASHRFNDAPLDAKCDCYTCQNFSRAYLHHLDKCKEILGAQLNTIHNLRYYQNHMAAIRLAIEEGRLAQFAEEFYREQDGRADV

SEQ ID NO: 62477 - protein, 374 aa, Zhongshania sp.; identical to SEQ ID NO: 62476
  REGION 1..374: note = tr|A0A2S4HGZ9|A0A2S4HGZ9_9GAMM Queuine tRNA-ribosyltransferase OS=Zhongshania sp. ZX-21; OX = 2067667 GN=tgt PE=3 SV=1

SEQ ID NO: 62478 - protein, 387 aa, Zhouia amylolytica
  REGION 1..387: note = tr|A0A1I6RU48|A0A1I6RU48_9FLAO Queuine tRNA-ribosyltransferase OS=Zhouia amylolytica OX=376730; GN = tgt PE=3 SV=1
MFIFADIEGLFMKFDLKGKDQGSKARAGVITTDHGTIETPIFMPVGTVASVKGVHQRELKEDINPDIILGNTYHLYLRPKTEILEKAGGLHKFMNWDRNILTDSGGFQVYSLSGRRKIKEEGVKFKSHIDGSYHVFTPENVMDIQRTIGADIIMAFDECTPYPCDYRYAKSSMHRTHRWLDRCVSRFNNTPSKYGYEQTLFPIVQGSTYKDLRLQSAEYIANVGAEGNAIGGLSVGEPAEEMYEMTDIVCSVLPEDKPRYLMGVGTPINILENIALGVDMFDCVMPTRNARNGMLFTAHGTINIKNKKWEDDFSPIDEMGITFVDTYYSKAYLRHLFAANEYLGKQIATIHNLGFYLWLVREARKHILAGDFYEWKNKMVKQMDKRL

SEQ ID NO: 62479 - protein, 387 aa, Zhouia amylolytica
  REGION 1..387: note = tr|W2UNV6|W2UNV6_9FLAO Queuine tRNA-ribosyltransferase OS=Zhouia amylolytica AD3; OX = 1286632 GN=tgt PE=3 SV=1
MFIFADIEGLFMKFDLKGKDQGSKARAGVITTDHGTIETPIFMPVGTVASVKGVHQRELKEDINPDIILGNTYHLYLRPKTEILEKAGGLHKFMNWDRNILTDSGGFQVYSLSGRRKIKEEGVKFKSHIDGSYHVFTPENVMDIQRTIGADIIMAFDECTPYPCDYRYAKSSMHRTHRWLDRCVSRFNNTPSKYGYEQTLFPIVQGSTYKDLRLQSAEYIANVGAEGNAIGGLSVGEPAEEMYEMTDIVCSVLPEDKPRYLMGVGTPINILENIALGVDMFDCVMPTRNARNGMLFTAHGTINIKNKKWEDDFSPIDEMGITFVDTYYTKAYLRHLFAANEYLGKQIATIHNLGFYLWLVREARKHILAGDFYEWKNKMVKQMDKRL

SEQ ID NO: 62480 - protein, 382 aa, Zobellella denitrificans
  REGION 1..382: note = tr|A0A291HR45|A0A291HR45_9GAMM Queuine tRNA-ribosyltransferase OS=Zobellella denitrificans; OX = 347534 GN=tgt PE=3 SV=1
MKFELQTTDGRARRGRLVFDRGVVETPAFMPVGTYGTVKGMTPEEVTATGAQILLGNTFHLWIRPGQEVMKLHGDLHDFMNWQGPILTDSGGFQVFSLGDIRKITEEGVYFRNPVNGDKIFLAPETSMEIQYDLGSDIVMIMDECTPYPATWEEAKKSMEMSLRWAKRSRDHFDKLGNKNALFGIIQGSVYEDLRDQSLEGLLDIGFDGYAVGGLAVGEPKHEMHKVLEHTCPKIPEDKPRYLMGVGKPEDLVEGVRRGIDMFDCVMPTRNARNGHLFTTEGVVKIRNAKHKTDTGPLDADCDCYTCKHYSRSYLHHLDKCNEILGARLNTIHNLRYYQRVMEGLRGAIEQGKLDDFVAEFYGRQGRPVPPLGQSAVEHGEG

SEQ ID NO: 62481 - protein, 382 aa, Zobellella denitrificans
  REGION 1..382: note = tr|A0A231MX70|A0A231MX70_9GAMM Queuine tRNA-ribosyltransferase OS=Zobellella denitrificans; OX = 347534 GN=tgt PE=3 SV=1
MKFELQTTDGRARRGRLVFDRGVVETPAFMPVGTYGTVKGMTPEEVTATGAQILLGNTFHLWIRPGQEVMKLHGDLHDFMNWQGPILTDSGGFQVFSLGDIRKITEEGVYFRNPVNGDKIFLAPETSMEIQYDLGSDIVMIMDECTPYPATWEEAKKSMEMSLRWAKRSRDHFDKLGNKNALFGIIQGSVYEDLRDQSLEGLLEIGFDGYAVGGLAVGEPKHEMHKVLEHTCPRIPEDKPRYLMGVGKPEDLVEGVRRGIDMFDCVMPTRNARNGHLFTTEGVVKIRNAKHKTDTGPLDADCDCYTCKHYSRSYLHHLDKCNEILGARLNTIHNLRYYQRVMEGLRGAIEQGKLDDFVAEFYGRQGRPVPPLGQSAVEHGEG

SEQ ID NO: 62482 - protein, 382 aa, unidentified
  source 1..382: note = Zobellella endophytica
  REGION 1..382: note = tr|A0A2P7R3Y2|A0A2P7R3Y2_9GAMM Queuine tRNA-ribosyltransferase OS=Zobellella endophytica; OX = 2116700 GN=tgt PE=3 SV=1
MKFELQSTDGRARRGRLIFDRGVVETPAFMPVGTYGTVKGMTPEEVAGTGAQILLGNTFHLWIRPGQEVMKLHGDLHDFMNWQGPILTDSGGFQVFSLGDIRKITEEGVYFRNPVNGDKIFLSPEVSMEIQYDLGSDIVMIMDECTPYPATWEEARKSMEMSLRWARRSRDHFDQQGNKNALFGIIQGSVYEDLRDQSLEGLLDIGFDGYAVGGLAVGEPKHEMHKVLEHTCPRIPADKPRYLMGVGKPEDLVEGVRRGIDMFDCVMPTRNARNGHLFTTEGVVKIRNARHKTDTSPLDADCDCYTCKHYSRAYLYHLDKCNEILGARLNTIHNLRYYQRVMEGLRGAIEQGKLDDFVAEFYGRQGKPVPPLGQSEQTDCDH

SEQ ID NO: 62483 - protein, 382 aa, Zobellella taiwanensis
  REGION 1..382: note = tr|A0A2P7QG53|A0A2P7QG53_9GAMM Queuine tRNA-ribosyltransferase OS=Zobellella taiwanensis; OX = 347535 GN=tgt PE=3 SV=1
MKFELQTTDGRARRGRLMFDRGVVETPAFMPVGTYGTVKGMTPEEVAATGAQILLGNTFHLWIRPGQEVMKLHGDLHDFMNWQGPILTDSGGFQVFSLGHIRKITEEGVYFRNPVNGDKIFLSPEVSMEIQYDLGSDIVMIMDECTPYPATWEEAKKSMEMSLRWAKRSRDHFDKQGNKNALFGIIQGSVYEDLRDQSLEGLLEIGFDGYAVGGLAVGEPKHEMHKVLEHTCPKIPADKPRYLMGVGKPEDLVEGVRRGIDMFDCVMPTRNARNGHLFTTDGVVKIRNAKHKTDTGPLDADCDCYTCKNYSRAYLYHLDKCNEILGARLNTIHNLRYYQRVMEGLRGAIEQGKLDDFVAEFYGRQGRPVPPLGQSEQTDCDH

SEQ ID NO: 62484 - protein, 386 aa, Zobellia galactanivorans
  REGION 1..386: note = tr|G0LCT0|G0LCT0_ZOBGA Queuine tRNA-ribosyltransferase OS=Zobellia galactanivorans (strain DSM 12802 / CCUG 47099 / CIP 106680 / NCIMB 13871 / Dsij) OX=63186 GN=tgtPE=3 SV=1
MFIFAPINNILKFTLHHTDPKSKARAGTMVTDHGVIETPIFMPVGTVASVKSVHQRELKEDINPDIILGNTYHLFLRPKTEILKKAGGLHKFMGWDRNILTDSGGYQVYSLSGNRKIKEEGVKFKSHIDGTTHLFTPENVMEIQRVIGADIIMAFDECTPYPCDYRYAERSMHMTHRWLERCITHLKKTPFEYDYSQAFFPIVQGSTYTDLRKRSAEYIAGVGAEGNAIGGLSVGEPAEEMYAMTEVVCEILPEDKPRYLMGVGTPINILENIALGIDMFDCVMPTRNARNGMLFTAHGTINIKNKKWEDDFSPVDEMGITFVDLEYSKAYLRHLFVAKEYLGKQIATIHNLGFYLWLVREARKHILAGDFTEWKDRMVKQMDKRL

SEQ ID NO: 62485 - protein, 376 aa, Zobellia uliginosa
  REGION 1..376: note = tr|A0A1N7MX43|A0A1N7MX43_9FLAO Queuine tRNA-ribosyltransferase OS=Zobellia uliginosa OX=143224; GN = tgt PE=3 SV=1
MKFTLHHTDPKSKARAGTMVTDHGVIETPIFMPVGTVASVKSVHQRELKEDINPDIILGNTYHLFLRPKTEILKKAGGLHKFMGWDRNILTDSGGYQVYSLSGNRKIKEEGVKFKSHIDGTTHLFTPENVMEIQRVIGADIIMAFDECTPYPCDYRYAERSMHMTHRWLERCITHLKKTPFEYDYSQAFFPIVQGSTYTDLRKRSAEYIAGVGAEGNAIGGLSVGEPAEEMYAMTEVVCEILPEDKPRYLMGVGTPINILENIALGIDMFDCVMPTRNARNGMLFTAHGTINIKNKKWEDDFSPVDEMGITFVDLEYSKAYLRHLFVAKEYLGKQIATIHNLGFYLWLVREARKHILAGDFTEWKDRMVKQMDKRL

SEQ ID NO: 62486 - protein, 368 aa, Zoogloea ramigera
  REGION 1..368: note = tr|A0A4Y4CQ58|A0A4Y4CQ58_ZOORA Queuine tRNA-ribosyltransferase OS=Zoogloea ramigera OX=350 GN=tgt; PE = 3 SV=1
MKYELLATDGAARRGRLTLNHGTVDTPAFMPVGTYGTVKGISPQDLRDIGAQICLGNTFHLWLRPGLEVIKAFGGLHQFMAWDGPILTDSGGFQVFSLGALRKITEEGVRFSSPVNGDKLFLTPEESMRIQKVLNSDVVMIFDECTPYPASVPEAADSMRLSLRWARRSRDEFDRLENNNALFGIVQGGMYENLRDESLAGLTDIGFHGYAIGGLSVGEPKEDMQRILHHTAPRLPVDKPRYLMGVGTPEDLVFSVQAGIDMFDCVMPTRNARNGWLFTRHGDVKIRNAVHKKDTRPIDESCDCYTCRNFSRGYLHHLNRLNEILGARLATIHNLHYYQQLMRELRDAIASGTLTDYVARFHRERAGG

SEQ ID NO: 62487 - protein, 370 aa, Zoogloea sp.
  REGION 1..370: note = tr|A0A5C7K740|A0A5C7K740_9RHOO Queuine tRNA-ribosyltransferase OS=Zoogloea sp. OX=49181 GN=tgt; PE = 3 SV=1
MKYELLATDGAARRGRLTLNHGTVDTPAFMPVGTYGTVKGISPQDLRDIGAQICLGNTFHLWLRPGLEVMEAFGGLHQFMAWDGPILTDSGGFQVFSLGALRKITEEGVRFSSPVNGDKLFLTPEESMRIQKVLNSDVVMIFDECTPYPATVTEAADSMRLSLRWAQRSKDEFNRLENDNALFGIVQGGMYENLRDESLAGLEDVGFHGYAIGGLSVGEPKEDMQRILHHTAPRLPRDKPRYLMGVGTPEDIVFSVQAGIDMFDCVMPTRNARNGWLFTRHGDIKIRNARYKTDTRPLDESCDCYTCRNFSRGYLHHLNRLNEILGARLATIHNLHYYQQLMRDLRDAIASGTLTDYVARFHRERAGQGA

SEQ ID NO: 62488 - protein, 370 aa, unidentified
  source 1..370: note = Zoogloeaceae bacteirum
  REGION 1..370: note = tr|A0A2S0QS06|A0A2S0QS06_9RHOO Queuine tRNA-ribosyltransferase OS=Zoogloeaceae bacteirum Par-f-2; OX = 2080469 GN=tgt PE=3 SV=1
MQFELLATSGGARRGRLTLNHGLVDTPVFMPVGTYGTVKAMTPDMLAGIGAQICLGNTFHLWLRPGLEVIAAHGGLHRFMAWNKPILTDSGGFQVFSLGALRKIGEEGVKFASPIDGARLLLTPEISMQIQTVLNSDVVMIFDECTPYPATRDEAAKSMRLSQRWARRSREEFDRLENRNALFGIVQGGMYEDLRDESLAELEDIGFDGYAIGGLSVGEPKDDMQRILAHTAPRLPTNKPRYLMGVGTPEDIVAGVACGIDMFDCVMPTRNARNGWLFTRYGDIKIKNAIHKADTRPLDPSCDCYTCRNFSRAYLHHLHRTGEILGSMLNTVHNLRYYQTLTAELREAIAADRFAAYVTRFHQERAAGTA

SEQ ID NO: 62489 - protein, 373 aa, Zooshikella ganghwensis
  REGION 1..373: note = tr|A0A4P9VKW6|A0A4P9VKW6_9GAMM Queuine tRNA-ribosyltransferase OS=Zooshikella ganghwensis; OX = 202772 GN=tgt PE=3 SV=1
MRFETLTTDGQARRARLVFPRGVVETPTFMPVGTYGTVKGMLPKDIEAIGAQIILGNTFHLMLRPGTEIISKHGDLHDFNGWNKPILTDSGGFQVFSLGEMRKITEEGVSFRSPVDGAKVFLSPERSMEVQRALGSDIVMIFDECTPYPATESEAKKSMEMSLRWAKRSREAHGDSPSALFGIIQGGMYQHLREQSLAGLKAIDFDGYAIGGLSVGEPKNDMFRVLEGITPLMPENKPRYLMGVGTPEDLVEGVRRGVDMFDCVMPTRNARNGHLFTAAGVVKIRNAVHKHDTGPLDETCDCYTCQNFSRAYLHHLDKCGEILSSQLNTIHNLRYYQRVMAGLREAIEAGKLNDFVTAFYHARGMDVPPLTTE

SEQ ID NO: 62490 - protein, 376 aa, unidentified
  source 1..376: note = Zunongwangia atlantica
  REGION 1..376: note = tr|A0A1Y1T5D1|A0A1Y1T5D1_9FLAO Queuine tRNA-ribosyltransferase OS=Zunongwangia atlantica 22II14-10F7 OX=1185767 GN=tgt PE=3 SV=1
MEFELLKTDPASKARAGKITTDHGVIETPIFMPVGTVASVKGVHQTELKQEINPDIILGNTYHLYLRPKTEILKKAGGLHKFMNWDRNILTDSGGYQVYSLSGRRKIKEEGVKFKSHIDGSYHVFTPENVMEIQREIGADIIMAFDECTPYPCDYNYAKRSMHMTHRWLDRCIKHFTETPPLYGYDQTLFPIVQGSTYKDLRRQSAEYIASRNAEGNAIGGLSVGEPAEEMYAMTEVVTEILPEEKPRYLMGVGTPINILENIALGIDMFDCVMPTRNARNGMLFTAHGTINIKNKKWADDFSPIDDMGITFVDTQYSKAYVRHLFTVNEMLGKQIATIHNLGFYLWLVREARKHILAGDFRAWKDMMVKQMDKRL

SEQ ID NO: 62491 - protein, 383 aa, unidentified
  source 1..383: note = Zunongwangia mangrovi
  REGION 1..383: note = tr|A0A1I1KQQ0|A0A1I1KQQ0_9FLAO Queuine tRNA-ribosyltransferase OS=Zunongwangia mangrovi; OX = 1334022 GN=tgt PE=3 SV=1
MQPLIFYMEFELLKTDPASKARAGKITTDHGVIETPIFMPVGTVASVKGVHQTELKQEINPDIILGNTYHLYLRPKTEILKKAGGLHKFMNWDRNILTDSGGYQVYSLSGRRKIKEEGVKFKSHIDGSYHVFTPENVMEIQREIGADIIMAFDECTPYPCDYNYAKRSMHMTHRWLDRCIKHFAETPPLYGYDQTLFPIVQGSTYKDLRRQSAEYIASRNAEGNAIGGLSVGEPAEEMYAMTEVVTEILPEEKPRYLMGVGTPINILENIALGIDMFDCVMPTRNARNGMLFTAHGTINIKNKKWADDFSPIDDMGITFVDTQYSKAYVRHLFTVNEMLGKQIATIHNLGFYLWLVREARKHILAGDFRTWKDMMVKQMDKRL

SEQ ID NO: 62492 - protein, 376 aa, Zunongwangia profunda
  REGION 1..376: note = tr|D5BH67|D5BH67_ZUNPS Queuine tRNA-ribosyltransferase OS=Zunongwangia profunda (strain DSM 18752 / CCTCC AB 206139 / SM-A87) OX=655815 GN=tgt; PE = 3 SV=1
MEFELLKTDPASKARAGKITTDHGVIETPIFMPVGTVASVKGVHQTELKQEINPDIILGNTYHLYLRPKTGILKKAGGLHKFMNWDRNILTDSGGYQVYSLSGRRKIKEEGVKFKSHIDGSYHVFTPENVMEIQREIGADIIMAFDECTPYPCDYNYAKRSMHMTHRWLDRCIKHFGETPPLYGYDQTLFPIVQGSTYKDLRRQSAEYIASRNAEGNAIGGLSVGEPAEEMYAMTEVVTEILPEDKPRYLMGVGTPINILENIALGIDMFDCVMPTRNARNGMLFTAHGSINIKNKKWEDDFSPIDDMGITFVDTQYSKAYVRHLFTVNEMLGKQIATIHNLGFYLWLVREARKHILAGDFRAWKDMMVKQMDKRL

SEQ ID NO: 62493 - protein, 112 aa, Zunongwangia profunda
  REGION 1..112: note = tr|A0A3D5IYG3|A0A3D5IYG3_9FLAO tRNA guanosine(34) transglycosylase Tgt (Fragment) OS=Zunongwangia profunda; OX = 398743 GN=tgt PE=4 SV=1
LGIDMFDCVMPTRNARNGMLFTAHGSINIKNKKWEDDFSPIDDMGITFVDTQYSKAYVRHLFTVNEMLGKQIATIHNLGFYLWLVREARKHILAGDFRAWKDMMVKQMDKRL

SEQ ID NO: 62494 - protein, 376 aa, Zunongwangia sp.; identical to SEQ ID NO: 62492
  REGION 1..376: note = tr|A0A2E0NTN5|A0A2E0NTN5_9FLAO Queuine tRNA-ribosyltransferase OS=Zunongwangia sp. OX=1965325; GN = tgt PE=3 SV=1

SEQ ID NO: 62495 - protein, 378 aa, Zymobacter palmae
  REGION 1..378: note = tr|A0A348HHJ1|A0A348HHJ1_9GAMM Queuine tRNA-ribosyltransferase OS=Zymobacter palmae OX=33074; GN = tgt PE=3 SV=1
MREECFMHFERIAQDGKARRGRLSFPRGTVETPAFMPVGTYGTVKGMTPHDIEKIGAEIILGNTFHLWLRPGMEVMETHGDLHDFSQWQRPILTDSGGFQVFSLGEMRKITEEGVHFRSPVDGSKVFMGPEESMAVQRSLGSDIVMIFDECTPYPATYEQAKDSMELSLRWAQRSRTAHGSSPSALFGIIQGGMYKELRERSLKGLVEIGFDGLAIGGLSVGEPKEEMMKVLDYLPTMMPSHLPRYLMGVGKPEDLVEGVRRGVDMFDCVMPTRNARNGHLFTFDGVVRIRNASHRHSTAPLEADCDCYTCQHFSRGYLHHLDRCGEMLGAQLNTIHNLRHYQRLMAGLRGAIEAGTLTDYVENFYARRGQPVPPLAD

SEQ ID NO: 62496 - protein, 395 aa, Zymomonas mobilis
  REGION 1..395: note = tr|A0A2R9NVA6|A0A2R9NVA6_ZYMMB Queuine tRNA-ribosyltransferase OS=Zymomonas mobilis subsp. mobilis NRRL B-12526 OX=1194424 GN=tgt PE=3 SV=1
MMTAVKGRNVVEATAQETDRPRFSFSIAAREGKARTGTIEMKRGVIRTPAFMPVGTAATVKALKPETVRATGADIILGNTYHLMLRPGAERIAKLGGLHSFMGWDRPILTDSGGYQVMSLSSLTKQSEEGVTFKSHLDGSRHMLSPERSIEIQHLLGSDIVMAFDECTPYPATPSRAASSMERSMRWAKRSRDAFDSRKEQAENAALFGIQQGSVFENLRQQSADALAEIGFDGYAVGGLAVGEGQDEMFRVLDFSVPMLPDDKPHYLMGVGKPDDIVGAVERGIDMFDCVLPTRSGRNGQAFTWDGPINIRNARFSEDLKPLDSECHCAVCQKWSRAYIHHLIRAGEILGAMLMTEHNIAFYQQLMQKIRDSISEGRFSQFAQDFRARYFARNS

SEQ ID NO: 62497 - protein, 387 aa, Zymomonas mobilis
  REGION 1..387: note = tr|F8ESG0|F8ESG0_ZYMMT Queuine tRNA-ribosyltransferase OS=Zymomonas mobilis subsp. pomaceae (strain ATCC 29192 / JCM 10191 / NBRC 13757 / NCIMB 11200 / NRRL B-4491)OX=579138 GN=tgt PE=3 SV=1
MTEAVAKEEISHPRFTFSITARDGKARTGSIAMKRGVIRTPAFMPVGTAATVKAMKPEAVSATGADIILGNTYHLMLRPGAERLAKLGGLHQFMGWDRPILTDSGGYQVMSLSSLTKKSEEGVTFKSHLDGSRHILTPERSIEIQRLLGSDIVMAFDECTPYPATPTLAASSMERSMRWAKRSREAFDKNKDQSVNSALFGIQQGSVFENLRKKSADALAEIGFDGYAVGGLAVGEGQEAMFRVLDFSVPMLPDDKPHYLMGVGKPDDIVGAVERGIDMFDCVLPTRSGRNGQAFTWDGPINIRNARFAEDMKPLDSSCHCVVCQKWSRAYIHHLIRAGEILGAMLMTEHNIAFYQQLMQGLRMAIEEGRLSDFATAFRARYRAKNN

SEQ ID NO: 62498 - protein, 375 aa, Escherichia coli; identical to SEQ ID NO: 50999
  REGION 1..375: note = sp|P0A847|TGT_ECOLI Queuine tRNA-ribosyltransferase; OS = Escherichia coli (strain K12) OX=83333 GN=tgt PE=1 SV=1

SEQ ID NO: 62499 - protein, 375 aa, Escherichia coli; identical to SEQ ID NO: 50999
  REGION 1..375: note = sp|P0A849|TGT_ECO57 Queuine tRNA-ribosyltransferase; OS = Escherichia coli O157:H7 OX=83334 GN=tgt PE=3 SV=1

SEQ ID NO: 62500 - protein, 359 aa, unidentified
  source 1..359: note = [Actinobacillus] rossii
  REGION 1..359: note = tr|A0A380U1S8|A0A380U1S8_9PAST S-adenosylmethionine:tRNA ribosyltransferase-isomerase; OS = [Actinobacillus] rossii OX=123820 GN=queA PE=3 SV=1
MRLSDFYFDLPDELIARYPKPERTASRLLQLNGENGDISHRTFSDVLDLINEGDLLIFNNTRVIPARMYGRKLSGGKIEVLVERVLSETTFLAHVRSSKSPKVGAELILGEDKLGDGHGVKATMIGRQEALFELKIADKSTALLDVLQKIGHMPLPPYIDRPDEDADQERYQTVYNKVPGAVAAPTAGLHFDNELLAKLKAKGVNFAFVTLHVGAGTFQPVRVEKIEDHHMHAEYAEVSQEVCDAILSTKAAGKRVIAVGTTSVRSIESAALEAEENGSSQLIEPFFSDTSIFIYPGKKFRVIDCLITNFHLPESTLIMLVSAFAGYEHTMNAYKSAVENRYRFFSYGDAMFITKKTTV

SEQ ID NO: 62501 - protein, 343 aa, unidentified
  source 1..343: note = [Arcobacter] porcinus
  REGION 1..343: note = tr|A0A1C0AZV4|A0A1C0AZV4_9PROT S-adenosylmethionine:tRNA ribosyltransferase-isomerase; OS = [Arcobacter] porcinus OX=1935204 GN=queA PE=3 SV=1
MNDNLKTSSYDFFLPNEQIATKAANPADSAKLLVYNRATNEITHTIFRNIMDFLPEELTIFLNDTKVIKARIFGKKSTGAKIELLLNKALFMNRFSVYIKGKVNINTELFFDGNLCAKVIELNEDGSRVVEFYKKENEKQKLDFSSLVKILNKIGHIPLPPYINREDTKEDEKDYQTLFAKKDGAVAAPTASLHFTPELLKKIENRYGLNYLTLHVGAGTFKPVDVEDILSHPMHSEYFEISKECKDKIDSAKNILAVGTTVTRTLEFYARRNMICGECDLFLNPLNKPIIVNHLLTNFHLPKSTLIMLVASFIGLEKTLELYDISIKNNYRFYSYGDAMLII

SEQ ID NO: 62502 - protein, 343 aa, unidentified
  source 1..343: note = [Arcobacter] porcinus
  REGION 1..343: note = tr|A0A5C2HIF4|A0A5C2HIF4_9PROT S-adenosylmethionine:tRNA ribosyltransferase-isomerase; OS = [Arcobacter] porcinus OX=1935204 GN=queA PE=3 SV=1
MNDNLKTSSYDFFLPNEQIATKAANPADSAKLLVYNRATNEITHTIFRNIMDFLPEELTIFLNDTKVIKARIFGKKSTGAKIELLLNKALFMNRFSVYIKGKVNINTELFFDGNLCAKVIELNEDGSRVVEFYKKENEKQKLDFSSLVEILNKIGHIPLPPYINREDTKEDEKDYQTLFAKKYGAVAAPTASLHFTPELLEKMKQKYGLNYLTLHVGAGTFKPVDVEDILSHPMHSEYFEISKECKDKIDSAKNILAVGTTVTRTLEFYARKNMICGECDLFLNPSNKPIIVNHLLTNFHLPKSTLIMLVASFIGLEKTLELYDIAIKNDYRFYSYGDAMLII

SEQ ID NO: 62503 - protein, 347 aa, unidentified
  source 1..347: note = [Bacillus] sp.
  REGION 1..347: note = tr|A0A150YL11|A0A150YL11_9BACI S-adenosylmethionine:tRNA ribosyltransferase-isomerase; OS = [Bacillus] sp. KCTC 13219 OX=1811976 GN=queA PE=3 SV=1
MKVEDFDFYLPEQLIAQTPLLDRTASRLLVVNPHSKELEHHQFAHILEELQAGDCLVLNDTRVLPARLIGVKEDTGANIEILLLKQTNEDEWETLVKPAKRVKIGTVITFGEGLLHAECVAELEHGGRLFQFQYEGIFYEILERLGEMPLPPYIREKLDNQERYQTVYAKERGSAAAPTAGLHFTEQLLEAIRAKGVEIAFVTLHVGLGTFRPVSVESIEDHDMHAEFYSISEQTASIINRTKANGGNIIAVGTTSTRTLETVASKNNGKIIAEQGWTSIFIYPGYEFKAVDGLITNFHLPKSTLVMLVSALASKDSILHAYKEAVEENYRFFSFGDAMFIRPKVKP

SEQ ID NO: 62504 - protein, 341 aa, unidentified
  source 1..341: note = [Bacteroides] coagulans
  REGION 1..341: note = tr|A0A2U1E2G7|A0A2U1E2G7_9FIRM S-adenosylmethionine:tRNA ribosyltransferase-isomerase; OS = [Bacteroides] coagulans OX=46507 GN=queA PE=3 SV=1
MIRVDDYDFDLPEELIAQTPLKERDKSRLMVVDKKGSEPKDYVFSDLVDLLDEGDILVFNDSRVIPARLFGHRKDKEEKVEFLLLKELGDDRWQCLSKPGKKAKVGTEFFFGDELSLVVDEVDEEGLRYVTLKYDGILYEILDRLGTMPLPPYIHEKLEDQEMYQTVYAKDPGSAAAPTAGLHFTDELLEKLKNKGIEELFITLNVGLGTFRPVTSEFIEDHKMHEELYTVSEEVAAKINAAKKAGKKVVAVGTTTIRTLESAADENGEVRAGSRWTNIFIYPGYKFKVVDKLITNFHLPKSTLLMLISAIMGRENALHAYKIAVDRKYRFFSFGDAMFIE

SEQ ID NO: 62505 - protein, 200 aa, unidentified
  source 1..200: note = [Bacteroides] pectinophilus
  REGION 1..200: note = tr|B7AT74|B7AT74_9FIRM S-adenosylmethionine:tRNA ribosyltransferase-isomerase OS=[Bacteroides] pectinophilus ATCC 43243 OX=483218 GN=BACPEC_01343 PE=3; SV = 1
MMELHDFYYDLPQELIAQDPLSDRSASRLMLLDKNTGEIEHKIFKDIIDYLNPGDCLVINDTKVIPARLIGERVGTGATIEVLLLKRKEDMKDVWEVLVKPGKKAKIGTKISFGDGRLVAEVIDIVEEGNRLIQFTYEGIFEEILDELGQMPLPPYITHKLQDKNRYQTVYAKHEGSAAAPTAGLHFTKELLERIQEKRC

SEQ ID NO: 62506 - protein, 118 aa, unidentified
  source 1..118: note = [Bacteroides] pectinophilus
  REGION 1..118: note = tr|B7AT75|B7AT75_9FIRM S-adenosylmethionine:tRNA ribosyltransferase-isomerase OS=[Bacteroides] pectinophilus ATCC 43243 OX=483218 GN=BACPEC_01344 PE=3; SV = 1
MHSEYYVVTQEAADKINNAKADGGRVICVGTTSCRTIESASDDDGRVKACSGWTEIFIYPGYKFKVLDALITNFHLPESTLLMLVSALAGREHILAAYKTAVEEKYRFFSFGDAMFIH

SEQ ID NO: 62507 - protein, 342 aa, unidentified
  source 1..342: note = [Brevibacterium] frigoritolerans
  REGION 1..342: note = tr|A0A4R6AKZ9|A0A4R6AKZ9_9BACI S-adenosylmethionine:tRNA ribosyltransferase-isomerase; OS = [Brevibacterium] frigoritolerans OX=450367 GN=queA PE=3; SV = 1
MKVDLFDFNLPEELIAQVPLLERDASKLMVLDKETGSIQHEQFRSIIDYFHEGDCLVLNNTRVLPARLIGEKKDTGAKIELLLLKQEQGDVWEVLAKPAKRVKIGTELVFGDGILHAVCTGESEHGGRLLEFKYEGIFYEALDSLGKMPLPPYIKEQLDDQERYQTVFSRERGSAAAPTAGLHFTEQILDQLKDKGVHIVFITLHVGLGTFRPVNADVVEEHEMHAEFYQMSAGTAQLLNQVRAEGGRIISVGTTSTRTLETIASKNDGTFIEDSGWTNIFIYPGYEFRAIDGMVTNFHLPKSSLIMLVSALATREHVMNAYETAVREKYRFFSFGDAMLII

SEQ ID NO: 62508 - protein, 342 aa, unidentified
  source 1..342: note = [Brevibacterium] frigoritolerans
  REGION 1..342: note = tr|A0A561DLA0|A0A561DLA0_9BACI S-adenosylmethionine:tRNA ribosyltransferase-isomerase; OS = [Brevibacterium] frigoritolerans OX=450367 GN=queA PE=3; SV = 1
MKLDMFDFHLPEELIAQVPLEDREASRLMVLDKETGKLQHDVFSHITEYIKPGDCLVLNDTKVLPARLYGSKEGTGAKIEVLLLKQEHDDVWETLVKPAKRIKEGSTIVFGDGKLSAVCTGVLEHGGRILEFKYDGIFYEILEKLGEMPLPPYIKEQLDDQDRYQTVYARERGSAAAPTAGLHFTEDLLEKLKGMGVHIAFITLHVGLGTFRPVSVDDIDSHEMHSEFYQMTEGTARLLNDVKEKGGKIITVGTTSTRTLETIASRNDGVFKEENGWTSIFIYPGYEFKGIDAMITNFHLPKSTLIMLISALAGREHVLHAYEAAVEEKYRFFSFGDAMLIK

SEQ ID NO: 62509 - protein, 349 aa, unidentified
  source 1..349: note = [Clostridium] aldenense
  REGION 1..349: note = tr|A0A3E2WI85|A0A3E2WI85_9FIRM S-adenosylmethionine:tRNA ribosyltransferase-isomerase; OS = [Clostridium] aldenense OX=358742 GN=queA PE=3 SV=1
MDVKDFYFDLPEELIAQDPLKDRSSSRLLVLDRDTGEVQHRVFRDIVEYLRPGDCLVINDTKVIPARLFGIKKDTGAKIEILLLKRRENDIWETLVRPGKKCRPGTVIEFGEGLLSGTVVETVDDGNRLIRFSYKGIFEEILDQLGQMPLPPYITHELKDKNRYQTVYAKHEGSAAAPTAGLHFTNELLKQIEEMGVKVAHVTLHVGLGTFRPVKVENVLDHHMHSEFYVVEESEARKVNDTKAAGGRVICVGTTSCRTVESASTDDGILQAKTGWTEIFIYPGYRFKVLDALITNFHLPESTLVMLVSALAGRGHILDAYKEAVKERYRFFSFGDAMFIASSPVAQKR

SEQ ID NO: 62510 - protein, 349 aa, unidentified
  source 1..349: note = [Clostridium] aldenense
  REGION 1..349: note = tr|A0A413VUM6|A0A413VUM6_9FIRM S-adenosylmethionine:tRNA ribosyltransferase-isomerase; OS = [Clostridium] aldenense OX=358742 GN=queA PE=3 SV=1
MDVKDFYFDLPEELIAQDPLKERSSSRLLVLDKDTGEVQHRVFRDIVEYLRPGDCLVINDTKVIPARLFGIKKDTGAKIEILLLKRRENDIWETLVRPGKKCRPGTVIEFGEGLLSGTVVETVDDGNRLIRFSYKGIFEEILDQLGQMPLPPYITHELKDKNRYQTVYAKHEGSAAAPTAGLHFTNELLKQIEDMGVKVAHVTLHVGLGTFRPVKVENVLDHHMHSEFYVVEESEARKVNDTKAAGGRVICVGTTSCRTVESASTDDGILQAKTGWTEIFIYPGYRFKVLDALITNFHLPESTLVMLVSALAGREHILDAYKEAVKERYRFFSFGDAMFIASSPVAQKR

SEQ ID NO: 62511 - protein, 346 aa, unidentified
  source 1..346: note = [Clostridium] algidixylanolyticum
  REGION 1..346: note = tr|A0A419T3Z5|A0A419T3Z5_9FIRM S-adenosylmethionine:tRNA ribosyltransferase-isomerase; OS = [Clostridium] algidixylanolyticum OX=94868 GN=queA PE=3; SV = 1
MNVKDFDFDLPQELIAQDPLLDRSSSRLLVLDKQTGEIKHKHFRDILSYLKEGDCLVINDTKVIPARLFGVKEGTEAKIEILLLKRRENDIWETLVKPGKKAKEGTVISFGDGLLKGTVIDVVEEGNRLIQFSYDGIFEEILDQLGQMPLPPYITHQLQDKNRYQTVYAKHEGSAAAPTAGLHFTKELLEEIEKKGITIARVTLHVGLGTFRPVKVDEIESHHMHSEFYVVEEAEAKKVNDAKKNGGRIICVGTTSCRTVESASTEEGILKAGSGWTEIFIYPGYRFKTLDCLITNFHLPESTLVMLVSALAGREHVLHAYHEAIKERYRFFSFGDAMFLADLQEN

SEQ ID NO: 62512 - protein, 341 aa, unidentified
  source 1..341: note = [Clostridium] aminophilum
  REGION 1..341: note = tr|A0A1I6KDT2|A0A1I6KDT2_9FIRM S-adenosylmethionine:tRNA ribosyltransferase-isomerase; OS = [Clostridium] aminophilum OX=1526 GN=queA PE=3 SV=1
MNVKDFDYDLPQELIAQDPLEDRASSRLLVLDKDTGKTEHKIFHDIIDYLNPGDALVINDTKVIPARLHGVKEDTGAHIEVLLLTRKKDDIWETLVKPGKKCKPGTVISFGDGLLKGTVVDVIEDGNRLIQFQYEGIFEEILDQLGQMPLPPYITHQLKDKNRYQTVYAEHEGSAAAPTAGLHFTKELLQRIEDKGVKIVHVTLHVGLGTFRPVKVDTIEEHQMHSEFYIVSQEAADTVNAVKKAGGRIICVGTTSCRTLESAADENGILHAKSSWTSIFIYPGYKFKILDCLITNFHLPQSTLVMLVSALAGREHILNAYKEAIAERYRFFSFGDAMFIH

SEQ ID NO: 62513 - protein, 318 aa, unidentified
  source 1..318: note = [Clostridium] asparagiforme
  REGION 1..318: note = tr|C0D9T2|C0D9T2_9FIRM S-adenosylmethionine:tRNA ribosyltransferase-isomerase (Fragment) OS=[Clostridium] asparagiforme DSM 15981 OX=518636 GN=queA PE=3 SV=1
AVTHRVFRDIVEYLRPGDCLVINDTKVIPARLMGVKADTGAKIEVLLLKRRENDIWETLVKPGKKAKPGTELSFGDGLLTGTVVETVDDGNRLIQFHYEGIFEEILDQLGQMPLPPYITHQLKDKNRYQTVYAKHEGSAAAPTAGLHFTNELLKEIGDMGVKIAHVTLHVGLGTFRPVKVENVLDHHMHSEFYVVEESEAAKVNETKAAGGRVICVGTTSCRTVESASTEDGVLKAGTGWTEIFIYPGYRFKILDALITNFHLPESTLVMLVSALAGREHILAAYEEAIRERYRFFSFGDAMFIAPDPVALPRKTEEK

SEQ ID NO: 62514 - protein, 354 aa, unidentified
  source 1..354: note = [Clostridium] asparagiforme
  REGION 1..354: note = tr|A0A413FBQ7|A0A413FBQ7_9FIRM S-adenosylmethionine:tRNA ribosyltransferase-isomerase; OS = [Clostridium] asparagiforme OX=333367 GN=queA PE=3 SV=1
MDVKDFNFDLPQELIAQDPLDDRASSRLLVLDKDTGAVTHRVFRDIVEYLRPGDCLVINDTKVIPARLMGVKADTGAKIEVLLLKRRENDIWETLVKPGKKAKPGTELSFGDGLLTGTVVETVDDGNRLIQFHYEGIFEEILDQLGQMPLPPYITHQLKDKNRYQTVYAKHEGSAAAPTAGLHFTNELLKEIGDMGVKIAHVTLHVGLGTFRPVKVENVLDHHMHSEFYVVEESEAAKVNETKAAGGRVICVGTTSCRTVESASTEDGVLKAGTGWTEIFIYPGYRFKILDALITNFHLPESTLVMLVSALAGREHILAAYEEAIRERYRFFSFGDAMFIAPDPVALPRKTEEK

SEQ ID NO: 62515 - protein, 349 aa, unidentified
  source 1..349: note = [Clostridium] bolteae
  REGION 1..349: note = tr|R0AMS0|R0AMS0_9FIRM S-adenosylmethionine:tRNA ribosyltransferase-isomerase OS=[Clostridium] bolteae 90B8; OX = 997897 GN=queA PE=3 SV=1
MDVKDFDYELPEELIAQDPLEDRSASRLMVLDRETGEIQHRIFKDITEYLRPGDCLVINDTKVIPARLFGVKKDTGAKIEILLLKRRENDIWETLVRPGKKAKPGTVIEFGEGLLTGTVVDTVDDGNRLIQFHYKGIFEEILDQLGQMPLPPYITHQLKDKNRYQTVYARHEGSAAAPTAGLHFTQELLAEIEGMGVKIAHVTLHVGLGTFRPVKVENVQDHHMHSEFYIVEESEAKKVNDTRAAGGRVICVGTTSCRTVESASTEDGVLKAGTGWTEIFIYPGYRFKVLDALITNFHLPQSTLVMLVSALAGREHILDAYREAVKEGYRFFSFGDAMFIAAHPAAEKR

SEQ ID NO: 62516 - protein, 349 aa, unidentified
  source 1..349: note = [Clostridium] bolteae
  REGION 1..349: note = tr|A0A412YU67|A0A412YU67_9FIRM S-adenosylmethionine:tRNA ribosyltransferase-isomerase; OS = [Clostridium] bolteae OX=208479 GN=queA PE=3 SV=1
MDVKDFDYELPEELIAQDPLEDRSASRLMVLDRETGEIQHRIFKDITEYLRPGDCLVINDTKVIPARLFGVKKDTGAKIEILLLKRRENDIWETLVRPGKKAKPGTVIEFGEGLLTGTVVDTVDDGNRLIQFHYKGIFEEILDQLGQMPLPPYITHQLKDKNRYQTVYARHEGSAAAPTAGLHFTQELLAEIEGMGVKIAHVTLHVGLGTFRPVKVENVQDHHMHSEFYIVEESEAKKVNDTRVAGGRVICVGTTSCRTVESASTEDGVLKAGTGWTEIFIYPGYRFKVLDALITNFHLPQSTLVMLVSALAGREHILDAYREAVKEGYRFFSFGDAMFIAAHPAAEKR

SEQ ID NO: 62517 - protein, 349 aa, unidentified
  source 1..349: note = [Clostridium] celerecrescens
  REGION 1..349: note = tr|A0A084JMB2|A0A084JMB2_9FIRM S-adenosylmethionine:tRNA ribosyltransferase-isomerase; OS = [Clostridium] celerecrescens OX=29354 GN=queA PE=3 SV=1
MNVRDFYFDLPQELIAQDPLEDRSASRLLVLDKHTGEIKHRHFRDVLSYLRKGDCLVINDTKVIPARLFGVKEGTEAKIEILLLKRRENDIWETLVKPGKKAKVGTVISFGDGLLKGTVIDVVEEGNRLIQFSYEGIFEEILDRLGQMPLPPYITHQLKDKNRYQTVYAKHEGSAAAPTAGLHFTKELLEEIVAMGVTIAHVTLHVGLGTFRPVKVDEIESHHMHSEFYIIEEEEAKKVNEAKKNGGRIVCVGTTSCRTVESASTEEGILKAGSGWTEIFIYPGYRFKILDCLITNFHLPESTLVMLVSALAGRDHVLHAYEEAIKERYRFFSFGDAMFLTDLHHEEES

SEQ ID NO: 62518 - protein, 349 aa, unidentified
  source 1..349: note = [Clostridium] celerecrescens
  REGION 1..349: note = tr|A0A2M8Z7X1|A0A2M8Z7X1_9FIRM S-adenosylmethionine:tRNA ribosyltransferase-isomerase; OS = [Clostridium] celerecrescens 18A OX=1286362 GN=queA; PE = 3 SV=1
MNVRDFYFDLPQELIAQDPLEDRSASRLLVLDKHTGEIQHRHFRDILSYLRKGDCLVINDTKVIPARLFGVKEGTEAKIEILLLKRKENDIWETLVKPGKKAKVGTVITFGEGLLKGTVIDVVEEGNRLIQFSYEGIFEEILDRLGQMPLPPYITHQLKDKNRYQTVYAKHEGSAAAPTAGLHFTKELLEEIEDMGVAIAHVTLHVGLGTFRPVKVDEIEAHHMHSEFYIIEEEEAKKVNEAKQNGGRIVCVGTTSCRTVESASTEEGILKAGSGWTEIFIYPGYRFTILDCLITNFHLPESTLVMLVSALAGRDHVLHAYAEAIKERYRFFSFGDAMLLTDLRYEGES

SEQ ID NO: 62519 - protein, 341 aa, unidentified
  source 1..341: note = [Clostridium] cellulosi
  REGION 1..341: note = tr|A0A078KSP7|A0A078KSP7_9FIRM S-adenosylmethionine:tRNA ribosyltransferase-isomerase; OS = [Clostridium] cellulosi OX=29343 GN=queA PE=3 SV=1
MKKSDFYYDLPEELIAQEPLKQRDASRLMTLNRKTGETGDYHFYDIVDMLNPSDCLILNDSRVLPARIYGVKEGTGGHIEFLLLTQKGKDTWEVLLKPGRIAKPGAKFIFGDGLLKAEILEIVEGGNRIVKFTYDGNFFELLEKIGEMPLPHYIKHKLEDKERYQTVYSKKPGSAAAPTAGLHFTPELLERIKAKGVKIGFVTLHVGVGTFRPVKTENIEDHVMHFEHYELPQETADLILETKKKGGRVIAVGTTSCRTLETVAHLDGGIKASEGWTGIFIYPGYEFKAIDALITNFHLPESTLIMLVSAFAGREHVLAAYEKAIKEKYRFYSFGDAMFIY

SEQ ID NO: 62520 - protein, 341 aa, unidentified
  source 1..341: note = [Clostridium] cf.
  REGION 1..341: note = tr|D6DHB8|D6DHB8_CLOSC S-adenosylmethionine:tRNA ribosyltransferase-isomerase OS=[Clostridium] cf. saccharolyticum K10 OX=717608 GN=queA PE=3 SV=1
MDVKDFYFDLPQELIAQDPLEDRASSRLLVLDRSTGEVEHRKFRDILEYLNPGDCLVINDTKVIPARLIGSKEGTDAKIEVLLLKRKENDIWETLVKPGKKAKPGTVIRFGDGILKGTVVDVVEEGNRLIQFSYEGIFEEILDQLGQMPLPPYITHQLKDKNRYQTVYAKHEGSAAAPTAGLHFTKELLQEIEDRGVKIAHVTLHVGLGTFRPVKVENVLDHHMHSEFYVVEESEAEKINSTKREGGRVICVGTTSCRTIESASDENGVLKAGSGWTDIFIYPGYQFKILDCLITNFHLPESTLVMLVSALAGREHVLAAYEEAVKERYRFFSFGDAMFIH

SEQ ID NO: 62521 - protein, 349 aa, unidentified
  source 1..349: note = [Clostridium] citroniae
  REGION 1..349: note = tr|A0A3E2VEN0|A0A3E2VEN0_9FIRM S-adenosylmethionine:tRNA ribosyltransferase-isomerase; OS = [Clostridium] citroniae OX=358743 GN=queA PE=3 SV=1
MDVKDFYFDLPEELIAQDPLEDRSSSRLLVLDKDTGEIRHRVFRDIVEYLRPGDCLVINDTKVIPARLFGTKKDTGAKIEILLLKRRENDIWETLVRPGKKAKPGTVIDFGEGLLTGTVIDTVDDGNRLIRFSYKGIFEEILDQLGQMPLPPYITHQLQDKNRYQTVYAKHEGSAAAPTAGLHFTKELLKQIEDMGVKIAHVTLHVGLGTFRPVKVENVLDHHMHSEFYVVEESEARKVNDTKAAGGRVICVGTTSCRTVESASTQEGILEAKTGWTEIFIYPGYRFKVLDALITNFHLPESTLVMLVSALAGREHILNAYQEAVKERYRFFSFGDAMFIASDPKTGNR

SEQ ID NO: 62522 - protein, 349 aa, unidentified
  source 1..349: note = [Clostridium] citroniae
  REGION 1..349: note = tr|A0A0J9BU53|A0A0J9BU53_9FIRM S-adenosylmethionine:tRNA ribosyltransferase-isomerase; OS = [Clostridium] citroniae WAL-19142 OX=742734 GN=queA; PE = 3 SV=1
MDVKDFYFDLPEELIAQDPLEDRSSSRLLVLDKDTGEIRHRVFRDIVEYLRPGDCLVINDTKVIPARLFGTKKDTGAKIEILLLKRRENDIWETLVRPGKKAKPGTVIDFGEGLLTGTVIDTVDDGNRLIRFSYKGIFEEILDQLGQMPLPPYITHQLQDKNRYQTVYAKHEGSAAAPTAGLHFTKELLKQIEDMGVKIAHVTLHVGLGTFRPVKVENVLDHHMHSEFYVVEESEARKVNDTKAAGGRVICVGTTSCRTVESASTQEGILEAKTGWTEIFIYPGYRFKVLDALITNFHLPESTLVMLVSALAGREHILNAYQEAVKERYRFFSFGDAMFIASDPKTGNQ

SEQ ID NO: 62523 - protein, 354 aa, unidentified
  source 1..354: note = [Clostridium] clostridioforme
  REGION 1..354: note = tr|A0A227LWM7|A0A227LWM7_9FIRM S-adenosylmethionine:tRNA ribosyltransferase-isomerase; OS = [Clostridium] clostridioforme OX=1531 GN=queA PE=3 SV=1
MDVKDFDYELPEELIAQDPLEDRSASRLMVLDRETGEIQHRIFKDITQYLRPGDCLVINDTKVIPARLFGVKKDTGAKIEILLLKRGENDIWETLVRPGKKAKPGTVIEFGEGLLTGTVVDTVDDGNRLIQFYYKGIFEEILDQLGQMPLPPYITHQLMDKNRYQTVYARHEGSAAAPTAGLHFTQELLDEIEGMGVKIAHVTLHVGLGTFRPVKVENVQDHHMHSEFYIVEESEAKKVNDTKAAGGRVICVGTTSCRTVESASTEDGVLKSGNGWTEIFIYPGYRFKVLDALITNFHLPQSTLVMLVSALAGREHILNAYRKAVKERYRFFSFGDAMFIAAHPAAEKRQGLWE

SEQ ID NO: 62524 - protein, 354 aa, unidentified
  source 1..354: note = [Clostridium] clostridioforme
  REGION 1..354: note = tr|A0A174T2Y0|A0A174T2Y0_9FIRM S-adenosylmethionine:tRNA ribosyltransferase-isomerase; OS = [Clostridium] clostridioforme OX=1531 GN=queA PE=3 SV=1
MDVKDFDYELPEELIAQDPLEDRSASRLMVLDRETGEIQHRIFKDITQYLRPGDCLVINDTKVIPARLFGVKKDTGAKIEILLLKRGENDIWETLVRPGKKAKPGTVIEFGEGLLTGTVVDTVDDGNRLIQFYYKGIFEEILDQLGQMPLPPYITHQLKDKNRYQTVYARHEGSAAAPTAGLHFTQELLDEIEGMGVKIAHVTLHVGLGTFRPVKVENVQDHHMHSEFYIVEESEAKKVNDTKAAGGRVICVGTTSCRTVESASTEDGVLKSGTGWTEIFIYPGYRFKVLDALITNFHLPQSTLVMLVSALAGREHILNAYREAVKERYRFFSFGDAMFIAAHPAAEKRQGLWE

SEQ ID NO: 62525 - protein, 341 aa, unidentified
  source 1..341: note = [Clostridium] cocleatum
  REGION 1..341: note = tr|A0A1I0C6X2|A0A1I0C6X2_9FIRM S-adenosylmethionine:tRNA ribosyltransferase-isomerase; OS = [Clostridium] cocleatum OX=69824 GN=queA PE=3 SV=1
MKLSEFDFNLPEELIAQTPLDKRDTSRLMVLNRKLQTIEHKHFYDLIDYLKPGDILVRNNTKVIPARLFGIKEETNGHVEVLLLKDQGNDNWECLVGNARIVKVDTIIKFGDGLLKARCIEIKDEGIRVFKMIYDGIFYEILDQLGTMPLPPYIKEKLNDQNRYQTVYAKIEGSAAAPTAGLHFTDEIITKIKDKGIEILDVTLHVGLGTFRPVKVDDVLDHHMHSEYYMIEPDVARKLNAAKNNGQRIIAVGTTSTRTLEANMQKYGKFKATHENTDIFIYPGYKYKAIDCLITNFHLPKSTLLMLISAFSNKEFIFKAYQEAINEKYRFFSFGDSMLII

SEQ ID NO: 62526 - protein, 343 aa, unidentified
  source 1..343: note = [Clostridium] fimetarium
  REGION 1..343: note = tr|A0A1I0MQF0|A0A1I0MQF0_9FIRM S-adenosylmethionine:tRNA ribosyltransferase-isomerase; OS = [Clostridium] fimetarium OX=99656 GN=queA PE=3 SV=1
MNKEEFFYELPEALIAQDPLSDRSSSRLMVLDKNTGEIRHKIFKDIIDYLEPNDCLVINDTKVIPARLIGERVGTGATIEVLLLKRKPDEKDIWEVLVKPGKKAKVGTEISFGDGKLVAKVIDIVEEGNRLIQFSYNGIFEEILDELGQMPLPPYITHKLEDKNRYQTVYAKYQGSAAAPTAGLHFTKELLGKIKEKGVTIASVTLHVGLGTFRPVKEENILEHHMHSEFYMINEEAAKKINETKKNGGRIIAVGTTSTRTLESAAKEDGTIEASSGWTEIFIYPGYTFKSIDALITNFHLPESTLIMLISALAGREHVLNAYATAVEEKYRFFSFGDAMLIH

SEQ ID NO: 62527 - protein, 350 aa, unidentified
  source 1..350: note = [Clostridium] hiranonis
  REGION 1..350: note = tr|B6FYF4|B6FYF4_9FIRM S-adenosylmethionine:tRNA ribosyltransferase-isomerase OS=[Clostridium] hiranonis DSM 13275 OX=500633 GN=queA PE=3 SV=1
MIIRKEERALKTSDFNFDLPQELIAQTPIEDRSASRLMVLDKETGEIEHKIFRDIKEYLKPGDCLVLNDTRVIPARLIGEKVDTGGKIEFLLLKRNTDDTWESLVKPGKRAKIGTKFSFGGGKLIGEVVGMADEGARIIKFHYDGIFEEILDELGNMPLPPYITEKLEEKERYQTVYSKHNGSAAAPTAGLHFTNELLEEIKEMGVDIAFVTLHVGLGTFRPVKVDDVLNHEMHSEFYMVTQEAADKINKAKENGNRVICVGTTSCRTIESAAEEDGHMTAKSGWTNIFIYPGYKFKVLDNLITNFHLPESTLIMLVSALCGREHVLNAYNEAIKERYRFFSFGDAMFIK

SEQ ID NO: 62528 - protein, 341 aa, unidentified
  source 1..341: note = [Clostridium] hiranonis
  REGION 1..341: note = tr|A0A5C0T277|A0A5C0T277_9FIRM S-adenosylmethionine:tRNA ribosyltransferase-isomerase; OS = [Clostridium] hiranonis OX=89152 GN=queA PE=3 SV=1
MKTSDFNFDLPQELIAQTPIEDRSASRLMVLDKETGEIEHKIFRDIKEYLKPGDCLVLNDTRVIPARLIGEKVDTGGKIEFLLLKRNTDDTWESLVKPGKRAKIGTKFSFGGGKLIGEVVGMADEGARIIKFHYDGIFEEILDELGNMPLPPYITEKLEEKERYQTVYSKHNGSAAAPTAGLHFTNELLEEIKEMGVDIAFVTLHVGLGTFRPVKVDDVLNHEMHSEFYMVTQEAADKINKAKENGNRVICVGTTSCRTIESAAEEDGHMTAKSGWTNIFIYPGYKFKVLDNLITNFHLPESTLIMLVSALCGREHVLNAYNEAIKERYRFFSFGDAMFIK

SEQ ID NO: 62529 - protein, 341 aa, unidentified
  source 1..341: note = [Clostridium] hylemonae
  REGION 1..341: note = tr|C0BZE3|C0BZE3_9FIRM S-adenosylmethionine:tRNA ribosyltransferase-isomerase OS=[Clostridium] hylemonae DSM 15053 OX=553973 GN=queA PE=3 SV=1
MKRQDFYYELPEELIAQDPLEDRSSSRLLVLDKESGLVSHHVFKDITDYLHRGDCLVINDTKVIPARLVGSRIGTDARIEVLLLKRKENDIWETLVKPGKKAKIGTKISFGEGILTGEVIDVVEEGNRLIQFSYEGIFEEILDRLGQMPLPPYITHQLEDKNRYQTVYAKHSGSAAAPTAGLHFTPELLEEIQKKGVDIARVTLHVGLGTFRPVKADDILEHHMHSEFFQIDEAAAMKINKAKDTGGKVICVGTTSCRTIESAADKTGHITAKSGWTDIFIYPGYEFKLLDGLITNFHLPESTLIMLVSALAGREHVLAAYEEAVKERYRFFSFGDAMYIG

SEQ ID NO: 62530 - protein, 341 aa, unidentified
  source 1..341: note = [Clostridium] indolis
  REGION 1..341: note = tr|A0A3P6JZ25|A0A3P6JZ25_9FIRM S-adenosylmethionine:tRNA ribosyltransferase-isomerase; OS = [Clostridium] indolis OX=69825 GN=queA PE=3 SV=1
MDIESFDYHLPESLIAQTPLKNRDESRLLVLGRKTGDIEHKYFKNVIDYLQAGDTLVLNDTRVMPARLFGLKEETGAKVEMLMLTQLEDDDWEVLLKPAKRIKTGDKLSFGDGKIIAECVEELNQGGRIMRLDYDGILQERLDELGEMPLPPYIKERLDDPDRYQTVYAKASGSAAAPTAGLHFTDELLEQIKAKGVNITFITLHVGLGTFRPVSVENIDDHEMHSEYYQMDQETADLLNETKAKGHRVISVGTTSTRTLETIRASHNEFVADSGWTDIFIFPGFEFKAIDGLITNFHLPKSTLVMLVSAFSTKDYILNAYHQAVKSEYRFFSFGDAMLII

SEQ ID NO: 62531 - protein, 354 aa, unidentified
  source 1..354: note = [Clostridium] lavalense
  REGION 1..354: note = tr|A0A2T3FCF7|A0A2T3FCF7_9FIRM S-adenosylmethionine:tRNA ribosyltransferase-isomerase; OS = [Clostridium] lavalense OX=460384 GN=queA PE=3 SV=1
MDVKDFNFDLPQELIAQDPLDDRASSRLLVLDKDTGAVTHRVFRDIVEYLRPGDCLVINDTKVIPARLMGVKADTGAKIEVLLLKRRENDIWETLVKPGKKAKPGTELSFGDGLLTGTVVETVDDGNRLIQFHYEGIFEEILDQLGQMPLPPYITHQLKDKNRYQTVYAKHEGSAAAPTAGLHFTNELLQEIEDMGVKIAHVTLHVGLGTFRPVKVENVLDHHMHSEFYVVEESEAAKVNETKAAGGRVICVGTTSCRTVESASTEAGVLKAGTGWTEIFIYPGYRFKILDALITNFHLPESTLVMLVSALAGREHILAAYEEAIRERYRFFSFGDAMFIAPDPVALPRKTEES

SEQ ID NO: 62532 - protein, 354 aa, unidentified
  source 1..354: note = [Clostridium] lavalense
  REGION 1..354: note = tr|A0A1I0FSX3|A0A1I0FSX3_9FIRM S-adenosylmethionine:tRNA ribosyltransferase-isomerase; OS = [Clostridium] lavalense OX=460384 GN=queA PE=3 SV=1
MDVKDFNFDLPQELIAQDPLDDRASSRLLVLDKDTGAVTHRVFRDIVEYLRPGDCLVINDTKVIPARLMGVKADTGAKIEVLLLKRRENDIWETLVKPGKKAKPGTELSFGDGLLTGTVVETVDDGNRLIQFHYEGIFEEILDQLGQMPLPPYITHQLKDKNRYQTVYAKHEGSAAAPTAGLHFTNELLQEIEDMGVKIAHVTLHVGLGTFRPVKVENVLDHHMHSEFYVVEESEAAKVNETKAAGGRVICVGTTSCRTVESASTEDGVLKAGTGWTEIFIYPGYRFKILDALITNFHLPESTLVMLVSALAGREHILAAYEEAIRERYRFFSFGDAMFIAPDPVALPQKTEEK

SEQ ID NO: 62533 - protein, 344 aa, unidentified
  source 1..344: note = [Clostridium] leptum
  REGION 1..344: note = tr|A0A412RD58|A0A412RD58_9FIRM S-adenosylmethionine:tRNA ribosyltransferase-isomerase; OS = [Clostridium] leptum OX=1535 GN=queA PE=3 SV=1
MKTSDFYYDLPEELIAQTPIEPRDHSRLMVLDKKTGSIGHRHFYDIIEFLNPGDCLILNDSRVLPARIYGIKEGTGSQVEFLLLTHKEENVWEVLAGPGKKAKPGARFIFGNGLLKAEVLEVVEGGNRVIRFEFDPKEGNFYNILDRIGQMPLPPYITKRLENKERYQTVYSKELGSAAAPTAGLHFTPELLEKLKNKGIRLGFVTLHVGLGTFRPVKVDDVTEHKMHSEHYEISQEVADLILETKKNGGRVIGVGTTSCRTVESVATFEGQIKASEGWTNIFIYPGYEFKVLDGLITNFHLPESTLIMLVSAFAGYDHTMQAYKTAVQERYRFFSFGDSMLIL

SEQ ID NO: 62534 - protein, 341 aa, unidentified
  source 1..341: note = [Clostridium] leptum
  REGION 1..341: note = tr|A7VX15|A7VX15_9FIRM S-adenosylmethionine:tRNA ribosyltransferase-isomerase OS=[Clostridium] leptum DSM 753 OX=428125 GN=queA PE=3 SV=1
MKTSDFYYDLPEELIAQTPIEPRDHSRLMVLDKKTGSIGHRHFYDIIEFLNPGDCLILNDSRVLPARIYGIKEGTGSQVEFLLLTHKEENVWEVLAGPGKKAKPGARFIFGNGLLKAEVLEVVEGGNRVIRFEFDPKEGNFYNILDRIGQMPLPPYITKRLENKERYQTVYSKELGSAAAPTAGLHFTPELLEKLKNKGIRLGFVTLHVGLGTFRPVKVDDVTEHKMHSEHYEISQEVADLILETKKNGGRVIGVGTTSCRTVESVATFEGQIKASEGWTNIFIYPGYEFKVLDGLITNFHLPESTLIMLVSAFAGYDHTMQAYKTAVQERYRFFLLVIAC

SEQ ID NO: 62535 - protein, 340 aa, unidentified
  source 1..340: note = [Clostridium] methylpentosum
  REGION 1..340: note = tr|C0EF11|C0EF11_9FIRM S-adenosylmethionine:tRNA ribosyltransferase-isomerase OS=[Clostridium] methylpentosum DSM 5476 OX=537013 GN=queA PE=3 SV=1
MNTSDFYFDLPKELIAQTPIEPRDHSRMLCLDRNTGKLAHKHFYDVVDLLEPGDTLVINDSRVLPARLYGKKQGTGSDIEFLLLEQKQQDVWEILCKPGKKAKVGAKFTFGGLLDAEIIEVCDDGNRIAKFTYDGSFFDILDQIGQMPLPPYITEKLEDKERYQTVYADELGSAAAPTAGLHFTPELLGKLENKGVNIARVTLHVGLGTFRPVKVDDVTKHKMHSEHYAISQETADLINRTKANGKRVIAVGTTSCRTLESVATFTGGIQKAEGYTDIFIYPGYEFKVLDGLITNFHLPESTLIMLVSAFAGYDQVMEAYHTAVQERYRFFSFGDAMCIL

SEQ ID NO: 62536 - protein, 341 aa, unidentified
  source 1..341: note = [Clostridium] paradoxum
  REGION 1..341: note = tr|A0A150FP63|A0A150FP63_CLOPD S-adenosylmethionine:tRNA ribosyltransferase-isomerase; OS = [Clostridium] paradoxum JW-YL-7 = DSM 7308 OX=1121328; GN = queA PE=3 SV=1
MKTKEFYFDLPQELIAQKPLKERDKSRLMILDKQTGDIEHKIFRDIIDYLSEGDCLVLNNTRVIPARLIGEKVDTKGKIEFLLLNRIELDTWEVLVKPGKRAKVGTEFSFGDGKLRAKVLDIGSEGSRIVKFEYKGVFEEILDELGNMPLPPYITETLEDKERYQTVYSKHEGSAAAPTAGLHFTNELIEKIKEKGVQIAFITLHVGLGTFRPVKVEDITQHKMHSEFYMIQQEEAEKINRAKMNGKKVIAVGTTSCRTLESAVDENGILKAKNGWTDIFIYPGYEFKIVDALITNFHLPESTLIMLVSALCGKENILNAYNVAVKERYRFFSFGDAMFIK

SEQ ID NO: 62537 - protein, 341 aa, unidentified
  source 1..341: note = [Clostridium] polysaccharolyticum
  REGION 1..341: note = tr|A0A1H9Y053|A0A1H9Y053_9FIRM S-adenosylmethionine:tRNA ribosyltransferase-isomerase; OS = [Clostridium] polysaccharolyticum OX=29364 GN=queA PE=3; SV = 1
MKTSDFYFDLPEELIAQDPLEDRSSSKLLVLKKETGAITHKVFKDIKEYLKAGDCLVLNNTKVIPARLIGEKEGTGAKIELLLLKRFEGDVWETLVKPGKKAKPGTRVIFGGGLLTGEIIEIAEEGNRHVKFHYEGIFEEILDQLGQMPLPPYITHQLQDKNRYQTVYAKYEGSAAAPTAGLHFTKELLQELKDMGVEIASVTLHVGLGTFRPVKVDDVTRHHMHSEFYQVLPEEAEKINRAKREGRRIICVGTTSCRTIESAADENGVVQAGSGDTEIFIYPGYQFKVLDCLITNFHLPESTLLMLVSALAGKEHIMDAYKKAVELKYRFFSFGDAMFIE

SEQ ID NO: 62538 - protein, 358 aa, unidentified
  source 1..358: note = [Clostridium] populeti
  REGION 1..358: note = tr|A0A1I6L4Y3|A0A1I6L4Y3_9FIRM S-adenosylmethionine:tRNA ribosyltransferase-isomerase; OS = [Clostridium] populeti OX=37658 GN=queA PE=3 SV=1
MYNKYILFMNMTKKEDYMKTKDFYFDLPEELIAQDPLADRSGSRLLILNKDTGKVEHKIFKNVKEYLRAGDCLVLNNTKVIPARLIGEREGTGAKVELLLLKRMENDVWETLVKPGKKARTGSRIVFGNGLLVGEIMDIVEEGNRYVKFYYDGIFEEILDQLGQMPLPPYITHQLQDKNRYQTVYAKYEGSAAAPTAGLHFTKELLEEIEKMGVVIAHVTLHVGLGTFRPVKVEDVTNHHMHSEYFQVFPDEAEKINAAKRAGNRVICVGTTSCRTVESAADENGFVKPGSGDTDIFIYPGYQFKVLDCLITNFHLPESTLLMLVSALAGKEQVMAAYEEAVKERYRFFSFGDAMLIL

SEQ ID NO: 62539 - protein, 349 aa, unidentified
  source 1..349: note = [Clostridium] sphenoides
  REGION 1..349: note = tr|A0A381JG35|A0A381JG35_9FIRM S-adenosylmethionine:tRNA ribosyltransferase-isomerase; OS = [Clostridium] sphenoides OX=29370 GN=queA PE=3 SV=1
MNVRDFYFDLPQELIAQDPLEDRSASRLLVLDKHTGEIQHRHFRDILSFLRKGDCLVINDTKVIPARLFGVKEGTEAKIEILLLKRRENDIWETLVKPGKKAKVGTVITFGEGLLKGTVIDVVEEGNRLIQFSYEGIFEEILDRLGQMPLPPYITHQLKDKNRYQTVYAKHEGSAAAPTAGLHFTKELLEEIEDMGVSIAHVTLHVGLGTFRPVKVDEIEAHHMHSEFYIIEEEEAKKVNEAKQNGGRIVCVGTTSCRTVESASTDEGILKAGSGWTEIFIYPGYRFKILDCLITNFHLPESTLVMLVSALAGRDHVLHAYEEAIKERYRFFSFGDAMLLTDLLYEGES

SEQ ID NO: 62540 - protein, 341 aa, unidentified
  source 1..341: note = [Clostridium] spiroforme
  REGION 1..341: note = tr|A0A1Y4QID2|A0A1Y4QID2_9FIRM S-adenosylmethionine:tRNA ribosyltransferase-isomerase; OS = [Clostridium] spiroforme OX=29348 GN=queA PE=3 SV=1
MKLSEFDFELPEELIAQTPLDKRDTSRLMVLNRENQTIEHKHFYDIIDYLKPGDVLVRNNTKVIPARLFGIKEETNGHVEVLLLKDQGNDVWECLVGNARIVKLDTVITFGDGLLKAKCLEIKDEGIRVFKMIYDGIFYEILDQLGTMPLPPYIKEKLNDQSRYQTVYAKIEGSAAAPTAGLHFTDDIIKKIKAKGIEILDITLHVGLGTFRPVKVDNVLEHHMHSEYYMIEPEVADKLNQAKANGQRIIAVGTTSTRTLEANMQKYGKFTATHENTDIFIYPGYQYQAIDCLITNFHLPKSTLLMLISAFATKEFIFKAYHEAIENKYRFFSFGDSMFIM

SEQ ID NO: 62541 - protein, 349 aa, unidentified
  source 1..349: note = [Clostridium] spiroforme
  REGION 1..349: note = tr|B1C318|B1C318_9FIRM S-adenosylmethionine:tRNA ribosyltransferase-isomerase OS=[Clostridium] spiroforme DSM 1552 OX=428126 GN=queA PE=3 SV=1
MYIRGRFKMKLSEFDFELPEELIAQTPLDKRDTSRLMVLNRENQTIEHKHFYDIINYLKPGDVLVRNNTKVIPARLFGVKEETNGHVEVLLLKDQGNDVWECLVGNARIVKLDTIITFGDGLLKAKCLEIKDEGIRVFKMIYDGIFYEILDQLGTMPLPPYIKEKLNDQSRYQTVYAKIEGSAAAPTAGLHFTDDIIRKIKAKGIEILDITLHVGLGTFRPVKVDNVLEHHMHSEYYMIEPEVADKLNQAKANGQRIIAVGTTSTRTLEANMQKYGKFTATHENTDIFIYPGYQYQAIDCLITNFHLPKSTLLMLISAFATKEFIFKAYHEAIENKYRFFSFGDSMFIM

SEQ ID NO: 62542 - protein, 347 aa, unidentified
  source 1..347: note = [Clostridium] symbiosum
  REGION 1..347: note = tr|U2BYE8|U2BYE8_CLOSY S-adenosylmethionine:tRNA ribosyltransferase-isomerase OS=[Clostridium] symbiosum ATCC 14940 OX=411472 GN=queA PE=3 SV=1
MDVKDFYYDLPEELIAQDPLEDRSSSRLLVLNKDTGEIQHKVFRDILSYLRKGDCLVINDTKVIPARLIGSKEGTDAKIEVLLLKRRENDIWETLVKPGKKAKIGTVINFGEGLLKGTVVDVVEEGNRLIQFSYKGIFEEILDELGQMPLPPYITHQLQDKNRYQTVYAKHEGSAAAPTAGLHFTNELLGKIAEKGIEIAHVTLHVGLGTFRPVKVDNVLEHHMHSEFYIVEEEEARKINDTKKKGGRVICVGTTSCRTLESAAGEDGILKAGSGWTDIFIYPGYRFKILDCLITNFHLPESTLVMLVSALAGREHVLKAYEEAIKERYRFFSFGDAMFIASKPEQD

SEQ ID NO: 62543 - protein, 347 aa, unidentified
  source 1..347: note = [Clostridium] symbiosum
  REGION 1..347: note = tr|E7GPE3|E7GPE3_CLOSY S-adenosylmethionine:tRNA ribosyltransferase-isomerase OS=[Clostridium] symbiosum WAL-14163 OX=742740 GN=queA PE=3 SV=1
MDVKDFYYDLPEELIAQDPLEDRSSSRLLVLNKDTGEIQHKVFRDILSYLRKGDCLVINDTKVIPARLIGSKEGTDAKIEVLLLKRRENDIWETLVKPGKKAKIGTVINFGEGLLKGTVVDVVEEGNRLIQFSYKGIFEEILDELGQMPLPPYITHQLQDKKRYQTVYAKHEGSAAAPTAGLHFTNELLGKIAEKGIEIAHVTLHVGLGTFRPVKVDNVLEHHMHSEFYIVEEEEARKINDTKKKGGRVICVGTTSCRTLESAAGEDGILKAGSGWTDIFIYPGYRFKILDCLITNFHLPESTLVMLVSALAGREHVLKAYEEAIKERYRFFSFGDAMFIASKPEQD

SEQ ID NO: 62544 - protein, 341 aa, unidentified
  source 1..341: note = [Clostridium] thermoalcaliphilum
  REGION 1..341: note = tr|A0A1V4I9U5|A0A1V4I9U5_9FIRM S-adenosylmethionine:tRNA ribosyltransferase-isomerase; OS = [Clostridium] thermoalcaliphilum OX=29349 GN=queA PE=3; SV = 1
MKTSDFYFDLPQELIAQKPLEERDKSRLMVLDKESGEIEHKVFRDIIDYLSEGDCLVLNNTRVLPARLIGEKLDTKAKMEFLLLKRIDLDTWETLVKPGKRAKIGSEFSFGDGRLKAKVVDIGEEGARIVKFEYDGIFEEILDELGNMPLPPYITETLEDKERYQTVYSKHQGSAAAPTAGLHFTNEILEKIKAKGVEIAFITLHVGLGTFRPVKVENVLEHKMHSEFYMIEKEEAEKINKAKANGKKVIAVGTTSCRTLESASDENGVLHPKSGWTDIFIYPGHEFKIVDSLITNFHLPESTLIMLVAALCGKENILNAYNIAVTERYRFFSFGDAMFIK

SEQ ID NO: 62545 - protein, 327 aa, unidentified
  source 1..327: note = [Clostridium] ultunense
  REGION 1..327: note = tr|A0A1M4PN32|A0A1M4PN32_9FIRM S-adenosylmethionine:tRNA ribosyltransferase-isomerase; OS = [Clostridium] ultunense Esp OX=1288971 GN=queA PE=3 SV=1
MKTEDFYYDLPGELIAQFPIKDREESKLLILDKKTGNIEDRIFKDIIDYFNPGDCLVLNDTRVIPARLFGSRIGKDEKIEFLLLRRIENDMWEILARPGKKVRPGNRIVFGQGLLVADVLSIGEDGTRKVKFNYNGIFEEILDKLGEMPLPPYITEKLEDGERYQTVYSKHDGSAAAPTAGLHFTKELLKQIEEKGVNIAYLTLHVGLGTFRPVKVENIEEHHMHSEYYEVSHKAAHMINRAKRDGGRVIAVGTTTTRTLETIGSLEGMIIPKKGWTDIFIYPGYKFKIIDGLITNFHLPESTLLMLVSALAGRLLFNRSHLLLYFL

SEQ ID NO: 62546 - protein, 407 aa, unidentified
  source 1..407: note = [Collinsella] massiliensis
  REGION 1..407: note = tr|A0A1Y3XQX5|A0A1Y3XQX5_9ACTN S-adenosylmethionine:tRNA ribosyltransferase-isomerase; OS = [Collinsella] massiliensis OX=1232426 GN=queA PE=3 SV=1
MRTDDFDYNLPEELIAQAPAEPRDSCRLLVLHRGEPLATTGDVVPLAHGGSVEHRHFYDIIDYLEPGDLLVANETRVMPARLIGRKAKTGGMAETLLLTRREDLDPLGHVWECLVNPGKRLKPGAVVEYRAGGPHAPETAPVVLTGEIVDFVPDSRGGRIVRFTPQGEGTDGRPRTLDEAIHAAGHVPLPPYITDYEGDPEKYQTVYAMSEEHSAAAPTAGLHFTPELIERIKQKGVGWATVELEVGIDTFRLVEEDDPTEHVMHTERYHLPQAVVDAVHAAKAGGHRVIAVGTTAVRSLESAWEASAPASDPAVVARRFEDAPDSAAVARAGDIVARADATTNLYLMPGSTYHVVDALITNFHVPRSTLMMLVSALATREQIMDAYAEAVAERYRFFSFGDAMLIE

SEQ ID NO: 62547 - protein, 356 aa, unidentified
  source 1..356: note = [Curtobacterium] plantarum
  REGION 1..356: note = tr|A0A3M7UKS6|A0A3M7UKS6_9GAMM S-adenosylmethionine:tRNA ribosyltransferase-isomerase; OS = [Curtobacterium] plantarum OX=221276 GN=queA PE=3 SV=1
MRVADFAFELPESLIAHYPQAQRSGCRLLSLDGPSGTLSHGVFTDVLDKLNPGDLLVFNNTRVIPARVFGRKASGGKIEMLVERMLDDKRVLAHVRASKAPKPGAELLLGEDESVKATMVARHDALFEIVFDDERAVLDILNSVGHMPLPPYIDRPDEEADRELYQTVYSARPGAVAAPTAGLHFDEPLLQALKEKGIEMAFVTLHVGAGTFQPVRVDNIEEHHMHAEYAEVPQEVVDAVLACKARGNKVVAVGTTSVRSLESAAKASQDALIAPFFDDTQIFIYPGYEYQVIDALITNFHLPESTLIMLVSAFAGYQHTMAAYCAAVAEQYRFFSYGDAMFISKNPQAPLEKVGD

SEQ ID NO: 62548 - protein, 349 aa, unidentified
  source 1..349: note = [Desulfotomaculum] guttoideum
  REGION 1..349: note = tr|A0A1I0F829|A0A1I0F829_9FIRM S-adenosylmethionine:tRNA ribosyltransferase-isomerase; OS = [Desulfotomaculum] guttoideum OX=58134 GN=queA PE=3 SV=1
MNVRDFYFDLPQELIAQDPLEDRSASRLLVLDKHTGEIQHRHFRDILSFLRKGDCLVINDTKVIPARLFGVKEGTEAKIEILLLKRRENDIWETLVKPGKKAKVGTVITFGEGLLKGTVIDVVEEGNRLIQFSYEGIFEEILDRLGQMPLPPYITHQLKDKNRYQTVYAKHEGSAAAPTAGLHFTKELLEEIEDMGVSIAHVTLHVGLGTFRPVKVDEIEAHHMHSEFYIIEEEEAKKVNEAKQNGGRIVCVGTTSCRTVESASTDEGILKAGSGWTEIFIYPGYRFKILDCLITNFHLPESTLVMLVSALAGRDHVLHAYEEAIKERYRFFSFGDAMLLTDLRYGGES

SEQ ID NO: 62549 - protein, 344 aa, unidentified
  source 1..344: note = [Eubacterium] cellulosolvens
  REGION 1..344: note = tr|I5AR62|I5AR62_EUBCE S-adenosylmethionine:tRNA ribosyltransferase-isomerase OS=[Eubacterium] cellulosolvens 6 OX=633697 GN=queA PE=3 SV=1
MPMKTSDFNYDLPVELIAQDPLEDRSASRMMYMDKETGELKDEIFTEVIDHLREGDCLVLNDTKVIPARLYGTKKDTGALIEVLLLTRKQNDVWETLVRPGKKCKIGTEIVFGEEGLMTGKVIDVTEDGNRFIQFSYEGIFEEILDRLGEMPLPPYIKHKLQDKTMYNTVYAKNDGSAAAPTAGLHFTKELLEKISAKGVKIAHVTLHVGLGTFRPVKVDDVTQHKMHSELYIVEEDQAKIINDTKAAGGRVICVGTTSCRTLESATDENGILQPGSAWTNIFIYPGYTFKIMDGLITNFHLPESTLIMLVSAFAGKDKVMHAYETAVEKKYRFFSFGDAMMII

SEQ ID NO: 62550 - protein, 343 aa, unidentified
  source 1..343: note = [Eubacterium] eligens
  REGION 1..343: note = tr|A0A174Z2A1|A0A174Z2A1_9FIRM S-adenosylmethionine:tRNA ribosyltransferase-isomerase; OS = [Eubacterium] eligens OX=39485 GN=queA PE=3 SV=1
MDLHDFYYDLPEELIAQDPLSDRSSSRLMVLDKETGEIEHKIFRDIVDYLRPGDCLVVNDTKVIPARLIGTKADTGATIEVLLLKRLEDRQDTWEVLVKPGKKAKVGAKISFGEGKLIGEIIDIVEEGNRLIQFTYDGIFEEILDELGQMPLPPYITHKLEDKNRYQTVYAKHEGSAAAPTAGLHFTTELLEKIKAMGVNIARVTLHVGLGTFRPVKVENILDHHMHSEFYVVTQEAADMINNTRKNGGRVIAVGTTSTRTLESVALEDGTIPAKSGWTEIFIYPGYKFKAIDCLITNFHLPESTLVMLVSALAGREHVLHAYEVAVQEKYRFFSFGDAMFIK

SEQ ID NO: 62551 - protein, 343 aa, unidentified
  source 1..343: note = [Eubacterium] eligens
  REGION 1..343: note = tr|A0A413YZ06|A0A413YZ06_9FIRM S-adenosylmethionine:tRNA ribosyltransferase-isomerase; OS = [Eubacterium] eligens OX=39485 GN=queA PE=3 SV=1
MDLHDFYYDLPEELIAQDPLSDRSSSRLMVLDKETGEIEHKIFRDIVDYLKPGDCLVVNDTKVIPARLIGTKVDTGATIEVLLLKRLEDRQDTWEVLVKPGKKAKVGAKISFGEGKLIGEIIDIVEEGNRLIQFTYDGIFEEILDELGQMPLPPYITHKLEDKNRYQTVYAKHEGSAAAPTAGLHFTTELLEKIKAMGVNIARVTLHVGLGTFRPVKVENILDHHMHSEFYVVTQEAADMINNTRKNGGRVIAVGTTSTRTLESVALEDGTIPAKSGWTEIFIYPGYKFKAIDCLITNFHLPESTLVMLVSALAGREHVLHAYEVAVQEKYRFFSFGDAMFIK

SEQ ID NO: 62552 - protein, 351 aa, unidentified
  source 1..351: note = [Eubacterium] infirmum
  REGION 1..351: note = tr|A0A377FMZ3|A0A377FMZ3_9FIRM S-adenosylmethionine:tRNA ribosyltransferase-isomerase; OS = [Eubacterium] infirmum OX=56774 GN=queA PE=3 SV=1
MHINDFDYELPEELIAQKPQKDRDKCRLMVLRRKENSIEHRHFFDILEYLKEGDCLLLNDSKVIPARLYGIKEGTGARVEFLLIKRVDGDIWETMVRPGKRLKPGDSVLFSDEDGKKLRAEILDYGEDGTRIVKMEYDGILMERLEEIGSMPLPPYISRPSNDEDKDDYQTVYCHEEGSVAAPTAGLHFTTELLEKAKEKGVKIAFVTLHVGIGTFRPVKCETIEEHHMHFEEYSISEEAAEIVNRTVLEGGRIISVGTTSTRTAESAAYFDEKSGKYLIAAGSGSTDIFIYPGYKFKIIGSLITNFHLPKSTLMMLVSALYDREHILKAYGKAAREKYRFFSYGDAMFIE

SEQ ID NO: 62553 - protein, 352 aa, unidentified
  source 1..352: note = [Eubacterium] rectale
  REGION 1..352: note = tr|D4JPG0|D4JPG0_9FIRM S-adenosylmethionine:tRNA ribosyltransferase-isomerase OS=[Eubacterium] rectale M104/1 OX=657317 GN=queA PE=3 SV=1
MDVKDFDYDLPEELIAQDPLEDRSSSRLMVLDKKTGEVSHHVFKEIVKYLRPGDCLVLNNTKVIPARLFGVKEGTMAKIEILLLKRRQNDVWETLVKPGKKAKPGTKIIFGDGLLTGEVIDVVDDGNRLIQFSYEGIFEEILDKLGQMPLPPYITHQLKDKNRYQTVYAKYDGSAAAPTAGLHFTKELLQQVKDKGVDIAEVTLHVGLGTFRPVKVDNVLDHHMHSEFYMVSQEAADKINNAKKNGGRIISVGTTSTRTLEAASDENGMLKECSGWTDIFIYPGYSFKVIDCLITNFHLPQSTLVMLVSALAGREHVLNAYKEAVEERYRFFSFGDAMFITNDMHMDDEAAE

SEQ ID NO: 62554 - protein, 352 aa, unidentified
  source 1..352: note = [Eubacterium] rectale
  REGION 1..352: note = tr|A0A3E4Y857|A0A3E4Y857_9FIRM S-adenosylmethionine:tRNA ribosyltransferase-isomerase; OS = [Eubacterium] rectale OX=39491 GN=queA PE=3 SV=1
MDVKDFDYDLPEELIAQDPLEDRSSSRLMVLDKNTGEVSHHVFKEIVKYLRPGDCLVLNNTKVIPARLFGVKEGTMAKIEILLLKRRQNDVWETLVKPGKKAKPGTRIIFGDGLLTGEVIDVVDDGNRLIQFSYEGIFEEILDKLGQMPLPPYITHQLKDKNRYQTVYAKYDGSAAAPTAGLHFTKELLQQVKDKGVDIAEVTLHVGLGTFRPVKVDNVLDHHMHSEFYMVSQEAADKINNAKKNGGRIISVGTTSTRTLEAASDENGMLKECSGWTDIFIYPGYSFKVIDCLITNFHLPQSTLVMLVSALAGREHVLNAYKEAVEERYRFFSFGDAMFITNDMHMEDEMAE

SEQ ID NO: 62555 - protein, 386 aa, unidentified
  source 1..386: note = [Eubacterium] siraeum
  REGION 1..386: note = tr|B0MPQ6|B0MPQ6_9FIRM S-adenosylmethionine:tRNA ribosyltransferase-isomerase OS=[Eubacterium] siraeum DSM 15702 OX=428128 GN=queA PE=3 SV=1
MLFVNGEAVKNNLIFFRKCVIIKQYAISRKKKCVKNAKNRGKTMLKSDFYYDLPQELIAQTPLEPRDSSRLMKIDRKSGKITHDRFYNICDYLEKGDLLVLNDSKVFPARLYGVKQETGAAVQFLLLHQISHNRWEVMVKPGKRLKIGTKVDFSGILTAEIVDYAEGGDRIAEFTYDGDSIFEVLDRIGQMPLPPYITEKLKDKDRYNTIYSHEVGSAAAPTAGLHFTENVFAKLREKGVDTAFVTLHVGLGTFRPVKEDNILDHKMHVEHYSIPQETADKIKACRERGGRVISVGTTSCRTLESAASLDPNGEIKACSHDTGIFIYPGYEFKAIDGLITNFHLPESTLIMLVSAFLGREKTLNAYNVAIQEKYRFFSFGDSMIII

SEQ ID NO: 62556 - protein, 343 aa, unidentified
  source 1..343: note = [Eubacterium] siraeum
  REGION 1..343: note = tr|A0A174ZSL7|A0A174ZSL7_9FIRM S-adenosylmethionine:tRNA ribosyltransferase-isomerase; OS = [Eubacterium] siraeum OX=39492 GN=queA PE=3 SV=1
MLKSDFYYDLPQELIAQTPLEPRDSSRLMKIDRKSGEITHDRFYNICDYLEKGDLLVLNDSKVFPARLYGVKQETGAAVQFLLLHQISHNRWEVMVKPGKRLKIGTKVDFSGILTAEIVDYAEGGDRIAEFTYDGDSIFEVLDRIGQMPLPPYITEKLKDKDRYNTIYSHEVGSAAAPTAGLHFTENVFAKLREKGVDTAFVTLHVGLGTFRPVKEDNILDHKMHVEHYSIPQETADKIKACRERGGRVISVGTTSCRTLESAASLDPNGEIKACSHDTGIFIYPGYEFKAIDGLITNFHLPESTLIMLVSAFLGREKTLNAYNVAIQEKYRFFSFGDSMIII

SEQ ID NO: 62557 - protein, 344 aa, unidentified
  source 1..344: note = [Eubacterium] yurii
  REGION 1..344: note = tr|E0QK98|E0QK98_9FIRM S-adenosylmethionine:tRNA ribosyltransferase-isomerase OS=[Eubacterium] yurii subsp. margaretiae ATCC 43715 OX=864565 GN=queA PE=3 SV=1
MKTEEFFYDLPERLIAQTPLKDRSSSKLLLLNKESGNTKHEIFKNIIDYLDKNDVLVFNNTRVLPARLYGLKKDTGANVEILLLKRYSMKKWQVLVKPAKRLKKGSTVSFGEDLLLMTILEEYDEGIRDVEFSYEGVFEDIISQIGFMPLPPYIKEKLQDKERYQTIYSKINGSSAAPTAGLHFTKELIASLEEKGVQIEYLTLHVGLGTFRPVKAEEVTDHVMHSEHYVIDEDTAQRLNKAKKEGKKIIAVGTTTVRTLESAVNRDNILEKLEDDTSIFIYPPYDFKFVDSIITNFHLPQSTLIMMISAFAGKDKVFNAYKVAIENEYRFFSFGDSMFIDKDV

SEQ ID NO: 62558 - protein, 344 aa, unidentified
  source 1..344: note = [Eubacterium] yurii
  REGION 1..344: note = tr|A0A1T5K530|A0A1T5K530_9FIRM S-adenosylmethionine:tRNA ribosyltransferase-isomerase; OS = [Eubacterium] yurii OX=39498 GN=queA PE=3 SV=1
MKTEEFFYDLPERLIAQTPLKDRSSSKLLLLNKNSGNTKHEIFKNIINYINKDDVLVFNNTRVLPARLYGVKKDTGAHVEILLLRRYSLKKWQVLVKPAKRLKKDTVVSFGEDLLLMTVLEEYDEGIRDVEFSYDGVFEDIISQIGFMPLPPYIKEKLQDKERYQTIYSKINGSSAAPTAGLHFTKELINALEEKAVQIEYLTLHVGLGTFRPVKVEEVTEHVMHSEHYVIDEATAQRLNKAKKEGRKIIAVGTTTVRTLESAVNADNILEKLEDDTSIFIYPPYDFKFVDSIITNFHLPQSTLIMMISAFAGKDKVFSAYNEAIKNEYRFFSFGDSMFIDKDL

SEQ ID NO: 62559 - protein, 338 aa, unidentified
  source 1..338: note = [Flavobacterium] thermophilum
  REGION 1..338: note = tr|A0A377G370|A0A377G370_9BACL S-adenosylmethionine:tRNA ribosyltransferase-isomerase; OS = [Flavobacterium] thermophilum OX=1414643 GN=queA PE=3; SV = 1
MFDFHLPEELIAQTPLPDRAASRLMVLDKRTGAIRHETFRNIISYLNPSDCLVLNDTRVMPARLYGEKEETGGTVEVLLLKQLDGDRWETLVKPGKRVKPGTKLTFGEGKLEAVCLDTLEHGGRVLEFSYDGLFYEVLAELGEMPLPPYIKEKLDDPERYQTVYAREIGSAAAPTAGLHFTEELLDAIREKGVHIVFITLHVGLGTFRPVQVDEVEKHDMHAEFYQMSEETAETLNRVRNQGGRIIAVGTTSTRTLETIAGKHNGRFVAESGWTDIFIYPGYEFKGIDGLVTNFHLPKSTLIMLVSALAGRENILHAYQVAVKERYRFFSFGDAMLII

SEQ ID NO: 62560 - protein, 349 aa, unidentified
  source 1..349: note = [Flexibacter] sp.
  REGION 1..349: note = tr|A0A1V2CFN4|A0A1V2CFN4_9FLAO S-adenosylmethionine:tRNA ribosyltransferase-isomerase; OS = [Flexibacter] sp. ATCC 35103 OX=1937528 GN=queA PE=3; SV = 1
MKLSHFQFNLPKELLAEFPAENRDESRLMVIDRQKQTIEHKMFKDVINYFDDGDVLILNNTKVFPARLYGNKEKTGARIEVFLLRELNSEQRLWDVLVDPARKIRIGNKLYFGDDDSLVAEVIDNTTSRGRTLRFLYDGSYEEFRNKLTELGETPIPKYISREVTAEDAERYQTIYAKEEGAVAAPTAGLHFSKHLLKKLEIKGINFAEVTLHVGLGTFNPVEVEDLSKHKMDSEELIIKQEACDIVNEAKAKKKRICAVGTTSMRAIESSVSSQNTLNPYEGWTNKFIFPPHDFSIANCMITNFHTPKSTLLMMISAFCGHDLMKRAYDEAIKEEYKFYSYGDAMLII

SEQ ID NO: 62561 - protein, 349 aa, unidentified
  source 1..349: note = [Flexibacter] sp.
  REGION 1..349: note = tr|A0A1V2BBM7|A0A1V2BBM7_9BACT S-adenosylmethionine:tRNA ribosyltransferase-isomerase; OS = [Flexibacter] sp. ATCC 35208 OX=1936242 GN=queA PE=3; SV = 1
MKLSQFRFDLPLNLIAQHPSKTRDEARLMVVNRATGKIEHKVFKDILNYFNDKDVMMVNNTKVFPARLYGRKEKTGAKIEVFLLRELNKQNRLWDVIVDPARKIRVGNKLYFGDDESLVAEVIDNTTSRGRTIRFLFEGNDEEFKQVLDTLGETPLPKYIKRKPEDEDKERYQTVYAKYEGAVAAPTAGLHFSRELIKRLEIKGIKFAEVTLHTGLGTFRPIEVEDLSKHKMDAEYFNIDEYAVKIVNKAKEENRKVCAIGTTTVRAVESSVTAQNMLKAAEGWTNTFIHPPYDFAIPNALVTNFHLPKTSLLIMVCAFAGYDLVMEAYQQAIKEKYRFFSYGDAMLIL

SEQ ID NO: 62562 - protein, 363 aa, unidentified
  source 1..363: note = [Haemophilus] felis
  REGION 1..363: note = tr|A0A1T0AXU2|A0A1T0AXU2_9PAST S-adenosylmethionine:tRNA ribosyltransferase-isomerase; OS = [Haemophilus] felis OX=123822 GN=queA PE=3 SV=1
MRLADFYFDLPDELIARYPKSDRKSSRLLQLNGETGALSHGVFADVLELVNVGDLLIFNNTRVIPARMFGRKESGGKVEVLVERMLDDRRCLAHIRSSKAPKAGATLFLGEDKLGESKGVKMLMLARHDNLFELELSDAQLSLLDVLQQIGHMPLPPYIDRPDEAADQERYQTVYNKVPGAVAAPTAGLHFDDELLAQLKAKGVNFAFVTLHVGAGTFQPVRVEHIEDHKMHAEYVEVSQEVCDAIIATKQAGKRVIAVGTTSVRSVETAALASIEQGSDALIRPYFSDTSIFLYPSKKFHIVDGLITNFHLPESTLIMLVSAFAGYQHTMRAYQCAVENRYRFFSYGDAMFITKNPNVNGLA

SEQ ID NO: 62563 - protein, 369 aa, unidentified
  source 1..369: note = [Oscillatoria] sp.
  REGION 1..369: note = tr|D8G5N5|D8G5N5_9CYAN S-adenosylmethionine:tRNA ribosyltransferase-isomerase OS=[Oscillatoria] sp. PCC 6506 OX=272129 GN=queA PE=3 SV=1
MTEINSSLDLKLEAYNYVLPPERIAQNPVVPRDSSRLLVVDSPHSHQHSIFRELPNFLKRGDLLVLNNTRVLPARLKGRKPNGYPVEALLMEERERNCWLALVKPGKRLKPGARIEFDPLNGEIPNGDRLSATVLERDEATGGRLLQFEVPVGMSLVQLLPEYGHIPLPPYIKNSQALGEQYQTIYAEKLGAIAAPTAGLHFTDELLKGLQEKGIEQAFVTLHVGVGTFRPVEVEDLTTHQMHREWVEVPAITVDKIRQTQANGGRIIAVGTTAVRALEGAAAAAQKQNLPSLQAFCGHTDLFIYPGYRWQVVEGLITNFHLPQSSLLMLVSAMIGRQRLFELYEEAIAHQYRFYSFGDAMLILPEVNC

SEQ ID NO: 62564 - protein, 363 aa, unidentified
  source 1..363: note = [Pasteurella] mairii
  REGION 1..363: note = tr|A0A379B4Y1|A0A379B4Y1_9PAST S-adenosylmethionine:tRNA ribosyltransferase-isomerase; OS = [Pasteurella] mairii OX=757 GN=queA PE=3 SV=1
MHLSDFYFDLPDELIARYPKVERTSSRLLQLNGQNGELFHRTFSDVVDLINEGDLLIFNNTRVIPARIFGRKASGGKIEVLIERILTENRFLAHIRASKAPKDGAELILGEDKLGEGKGIKARMISRHEALFEVEIVEKNTALLEILPQIGHMPLPPYIDRPDEEADKERYQTVYNKVPGAVAAPTAGLHFDQPLLDKLKAKGVNFAFVTLHVGAGTFQPVRVEQIEDHKMHAEYVEVPQEVVEAILATKANGKRVIAVGTTSVRSIESAALFAEENQLNTPIAPFFSDTSIFIYPGKKFRVTDALITNFHLPESTLIMLVSAFAGYQHTMNAYKSAVENRYRFFSYGDAMFISKNPNVKGLE

SEQ ID NO: 62565 - protein, 362 aa, unidentified
  source 1..362: note = [Polyangium] brachysporum
  REGION 1..362: note = tr|A0A0G3BVQ6|A0A0G3BVQ6_9BURK S-adenosylmethionine:tRNA ribosyltransferase-isomerase; OS = [Polyangium] brachysporum OX=413882 GN=queA PE=3 SV=1
MPSSDPHSPATPASASPTPGAYTLSDFDFELPPELIAQQPAPERSGSRLLDGRGPTPVDRIFRELPGLLQPGDLLVFNDTRVIKARLYGAKASGGAIEALVERVLPGHEVLAHLRASKSPKAGTVVRFAQAFDAEVLGRGGPDGGLFHLRFPEEPLALLERHGHVPLPPYITHEDTSEDARRYQTVFADKPGAVAAPTAALHFDDGVLAALAERGITTAGVTLHVGAGTFQPVRTENLAEHKMHSEWFEVSAATVAAVAQARERGGRVVAVGTTTLRALESAALGGRLVAGARETDIFITPGFEFRVVDRLVTNFHLPKSTLMMLVSAFAGYAHVMALYRHAIAQRYRFFSYGDAMLLERPF

SEQ ID NO: 62566 - protein, 373 aa, unidentified
  source 1..373: note = [Polyangium] brachysporum
  REGION 1..373: note = tr|A0A0G3BVM9|A0A0G3BVM9_9BURK S-adenosylmethionine:tRNA ribosyltransferase-isomerase; OS = [Polyangium] brachysporum OX=413882 GN=AAW51_4735 PE=3; SV = 1
MIAADQAVQRPADARLLVIAADGSIRPTARSRLIEWLRPGDLLVANDAATLPASLFGTHEPSGGAIEVRLAGRDTLDPRSVSPFTAVVFGAGDHRARTEDRAPPPTLRAGDRLLLGPLDARVDALLGHARLLTLRFAGTPAEIWAGLARHGRPVQYAHVPMPLALWDVWTPIAGLPVAFEPPSAGFALDWRLLSSLRARGVAFSTLTHAAGLSSTGDLQLDRRLPLPEAYRIPKVTAEAIAATRRGGGRVVAVGTTVVRALEQAWATHGTVPPGDGLATLRIGSSTRLQVVDVLLSGTHEPDTSHHALLRAFTDDTTLRRADRALEAEGFRTHEFGDSVWLERRDRRPVNVGPGPGATGVRPADDHREGAASR

SEQ ID NO: 62567 - protein, 355 aa, unidentified
  source 1..355: note = [Pseudomonas] geniculata
  REGION 1..355: note = tr|A0A0L8AB88|A0A0L8AB88_9GAMM S-adenosylmethionine:tRNA ribosyltransferase-isomerase; OS = [Pseudomonas] geniculata N1 OX=1167641 GN=queA PE=3 SV=1
MRAIVDLLPPTALKKSDFHYDLPAELIAQAPLAERSASRLLLVPPAPDGFTDLQVRDLPSLLQPGDLLVFNDTRVIPARLFGQKASGGRVEILIERLLGGQQARAQVGASKSPKAGSRIALDAGGEAEVLGRDGEFYVLQFHVPESLEQWLLHAGRLPLPPYIQREPGVDDRERYQTVFAREVGAVAAPTAGLHFDEPLLAALKDKGVDFGHVTLHVGAGTFQPVRADDLKDHVMHREWLNVGAELVQQVRRTRAAGGRVIGVGTTVVRALESAMRDGELLPFAGETQIFITPGYRIRSVDAMVTNFHLPESTLLMMISAFAGKERVFEAYQHAIEQRYRFFSYGDAMLLFPQAG

SEQ ID NO: 62568 - protein, 354 aa, unidentified
  source 1..354: note = [Pseudomonas] mesoacidophila
  REGION 1..354: note = tr|A0A2A4F7P9|A0A2A4F7P9_9BURK S-adenosylmethionine:tRNA ribosyltransferase-isomerase; OS = [Pseudomonas] mesoacidophila OX=265293 GN=queA PE=3 SV=1
MFTLSDFDFNLPPELIAQTALPDRTASRLLEVDNTAAPARLVDRRFAELPSCIAPGDLLVFNDTKVLKARFFGHKASGGKVEVLIERVTGTHTALAQIRASKSPGPGTTLTLADAFDVTVGERVEPFFTLHFPAPCLTLIEQYGRLPLPPYIEHDPDATDETRYQTVYASNPGAVAAPTAGLHFDEPLLAKLDAMGVERATLTLHVGAGTFQPVRVENIAEHKMHSEWYELPQSLVDRIAATRARGGNVIAVGTTSMRALEAAARDAAAAGRPLAATQAETDIFITPGYAFRVVDRLVTNFHLPKSTLLMLVSAFAGVDTIRAAYQHAIDERYRFFSYGDAMLLTRRDTPQAGA

SEQ ID NO: 62569 - protein, 341 aa, unidentified
  source 1..341: note = [Ruminococcus] gnavus
  REGION 1..341: note = tr|R5UAB2|R5UAB2_9FIRM S-adenosylmethionine:tRNA ribosyltransferase-isomerase OS=[Ruminococcus] gnavus CAG:126 OX=1263106 GN=queA PE=3 SV=1
MKTSDFYYDLPEELIAQDPLEDRSGSRLLFLDKETGKTEHHIFRDVIDYLNPGDCLVINDTKVIPARLIGEKEGTGAKIEVLLLKRGENDVWETLVKPGKKAKPGTRISFGDGLLVGEVVDVVEEGNRLIHFEYKGIFEEILDQLGQMPLPPYITHQLEDRSRYNTVYAAHEGSAAAPTAGLHFTPKLLKEIQEKGVDIARVTLHVGLGTFRPVKVEDVTEHHMHSEFYMVDAEAAEKINKAKEHGGRVICVGTTSCRTIESAADENGRLKPCSGWTEIFIYPGYQFKILDGLITNFHLPESTLIMLVSALAGKEHVMAAYEEAVKERYRFFSFGDAMIIL

SEQ ID NO: 62570 - protein, 341 aa, unidentified
  source 1..341: note = [Ruminococcus] torques
  REGION 1..341: note = tr|A0A173XQB9|A0A173XQB9_9FIRM S-adenosylmethionine:tRNA ribosyltransferase-isomerase; OS = [Ruminococcus] torques OX=33039 GN=queA PE=3 SV=1
MKTSDFYYDLPEELIAQDPLEDRSSSRLMTVDKETGKIGHHVFSEIIDYLNEGDCLVINDTKVIPARLIGAKEETGAKIEVLLLKRGADDVWETLVKPGRKAKPGTRISFGDGLLVGEVVDIVDEGNRLIHFEYEGIFEEILDQLGQMPLPPYITHQLQDKNRYNTVYAEHSGSAAAPTAGLHFTPELLRKIEEKGVDIARVTLHVGLGTFRPVKVDDVENHHMHSEFYMINEEAAEKINHAKDRGGRVICVGTTSCRTIESAADENGRLKACSGWTEIFIYPGYRFKTLDCLITNFHLPESTLIMLVSALAGKEHVMAAYEEAVKERYRFFSFGDAMLIL

SEQ ID NO: 62571 - protein, 341 aa, unidentified; identical to SEQ ID NO: 62570
  source 1..341: note = [Ruminococcus] torques
  REGION 1..341: note = tr|A5KPU6|A5KPU6_9FIRM S-adenosylmethionine:tRNA ribosyltransferase-isomerase OS=[Ruminococcus] torques ATCC 27756 OX=411460 GN=queA PE=3 SV=1

SEQ ID NO: 62572 - protein, 365 aa, unidentified
  source 1..365: note = Abditibacterium utsteinense
  REGION 1..365: note = tr|A0A2S8SR18|A0A2S8SR18_9BACT S-adenosylmethionine:tRNA ribosyltransferase-isomerase; OS = Abditibacterium utsteinense OX=1960156 GN=queA PE=3 SV=1
MLASELDFDLPEHFIAQTPVEPRDAAKLLVFRRASGQISHHFVRDLPALLRPSDLLIFNDTRVLRARLRGFKPSGGRVEALLLKEITKNRWQALLKPSARLQAGGTVEFVSENSDLHLSARLEARLEDAWILEFHTPKNADIRDFLPTLGEVPLPPYIRQSSPEARYQTTFSRQKTLGNPLDSAAAPTAGLHFTPQLLENLEKRGIDKAFLTLAVGAGTFRPVQSETLEEHRMHREEFEISVQSAQKINEQKARGGRIVAVGTTSVRALESVADERGFVAPGEAATQIFIRPGHVFRGVDALLTNFHQPRSTLLALVAAFIEAGTINKNGENGSKSGLATIREIYALAMKEGYRFHSFGDAMLLD

SEQ ID NO: 62573 - protein, 344 aa, Abiotrophia defectiva
  REGION 1..344: note = tr|W1Q5M6|W1Q5M6_ABIDE S-adenosylmethionine:tRNA ribosyltransferase-isomerase OS=Abiotrophia defectiva ATCC 49176 OX=592010 GN=queA PE=3 SV=1
MLTTKDFDYHLPEHLIAQTPLADRAASRLLVLDRQTGRKQDLHFDQIINFLNPGDALVVNETRVIPARLFGIKPETGGHLEVLLLNNTQGNQWECLIKPARRAKTGTQIVFGEDGRLTATVVSEGDHGGRIIEFSYEGVFLEILESLGQMPLPPYIKERLEDADRYQTVYAKENGSAAAPTAGLHFTDELLEAIKAKGVEIIPLVLHVGLGTFRPVSADSIEDHEMHAEYYQLSQESADAIQAVQARGGKIFAVGTTSVRTLETIAAKFDGQVRADSGWTQIFISPGFEFKVVDHLITNFHLPCSTLVMLVSAFYNREAVLAAYEHAVEAEYRFFSFGDSMLIL

SEQ ID NO: 62574 - protein, 344 aa, Abiotrophia sp.
  REGION 1..344: note = tr|A0A1F1LRM2|A0A1F1LRM2_9LACT S-adenosylmethionine:tRNA ribosyltransferase-isomerase; OS = Abiotrophia sp. HMSC24B09 OX=1581061 GN=queA PE=3 SV=1
MLTTKDFDYHLPERLIAQTPLADRAASRLLVLDRQTGQKQDLQFDQIINFLNPGDALVVNETRVIPARLFGIKPETGGHLEVLLLNNTQGNQWECLIKPARRAKTGTQIVFGEDGRLTATVVSEGDHGGRIIEFSYEGVFLEILESLGQMPLPPYIKERLEDADRYQTVYAKENGSAAAPTAGLHFTDELLEAIKAKGVEIIPLVLHVGLGTFRPVSADSIEDHEMHAEYYQLSQSSADAIQAVQARGGKIFAVGTTSVRTLETIATKFDGQVRADSGWTQIFISPGFEFKVVDHLITNFHLPCSTLVMLVSAFYNREAVLAAYEHAVEAEYRFFSFGDSMLIL

SEQ ID NO: 62575 - protein, 346 aa, unidentified
  source 1..346: note = Abyssibacter profundi
  REGION 1..346: note = tr|A0A363UPB7|A0A363UPB7_9GAMM S-adenosylmethionine:tRNA ribosyltransferase-isomerase; OS = Abyssibacter profundi OX=2182787 GN=queA PE=3 SV=1
MQKSDFHFDLPDHLIAQHPLPDRSGARMLDVDGATGQLRDARVLDLPERLQPGDLVVTNDVRVMPARVFGRKASGGRVEVMIERLVQPRVAWAHVRASKTPKPGGQLVLEGGHAVEVRGRQDDGLFVLELAQGTWPEVLEAVGHMPLPPYIRRADTPDDAERYQTVFARQPGAVAAPTAGLHFDDALMAAIQARGAELASTTLWVGAGTFQPVRSERIDEHRMHAERVQVPQATVDAVEATRARGGRVVAIGTTVVRALEAAAAQGQLAAMDGDTRLFIKPGDQFRVVDALFTNFHLPESTLLMLVCAFAGYDTVMHAYRHAVTQQYRFFSYGDAMWLTPQPEARA

SEQ ID NO: 62576 - protein, 350 aa, unidentified
  source 1..350: note = Abyssicoccus albus
  REGION 1..350: note = tr|A0A3N5BNV2|A0A3N5BNV2_9STAP S-adenosylmethionine:tRNA ribosyltransferase-isomerase; OS = Abyssicoccus albus OX=1817405 GN=queA PE=3 SV=1
MNVEQFDFDLPDDLIAQTPLKERSESRLLTLDYANQRIEHRQFFHIQNYLKAGDALVLNNTKVIPARLFGMKETGAAIEILLLEDIGEDTWKALVKPAKRIKIGDKILFGEGVLTAECVAVQDEGIRQLKLQYDGILQNILDKLGTMPLPPYIKETLDDASRYQTVYAKTPGSAAAPTAGLHFTTELLEQLIAQGVDIYYVTLHVGLGTFRPVSVDNVDDHTMHSEYYEIDEVTAKALNDKKLAGKRIISVGTTSTRTLETVYSMYNEFRASSGYTDIFIYPGYEYKAIDGLITNFHLPKSTLMMLVSALAGRELIMKAYSEAIQERYRFFSFGDAMFIYKGEQHGGNNV

SEQ ID NO: 62577 - protein, 369 aa, unidentified
  source 1..369: note = Acaryochloris marina
  REGION 1..369: note = sp|B0C0B9|QUEA_ACAM1 S-adenosylmethionine:tRNA ribosyltransferase-isomerase OS=Acaryochloris marina (strain MBIC 11017) OX=329726 GN=queA PE=3 SV=1
MLGPTPELDQTLQAYDYLLPETFIAQTPLVPRDRSRLLVVQQQAHQHKIFQDLVALLQPGDLLVFNDTRVIPARLLGRKLNSELAQPVEVFLLEPRQPNTWLALVRPGRRLKPGAQIEFGPPERPLLRAEILATDADTRGRIIQFESLVEEPFEDLLEQLGEVPLPPYIQESTAQPEQYQTVYAQHPGAVAAPTAGLHFTPELLARLQSEGINQAHLTLHVGIGTFRPVETDDILQHHMHSEWVDLPAATVDAIRTTKASGGRVIAVGTTVTRALEGACQNGPLVPWQGRTNLFIYPSYQWRVVDGLITNFHLPKSSLLMLVSALVGRERLLALYEDAIAQQYRFYSFGDAMLVLPEAVIAERSPDPVF

SEQ ID NO: 62578 - protein, 360 aa, unidentified
  source 1..360: note = Acaryochloris sp.
  REGION 1..360: note = tr|A0A2W1JFA4|A0A2W1JFA4_9CYAN S-adenosylmethionine:tRNA ribosyltransferase-isomerase; OS = Acaryochloris sp. RCC1774 OX=1764569 GN=queA_1 PE=3 SV=1
MSNAPYSQDHCLSAYDYTLPETLIAQTPMVPRDRSRLLVVEPTTHQHRHFYELPQLLRSGDLLVLNNTRVIPARLLGYKLSSKGGQIPVEVLLLEPRPDQCWLALVKPGRRLKPGANIIFGNPEQPSLQATVLETDAETRGRIIQFHVDSGKVLEAKIHQLGQLPLPPYIHHSSAAPEQYQTVFAEQPGAVAAPTAGLHFTPQLLEQLSAQGIQQAWITLHVGLGTFRPVEIDHITDHRMHAEWIDISPATVAAVQQTQAQGGRIIAVGTTAVRALEGAAQSGTLQPYRGKTQIFIYPGYQWQVVDGLITNFHLPKSSLMMLVSALIGRQRLLTLYQEAIDERYRFYSFGDAMLIMPVRD

SEQ ID NO: 62579 - protein, 343 aa, unidentified
  source 1..343: note = Accumulibacter phosphatis
  REGION 1..343: note = tr|C7RRA0|C7RRA0_ACCPU S-adenosylmethionine:tRNA ribosyltransferase-isomerase OS=Accumulibacter phosphatis (strain UW-1) OX=522306 GN=queA PE=3 SV=1
MLTIDDFDFDLPTELIAQQPTPERTASRLLELADGGLHDRRFSELPQLVDAGDLLVFNDTRVIRARLFGHKESGGQIEVLIERIIDARHALAQIRASKSPKPGSRIVLEDAIALNVCGRSGKHGEFFALELAGPGDLWTLIERHGRLPLPPYITHAAGSDDEARYQTVFARQPGAVAAPTAGLHFDDALLGQLAACSVEVAWLTLHVGAGTFQPVRVHAVAEHRMHAERFEIPPATIAAIARTRARAGKVIAVGTTSLRALEAAAQDGELRAGAAETDIFITPGYRFQVVDRLITNFHLPKSTLLMLVSAFAGLDAIRTAYAHAIRHGYRFFSYGDAMLLSRE

SEQ ID NO: 62580 - protein, 343 aa, Acetanaerobacterium elongatum
  REGION 1..343: note = tr|A0A1H0BD05|A0A1H0BD05_9FIRM S-adenosylmethionine:tRNA ribosyltransferase-isomerase; OS = Acetanaerobacterium elongatum OX=258515 GN=queA PE=3; SV = 1
MRKSDFWYDLPEKLIAQTPIEPRDTSRMLTLDRKTGVIGHRHFYDILDLLNKGDTLILNNSRVLPARLYGKRTDTGGDIEFLLLEQKQQDIWEILVKPGKRARIGSKFVFGDGLLNAEVLDILPADGNRLVRFKWQCGSFFNVLEQIGQMPLPPYIKQKLQDKERYQTVYSKEPGSAAAPTAGLHFTPELLERIKSKGINIGFVTLHVGLGTFRPVKEDNITDHKMHSEHYYLPQETADLINKTKANGKRVIAVGTTSCRTLEAAVATYGCVQACEGYTDIFIYPGFEFKVLDGIITNFHLPESTLIMLVSAFAGYEHTMNAYKIAVEEQYRFFSFGDAMFIV

SEQ ID NO: 62581 - protein, 345 aa, unidentified
  source 1..345: note = Acetatifactor muris
  REGION 1..345: note = tr|A0A2K4ZGY0|A0A2K4ZGY0_9FIRM S-adenosylmethionine:tRNA ribosyltransferase-isomerase; OS = Acetatifactor muris OX=879566 GN=queA PE=3 SV=1
MDGVMPKSDYYFELPQELIAQDPLEDRSSSRLLVLDKHTGAVSHRVFRDIGEFLRPGDCLVLNNTKVIPARLLGVRADTGAHVEVLLLKRQEGNVWETLVKPGKKCRPGAKLSFGEGLLGAEILEVTEEGNRLIRFAYEGIFEEVLDRLGEMPLPPYITHKLQDKNRYQTVYAREEGSAAAPTAGLHFTQELLAQLEEKGIRIAFVTLHVGLGTFRPVKEENVLDHHMHSEYYQVPEETATLINRTRTEGGRVICVGTTSCRTLESAADEKGVVQAGSGDTDIFIYPGYRFRVLDALITNFHLPESTLVMLVSALAGRENVLNAYAEAVREQYRFFSFGDAMLVL

SEQ ID NO: 62582 - protein, 351 aa, Acetitomaculum ruminis
  REGION 1..351: note = tr|A0A1I0V3S4|A0A1I0V3S4_9FIRM S-adenosylmethionine:tRNA ribosyltransferase-isomerase; OS = Acetitomaculum ruminis DSM 5522 OX=1120918 GN=queA PE=3; SV = 1
MEVKDFDYELPEELIAQDPLEDRSSSRLMVLSKDNGEIAHRHFYDICNYLKAGDCLVINNTKVIPARIFGVKEGSGAHLEFLLLKRGENDCWETLVKPGKKAKIGTKIVFGDGSLKGEIVDIIEEGNRIIKFEYDGIFEEILDKLGQMPLPPYITHKLKDKNRYQTVYAKYDGSAAAPTAGLHFTKELIEKIKNMGVEVAEVTLHVGLGTFRPVKVDNVLEHHMHSEFYQINQSEADKINKAKRNGGRIIAVGTTSTRTLESAADENGFLTEKSGWTDIFIYPGYNFKIIDCLITNFHLPKSTLVMLVSALAGREQVLKAYGEAVKEKYRFFSFGDAMFITNDMSEKKLDN

SEQ ID NO: 62583 - protein, 341 aa, Acetivibrio ethanolgignens
  REGION 1..341: note = tr|A0A0V8QFY9|A0A0V8QFY9_9FIRM S-adenosylmethionine:tRNA ribosyltransferase-isomerase; OS = Acetivibrio ethanolgignens OX=290052 GN=queA PE=3 SV=1
MQTKDFDFYLPEELIAQDPLEDRSSSRLLVLDKKTGERTHRIFRDIVEYLEPGDCLVINNTKVIPARLIGEKEGTGAHIELLLLKRKEKDIWETLVKPGKKAKPGTRISFGGGLLTGEIIDVVEEGNRLVQFTYEGIFEEILDQLGQMPLPPYITHQLQDKNRYQTVYAKYEGSAAAPTAGLHFTKELLQKIEEKGIVIANVTLHVGLGTFRPVKVEDVTKHHMHSEFYQVEKAEAEKINAAKASGHRVICVGTTSCRTIESAADENGIVRAGNGNTEIFIYPGYSFKILDALITNFHLPESTLLMLVSALAGRENILAAYDEAVKEKYRFFSFGDAMLIH

SEQ ID NO: 62584 - protein, 341 aa, Acetoanaerobium noterae
  REGION 1..341: note = tr|A0A1T5CL29|A0A1T5CL29_9FIRM S-adenosylmethionine:tRNA ribosyltransferase-isomerase; OS = Acetoanaerobium noterae OX=745369 GN=queA PE=3 SV=1
MKTNDFYFDLPEDLIAQVPLKNRDESRLMTLDKNTGEVKHKTFRDILECLNDNDILVLNNTRVIPARLFGFKAETNAEIEILLLSRKDINTWEALTKPAKRLKLGTRIIFGDGLLIGVVKELQEEGIRTIEFEYEGIFEDVLDRLGNMPLPPYIHEKLEDKERYQTVYSKVTGSSAAPTAGLHFTPEILLELKNKGVQIEYVTLHVGLGTFRPVKAESIFDHTMHKEYFEIAEDVKNRLNEAKKNGKRIVCVGTTSVRTLESSANIINNLDRDSGWTDIFIYPSYEFKFVDAMITNFHLPESTLIMMISAFAGKNYIMDAYEEAIKEKYRFFSFGDAMYIF

SEQ ID NO: 62585 - protein, 341 aa, unidentified
  source 1..341: note = Acetoanaerobium sticklandii
  REGION 1..341: note = tr|E3PRC9|E3PRC9_ACESD S-adenosylmethionine:tRNA ribosyltransferase-isomerase OS=Acetoanaerobium sticklandii (strain ATCC 12662 / DSM 519 / JCM 1433 / NCIMB 10654) O X=499177 GN=queA PE=3 SV=1
MKTNDFYFDLPEDLIAQVPLKNRDESRLMTLDKNTGEVKHKTFRDILECLNDNDILVLNNTRVIPARLFGFKAETNAEIEILLLSRKDINTWEALTKPAKRLKLGTKIIFGDGLLIGIVKELQEDGIRTIEFEYEGIFEDVLDRLGNMPLPPYIHEKLEDKERYQTVYSKVTGSSAAPTAGLHFTPEILLELKNKGVQIEYVTLHVGLGTFRPVKAESIFDHTMHKEYFEIAEDVKNRLNEAKKNGKRIVCVGTTSVRTLESSANILNNLDRNSGWTDIFIYPSYEFKFVDAMITNFHLPESTLIMMISAFAGKTYIMDAYEEAIREKYRFFSFGDAMYIF

SEQ ID NO: 62586 - protein, 352 aa, Acetobacter aceti
  REGION 1..352: note = tr|A0A1U9KL92|A0A1U9KL92_ACEAC S-adenosylmethionine:tRNA ribosyltransferase-isomerase; OS = Acetobacter aceti OX=435 GN=queA PE=3 SV=1
MDDRTADFDFHLPESSIAQHPARPRESARLLDVPADSATPFIDRRISDLPDLLRQGDLLVANDTAVIPAQLHALRGEAKIGVTLDQHQADGSWSALIRNVKRLKLGDTLTFPGTAETAEVTTLDGRGGATLRFSVEGDAFDTFLQTAGALALPPYIARPQGPTAEDQSDYRTIFAEHRGAVAAPTAGLHFTPELLRHIDEAGIGRETLTLHVGAGTFLPVRAETLSGHHMHAERGIITQETADRINAVKERGGRIVAIGTTTLRLLESAVSEDGRVMPFDGDTSIFIHPGFKFRAVDMLMTNFHLPRSTLFMLVCAFAGTERMKAAYEHAVRDGYRFYSYGDACLLRRAETP

SEQ ID NO: 62587 - protein, 352 aa, Acetobacter aceti
  REGION 1..352: note = tr|A0A0D6MR87|A0A0D6MR87_ACEAC S-adenosylmethionine:tRNA ribosyltransferase-isomerase; OS = Acetobacter aceti NBRC 14818 OX=887700 GN=queA PE=3 SV=1
MDDRTADFDFHLPESSIAQHPARPRESARLLDVPADPKAPFIDRHVTDLPGLLRAGDLLVANDTAVIPAQLHARRGEAKIGVTLDQHQADGTWSALIRNAKRLKLGDTLTFPGTDDTAEVATLDGQGGATLRFSAEGDAFDAFLQTAGALALPPYIARPQGPTAEDQSDYRTIFAEHRGAVAAPTAGLHFTPDLLRRIDEAGVGRETLTLHVGAGTFLPVRAETLSGHHMHAERGIITQKTADRINAVKEQGGRIVAVGTTTLRLLESSVTEDGRVMPFDGDTSIFIHPGFKFRAVDMLMTNFHLPRSTLFMLVCAFAGTERMKAAYEHAVRDGYRFYSYGDACLLRRAEVS

SEQ ID NO: 62588 - protein, 360 aa, unidentified
  source 1..360: note = Acetobacter ascendens
  REGION 1..360: note = tr|A0A1D8QY82|A0A1D8QY82_9PROT S-adenosylmethionine:tRNA ribosyltransferase-isomerase; OS = Acetobacter ascendens OX=481146 GN=queA PE=3 SV=1
MSSDRTEDFDFHLPESLIAQEPARPREAARLLDATQPDMFADRHIRDLPSLLKREDLLVANNTAVIRAQLHGLRGEAKIGITLDQIQPDGSWHVLVRNARRLKVGDSIAFPGVQDTARVQALEPGGGAILRFSAEGNDFDAFLQKAGALALPPYIHRPKGPTAQDTSDYATIFERNKGAVAAPTAGLHFTPALLKAIDATGAQRCTLTLHVGAGTFLPVREAEISEHKMHSERGIITPETAERINATRKAGGRIIAIGTTSLRLLETATDENGIVHPFDGTTSIFIRPGYKFRAVDMLLTNFHLPRSTLFMLVSAFAGVERARQIYAHAVASGYRFYSYGDACLLRCAHSIHAHHLGTVE

SEQ ID NO: 62589 - protein, 360 aa, unidentified
  source 1..360: note = Acetobacter ascendens
  REGION 1..360: note = tr|A0A1Y0UXB0|A0A1Y0UXB0_9PROT S-adenosylmethionine:tRNA ribosyltransferase-isomerase; OS = Acetobacter ascendens OX=481146 GN=queA PE=3 SV=1
MSSDRTEDFDFHLPESLIAQEPARPREAARLLDATQPDMFADRHIRDLPSLLKREDLLVANNTAVIRAQLHGLRGEAKIGITLDQIQPDGSWHVLVRNARRLKVGDSIAFPGVQDTARVQALEPGGGAILRFSTEGNDFDAFLQKAGALALPPYIHRPKGPTAQDTSDYATIFERNKGAVAAPTAGLHFTPALLKAIDATGAQRCTLTLHVGAGTFLPVREAEISEHKMHSERGIITPETAERINATRKAGGRIIAIGTTSLRLLETATDENGIVHPFDGTTSIFIRPGYKFRAVDMLLTNFHLPRSTLFMLVSAFAGVERARQIYAHAVASGYRFYSYGDACLLRCAHSIHAHHLGTVE

SEQ ID NO: 62590 - protein, 359 aa, Acetobacter cerevisiae
  REGION 1..359: note = tr|A0A149UV66|A0A149UV66_9PROT S-adenosylmethionine:tRNA ribosyltransferase-isomerase; OS = Acetobacter cerevisiae OX=178900 GN=queA PE=3 SV=1
MSDRTEDFDFHLPETLIAQEPARPREAARLLDVPPHGPFMDRHVSDLPSLLKTGDLLVVNDTAVIRAQLHGLRGEAHIGITLDRILPDTSWHVLVRNARRLKVGDTLTFTGSAHTATVLAREEGGGAVLRFSAEGSAFDTFLQDVGALALPPYIHRPHGPTAQDAKDYATIFAEHKGAVAAPTAGLHFTPTLLEAVDATGAERCTLTLHVGAGTFLPVRENDISKHHMHAERGIITPETADRINAVRKAGGRIIAVGTTSLRLLESAADENGIVHPFDDVTSIFIRPGYRFRAVDMLMTNFHLPRSTLFMLVCAFAGEERMRAAYAHAIQTGYRFYSYGDACLLRCANPIEAHRTGESA

SEQ ID NO: 62591 - protein, 359 aa, Acetobacter cerevisiae
  REGION 1..359: note = tr|A0A149V9A8|A0A149V9A8_9PROT S-adenosylmethionine:tRNA ribosyltransferase-isomerase; OS = Acetobacter cerevisiae OX=178900 GN=queA PE=3 SV=1
MSDRTEDFDFHLPETLIAQEPARPREAARLLDVPPHGPFMDRHVSDLPSLLQAGDLLVANDTAVIRAQLHGLRGEAHIGITLDRILPDTSWHVLVRNARRLKVGDTLTFTGSAHTATVLAREEGGGAVLRFSAEGSAFDTFLQDVGALALPPYIHRPHGPTAQDTKDYATIFAEHKGAVAAPTAGLHFTPTLLEAVDATGAERCTLTLHVGAGTFLPVRENDISKHHMHAERGIITPETADRINAVRKAGGRIIAVGTTSLRLLESAADENGIVHPFDDVTSIFIRPGYRFRAVDMLMTNFHLPRSTLFMLVCAFAGEERMRAAYAHAIQTGYRFYSYGDACLLRCANPIEAHRTGESA

SEQ ID NO: 62592 - protein, 361 aa, Acetobacter cibinongensis
  REGION 1..361: note = tr|A0A0D6N171|A0A0D6N171_9PROT S-adenosylmethionine:tRNA ribosyltransferase-isomerase; OS = Acetobacter cibinongensis 4H-1 OX=1231339 GN=queA PE=3; SV = 1
MSNRTEDFDFHLPEALIAQEPARPRESARLLDVPLHGPFRDLHISDLPGILQRGDLLVANDTAVIRAQLHAMRGEAHIGITLDRILPDTTWHVLLRNAKRVKVGDTLTFANTPHTATVVAREEGGGGILRFTAEGEDFDAFLLHVGALALPPYIHRPHGPTEQDARDYATIFEDHKGAVAAPTAGLHFTPALLDAVDATGADRCTLTLHVGAGTFLPVRDDDISKHHMHAERGIITPEVAARINATRKAGGRIIAVGTTSLRLLESAADEHGVVHPFNAETSIFIRPGYQFRAVDMLMTNFHLPRSTLFMLVSAFAGQARMRQAYEHAVQTGYRFYSYGDACLLRCAHSIHTPNPSTGATP

SEQ ID NO: 62593 - protein, 361 aa, Acetobacter cibinongensis
  REGION 1..361: note = tr|A0A1Z5YZ41|A0A1Z5YZ41_9PROT S-adenosylmethionine:tRNA ribosyltransferase-isomerase; OS = Acetobacter cibinongensis OX=146475 GN=queA PE=3 SV=1
MSNRTEDFDFHLPETLIAQEPARPRESARLLDVPLHGPFRDLHVSDLPGLLQPGDLLVANDTAVIRAQLHAMRGEAHIGITLDRILPDTTWHVLLRNAKRVKVGDTLTFANTPHTATVVAREEGGGGVLRFTAEGEAFDAFLLHVGALALPPYIHRPHGPTEQDARDYATIFEDHKGAVAAPTAGLHFTPALLDAVDATGADRCTLTLHVGAGTFLPVRDDDISKHHMHAERGIITPEVAARINATRKAGGRIIAVGTTSLRLLESAADEHGVVHPFNAETSIFIRPGYQFRAVDMLMTNFHLPRSTLFMLVSAFAGQARMRQAYEHAVQTGYRFYSYGDACLLRCAHSIHTPHSSTGATP

SEQ ID NO: 62594 - protein, 353 aa, Acetobacter fabarum
  REGION 1..353: note = tr|A0A269Y107|A0A269Y107_9PROT S-adenosylmethionine:tRNA ribosyltransferase-isomerase; OS = Acetobacter fabarum OX=483199 GN=queA PE=3 SV=1
MSNRTEDFDFHLPESLIAQEPARPRESARLLDATVPHTLVDRHVRDLPTLLRRGDLLVANNTAVIRAQLHALRGEARIGITLDQIRPDGTWHVLVRNARRLRVGDTLTFAHSDQTAQVVALEPGGGANLRFSCEGDAFDTFLQTAGALALPPYIHRPNGPTAQDSKDYATIFERYKGAVAAPTAGLHFTPDLLDAVDATGAERCTLTLHVGAGTFLPVRADDIAHHHMHSEHGVISPQTAERINATRAAGGRIIAIGTTTLRLLESAADEHGIVHPFAGETAIFIRPGYRFRAVDVLMTNFHLPRSTLFMLVCAFAGQERAKAVYAHALHTGYRFYSYGDACLLECASSIHAR

SEQ ID NO: 62595 - protein, 353 aa, Acetobacter ghanensis
  REGION 1..353: note = tr|A0A0U5F163|A0A0U5F163_9PROT S-adenosylmethionine:tRNA ribosyltransferase-isomerase; OS = Acetobacter ghanensis OX=431306 GN=queA PE=3 SV=1
MSNRTEDFDFHLPEALIAQEPARPRESARLLDATTPGTLVDRHVCDLPHLLRKGDLLVANNTAVIRAQLHALRGEARIGITLDQIRPDGTWHVLVRNARRLKVGDTLTFPNSVETAQVVTLEPGGGACLRFSCEGDAFDAFLQAAGALALPPYIHRPHGPTAQDSKDYATIFERYKGAVAAPTAGLHFTPELLAAVDATGAERCTLTLHVGAGTFLPVRADDITQHHMHSEHGVITPQTAERINATRAAGGRIIAIGTTTLRLLESAADEHGIVHPFEGETAIFIRPGYRFRAVDVLMTNFHLPRSTLFMLVCAFAGQEQAKAAYAHALKTGYRFYSYGDACLLRCANSIHAH

SEQ ID NO: 62596 - protein, 371 aa, Acetobacter indonesiensis
  REGION 1..371: note = tr|A0A0D6N8D4|A0A0D6N8D4_9PROT S-adenosylmethionine:tRNA ribosyltransferase-isomerase; OS = Acetobacter indonesiensis 5H-1 OX=1231340 GN=queA PE=3; SV = 1
MSDRTEDFDFHLPESLIAQEPARPRESARLLDVPEHGAFHDRHVSDLPSLLRQGDLLVANDTAVIRAQLHALRGEARIGITLDRILPDTSWHVLVRNARRLRVGDTLTFTGSPHTADVLAREEGGGAILRFSAQGAAFDAFLKDVGALALPPYIHRPNGPTTQDDTDYATIFAEHKGAVAAPTAGLHFTPSLLQAVDATGAERCTLTLHVGAGTFLPVRENDISKHHMHAERGIITQQTADRINAVRRAGGRIIAVGTTSLRLLESAADENGHVHAFDQETSIFIRPGYKFRAVDLLMTNFHLPRSTLFMLVSAFAGTERMRAAYNHAVTSGYRFYSYGDACLLRCANPIDAHRRTHQNTVPLSGEAGASS

SEQ ID NO: 62597 - protein, 359 aa, Acetobacter malorum
  REGION 1..359: note = tr|A0A087PPV1|A0A087PPV1_9PROT S-adenosylmethionine:tRNA ribosyltransferase-isomerase; OS = Acetobacter malorum OX=178901 GN=queA PE=3 SV=1
MSDRTEDFDFHLPETLIAQEPARPREAARLLDVPPHGPFMDRHVSDLPSLLKAGDLLVANDTAVIRAQLHGLRGEAHIGITLDRILPDTSWHVLVRNARRLKVGDTLTFTGSAHTATVLAREEGGGAVLRFSAEGSAFDTFLQDVGALALPPYIHRPHGPTAQDAKDYATIFAEHKGAVAAPTAGLHFTPKLLDAVDATGAERCTLTLHVGAGTFLPVRENDISKHHMHAERGIITPETAARINEVRKAGGRIIAVGTTSLRLLESAADENGIVHPFDDVTSIFIRPGYRFRAVDMLMTNFHLPRSTLFMLVCAFAGEERMRAAYAHAVQTGYRFYSYGDACLLRCANPIEAHRTGESA

SEQ ID NO: 62598 - protein, 359 aa, Acetobacter malorum
  REGION 1..359: note = tr|A0A149V175|A0A149V175_9PROT S-adenosylmethionine:tRNA ribosyltransferase-isomerase; OS = Acetobacter malorum OX=178901 GN=queA PE=3 SV=1
MSDRTEDFDFHLPETLIAQEPARPREAARLLDVPPHGPFMDRHVSDLPSLLKAGDLLVANDTAVIRAQLHGLRGEAHIGITLDRILPDTSWHVLVRNARRLKVGDTLTFTGSTHTATVLAREEGGGAVLRFSAEGSAFDTFLQDVGALALPPYIHRPHGPTAQDAQDYATIFAEHKGAVAAPTAGLHFTPTLLEAVDATGAERCTLTLHVGAGTFLPVRENDISKHHMHAERGIITPETADRINAVRKAGGRIIAVGTTSLRLLESAADENGIVHPFDDVTSIFIRPGYRFRAVDILMTNFHLPRSTLFMLVCAFAGEERMRAAYAHAVQTGYRFYSYGDACLLRCANPIEAHRTGESA

SEQ ID NO: 62599 - protein, 351 aa, Acetobacter nitrogenifigens
  REGION 1..351: note = tr|A0A511X738|A0A511X738_9PROT S-adenosylmethionine:tRNA ribosyltransferase-isomerase; OS = Acetobacter nitrogenifigens DSM 23921 = LMG 23498; OX = 1120919 GN=queA PE=3 SV =1
MTDRTADYDFDLPQESIAQSPARPRDSARLLDVAEAGLIDRTMREFPDLLRPGDLLVANDTAVIRAQLHALRGEAKIGVTLDRILPDGSWHALIRNARRLRVGDRLTFPGARAEDVADVLELEDGGGATLRFSAEGDAFDAFLQAAGALALPPYIHRPAGPTSEDERDYTTIFSAHKGAVAAPTAGLHFTPDLLQRIDAAGIERRTLTLHVGAGTFLPVRAETLTGHKMHAERGVVTAETADAINAARARGGRVVAVGTTTLRLLESAVDEQGVVRPFDGETSIFITPGFTFRAVDMLLTNFHLPRSTLFMLVSAFAGTARMRGAYAHAVREGYRFYSYGDACLLRREDNQ

SEQ ID NO: 62600 - protein, 356 aa, Acetobacter oeni
  REGION 1..356: note = tr|A0A511XMU6|A0A511XMU6_9PROT S-adenosylmethionine:tRNA ribosyltransferase-isomerase; OS = Acetobacter oeni OX=304077 GN=queA PE=3 SV=1
MDDLTADFDFDLPQERIAQHPVKPRDSARLLDVPCDPGVPVVDRHVRDLPGLLRAGDLLVANDTAVIPAQLHARRGVAKIGVTLDQHQADGSWSALIKNSKRLRTGDVLTFPGASDGDVATVASLDGEGGATLRFSCEGEAFDGFLRKAGALALPPYIARPSGPTAEDEVDYRTIFAEHRGAVAAPTAGLHFTPELLARLDEAGIGRETLTLHVGAGTFLPVRSETLSAHKMHAERGIITRRAADRINETRAQGGRIVAVGTTSLRLLESAADEGGTVRPFDGETSIFIHPGYRFRAVDLLMTNFHLPRSTLFMLVCAFAGTERMRAAYAHAVSDGYRFYSYGDACLLRRTDAVCP

SEQ ID NO: 62601 - protein, 353 aa, unidentified
  source 1..353: note = Acetobacter okinawensis
  REGION 1..353: note = tr|A0A252BYD5|A0A252BYD5_9PROT S-adenosylmethionine:tRNA ribosyltransferase-isomerase; OS = Acetobacter okinawensis OX=1076594 GN=queA PE=3 SV=1
MSNRTEDFDFHLPEALIAQEPARPREAARLLDATSPHTLVDRHVRDLPQLLRKGDLLVANNTAVIRAQLHALRGEARIGITLDQIRPDGTWHVLVRNARRLKVGDTLTFPHSDQTAQVMALEPGGGANLRFSCEGDAFDAFLQAAGALALPPYIHRPNGPTAQDSKDYATIFERYKGAVAAPTAGLHFTPELLAAVDATGAQRCTLTLHVGAGTFLPVRADDIAHHHMHSEHGVITPQTAERINATRAAGGRIIAIGTTTLRLLESAADEHGIVHPFEGETAIFIRPGYRFRAVDVLMTNFHLPRSTLFMLVCAFAGQERAKAVYAHALNTGYRFYSYGDACLLQCASSLHDR

SEQ ID NO: 62602 - protein, 361 aa, Acetobacter orientalis
  REGION 1..361: note = tr|A0A252A339|A0A252A339_9PROT S-adenosylmethionine:tRNA ribosyltransferase-isomerase; OS = Acetobacter orientalis OX=146474 GN=queA PE=3 SV=1
MSDRTEDFDFHLPETLIAQEPARPRESARLLDVPLHGPFIDRHVSDLPSLLQPQDLLVANDTAVIRAQLQAMRGEAHIGITLDRILPDTSWHVLLRNAKRVRVGDVLTFANTPHTATVTAREEGGGGVLRFSAEGEAFDAFLRHVGALALPPYIHRPHGPTAQDALDYATIFAEHKGAVAAPTAGLHFTPALLNAIDDTGASRCTLTLHVGAGTFLPVRDNDISKHHMHAERGIITPETAERINAVRKAGGRIIAVGTTSLRLLESATDAHGVVHPFNAETSIFIRPGYRFRAVDMLMTNFHLPRSTLFMLVSAFAGQDRMRRAYEHAVQTGYRFYSYGDACLLRCAHSIHTPKPETGVPS

SEQ ID NO: 62603 - protein, 361 aa, Acetobacter orientalis
  REGION 1..361: note = tr|A0A252BFN4|A0A252BFN4_9PROT S-adenosylmethionine:tRNA ribosyltransferase-isomerase; OS = Acetobacter orientalis OX=146474 GN=queA PE=3 SV=1
MSDRTEDFDFHLPETLIAQEPARPRESARLLDVPLHGPFIDRHVSDLPSLLQPQDLLVANDTAVIRAQLQAMRGEAHIGITLDRILPDTSWHVLLRNAKRVRVGDVLTFANTPHTATVTAREEGGGGVLRFSAEGEAFDAFLRHVGALALPPYIHRPHGPTAQDALDYATIFAEHKGAVAAPTAGLHFTPALLNAIDDTGASRCTLTLHVGAGTFLPVRDNDISKHHMHAERGIITPETAERINAVRKAGGRIIAVGTTSLRLLESAADAHGVVHPFNAETSIFIRPGYRFRAVDMLMTNFHLPRSTLFMLVSAFAGQDRMRLAYEHAVQTGYRFYSYGDACLLRCAHSIHTPKPETGVPS

SEQ ID NO: 62604 - protein, 359 aa, Acetobacter orleanensis
  REGION 1..359: note = tr|A0A4Y3TPV7|A0A4Y3TPV7_9PROT S-adenosylmethionine:tRNA ribosyltransferase-isomerase; OS = Acetobacter orleanensis OX=104099 GN=queA PE=3 SV=1
MSDRTEDFDFHLPETLIAQEPARPREAARLLDVPAHGPLIDRHVRDLPELLKAGDLLVANDTAVIRAQLHALRGEAHIGITLDRILPDTSWHVLVRNARRLKVGDTLTFTGSPHTATVLAREDGGGAVLRFSAEGAAFDAFLQDVGALALPPYIHRPHGPTAQDTKDYATIFAEHKGAVAAPTAGLHFTPTLLEAVDATGAERCTLTLHVGAGTFLPVRENDISKHHMHAERGVITPETAARINAVRKAGGRIIAVGTTSLRLLESAADENGIVHPFDDVTSIFIRPGYRFRAVDLLLTNFHLPRSTLFMLVCAFAGEERMRAAYAHAVQTGYRFYSYGDACLLRCASPLEAHRTGDTA

SEQ ID NO: 62605 - protein, 360 aa, Acetobacter pasteurianus
  REGION 1..360: note = tr|A0A401X0A7|A0A401X0A7_ACEPA S-adenosylmethionine:tRNA ribosyltransferase-isomerase; OS = Acetobacter pasteurianus NBRC 3278 OX=1226660 GN=queA; PE = 3 SV=1
MSSDRTEDFDFHLPESLIAQEPARPREAARLLDATQPDMFADRHIRDLPSLLKRGDLLVANNTAVIRAQLHGLRGEAKIGITLDQIQPDGSWHVLVRNARRLKVGDTIAFPGVQDTARVQALEPGGGAVLQFSAEGDAFDAFLRKAGALALPPYIHRPEGPTAQDTSDYATIFERNKGAVAAPTAGLHFTPALLKAIDATGAQRCTLTLHVGAGTFLPVREAEISEHKMHSERGIITPETAERINATRKAGGRIIAIGTTSLRLLETATDENGIVHPFDGTTSIFIRPGYQFRAVDMLLTNFHLPRSTLFMLVSAFAGVERARQIYAHAVASGYRFYSYGDACLLRCAHSIHAHHLGTVE

SEQ ID NO: 62606 - protein, 360 aa, Acetobacter pasteurianus
  REGION 1..360: note = tr|A0A1A0DDR2|A0A1A0DDR2_ACEPA S-adenosylmethionine:tRNA ribosyltransferase-isomerase; OS = Acetobacter pasteurianus OX=438 GN=queA PE=3 SV=1
MSSDRTEDFDFHLPESLIAQEPARPREAARLLDATQPDMFADRHIRDLPSLLKRGDLLVANNTAVIRAQLHGLRGEAKIGITLDQIQPDGSWHVLVRNARRLKVGDTIAFPGVQDTARVQALEPGGGAVLQFSAEGDSFDAFLQKAGALALPPYIHRPEGPTAQDTSDYATIFERNKGAVAAPTAGLHFTPALLKAIDATGAQRCTLTLHVGAGTFLPVREAEISEHKMHSERGIITPETAERINATRKAGGRIIAIGTTSLRLLETATDENGIVHPFDGTTSIFIRPGYQFRAVDMLLTNFHLPRSTLFMLVSAFAGVERARQIYAHAVASGYRFYSYGDACLLRCAHSIHAHHLGTVE

SEQ ID NO: 62607 - protein, 350 aa, unidentified
  source 1..350: note = Acetobacter peroxydans
  REGION 1..350: note = tr|A0A4Y3TW89|A0A4Y3TW89_9PROT S-adenosylmethionine:tRNA ribosyltransferase-isomerase; OS = Acetobacter peroxydans OX=104098 GN=queA PE=3 SV=1
MSDRTEDFDFPLPQSLIAQEPARPRESARLLDATAPAPTLIDRHIHDLPELFQPGDLLVANDTAVIRAQLQARRGEARIGVTLDQIRPDGTWHVLVRNARRLKPGDTLTFENTAQTAQVVTLEEGGGAILRFSAEGDAFDTFLRDAGVLALPPYILRPDGPTERDSQDYATIFEQVRGAVAAPTAGLHFTPALLAALDARGVSRCTLTLHVGAGTFLPVREADISRHHMHTERGVITPETAERINATRRAGGRIIAVGTTTLRLLESAADEHGVVHPFSGETAIFIRPGYRFRTVDVLMTNFHLPRSTLFMLVSAFAGVERARQVYDHAIASGYRFYSYGDACLLRLSTD

SEQ ID NO: 62608 - protein, 359 aa, unidentified
  source 1..359: note = Acetobacter persici
  REGION 1..359: note = tr|A0A1U9LE27|A0A1U9LE27_9PROT S-adenosylmethionine:tRNA ribosyltransferase-isomerase; OS = Acetobacter persici OX=1076596 GN=queA PE=3 SV=1
MSDRTEDFDFHLPETLIAQEPARPREAARLLDVPAHGPLADRHVSDLPGLLKAGDLLIANDTAVIRAQLHALRGEAHIGITLDRILPDTSWHVLVRNARRLKVGDTLTFTGSPHTATVLAREEGGGAVLRFSAEGSAFDTFLQDVGALALPPYIHRPHGPTAQDTRDYATIFEHHKGAVAAPTAGLHFTPALLEAVDATGADRCTLTLHVGAGTFLPVRENDISKHHMHAERGIITPETAARINAARQAGGRIIAVGTTSLRLLESAADENGIVHPFDDVTSIFIRPGYRFRAVDMLMTNFHLPRSTLFMLVCAFAGEERMRAAYAHAIQTGYRFYSYGDACLLRCASPIEAHRTGESA

SEQ ID NO: 62609 - protein, 359 aa, unidentified
  source 1..359: note = Acetobacter persici
  REGION 1..359: note = tr|A0A252ALZ9|A0A252ALZ9_9PROT S-adenosylmethionine:tRNA ribosyltransferase-isomerase; OS = Acetobacter persici OX=1076596 GN=queA PE=3 SV=1
MSDRTEDFDFHLPETLIAQEPARPREAARLLDVPAHGPLADRHVSDLPGLLKAGDLLVANDTAVIRAQLHALRGEAHIGITLDRILPDTSWHVLVRNARRLKVGDTLTFTGSPHTATVLAREEGGGAVLRFSAEGSAFDTFLQDVGALALPPYIHRPHGPTAQDTRDYATIFEHHKGAVAAPTAGLHFTPALLEAVDATGADRCTLTLHVGAGTFLPVRENDISKHHMHAERGIITPETAARINAARKAGGRIIAVGTTSLRLLESAADENGIVHPFDDVTSIFIRPGYRFRAVDMLMTNFHLPRSTLFMLVCAFAGEERMRAAYAHAIQTGYRFYSYGDACLLRCASPIESHRTGESA

SEQ ID NO: 62610 - protein, 358 aa, Acetobacter pomorum
  REGION 1..358: note = tr|A0A346DX53|A0A346DX53_9PROT S-adenosylmethionine:tRNA ribosyltransferase-isomerase; OS = Acetobacter pomorum OX=65959 GN=queA PE=3 SV=1
MSSDRTEDFDFHLPESLIAQEPARPREAARLLDATQPSIFADRHIRDLPSLLKRRDLLVANNTAVIRAQLHGLRGEAKIGITLDQIQPDGSWHVLVRNARRLKVGDIIAFPGVQDIARVLALEPGGGAVLRFSAEGDAFDVFLQKAGALALPPYIHRPEGPTAQDTSDYATIFERNKGAVAAPTAGLHFTPALLKAVDATGAQRCTLTLHVGAGTFLPVREAEISEHKMHSERGIITPETAERINATRKAGGRIIAIGTTSLRLLETATDENGIVHPFDGTTSIFIRPGYQFRAVDMLLTNFHLPRSTLFMLVSAFAGVERARQIYAHAVASGYRFYSYGDACLLRCAHSIHAPTSEQ

SEQ ID NO: 62611 - protein, 358 aa, Acetobacter pomorum
  REGION 1..358: note = tr|F1YUU6|F1YUU6_9PROT S-adenosylmethionine:tRNA ribosyltransferase-isomerase OS=Acetobacter pomorum DM001; OX = 945681 GN=queA PE=3 SV=1
MSSDRTEDFDFHLPESLIAQEPARPREAARLLDATQPGIFADRHIRDLPSLLKRGDLLVANNTAVIRAQLHGLRGEAKIGITLDQIQPDGSWHVLVRNARRLKVGDIIAFPGVQDIARVLALEPGGGAVLRFSAEGDAFDVFLQKAGALALPPYIHRPEGPTAQDTSDYATIFERNKGAVAAPTAGLHFTPALLKAVDATGAQRCTLTLHVGAGTFLPVREAEISEHKMHSERGIITPETAERINTTRKAGGRIIAIGTTSLRLLETATDENGIVHPFDGTTSIFIRPGYQFRAVDMLLTNFHLPRSTLFMLVSAFAGVERARQIYAHAVASGYRFYSYGDACLLRCAHSIHAPTSEQ

SEQ ID NO: 62612 - protein, 371 aa, Acetobacter senegalensis
  REGION 1..371: note = tr|A0A149TVS9|A0A149TVS9_9PROT S-adenosylmethionine:tRNA ribosyltransferase-isomerase; OS = Acetobacter senegalensis OX=446692 GN=queA PE=3 SV=1
MSDRTEDFDFHLPETLIAQEPARPRESARLLDVPQDGPFHDRHVSDLPSLLRAGDLLVANDTAVIRAQLHALRGEARIGITLDRILADGTWHVLVRNARRLRVGDTLTFTGSPHTAEVLAREEGGGGVLRFSAEGSAFDAFLKDVGALALPPYIHRPHGPTAQDDKDYATIFAEHKGAVAAPTAGLHFTPSLLEAVDATGAERCTLTLHVGAGTFLPVRENDISKHHMHAERGIITQETADRINAVRQAGGRIIAVGTTSLRLLESAADETGRVHPFDAETSIFIRPGYKFRAVDMLMTNFHLPRSTLFMLVSAFAGTERMRATYAHAVHSGYRFYSYGDACLLRCANPIDAHRISHQTTAHPTGAAGALS

SEQ ID NO: 62613 - protein, 371 aa, Acetobacter senegalensis
  REGION 1..371: note = tr|A0A252EH20|A0A252EH20_9PROT S-adenosylmethionine:tRNA ribosyltransferase-isomerase; OS = Acetobacter senegalensis OX=446692 GN=queA PE=3 SV=1
MSDRTEDFDFHLPETLIAQEPARPRESARLLDVPQDGPFHDRHVSDLPSLLRAGDLLVANDTAVIRAQLHALRGEARIGITLDRILADGTWHVLVRNARRLRVGDTLTFTGSPHTAEVLAREEGGGAVLRFSAEGSAFDAFLKDVGALALPPYIHRPHGPTAQDDKDYATIFAEHKGAVAAPTAGLHFTPSLLEAVDATGAERCTLTLHVGAGTFLPVRENDISKHHMHAERGIITQETAERINAVRQTGGRIIAVGTTSLRLLESAADETGRVHPFDAETSIFIRPGYKFRAVDMLMTNFHLPRSTLFMLVSAFAGTERMRAAYAHAVNSGYRFYSYGDACLLRCATPIDAHRISHQTTAHPTGAAGALS

SEQ ID NO: 62614 - protein, 360 aa, Acetobacter sp.; identical to SEQ ID NO: 62588
  REGION 1..360: note = tr|A0A368AGZ6|A0A368AGZ6_9PROT S-adenosylmethionine:tRNA ribosyltransferase-isomerase; OS = Acetobacter sp. BCRC 14118 OX=1868878 GN=queA PE=3 SV=1

SEQ ID NO: 62615 - protein, 358 aa, Acetobacter sp.
  REGION 1..358: note = tr|A0A5C1YPQ5|A0A5C1YPQ5_9PROT S-adenosylmethionine:tRNA ribosyltransferase-isomerase; OS = Acetobacter sp. KACC 21233 OX=2592655 GN=queA PE=3 SV=1
MSDRTEDFDFHLPESLIAQEPARPREAARLLDASSPDALADRHVRDLPGLLRAGDLLVANDTAVIRAQLQARRGEAHIGITLDQIRPDGAWHVLARNARRLKVGDTLTFSGTDVTASVQALEDGGGAVLHFSAQGDAFDQFLLAAGALALPPYIHRPHGPTQRDAQDYATIFERARGAVAAPTAGLHFTPALLDAVDATGAQRRTLTLHVGAGTFLPVRDDDISRHRMHSERGVITQETADAINATRKTGGRIIAIGTTTLRLLESAADTNGIVHPFEGETAIFIRPGYRFRAVDMLMTNFHLPRSTLFMLVSAFAGVERARQIYTHAVTHGYRFYSYGDACLLRCASPLDAPCTGAR

SEQ ID NO: 62616 - protein, 353 aa, Acetobacter syzygii
  REGION 1..353: note = tr|A0A270BWM7|A0A270BWM7_9PROT S-adenosylmethionine:tRNA ribosyltransferase-isomerase; OS = Acetobacter syzygii OX=146476 GN=queA PE=3 SV=1
MSNRTEDFDFHLPDALIAQEPARPRESARLLDATTPTALVDRHVRDLPNLLRKGDLLVANNTAVIRAQLHALRNEAKIGITLDQIRPDGTWHVLVRNARRLRVGDTLTFPNSVQTALVTALEPGGGACLRFSCEGDAFDAFLQAAGALALPPYIHRPDGPTAQDTKDYATIFERHKGAVAAPTAGLHFTPELLAAVDATGAERCALTLHVGAGTFLPVRADDITQHHMHSEHGVITAQTAERINATRAAGGRIIAIGTTTLRLLESAADAYGIIHPFAGETAIFIRPGYRFKAVDVLMTNFHLPRSTLFMLVCAFAGQEQAKAAYAHALSTGYRFYSYGDACLLQCANSIHTP

SEQ ID NO: 62617 - protein, 371 aa, Acetobacter tropicalis
  REGION 1..371: note = tr|A0A252A693|A0A252A693_9PROT S-adenosylmethionine:tRNA ribosyltransferase-isomerase; OS = Acetobacter tropicalis OX=104102 GN=queA PE=3 SV=1
MSDRTEDFDFHLPETLIAQEPARPRESARLLDVPQDGPFHDRHVSDLPSLLRAGDLLVTNDTAVIRAQLHALRGEARIGITLDRILADGTWHVLVRNARRLRVGDTLTFTGSPQTAEVLAREEGGGAVLRFSAEGSAFDAFLKDVGALALPPYIHRPHGPTAQDDKDYATIFAEHKGAVAAPTAGLHFTPSLLEAVDATGAERCTLTLHVGAGTFLPVRENDISKHHMHAERGIITQKTADRINAVRQAGGRIIAVGTTSLRLLESAADETGRVHPFDAETSIFIRPGYKFRAVDMLMTNFHLPRSTLFMLVSAFAGTERMRAAYAHAVHSGYRFYSYGDACLLRCANPIDAHRISHQTTAHPTGAAGALS

SEQ ID NO: 62618 - protein, 371 aa, Acetobacter tropicalis
  REGION 1..371: note = tr|A0A0C9LJ75|A0A0C9LJ75_9PROT S-adenosylmethionine:tRNA ribosyltransferase-isomerase; OS = Acetobacter tropicalis OX=104102 GN=queA PE=3 SV=1
MSDRTEDFDFHLPETLIAQEPARPRESARLLDVPQDGPFHDRHVSDLPSLLRADDLLVANDTAVIRAQLHALRGEARIGITLDRILADGTWHVLVRNARRLRVGDTLTFTGSPHTAEVLAREEGGGAVLRFSAEGSAFDAFLKDVGALALPPYIHRPHGPTAQDDKDYATIFAEHKGAVAAPTAGLHFTPSLLEAVDATGAERCTLTLHVGAGTFLPVRENDISKHHMHAERGIITQETAERINAVRQAGGRIVAVGTTSLRLLESAADETGRVHPFDAETSIFIRPGYKFRAVDMLMTNFHLPRSTLFMLVSAFAGTERMRAAYAHAVHSGYRFYSYGDACLLRCANPIDTHRISHQTTAHPTGAAGALS

SEQ ID NO: 62619 - protein, 363 aa, unidentified
  source 1..363: note = Acetobacteraceae bacterium
  REGION 1..363: note = tr|A0A327M9J0|A0A327M9J0_9PROT S-adenosylmethionine:tRNA ribosyltransferase-isomerase; OS = Acetobacteraceae bacterium DB1506 OX=2230885 GN=queA; PE = 3 SV=1
MRAEEFDFALPERLIAQAPARPRDAARLLLVRPEGCADRGIGDLPALLGPGDVMVVNDTRVIPARLRARRGAAAIEIMLNRAEPDGTWEALVRNARRLRPGDALQVEGAPELPCRVLAREGGTARLDFGPDPAVLAAALERAGEIPLPPYIARPEGPRPEDREDYQTLFAARPGAVAAPTASLHFTPGLVAALEARGVRRATVTLHVGAGTFLPLRGEDPRAHRLHAEWGEVTPEAAAIINAARPAGGRILAIGTTALRLLETAAQGAGGDPLRPVRPFRGLTDLYLLPGHRFRAADLLLTNFHLPRSTLFMLVSAFAGTARMRAAYAHAIAAGYRFYSYGDASLLTRADAVAGSRASEGQQP

SEQ ID NO: 62620 - protein, 348 aa, unidentified
  source 1..348: note = Acetobacteraceae bacterium
  REGION 1..348: note = tr|A0A354UYH7|A0A354UYH7_9PROT S-adenosylmethionine:tRNA ribosyltransferase-isomerase; OS = Acetobacteraceae bacterium OX=1909293 GN=queA PE=3 SV=1
MTLADFDYELPPERIAHEPVRPRDSARLLHIHDDGLTDLTIRDLPSLLRPGDILVANDTRVFPAQLQAMRGEARIGITLDRPRADGAWKALARNARRVHPGDTLTIEGGGELTARVVDKAPDGSIGLAFNLEGDALMAAFEQAGVLALPPYIHRPDGPTPDDASDYQTVFAQRQGAVAAPTAGLHFTPALLDTLDAMGVRRVTVTLHVGIGTFLPVRVDRVTDHRMHAERGEISAATAEAINAAHCAGGRVVAVGTTSLRLLESAALPDGTVEPFVGETALFILPGYRFKVVDRLVTNFHLPRSTLLMLVSAFRGRDRMLAAYRHAVEAGYRFHSYGDACLLERQPQT

SEQ ID NO: 62621 - protein, 341 aa, Acetobacterium bakii
  REGION 1..341: note = tr|A0A0L6U4X2|A0A0L6U4X2_9FIRM S-adenosylmethionine:tRNA ribosyltransferase-isomerase; OS = Acetobacterium bakii OX=52689 GN=queA PE=3 SV=1
MNKTDFHFDLPEDRIAQCPLEKRDDSRLMVLNRNKNTIEDRHFSDITDYLRPGDLLVMNNTKVLPGRLFGHREDTGGKVEILLLRHLSKTDWEIMVKPGKRARVGARIVFSADLKGEITGTREGGLRAISFEYTGIFEEIIHEIGLMPVPPYIHETLKDNNRYQTVYAKHEGSSAAPTAGLHFTPDLIEKIEAMGVETAEVTLHVGIGTFRPVKCDVIEDHHMHEEYYEISEATAKAIKRTKANGGRVIAVGTTSVRTLESNARLHGGEIKAYAGVTDIFIYPGYTWAVVDALITNFHLPESTLLMLVSAFYNREAVMGAYETAIDWGYRFFSFGDAMYIE

SEQ ID NO: 62622 - protein, 341 aa, Acetobacterium sp.
  REGION 1..341: note = tr|A0A2Z4IBB0|A0A2Z4IBB0_9FIRM S-adenosylmethionine:tRNA ribosyltransferase-isomerase; OS = Acetobacterium sp. KB-1 OX=2184575 GN=queA PE=3 SV=1
MDKTDFYYDLPDELIAQSPLEKRDNSRLMVINREKNTIADQNFFEVTNYLRPGDLLVMNNTKVLPGRLFGTREDTGGKVEILLLRHLSQKDWEIMVKPGKRARVGARIVFSPELKGEITGTTQGGLRIISFEYLGVFEEIIDEIGLMPVPPYIHETLKDNNRYQTVYAKHDGSSAAPTAGLHFTPDLLQKIEAMGVEIAEVTLHVGIGTFRPVKCDVIEEHHMHEEYYEVPEETAKAIKRTRERGGRVIAVGTTSVRTLESNAKLHDGVVTAYTGVTDIFIYPGYQWEVVDALITNFHLPESTLLMLVSAFYNREAIMKAYQSAIDWKYRFFSFGDAMLIE

SEQ ID NO: 62623 - protein, 341 aa, Acetobacterium sp.
  REGION 1..341: note = tr|A0A231NU66|A0A231NU66_9FIRM S-adenosylmethionine:tRNA ribosyltransferase-isomerase; OS = Acetobacterium sp. MES1 OX=1899015 GN=queA PE=3 SV=1
MNKTDFYYDLPDELIAQCPLEKRDNSRLMVINREKNTIEDHKFFEITNYLRPGDLLVMNNTKVLPGRLFGTREDTGGKVEILLLRHLSQKDWEIMVKPGKRARVGARIVFGPELKGEITGTTQGGLRIISFEYSGVFEEIIDEIGLMPVPPYIHETLTDNNRYQTVYAKREGSSAAPTAGLHFTPDLLSKIEAMGVEIAEVTLHVGIGTFRPVKCDVIEEHHMHEEYYEVPEETARAVKRTRERGGRVIAVGTTSVRTLESNAKLHDGVVTPYTGVTDIFIYPGYEWEVVDALITNFHLPESTLLMLVSAFYNREAIMKAYQTAIDWKYRFFSFGDALFIE

SEQ ID NO: 62624 - protein, 341 aa, Acetobacterium wieringae; identical to SEQ ID NO: 62623
  REGION 1..341: note = tr|A0A1F2PIU1|A0A1F2PIU1_9FIRM S-adenosylmethionine:tRNA ribosyltransferase-isomerase; OS = Acetobacterium wieringae OX=52694 GN=queA PE=3 SV=1

SEQ ID NO: 62625 - protein, 341 aa, Acetobacterium woodii
  REGION 1..341: note = tr|H6LEI3|H6LEI3_ACEWD S-adenosylmethionine:tRNA ribosyltransferase-isomerase OS=Acetobacterium woodii (strain ATCC 29683 / DSM 1030 / JCM 2381 / KCTC 1655 / WB1) OX =931626 GN=queA PE=3 SV=1
MNKADFYYDLPDELIAQCPLEKRDNSRLMVINRERQSIEDRNFYDIVDYLKPGDLMVMNNTKVLPGRLFGTREDTGGKVEILLLRHLSEKDWEIMVKPGKRAKVGARIVFSEALKGEITGTTEGGLRIISFEYQGVFEEIIDAIGLMPVPPYIHETLKDNNRYQTVYAKREGSAAAPTAGLHFTPDLIEKIENMGVEIVEVTLHVGIGTFRPVKCEVIEEHHMHEEYYEVSEKTAKAIMRTKANGGRVIAVGTTSVRTLESNAKLHDGVVRAYTGMTDIFIYPGYEWEIVDAMITNFHLPESTLLMLVAAFYNRDAIMAAYQTAIDWKYRFFSFGDALFIE

SEQ ID NO: 62626 - protein, 404 aa, unidentified
  source 1..404: note = Acetobacteroides hydrogenigenes
  REGION 1..404: note = tr|A0A4R2E8W3|A0A4R2E8W3_9BACT S-adenosylmethionine:tRNA ribosyltransferase-isomerase; OS = Acetobacteroides hydrogenigenes OX=979970 GN=queA PE=3; SV = 1
MTPHAQHIAIGDFNYDLPDERIAKYPLEERDLSKLLFFNGNNIDDKQFKELPTLLQDSDLLVFNNTKVIQARMEFFRSTGARVEIFCLEPADSSDYESVFQAKGSITWKCIVGNLKKWKESTLEKKLDLKGTAVTLTAQKLEKPNDNVLIMFSWDGDFTFSEILEASGTIPIPPYLNRDTEDIDLNRYQTVYSKHKGSVAAPTAGLHFTPSIIETLKSNGVDTAEVTLHVGAGTFKPVKTEDVADHEMHTEHFSVTLESLKKLRKHLGNVISVGTTSMRTLESLYWYGVRAIRSGNPNFEKPIEQWEPYQHTEVHSAEESMNALISYLERTEKNELHAATQIIIVSGYKVRMIKGLVTNFHQPQSTLLLLVSALVGERWKDIYNHALANNYRFLSYGDSSLLMR

SEQ ID NO: 62627 - protein, 349 aa, unidentified
  source 1..349: note = Acetobacteroides hydrogenigenes
  REGION 1..349: note = tr|A0A4R2EX61|A0A4R2EX61_9BACT S-adenosylmethionine:tRNA ribosyltransferase-isomerase; OS = Acetobacteroides hydrogenigenes OX=979970 GN=queA PE=3; SV = 1
MKLSQYKFDLPADLIAKFPTPNRDESRLMVLNRKEKTIEHKVFKDLVDYFDDGDVMVFNNTKVFPARLYGNKEKTGAQIEVFLLRELNREQRLWDVLVDPARKIRIGNKLYFGDDDLLVAEVIDNTTSRGRTLRFLFDGNYEEFKDVLYKLGETPLPKWVRKEVVPEDADRYQTIFAKHEGAVAAPTAGLHFSRELMKRMEIKGIDFAEITLHVGLGNFRTVDVEDLTKHKMDSEQIIIPEEAVGIINRAKDARKNVCAVGTTVLRTLESSVATNGHLKPYDGWTNKFIFPPYDFSVPTSMVTNFHLPLSTLLMMVSAFAGYDFLFEAYEIALKEKYRFGTYGDAMLIL

SEQ ID NO: 62628 - protein, 341 aa, Acetohalobium arabaticum
  REGION 1..341: note = tr|D9QVI6|D9QVI6_ACEAZ S-adenosylmethionine:tRNA ribosyltransferase-isomerase OS=Acetohalobium arabaticum (strain ATCC 49924 / DSM 5501 / Z-7288) OX=574087 GN=queA P E=3 SV=1
MKVSDFDYDLPEELIAQQPAEPRDESQLMVLDRKTGEIKERIFKKIIDLIEPGDTLVLNNTEVIPARLYGKKEKTGGKVEFLLLTETELDTWEVLVRPGRKVKIGTRVVFGDNDLIAEVKDRTDFGGRVVEFEYKGVFAEVLDKLGEMPLPPYITKELEERNQYQTVYAQKKGAAAAPTAGLHFTEEVLEQLEEKGVNIAAITLHVGLGTFRPVRADEVEEHDMHAEYYEVTDKAADTINQTKESGGRIIAVGTTVTRTLETVGNKEGYVEADKGWTDIFIYPGYEFKVIDGLLTNFHLPESTLIMMVTAFAGYDKVMAAYQEAIDKEYRFYSFGDAMLII

SEQ ID NO: 62629 - protein, 313 aa, unidentified
  source 1..313: note = Acetomicrobium hydrogeniformans
  REGION 1..313: note = tr|A0A0T5XCE7|A0A0T5XCE7_9BACT S-adenosylmethionine:tRNA ribosyltransferase-isomerase; OS = Acetomicrobium hydrogeniformans ATCC BAA-1850 OX=592015; GN = queA PE=3 SV=1
MVLNRRERCLEHACFYEIIKYLKRGDVLVFNDTKVIPARFLGQKPSGAKVEVLLVKPKDSAWEHWEAMVRPGKRLKSGDEVVIDDEASILVLDRVSGGMRLVRIKGKDTPYNIIEKKGKVPLPPYIRGNGRASKHYQTVYARVDGSVAAPTAGFHFTEELLDKLRSCGIELAYVTLHVGPGTFRPVKVDDVRKHEMHCEDYNISSDTAERINKAKKEGRRIIAVGTTVVRCLESSSDEEGFVLFGKGSTDLFIFPGYKFKVVDGMVTNFHLPKSTLLMLVSAFAGYDFVMEAYKVAIERRYRFYSFGDAMLII

SEQ ID NO: 62630 - protein, 354 aa, unidentified
  source 1..354: note = Acetomicrobium mobile
  REGION 1..354: note = tr|I4BVP9|I4BVP9_ACEMN S-adenosylmethionine:tRNA ribosyltransferase-isomerase OS=Acetomicrobium mobile (strain ATCC BAA-54 / DSM 13181 / JCM 12221 / NGA); OX = 891968 G N=queA PE=3 SV=1
MLQRHGCTTVDIYDISAYDYELPEELIAQYPVEPRDRSRLLVVDRKTGNLEHRVFYEIPDYLKAGDVLVLNDTKVIPARFLGRKNQNGGKAEVLLVKPLDDGFSCWEALVRPGKRLNAGDSVIIDSETSILILDRLDQGMRKVQIIGNDSPYNVIAKKGKVPLPPYVSENDKALKSYQTVYARVDGSVAAPTAGFHFTESLLKRLASAGIELVYITLHVGPGTFRPVKVKNIKEHAMHREDYHISSSAADSINRAKYEGRRIIAVGTTVVRCLESAAVDKDIISPGKGSTELFIFPGYEFKVIDGLITNFHLPKSTLLMLVSAMAGYDLTMKAYREAVKERYRFYSFGDAMLII

SEQ ID NO: 62631 - protein, 313 aa, unidentified
  source 1..313: note = Acetomicrobium thermoterrenum
  REGION 1..313: note = tr|A0A1H3DSC2|A0A1H3DSC2_9BACT S-adenosylmethionine:tRNA ribosyltransferase-isomerase; OS = Acetomicrobium thermoterrenum DSM 13490 OX=1120987; GN = queA PE=3 SV=1
MVLNRRERSLEHACFHEVIKYLKRGDVLVFNDTKVIPARFLGQKPTGAKVEVLLVKPKDSAWEYWEAMVRPGKRFKSGDEVVIDDETSISVLDRLSGGMRLVRIKGEDTPYNIIEKKGKVPLPPYIRGNGRASKHYQTVYARVDGSVAAPTAGFHFTEELLDKLRSCGIELAYVTLHVGPGTFRPVKVDDVRKHEMHCEDYHISSDTAERINKAKKEGRRIIAVGTTVVRCLESSSDEEGFVLFGKGNTDLFIFPGYKFKVVDGMVTNFHLPKSTLLMLVSAFAGYDFVMEAYKVAIERRYRFYSFGDAMLII

SEQ ID NO: 62632 - protein, 339 aa, Acetonema longum
  REGION 1..339: note = tr|F7NQ93|F7NQ93_9FIRM S-adenosylmethionine:tRNA ribosyltransferase-isomerase OS=Acetonema longum DSM 6540; OX = 1009370 GN=queA PE=3 SV=1
MLLSDFDYYLPQQLIAQTPIYPRNYSRLLVMDRQTGELTHRHFYDLFDYVTEGDTLVFNDTRVIPARLIGCKRDTGAKIEVFLLTQLNDREWEVLVKPGKKAKIGVKIDFGPEISCEVLRHTDFGGRVVRFDYEGVFFAILDRLGTTPLPPYIKEQLNDAERYQTVYAKEKGSAAAPTAGLHFTREMMEELQKRGVNTVFITLHVGLGTFRPVSETEITNHKMHREYYSIPGETARIINEAKERGKRVIAVGTTAIRTLETVGRENRIQAGTGWTGIFIYPGYRFQVIDGMITNFHLPQSTLLMLVSAFAGREHVLQAYEEAVRSEYRFFSFGDAMLIL

SEQ ID NO: 62633 - protein, 340 aa, Acholeplasma axanthum
  REGION 1..340: note = tr|A0A449BEA5|A0A449BEA5_ACHAX S-adenosylmethionine:tRNA ribosyltransferase-isomerase; OS = Acholeplasma axanthum OX=29552 GN=queA PE=3 SV=1
MKVEDFNFELPVELIAQSPMEKRDYSKLLVMDKKTGDIEHKHFYDIVDYLNEGDVLVLNETKVLPARLFGSKKDTNAHIEILLLKEISKDKWETLVKPAKRIKVGDEVTFGDKLIAKCIGYEGEGIRIFELIYNDILIEILEELGTMPLPPYITERLNDKDRYQTVYAKELGSAAAPTAGLHFTKEILEKIKVKGIKIIPVTLHVGLGTFRPVSVDAIEDHKMHSETYHITSDSAKALNEAVDNKKKIIAVGTTSIRTLESNYNNGFHAGVFDTSIFIYPGYKFKVVDELITNFHLPKSSLIMLVSALSSKENIMNAYHEAIKNKYRFFSFGDAMYIKMK

SEQ ID NO: 62634 - protein, 339 aa, Acholeplasma brassicae
  REGION 1..339: note = tr|U4KNK2|U4KNK2_9MOLU S-adenosylmethionine:tRNA ribosyltransferase-isomerase OS=Acholeplasma brassicae; OX = 61635 GN=queA PE=3 SV=1
MKTNDFDFNLPEELIAQHPLENRDTSRLLIVDRENQSFSHKHFYDILEELSSNDVLVINNTKVMPARLIGEKEDTNAVIELLLLEQKESLWDALVKPGRRVKVGTVISFGRGMLKAKCVGEKEDGIKTFQMIYEGIFYEILEQLGQMPLPPYIHEKLEDKDRYQTVYAKEIGSAAAPTAGLHFTKDLLDKIKEKQIEIIEVTLHVGLGTFRPTSTETIEDHHMHKESYLISEDAANRLNLAMQNKKRIVAVGTTSVRTLESNYDGTSFKPGLYETDIFIYPGYKFLTIGALITNFHLPKSTLVMLVSALSCRELILKAYKEAIKEKYRFFSFGDAMFIK

SEQ ID NO: 62635 - protein, 339 aa, Acholeplasma hippikon
  REGION 1..339: note = tr|A0A449BJI5|A0A449BJI5_9MOLU S-adenosylmethionine:tRNA ribosyltransferase-isomerase; OS = Acholeplasma hippikon OX=264636 GN=queA PE=3 SV=1
MKIELFDFNLPDELIAQHPMEKRDHSRLFVIDRKTDERRHKHFYDIVDELTENDVLVMNNTKVIPARLIGEKEDTKAGIEVLLLKEIKPGVWEALTKPAKRIKVGTVVSFGNGLLKMQCIEEREEGIRVYQAIYEGIFLEVLDKLGTMPLPPYITEKLTDQSRYQTVYAANPGSAAAPTAGLHFTKELLQKIKEKGVEIIEVTLHVGLGTFRPVQVDDTNQHHMHNESYEITEYAAERLNLAVKNKKNIVAVGTTSVRTLESNYHNGFTAGHFDTAIFIHPGYKFKAVGSIITNFHLPKSTLIMLISAFYDREKILDCYREAIEKNYRFFSFGDSMFLK

SEQ ID NO: 62636 - protein, 282 aa, Acholeplasma laidlawii
  REGION 1..282: note = tr|A9NF63|A9NF63_ACHLI S-adenosylmethionine:tRNA ribosyltransferase-isomerase OS=Acholeplasma laidlawii (strain PG-8A) OX=441768 GN=queA PE=3 SV=1
MNNTKVIPARLIGEKIDTHAVIEVLLLKELEKNTWEALTKPAKKIKIGTVVSFGDGALKMECIGIKDEGIRIFKAIYEGIFLEVLDALGTMPLPPYITEKLEDKSRYQTVYAKYAGSAAAPTAGLHFTKELLEKIKAKGVQVLEITLHVGLGTFRPVQVDDVLEHQMHYESYEINEETARLLNQYKKEGKRIIAVGTTTVRTLESNYNDGFHAGNYSTNIFIYPGYQFKIIGAIITNFHLPKSTLIMLISAFYNREKVLEVYEDAVKKNYRFFSFGDSMFIK

SEQ ID NO: 62637 - protein, 339 aa, Acholeplasma laidlawii
  REGION 1..339: note = tr|A0A553IJ02|A0A553IJ02_ACHLA S-adenosylmethionine:tRNA ribosyltransferase-isomerase; OS = Acholeplasma laidlawii OX=2148 GN=queA PE=3 SV=1
MKLELFDYDLPKSHIAQHPKDKRDHSKLLVVDREKQTTKDCLFYDILDELSSNDVLVMNNTKVIPARLIGEKIDTHAVIEVLLLKELEKNTWEALTKPAKKIKIGTVVSFGDGALKMECIGIKDEGIRIFKAIYEGIFLEVLDALGTMPLPPYITEKLEDKSRYQTVYAKYAGSAAAPTAGLHFTKELLEKIKAKGVQVLEITLHVGLGTFRPVQVDDVLEHQMHYESYEINEETARLLNQYKKEGKRIIAVGTTTVRTLESNYNDGFHAGNYSTNIFIYPGYQFKIIGAIITNFHLPKSTLIMLISAFYNREKVLEVYEDAVKKNYRFFSFGDSMFIK

SEQ ID NO: 62638 - protein, 339 aa, Acholeplasma oculi
  REGION 1..339: note = tr|A0A061ACJ7|A0A061ACJ7_9MOLU S-adenosylmethionine:tRNA ribosyltransferase-isomerase; OS = Acholeplasma oculi OX=35623 GN=queA PE=3 SV=1
MKIELFDYHLPKENIAQHPEDKRDHSKLLVIDRKNDLTHDKHFYDILDEFTENDVLVMNNTRVIPARLLGHREGLQGVMEVLLLNQTSKDEWEALTKPAKKVKLGTIIVFGDGSLKLKCVGIKDEGIRVYEAIYEGIFLEVLDKLGTMPLPPYITEQLSDKERYQTVYAKYPGSAAAPTAGLHFTKELLENIKKKGVEIVEVTLHVGLGTFRPVQVDDVLSHHMHSEAYEISKEAAERLNTYKKLGKRIIAVGTTSVRTLESNYKNGFHHGHYSTDIFIYPGYQFKVVDAIITNFHLPKSTLIMLVSAFYNREKVLEIYNEAVKKNYRFFSFGDSMFLK

SEQ ID NO: 62639 - protein, 339 aa, Acholeplasma palmae
  REGION 1..339: note = tr|U4KKF2|U4KKF2_ACHPJ S-adenosylmethionine:tRNA ribosyltransferase-isomerase OS=Acholeplasma palmae (strain ATCC 49389 / J233) OX=1318466 GN=queA PE=3 SV=1
MNTNDFDFNLPEHLIAQHPSEKRDNSRLMVLNRKDETIEHKHFYDIIDYLDENSCLVINDTKVLPARLLGIKKDTHAAIEVLLLKELEKDVWEALTKPAKRVKVGTLVTFGDGLLELECIDVKEDGIRHFKLHYKGILIEVLEKLGTMPLPPYIVEKLDDQSRYQTVYADVLGSSAAPTAGLHFTKELLEKIKQKGIEIIPVTLHVGLGTFRPVSVENVLEHHMHEETYILTEEVTEKLNQAVLNKKTIVAVGTTSVRTLESNFDGKFHAGKFDTKIFIYPGYKFKVVNQLITNFHLPKSTLMMLISAFATKEYIKKAYSNAIDHEYRFFSFGDSMFIK

SEQ ID NO: 62640 - protein, 337 aa, Acholeplasma sp.
  REGION 1..337: note = tr|R5HEV6|R5HEV6_9MOLU S-adenosylmethionine:tRNA ribosyltransferase-isomerase OS=Acholeplasma sp. CAG:878; OX = 1262686 GN=queA PE=3 SV=1
MKTSEFDYELPLELIAQTPLEKRDESRLLVLDKKTGSIKHEVFKNIINYLNEDDILVVNDTKVIPARLYGEKEETKALIEVLLLKEISNNKWECLTKPAKRIKVGTVVNFGDLLKMKCVEVKEEGIRIFELKNEGILYEILDKLGTMPLPPYIHEQLESKNRYQTVYAKNSGSAAAPTAGLHFTEELLEKIKEKGVKIVPITLHVGLGTFRPVNVEDVKSHHMHQEFYQMSSDTADILNNAKGRIISVGTTSTRTLETIKNLYGKFIECSGWTDIFIYPGYEFKAIDALITNFHLPKSTLMMLVSALAGKENIMNAYKIAVEEKYRFFSFGDSMFIK

SEQ ID NO: 62641 - protein, 371 aa, Acholeplasma sp.
  REGION 1..371: note = tr|A0A3A6NLD5|A0A3A6NLD5_9MOLU S-adenosylmethionine:tRNA ribosyltransferase-isomerase; OS = Acholeplasma sp. OX=33015 GN=queA PE=3 SV=1
MKLSDFDFHLPKDRIAQHPSDKRDHSRLLILDKTSKTMKHQMFYDIYDELSEDDVLVINDTKVIPARLLGIKEKTDATIEVLLLKETSPHHWEAMTKPARRVKIGTKIHFSDLLVAECVEEKEEGLRIFKMHYEGLFIEVLERLGSMPLPPYITEKLFEKDRYQTVYAKDPGSAAAPTAGLHFTKELLIKIQTKGVEIIPITLHVGLGTFKPVQTENILEHPMHEETYTISKESADRLNQAMFHGKKIVCVGTTSIRTLESNYQNGFHPGTFETSIFIYPGYIFKVVDKLITNFHLPKSTLIMLVSALAGREFILDAYKIAVDKGYRFFSFGDAMFIKWLKNEEKIIIMIVEENNDLSFDKYIYLLSHNRS

SEQ ID NO: 62642 - protein, 339 aa, unidentified
  source 1..339: note = Acholeplasmataceae bacterium
  REGION 1..339: note = tr|A0A357WFI7|A0A357WFI7_9MOLU S-adenosylmethionine:tRNA ribosyltransferase-isomerase; OS = Acholeplasmataceae bacterium OX=1898209 GN=queA PE=3; SV = 1
MKTNDFDFNLPEELIAQHPLENRDRSRLLIVDRENQSFSHKHFYDILEELSSNDVLVINNTKVMPARLIGEKEDTNAVIELLLLEQKESLWDALVKPGRRVKEGTVVSFGSGMLKAKCVGEKEDGIKTFQMLYEGIFYEILEQLGQMPLPPYIHEKLEDKGRYQTVYAKEIGSAAAPTAGLHFTKDLLEKIKDKQIEIIEVTLHVGLGTFRPTSTETIEDHHMHKESYLISEDAANRLNAAMNNKKRIVAVGTTSVRTLESNYDGTSFTPGLYETDIFIYPGYKFQTIGALITNFHLPKSTLVMLVSALSSRELILKAYEEAIEEKYRFFSFGDAMFIK

SEQ ID NO: 62643 - protein, 338 aa, unidentified
  source 1..338: note = Acholeplasmataceae bacterium
  REGION 1..338: note = tr|A0A353PJP9|A0A353PJP9_9MOLU S-adenosylmethionine:tRNA ribosyltransferase-isomerase; OS = Acholeplasmataceae bacterium OX=1898209 GN=queA PE=3; SV = 1
MKVSDFDFYLPKSAIAQHPSEKRDHSRLMIVDKVKQTISHHHFYDILDELTPDDVLVLNDTKVIPARLIGIKEDTDASIEVLLLKEVSKDTWEAMTKPAKRVKIGTKIHFTDILTAECVEILDEGLRIFKLHYEGLLIELLERLGSMPLPPYITEKLEEKDRYQTVYARLSGSAAAPTAGLHFTKELLEKIREKGIEIIPVTLHVGLGTFKPVSVENILDHHMHEETYTLSEESANRLNLAIKNKKRIVCVGTTSIRTIESNYSNGFHPGTFETKIFIYPGYQFKAVSRLITNFHLPKSTLIMLVSALAGTELIKKAYLEAVETNYRFFSFGDAMFIK

SEQ ID NO: 62644 - protein, 237 aa, unidentified
  source 1..237: note = Acholeplasmatales bacterium
  REGION 1..237: note = tr|A0A348NIM0|A0A348NIM0_9MOLU S-adenosylmethionine:tRNA ribosyltransferase-isomerase (Fragment) OS=Acholeplasmatales bacterium OX=2053494; GN = DCR44_03115 PE=3 SV=1
WFGDGLLKATCTAEGEDGIRQFTFAYEGLFLELLDRLGEMPLPPYIHEKLVDRDRYQTVYSKVVGSAAAPTAGLHFTPELLDRLRAKGVIVVSITLHVGLGTFRPVSVEDVTTHKMHSEFYRVSAAAAATLSAAKAEGRRIIAVGTTTTRTLESVMAKFGQFAEASGWTDIFIYPGFVYRAIDGLITNFHLPKSTLIMLVSAFASKAIILNAYAAAIAEKYRFFSFGDAMLLLPSKR

SEQ ID NO: 62645 - protein, 339 aa, unidentified
  source 1..339: note = Acholeplasmatales bacterium
  REGION 1..339: note = tr|A0A3D4MLA3|A0A3D4MLA3_9MOLU S-adenosylmethionine:tRNA ribosyltransferase-isomerase; OS = Acholeplasmatales bacterium OX=2053494 GN=queA PE=3 SV=1
MNTEEFDYYLPEELIAQTPLKDRSASRLMVLDRKTGQIEHRIFKDIVNYLDENDVLVLNDTKVIPARLFGVKEDTKAHIELLMLKEMGDDVWQTLCKPARRVKVGTIVTFGDGLLKAECIKEEEDGIRYFKMIYEGIFLEILDKLGEMPLPPYIHEHLEDKDRYQTVYAKNPGSAAAPTAGLHFTKEILDALKAKGVTICYITLHVGLGTFRPVSVTDVTKHKMHSEFYHISQEVADILNNAKKSGKRIVSVGTTSTRTLESAYDNGFKETSGWTDIFIYPGYEFKAIDAQITNFHLPKSTLIMLVSAFAGKENIMNAYNEAVKEKYRFFSFGDSMFIK

SEQ ID NO: 62646 - protein, 352 aa, Achromatium sp.
  REGION 1..352: note = tr|A0A0M1JFX1|A0A0M1JFX1_9GAMM S-adenosylmethionine:tRNA ribosyltransferase-isomerase; OS = Achromatium sp. WMS3 OX=1604836 GN=queA PE=3 SV=1
MSSNRSNHQLSDFDFRLPEKLIAQYPNSQRSNSRLLYLHNNKIQDRIFHDLPDILQPNDLLIINNTKVLKARLYGQKLTGAKVEILVERIAATNPYQALAQIRANRPCKPKTIITIENTINNAIDPIELKVINRINDLFQLQSPIPFAELMEQYGHIPLPPYVHRHADFRDIKRYQTIYAEQEGAIAAPTAGLHFDVALFSELKKRGIRIANITLHIGAGTFQPVRTEYLDEHIMHSEWCEVTEAVCQQIHATKSQGGRIVAVGTTSVRSLETAAADGILKSYTGETSLFIRPGYRFKVIDMLITNFHLPRSTLLMLVCAFGGKDAVLNAYRYAIMHNYRFFSYGDAMLLVK

SEQ ID NO: 62647 - protein, 352 aa, unidentified
  source 1..352: note = Achromobacter agilis
  REGION 1..352: note = tr|A0A446CY76|A0A446CY76_9BURK S-adenosylmethionine:tRNA ribosyltransferase-isomerase; OS = Achromobacter agilis OX=1353888 GN=queA PE=3 SV=1
MTQSLTVSDFNYDLPPELIAQTPAAERTGSRLLHLDRAGQLHDRQFADLATLVRPQDLLVFNDTRVIKARLNGHKITGGKVEVLVERITEPDRVLAHVRASKSPGAGMVLRLADAFEATVLGREGELFDIRFPGPVLDLLDAHGATPLPPYITHQADAGDDERYQTVYAREPGAVAAPTAGLHFDQPTLERLDAQGVARAFVTLHVGAGTFQPVRVDNLADHVMHAEWFTVPQATVDAIAAARRQGGRVIAVGTTSVRALESAAAQTEGRTAPGLPLAAAQGDTRLFITPGYRYRVIDALVTNFHLPQSTLLMLVSALAGVEPIRRAYAHAVAERYRFFSYGDAMFIESPAL

SEQ ID NO: 62648 - protein, 372 aa, unidentified
  source 1..372: note = Achromobacter aloeverae
  REGION 1..372: note = tr|A0A4Q1HDR8|A0A4Q1HDR8_9BURK S-adenosylmethionine:tRNA ribosyltransferase-isomerase; OS = Achromobacter aloeverae OX=1750518 GN=queA PE=3 SV=1
MSSPLTVADFDYALPPELIAQHPSPERGGSRLLHLDAQGRLHDRVFADLAGLLRPNDLLVFNDTRVIKARLTGHKASGGKVEVLIERIVEPDRALAHVRASKSPGPGTVLRLADCFDATVLGRAGALFDLRFPGDVLDLLQAHGATPLPPYITHAAGSEDDERYQTVYARAPGAVAAPTAGLHFDEAMLGRLEEAGIARAFVTLHVGAGTFKPVQVEKVSDHVMHAEWYTVPQATADAVARARAAGGRVIAVGTTSARALESAAAQASPLRATQGDTQLFITPGYRFQVLDGLITNFHLPQSTLLMMISALAGMEPIRRAYAHAVAERYRFFSYGDAMLIESPLPPASAAPASSTPPSPASPHSAASGPAAA

SEQ ID NO: 62649 - protein, 364 aa, unidentified
  source 1..364: note = Achromobacter arsenitoxydans
  REGION 1..364: note = tr|H0F7G6|H0F7G6_9BURK S-adenosylmethionine:tRNA ribosyltransferase-isomerase OS=Achromobacter arsenitoxydans SY8 OX=477184 GN=queA PE=3 SV=1
MQGPIPLIPDTRVTQSFTVSDFDYDLPPELIAQTPAAERTGSRLLHLDDASQLHDRQFADLTALLRPHDLLVFNDTRVIKARLAGHKITGGKIEVLVERITEPDRVLAHVRASKSPGAGMVLRLADAFEATVLGREGELFDIRFPGPVLELLDAHGATPLPPYITHAADAGDDDRYQTVYAREPGAVAAPTAGLHFDQPTLDRLSELGVARAFVTLHVGAGTFQPVRVDNLADHIMHAEWFTVPQATVDAIAAARAQGGRVIAVGTTSVRALESAAAQTEGRTAPGAPLAPAQGDTRLFITPGYQYRVVDALVTNFHLPQSTLLMLVSALAGVEPIRRAYAHAVAQRYRFFSYGDAMFIETPAP

SEQ ID NO: 62650 - protein, 352 aa, Achromobacter denitrificans
  REGION 1..352: note = tr|A0A3R9HPC9|A0A3R9HPC9_ACHDE S-adenosylmethionine:tRNA ribosyltransferase-isomerase; OS = Achromobacter denitrificans OX=32002 GN=queA PE=3 SV=1
MTQSLTVSDFNYELPPELIAQTPAAERTGSRLLHLDRAGALHDRQFADLAALLRPHDLLVFNDTRVIKARLTGHKITGGKVEVLVERITEPDRVLAHVRASKSPGAGMVLRLADAFEATVLGRDGELFDIRFPGPVLALLDAHGATPLPPYITHQADAGDDERYQTVYAREPGAVAAPTAGLHFDQPTLDRLDALGVTRAFVTLHVGAGTFQPVRVDNLADHVMHAEWFTVPQATVDAIAAARSRGGRVVAVGTTSVRALESAAAQTEGRTAPGLPLAAAQGDTRLFITPGYQYRVIDALVTNFHLPQSTLLMLVSALAGVEPIRRAYAHAVAERYRFFSYGDAMFIESPAP

SEQ ID NO: 62651 - protein, 352 aa, Achromobacter insolitus
  REGION 1..352: note = tr|A0A448JPW9|A0A448JPW9_9BURK S-adenosylmethionine:tRNA ribosyltransferase-isomerase; OS = Achromobacter insolitus OX=217204 GN=queA PE=3 SV=1
MTQSLTVSDFNYELPPELIAQAPAAERTGSRLLHLDGAGHLHDRQFADLASLLRPQDLLIFNDTRVIKARLNGHKITGGKIEVLVERITEPDRVLAHVRASKSPGPGMVLRLADAFDATVLGREGELFDIRFPGPVLELLDAHGATPLPPYITHEADTGDDERYQTVYAREPGAVAAPTAGLHFDQPTLDRLAAMGVERAFVTLHVGAGTFQPVRVDNLADHVMHAEWFTVPQATVDAIAVARSRGGRVIAVGTTSVRALESAAAQTEGRTAPGLPLASAQGDTRLFITPGYRYRVIDALVTNFHLPQSTLLMLVSALAGVEPIRRAYAHAVAERYRFFSYGDAMFIESPAP

SEQ ID NO: 62652 - protein, 352 aa, Achromobacter insolitus
  REGION 1..352: note = tr|A0A5C0YQ87|A0A5C0YQ87_9BURK S-adenosylmethionine:tRNA ribosyltransferase-isomerase; OS = Achromobacter insolitus OX=217204 GN=queA PE=3 SV=1
MTQSLTVSDFNYELPPELIAQAPAAERTGSRLLHLDGAGHLHDRQFADLASLLRPQDLLIFNDTRVIKARLNGHKITGGKIEVLVERITEPDRVLAHVRASKSPGPGMVLRLADAFDATVLGREGELFDIRFPGPVLELLDAHGATPLPPYITHEADTGDDERYQTVYAREPGAVAAPTAGLHFDQPTLDRLAAMGVERAFVTLHVGAGTFQPVRVDNLADHVMHAEWFTVPQATVDAIAAARSRGGRVIAVGTTSVRALESAAAQTEGRTASGLPLASAQGDTRLFITPGYRYRVIDALVTNFHLPQSTLLMLVSALAGVEPIRRAYAHAVAERYRFFSYGDAMFIESPAP

SEQ ID NO: 62653 - protein, 351 aa, unidentified
  source 1..351: note = Achromobacter insuavis
  REGION 1..351: note = tr|F7SVZ3|F7SVZ3_9BURK S-adenosylmethionine:tRNA ribosyltransferase-isomerase OS=Achromobacter insuavis AXX-A OX=1003200 GN=queA PE=3 SV=1
MQPLTVSDFDYELPPELIAQTPAAQRTGSRLLHLDGASQLHDRQFADLEGLLRPGDLLVFNDTRVIKARLAGHKITGGKVEVLVERITDTDRALAHVRASKSPGAGMVLRLADAFDATVLGREGELFDIRFPGPVLDLLDAHGATPLPPYITHAADAGDDDRYQTVYAREPGAVAAPTAGLHFDQPTLDRLAALGVERAFVTLHVGAGTFQPVRVDNLADHVMHAEWFTVPQATVDAIAAARARGGRVIAVGTTSVRALESAAAQTEGRTAPGLPLAAAQGDTRLFITPGYQYRVIDALVTNFHLPQSTLLMLVSALAGVEPIRRAYAHAVAQRYRFFSYGDAMFIESLAP

SEQ ID NO: 62654 - protein, 352 aa, Achromobacter marplatensis
  REGION 1..352: note = tr|A0A366FHR9|A0A366FHR9_9BURK S-adenosylmethionine:tRNA ribosyltransferase-isomerase; OS = Achromobacter marplatensis OX=470868 GN=queA PE=3 SV=1
MTQSLTVSDFNYELPPELIAQTPAAERTGSRLLHLDGASQLHDRQFADLAGLLRAGDLLIFNDTRVIKARLPGHKITGGKIEVLVERITETDRVLAHVRASKSPGPGMVLRLADAFDATVLGREGELFDIRFPGPVLDLLDAHGATPLPPYITHAADAGDDDRYQTVYAREPGAVAAPTAGLHFDQPTLDRLADLGVERAFVTLHVGAGTFQPVRVDNLADHIMHAEWFTVPQATVDAIAAARARGGRVIAVGTTSVRALESAAAQTEGRTAPGLPLAAAQGDTRLFITPGYQYRVVDALVTNFHLPQSTLLMLVSALAGVEPIRRAYAHAVAQRYRFFSYGDAMFIESPAS

SEQ ID NO: 62655 - protein, 352 aa, Achromobacter marplatensis
  REGION 1..352: note = tr|J4Z2B1|J4Z2B1_9BURK S-adenosylmethionine:tRNA ribosyltransferase-isomerase OS=Achromobacter marplatensis; OX = 470868 GN=queA PE=3 SV=1
MTQSLTVSDFNYELPPELIAQTPAAERTGSRLLHLDGASQLHDRQFADLAGLLRAGDLLIFNDTRVIKARLPGHKITGGKIEVLVERITETDRVLAHVRASKSPGPGMVLRLADAFDATVLGREGDLFDIRFPGPVLDLLDAHGATPLPPYITHAADAGDDDRYQTVYAREPGAVAAPTAGLHFDQPTLDRLADLGVERAFVTLHVGAGTFQPVRVDNLADHIMHAEWFTVPQATVDAIAAARARGGRVIAVGTTSVRALESAAAQTEGRTAPGVPLAAAQGDTRLFITPGYQYRVVDALVTNFHLPQSTLLMLVSALAGVEPIRRAYAHAVAQRYRFFSYGDAMFIESPAS

SEQ ID NO: 62656 - protein, 352 aa, Achromobacter piechaudii
  REGION 1..352: note = tr|D4XHX4|D4XHX4_9BURK S-adenosylmethionine:tRNA ribosyltransferase-isomerase OS=Achromobacter piechaudii ATCC 43553 OX=742159 GN=queA PE=3 SV=1
MTQSLTVSDFNYDLPPELIAQTPAATRTGSRLLHLDAASQLHDRQFADLIGLLRPDDLLVFNDTRVIKARLAGHKITGGKVEVLVERITESDRVLAHVRASKSPGPGMVLRLADAFEATVLGREGELFDIRFPGPVLDLLDAHGATPLPPYITHAADSGDDDRYQTVYAREPGAVAAPTAGLHFDQPTLDRLADLGIARAFVTLHVGAGTFQPVRVDNLADHVMHAEWFTVPQATVDAIAATRAKGGRVIAVGTTSVRALESAAAQTEGRTADGLPLAAAQGDTRLFITPGYRYRVVDALVTNFHLPQSTLLMLVSALAGVEPIRRAYAHAVAQRYRFFSYGDAMFIESLAP

SEQ ID NO: 62657 - protein, 352 aa, Achromobacter piechaudii
  REGION 1..352: note = tr|A0A0L6HSN4|A0A0L6HSN4_9BURK S-adenosylmethionine:tRNA ribosyltransferase-isomerase; OS = Achromobacter piechaudii OX=72556 GN=queA PE=3 SV=1
MTQSLTVSDFNYDLPPELIAQTPAATRTGSRLLHLDAASHLHDRQFADLIDLLRPDDLLVFNDTRVIKARLAGHKITGGKVEVLVERITESDRVLAHVRASKSPGPGMVLRLADAFEATVLGREGELFDIRFPGPVLDLLDAHGATPLPPYITHAADAGDDDRYQTVYAREPGAVAAPTAGLHFDQPTLDRLADRGIARAFVTLHVGAGTFQPVRVDNLADHVMHAEWFTVPQATVDAIAATRAKGGRVIAVGTTSVRALESAAAQTEGRTADGLPLAAAQGDTRLFITPGYRYRVVDALVTNFHLPQSTLLMLVSALAGVEPIRRAYAHAVAQRYRFFSYGDAMFIESLAP

SEQ ID NO: 62658 - protein, 352 aa, unidentified
  source 1..352: note = Achromobacter pulmonis
  REGION 1..352: note = tr|A0A2N8KGN0|A0A2N8KGN0_9BURK S-adenosylmethionine:tRNA ribosyltransferase-isomerase; OS = Achromobacter pulmonis OX=1389932 GN=queA PE=3 SV=1
MTQSLTVSDFDYDLPPELIAQTPAAERTGSRLLHLDRAGQLHDRQFADLAALLRPGDLLVFNDTRVIKARLTGHKITGGKVEVLVERITEPDRVLAHVRASKSPGAGMVLRLAEAFDATVLGRDGELFDIRFPGPVLELLDAHGATPLPPYITHQADAGDDERYQTVYAREPGAVAAPTAGLHFDQPTLDRLQALGVARAFVTLHVGAGTFQPVRVDNLADHVMHAEWYTVPQATVDAIAAARGRGGRVIAVGTTSVRALESAAAQTEGRAAPGLPLAPAQGDTRLFITPGYQYRVIDALVTNFHLPQSTLLMLVSALAGVEPIRRAYAHAVAERYRFFSYGDAMFIESPAP

SEQ ID NO: 62659 - protein, 351 aa, Achromobacter ruhlandii
  REGION 1..351: note = tr|A0A1D8IEM5|A0A1D8IEM5_9BURK S-adenosylmethionine:tRNA ribosyltransferase-isomerase; OS = Achromobacter ruhlandii OX=72557 GN=queA PE=3 SV=1
MQALTVSDFDYELPPELIAQTPAAQRTGSRLLHLYGASQLHDRQFADLEKLLRPGDLLVFNDTRVIKARLAGHKITGGKVEVLVERIIDTDRALAHVRASKSPGAGMVLRLADAFDATVLGREGELFDIRFPGPVLELLDAHGATPLPPYITHAADAGDDDRYQTVYAREPGAVAAPTAGLHFDQPTLDRLAALGVERAFVTLHVGAGTFQPVRVDNLADHVMHAEWFTVPQATVDAIAATRARGGRVIAVGTTSVRALESAAAQTEGRTAPGLPLAAAQGDTRLFITPGYQYRVIDALVTNFHLPQSTLLMLVSALAGVEPIRRAYAHAVAQRYRFFSYGDAMFIESPAP

SEQ ID NO: 62660 - protein, 351 aa, Achromobacter ruhlandii
  REGION 1..351: note = tr|A0A2M9GVJ5|A0A2M9GVJ5_9BURK S-adenosylmethionine:tRNA ribosyltransferase-isomerase; OS = Achromobacter ruhlandii OX=72557 GN=queA PE=3 SV=1
MQALTVSDFDYELPPELIAQTPAAQRTGSRLLHLDGASQLHDRQFADLEKLLRPGDLLVFNDTRVIKARLAGHKITGGKVEVLVERIIDTDRALAHVRASKSPGAGMVLRLADAFDATVLGREGELFDIRFPGPVLELLDAHGATPLPPYITHAADAGDDDRYQTVYAREPGAVAAPTAGLHFDQPILDRLAALGVERAFVTLHVGAGTFQPVRVDNLADHIMHAEWFTVPQATVDAIAAARARGGRVIAVGTTSVRALESAAAQTEGRTAPGLPLAAAQGDTRLFITPGYQYRVIDALVTNFHLPQSTLLMLVSALAGVEPIRRAYAHAVAQRYRFFSYGDAMFIESPAP

SEQ ID NO: 62661 - protein, 356 aa, Achromobacter sp.
  REGION 1..356: note = tr|A0A0M9J3R5|A0A0M9J3R5_9BURK S-adenosylmethionine:tRNA ribosyltransferase-isomerase; OS = Achromobacter sp. ATCC35328 OX=1806490 GN=queA PE=3 SV=1
MRVTDFSFELPESLIAHYPMPERSSCRLLSLDGPTGALTHGTFTDLLDKLNPGDLLVFNNTRVIPARLFGRKASGGKIEVLVERMLDDKRILAHIRASKAPKPGAELLLGDDESINATMTARHGALFEVEFNDERSVLDILNSIGHMPLPPYIDRPDEDADRELYQTVYSEKPGAVAAPTAGLHFDEPLLEKLRAKGVEMAFVTLHVGAGTFQPVRVDTIEDHIMHSEYAEVPQDVVDAVLAAKARGNRVIAVGTTSVRSLESAAQAAKNDLIEPFFDDTQIFIYPGFQYKVVDALVTNFHLPESTLIMLVSAFAGYQHTMNAYKAAVEEKYRFFSYGDAMFITYNPQAINERVGE

SEQ ID NO: 62662 - protein, 80 aa, Achromobacter sp.
  REGION 1..80: note = tr|A0A226YA01|A0A226YA01_9BURK S-adenosylmethionine:tRNA ribosyltransferase-isomerase (Fragment) OS=Achromobacter sp. KAs 3-5 OX=1915388; GN = BMR85_002450 PE=3 SV=1
PGVPLATAQGDTRLFITPGYAYRVVDALVTNFHLPQSTLLMLVSALAGVEPIRRAYAHAVAARYRFFSYGDAMFIETPAS

SEQ ID NO: 62663 - protein, 352 aa, Achromobacter spanius
  REGION 1..352: note = tr|A0A2S5GJM3|A0A2S5GJM3_9BURK S-adenosylmethionine:tRNA ribosyltransferase-isomerase; OS = Achromobacter spanius OX=217203 GN=queA PE=3 SV=1
MTQSLTVSDFNYELPPELIAQTPAAQRTGSRLLHLDAASQLHDRQFADLVGLLRPNDLLVFNDTRVIKARLAGHKITGGKIEVLVERITESDRVLAHVRASKSPGPGMVLRLADAFDATVLGREGELFDIRFPGPVLDLLDAHGATPLPPYITHAADAGDDDRYQTVYAREPGAVAAPTAGLHFDQPTLDRLADLGIARAFVTLHVGAGTFQPVRVDNLADHIMHAEWFTVPQATVDAIAATRAEGGRVIAVGTTSVRALESAAAQTEGRTAPGLPLAAAQGDTRLFITPGYRYRVVDALVTNFHLPQSTLLMLVSALAGVEPIRRAYAHAVAQRYRFFSYGDAMFIESPAP

SEQ ID NO: 62664 - protein, 358 aa, Achromobacter spanius
  REGION 1..358: note = tr|A0A2S0IGI9|A0A2S0IGI9_9BURK S-adenosylmethionine:tRNA ribosyltransferase-isomerase; OS = Achromobacter spanius OX=217203 GN=queA PE=3 SV=1
MAPDTRVTQSFTVSDFDYELPPELIAQTPAAERTGSRLLHLDAASQLHDRQFADLTSLLRPNDLLVFNDTRVIKARLPGHKITGGKIEVLVERITEPDRVLAHVRASKSPGAGMVLRLADAFEATVLGREGELFDIRFPGPVLDLLDAHGATPLPPYITHAADAGDDDRYQTVYAREPGAVAAPTAGLHFDQPTLERLAGLGVARAFVTLHVGAGTFQPVRVDNLADHVMHAEWFTVPQATVDAIAAARAQGGRVIAVGTTSVRALESAAAQTEGRTAPGVPLAPAQGDTRLFITPGYQYRVVDALVTNFHLPQSTLLMLVSALAGVEPIRRAYAHAVAARYRFFSYGDAMFIETPAS

SEQ ID NO: 62665 - protein, 352 aa, Achromobacter xylosoxidans
  REGION 1..352: note = tr|E3HRH0|E3HRH0_ACHXA S-adenosylmethionine:tRNA ribosyltransferase-isomerase OS=Achromobacter xylosoxidans (strain A8) OX=762376 GN=queA PE=3 SV=1
MTQSLTVADFNYELPPELIAQAPAAERTGSRLLHLDGAGQLHDRQFADLAALLRPQDLLIFNDTRVIKARLNGHKITGGKIEVLVERITEPDRVLAHVRASKSPGPGMVLRLADAFDATVLGREGELFDIRFPGPVLDLLDAHGATPLPPYITHEADTGDDERYQTVYAREPGAVAAPTAGLHFDQPTLDRLAAMGVERAFVTLHVGAGTFQPVRVDNLADHVMHAEWFTVPQATVDAIAAARSRGGRVIAVGTTSVRALESAAAQTEGRTAPGLPLAAAQGDTRLFITPGYRYRVIDALVTNFHLPQSTLLMLVSALAGVEPIRRAYAHAVAERYRFFSYGDAMFIESPAP

SEQ ID NO: 62666 - protein, 340 aa, Acidaminobacter hydrogenoformans
  REGION 1..340: note = tr|A0A1G5RX76|A0A1G5RX76_9FIRM S-adenosylmethionine:tRNA ribosyltransferase-isomerase; OS = Acidaminobacter hydrogenoformans DSM 2784 OX=1120920; GN = queA PE=3 SV=1
MKTSDFYFNLPEELIAQTPLKDRAASRLLCLDKETGQTHHESFRDLLKHLKVGDCLVINDTRVLPARLFGRRSSGAAVEFLLLKRVEGDVWQTLVKPGKKARPGDTFEFGDGSLRAVVEGLSEEGTRLVRFAYEGIFEEVLDRLGTMPLPPYIRETLEDSERYQTVYSNKYGSAAAPTAGLHFDDALLDAIEKKGIEIARITLHVGLGTFRPVKAESLQDHVMHAEYFEIGPEAVQKIQRAKQGGGRVIAVGTTSVRTLESAAGRHETLQACSGWTDIFIYPGYAFKVVDGLVTNFHLPESTLIMLVSALAGRDNVLAAYKEAVSQRYRFFSFGDAMLIL

SEQ ID NO: 62667 - protein, 343 aa, unidentified
  source 1..343: note = Acidaminococcaceae bacterium
  REGION 1..343: note = tr|A0A349RGE9|A0A349RGE9_9FIRM S-adenosylmethionine:tRNA ribosyltransferase-isomerase; OS = Acidaminococcaceae bacterium OX=2049052 GN=queA PE=3; SV = 1
MKVTDFDYELPKELIAQHPAEPRDHSRLLVVDKNTGKTEHRHFYDLPKYLHPGDLLVFNDTRVIPARLYGYKDTGAHVEVFLLTRLNNTDWEVLVRPGKKLQVGAHIKFAEELAGTIIDHTDFGGRIIRFEFDGVFEEILDRLGEVPLPPYITAELEDKERYQTVYNRDPGSAAAPTAGLHFTKELMQKIKDMGCEEVFVTLNVGLGTFRPVTEENIEDHPMHKEFYTVTPEAAAAINKAKAEGRRIVAVGTTAVRTLESAGADGEVKAGSSWTQIYIYPGFRWHIVDALVTNFHLPQSTLLMLVSSLSSRELMLQTYAEAVKEKYRFFSFGDAMFITTLDRM

SEQ ID NO: 62668 - protein, 343 aa, unidentified
  source 1..343: note = Acidaminococcaceae bacterium
  REGION 1..343: note = tr|A0A3D2QCJ0|A0A3D2QCJ0_9FIRM S-adenosylmethionine:tRNA ribosyltransferase-isomerase; OS = Acidaminococcaceae bacterium OX=2049052 GN=queA PE=3; SV = 1
MKVTDFDYDLPKELIAQHPMEPRDHSRLLVVDKDTGEMEHRHFYDLPEYLRPGDLLVFNDTRVIPARLHGFKDTGAHVEVFLLTRMNNTDWEVLVRPGKRLQVGAHIRFSDDLACTIIDHTDFGGRIARFEFDGVFEEILDRLGEVPLPPYITAELEDKERYQTVYNRAPGSAAAPTAGLHFTKELLQKIQAMGCEEVFVTLNVGLGTFRPVNEENIEDHLMHREFYSITPEAAAAINKARAEGRRIVAVGTTAVRTLEAAGTAGTIKAGGNWTNIFIYPGFQWHFVDALVTNFHLPQSTLLMLVSALSTREIMLHTYAEAVKEKYRFFSFGDAMFITKLHQD

SEQ ID NO: 62669 - protein, 338 aa, Acidaminococcus fermentans
  REGION 1..338: note = tr|A0A1I5J6C3|A0A1I5J6C3_ACIFE S-adenosylmethionine:tRNA ribosyltransferase-isomerase; OS = Acidaminococcus fermentans OX=905 GN=queA PE=3 SV=1
MEVTDFDYDLPQELIAQTPVEPRDSSRLLVMDKKTGELEHRHFFNLPEYLKPGDLLVFNDTRVIPARLHGFKTTGAHVEVFLLTRKNATDWEVLVKPGKKLQKGARIKFSDELSCEILDTTDFGGRIARFQYDGIFEEILDRLGETPLPPYIHEKLEDKERYQTVYNRERGSAAAPTAGLHFTRELLQKIRDMGVEEVFVTLHVGLGTFRPVNESRIEDHKMHREFYTVSQEAADAINKAKREGRRIIAVGTTSVRTLESAGASGEMKAGGNWTSIFIYPGYQFRFVDALVTNFHLPQSTLIMLVSALSTRENILHAYKVAVQEKYRFFSFGDAMFIH

SEQ ID NO: 62670 - protein, 338 aa, Acidaminococcus fermentans
  REGION 1..338: note = tr|D2RLD2|D2RLD2_ACIFV S-adenosylmethionine:tRNA ribosyltransferase-isomerase OS=Acidaminococcus fermentans (strain ATCC 25085 / DSM 20731 / VR4) OX=591001 GN=queA P; E = 3 SV=1
MEVTDFDYDLPQELIAQTPVEPRDSSRLLVMDKKTGELEHRHFFNLPEYLKPGDLLVFNDTRVIPARLHGFKTTGAHVEVFLLNRKNATDWEVLVKPGKKLQKGARIKFSDELSCEILDTTDFGGRIARFQYDGIFEEILDRLGETPLPPYIHEKLEDKERYQTVYNRERGSAAAPTAGLHFTRELLQKIRDMGVEEVFVTLHVGLGTFRPVNESRIEDHKMHREFYTVSQEAADAINKAKREGRRIIAVGTTSVRTLESAGASGEMKAGGNWTSIFIYPGYQFRFVDALVTNFHLPQSTLIMLVSALSTRENILHAYKVAVQEKYRFFSFGDAMFIH

SEQ ID NO: 62671 - protein, 339 aa, Acidaminococcus intestini
  REGION 1..339: note = tr|C0WEF3|C0WEF3_9FIRM S-adenosylmethionine:tRNA ribosyltransferase-isomerase OS=Acidaminococcus intestini; OX = 187327 GN=queA PE=3 SV=1
MEVTDFDYDLPKELIAQTPIEPRDASRLLVMDKKTGALEHRHFYNLPEYLRPGDVLVFNDTRVMPARLHGTKTTGAHVEVFLLTRKNNTDWEVLVKPGKKLQEGAEIIFSDELSCTILEKTDFGGRIARFRFDGVFEEILDRLGETPLPPYIHEKLKDKERYQTVYNRELGSAAAPTAGLHFTKELMQKIKEMGVEEVFVTLNVGLGTFRPVSEERIEDHEMHSEFYTVSPEAAAALNRAKKEGRRIIAVGTTSVRTLESAGASGTMVPGGNWTKIFIYPGFKFHFVDALVTNFHLPQSTLIMLVSALSSRENILHAYGEAVKEKYRFFSFGDAMFIKD

SEQ ID NO: 62672 - protein, 339 aa, Acidaminococcus intestini; identical to SEQ ID NO: 62671
  REGION 1..339: note = tr|G4Q516|G4Q516_ACIIR S-adenosylmethionine:tRNA ribosyltransferase-isomerase OS=Acidaminococcus intestini (strain RyC-MR95) OX=568816 GN=queA PE=3 SV=1

SEQ ID NO: 62673 - protein, 338 aa, Acidaminococcus sp.
  REGION 1..338: note = tr|R7LY37|R7LY37_9FIRM S-adenosylmethionine:tRNA ribosyltransferase-isomerase OS=Acidaminococcus sp. CAG:542 OX=1262687 GN=queA PE=3 SV=1
MEVTDFDYDLPQELIAQTPVEPRDSSRLLVMDKKTGELEHRHFFNLPEYLKPGDVLVFNDTRVIPARLHGFKTTGAHVEVFLLTRKNATDWEVLVKPGKKLQKGAQIKFSDELSCEILETTDFGGRIARFHYDGIFEEILDRLGETPLPPYIHEKLQDKERYQTVYNRERGSAAAPTAGLHFTKELLQKIRDMGVEEVFVTLHVGLGTFRPVNESRIEDHKMHREFYTVSQEAADAINKAKREGRRIIAVGTTSVRTLESAGASGEMKAGGNWTSIFIYPGYQFKFVDALVTNFHLPQSTLIMLVSALSTRENILHAYKVAVQEKYRFFSFGDAMFIH

SEQ ID NO: 62674 - protein, 338 aa, Acidaminococcus sp.
  REGION 1..338: note = tr|A0A415EKH0|A0A415EKH0_9FIRM S-adenosylmethionine:tRNA ribosyltransferase-isomerase; OS = Acidaminococcus sp. AM05-11 OX=2291997 GN=queA PE=3 SV=1
MDVTDFDYELPQELIAQHPVEPRDSSRLLVMDKKTGELEHRHFYNLPEYLKPGDVLVFNDTRVIPARLHGVKTTGAHVEVFLLTRKNATDWEVLVRPGKKLQKGAQINFSEELSCEILETTDFGGRIARFHYDGVFEEILDRLGETPLPPYIHEPLADKERYQTVYSRERGSAAAPTAGLHFTKELLQKIKDMGVEEVFVTLHVGLGTFRPVSESRIEDHKMHSEFYSVTPEAAEAINRAKREGRRVIAVGTTSVRTLESAGADGIVKPGGSWTSIFIYPGYQYKIVDALVTNFHLPQSTLIMLVAALTSREMILNAYKVAVQEKYRFFSFGDAMFIR

SEQ ID NO: 62675 - protein, 346 aa, unidentified
  source 1..346: note = Acidibacillus ferrooxidans
  REGION 1..346: note = tr|A0A101XP46|A0A101XP46_9BACL S-adenosylmethionine:tRNA ribosyltransferase-isomerase; OS = Acidibacillus ferrooxidans OX=1765683 GN=queA PE=3 SV=1
MKTEDFDYELPAHLIAQTPLEKRSDSRLLVLNRKEQTLAHARFYELGNYLRAGDLLIFNDSRVIPARLFGEKEGTGGAVELLLLRPLQNPVHFEALVKPGRRIRSGQRLRFGGGALTGTVIGEGQDGVRHIAFDTDAKMWDALLETLGEMPLPPYIHERLEDRTRYQTVYAREKGSAAAPTAGLHFTDELLSSLAAQGVERAFVTLHVGLGTFRPVQVEDVEKHTMHAEWFRIPAETKQAIERAKAEGRRVICVGTTSVRTIESAWRNYGTVAEDGSIQGFTDIFIHPNEPLRVTEGLITNFHLPQSTLMMLVAALIGRERLLETYRIAVEHEYRFFSFGDAMLIL

SEQ ID NO: 62676 - protein, 346 aa, unidentified
  source 1..346: note = Acidibacillus ferrooxidans
  REGION 1..346: note = tr|A0A162TDJ2|A0A162TDJ2_9BACL S-adenosylmethionine:tRNA ribosyltransferase-isomerase; OS = Acidibacillus ferrooxidans OX=1765683 GN=queA PE=3 SV=1
MKTEDFDYQLPAHLIAQTPLMKRSDSRLLVLDRKEQALAHARFYELGNYLRAGDLLIFNDSRVIPARLFGEKEGTGGVVEILLLRPLDNPVHFEVLAKPGRRIKTGQRIRFGDGALTGTIIGEGEDGIRHIAFDTEPRMWDTLLETLGEMPLPPYIHEHLEDRTRYQTVYAREKGSAAAPTAGLHFTEELLASLAAQGVERAFVTLHVGLGTFRPVQVEDVENHTMHAEWFRVPAETKRAIEKAKAEGRRVICVGTTSVRTIESAWRDYGTVAEDGSIQGFTDIFIHPNEPLRVTEGLITNFHLPQSTLMMLVAALIGRERLLEAYRVAVAMEYRFFSFGDAMLIL

SEQ ID NO: 62677 - protein, 346 aa, unidentified
  source 1..346: note = Acidibacillus sulfuroxidans
  REGION 1..346: note = tr|A0A2U3DB55|A0A2U3DB55_9BACL S-adenosylmethionine:tRNA ribosyltransferase-isomerase; OS = Acidibacillus sulfuroxidans OX=1765684 GN=queA PE=3 SV=1
MNTHEYKYNLPEELIAQSPEPHRSSSRLLVLDRKSDELKHAHFYDLPKFLRSGDLLIANDSRVIPARLFGRKRDTGAMIELLLLRPYAVAGQWEVLLRPAKRLAMGQQVVFGDGQLTATLIAHLPGDTRLVEFSASGTVFDALLDTLGQMPLPPYIKSKLEDPNRYQTVYAREKGSVAAPTAGLHFTPQLIQELEENGIQMHFITLHVGLGTFRPVQADRIEDHHMHEEWYRVPATVVDAIQAAKRSGRRVLCVGTTTVRALESAWRIRQQQTPSTEISGWTNIFIYPGFQFQVTDALITNFHLPESTLLMLVSALVGRERLLAAYEVAVQQKYRFYSFGDAMLIL

SEQ ID NO: 62678 - protein, 346 aa, Acidiferrobacter sp.
  REGION 1..346: note = tr|A0A2D7VN33|A0A2D7VN33_9GAMM S-adenosylmethionine:tRNA ribosyltransferase-isomerase; OS = Acidiferrobacter sp. OX=1872107 GN=queA PE=3 SV=1
MKYSIDFDYDLPEDLIAQAPLAKRTDSRLLVVPAAHHTLIDTVFSDLEQRLRHGDLLVVNETKVLPARLYGQKSRTGGKVELLLERLLDEGTALVQLRASKPPGPGTELTTKGGAPLRVLGRDGMFFVVACSGGERFEELLYREGEAPLPPYIERPVKDTDRDRYQTVYARHPGAVAAPTAGLHFDERLFEKLAAKGVQLAKLTLHVGAGTFSPMKSEILDQHEMHAEEIVVSDELVEAVCQTRDRGGRVVAVGTTVVRALESAAQRGALAPMRGPTKLFIRPGFRFSVVDMLITNFHLPRSTLLVLVSAFAGVDRIREAYKHAVDRRYRFFSYGDAMLLESRRVQ

SEQ ID NO: 62679 - protein, 348 aa, Acidiferrobacter sp.
  REGION 1..348: note = tr|A0A2Z3R8V0|A0A2Z3R8V0_9GAMM S-adenosylmethionine:tRNA ribosyltransferase-isomerase; OS = Acidiferrobacter sp. SPIII_3 OX=1281578 GN=queA PE=3; SV = 1
MTPDAFDYDLPPELIAQAPVSPRSASRLMVVGADDEGVADRRFADLGEYLRAGDLLVFNDTRVVPARFYGRRATGGRVELLLERFLDDDGRAHVALRASKSPRAGEVLVLEGGLYATVLRRAGELTEVVFRGADDLMGLIERVGHVPLPPYITRPDNEDDRTRYQTVYARFPGAVAAPTAGLHFDEALLARLAGQGVETAFVTLHVGAGTFRPVRPEALAQGRLHPERIIVSEACVAAIAAAQARGGRVVAVGTTTARALEAAAASGTLKPHVGDTDLFIRPGFQFRATEGLITNFHLPRSTLLMLVCAFAGADRVMDAYHRAVMMRYRFFSYGDAMLLWRARPRENK

SEQ ID NO: 62680 - protein, 347 aa, Acidiferrobacter thiooxydans
  REGION 1..347: note = tr|A0A368HLN0|A0A368HLN0_9GAMM S-adenosylmethionine:tRNA ribosyltransferase-isomerase; OS = Acidiferrobacter thiooxydans OX=163359 GN=queA PE=3 SV=1
MTSDLFDYDLPPELIAQTPVSPRSASRLMVVSADDGGLADRQFADLGEYLLAGDLLVFNDTRVVPARFYGRRPTGGRVELLLERFLDDGGRAHVALRASKSPRAGEVLTLEGGLYATVLGRTGELTEVMFSGADDLMGLIERVGHVPLPPYITRPDNENDRTRYQTVYARVPGAVAAPTAGLHFDEALLARLAGQGVETAFVTLHVGAGTFRPVRPETLAQGRLHPERIIVSEALVAAIAATKAHGGRVIAVGTTTARALEAAAASGTLRPYIGDTDLFIRPGFQFRVTEGLITNFHLPHSTLLMLVCAFAGADRVRDAYRRAVMMRYRFFSYGDAMLLWRAARENK

SEQ ID NO: 62681 - protein, 347 aa, Acidiferrobacter thiooxydans
  REGION 1..347: note = tr|A0A1C2FX33|A0A1C2FX33_9GAMM S-adenosylmethionine:tRNA ribosyltransferase-isomerase; OS = Acidiferrobacter thiooxydans OX=163359 GN=queA PE=3 SV=1
MTPDVFDYDLPPELIAQTPVSPRSASRLMVVSADDGGLADRQFADLGEYLRAGDLLVFNDTRVVPARFYGRRPTGGRVELLLERFLDDGGRAHVALRASKSPRAGEVLTLEGGLYATVLGRTGELTEVMFSGADDLMGLIERVGHVPLPPYITRPDNENDRTRYQTVYARVPGAVAAPTAGLHFDEALLARLAGQGVETAFVTLHVGAGTFRPVRPETLAQGRLHPERIIVSEALVAAIAATKAHGGRVIAVGTTTARALEAAAASGTLRPYIGDTDLFIRPGFQFRVTEGLITNFHLPHSTLLMLVCAFAGADRVRDAYRRAVMMRYRFFSYGDAMLLWRAAREYK

SEQ ID NO: 62682 - protein, 207 aa, unidentified
  source 1..207: note = Acidiferrobacteraceae bacterium
  REGION 1..207: note = tr|A0A2E9IGN3|A0A2E9IGN3_9GAMM S-adenosylmethionine:tRNA ribosyltransferase-isomerase; OS = Acidiferrobacteraceae bacterium OX=2024893; GN = CL393_10145 PE=3 SV=1
MEVLVNHGAVPLPPYIHREADDKDTERYQTVYASHPGAVAAPTAGLHFDQALLNQLENRGINIGRITLHVGAGTFLPVRSEEVADHRMHPEWMEVEASLCDEVRTTRERGGRVVAVGTTTVRALETASQGGGLSPFQGESEIFIFPGFAFSVVDALITNFHLPRTTLLMMISAFAGRQRVLEAYRHAVDNKFRFYSYGDAMYIERKQ

SEQ ID NO: 62683 - protein, 340 aa, unidentified
  source 1..340: note = Acidiferrobacteraceae bacterium
  REGION 1..340: note = tr|A0A2D6K818|A0A2D6K818_9GAMM S-adenosylmethionine:tRNA ribosyltransferase-isomerase; OS = Acidiferrobacteraceae bacterium OX=2024893 GN=queA PE=3; SV = 1
MKLSDFDYDLPPELIAQYPATSRSESRLLALTSSGALEERRFFSIGDFLRRGDLLVVNDTKVLPARLVARKPTGGRVEVLVERVLGDRELKVQMRASKTPKVGGELIFPGGESAHVIEREGDFYQLRFSQHSPMEVLVNHGAVPLPPYIHREADDQDTERYQTVYASHPGAVAAPTAGLHFDQALLNQLEDRGINIGRITLHVGAGTFLPVRNEEVADHRMHSEWMEVEASLCDEVRTTRERGGRVIAVGTTTVRALETASQGGGLSPFQGESEIFIFPGFAFSVVDALITNFHLPRTTLLMMISAFAGRQRVLEAYRHAVDNKFRFYSYGDAMYIERKQ

SEQ ID NO: 62684 - protein, 344 aa, unidentified
  source 1..344: note = Acidihalobacter ferrooxidans
  REGION 1..344: note = tr|A0A1P8ULC6|A0A1P8ULC6_9GAMM S-adenosylmethionine:tRNA ribosyltransferase-isomerase; OS = Acidihalobacter ferrooxidans OX=1765967 GN=queA PE=3; SV = 1
MRTSDFHFDLPAAQIAQHPLAERSASRLLVLDPVDDRLEDDQFSALVDRLSPDDLLVFNDTRVIPARLQGRKDTGGRIEVLIERLLDDRRVLAHVRASKSPRAGSALLLENALEVDVLERADELFVLAFRGETPVLELLERHGHVPLPPYIARGDEAGDRDRYQTVYANRPGAVAAPTAGLHFDAPLLERLRDRGVRMTHITLHVGAGTFQPVRVDDPDKHVMHAEYLEVSEEVCNAVAACRARAGRVIAVGTTSVRSLETAAQSGELQPYAGDTRLFIRPGYQYRVVDALVTNFHLPESTLLMLVAALGGYAPVMRAYRHAVKAGYRFYSYGDAMFVSRRHAF

SEQ ID NO: 62685 - protein, 341 aa, unidentified
  source 1..341: note = Acidihalobacter prosperus
  REGION 1..341: note = tr|A0A1D8K7E5|A0A1D8K7E5_9GAMM S-adenosylmethionine:tRNA ribosyltransferase-isomerase; OS = Acidihalobacter prosperus OX=160660 GN=queA PE=3 SV=1
MLTSDFYYELPEQLIAQVPLEPRSASRMLVLDAETGLSDRWIIALPDLLKPGDLLVFNDTRVIPARLNGHKATGGRVEVLIERIVGERRALAHIRASKSPASGSRLELEGGVSVEVQGREGELFILEFTGGASVLEQLEHHGHVPLPPYIQRGDTEADRERYQTIFANRAGAVAAPTAGLHFDEALMAGIRARGVETARVTLHVGAGTFQPVRVADPSQHHMHAEYAEVDETVCAAVTACRARGGRVVAVGTTCVRSLESAAASGELKPFAGDTQLFITPGYEFKVVDALLTNFHLPESTLLMLVCAFAGYAPVMAAYRHAVAESYRFFSYGDAMFLTRAS

SEQ ID NO: 62686 - protein, 341 aa, unidentified
  source 1..341: note = Acidihalobacter prosperus
  REGION 1..341: note = tr|A0A1D8IPC9|A0A1D8IPC9_9GAMM S-adenosylmethionine:tRNA ribosyltransferase-isomerase; OS = Acidihalobacter prosperus OX=160660 GN=queA PE=3 SV=1
MLTRDFHYDLPETLIAQAPQEPRSASRMLALDAGRGLVDSLVAELPTFLSAGDLLVFNDTRVIPARLFGQKETGGRVEVLVERITSECTALAHVRASKSPPAGSLLMLEGGLEVCVQGREGELFVLEFVGVPSVLDALERHGHMPLPPYIRRQDTDEDRARYQTIFAQRSGAVAAPTAGLHFDEGLLARIRERGVETARVTLHVGAGTFQPVRVSDPTQHHMHAEYAEVDEATCEAVRACRTRGGRVVAVGTTCVRSLESAAADGELRPFAGDTRLFITPGYRFHVVDALVTNFHLPESTLLMLVCAFAGYEPVMAAYRHAVSESYRFFSYGDAMFLTRTR

SEQ ID NO: 62687 - protein, 334 aa, unidentified
  source 1..334: note = Acidimicrobiaceae bacterium
  REGION 1..334: note = tr|A0A2D8GFZ8|A0A2D8GFZ8_9ACTN S-adenosylmethionine:tRNA ribosyltransferase-isomerase; OS = Acidimicrobiaceae bacterium OX=2024894 GN=queA PE=3 SV=1
MTDRPETLADIDYDLPAERIAQEPIEPRDAARLLVDRGDRVEHRHVRDLPDLLHPGDLVVVNDTKVLPARIPVRRSTGGAAEILLLEERDDGSWEALAKPSKKLKPGDVVTAEGLAVEMGEDLGDGRRAVRLDPGDADLHDRLAKVGLPPLPPYIENQIDDPSRYQTVYADRPLSAAAPTAGLHFTPAVLEALRANGITMATVELAVGLDTFRPVMVDRLDDHVMHSEWYRVPDETVAAVEAAERVVAIGTTVVRSLESWKATGEQSGRSSLFIRRPYAWKAVDVLLTNFHLPQSTLLCLVDGFVGPRWRTLYETAVAEDYRFLSFGDAMLLER

SEQ ID NO: 62688 - protein, 333 aa, unidentified
  source 1..333: note = Acidimicrobiaceae bacterium
  REGION 1..333: note = tr|A0A1Z9KKU1|A0A1Z9KKU1_9ACTN S-adenosylmethionine:tRNA ribosyltransferase-isomerase; OS = Acidimicrobiaceae bacterium TMED189 OX=1986618; GN = CBD49_02630 PE=3 SV=1
MNKTPTTDLEYDLKESSIAQVRYKNPGSSKLLIASTKQILTFEKYIKNLSNKSVFIFNKSSVQNVRIETNKLYTNGKVEFFILSLLSTNTAEVLIKTSSNLLPGDVVSTYIADVRIVEKNNSIFTVDFNTEVQLLIDEYGKVPLPPYIKDDVSKYEDYKNQFSDGGFSVASSTAGLHFSLRMISDLIKNNHKVFYVNLDINLGTFKQIDTSNVEDYKIHSEYYNMDESDFHEILSLKEDGYNIVTVGTTVLRTLETVAANSTYRGLTNLFITPGYKFKVSNTLITNFHAPRSSLLAIVQTIFGDNWKDLYSYAQSNHLKFLSFGDAVLFNIDE

SEQ ID NO: 62689 - protein, 339 aa, unidentified
  source 1..339: note = Acidimicrobiales bacterium
  REGION 1..339: note = tr|A0A2A5YUV0|A0A2A5YUV0_9ACTN S-adenosylmethionine:tRNA ribosyltransferase-isomerase; OS = Acidimicrobiales bacterium MED-G01 OX=1986263 GN=queA; PE = 3 SV=1
MKEFDYELPAGAVAQKPAVPRDSAKLLVDAGLGRPPQHLTVTDLPDQLGPGDVVVVNETSVIPARLPLRKVTGGAVEVLLLEPVADGWAALVKPSRRVKSGTELRSERDKDLQVMVGDEIGEDGQRKVVVIHAGVAVSNPNESQRLSRAGESPLPPYITSKGHSPERYQTVYARTPGSVAAPTAGLHLTNELLQEIRDRGARIKKIDLVVGLDTFRPVTVDDPADHVMHSESYKVDESTWEACQKARRVVAIGTTTVRALESAARGTLSGRTELFLRRGSKFEVVDVLMTNFHMPRSTLLMMIDAFIGDRWKELYREALDNNYRFLSFGDAMLLHRAPS

SEQ ID NO: 62690 - protein, 342 aa, unidentified
  source 1..342: note = Acidimicrobiales bacterium
  REGION 1..342: note = tr|A0A2W6CB75|A0A2W6CB75_9ACTN S-adenosylmethionine:tRNA ribosyltransferase-isomerase; OS = Acidimicrobiales bacterium OX=2201156 GN=queA PE=3 SV=1
MASFEYHLPPAAIAQEPAEPRTAARLLVATEPTGPVDHRRVADLPELLAPGDVVVVNDTRVLPARLRLRKATGARIEVLLLEPTGDGEWEGLVRPGRRAPPGTVLLHGTVAVAEVGPPAPMHGGCVWGRDGRRVVRILDPKLADEIGEVALPPYIDRPLADPERYQTVYARRPGSVAAPTAGLHLTTGLLDAVRAAGAQVASVDLAVGLDTFRPMTGDRPQDHVMHSEAYIVPVATWAACQAARRVLAVGTTTVRALESAAATGKLEGRTSLFIRGSHPWRVVDLLLTNFHLPRSSLLVMVEAFYGPGWRNLYDLALAEGYRFLSFGDAMLLARRANGQLER

SEQ ID NO: 62691 - protein, 349 aa, unidentified
  source 1..349: note = Acidimicrobiia bacterium
  REGION 1..349: note = tr|A0A431IE30|A0A431IE30_9ACTN S-adenosylmethionine:tRNA ribosyltransferase-isomerase; OS = Acidimicrobiia bacterium OX=2080302 GN=queA PE=3 SV=1
MRTDELDYDLPEGAIAQVPIEPRDAARLLVDRGPGRDPEHRTVAELPELVRPGDLLVLNDTRVLPARVPIERASGGTGEVLLLEERDDGWWEVLCRPARKLRPGDVVDATAGGLRFDIGPDVGDGRKLVRPHSDVPLLDALEHAGEMPLPPYIGERLTDAERYQTVFSARPASAAAPTAGLHLTDRLLAELTRRGVATAAVELVVGLDTFRPLSTERVEDHAIHTERYSVPAATWEAVERTRADGGRVVAVGTTSVRALESRATRGEPSGRTDLFITPGYRFAVVDAMVTNFHLPRTSLLALVQAFVGPRWRDLYATALADGYRFLSFGDAMLLARAEPPERADVGVVG

SEQ ID NO: 62692 - protein, 232 aa, unidentified
  source 1..232: note = Acidimicrobiia bacterium
  REGION 1..232: note = tr|A0A0R2QPI1|A0A0R2QPI1_9ACTN S-adenosylmethionine:tRNA ribosyltransferase-isomerase (Fragment) OS=Acidimicrobiia bacterium BACL6 MAG-120910-bin40 OX=1655586 GN=ABR 78_01375 PE=3 SV=1
YSSDDTEFLQVGERTKAGDTFLVRLLGGNVVDQLTKYGSMPLPPYITEVLQDAERYQTVFSHDQKSSAAPTAGLHFTPELLQRIRDVGAAICEVELVVGLDTFKPISVDNPLDHLIHTESYRVPLSTMTACNDAHSSGARVIAIGTTATRALESAAKFGQLEGRTNLFITPGFEWKVVDMMMTNFHMPRTTLLLMIQSFIGTRWRELYEEAVAREYRMLSFGDAMLLARRTD

SEQ ID NO: 62693 - protein, 349 aa, Acidimicrobium ferrooxidans
  REGION 1..349: note = tr|C7LYS4|C7LYS4_ACIFD S-adenosylmethionine:tRNA ribosyltransferase-isomerase OS=Acidimicrobium ferrooxidans (strain DSM 10331 / JCM 15462 / NBRC 103882 / ICP) OX=52 5909 GN=queA PE=3 SV=1
MARGRGAREAWQVPALSVDAFDYDLPAEAIAHDPIEPRRAARLLVARRGAPVAHARVADLARLLEPGDLVVVNESAVVPARLHLQRSSGGAVEVLLLRQLPDGTAEALVRPNRRVRAGERLLADGVEVVEVGGALEAVEGMTIRAVRVLDPERVASIGVAPLPPYLGRQDIPLERYQTVFARRPGSVAAPTAGLHLDEVVLADLAARGIDVVRIVLHVGLGTFWPVTAATLAGHPMHAESYEVDPATWARIEGAKRVVAIGTTVVRTLETVALTGELAGESRLLIAPGFRLQVVDTVLTNFHQPRSTLIALVAAMVGDRWRELYSVALAEGYRFLSFGDAMLVDVEGRR

SEQ ID NO: 62694 - protein, 338 aa, Acidimicrobium sp.
  REGION 1..338: note = tr|A0A0R2QG09|A0A0R2QG09_9ACTN S-adenosylmethionine:tRNA ribosyltransferase-isomerase; OS = Acidimicrobium sp. BACL27 MAG-120823-bin4 OX=1655564; GN = queA PE=3 SV=1
MQIKDFDYNLPTELIAQTPVEPRDSARLLVDQGSGLALHRQVRDFIDFCRPGDVVVVNDTKVIPARLRLVRESGGAAEVLLLEQDSTAPFKWEALIRPAKRLKLGETLFASDNSEVVRIGDRTKAGDTFSVELVGEMCDDVEALLKKYGEMPLPPYIETRLEQADRYQTVYANRPASAAAPTAGLHFTPKLLTDLKSAGIKLLTVDLTVGLDTFAPVTSENPLEHPMHSEHYRVTQETLEECARAERVIAVGTTATRALESAATSGVLSGRTKMFISRGYEFKVVDLLLTNFHMPRTTLLMMIEAFVGPRWRDLYSVAIAERYRMLSFGDAMLLNRHL

SEQ ID NO: 62695 - protein, 347 aa, Acidimicrobium sp.
  REGION 1..347: note = tr|A0A0R2PGH1|A0A0R2PGH1_9ACTN S-adenosylmethionine:tRNA ribosyltransferase-isomerase; OS = Acidimicrobium sp. BACL17 MAG-120924-bin0 OX=1655565; GN = queA PE=3 SV=1
MCVDVNDIDYELPERLIAQTPCEPRDAARLLVNAPSGMIHRHVSDIDSLFHEGDVMVVNHTRVLPARLKLRRQTGGAVEVLLLEEKQDHAFRWEALVKPGGKLSARELLVDVAGGAVLHVVQRSEAGDTFYVEFVTPDHKSMMDRIIELGEMPLPPYITTRLDDANRYQTVFAHNQKSSAAPTAGLHFTNELLERIRSRGVRICEVELVVGLDTFKPISVDNPLDHQIHTESYRVPAETLTACQEAHSHGKRVIAIGTTATRALESATTFNSLSGRTNLFITPGYQWKIVDLMVTNFHMPRTTLLLMIEAFIGKQWREVYAEAIAREYRMLSFGDAMLLYRDTNVSG

SEQ ID NO: 62696 - protein, 345 aa, Acidiphilium cryptum
  REGION 1..345: note = sp|A5FY68|QUEA_ACICJ S-adenosylmethionine:tRNA ribosyltransferase-isomerase OS=Acidiphilium cryptum (strain JF-5) OX=349163 GN=queA PE=3 SV=1
MNLADFDYHLPPERIAAEPARPRHAARLLHVRGDGLDDRTILDLPALLAPGDLLVVNDTRVIPAQLTGRRGDARIGITLDRPLADGTWRVLLRNARRARPGETIAIDGAGGIAAEVIDRAPDGSATLRFDCDAETFRAMLDRAASLALPPYIPRPAGISEQDRQDYQTMFAAEEGAVAAPTAGLHFTETVLAALAARGVGLATVTLHVGAGTFLPVREDQLERHKLHAERGLIGPETAALVNATRARGGRIVAVGTTSLRVLETAAGDDGTLAPWHGETELFITPGYRFKLVDRLMTNFHLPKSTLLMLVAAFAGVERMRAAYAHAIARGYRFYSYGDASLLERA

SEQ ID NO: 62697 - protein, 345 aa, Acidiphilium multivorum; identical to SEQ ID NO: 62696
  REGION 1..345: note = tr|F0IY73|F0IY73_ACIMA S-adenosylmethionine:tRNA ribosyltransferase-isomerase OS=Acidiphilium multivorum (strain DSM 11245 / JCM 8867 / NBRC 100883 / AIU301); OX = 9265 70 GN=queA PE=3 SV=1

SEQ ID NO: 62698 - protein, 345 aa, Acidiphilium rubrum
  REGION 1..345: note = tr|A0A1N6RP62|A0A1N6RP62_ACIRU S-adenosylmethionine:tRNA ribosyltransferase-isomerase; OS = Acidiphilium rubrum OX=526 GN=queA PE=3 SV=1
MNLADFDYALPAERIAAEPARPRDAARLLHVTQAELHDCRIADLPELLRRGDCLVVNDTRVIPAQLTGRRGDAVIGITLDRPMDDGTWRVLLRNARRARPGEIITIDRGEGLTATVVSRADDGAARLRFNAEGDAFRTALDAAGALALPPYIPRDASVTTQDQADYQTMFAAHEGAVAAPTAGLHFTPALLEALAAKGITTARVTLHVGAGTFLPVRTETLADHRMHAERCIITAATAATINAARTAGGRIVAVGTTSLRVLETAAAADGTIMPWSGETDLFILPGYRFRAVDRLLTNFHLPRSTLLMLVAAFAGHDRIKTAYQHAIAQHYRFYSYGDACLLEPA

SEQ ID NO: 62699 - protein, 63 aa, Acidiphilium sp.
  REGION 1..63: note = tr|F7S8Y7|F7S8Y7_9PROT S-adenosylmethionine:tRNA ribosyltransferase-isomerase (Fragment) OS=Acidiphilium sp. PM OX=1043206 GN=APM_2788 PE=3 SV=1
MNLADFDYHLPPERIAAEPARPRHAARLLHVRGDGLDDRTILDLPALLAPGDLLVVNDTRVIP

SEQ ID NO: 62700 - protein, 345 aa, Acidiphilium sp.
  REGION 1..345: note = tr|A0A066PV07|A0A066PV07_9PROT S-adenosylmethionine:tRNA ribosyltransferase-isomerase; OS = Acidiphilium sp. JA12-A1 OX=1464546 GN=queA PE=3 SV=1
MNLADFDYHLPPERIAAEPARPRHAARLLHVRGDGLDDRTILDLPALLAPGDLLVVNDTRVIPAQLTGRRGDARIGITLDRPLADGTWRVLLRNARRARPGETIAIDGAGGIAAEVIDRAPDGSATLRFDCDAETFRAMLDRAASLALPPYIPRPAGISEQDRQDYQTMFAAEEGAVAAPTAGLHFTETVLAALAARGVGLATVTLHVGAGTFLPVREDQLERHKLHAERGLIGPETAALVNATRARGGRIVAVGTTSLRVLETAAAEDGTLAPWHGETELFITPGYRFRLVDRLMTNFHLPKSTLLMLVAAFAGLERMRAAYAHAIARGYRFYSYGDASLLERA

SEQ ID NO: 62701 - protein, 351 aa, unidentified
  source 1..351: note = Acidipila dinghuensis
  REGION 1..351: note = tr|A0A4Q1SEC3|A0A4Q1SEC3_9BACT S-adenosylmethionine:tRNA ribosyltransferase-isomerase; OS = Acidipila dinghuensis OX=1560006 GN=queA PE=3 SV=1
MLVTDFDYELPEELIAQQPPSERSGARMLLVDRNTGHWQDSAFQHLPEQLREGDLLVLNNSRVIPARLYGRRVDTASGIEHTGRIEVFLTTQRSEWEWEVLVKPGRKVQPGTQLVFGAGDLHAEVLDRGEFGERTLRFQPVPDFFAALEALGRIPLPPYIHRGEKDADSDRERYQTVFAEDRGSVAAPTAGLHFTPEILDRIRQRGVEVAYVTLHVGLGTFQPVRVERLEDIHLHTERYTLPEATATALNAARREGRRIVAAGTTTVRTLEHCALLGEEFTPHAGSTNIFISPGFRFRAVNALLTNFHLPQSTLLMLVSAFAGQDHVLAAYRHAVAERYRFFSYGDCMFLS

SEQ ID NO: 62702 - protein, 362 aa, unidentified
  source 1..362: note = Acidipila rosea
  REGION 1..362: note = tr|A0A4R1L816|A0A4R1L816_9BACT S-adenosylmethionine:tRNA ribosyltransferase-isomerase; OS = Acidipila rosea OX=768535 GN=queA PE=3 SV=1
MQKAESYFLWNDPMLVTDFDYELPEELIAQQPPQQRGGARMLVVGRESGALQDSMFAQFPGLLSDGDLLVLNNSRVIPARLFATREGSGAMQTPTGRIEVLLTEQLDEWEWKALVRPGRKVQIGEVLRFADAFSAEVVAHGEFGERTLRFRPVANFYAQLEMLGHMPLPPYIHRQDEMGDRERYQTVYAQTPGSVAAPTAGLHFTPETLARLRARGVRIAYVTLHVGLGTFQPVRVEKLEDIRLHRERYTLPEETAVEINAALREGRRVIAAGTTTVRTLEHCARIGPGGLQPHSGATEIFISPGFKFQVVQGLLTNFHLPQSTLLMLVSAFAGRERVLAAYRHAVKQRYHFFSYGDCMFVS

SEQ ID NO: 62703 - protein, 353 aa, unidentified
  source 1..353: note = Acidipila sp.
  REGION 1..353: note = tr|A0A372IQS4|A0A372IQS4_9BACT S-adenosylmethionine:tRNA ribosyltransferase-isomerase; OS = Acidipila sp. 4G-K13 OX=2303751 GN=queA PE=3 SV=1
MLVSDFDFHLPEELIAQQPPEDRAGARMLRLDRATGAWQDGWFREFPDLLREGDLLVLNDSRVIPARLFAHRAGLHTQAGHQTSGRIQVLLTEQVSEWEWRVLARPGRKVLTGERLTFGENELQAEVTAHGEFGERTLRFEPTPDFFAILDRLGHMPLPPYIHRQDRAQDRERYQTVYARERGSVAAPTAGLHFTPEILERLRGRGVEVAYVTLHVGLGTFQPVRVETVEEIHLHAERYTLSEATAAAINAARRDGRRVIAAGTTTVRTLEHCAATMESGELAAHSGVTSIFISPGYKFRIVGGLLTNFHLPQSTLLMLVSAFGGREHVMAAYGHAVEAGYRFFSYGDCMFVS

SEQ ID NO: 62704 - protein, 370 aa, unidentified
  source 1..370: note = Acidipila sp.
  REGION 1..370: note = tr|A0A3P0XIA7|A0A3P0XIA7_9BACT S-adenosylmethionine:tRNA ribosyltransferase-isomerase; OS = Acidipila sp. EB88 OX=2305226 GN=queA PE=3 SV=1
MRLDTEQPALVSDYDFALPPELIAQAPPAERSGARMLTLDRMTGSVADRQFTDLPQQLAPGDLLVLNNSRVLPARLFGRRLKGHAQSGQQPARIEVLLIAEQGPGEWTALVRPGRKVLRGERLVFPFEGAPVLEAEVLEHGEFGERVLRFAVSPGAGSDFYAALDTLGQMPLPPYIHREQSVTTAADRERYQTVYAAERGSVAAPTAGLHFTPEVLEQIRARGVEIVYVTLHVGLGTFQPVRVDRLDAIKLHSERYTLPAPTAQAINRTKQDGRRVVAAGTTTVRTLEHCARVADGAPLAAHAGATDIFLSPGHRFQIVDALLTNFHLPASTLLMLVCAFAGRKPVLAAYRHAVAERYRFFSYGDCMFLS

SEQ ID NO: 62705 - protein, 350 aa, unidentified
  source 1..350: note = Acidisarcina polymorpha
  REGION 1..350: note = tr|A0A2Z5FX32|A0A2Z5FX32_9BACT S-adenosylmethionine:tRNA ribosyltransferase-isomerase; OS = Acidisarcina polymorpha OX=2211140 GN=queA PE=3 SV=1
MLVSDFNFELPEELIAQQPPAERSGARMLVLDRQSGRWRDAWFSDFPDLLHPGDVLVLNDSRVIPARLLGHKASVAQSGKIEALLTQQVNEWEWTALVRPGRKVLLGDTLVFASDNGTSLTAEVVDRGEFGERLLRFHPVPNFFSQLEKVGHMPLPPYIRRQDTSGDRQRYQTVFAERPGSAAAPTAGLHFTPEVLERIRARGVTVVFITLHVGLGTFQPVRVDRVEDIRLHAEPYTLPAQTADAINAALAENRRVIAAGTTTVRTLEHCALAAKGRPLAAHAGTTSIFISPGYEFRIVSGLLTNFHLPQSTLLMLVSAFAGREAALAAYRHAIAERYRFFSYGDCMFLS

SEQ ID NO: 62706 - protein, 344 aa, Acidisphaera rubrifaciens
  REGION 1..344: note = tr|A0A0D6P7D1|A0A0D6P7D1_9PROT S-adenosylmethionine:tRNA ribosyltransferase-isomerase; OS = Acidisphaera rubrifaciens HS-AP3 OX=1231350 GN=queA; PE = 3 SV=1
MKAADFDYALPPDRIAQHPARPRDAARLLHVAGDGLRDRTVRDLPSLLRPNDVLVVNDTRVIPAQLVARRGAARIGITLDRPLADGTWHALARNARRLRVGDVLSFDGDATLAAEVAARDPDGGVALRFHTDDLAASLRRAGALALPPYIDRPAGPTEDDGSDYQTVYAATEGAVAAPTAGLHFTPALLDALAARGIGRVHVTLHVGAGTFLPMRGEEVRDHRMHAERGMIGAAAVAAINEARAAGGRVVAVGTTTLRLLETAAADGTLRPWAGETDLFILPGFRFQAVDMLLTNFHLPRSTLFMLVCAFAGEARMRGAYSHAIAAGYRFYSYGDASLLERACD

SEQ ID NO: 62707 - protein, 342 aa, unidentified
  source 1..342: note = Acidithiobacillales bacterium
  REGION 1..342: note = tr|A0A0S8L5J0|A0A0S8L5J0_9PROT S-adenosylmethionine:tRNA ribosyltransferase-isomerase; OS = Acidithiobacillales bacterium SM1_46 OX=1703384 GN=queA; PE = 3 SV=1
MLKSDFAYSLPPDLIAQKPLTFRSASRLLALDGPTGAIRDLRFTDLPGLLHAGDLMVFNDTRVIPARLLGTKDTGGQVEVLIERVLDARRALVLMRASKAPRAGQRLQLEGTVTARVLARRGEFYELEFESDRPVLALLDAIGHMPLPPYIARADVAADRERYQTIYAREAGAVAAPTAGLHFDAATLARLDALGVEQAFITLHVGAGTFQPLRVEEVSAHRMHREWVGVSSVTAERVNAARREGRRVVAVGTTVVRALEAAASEGEVQPFNGETDIFIYPGYRFRVVDALVTNFHLPESTLLMLVCALAGREQVLRAYQHAVTKRYRFFSYGDAMFVTRAA

SEQ ID NO: 62708 - protein, 342 aa, unidentified
  source 1..342: note = Acidithiobacillales bacterium
  REGION 1..342: note = tr|A0A0S8GKR5|A0A0S8GKR5_9PROT S-adenosylmethionine:tRNA ribosyltransferase-isomerase; OS = Acidithiobacillales bacterium SM23_46 OX=1703385; GN = queA PE=3 SV=1
MLKSDFAYSLPPDLIAQKPLTFRSASRLLALDGPTGAIRDLRFTDLPGLLRAGDLMVFNDTRVIPARLLGTKDTGGQVEVLIERVLDARRALVLMRASKAPRAGQRLQLEGTVTARVLARRGEFYELEFESDRPVLALLDAIGHMPLPPYIARADVAADRERYQTIYAREAGAVAAPTAGLHFDAATLARLDALGVEQAFITLHVGAGTFQPLRVEEVSAHRMHREWVGVSSVTAERVNAARREGRRVVAVGTTVVRALEAAASEGEVQPFNGETDIFIYPGYRFRVVDALVTNFHLPESTLLMLVCALAGREQVLRAYQHAVTKRYRFFSYGDAMFVTRAA

SEQ ID NO: 62709 - protein, 346 aa, Acidithiobacillus caldus
  REGION 1..346: note = tr|F9ZS02|F9ZS02_ACICS S-adenosylmethionine:tRNA ribosyltransferase-isomerase OS=Acidithiobacillus caldus (strain SM-1) OX=990288 GN=queA PE=3 SV=1
MKKSDFYYHLPPERIAQEPLPERSASRLLVLDPRTGHLCDSSVRELPQFLRAGDLLVFNDTRVLPARLHARKPTGGAVELLLERLLAPDRARFLARSSKTLKPGARITLAGGEAVELLAREGRMVELGLPGGGNWLDILEAQGEVPLPPYIDRAPAAADRERYQTVYARNPGAVAAPTAGLHFDADLLARLDAAGMERAHITLHVGAGTFLPVEAEEVEEHRMHSERVTVPAATVEQVRRAQARGGRIFAIGTTACRALEGAARSGSLQAFAGETDIFLYPGRPFRVIDGLFTNFHLPESTLLMLVSALAGRERILAAYAHAVAQQYRFFSYGDAMLILPGGVGRA

SEQ ID NO: 62710 - protein, 346 aa, Acidithiobacillus caldus; identical to SEQ ID NO: 62709
  REGION 1..346: note = tr|A0A060A133|A0A060A133_ACICK S-adenosylmethionine:tRNA ribosyltransferase-isomerase; OS = Acidithiobacillus caldus (strain ATCC 51756 / DSM 8584 / KU) OX=637389 GN=qu eA PE=3 SV=1

SEQ ID NO: 62711 - protein, 345 aa, unidentified
  source 1..345: note = Acidithiobacillus ferridurans
  REGION 1..345: note = tr|A0A2Z6IFB3|A0A2Z6IFB3_9PROT S-adenosylmethionine:tRNA ribosyltransferase-isomerase; OS = Acidithiobacillus ferridurans OX=1232575 GN=queA PE=3; SV = 1
MHKKDFHYELPDALIAQAPLSERSAARMLIVDGHQGTWEDARVRDLPGLLRPGDLLVLNDTRVLPARLQARKATGGAVELLLDRLLDARDGWFLAKSSKALRPGMSIHLPGGAVATVEEKDGMDVRLILPADVAWLPILEAEGSMPLPPYIRRAAEASDRERYQTVYAARPGAVAAPTAGLHFDTELLDALAARGVERTYVTLHVGAGTFLPVRSEDITEHPMHAETMEVSATTVAAVAAARARGGRVIAVGTTACRALETAAQDGTLRPFTGETRLFLYPGKTFQVTDGLLTNFHLPESTLLMLVCAFAGMECMLAAYRHAVAEGYRFFSYGDAMLISPQAGRR

SEQ ID NO: 62712 - protein, 345 aa, Acidithiobacillus ferrivorans
  REGION 1..345: note = tr|A0A257TBD5|A0A257TBD5_9PROT S-adenosylmethionine:tRNA ribosyltransferase-isomerase; OS = Acidithiobacillus ferrivorans OX=160808 GN=queA PE=3; SV = 1
MQKSDFYYELPDALIAQVPLAERGAARMLIVDGRQGSWEDARIRDLPNLLQPGDLLVLNDTRVLPARLQACKATGGTVELLLDRLLDVQEGWFLAKSSKALRPGMAIHLSGGAVAMVEEKDGMEVRLRLSADAQWLPILEAEGSVPLPPYIRRAPEACDRERYQTIYAAHPGAVAAPTAGLHFDAQLLDALAARGIERTFVTLHVGAGTFLPVRSDDITEHPMHAETMEVSAATVAAVAAAKARGKRVIAVGTTACRALETAAQDGTLRPYTGETRLFIYPGKTFQVIDGLLTNFHLPESTLLMLVCAFAGTECMLAAYRHAVAEGYRFFSYGDAMLISPQVGQR

SEQ ID NO: 62713 - protein, 345 aa, Acidithiobacillus ferrivorans
  REGION 1..345: note = tr|A0A060UV60|A0A060UV60_9PROT S-adenosylmethionine:tRNA ribosyltransferase-isomerase; OS = Acidithiobacillus ferrivorans OX=160808 GN=queA PE=3; SV = 1
MQKSDFYYELPDALIAQAPLAERSAARMLIVDGRQGTWQDARICDLPDLLQPGDLLVLNDTRVLPARLPARKATGGAVELLLDRLVDAREGWFLAKSSKALRPGMRLHLPGGAVATVEEKDGMEVRLSLTADAQWLPILEAEGSMPLPPYIRRAPEASDRERYQTIYAAHPGAVAAPTAGLHFDAQLLDALAARGVERTFVTLHVGAGTFLPVRSDDITEHPMHAETMEVSATTVAAVAAAKARGKRVIAVGTTACRALETAAQDGTLRPYTGETRLFIYPGKTFQVIDGLLTNFHLPESTLLMLVCAFAGMECMLAAYRHAVAEGYRFFSYGDAMLISPQVGQR

SEQ ID NO: 62714 - protein, 345 aa, Acidithiobacillus ferrooxidans
  REGION 1..345: note = tr|A0A179B6A0|A0A179B6A0_ACIFR S-adenosylmethionine:tRNA ribosyltransferase-isomerase; OS = Acidithiobacillus ferrooxidans OX=920 GN=queA PE=3 SV=1
MQKSDFYYELPDALIAQVPLAERGAARMLIVDGRQGSWEDARIRDLPNLLQPGDLLVLNDTRVLPARLQACKATGGTVELLLDRLLDVQEGWFLAKSSKALRPGMAIHLSGGAVAMVEEKDGMEVRLRLSADAQWLPILETEGSVPLPPYIRRAPEACDRERYQTIYAAHPGAVAAPTAGLHFDVQLLDALAARGIERTFVTLHVGAGTFLPVRSDDITEHPMHAETMEVSAATVAAVAAAKARGKRVIAVGTTACRALETAAQDGTLRPYTGETRLFIYPGKTFQVIDGLLTNFHLPESTLLMLVCAFAGTECMLAAYRHAVAEGYRFFSYGDAMLISPQVGQR

SEQ ID NO: 62715 - protein, 345 aa, Acidithiobacillus ferrooxidans
  REGION 1..345: note = sp|B5EK09|QUEA_ACIF5 S-adenosylmethionine:tRNA ribosyltransferase-isomerase OS=Acidithiobacillus ferrooxidans (strain ATCC 53993) OX=380394 GN=queA PE=3; SV = 1
MHKKDFHYELPDALIAQAPLPERSAARMLIVDGHQGTWEDAWVRDLPGVLRPGDLLVLNDTRVLPARLQARKTTGGAVELLLDRLLDARDGWFLAKSSKALRPGMSIHLPGGAVATVEEKDGMDVRLSLPADVAWLPILEAGGSMPLPPYIRRAAEASDRERYQTVYAARPGAVAAPTAGLHFDTELLDALAARGVERTFVTLHVGAGTFLPVRSEDITEHPMHAETMEVSATTVAAVAAARARGGRVIAVGTTACRALETAAQGGTLRPFTGETRLFLYPGKTFQVTDGLLTNFHLPESTLLMLVCAFAGMECMLAAYRHAVAEGYRFFSYGDAMLISPQAGRR

SEQ ID NO: 62716 - protein, 345 aa, Acidithiobacillus sp.
  REGION 1..345: note = tr|A0A2I1DKV6|A0A2I1DKV6_9PROT S-adenosylmethionine:tRNA ribosyltransferase-isomerase; OS = Acidithiobacillus sp. SH OX=187490 GN=queA PE=3 SV=1
MLKSDFTYELPPELIAQEPLAQRSASRMLVVDGQSGQWQDSWIRQLPEWLHPGDLLILNDTRVLPARLHAYKETGGAVELLLDRLLGEQDGWFLAKSSKALRPGMRLRLAHGDEAEVLEKEGMDVRLHLQQGSWLDILESEGSMPLPPYIHRAPEASDQERYQTIYADKPGAVAAPTAGLHFDEALLDALDARGVERRFVTLHVGAGTFLPVRSDHVQEHVMHAETLMVSQEAVDAIVATKARGGRVIAVGTTACRALETAGKDGVLRPYVGETRLFLYPGKKFQVIDALLTNFHLPESTLLMLVCAFAGTECMLAAYRHAVAARYRFFSYGDAMFITPADPEPV

SEQ ID NO: 62717 - protein, 260 aa, Acidithiobacillus sp.
  REGION 1..260: note = tr|A0A3M8R7Y1|A0A3M8R7Y1_9PROT S-adenosylmethionine:tRNA ribosyltransferase-isomerase (Fragment) OS=Acidithiobacillus sp. CJ-2 OX=1867749; GN = queA PE=3 SV=1
MQRKDFYYELPPERIAQAPLAERSGGRLLQVDGGNGTWTDGQIRDLPQILRPGDLLVLNDTRVLPARLQARKPSGGAVELLLDRIVSDAEAWFLARSSKPLRPGGTLLLGGGVEIHIHEKVDMRVRLGIPAGGGWLALLQAQGATPLPPYIHRTPSADDAERYQTVYSAKPGAVAAPTAGLHFDAPLLALLAERGVDTAFVTLHVGAGTFLPVRSERVEDHEMHAENMEVPAATVAAIAATRARGGRVVAVGTTACRALE

SEQ ID NO: 62718 - protein, 347 aa, Acidithiobacillus thiooxidans
  REGION 1..347: note = tr|A0A1C2IWK4|A0A1C2IWK4_ACITH S-adenosylmethionine:tRNA ribosyltransferase-isomerase; OS = Acidithiobacillus thiooxidans OX=930 GN=queA PE=3 SV=1
MLKSDFTYDLPPELIAQEPLAERSASRMLVLDGDSGHWQDSWIRALPEYLNPGDLLILNDTRVLPARLHAHKETGGAVELLLDRLLGEDEGWFLAKSSKALRPGMMLQLARGDCAEVLEKDGMDVRLRLHRASWLAVLESEGSMPLPPYIHRAPEARDQERYQTVYADKPGAVAAPTAGLHFDQGLLEALDARGVERRFVTLHVGAGTFLPVRSEQVQEHQMHAETLIVSPDTVAAITATKARGGRVIAVGTTACRALETAGQDGTLRPYVGETRLFLYPGKKFQVIDALLTNFHLPESTLLMLVCAFAGTECMLAAYQHAVAARYRFFSYGDAMFITPAALSRCLP

SEQ ID NO: 62719 - protein, 347 aa, Acidithiobacillus thiooxidans
  REGION 1..347: note = tr|A0A543Q403|A0A543Q403_ACITH S-adenosylmethionine:tRNA ribosyltransferase-isomerase; OS = Acidithiobacillus thiooxidans ATCC 19377 OX=637390; GN = queA PE=3 SV=1
MLKSDFTYDLPPELIAQEPLAERSASRMLVIDGDSGQWQDSWIRALPECLNPGDLLILNDTRVLPARLHAHKETGGAVELLLDRLLGEDEGWFLAKSSKALRPGMMLQLAQGDRAEVLEKDGMDVRLRLHQASWLAVLESEGSMPLPPYIHRAPEARDQERYQTVYADKPGAVAAPTAGLHFDQGLLEALDARGVERRFVTLHVGAGTFLPVRSEQVQEHQMHAETLIVSPDTVAAITATKARGGRVIAVGTTACRALETAGQDGTLRPYVGETRLFLYPGKKFQVIDALLTNFHLPESTLLMLVCAFAGTECMLAAYQHAVAARYRFFSYGDAMFITPAALSRCLP

SEQ ID NO: 62720 - protein, 353 aa, unidentified
  source 1..353: note = Acidithrix ferrooxidans
  REGION 1..353: note = tr|A0A0D8HEW8|A0A0D8HEW8_9ACTN S-adenosylmethionine:tRNA ribosyltransferase-isomerase; OS = Acidithrix ferrooxidans OX=1280514 GN=queA PE=3 SV=1
MNNDSKNVDPTAAVDEMALFDYDLPQSLIAQSPIEPRSSARLLDASGEKFVDRHVYDFPLLLKEGDVVVVNDTKVLPARVTLFKESGGAVELLFLEEVAPRFWLTLANPSRKLLFGVPLCDRQGVVVAVVKERREREGDAPVRLIVEVLEPELIEKSGEVPLPPYIKEPLKTPERYQTVYANRGSSAAAPTAGLHFDNDLLEAISRAGASLVKVELSVGLDTFLPIKTERIRDHKIHTESYSVSSEAWDQIRSAPRVIAIGTTVVRTIETVGTTGQLSGRTSIFIHQGYQFLVTDVLLTNFHIPRSSLLLLVDAFVGPRWREIYEHAKQERYRFLSFGDAMLLKRANSDSLER

SEQ ID NO: 62721 - protein, 241 aa, unidentified
  source 1..241: note = Acidobacteria bacterium
  REGION 1..241: note = tr|A0A1F2QIS4|A0A1F2QIS4_9BACT S-adenosylmethionine:tRNA ribosyltransferase-isomerase (Fragment) OS=Acidobacteria bacterium RIFCSPHIGHO2_01_FULL_67_28 OX=1797175 GN= A2620_00320 PE=3; SV = 1
MKLSEFDYTLPPERIAQRPLAERDASRLLLVDRRSGAWQDRRFRELASLVRGDEVIVLNNARVFPARLFGRRRGMHARPVGRRSRVRREHLSAPIEVLLLGRARVGRAGEEDCWEALVRPGRKVGTGEVLQFGEGELEAEVIGRGDYGRRTLRFRAAGDFRETVERLGHVPLPPYIHRADEPADRERYQTVFARQGAAVAAPTAGLHFTPEILDALRRRGCGIVEITLEVGYGTFQPVRTE

SEQ ID NO: 62722 - protein, 226 aa, unidentified
  source 1..226: note = Acidobacteria bacterium
  REGION 1..226: note = tr|A0A1Q7LDM1|A0A1Q7LDM1_9BACT S-adenosylmethionine:tRNA ribosyltransferase-isomerase (Fragment) OS=Acidobacteria bacterium 13_1_40CM_4_58_4; OX = 1803453 GN=AUH86_0466 5 PE=3 SV=1
GLRTLQLVSHDERSVSEHLERLGHVPLPPYIDRADETADRERYQTVFAKRPGAVAAPTAGLHFSMEIVEKIRKRGVELCEVTLDVGLGTFQPVHTETLEGHVMHSESYEIPTETADRINVAHAAGRPILAIGTTVVRALEDAGLRAAETGSTSIVAAGRAEAHLFIIPGFQFRVVDSLLTNFHLPRSTLLALVCAFAGRELVLTAYQHAVAAGYRFYSYGDCMLIR

SEQ ID NO: 62723 - protein, 364 aa, unidentified
  source 1..364: note = Acidobacteriales bacterium
  REGION 1..364: note = tr|A0A1Q6XG78|A0A1Q6XG78_9BACT S-adenosylmethionine:tRNA ribosyltransferase-isomerase; OS = Acidobacteriales bacterium 13_2_20CM_55_8 OX=1803470; GN = queA PE=3 SV=1
MLVSDFHYQLPPDLIAQEPLADRAASRLLHVERASGKLCDRWFREFPDFLRPDDLVVFNNTRVFPARLYGRRSGEKAQPVSTQNPAAKDFLKGQIEVLLTRQISDEPNEWECLVRPGRKIGVGERLFFGDDEELQAEVLARGKFGERRIRFSPTPDFFGLIERLGHVPLPPYISREDRPGDRERYQTVYARERGSVAAPTAGLHFTPEILARMKELGIATTEITLHVGLGTFQPVRADRVEDHTLHRESYHISADAAATINHALDAERRIVAIGTTTVRTLEHAAHQSARGRVQAGSGEANLFIYPGYDFRVVGALLTNFHLAHSTLLMLVCAFGGTARVLDAYRHAVEQKYRFYSYGDCMFLE

SEQ ID NO: 62724 - protein, 355 aa, unidentified
  source 1..355: note = Acidobacteriales bacterium
  REGION 1..355: note = tr|A0A3N5LKF1|A0A3N5LKF1_9BACT S-adenosylmethionine:tRNA ribosyltransferase-isomerase; OS = Acidobacteriales bacterium OX=2282142 GN=queA PE=3 SV=1
MQLSEFDYHLPEDRIAQRPLEDRAASRMLVLNRKEQRWEDRHFRELPLFLRPGDCLVLNDTRVFPSRLYGRRAGVAALPIGKNNPKREEYLSGEVEVFLLRPAAGDPGTWQALVHPGRKMRVGERVSFGGGLEAEVVARGAYGERTVRFNCGDDIYERLEQVGHVPLPPYIRRPDTPEDRLRYQTVFARETGSVAAPTAGLHFTPQVLEACRAAGAAAASVTLHVGLSTFQPIHGDVLEQHHLHSESFHITGDEARKMRAAVRLMPVGTTAVRTLETAMQRGGLEEVHGETGLFIYPGFQFQATGAMLTNFHLPRSSLLLLVCAFAGKELTLNAYRHAVEAGYRFYSYGDCMLII

SEQ ID NO: 62725 - protein, 364 aa, unidentified
  source 1..364: note = Acidobacteriia bacterium
  REGION 1..364: note = tr|A0A321LTY1|A0A321LTY1_9BACT S-adenosylmethionine:tRNA ribosyltransferase-isomerase; OS = Acidobacteriia bacterium AA117 OX=2169412 GN=queA PE=3; SV = 1
MLISDFDFHLPGELIAQEPLPNRSASRMLHLSRATGEYQDRHFVEFPDLLRPDDLLVVNNSRVFPARLFGRRAGLHSQPVSPRNPASRDFLQGQVEVLLTRQLGQWEWQALVRPGRKIGVGERIYFGQEAMPELQAEVTGRGEFGERTLRFHPIDDFFAVVERIGHVPLPPYISRADRAEDRERYQTVYAQQQGSVAAPTAGLHFTPEILARIRQHGIDIAEITLHVGLGTFQPVRVENIEQHKIHRERFTISPETAGKINRALAENRRIVAVGTTTVRTLEYAASQDSAGRISPGSAEADIFIYPGFRFRVIGALLTNFHLPQSTLLMLVSAFAGRKTILKAYRYAVNSRYRFFSYGDCMFIE

SEQ ID NO: 62726 - protein, 353 aa, Acidobacterium capsulatum
  REGION 1..353: note = sp|C1F7K8|QUEA_ACIC5 S-adenosylmethionine:tRNA ribosyltransferase-isomerase OS=Acidobacterium capsulatum (strain ATCC 51196 / DSM 11244 / JCM 7670 / NBRC 15755 / NCI MB 13165 / 161) OX=240015 GN=queA PE=3 SV=1
MLVSEFDFHLPEDLIAQEPLADRAASRMLALDRSTGAWQDRMFADLPGFLRPGDLLVLNNTRVIPARLFGRRAGLRTQPGHEATGQVEVMLTEQISEWEWRALVRPGRKVPVGESIHFGNEGLQAEIIAHGEFGERTLRFTPIPDFFHVLERVGHIPLPPYIHREDRPEDRERYQTVYNQQPGSVAAPTAGLHFTPQMLAKLQELGVQTAYITLHVGLGTFQPVRVDKVEDIRLHRERYTLSPETAAAVNAALHENRRVIAVGTTTVRTLEHCATVADGKPLVPHAGETEIFISPGYKFRIVQGLLTNFHLPQSTLLMLVSAFAGREAVLAAYRHAVEQRYRFFSYGDCMFLA

SEQ ID NO: 62727 - protein, 353 aa, Acidobacterium sp.; identical to SEQ ID NO: 62726
  REGION 1..353: note = tr|A0A3D4VEU1|A0A3D4VEU1_9BACT S-adenosylmethionine:tRNA ribosyltransferase-isomerase; OS = Acidobacterium sp. OX=1872119 GN=queA PE=3 SV=1

SEQ ID NO: 62728 - protein, 349 aa, Acidobacterium sp.
  REGION 1..349: note = tr|A0A2G4JIY9|A0A2G4JIY9_9BACT S-adenosylmethionine:tRNA ribosyltransferase-isomerase; OS = Acidobacterium sp. OX=1872119 GN=queA PE=3 SV=1
MNVSDFDFDLPADLIAQDPPAQRGASRLLALKRSSGCVSHHQFADLPSLLRPGDLLVVNDTRVFPARLIGHRVPGGGAAECFLVRPTGVTDEWLALVHPGQRLREGAGMVFEAGALRLNAEVVGIHFHGRRTVRLWTDDGSSVREAIDAIGHIPLPPYIKRSDAPADRDRYQTVFARDRGSIAAPTAGLHFTTELLDALAERGIERAALTLHVGYGTFQPIRVERVEDHQMEAEHYEVSAATAAALSAARREHRRIITVGTTSTRTVESLASEADGEVQPARGATALFIHPGHQFRLVSGMVTNFHLPRSSLIMLVSALAGREQVLAAYEAAVKERYRFYSYGDAMVVL

SEQ ID NO: 62729 - protein, 343 aa, Acidocella aminolytica
  REGION 1..343: note = tr|A0A0D6PK06|A0A0D6PK06_9PROT S-adenosylmethionine:tRNA ribosyltransferase-isomerase; OS = Acidocella aminolytica 101 = DSM 11237 OX=1120923; GN = queA PE=3 SV=1
MQLSEFGYDLPPERIATAPARPRDAARLLHVEADGLHDQIVRDLPALLRPDDLLVVNDTKVIPAQLTARRGDAKIGITLDRRLDDGSWHVLLRNSKRVKQGDVLVIDPAFSAEVVELEAGGAAILRFTADDFHAALERSGALALPPYIARPEGITAQDKTDYQTLFAAHEGAVAAPTAGLHFTPTLLAALQARGVEMAKVTLHVGAGTFLPVRVERIEDHKMHAERGYITEATAARINAAKAAGRRIIPIGTTALRLLESAATDAGTLKPFDSETDIFIYPGYRFKIADALFTNFHLPHSTLLMLVSAFAGTKRIKAAYAHAIANGYRFYSYGDACLLERAAG

SEQ ID NO: 62730 - protein, 340 aa, Acidocella sp.
  REGION 1..340: note = tr|A0A257NR42|A0A257NR42_9PROT S-adenosylmethionine:tRNA ribosyltransferase-isomerase; OS = Acidocella sp. 20-63-7 OX=1970304 GN=queA PE=3 SV=1
MKLSDFGYTLPAERIATEPARPRDSARLLHVGAALRDYTVRYLPGLLRRGDLLVVNDTKVIPAQLSAMRGVARIGITLDRRLDDGRWRVLLRNAKRVHAGDVLVIDPEFSAEVSEILEGGAALLRFVADDFYAALDRSGALALPPYIARPEGVTQRDASDYQTMFAAHEGAVAAPTAGLHFTPQLLEALQEAGIEIVRVTLHVGAGTFLPVRVENLAEHKMHAERGHVSAEAAARINAARAAGGRIVPVGTTALRVIESAANDEGAVKAFDGETDIFILPGYRFKVADLLFTNFHLPHSTLLMLVSAFAGVERIRDAYAYAIGQKYRFYSYGDACLLERV

SEQ ID NO: 62731 - protein, 343 aa, Acidocella sp.
  REGION 1..343: note = tr|A0A258LDL3|A0A258LDL3_9PROT S-adenosylmethionine:tRNA ribosyltransferase-isomerase; OS = Acidocella sp. 35-58-6 OX=1970306 GN=queA PE=3 SV=1
MRLEDFGYELPASHIATEPTRPRESAKLLHVKPDALGDYTVRDLPRLLREGDLLVVNDTKVIPAQLTAMRGAARIGITLDKPNAAGDWLVLLRNARRVHVGDVLQIDEAFSAEVMAVHEGGTAALRFNVSDAAFLAALQRSGALALPPYIARPGGITEQDKADYQTMFAEHDGAVAAPTAGLHFTPALLEALAAKGVETVRVTLHVGAGTFLPVRVEDVTTHKMHAERGIVSAAAAARINDVKARGGRVIPVGTTALRLIESAAGNDGTVRPFVGETDIFILPGYRFKVADVLFTNFHLPHSTLLMLVSAFAGMARIKSAYEHAIAHDYRFYSYGDACLLERL

SEQ ID NO: 62732 - protein, 351 aa, Acidomonas methanolica
  REGION 1..351: note = tr|A0A023D6T1|A0A023D6T1_ACIMT S-adenosylmethionine:tRNA ribosyltransferase-isomerase; OS = Acidomonas methanolica NBRC 104435 OX=1231351 GN=queA; PE = 3 SV=1
MTDLPDLPLAAFDFDLPPDRIAREPARPRDSARLLRVTPGAPPSETTVRALPSLLRAGDLLIVNDTAVIPAQLAAQRGEAAIGVTLDRLLPDGDWHALARNARKLHKGDTLRFGDDPVTAIVTENEGDGAIRLRFSAEGAAFDAFLQRAAALALPPYIERPDGPTEQDAEDYRTIFSRHRGAVAAPTAGLHFTPDLLAALDSAGIARRTLTLHVGAGTFLPVRDSIATHRMHAEWGRIDAETADTINATRARGGRVVAVGTTSLRLLESAADERGVIRPWQGETSIFIRPGYQFRAVDLLMTNFHLPKSTLFMLVSAFSGVETMRAAYAHAVAAGFRFYSYGDACLLERAP

SEQ ID NO: 62733 - protein, 366 aa, Acidovorax anthurii
  REGION 1..366: note = tr|A0A328YHW4|A0A328YHW4_9BURK S-adenosylmethionine:tRNA ribosyltransferase-isomerase; OS = Acidovorax anthurii OX=78229 GN=queA PE=3 SV=1
MSASQPPRAFTLSDFDFSLPPELIAQHPAPERSASRLLDGRAEAPVDRIFRELPGLLQPGDLLVFNDTRVVKARVFGEKESGGKVELLIERVLVGGSGNEVVAHMKVSKKPAVGATLQMAGGPARGGFGATLLGRWPDEDGPLFRFALSSPDGAAPHALMERHGHMPLPPYIERHQDGGDDPDAAEDAERYQTVFARAPGAVAAPTAALHFDDAVLAALAERGVERASVTLHVGAGTFQPVKTESLAEHRMHSEWYEVPLATLAALERCRQRGGRVVAVGTTTVRTLESWARSGQATGDTDIFITPGFAFQVVDLLVTNFHLPKSTLMMLISAFAGYEHAMALYRHAIAQHYRFFSYGDAMLLARR

SEQ ID NO: 62734 - protein, 369 aa, Acidovorax avenae
  REGION 1..369: note = tr|F0Q654|F0Q654_ACIAP S-adenosylmethionine:tRNA ribosyltransferase-isomerase OS=Acidovorax avenae (strain ATCC 19860 / DSM 7227 / JCM 20985 / NCPPB 1011); OX = 643561GN=queA PE=3 SV=1
MSASQPPRAFTLSDFDFSLPPELIAQHPAPERSASRLLDGRADVPVDRIFRELPDLLQPGDLLVFNDTRVVKARVFGEKASGGKVELLIERVLVGPNGEAGNEVVAHMKVSKKPAVGAMLHMAGGPAGGGFGATLLGRWPDEDGPLFRFALSSPDGEGPHALMERHGHMPLPPYIERHQDGGGDPDAAEDAERYQTVFARAPGAVAAPTAALHFDEGVLASLAARGVERASVTLHVGAGTFQPVKTESLADHRMHSEWYEVPLATLAALERCRQRGGRVVAVGTTTVRTLESWARSGQATGDTDIFITPGFAFQVVDLLVTNFHLPKSTLMMLISAFTGYDHAMDLYRHAIAQRYRFFSYGDAMLLARR

SEQ ID NO: 62735 - protein, 369 aa, Acidovorax avenae
  REGION 1..369: note = tr|A0A2R4E494|A0A2R4E494_9BURK S-adenosylmethionine:tRNA ribosyltransferase-isomerase; OS = Acidovorax avenae subsp. avenae OX=80870 GN=queA PE=3; SV = 1
MSASQPPRAFTLSDFDFSLPPELIAQHPAPERSASRLLDGRAEAPVDRIFRDLPDLLQPDDLLVFNDTRVVKARVFGEKASGGKVELLIERVLVGPDGEAGNEVVAHMKVSKKPAVGATLHMAGGPMGGGFGATLLGRWPDEDGPLFRFALSSPDGAGPHALMERHGHMPLPPYIERHQEGGGDPDAAEDAERYQTVFARAPGAVAAPTAALHFDEGVLAALAACGVERASVTLHVGAGTFQPVKTESLADHRMHSEWYEVPLATLAALERCRQRGGRVVAVGTTTVRTLESWARSGQATGDTDIFITPGFAFRVVDLLVTNFHLPKSTLMMLISAFTGYDHAMGLYRHAIAQRYRFFSYGDAMLLARR

SEQ ID NO: 62736 - protein, 365 aa, Acidovorax caeni
  REGION 1..365: note = tr|A0A1I7H9L3|A0A1I7H9L3_9BURK S-adenosylmethionine:tRNA ribosyltransferase-isomerase; OS = Acidovorax caeni OX=343013 GN=queA PE=3 SV=1
MHTLSDFDFVLPEQLIAQHPAPERSGSRLLDGRAPTPVDRIFRELPALLQPGDLLVFNDTRVVKARVFGEKASGGKLELLIERVLTGNDVVAHMKVSKKPLPGATVHMAGGAAHGGFDATLLSRWPDADGPLFRFALHGPAGETPWELMERHGHLPLPPYIERQQNSSHDPDEAEDNERYQTVFARAPGAVAAPTAALHFDEGVLAALAAHGVERASVTLHVGAGTFQPVKTENLAEHRMHSEWYEVPPDTLAALERCRQRGGRVVAVGTTTVRTLESWARCGQTTGETDIFITPGFRFQVVELLVTNFHLPKSTLMMLVSAFAGYTHIMDLYRHAIAQRYRFFSYGDAMLLQRATPTAPAAPAD

SEQ ID NO: 62737 - protein, 385 aa, unidentified
  source 1..385: note = Acidovorax carolinensis
  REGION 1..385: note = tr|A0A240UGY5|A0A240UGY5_9BURK S-adenosylmethionine:tRNA ribosyltransferase-isomerase; OS = Acidovorax carolinensis OX=553814 GN=queA PE=3 SV=1
MTDLSSGAASAPFTPSAIPTPRVFTLSDFDFSLPPERIAQHPAPERSASRLLDGRAMQPVDRIFRDLPGLLRAGDLLVFNDTRVVKARIFGEKASGGKLELLIERVLPAEAGNPGNEVVAHMKVSKKPLPGSVVHMAGGRKAGGFDAQLLGRWPTEDGPLFRFALHGPANESPWELMDRHGHLPLPPYIERQQNTGHDPDEAEDSQRYQTVFARNPGAVAAPTAALHFDEAVLADLAARGIERASVTLHVGAGTFQPVKTENLAEHQMHSEWYEVPLATLAALERCRQRGGRVVAVGTTTVRTLESWAKSGQATGDTNIFITPGFAFQVVDLLITNFHLPKSTLMMLVSAFAGYAHVMGLYRHAIAQEYRFFSYGDAMLLERFAG

SEQ ID NO: 62738 - protein, 385 aa, unidentified
  source 1..385: note = Acidovorax carolinensis
  REGION 1..385: note = tr|A0A240TVF2|A0A240TVF2_9BURK S-adenosylmethionine:tRNA ribosyltransferase-isomerase; OS = Acidovorax carolinensis OX=553814 GN=queA PE=3 SV=1
MTDLSSGAASAPFTPSAIPTPRVFTLSDFDFSLPPERIAQHPAPERSASRLLDGRAMQPVDRIFRDLPGLLRAGDLLVFNDTRVVKARIFGEKASGGKLELLIERVLPAEAGGTGNEVVAHMKVSKKPLPGSVVHMAGGRKAGGFDAQLLGRWPTEDGPLFRFALHGPANESPWELMDRHGHLPLPPYIERQQNTGHDPDEAEDSQRYQTVFARNPGAVAAPTAALHFDEAVLADLAERGIERASVTLHVGAGTFQPVKTENLAEHQMHSEWYEVPLATLAALERCRQRGGRVVAVGTTTVRTLESWAKTGRATGDTNIFITPGFAFQVVDLLITNFHLPKSTLMMLVSAFAGYAHVMGLYRHAIAQEYRFFSYGDAMLLERFAG

SEQ ID NO: 62739 - protein, 369 aa, Acidovorax cattleyae
  REGION 1..369: note = tr|A0A1H0QH59|A0A1H0QH59_9BURK S-adenosylmethionine:tRNA ribosyltransferase-isomerase; OS = Acidovorax cattleyae OX=80868 GN=queA PE=3 SV=1
MSASQPPRAFTLSDFDFSLPPELIAQHPAPERSASRLLDGRADAPVDRIFRELPDLLQAGDLLVFNDTRVVKARVFGEKASGGKVELLIERVLVGPEGEAGNEVVAHMKVSKKPAVGATLHMAGGPAGGGFGATLLGRWPDENGPLFRFALSSPDGAGPHALMERHGHMPLPPYIERHQDGEDDPDAAEDAERYQTVFARAPGAVAAPTAALHFDEGVLAALAARGVERASVTLHVGAGTFQPVKTESLADHRMHSEWYEVPLATLAALERCRQRGGRVVAVGTTTVRTLESWARSGQATGDTDIFITPGFSFRVVDLLVTNFHLPKSTLMMLISAFTGYDHAMELYRHAIAQRYRFFSYGDAMLLARR

SEQ ID NO: 62740 - protein, 91 aa, unidentified
  source 1..91: note = Acidovorax cavernicola
  REGION 1..91: note = tr|A0A3A1VUT8|A0A3A1VUT8_9BURK S-adenosylmethionine:tRNA ribosyltransferase-isomerase (Fragment) OS=Acidovorax cavernicola OX=1675792; GN = D3H34_33375 PE=3 SV=1
IAVGTTTVRTLESWAKSGNIQGDTNIFITPGFQFEVVDMLVTNFHLPKSTLMMLVSALAGYEQVMSLYQQAIAHHYRFFSYGDSMLLERQR

SEQ ID NO: 62741 - protein, 347 aa, unidentified
  source 1..347: note = Acidovorax cavernicola
  REGION 1..347: note = tr|A0A3A1WEC7|A0A3A1WEC7_9BURK S-adenosylmethionine:tRNA ribosyltransferase-isomerase; OS = Acidovorax cavernicola OX=1675792 GN=queA PE=3 SV=1
MRAFTLSDFDFHLPPELVAQHPATERTASRLLDGTGAAPADRIFKELPSLLRAGDLLVFNDTRVVKARLFGEKPTGGKLELLVERVLQGQEVVAHMKVSKKPPVGTTLEMVGGFRATLLGRWPEEDGALFRFAFESDTGENPYMLMERCGHVPLPPYITHTDSADDESRYQTVFARVPGAVAAPTAALHFDEGLLAELDARGVQRANVTLHVGAGTFQPVKTENIAEHTMHAERYEVPEATQRAIAECKARGGRVVAVGTTTVRTLESWAKSGEATGDTRIFITPGFAFAHVDVLVTNFHLPKSTLMMLVSAFAGYERVMALYAHAIANGYRFFSYGDAMLLQRQQD

SEQ ID NO: 62742 - protein, 369 aa, Acidovorax citrulli
  REGION 1..369: note = tr|A1TJQ6|A1TJQ6_ACIAC S-adenosylmethionine:tRNA ribosyltransferase-isomerase OS=Acidovorax citrulli (strain AAC00-1) OX=397945 GN=queA PE=3 SV=1
MSASQPPRAFTLSDFDFSLPPELIAQHPAPERSASRLLDGRADVPVDRIFRELPGLLQPGDLLVFNDTRVVKARVFGEKASGGKVELLIERVLVGTGGEAGNEVVAHMKVSKKPAVGAMLHMAGGPAGGGFGATLLGRWPDEDGPLFRFALSSPDGAGPHALMERHGHIPLPPYIERHQEGGGDPDAAEDAERYQTVFARAPGAVAAPTAALHFDEGVLASLAARGVERASVTLHVGAGTFQPVKTESLADHRMHSEWYEVPLATLAALERCRQRGGRVVAVGTTTVRTLESWARSGQGTGDTDIFITPGFAFQVVDLLVTNFHLPKSTLMMLISAFTGYEHAMDLYRHAIAQRYRFFSYGDAMLLARR

SEQ ID NO: 62743 - protein, 387 aa, Acidovorax delafieldii
  REGION 1..387: note = tr|A0A561XBY9|A0A561XBY9_ACIDE S-adenosylmethionine:tRNA ribosyltransferase-isomerase; OS = Acidovorax delafieldii OX=47920 GN=queA PE=3 SV=1
MTDLSSGATSAPLASGGPSTPRVFTLSDFDFSLPPELIAQHPAPERSASRLLDGRAMQPVDRIFRELPGLLREGDLLVFNDTRVVKARIFGEKASGGKLELLIERVLPAEAGNPGNEVVAHMKVSKKPLPGSVVHMAGGRKAGGFDAQLLGRWPTEDGPLFRFALHGPAGESPWELMDRHGHLPLPPYIERQQNTDHDPDEAEDSQRYQTVFARNPGAVAAPTAALHFDEGVLADLAARGIERASVTLHVGAGTFQPCKTENLAEHQMHSEWYEIPLATLAALERCRQRGGRVVAVGTTTVRTLESWAKTGQASGDTNIFITPGFAFQVVDVLITNFHLPKSTLMMLVSAFAGYAHIMGLYRHAIAHQYRFFSYGDAMLLERARGTP

SEQ ID NO: 62744 - protein, 406 aa, Acidovorax delafieldii
  REGION 1..406: note = tr|C5TB82|C5TB82_ACIDE S-adenosylmethionine:tRNA ribosyltransferase-isomerase OS=Acidovorax delafieldii 2AN; OX = 573060 GN=queA PE=3 SV=1
MAQRGRGRIAPFLFLERARPALKPMTDTTASAPRAFTLSDFDFALPPALIAQHPASERSASRLLDGRQLPPTDRIFRELPGLLRAGDLLVFNDTRVVKARIFGEKASGGKLELLIERVLPAEARENAAGTAGGTGNEVVAHMKVSKKPLPGSTVHMAGGRHAGGFDATLLSRWPTEDGPLFRFALHGPAGESPWELMERHGHLPLPPYIERQQHTGNDPDAAEDSQRYQTVFARAPGAVAAPTAALHFDESVLAEMAARGIERASVTLHVGAGTFQPVKTENLAEHQMHSEWYEVPLATLAALERCRQRGGRVVAVGTTTVRTLESWARSGQASGDTAIFITPGFAFQVVDVLLTNFHLPKSTLMMLVSAFAGYEHVMALYRHAIAQEYRFFSYGDAMLLERRKMA

SEQ ID NO: 62745 - protein, 366 aa, unidentified
  source 1..366: note = Acidovorax ebreus
  REGION 1..366: note = tr|B9MBS9|B9MBS9_ACIET S-adenosylmethionine:tRNA ribosyltransferase-isomerase OS=Acidovorax ebreus (strain TPSY) OX=535289 GN=queA PE=3 SV=1
MSSASTAPRTFTLSDFDFELPELLIAQHPAPQRSGSRLLDGRTAPPTDRIFRELPDLLQPGDLLVFNDTRVVKARVFGEKASGGKLELLIERVLTGNEVVAHMKVSKKPLPGATLHLAGGAAAGGFDATLLGRYPDADGPLFRLALRGPAGESPWELMERHGHLPLPPYIERQQAGGNDPHAGEDSERYQTVFARAPGAVAAPTAALHFDDAVLARLAERGIERASVTLHVGAGTFQPVKTENLAEHRMHSEWYEVPLATLAALERCRQRGGRVVAVGTTTVRTLESWAASGQAAGDTSIFITPGFQFQVVDLLLTNFHLPKSTLMMLVSAFAGYEHIMQLYRHAVAQRYRFFSYGDCMLLERPRA

SEQ ID NO: 62746 - protein, 381 aa, unidentified
  source 1..381: note = Acidovorax kalamii
  REGION 1..381: note = tr|A0A235EM06|A0A235EM06_9BURK S-adenosylmethionine:tRNA ribosyltransferase-isomerase; OS = Acidovorax kalamii OX=2004485 GN=queA PE=3 SV=1
MTDFSPGAASAPHASRVFTLSDFDFSLPPELIAQHPAPERSASRLLDGRAMQPVDRIFRELPGLLREGDLLVFNDTRVVKARIFGEKASGGKLELLIERVLPAEAGNPGNEVVAHMKVSKKPLPGSVVHMAGGRKAGGFDAQLLGRWPTEDGPLFRFALHGPAGESPWELMDRHGHLPLPPYIERQQNADHDPDEAEDSQRYQTVFARNPGAVAAPTAALHFDEGVLADLAARGIERASVTLHVGAGTFQPCKTENLAEHQMHSEWYEIPLATLAALERCRQRGGRVVAVGTTTVRTLESWAKTGQASGDTNIFITPGFAFQVVDVLVTNFHLPKSTLMMLVSAFAGYAHIMGLYRHSIAQQYRFFSYGDAMLLERARSSP

SEQ ID NO: 62747 - protein, 371 aa, Acidovorax konjaci
  REGION 1..371: note = tr|A0A1I1V682|A0A1I1V682_9BURK S-adenosylmethionine:tRNA ribosyltransferase-isomerase; OS = Acidovorax konjaci OX=32040 GN=queA PE=3 SV=1
MPDSQPHRTFTLSDFDFSLPPDLIAQHPAPERSASRLLDGRAGAPVDRIFRELPGLLQPGDLLVFNDTRVVKARVFGEKESGGKVELLIERVLVADGDGKAAGNEVVAHMKVSKKPAVGATLQMAGGPARGGFGATLLGRWPDENGPLFRFALSSPDGAGPHALMERHGHMPLPPYIERHQDGADDPDAAEDAERYQTVFARAPGAVAAPTAALHFDDAVLAALAAHGVERASVTLHVGAGTFQPVKTESLADHRMHSEWYEVPLATLAALERCRQRGGRVVAVGTTTVRTLESWARSGQATGDTDIFITPGFAFQVVDLLVTNFHLPKSTLMMLISAFTGYEHAMALYRHAIGQRYRFFSYGDAMLLARR

SEQ ID NO: 62748 - protein, 373 aa, Acidovorax radicis
  REGION 1..373: note = tr|A0A561CAD3|A0A561CAD3_9BURK S-adenosylmethionine:tRNA ribosyltransferase-isomerase; OS = Acidovorax radicis OX=758826 GN=queA PE=3 SV=1
MTVSSTPPAPRHFTLSDFDFSLPPELIAQHPATQRSASRLLDGRAASPVDRIFHELPGLLQPGDLLVFNDTRVVKARIFGEKASGGKLELLIERVLLGNEVVAHMKVSKKPLPGAVVHMAGGLHGGGFNATLLSRWPGEEGPLFRFALDGPAGETPHDLMERHGHLPLPPYIERQQNADHDPDAAEDAQRYQTVFARAPGAVAAPTAALHFDEGVLAALADRGVERASVTLHVGAGTFQPVKTENLAEHQMHSEWYEVPLATLAALERCRQRGGRVVAVGTTTVRTLESWARSGQASGDTNIFITPGFAFQVVDLLLTNFHLPKSTLMMLVSAFAGYERIQAIYRHAIAQQYRFFSYGDSMLLERERTPLSNS

SEQ ID NO: 62749 - protein, 368 aa, Acidovorax soli
  REGION 1..368: note = tr|A0A1H4AFV5|A0A1H4AFV5_9BURK S-adenosylmethionine:tRNA ribosyltransferase-isomerase; OS = Acidovorax soli OX=592050 GN=queA PE=3 SV=1
MIDHPGGSARTFTLSDFDFSLPPALIAQHPAPERSASRLLDGRAMQPVDRIFRELPGLLREGDLLVFNDTRVVKARIFGEKASGGKLELLIERVLTGHEVVAHMKVSKKPQSGSTVHMAGGRQGGGFDATLLGRWPHEDGPLFRFALHGPAGESPWELMERHGHLPLPPYIERNQNTDHDPDAAEDSQRYQTVFARAPGAVAAPTAALHFDDAVLADLAARGIERASVTLHVGAGTFQPVKTENLAEHQMHSEWYEVPLATLAALERCRQRGGRVVAVGTTTVRTLESWARSGQASGDTNIFITPGFRFQVVDLLLTNFHLPKSTLMMLVSAFAGYAHIMGLYRHAIAQEYRFFSYGDAMLLERQDLK

SEQ ID NO: 62750 - protein, 256 aa, Acidovorax sp.
  REGION 1..256: note = tr|A0A1E3Y1F3|A0A1E3Y1F3_9BURK S-adenosylmethionine:tRNA ribosyltransferase-isomerase (Fragment) OS=Acidovorax sp. SCN 65-108 OX=1660085; GN = ABS37_22100 PE=3 SV=1
SVVHMAGGRKAGGFDAQLLGRWPTEDGPLFRFALHGPAGESPWELMDRHGHLPLPPYIERHQNSDHDPDEAEDSQRYQTVFARNPGAVAAPTAALHFDEGVLADLAARGIERASVTLHVGAGTFQPCKTENLAEHQMHSEWYEVPLATLAALERCRQRGGRVVAVGTTTVRTLESWAKTGQASGDTNIFITPGFAFQVVDVLITNFHLPKSTLMMLVSAFAGYAHIMGLYRHAIAQQYRFFSYGDAMLLERARSTP

SEQ ID NO: 62751 - protein, 389 aa, Acidovorax sp.
  REGION 1..389: note = tr|A0A2G6T1Z3|A0A2G6T1Z3_9BURK S-adenosylmethionine:tRNA ribosyltransferase-isomerase; OS = Acidovorax sp. 56 OX=2035205 GN=queA PE=3 SV=1
MTDITPAAPGAPRAYTLSDFDFSLPPELIAQHPAPERSASRLLDGRAMQPVDRIFRDLPGLLREGDLLVFNDTRVVKARIFGEKASGGKLELLIERVLPAEAGNQGNEVVAHMKVSKKPLPGSLVHMAGGRKGGGFDALLLGRWPTEDGPLFRFALLGPAGESPWELMDRHGHLPLPPYIERHQNTDHDPDEAEDSQRYQTVFASAPGAVAAPTAALHFDEGVLADLAARGIERASVTLHVGAGTFQPCKTENLAEHQMHSEWYEVPLATLAALERCRQRGGRVVAVGTTTVRTLESWARTGLATGDTNIFITPGFSFQVVDVLITNFHLPKSTLMMLVSAFAGYAHVMGLYRHAIAQGYRFFSYGDAMLLERSAQASKEAPQTSPTAR

SEQ ID NO: 62752 - protein, 381 aa, Acidovorax temperans
  REGION 1..381: note = tr|A0A543L7M4|A0A543L7M4_9BURK S-adenosylmethionine:tRNA ribosyltransferase-isomerase; OS = Acidovorax temperans OX=80878 GN=queA PE=3 SV=1
MTDLSLSAPGAPLAPHAYTLSDFDFSLPPELIAQHPAPERSASRLLDGRAMAPADRIFRELPGLLREGDLLVFNDTRVVKARIFGEKASGGKLELLIERVLPAEAGSAGNEVVAHMKVSKKPLPGSTVHMAGGRHAGGFDARLLGRWPTEDGPLFRFALQGPAGETPWELMDRHGHLPLPPYIERQQNTDHDPDEAEDSQRYQTVFARNPGAVAAPTAALHFDEGVLAELQSRGIERASVTLHVGAGTFQPVKTENLAEHQMHSEWYEVPLATLAALERCRQRGGRVVAVGTTTVRTLESWAQSGKTTGDTNIFITPGFSFKVVDVLITNFHLPKSTLMMLVSAFAGYAHIMGLYRHAIAQRYRFFSYGDAMLLERAKAAN

SEQ ID NO: 62753 - protein, 369 aa, Acidovorax temperans
  REGION 1..369: note = tr|A0A0D7KC62|A0A0D7KC62_9BURK S-adenosylmethionine:tRNA ribosyltransferase-isomerase; OS = Acidovorax temperans OX=80878 GN=queA PE=3 SV=1
MAPHAYTLSDFDFSLPPELIAQHPAPERSASRLLDGRAMAPADRIFRELPGLLREGDLLVFNDTRVVKARIFGEKASGGKLELLIERVLPAEAGSTGNEVVAHMKVSKKPLPGSTVHMAGGRHAGGFDAKLLGRWPTEDGPLFRFALQGPAGETPWELMDRHGHLPLPPYIERQQNTDHDPDEAEDSQRYQTVFARNPGAVAAPTAALHFDEGVLAELQSRGIERASVTLHVGAGTFQPVKTENLAEHQMHSEWYEVPLATLAALERCRQRGGRVVAVGTTTVRTLESWAQSGKTTGDTNIFITPGFTFKVVDVLITNFHLPKSTLMMLVSAFAGYAHIMGLYRHAIAQRYRFFSYGDAMLLERAKAAN

SEQ ID NO: 62754 - protein, 365 aa, Acidovorax valerianellae
  REGION 1..365: note = tr|A0A1G6Z8N0|A0A1G6Z8N0_9BURK S-adenosylmethionine:tRNA ribosyltransferase-isomerase; OS = Acidovorax valerianellae OX=187868 GN=queA PE=3 SV=1
MSPSPRAFTLSDFDFTLPPQLIAQHPAPERSASRLLDGRSTEPADRVFRDLPGLLRAGDLLVFNDTRVVKARVFGEKASGGKLELLIERVLTGNEVVAHMKVSKKPLPGAVVHLAGGLTGGGFDATLLSRWPEDGGPLFRFALRGPAGETPYDLMERHGHLPLPPYIERQQQEGNDPDAAEDAQRYQTVFARAPGAVAAPTAALHFDAGVLADLEARGVERASVTLHVGAGTFQPVKTENLAEHQMHSEWYEVPLATLAALERCRQRGGRVVAVGTTTVRTLESWALSGQATGDTQIFITPGFGFRVVDVLVTNFHLPKSTLMMLVSAFAGYEHVMGLYRHAIAQGYRFFSYGDAMLLQRPQPVQ

SEQ ID NO: 62755 - protein, 384 aa, unidentified
  source 1..384: note = Acidovorax wautersii
  REGION 1..384: note = tr|A0A1I2GJX7|A0A1I2GJX7_9BURK S-adenosylmethionine:tRNA ribosyltransferase-isomerase; OS = Acidovorax wautersii OX=1177982 GN=queA PE=3 SV=1
MQTPLSSPSNSSSPSAEAPAAPARTFTLSDFDFALPPELIAQHPAPERSGSRLLDGRSREPADRIFRELPGLLREGDLLVFNDTRVVKARLFGEKASGGKLELLIERVLTGNEVVAHMKVSKKPLPGSTVLMAGGRAAGGFDATLLGRWPDDNGPLFRFALHGPAGESPWELMERHGHLPLPPYIERQQNAEHDPDEAEDSQRYQTVFARAPGAVAAPTAALHFDEAVLADLAARGIERASVTLHVGAGTFQPVKTENLAEHRMHSEWYEVPLATLAALERCRQRGGRVVAVGTTTVRTLESWARSGQATGDTDIFITPGFGFRVVDLLITNFHLPKSTLMMLVSAFAGYAQVMGLYRHAIAQRYRFFSYGDSMLLERSGPRVA

SEQ ID NO: 62756 - protein, 345 aa, unidentified
  source 1..345: note = Acinetobacter albensis
  REGION 1..345: note = tr|A0A1C4GXX4|A0A1C4GXX4_9GAMM S-adenosylmethionine:tRNA ribosyltransferase-isomerase; OS = Acinetobacter albensis OX=1673609 GN=queA PE=3 SV=1
MQLSDFNFVLPDALIARYPLNTRSASRLLHLDAQGQYHDGYFTDILNLLDAGDLLILNDTKVMKARLKGKRATGGAVEVLVERIQDKFIAHCHIKASNSPKTGAELFVGEDEIKVTIQGRHENLFIVEFSQPILDVLDQYGALPIPPYFNREAEEIDTERYQTVFNDPTKLASVAAPTASLHFDQNLLAKLEAKGIQKTFVTLHVGAGTFLPVRSSDIANHIMHSEWCDVPEHTVDLIRQTKARGNKVISVGTTATRAVESAAQAHGGKLAAWTGDTQIFIYPGYQFKVIDRLITNFHLPESTLLMLVSALSNRDAILNAYQHAVEAQYRFFSYGDAMLIDQIHP

SEQ ID NO: 62757 - protein, 355 aa, unidentified
  source 1..355: note = Acinetobacter apis
  REGION 1..355: note = tr|A0A217EHD7|A0A217EHD7_9GAMM S-adenosylmethionine:tRNA ribosyltransferase-isomerase; OS = Acinetobacter apis OX=1229165 GN=queA PE=3 SV=1
MQLSDFNFDLPDELIARYPLNERSASRLLHLDASGAYHDRVFTDILDLLHPGDLLVLNDTKVMKARLKGKRETGGAIEILVERMQDRFIAHCHIKSSNSPKAGAKLYIGDADVQVTVQGRQDNLYIVEFSAPILDVLDQYGQLPIPPYFNREAEDIDTERYQTVFNDPSKLASVAAPTASLHFDQKLLDQLAEKGIQTTFVTLHVGAGTFLPVRTDDIAHHIMHSEWCDVPESTVQRILHTKATGNQVISVGTTATRAVESAAQAHGGELKAWTGDTQIFIYPGYTFCVVDRLITNFHLPESTLLMLVSAVSDRQSILSAYEHAVKEKYRFFSYGDAMLIDQKRASTECSTTGSI

SEQ ID NO: 62758 - protein, 345 aa, Acinetobacter baumannii
  REGION 1..345: note = tr|A0A454ASD6|A0A454ASD6_ACIBA S-adenosylmethionine:tRNA ribosyltransferase-isomerase; OS = Acinetobacter baumannii MDR-TJ OX=889738 GN=queA PE=3; SV = 1
MQLSDFSFELPDELIARYPLETRSASRLLHLDAKGQYHDHMFTDIIDLFEEGDLLVLNDTKVMKARLKGKRATGGAIEILVERMLNHTTAYCHIKASNSPKAGAELFVGEDNIPVIVRGRHENLFVVEFSQPILPVLEQYGQLPIPPYFNREAEEIDTERYQTVFHNPEKIASVAAPTASLHFDEELLAKLDQKGVKKTFVTLHVGAGTFMPVRTDDITNHVMHSEWCDVPQETIDLILATKARGNKVIAVGTTATRALESAAQAHGGKIAAWTGDTQIFIYPGYEFCIVDRLITNFHLPESTLLMLVSALSNRENILAAYEHAVKDRYRFFSYGDAMLIDKLEV

SEQ ID NO: 62759 - protein, 345 aa, Acinetobacter baumannii
  REGION 1..345: note = sp|B7GWL7|QUEA_ACIB3 S-adenosylmethionine:tRNA ribosyltransferase-isomerase OS=Acinetobacter baumannii (strain AB307-0294) OX=557600 GN=queA PE=3 SV=1
MQLSDFSFELPDELIARYPLETRSASRLLHLDAKGQYHDHMFTDIIDLFEEGDLLVLNDTKVMKARLKGKRATGGAIEILVERMLNHTTAYCHIKASNSPKAGAELFVGADNIPVIVRGRHENLFVVEFSQPILPVLEQYGQLPIPPYFNREAEEIDTERYQTVFHNPEKIASVAAPTASLHFDEELLAELDQKGVKKTFVTLHVGAGTFMPVRTDDITNHVMHSEWCDVPQETIDLILATKARGNKVIAVGTTATRALESAAQAHGGKIAAWTGDTQIFIYPGYEFCIVDRLITNFHLPESTLLMLVSALSNRENILAAYEHAVKDRYRFFSYGDAMLIDKLEV

SEQ ID NO: 62760 - protein, 344 aa, Acinetobacter baylyi
  REGION 1..344: note = sp|Q6FEJ3|QUEA_ACIAD S-adenosylmethionine:tRNA ribosyltransferase-isomerase OS=Acinetobacter baylyi (strain ATCC 33305 / BD413 / ADP1) OX=62977 GN=queA PE=3; SV = 1
MQLSDFNFDLPDELIARYPLDTRSASRLLHLDAHGHYHDHAFTDILDLINDGDLLVLNDTKVMKARLKGKRASGGAIEILVERMLDNQIAHCHIKASNTPKAGAELFVGENGIKVTVQGRHENLFVVEFSEPILSVLDRYGQLPIPPYFNREAEEIDTERYQTVFHDPQKIASVAAPTASLHFDQDLLEKLAAKNIQKTFVTLHVGAGTFMPVRTDDIKNHIMHSEWCDVPESTAELIRQTKARGNKVIAVGTTATRALESAAQANGGKIDAWTGDTQIFIYPGYQFCVVDRLITNFHLPESTLLMLVSALSNRNNILSAYEHAVQSKYRFFSYGDAMLIDQAV

SEQ ID NO: 62761 - protein, 345 aa, Acinetobacter beijerinckii
  REGION 1..345: note = tr|N9FKR6|N9FKR6_9GAMM S-adenosylmethionine:tRNA ribosyltransferase-isomerase OS=Acinetobacter beijerinckii CIP 110307 OX=1217648 GN=queA PE=3 SV=1
MQLSDFSFDLPDELIARYPLESRSASRLLHIDAQGQYHDHAFTDILNLLEDGDLLVLNDTKVMKARLKGKRATGGAIEVLVERMLDSHIAHCHIKSSNSPKAGAELYVGEDSIPVTVQGRHENLFVVKFSQPILSVLDQYGQLPIPPYFNREAEEIDTERYQTVFHDPEKIASVAAPTASLHFDQDLLEKLAAKGVKKTFVTLHVGAGTFMPVRTTDISNHIMHSEWCDVPQTTIDLILETKARGNKVIAVGTTATRALESAAQANQGETAAWTGDTQIFIYPGYQFCIVDRLITNFHLPESTLLMLVSALSNRDNILAAYTHAVEQRYRFFSYGDAMLIDKLEA

SEQ ID NO: 62762 - protein, 345 aa, Acinetobacter beijerinckii
  REGION 1..345: note = tr|N9DX61|N9DX61_9GAMM S-adenosylmethionine:tRNA ribosyltransferase-isomerase OS=Acinetobacter beijerinckii ANC 3835 OX=1217649 GN=queA PE=3 SV=1
MQLSDFSFDLPDELIARYPLESRSASRLLHIDAQGQHHDHAFTDILDLLEDGDLLVLNDTKVMKARLKGKRATGGAIEVLVERMLDSHIAHCHIKSSNSPKAGAELYVGEDSIPVTVQGRHENLFVVKFSQPILYVLDQYGQLPIPPYFNREAEEIDTERYQTVFHDPEKIASVAAPTASLHFDQDLLEKLAAKGVKKTFVTLHVGAGTFMPVRTTDISNHIMHSEWCDVPQTTIDLILETKARGNKVIAVGTTATRALESAAQANQGKIAAWTGDTQIFIYPGYQFCIVDRLITNFHLPESTLLMLVSALSNRDNILAAYTHAVEQRYRFFSYGDAMLIDKLIV

SEQ ID NO: 62763 - protein, 352 aa, Acinetobacter bereziniae
  REGION 1..352: note = tr|N8YVS0|N8YVS0_ACIBZ S-adenosylmethionine:tRNA ribosyltransferase-isomerase OS=Acinetobacter bereziniae NIPH 3 OX=1217651 GN=queA PE=3 SV=1
MMQLSDFSFELPDELIARYPLETRSASRLLHLNADGSYQDHSFTDILDLFDEGDLMVLNDTKVMKARLKGKRASGGAVEVLVERIFDQTIAHCHIKASNSPKAGAELFIGVDGVKATVQGRHENLFIVEFSQPILQVLDLYGQLPIPPYFNREAEAIDTERYQTVFNDPTKLASVAAPTASLHFDQSLLEKLKQKGIQQAFVTLHVGAGTFLPVRTDNIENHIMHSEWCDVPEATAKLIQETKARGNKVIAVGTTATRALESAAQASGGKIAAWTGDTQIFIYPGYQFCVVDRLITNFHLPESTLLMLVAALSNRDNILNAYRHAVEQKYRFFSYGDAMLIENANTEQMTAE

SEQ ID NO: 62764 - protein, 352 aa, Acinetobacter bereziniae
  REGION 1..352: note = tr|A0A0A8TP55|A0A0A8TP55_ACIBZ S-adenosylmethionine:tRNA ribosyltransferase-isomerase; OS = Acinetobacter bereziniae OX=106648 GN=queA PE=3 SV=1
MMQLSDFSFELPDELIARYPLETRSASRLLHLNADGSYQDHSFTDILDLFDEGDLMVLNDTKVMKARLKGKRASGGAVEVLVERIFDQTIAHCHIKASNSPKAGAELFIGVDGVKATVQGRHENLFIVEFSQPILQVLDLYGQLPIPPYFNREAEAIDTERYQTVFNDPTKLASVAAPTASLHFDQSLLEKLKQKGIQQAFVTLHVGAGTFLPVRTDNIENHIMHSEWCDVPEATAKLIQETKARGNKVIAVGTTATRALESAAQASGGKIAAWTGDTQIFIYPGYLFCVVDRLITNFHLPESTLLMLVAALSNRDNILNAYRHAVEQKYRFFSYGDAMLIENANIEQTTTE

SEQ ID NO: 62765 - protein, 345 aa, unidentified
  source 1..345: note = Acinetobacter bohemicus
  REGION 1..345: note = tr|A0A1I6ULV7|A0A1I6ULV7_9GAMM S-adenosylmethionine:tRNA ribosyltransferase-isomerase; OS = Acinetobacter bohemicus OX=1435036 GN=queA PE=3 SV=1
MQLSDFNFDLPDELIARYPLDTRSASRLLHLDQQGQYHDCHFTDIFDLLDAGDLLILNDTKVMKARLKGKRATGGAVEVLVERMQDKFIAHCHIKASNSPKAGAELFIGADEVKVTVQGRHENLFIVEFSQPILDVLDQYGALPIPPYFNREAEAIDTERYQTVFNDPTKLASVAAPTASLHFDQGLLEKLEAKGIQKAFVTLHVGAGTFLPVRTTDIQNHIMHSEWCDIPEQTVELIRQTKARGNKVISVGTTATRAVESAAQAHGGTLAAWTGDTQIFIYPGYDFKVVDRLITNFHLPESTLLMLVSALSNRDNILNAYHHAVEAKYRFFSYGDAMLVDKITA

SEQ ID NO: 62766 - protein, 345 aa, unidentified
  source 1..345: note = Acinetobacter bohemicus
  REGION 1..345: note = tr|N8QHJ4|N8QHJ4_9GAMM S-adenosylmethionine:tRNA ribosyltransferase-isomerase OS=Acinetobacter bohemicus ANC 3994 OX=1217715 GN=queA PE=3 SV=1
MQLSDFNFDLPDELIARYPLDTRSASRLLHLDQQGQYHDCHFTDIFDLLNAGDLLILNDTKVMKARLKGKRATGGAVEVLVERMQDKFIAHCHIKASNSPKAGAELFIGDDEIKVTVQGRHENLFIVEFSQPILNVLDQYGALPIPPYFNREAEAIDTERYQTVFNDPTKLASVAAPTASLHFDQGLLEKLEAKGIQKAFVTLHVGAGTFLPVRTTDIQNHIMHSEWCDVPEQTVELIRQTKARGNKVISVGTTATRAVESAAQAHGGTLAAWTGDTQIFIYPGYDFKVVDRLITNFHLPESTLLMLVSALSNRDNILDAYHHAVEAKYRFFSYGDAMLVDKITA

SEQ ID NO: 62767 - protein, 346 aa, unidentified
  source 1..346: note = Acinetobacter boissieri
  REGION 1..346: note = tr|A0A1G6GGB3|A0A1G6GGB3_9GAMM S-adenosylmethionine:tRNA ribosyltransferase-isomerase; OS = Acinetobacter boissieri OX=1219383 GN=queA PE=3 SV=1
MQLSDFNFDLPDELIARYPLPERSASRLLHIDATGQHHDHQFTDIIDLLNEGDLLVLNDTKVMKARLKGKRATGGAIEILVERMQDRHIAHCHIKSSNSPKAGASLFVGEDNVEVTVQGRHENLYIVEFSQPILDVLDRYGKLPIPPYFNREAEDIDTERYQTVFNDPTKLASVAAPTASLHFDEQLLENLKQKGITTAFVTLHVGAGTFLPVRTDHIENHIMHSEWCDVPQSTVEQIRTVKARGNQVISVGTTATRAIESAAQAHQGQLAAWTGDTQIFIYPGYQFCVIDRLITNFHLPESTLLMLVSALSSKDHILNAYQHAVAEKYRFFSYGDAMLIDQYQAV

SEQ ID NO: 62768 - protein, 346 aa, Acinetobacter bouvetii
  REGION 1..346: note = tr|A0A4Q7AVI8|A0A4Q7AVI8_9GAMM S-adenosylmethionine:tRNA ribosyltransferase-isomerase; OS = Acinetobacter bouvetii OX=202951 GN=queA PE=3 SV=1
MQLSDFSFDLPDELIARYPLETRSASRLLHLDVQGQYHDYHFTDILDLLQPGDLLVLNDTKVMKARLKGKRATGGAVEVLVERMMDKFVAHCHIKASNSPKEGAELFIGPDEVKVTVKGRHENLFIVEFSQSILDVLDKYGALPIPPYFNREAESIDTERYQTVFNDPAKLASVAAPTASLHFDEALLQKLEAKGINKTFVTLHVGAGTFLPVRTTDIENHIMHSEWCDVSDDSMALIRETKARGNKVIAVGTTATRATESAAQANGGELKGWTGDTQIFIYPGYEFKVVDRLITNFHLPESTLLMLVSALSNRDNILNAYHHAVDSQYRFFSYGDAMLIDNLNVK

SEQ ID NO: 62769 - protein, 346 aa, Acinetobacter bouvetii
  REGION 1..346: note = tr|N9C857|N9C857_9GAMM S-adenosylmethionine:tRNA ribosyltransferase-isomerase OS=Acinetobacter bouvetii DSM 14964 = CIP 107468 OX=1120925 GN=queA PE=3 SV=1
MQLSDFSFDLPDELIARYPLETRSASRLLHLDVQGQYHDYHFTDILDLLQPGDLLLLNDTKVMKARLKGKRATGGAVEVLVERMMDKFVAHCHIKASNSPKEGAELFIGPDEVKVTVKGRHENLFIVEFSQSILDVLDKYGALPIPPYFNREAESIDTERYQTVFNDPTKLASVAAPTASLHFDEALLKKLEAKGINKTFVTLHVGAGTFLPVRTTDIENHIMHSEWCDVSDESMALIRETKARGNKVIAVGTTATRATESAAQANGGELKGWTGDTQIFIYPGYEFKVVDRLITNFHLPESTLLMLVSALSNRDNILNAYHHAVDSQYRFFSYGDAMLIDNLNVK

SEQ ID NO: 62770 - protein, 343 aa, Acinetobacter brisouii
  REGION 1..343: note = tr|V2UNK0|V2UNK0_9GAMM S-adenosylmethionine:tRNA ribosyltransferase-isomerase OS=Acinetobacter brisouii CIP 110357 OX=1341683 GN=queA PE=3 SV=1
MQLSDFNFELPDHLIARYPLQSRTSSRLLHLHADGKYQDHCFTDILELFNPGDLMILNDTKVMKARLKGKRATGGAVEVLVERMQDQFIAHCHIKASNSPKAGAELFIGADEVKVTVQGRHENLFIVEFSQPILAVLDRYGQLPIPPYFNREAEAIDTERYQTVFHDPNKLASVAAPTASLHFDQQLLVELEQKGIQKSFVTLHVGAGTFLPVRTDNIENHIMHSEWCDVPQHTVDLIRETQARGNKVIAVGTTATRALESAAQAHGGKIGAWTGDTQIFIYPGYEFCVVDRLITNFHLPESTLLMLVSALSNQENILNAYRHAVKQQYRFFSYGDAMLIDRA

SEQ ID NO: 62771 - protein, 345 aa, Acinetobacter calcoaceticus; identical to SEQ ID NO: 62759
  REGION 1..345: note = tr|A0A380VJQ8|A0A380VJQ8_ACICA S-adenosylmethionine:tRNA ribosyltransferase-isomerase; OS = Acinetobacter calcoaceticus OX=471 GN=queA PE=3 SV=1

SEQ ID NO: 62772 - protein, 345 aa, Acinetobacter calcoaceticus
  REGION 1..345: note = tr|N9EN63|N9EN63_ACICA S-adenosylmethionine:tRNA ribosyltransferase-isomerase OS=Acinetobacter calcoaceticus ANC 3680 OX=1217653 GN=queA PE=3 SV=1
MQLSDFSFELPDELIARYPLESRSASRLLHLDSKGQYHDHMFTDIIDLFEEGDLLVLNDTKVMKARLKGKRSTGGAIEILVERMLNHTTAYCHIKSSNSPKAGAELFVGADNIPVIVRGRHENLFVVEFSQPILPALEQYGQLPIPPYFNREAEEIDTERYQTVFHNPEKIASVAAPTASLHFDEELLAKLEQKNVQKTFVTLHVGAGTFMPVRTDDITNHIMHSEWCDVPQETIDLILATKARGNKVIAIGTTATRALESAAQAHSGKIAAWTGDTQIFIYPGYEFCIVDRLITNFHLPESTLLMLVSALSNRDNILAAYEHAVKSRYRFFSYGDAMLIDKVEV

SEQ ID NO: 62773 - protein, 345 aa, Acinetobacter calcoaceticus
  REGION 1..345: note = tr|A0A2S4SYP5|A0A2S4SYP5_9GAMM S-adenosylmethionine:tRNA ribosyltransferase-isomerase; OS = Acinetobacter calcoaceticus/baumannii complex sp. ABNIH27 OX=2080673 GN=queAPE=3 SV=1
MQLSDFSFELPDELIARYPLETRSASRLLHLDAKGQYHDHMFTDIIDLFEEGDLLVLNDTKVMKARLKGKRATGGAIEILVERMLNHTTAYCHIKASNSPKAGAELFVGAGNIPVIVRGRHENLFVVEFSQPILPVLEQYGQLPIPPYFNREAEAIDTERYQTVFHNPEKIASVAAPTASLHFDEELLAKLDQKGVKKTFVTLHVGAGTFMPVRTDDITNHVMHSEWCDVPQETIDLILATKARGNKVIAVGTTATRALESAAQAHGGKIAAWTGDTQIFIYPGYEFCIVDRLITNFHLPESTLLMLVSALSNRENILAAYEHAVKDRYRFFSYGDAMLIDKLEV

SEQ ID NO: 62774 - protein, 346 aa, unidentified
  source 1..346: note = Acinetobacter celticus
  REGION 1..346: note = tr|A0A1C3CUM2|A0A1C3CUM2_9GAMM S-adenosylmethionine:tRNA ribosyltransferase-isomerase; OS = Acinetobacter celticus OX=1891224 GN=queA PE=3 SV=1
MQLSDFNFNLPDELIARYPLETRSASRLLHLDTQGQYHDHHFTDILDLLNEGDLLVLNDTKVMKARLKGKRATGGAVEVLVERMMDKFTAHCHIKASNSPKEGAELFIGPDEVKVTVKGRHENLFIVEFSQPILNVLDLYGALPIPPYFNREAEAIDTERYQTVFNDPTKLASVAAPTASLHFDEDLLKKLEAKGIQKTFVTLHVGAGTFLPVRTTDIQNHIMHSEWCDVSDEAMAIIKATKARGNKVIAVGTTATRATESAAQANGGELKAWTGDTQIFIYPGYEFKVIDRLITNFHLPESTLLMLVSAMSNRDNILNAYNHAVDKQYRFFSYGDAMLIDNLNVK

SEQ ID NO: 62775 - protein, 345 aa, unidentified
  source 1..345: note = Acinetobacter colistiniresistens
  REGION 1..345: note = tr|N9PTD2|N9PTD2_9GAMM S-adenosylmethionine:tRNA ribosyltransferase-isomerase OS=Acinetobacter colistiniresistens OX=280145 GN=queA PE=3 SV=1
MQLSDFSFDLPDELIARYPLDSRSASRLLHIDAQGQYHDHAFTDILDLLEDGDLLVLNDTKVMKARLKGKRATGGAIEVLVERMLDTHTAHCHIKSSNSPKAGAELYIGEDAVPVTVQGRHENLFVVKFSQPILSVLDQYGQLPIPPYFNREAEEIDTERYQTVFHDPEKIASVAAPTASLHFDQGLLEKLEAKGVQKTFVTLHVGAGTFMPVRTTDITNHIMHSEWCDVPQATIDLILATKARGNKVIAVGTTATRALESAAQANQGKIAAWTGDTQIFIYPGYQFCIVDRLITNFHLPESTLLMLVSALSNRDNILAAYTHAVEQRYRFFSYGDAMLVDKLDA

SEQ ID NO: 62776 - protein, 345 aa, unidentified
  source 1..345: note = Acinetobacter colistiniresistens
  REGION 1..345: note = tr|S3SZP4|S3SZP4_9GAMM S-adenosylmethionine:tRNA ribosyltransferase-isomerase OS=Acinetobacter colistiniresistens OX=280145 GN=queA PE=3 SV=1
MQLSDFSFDLPDELIARYPLDSRSASRLLHIDAQGQYHDHAFTDILDLLEDGDLLVLNDTKVMKARLKGKRATGGAIEVLVERMLDTHTAHCHIKSSNSPKAGAELYIGEDAVPVTVQGRHENLFVVKFSQPILSVLDQYGQLPIPPYFNREAEEIDTERYQTVFHDPEKIASVAAPTASLHFDQGLLEKLAAKGVQKTFVTLHVGAGTFMPVRTTDITNHIMHSEWCDVPQATIDLILATKARGNKVIAVGTTATRALESAAQANQGQIAAWTGDTQIFIYPGYQFCIVDRLITNFHLPESTLLMLVSALSNRDNILAAYKHAVEQRYRFFSYGDAMLVDELDA

SEQ ID NO: 62777 - protein, 346 aa, unidentified
  source 1..346: note = Acinetobacter cumulans
  REGION 1..346: note = tr|A0A3A8G4S4|A0A3A8G4S4_9GAMM S-adenosylmethionine:tRNA ribosyltransferase-isomerase; OS = Acinetobacter cumulans OX=2136182 GN=queA PE=3 SV=1
MQLSDFSFDLPDELIARYPLENRTSSRLLHLDTTGQYHDHCFTDILDLLNEGDLLVLNDTKVMKARLKGKRATGGAIEVLVERILDPQTAHCHIKASNTPKEGAELFIGPDEVKVTVKGRHENLFVVEFSQPILQVLDLYGALPIPPYFNREAEAIDTERYQTVFNDPTKLASVAAPTASLHFDKALLAKLKAKGVQTTFVTLHVGAGTFLPVRTTDIENHIMHSEWCDVSDESMALIRETKARGNKVIAVGTTATRATESAAQANGGELKGWTGDTQIFIYPGYEFKVVDRLITNFHLPESTLLMLVSALSNRDNILNAYNHAVASKYRFFSYGDAMLIDNINLK

SEQ ID NO: 62778 - protein, 346 aa, unidentified
  source 1..346: note = Acinetobacter cumulans
  REGION 1..346: note = tr|A0A498D6P0|A0A498D6P0_9GAMM S-adenosylmethionine:tRNA ribosyltransferase-isomerase; OS = Acinetobacter cumulans OX=2136182 GN=queA PE=3 SV=1
MQLSDFSFDLPDELIARYPLENRTASRLLHLDTTGQYHDHCFTDILDLLNEGDLLVLNDTKVMKARLKGKRATGGAIEVLVERILDPQTAHCHIKASNTPKEGAELFIGPDEVKVTVKGRHENLFVVEFSQPILQVLDLYGALPIPPYFNREAEAIDTERYQTVFNDPTKLASVAAPTASLHFDEALLAKLKAKGVQTTFVTLHVGAGTFLPVRTTDIENHIMHSEWCDVSDESMALIRETKARGNKVIAVGTTATRATESAAQANGGELKGWTGDTQIFIYPGYEFKVVDRLITNFHLPESTLLMLVSALSNRDNILNAYNHAVASKYRFFSYGDAMLIDNINLK

SEQ ID NO: 62779 - protein, 345 aa, unidentified
  source 1..345: note = Acinetobacter defluvii
  REGION 1..345: note = tr|A0A2S2FAU0|A0A2S2FAU0_9GAMM S-adenosylmethionine:tRNA ribosyltransferase-isomerase; OS = Acinetobacter defluvii OX=1871111 GN=queA PE=3 SV=1
MQLSDFNFDLPDELIARYPLEARSASRLLHLNADGSYQDHHFTDILDLFEAGDLMVLNDTKVMKARLKGKRATGGAVEVLVERIFDQTIAHCHIKASNSPKAGAELFMGSDEVKVTVTGRHENLFVVEFSQPILQVLDAYGQLPIPPYFNREAEAIDTERYQTVFNDPTKLASVAAPTASLHFDEDLLAKLAQKGVNKTFVTLHVGAGTFLPVRTTDIENHIMHSEWCEVSETAAQMIQETQAHGNKVIAIGTTATRAVESAAQACGGKIGAWTGDTQIFIYPGYPFCVVDRLITNFHLPESTLLMLVSALSSKENILKAYQHAVENKYRFFSYGDAMLIEKTSV

SEQ ID NO: 62780 - protein, 345 aa, unidentified
  source 1..345: note = Acinetobacter equi
  REGION 1..345: note = tr|A0A0N9VDJ2|A0A0N9VDJ2_9GAMM S-adenosylmethionine:tRNA ribosyltransferase-isomerase; OS = Acinetobacter equi OX=1324350 GN=queA PE=3 SV=1
MQLSDFNFDLPDELIARYPLKTRSASRLLHLDANGTYHDHQFTDILDLLSPGDLLVLNDTKVMKARLKGKRATGGAVEVLVERMQDKFIAHCHIKASNSPKPGAELFIGEDQVKVTVQGRHENLFIVEFSQPILDVLDQYGSLPIPPYFNREAEDIDTERYQTVFNDPTKLASVAAPTASLHFDEVLLKKLEEKGINKTFVTLHVGAGTFLPVRTNDIENHIMHSEWCDVSDASMQLIKETKARGNRVIAVGTTATRATESAAQANGGELKGWTGDTQIFIYPGYEFKVVDRLITNFHLPESTLLMLVSALSNRDNILNAYNHAVTEKYRFFSYGDAMLIDNQAK

SEQ ID NO: 62781 - protein, 346 aa, unidentified
  source 1..346: note = Acinetobacter gandensis
  REGION 1..346: note = tr|A0A1A7R7G0|A0A1A7R7G0_9GAMM S-adenosylmethionine:tRNA ribosyltransferase-isomerase; OS = Acinetobacter gandensis OX=1443941 GN=queA PE=3 SV=1
MQLSDFNFNLPDELIARYPLETRSASRLLHLDRQGQYHDQHFTDILDLLEPGDLLVLNDTKVMKARLKGKRATGGAIEVLVERILDPQTAHCHIKASNTPKEGAELFIGPDEVKVTVKGRHENLFVVEFSQPILQVLDLYGALPIPPYFNREAESIDTERYQTVFNDPTKLASVAAPTASLHFDEALLEKLAAKGINKTFVTLHVGAGTFLPVRTNDIENHIMHSEWCDVSEDSMALIRETKARGNKVIAVGTTATRATESAAQANGGELKAWTGDTQIFIYPGYEFKVVDRLITNFHLPESTLLMLVSALSNRDNILNAYHHAVESKYRFFSYGDAMLIDNINVK

SEQ ID NO: 62782 - protein, 345 aa, unidentified
  source 1..345: note = Acinetobacter genomosp.
  REGION 1..345: note = tr|A0A1V2V5K0|A0A1V2V5K0_9GAMM S-adenosylmethionine:tRNA ribosyltransferase-isomerase; OS = Acinetobacter genomosp. 33YU OX=1675530 GN=queA PE=3; SV = 1
MQLSDFSFELPDELIARYPLESRSASRLLHLDSKGQYHDHMFTDIIDLFEEGDLLVLNDTKVMKARLKGKRSTGGAIEILVERMLNHTTAYCHIKSSNSPKAGAELYVGADNIPVIVRGRHENLFVVEFSQPILPVLEQYGQLPIPPYFNREAEEIDTERYQTVFHNPEKIASVAAPTASLHFDEELLAKLEQKNVQKSFVTLHVGAGTFMPVRTDDITNHVMHSEWCDVPQETIDLILATKARGNKVIAVGTTATRALESAAQAHGGKIAAWNGDTQIFIYPGYEFCIVDRLITNFHLPESTLLMLVSALSNRDNILAAYEHAVKSRYRFFSYGDAMLIDKLEV

SEQ ID NO: 62783 - protein, 345 aa, unidentified
  source 1..345: note = Acinetobacter genomosp.
  REGION 1..345: note = tr|A0A1V2UP04|A0A1V2UP04_9GAMM S-adenosylmethionine:tRNA ribosyltransferase-isomerase; OS = Acinetobacter genomosp. 33YU OX=1675530 GN=queA PE=3; SV = 1
MQLSDFSFELPDELIARYPLESRSASRLLHLDSKGQYHDHMFTDIIDLFEEGDLLVLNDTKVMKARLKGKRSTGGAIEILVERMLNHTTAYCHIKSSNSPKAGAELYVGTDNIPVIVRGRHENLFVVEFSQPILPVLEQYGQLPIPPYFNREAEEIDTERYQTVFHNPEKIASVAAPTASLHFDEELLAKLERKNVQKSFVTLHVGAGTFMTVRTDDITNHVMHSEWCDVPQETIDLILATKARGNKVIAVGTTATRALESAAQAHGGKIAAWNGDTQIFIYPGYEFCIVDRLITNFHLPESTLLMLVSALSNRDNILAAYEHAVKDRYRFFSYGDAMLIDKLEV

SEQ ID NO: 62784 - protein, 344 aa, Acinetobacter gerneri
  REGION 1..344: note = tr|N8ZKW2|N8ZKW2_9GAMM S-adenosylmethionine:tRNA ribosyltransferase-isomerase OS=Acinetobacter gerneri DSM 14967 = CIP 107464 OX=1120926 GN=queA PE=3 SV=1
MQLSDFNFDLPDELIARYPLETRSASRLLHLKADGQYQDHHFTDILDIFEPGDLLVLNDTKVMKARLKGKRATGGAVEVLVERIFDQTIAHCHIKASNAPKAGAELFIGPDEVKVTVTGRHENLFVVEFSQPILNVLDQYGQLPIPPYFNREAEAIDTERYQTVFNDPTKLASVAAPTASLHFDQDLLQKLEQKGVQKTFVTLHVGAGTFLPVRTTDIENHIMHSEWCEVSEQAAQLIAETKARGNKVIAVGTTATRATESAAQACGGKIGAWTGDTQIFIYPGYQFCVVDRLITNFHLPESTLLMLVSALSNRDNILNAYHHAVASKYRFFSYGDAMLIDKAL

SEQ ID NO: 62785 - protein, 346 aa, Acinetobacter guillouiae
  REGION 1..346: note = tr|N8X1H7|N8X1H7_ACIGI S-adenosylmethionine:tRNA ribosyltransferase-isomerase OS=Acinetobacter guillouiae NIPH 991 OX=1217656 GN=queA PE=3 SV=1
MMQLSDFNFELPDELIARYPLETRSASRLLHLNADGSYQDLHFTDVFDLFNEGDLLVLNDTKVMKARLKGKRASGGAIEVLVERIFDQTIAHCHIKASNSPKAGAELFIGKDEVKVTVTGRHENLFVVEFSQPILQVLDLYGQLPIPPYFNREAEAIDTERYQTVFNDPTKLASVAAPTASLHFDQALLEKLEQKGVNKAFVTLHVGAGTFLPVRIDQIENHIMHSEWCDVPEATAKLIQETKARGNKVIAVGTTATRALESAAQASGGKIAAWTGDTQIFIYPGYQFCVVDRLITNFHLPESTLLMLVSALSNRDNIMNAYQHAVASKYRFFSYGDAMLIENANG

SEQ ID NO: 62786 - protein, 346 aa, Acinetobacter guillouiae
  REGION 1..346: note = tr|N8S6Z8|N8S6Z8_ACIGI S-adenosylmethionine:tRNA ribosyltransferase-isomerase OS=Acinetobacter guillouiae CIP 63.46 OX=1217655 GN=queA PE=3 SV=1
MMQLSDFNFELPDELIARYPLETRSASRLLHLNADGSYQDLHFTDVFDLFNEGDLLVLNDTKVMKARLKGKRASGGAIEVLVERIFDQTIAHCHIKASNSPKAGAELFIGKDEVKVTVTGRHENLFVVEFSQPILQVLDLYGQLPIPPYFNREAEAIDTERYQTVFNDPTKLASVAAPTASLHFDQALLEKLEQKGVNKAFVTLHVGAGTFLPVRTDQIENHIMHSEWCDVPEATAKLIQETKARGNKVIAVGTTATRALESAAQASGGKIATWTGDTQIFIYPGYQFCVVDRLITNFHLPESTLLMLVSALSNRDNIMNAYQHAVASKYRFFSYGDAMLIENANG

SEQ ID NO: 62787 - protein, 345 aa, Acinetobacter gyllenbergii
  REGION 1..345: note = tr|V2TFY6|V2TFY6_9GAMM S-adenosylmethionine:tRNA ribosyltransferase-isomerase OS=Acinetobacter gyllenbergii NIPH 230 OX=1217658 GN=queA PE=3 SV=1
MQLSDFSFDLPDELIARYPLDSRSASRLLHIDAQGQYHDHAFTDILDLLEDGDLLVLNDTKVMKARLKGKRATGGAIEVLVERMLDTHTAHCHIKSSNSPKAGAELYIGEDAVPVTVQGRHENLFVVKFSQPILSVLDQYGQLPIPPYFNREAEEIDTERYQTVFHDPEKIASVAAPTASLHFDQGLLEKLAAKGVQKTFVTLHVGAGTFMPVRTTDITNHIMHSEWCDVPQATIDLILATKARGNKVIAVGTTATRALESAAQANQGQIAAWTGDTQIFIYPGYQFCIVDRLITNFHLPESTLLMLVSALSNRDNILAAYTHAVEQRYRFFSYGDAMLVDKLDA

SEQ ID NO: 62788 - protein, 345 aa, Acinetobacter gyllenbergii
  REGION 1..345: note = tr|A0A1B8U948|A0A1B8U948_9GAMM S-adenosylmethionine:tRNA ribosyltransferase-isomerase; OS = Acinetobacter gyllenbergii OX=134534 GN=queA PE=3 SV=1
MQLSDFSFDLPDELIARYPLDSRSASRLLHIDAQGQYHDHAFTDILDLLEDGDLLVLNDTKVMKARLKGKRATGGAIEVLVERMLDTHNAHCHIKSSNSPKAGAELYIGEDAVPVTVQGRHENLFVVKFSQPILSVLDQYGQLPIPPYFNREAEEIDTERYQTVFHDPEKIASVAAPTASLHFDQGLLEKLAAKGVQKTFVTLHVGAGTFMPVRTTDITNHIMHSEWCDVPQATIDLILATKVRGNKVIAVGTTATRALESAAQANQGQIAAWTGDTQIFIYPGYQFCIVDRLITNFHLPESTLLMLVSALSNRDNILAAYTHAVEQRYRFFSYGDAMLVDKLDA

SEQ ID NO: 62789 - protein, 349 aa, Acinetobacter haemolyticus
  REGION 1..349: note = tr|D4XTF4|D4XTF4_ACIHA S-adenosylmethionine:tRNA ribosyltransferase-isomerase OS=Acinetobacter haemolyticus ATCC 19194 OX=707232 GN=queA PE=3 SV=1
MVKKNMQLSDFSFDLPDELIAPYPLESRSASRLLHIDAQGHYHDHAFTDILDLLEEGDLLVLNDTKVMKARLKGKRATGGAIEVLVERILDTHTAHCHIKSSNSPKAGAELYIGEDAVPVTVQGRHENLFVVKFSQPILSVLDQYGQLPIPPYFNREAEEIDTERYQTVFHDPEKIASVAAPTASLHFDQSLLEKLATKGVQKTFVTLHVGAGTFMPVRTTDITNHIMHSEWCDVPQATIDLILATKARGNKVIAVGTTATRALESAAQANQGQIAAWTGDTQIFIYPGYQFCIVDRLITNFHLPESTLLMLVSALSNRDNILAAYKHAVEQRYRFFSYGDAMLIDKLA

SEQ ID NO: 62790 - protein, 344 aa, Acinetobacter haemolyticus
  REGION 1..344: note = tr|N9FFM0|N9FFM0_ACIHA S-adenosylmethionine:tRNA ribosyltransferase-isomerase OS=Acinetobacter haemolyticus NIPH 261 OX=1217986 GN=queA PE=3 SV=1
MQLSDFSFDLPDELIARYPLESRSASRLLHIDAQGQYYDHAFTDILDLLEEGDLLVLNDTKVMKARLKGKRATGGAIEILVERMLDTHTAHCHIKSSNSPKAGAELYVGEDAVPVTVQGRHENLFVVEFSQPILSALDQYGQLPIPPYFNREAEEIDTERYQTVFHNPEKIASVAAPTASLHFDQDLLEKLAAKGIQKTFVTLHVGAGTFMPVRTTDITNHIMHSEWCDVPQATIDLILETKARGNKVIAVGTTATRALESAAQANDGKIAAWTGDTQIFIYPGYQFCIVDRLITNFHLPESTLLMLVSALSNRDNILAAYKHAVEQRYRFFSYGDAMLIDKLA

SEQ ID NO: 62791 - protein, 344 aa, unidentified
  source 1..344: note = Acinetobacter halotolerans
  REGION 1..344: note = tr|A0A4Q6X9L5|A0A4Q6X9L5_9GAMM S-adenosylmethionine:tRNA ribosyltransferase-isomerase; OS = Acinetobacter halotolerans OX=1752076 GN=queA PE=3 SV=1
MQLSDFSFDLPDELIARYPLESRSASRLLHIDAQGQYHDHAFTDILDLLEDGDLLVLNDTKVMKARLKGKRATGGAIEVLVERMLDTHTAHCHIKSSNSPKAGAELYIGEDAVPVTVQGRHENLFVVKFSQPILSVLDQYGQLPIPPYFNREAEEIDTERYQTVFHDPEKIASVAAPTASLHFDQDLLAKLAAKGIQKTFVTLHVGAGTFMPVRTTDISNHIMHSEWCDVPQATIDLILATKARGNKVISVGTTATRALESAAQANGGKIAAWTGDTQIFIYPGYQFCMVDRLITNFHLPESTLLMLVSALSNRNNILAAYQHAVEQRYRFFSYGDAMLIDQLA

SEQ ID NO: 62792 - protein, 344 aa, unidentified
  source 1..344: note = Acinetobacter idrijaensis
  REGION 1..344: note = tr|A0A098YIJ2|A0A098YIJ2_9GAMM S-adenosylmethionine:tRNA ribosyltransferase-isomerase; OS = Acinetobacter idrijaensis OX=1507807 GN=queA PE=3 SV=1
MQLSDFNFDLPDELIARYPLETRSASRLLHLDAQGQYHDHQFTDILDLLEDGDLLVLNDTKVMKARLKGKRASGGAVEVLVERMQDRFIAYCHIKASNTPKAGAELFIGPDAVKVTVQGRHENLFIVEFSQPILDVLDQYGALPIPPYFNREAEEIDTERYQTVFNDPTKLASVAAPTASLHFDADLLAKLEAKGIQKTFVTLHVGAGTFLPVRTDDIQNHIMHSEWCDVPETAVEMIRQTKARGNKVISVGTTATRAVESAAQAHNGELAAWTGDTQIFIYPGYQFKVVDRLITNFHLPESTLLMLVSALSNRDNILNAYKHAVDSQYRFFSYGDAMLIDQAK

SEQ ID NO: 62793 - protein, 345 aa, unidentified
  source 1..345: note = Acinetobacter indicus
  REGION 1..345: note = tr|V2UAT4|V2UAT4_9GAMM S-adenosylmethionine:tRNA ribosyltransferase-isomerase OS=Acinetobacter indicus CIP 110367 OX=1341679 GN=queA PE=3 SV=1
MQLSDFNFDLPDELIARYPLEQRSASRLLHVNAEGQYQDHQFTDLVDLLEAGDVLVLNDTKVMKARLKGKRATGGAVEVLVERMQDQFIAHCHIKASNSPKAGAELFIGPDEVKVTVQGRHENLFIVEFSQPILEVLDRYGALPIPPYFNREAEAIDTERYQTVFNDPTKLASVAAPTASLHFDAELLAKLEAKGIQKTFVTLHVGAGTFLPVRTTDIENHIMHSEWCDVPTAAVEMIQQAKARGNKVISVGTTATRAVESAAQAHGGTLAAWTGDTQIFIYPGYKFKVVDRLITNFHLPESTLLMLVSALSSRENIMRAYQHAVAQRYRFFSYGDAMLIDQAHS

SEQ ID NO: 62794 - protein, 345 aa, unidentified
  source 1..345: note = Acinetobacter indicus
  REGION 1..345: note = tr|A0A437J036|A0A437J036_9GAMM S-adenosylmethionine:tRNA ribosyltransferase-isomerase; OS = Acinetobacter indicus OX=756892 GN=queA PE=3 SV=1
MQLSDFNFDLPDELIARYPLEQRSASRLLHVNAEGQYQDHQFTDIVNLLEAGDVLVLNDTKVMKARLKGKRATGGAVEVLVERMQDQFIAHCHIKASNSPKAGAELFIGPDEVKVTVQGRHENLFIVEFSQPILEVLDRYGALPIPPYFNREAEAIDTERYQTVFNDPNKLASVAAPTASLHFDAELLAKLEAKGIQKTFVTLHVGAGTFLPVRTTDIENHIMHSEWCDVPAAAVEMIQQAKARGNKVISVGTTATRAVESAAQAHGGTLAAWTGDTQIFIYPGYKFKVVDRLITNFHLPESTLLMLVSALSSRENIMRAYQHAVAQRYRFFSYGDAMLIDQAHS

SEQ ID NO: 62795 - protein, 346 aa, Acinetobacter johnsonii
  REGION 1..346: note = tr|A0A0U3SL70|A0A0U3SL70_ACIJO S-adenosylmethionine:tRNA ribosyltransferase-isomerase; OS = Acinetobacter johnsonii XBB1 OX=1242245 GN=queA PE=3; SV = 1
MQLSDFNFDLPDELIARYPLDTRSASRLLHLDAQGQHHDFQFTDILDLLNAGDLLVLNDTKVMKARLKGKRASGGAIEVLVERMQDAFIAHCHIKASNTPKAGAELFIGPDAVKITILGRHENLFIVEFSQPILTVLELYGQLPIPPYFNREAEAIDTERYQTVFNDPTKLASVAAPTASLHFDQKLLDQLEAKGIQKTFVTLHVGAGTFLPVRTDDIANHIMHSEWCDVPEHSVELIRQTKARGNKVISVGTTATRAVESAAQAHDGELKAWTGDTQIFIYPGYEFKVVDRLITNFHLPESTLLMLVSALSNRDNILMAYQHAVANQYRFFSYGDAMLVDQLQPK

SEQ ID NO: 62796 - protein, 346 aa, Acinetobacter johnsonii
  REGION 1..346: note = tr|N9CTH7|N9CTH7_ACIJO S-adenosylmethionine:tRNA ribosyltransferase-isomerase OS=Acinetobacter johnsonii ANC 3681 OX=1217662 GN=queA PE=3 SV=1
MQLSDFNFDLPDELIARYPLDTRSASRLLHLDAQGQHHDFQFTDILDLLDAGDLLVLNDTKVMKARLKGKRASGGAVEVLVERMQDAFIAHCHIKASNTPKAGAELFIGPDAVKVTVLGRHENLFIVEFSQPILTVLDLYGQLPIPPYFNREAEAIDTERYQTVFNDPTKLASVAAPTASLHFDQKLLDQLEAKGIQKTFVTLHVGAGTFLPVRTDDIANHIMHSEWCDVPEHAVELIRQTKARGNKVISVGTTATRAVESAAQAHQGELKAWTGDTQIFIYPGYEFKVVDRLITNFHLPESTLLMLVSALSNRDNILAAYQHAVANQYRFFSYGDAMLVDQLQPK

SEQ ID NO: 62797 - protein, 345 aa, Acinetobacter junii
  REGION 1..345: note = tr|D0SL65|D0SL65_ACIJU S-adenosylmethionine:tRNA ribosyltransferase-isomerase OS=Acinetobacter junii SH205; OX = 575587 GN=queA PE=3 SV=1
MQLSDFSFDLPDELIARYPLESRSASRLLHIDDQGHYHDHSFTDILDLLNEGDLLVLNDTKVMKARLKGKRATGGAIEVLVERMLDTHTAHCHIKSSNSPKAGAELYIGEDSVPVTVQGRHENLFVVEFSQPILSILDQYGQLPIPPYFNREAEEIDTERYQTVFHDPEKIASVAAPTASLHFDQDLLEKLAAKGVQKTFVTLHVGAGTFMPVRTTDITNHIMHSEWCDVPQSTIDLILETKARGNKVIAVGTTATRALESAAQANDGKIAAWTGDTQIFIYPGYQFCIVDRLITNFHLPESTLLMLVSALSNRDNILSAYEHAVKERYRFFSYGDAMLIDKLIV

SEQ ID NO: 62798 - protein, 345 aa, Acinetobacter junii
  REGION 1..345: note = tr|A0A365PK99|A0A365PK99_ACIJU S-adenosylmethionine:tRNA ribosyltransferase-isomerase; OS = Acinetobacter junii OX=40215 GN=queA PE=3 SV=1
MQLSDFSFDLPDELIARYPLESRSASRLLHIDDQGHYHDHSFTDILDLLNEGDLLVLNDTKVMKARLKGKRATGGAIEVLVERMLDTHTAHCHIKSSNSPKAGAELYIGEDSVPVTVKGRHENLFVVEFSQPILSILDQYGQLPIPPYFNREAEEIDTERYQTVFHDPEKIASVAAPTASLHFDQDLLEKLAAKGVQKTFVTLHVGAGTFMPVRTTDITNHIMHSEWCDVPQSTIDLILETKARGNKVIAVGTTATRALESAAQANDGKIAAWTGDTQIFIYPGYQFCIVDRLITNFHLPESTLLMLVSALSNRDNILSAYEHAVKERYRFFSYGDAMLIDKLIV

SEQ ID NO: 62799 - protein, 345 aa, unidentified
  source 1..345: note = Acinetobacter kookii
  REGION 1..345: note = tr|A0A1G6N1S0|A0A1G6N1S0_9GAMM S-adenosylmethionine:tRNA ribosyltransferase-isomerase; OS = Acinetobacter kookii OX=1226327 GN=queA PE=3 SV=1
MQLSDFNFDLPDELIARYPLETRSASRLLHLDAQGQYHDHQFTDILNLLNEGDLLVLNDTKVMKARLKGKRATGGAVEVLVERMLDKFIAHCHIKASNSPKEAAELFIGPDEVKVTVKGRHENLFIVEFSQPILNVLDLYGALPIPPYFNREAESIDTERYQTVFNDPTKLASVAAPTASLHFDEALLKKLEEKGIQKTFVTLHVGAGTFLPVRTNDIENHIMHSEWCDVSEESMALIRETKARGNKVIAVGTTATRATESAAQANGGELKGWTGDTQIFIYPGYEFKVVDRLITNFHLPESTLLMLVSALSNRDNILNAYHHAVEAKYRFFSYGDAMLVDKITP

SEQ ID NO: 62800 - protein, 345 aa, unidentified
  source 1..345: note = Acinetobacter kyonggiensis
  REGION 1..345: note = tr|A0A1H3JY53|A0A1H3JY53_9GAMM S-adenosylmethionine:tRNA ribosyltransferase-isomerase; OS = Acinetobacter kyonggiensis OX=595670 GN=queA PE=3 SV=1
MQLSDFNFDLPDELIARYPLDTRSASRLLHLDQQGQYHDCHFTDIFDLLDAGDLLILNDTKVMKARLKGKRATGGAVEVLVERMQDKFIAHCHIKASNSPKAGAELFIGDDEVKVTVQGRHENLFIVEFSQPILDVLDQYGALPIPPYFNREAEAIDTERYQTVFNDPTKLASVAAPTASLHFDQDLLEKLTAKGIQKSFVTLHVGAGTFLPVRTTDIQNHIMHSEWCDVPEQTVELIRQTKARGNKVITVGTTATRAIESAAQAHGGTLAAWTGDTQIFIYPGYDFKVVDRLITNFHLPESTLLMLVSALSNRDNILQAYHHAVEAKYRFFSYGDAMLVDKIKP

SEQ ID NO: 62801 - protein, 345 aa, unidentified
  source 1..345: note = Acinetobacter lactucae
  REGION 1..345: note = tr|A0A1V0K7Z2|A0A1V0K7Z2_9GAMM S-adenosylmethionine:tRNA ribosyltransferase-isomerase; OS = Acinetobacter lactucae OX=1785128 GN=queA PE=3 SV=1
MQLSDFSFELPDELIARYPLETRSASRLLHLDSKGQYHDHMFTDIIDLFEEGDLLVLNDTKVMKARLKGKRSTGGAIEILVERMLNHTTAYCHIKSSNSPKAGAELFVGADNIPVIVRGRHENLFVVEFSQPILPVLEQYGQLPIPPYFNREAEEIDTERYQTVFHNPEKIASVAAPTASLHFDEELLAKLEQKNVQKSFVTLHVGAGTFMPVRTDDITNHVMHSEWCDVPQETIELILETKARGNKVIAVGTTATRALESAAQAHGGKIAAWTGDTQIFIYPGYEFCIVDRLITNFHLPESTLLMLVSALSNRDNILAAYKHAVKDRYRFFSYGDAMLIDKLEV

SEQ ID NO: 62802 - protein, 345 aa, unidentified
  source 1..345: note = Acinetobacter lactucae
  REGION 1..345: note = tr|A0A3R9Q8D7|A0A3R9Q8D7_9GAMM S-adenosylmethionine:tRNA ribosyltransferase-isomerase; OS = Acinetobacter lactucae OX=1785128 GN=queA PE=3 SV=1
MQLSDFSFELPDELIARYPLESRSASRLLHLDSKGQYHDHMFTDIIDLFEEGDLLVLNDTKVMKARLKGKRSTGGAIEILVERMLNHTTAYCHIKSSNSPKAGAELFVGADNIPVIVRGRHENLFVVEFSQPILPVLEQYGQLPIPPYFNREAEEIDTERYQTVFHNPEKIASVAAPTASLHFDEELLAKLERKNVQKSFVTLHVGAGTFMPVRTDDITNHVMHSEWCDVPQETIDLILATKARGNKVIAVGTTATRALESAAQAHGGKIAAWTGDTQIFIYPSYEFCIVDRLITNFHLPESTLLMLVSALSNRDNILAAYEHAVKSHYRFFSYGDAMLIDKLEV

SEQ ID NO: 62803 - protein, 346 aa, unidentified
  source 1..346: note = Acinetobacter larvae
  REGION 1..346: note = tr|A0A1B2LXF5|A0A1B2LXF5_9GAMM S-adenosylmethionine:tRNA ribosyltransferase-isomerase; OS = Acinetobacter larvae OX=1789224 GN=queA PE=3 SV=1
MQLSDFNFDLPDELIARYPLEQRSASKLLYLKADGQYEDHLFTDILDLLEPGDLLILNDTKVMKARLKGKRASGGQIEVLVERLLDAQHAHCHIKASNAPKAGAAIFLGEGEIPATVTGRHENLFVVEFSEPILSVLERYGQLPIPPYFNREAEDIDNVRYQTVFHDPNKLASVAAPTASLHFDETLMAKLAAKNIQHSFVTLHVGAGTFLPVRSQDIEHHVMHSEWCDVPVETVQRIQETQARGHKVIAVGTTATRALESAAQAHGGNIAAWSGDTQIFIYPGYQFCVVDRLITNFHLPESTLLLLVSALSSREHILKCYQHAIEQHYRFFSYGDAMLIDAKFST

SEQ ID NO: 62804 - protein, 344 aa, Acinetobacter lwoffii
  REGION 1..344: note = tr|N9GBF3|N9GBF3_ACILW S-adenosylmethionine:tRNA ribosyltransferase-isomerase OS=Acinetobacter lwoffii ATCC 9957 = CIP 70.31 OX=1311804 GN=queA PE=3 SV=1
MQLSDFNFDLPDELIARYPLETRSASRLLHLDTQGQYHDHQFTDILDLLEDGDLLILNDTKVMKARLKGKRASGGAVEVLVERMQDRFIAYCHIKASNTPKAGAELFIGPDAVKVIVQGRHENLFIVKFSQPILDVLDQYGALPIPPYFNREAEEIDTERYQTVFNDPTKLASVAAPTASLHFDADLLAKLEAKGIQKTFVTLHVGAGTFLPVRTDDIQNHIMHSEWCDVPETAVEMIRQTKARGNKVISVGTTATRAVESAAQAHNGELAAWTGDTQIFIYPGYQFKVVDRLITNFHLPESTLLMLVSALSNRDNILNAYKHAVDSKYRFFSYGDAMLIDQAK

SEQ ID NO: 62805 - protein, 344 aa, Acinetobacter lwoffii; identical to SEQ ID NO: 62804
  REGION 1..344: note = tr|D0SZ66|D0SZ66_ACILW S-adenosylmethionine:tRNA ribosyltransferase-isomerase OS=Acinetobacter lwoffii SH145 OX=575588 GN=queA PE=3 SV=1

SEQ ID NO: 62806 - protein, 349 aa, unidentified
  source 1..349: note = Acinetobacter marinus
  REGION 1..349: note = tr|A0A1G6KVG1|A0A1G6KVG1_9GAMM S-adenosylmethionine:tRNA ribosyltransferase-isomerase; OS = Acinetobacter marinus OX=281375 GN=queA PE=3 SV=1
MQLSDFSYHLPEELIAHYPLAQRSDSRLLHLDQHGQYHDHQFTDILDLLDAGDVLILNDTKVMKARLKGKRASGGAIEVLVERLIDPTTAYCHIKASNTPKAGVEIFISEAGIPATVQGRHENLFIVAFSQPILPILEQHGQLPIPPYFNREAEAVDNERYQTVFHDPAKLASVAAPTASLHFDKDMLAKLKAKGIDYHFVTLHVGAGTFLPVRVEKVETHVMHAEWCEVPASTVEKIQAAKARGNKVIAVGTTATRALESAAVAHDGELQAWSGDTQIFIYPGFEFKVVDRLITNFHLPESTLLMLVSALSRREAILTAYQHAVSEKYRFFSYGDAMLIDEFCDIVPL

SEQ ID NO: 62807 - protein, 348 aa, unidentified
  source 1..348: note = Acinetobacter nectaris
  REGION 1..348: note = tr|V2UWD0|V2UWD0_9GAMM S-adenosylmethionine:tRNA ribosyltransferase-isomerase OS=Acinetobacter nectaris CIP 110549 OX=1392540 GN=queA PE=3 SV=1
MMTMQLSDFNFDLPDELIARYPLEQRSASRLLHIDATGAYHDHQFTDIVDLLNEGDLLVLNDTKVMKARLKGKRESGGAVEVLVERMQDQFIAYCHIKASNSPKPETTLFIGKDAVPVTVKGRHENLYIVEFSQPILTVLDLYGQLPIPPYFNREAEDIDTERYQTVFNDPTKLASVAAPTASLHFDDALLKKLEQKGIQKTFVTLHVGAGTFLPVRTTDIENHIMHSEWCHVPSETVDLIQATKARGNKVISVGTTATRAVESAAQAHQGKLQAWTGDTQIFIYPGYKFCVVDRLITNFHLPESTLLMLVSALSNRENILKAYQHAVAEKYRFFSYGDAMLIDQAAV

SEQ ID NO: 62808 - protein, 345 aa, Acinetobacter nosocomialis
  REGION 1..345: note = tr|A0A1Y5NUI6|A0A1Y5NUI6_ACINO S-adenosylmethionine:tRNA ribosyltransferase-isomerase; OS = Acinetobacter nosocomialis P020 OX=1285584 GN=queA PE=3; SV = 1
MQLSDFSFELPDELIARYPLESRSASRLLHLDAKGQYHDHMFTDIIDLFEEGDLLVLNDTKVMKARLKGKRATGGAIEILVERMLNHTTAYCHIKASNSPKAGAELFVGADNIPVIVRGRHENLFVVEFSQPILPVLEQYGQLPIPPYFNREAEEIDTERYQTVFHNPEKIASVAAPTASLHFDEELLAKLDQKGVKKTFVTLHVGAGTFMPVRTDDITNHVMHSEWCDVPQETIDLILATKARGNKVIAVGTTATRALESAAQAHGGKIAAWTGDTQIFIYPGYEFCMVDRLITNFHLPESTLLMLVSALSNRDNILAAYEHAVKERYRFFSYGDAMLIDKLEV

SEQ ID NO: 62809 - protein, 345 aa, Acinetobacter nosocomialis
  REGION 1..345: note = tr|A0A2L1VCW1|A0A2L1VCW1_ACINO S-adenosylmethionine:tRNA ribosyltransferase-isomerase; OS = Acinetobacter nosocomialis OX=106654 GN=queA PE=3 SV=1
MQLSDFSFELPDELIARYPLESRSASRLLHLDAKGQYHDHMFTDIIDLFEEGDLLVLNDTKVMKARLKGKRATGGAIEILVERMLNHTTAYCHIKASNSPKAGAELFVGADNIPVIVRGRHENLFVVEFSQPILPVLEQYGQLPIPPYFNREAEEIDTERYQTVFHNPEKIASVAAPTASLHFDEDLLAKLDQKGVKKTFVTLHVGAGTFMPVRTDDITNHVMHSEWCDVPQETIDLILATKARGNKVIAVGTTATRALESAAQAHGGKIAAWTGDTQIFIYPGYEFCMVDRLITNFHLPESTLLMLVSALSNRDNILAAYEHAVKDRYRFFSYGDAMLIDKLEV

SEQ ID NO: 62810 - protein, 345 aa, unidentified
  source 1..345: note = Acinetobacter oleivorans
  REGION 1..345: note = tr|A0A0B2UC28|A0A0B2UC28_9GAMM S-adenosylmethionine:tRNA ribosyltransferase-isomerase; OS = Acinetobacter oleivorans OX=1148157 GN=queA PE=3 SV=1
MQLSDFSFELPDELIARYPLESRSASRLLHLDSKGQYHDHMFTDIIDLFEDGDLLVLNDTKVMKARLKGKRSTGGAIEILVERMLNHTTAYCHIKSSNSPKAGAELYVGADNIPVIVRGRHENLFVVEFSQPILPVLEQYGQLPIPPYFNREAEEIDTERYQTVFHNPEKIASVAAPTASLHFDEALLEKLEQKNVQKTFVTLHVGAGTFMPVRTDDITNHIMHSEWCDVPQETIDLILATKARGNKVIAIGTTATRALESAAQAHSGKIAAWTGDTQIFIYPGYQFCIVDRLITNFHLPESTLLMLVSALSNRDNILAAYEHAVKNRYRFFSYGDAMLIDKLEG

SEQ ID NO: 62811 - protein, 345 aa, unidentified
  source 1..345: note = Acinetobacter oleivorans
  REGION 1..345: note = tr|D8JNP1|D8JNP1_ACISD S-adenosylmethionine:tRNA ribosyltransferase-isomerase OS=Acinetobacter oleivorans (strain JCM 16667 / KCTC 23045 / DR1) OX=436717 GN=queA; PE = 3 SV=1
MQLSDFSFELPDELIARYPLESRSASRLLHLDSKGKYHDHMFTDIIDLFEEGDLLVLNDTKVMKARLKGKRSTGGAIEILVERMLNHTTAYCHIKSSNSPKAGAELYVGADNIPVIVRGRHENLFVVEFSQAILPVLEQYGQLPIPPYFNREAEEIDTERYQTVFHNPEKIASVAAPTASLHFDETLLEKLEQKNVQKTFVTLHVGAGTFMPVRTDDITNHIMHSEWCDVPQETIDLILATKARGNKVIAVGTTATRALESAAQAHGGKIAAWTGDTQIFIYPGYEFCIVDRLITNFHLPESTLLMLVSALSNRDNILAAYEHAVKSRYRFFSYGDAMLVDKLDV

SEQ ID NO: 62812 - protein, 345 aa, Acinetobacter parvus
  REGION 1..345: note = tr|N8Q132|N8Q132_9GAMM S-adenosylmethionine:tRNA ribosyltransferase-isomerase OS=Acinetobacter parvus NIPH 1103 OX=1217671 GN=queA PE=3 SV=1
MQLSDFSFDLPDELIARYPLESRSASRLLHIDPQGHYHDHVFTDILNLLEDGDLLVLNDTKVMKARLKGKRATGGAIEVLVERMLDTHTAHCHIKSSNSPKAGAELYIGEDAIPVTVQGRHENLFIVEFAQPILSVLDQYGQLPIPPYFNREAEEIDTERYQTVFHDPEKIASVAAPTASLHFDQDLLEKLAAKGVQKTFVTLHVGAGTFMPVRTTDISNHIMHSEWCDVPQATIDLILETKARGNKVIAVGTTATRALESAAQANQGQIAAWTGDTQIFIYPGYQFCIVDRLITNFHLPESTLLMLVSALSNRENILAAYQHAVEQRYRFFSYGDAMLVDKLEI

SEQ ID NO: 62813 - protein, 345 aa, Acinetobacter parvus
  REGION 1..345: note = tr|N8RMY5|N8RMY5_9GAMM S-adenosylmethionine:tRNA ribosyltransferase-isomerase OS=Acinetobacter parvus DSM 16617 = CIP 108168 OX=981333 GN=queA PE=3 SV=1
MQLSDFSFDLPDELIARYPLESRSASRLLHIDPQGHYHDHVFTDILNLLEDGDLLVLNDTKVMKARLKGKRATGGAIEVLVERMLDTHTAHCHIKSSNSPKAGAELYIGEDAIPVTVQGRHENLFIVEFAQPILSVLDQYGQLPIPPYFNREAEEIDTERYQTVFHDPEKIASVAAPTASLHFDQDLLEKLAAKGVQKTFVTLHVGAGTFMPVRTTDITNHIMHSEWCDVPQATIDLILETKARGNKVIAVGTTATRALESAAQANQGQIAAWTGDTQIFIYPGYQFCIVDRLITNFHLPESTLLMLVSALSNRENILAAYQHAVEQRYRFFSYGDAMLVDKLEI

SEQ ID NO: 62814 - protein, 345 aa, unidentified
  source 1..345: note = Acinetobacter piscicola
  REGION 1..345: note = tr|A0A4Q4GVB1|A0A4Q4GVB1_9GAMM S-adenosylmethionine:tRNA ribosyltransferase-isomerase; OS = Acinetobacter piscicola OX=2006115 GN=queA PE=3 SV=1
MQLSDFNFDLPDELIARYPLDTRSASRLLHLNADGSYQDHHFTDILDLFEEGDLMVLNDTKVMKARLKGKRATGGAVEVLVERIFDQTIAHCHIKASNSPKAGAELFIGEDGVKVTVTGRHENLFVVEFSQPILQVLEVYGQLPIPPYFNREAEAIDTERYQTVFNDPTKLASVAAPTASLHFDEDLLAKLAQKGVNKTFVTLHVGAGTFLPVRTTDIENHIMHSEWCEVSESAAKMIQDTQARGNKVIAIGTTATRAVESAAQACGGKIGAWTGDTQIFIYPGYQFCVVDRLITNFHLPESTLLMLVSALSNKENILNAYQHAVASKYRFFSYGDAMLIEKSSV

SEQ ID NO: 62815 - protein, 345 aa, Acinetobacter pittii
  REGION 1..345: note = tr|R8YG08|R8YG08_ACIPI S-adenosylmethionine:tRNA ribosyltransferase-isomerase OS=Acinetobacter pittii ANC 4050 OX=1217691 GN=queA PE=3 SV=1
MQLSDFSFELPDELIARYPLESRSASRLLHLDSKGQYHDHMFTDIIDLFEEGDLLVLNDTKVMKARLKGKRSTGGAIEILVERMLNHTTAYCHIKSSNSPKAGAELFVGADNIPVIVRGRHENLFVVEFSQPILPVLEQYGQLPIPPYFNREAEEIDTERYQTVFHNPEKIASVAAPTASLHFDEELLAKLEQKNVQKSFVTLHVGAGTFMPVRTDDITNHVMHSEWCDVPQETIDLILATKARGNKVIAVGTTATRALESAAQAHGGKIAAWTGDTQIFIYPGYEFCIVDRLITNFHLPESTLLMLVSALSNRDNILAAYKHAVKDRYRFFSYGDAMLIDKFEV

SEQ ID NO: 62816 - protein, 345 aa, Acinetobacter pittii
  REGION 1..345: note = tr|A0A1C2WML4|A0A1C2WML4_ACIPI S-adenosylmethionine:tRNA ribosyltransferase-isomerase; OS = Acinetobacter pittii OX=48296 GN=queA PE=3 SV=1
MQLSDFSFELPDELIARYPLESRSASRLLQLDSKGQYHDHMFTDIIDLFEEGDLLVLNDTKVMKARLKGKRSTGGAIEILVERMLNHTTAYCHIKSSNSPKAGAELFVGADNIPVIVRGRHENLFVVEFSQPILPVLEQYGQLPIPPYFNREAEEIDTERYQTVFHNPEKIASVAAPTASLHFDEELLAKLEQKNVQKSFVTLHVGAGTFMPVRTDDITNHVMHSEWCDVPQETIDLILATKARGNKVIAIGTTATRALESAAQAHGGKIAAWTGDTQIFIYPGYEFCIVDRLITNFHLPESTLLMLVSALSNRDNILAAYEHAVKSRYRFFSYGDAMLIDKLKV

SEQ ID NO: 62817 - protein, 346 aa, unidentified
  source 1..346: note = Acinetobacter populi
  REGION 1..346: note = tr|A0A1Z9Z2T5|A0A1Z9Z2T5_9GAMM S-adenosylmethionine:tRNA ribosyltransferase-isomerase; OS = Acinetobacter populi OX=1582270 GN=queA PE=3 SV=1
MQLSDFSYHLPEELIAHYPLAERSASRLLHLDAQGQFHDQHFTDLLDLLDTGDVLILNDTKVMKARLKGKRASGGAIEVLVERLTSPNTAYCHIKASNAPKAGVEIFIGPDLIPAKVQGRHENLFIVEFSQPVLEVLEQYGQLPIPPYFNREAEAIDTERYQTVFHDPNKLASVAAPTASLHFDQKLLKQLQDKGIQEHFVTLHVGAGTFLPVRVDNIENHVMHSEWCEVPASTVDAILAAKSRGNKVIAVGTTATRALESAAQAHGGKLAAWSGDTQIFIYPGYDFKVVDRLITNFHLPESTLLMLVSALSNRDNILNAYQHAVAQRYRFFSYGDAMLIDRLQHA

SEQ ID NO: 62818 - protein, 346 aa, unidentified
  source 1..346: note = Acinetobacter pragensis
  REGION 1..346: note = tr|A0A151Y0N4|A0A151Y0N4_9GAMM S-adenosylmethionine:tRNA ribosyltransferase-isomerase; OS = Acinetobacter pragensis OX=1806892 GN=queA PE=3 SV=1
MQLSDFSFDLPDELIARYPLATRSASRLLHLDTQGQYHDYHFTDILDLLQPGDLLVLNDTKVMKARLKGKRATGGAIEVLVERMMDKFVAHCHIKASNSPKEGAELFIGPDEVKVTVKGRHENLFIVEFSQSILDVLDKYGALPIPPYFNREAEAIDTERYQTVFNDPSKLASVAAPTASLHFDEALLKKLEEKGISKTFVTLHVGAGTFLPVRTTDIENHIMHSEWCDVSDESMALIKATKERGNKVIAVGTTATRATESAAQSNGGELKGWTGDTQIFIYPGYEFKVVDRLITNFHLPESTLLMLVSALSNQDNILNAYQHAVDSQYRFFSYGDAMLIDNINVK

SEQ ID NO: 62819 - protein, 345 aa, unidentified
  source 1..345: note = Acinetobacter proteolyticus
  REGION 1..345: note = tr|A0A1E7R4P4|A0A1E7R4P4_9GAMM S-adenosylmethionine:tRNA ribosyltransferase-isomerase; OS = Acinetobacter proteolyticus OX=1776741 GN=queA PE=3 SV=1
MQLSDFSFDLPDELIARYPLDSRSASRLLHIDAQGQYHDHAFTDILDLLEDGDLLVLNDTKVMKARLKGKRATGGAIEVLVERMLDTHTAHCHIKSSNSPKAGAELYIGEDAVPVTVQGRHENLFVVKFSQSILSVLDQYGQLPIPPYFNREAEEIDTERYQTVFHDPEKIASVAAPTASLHFDHGLLEKLEAKGVQKTFVTLHVGAGTFMPVRTTDITNHIMHSEWCDVPQATIDLILATKARSNKVIAVGTTATRALESAAQANQGKIAAWTGDTQIFIYPGYQFCIVDRLITNFHLPESTLLMLVSALSNRDNILAAYTHAVEQRYRFFSYGDAMLVDKLDA

SEQ ID NO: 62820 - protein, 345 aa, unidentified
  source 1..345: note = Acinetobacter proteolyticus
  REGION 1..345: note = tr|A0A2N0WIT4|A0A2N0WIT4_9GAMM S-adenosylmethionine:tRNA ribosyltransferase-isomerase; OS = Acinetobacter proteolyticus OX=1776741 GN=queA PE=3 SV=1
MQLSDFSFDLPDELIARYPLDSRSASRLLHIDAQGQYHDHAFTDILDLLEDGDLLVLNDTKVMKARLKGKRATGGAIEVLVERMLDTHTAHCHIKSSNSPKAGAELYIGEDAVPVTVQGRHENLFVVKFSQPILSVLDQYGQLPIPPYFNREAEEIDTERYQTVFHDPEKIASVAAPTASLHFDHGLLEKLEAKGVQKTFVTLHVGAGTFMPVRTTDITNHIMHSEWCDVPQATIDLILATKARGNKVIAVGTTATRALESAAQANQGKIAAWTGDTQIFIYPGYQFCIVDRLITNFHLPESTLLMLVSALSNRDNILAAYTHAVEQRYRFFSYGDAMLVDKLDA

SEQ ID NO: 62821 - protein, 346 aa, unidentified
  source 1..346: note = Acinetobacter puyangensis
  REGION 1..346: note = tr|A0A240E3U8|A0A240E3U8_9GAMM S-adenosylmethionine:tRNA ribosyltransferase-isomerase; OS = Acinetobacter puyangensis OX=1096779 GN=queA PE=3 SV=1
MQLSDFSYHLPEELIAHYPLAERSASRLLHLDAQGQFHDQHFTDLLDLLDAGDVLILNDTKVMKARLKGKRASGGAIEVLVERLTSPSTAYCHIKASNAPKAGTEIFIGPELIPAKVQGRHENLFIVEFSQSVLEVLEQYGQLPIPPYFNREAEAIDTERYQTVFHDPNKLASVAAPTASLHFDQKLLKQLQDKGICEHFVTLHVGAGTFLPVRVDNIENHVMHSEWCEVPASTVDAILAAKSRGNKVIAVGTTATRALESAAKAHNGKLAAWSGDTQIFIYPGYDFKVVDHLITNFHLPESTLLMLVSALSNRDNILNAYQHAVAQRYRFFSYGDAMLIDRLQRA

SEQ ID NO: 62822 - protein, 345 aa, unidentified
  source 1..345: note = Acinetobacter qingfengensis
  REGION 1..345: note = tr|A0A1E7R2U4|A0A1E7R2U4_9GAMM S-adenosylmethionine:tRNA ribosyltransferase-isomerase; OS = Acinetobacter qingfengensis OX=1262585 GN=queA PE=3 SV=1
MQLSDFSYHLPEELIAHYPLASRSASRLLHLDAQGQYHDRLFKEIVDLLSPGDLLILNDTKVMKARLKGKRASGGAIEVLVERLISSTTAYCHIKASNSPKAGAEIFLGEDEIPASVQGRHENLFIVEFSQSVLDILEQYGQLPIPPYFNRAAEAIDTERYQTVFHNPEKLASVAAPTASLHFDEDILAALTSKGIEQHFVTLHVGAGTFLPVRVDNIENHVMHSEWCEVPLSTVMAIQSAKARGNKIIAVGTTATRALESAASAHQGELQAWSGDTQIFIYPGFKFNVIDRLITNFHLPESTLLMLVSALSSREKILAAYEHAVAAKYRFFSYGDAMLIDLSST

SEQ ID NO: 62823 - protein, 346 aa, Acinetobacter radioresistens
  REGION 1..346: note = tr|A0A3F3GTI9|A0A3F3GTI9_ACIRA S-adenosylmethionine:tRNA ribosyltransferase-isomerase; OS = Acinetobacter radioresistens NIPH 2130 OX=1217674; GN = queA PE=3 SV=1
MQLSDFSFNLPDELIARYPLAQRSASRLLHLNSEGQYSDRHFTDILELFEPGDLLVLNDTKVMKARLKGRRATGGAVEILVERIFDQTIAHCHIKASNSPKAGAELFIGADEVKVTVQGRHENLFVVEFSQPILQVLDQHGQLPIPPYFNREAEAIDSERYQTVFHDPEKIASVAAPTASLHFDEVLLNKLSEKGVQQAFVTLHVGAGTFLPVRSIDIENHIMHSEWCEVPENTVELIKQVQTRGNKVIAVGTTATRALESAAQAHNGKIEAWTGDTQIFIYPGYQFCVVDRLITNFHLPESTLLMLVSALSTRDHILAAYEHAVRKHYRFFSYGDAMLIDKTVNR

SEQ ID NO: 62824 - protein, 346 aa, Acinetobacter radioresistens; identical to SEQ ID NO: 62823
  REGION 1..346: note = tr|A0A3D3FXE3|A0A3D3FXE3_ACIRA S-adenosylmethionine:tRNA ribosyltransferase-isomerase; OS = Acinetobacter radioresistens OX=40216 GN=queA PE=3 SV=1

SEQ ID NO: 62825 - protein, 347 aa, Acinetobacter rudis
  REGION 1..347: note = tr|S3PLP3|S3PLP3_9GAMM S-adenosylmethionine:tRNA ribosyltransferase-isomerase OS=Acinetobacter rudis CIP 110305 OX=421052 GN=queA PE=3 SV=1
MQLSDFSFDLPDELIARYPLDNRSASRLLHLGADGRHHDLHFVDILELFEAGDLLVLNDTKVMKARLKGKRATGGSVELLVERIFNQTTAHCHIKASNSPKAGAELFIGPDQVPVTVTGRHENLFIVEFSQPILQVLDQYGQLPIPPYFNREAEEIDTVRYQTVFNNPEKLASVAAPTASLHFDQALLEALAAKGVNTVFVTLHVGAGTFLPVRTTDIENHIMHSEWCEVTEETALKIQETQARGNKVIAVGTTATRALESAAQACHGKIGAWTGDTQIFIYPGYQFCVVDRLITNFHLPESTLLMLVSALTSRDHVLNAYKHAVAQQYRFFSYGDAMLVDRANNAQ

SEQ ID NO: 62826 - protein, 344 aa, Acinetobacter schindleri
  REGION 1..344: note = tr|N9AGG5|N9AGG5_9GAMM S-adenosylmethionine:tRNA ribosyltransferase-isomerase OS=Acinetobacter schindleri CIP 107287 OX=1217988 GN=queA PE=3 SV=1
MQLSDFSFDLPDELIARYPLEQRSASRLLHLDAEGQYHDHQFTDILDLLNEGDLLVLNDTKVMKARLKGKRASGGAVEVLVERVMDQFIAHCHIKASNTPKAGAELFIGPNAVKVTVQGRHENLFVVEFSQPILDVLDQYGALPIPPYFNREAEEIDTLRYQTVFNDPTKIASVAAPTASLHFDEDLLKKLEEKGIQKTFVTLHVGAGTFLPVRTSDIENHIMHSEWCQVSDASMALIKATKERGNKVIAVGTTATRATESAAQANGGELKGWTGDTQIFIYPGYEFKVVDRLITNFHLPESTLLMLVSALSNRDNILNAYKHAVESRYRFFSYGDAMLIDQAK

SEQ ID NO: 62827 - protein, 344 aa, Acinetobacter schindleri
  REGION 1..344: note = tr|A0A2S1FBD3|A0A2S1FBD3_9GAMM S-adenosylmethionine:tRNA ribosyltransferase-isomerase; OS = Acinetobacter schindleri OX=108981 GN=queA PE=3 SV=1
MQLSDFSFDLPDELIARYPLEQRSASRLLHLDAEGQYHDHQFTDILDLLNEGDLLVLNDTKVMKARLKGKRASGGAVEVLVERMMDQFIAHCHIKASNTPKAGAELFIGPDAVKVTVQGRHENLFVVEFSQPILDVLDQYGALPIPPYFNREAEAIDTERYQTVFNDPTKIASVAAPTASLHFDEDLLKKLEEKGIQKTFVTLHVGAGTFLPVRTSDIENHIMHSEWCQVSDASMALIKATKERGNKVIAVGTTATRATESAAQANGGELKGWTGDTQIFIYPGYEFKVVDRLITNFHLPESTLLMLVSALSNRDNILNAYKYAVESKYRFFSYGDAMLIDQAK

SEQ ID NO: 62828 - protein, 345 aa, unidentified
  source 1..345: note = Acinetobacter seifertii
  REGION 1..345: note = tr|A0A2T5R0R1|A0A2T5R0R1_9GAMM S-adenosylmethionine:tRNA ribosyltransferase-isomerase; OS = Acinetobacter seifertii OX=1530123 GN=queA PE=3 SV=1
MQLSDFSFELPDELIARYPLESRSASRLLHLDSKGQYHDHMFIDIIDLFEEGDLLVLNDTKVMKARLKGKRSTGGAIEILVERMLNHTTAYCHIKSSNSPKAGAELYVGADNIPVIVRGRHENLFVVEFSQPILPVLEQYGQLPIPPYFNREAEEIDTERYQTVFHNPEKIASVAAPTASLHFDEELLAKLEQKNVQKSFVTLHVGAGTFMPVRTDDITNHVMHSEWCDVPQETIDLILATKARGNKVIAIGTTATRALESAAQAHGGKIAAWNGDTQIFIYPGYEFCIVDRLITNFHLPESTLLMLVSALSNRDNILAAYEHAVKSRYRFFSYGDAMLIDKLEV

SEQ ID NO: 62829 - protein, 345 aa, unidentified
  source 1..345: note = Acinetobacter seifertii
  REGION 1..345: note = tr|A0A5E9PG97|A0A5E9PG97_9GAMM S-adenosylmethionine:tRNA ribosyltransferase-isomerase; OS = Acinetobacter seifertii OX=1530123 GN=queA PE=3 SV=1
MQLSDFSFELPDELIARYPLESRSASRLLHLDSKGQYHDHMFTDIIDLFEEGDLLVLNDTKVMKARLKGKRSTGGAIEILVERMLNHTTAYCHIKSSNSPKAGAELYVGTDNIAVIVRGRHENLFVVEFSQPILPVLEQYGQLPIPPYFNREAEEIDTERYQTVFHNPEKIASVAAPTASLHFDEELLAKLEQKNVQKSFVTLHVGAGTFMPVRTDDITNHVMHSEWCDVPQETIDLILTTKARGNKVIAVGTTATRALESAAQAHGGKIAAWNGDTQIFIYPGYEFCIVDRLITNFHLPESTLLMLVSALSNRDNILAAYEHAVKSRYRFFSYGDAMLIDKLEV

SEQ ID NO: 62830 - protein, 348 aa, Acinetobacter soli
  REGION 1..348: note = tr|A0A427M235|A0A427M235_9GAMM S-adenosylmethionine:tRNA ribosyltransferase-isomerase; OS = Acinetobacter soli OX=487316 GN=queA PE=3 SV=1
MQLSDFNFDLPDELIARYPLETRSASRLLHLDAQGQYHDHAFTDILELLDEGDLLVLNDTKVMKARLKGKRASGGAVEVLVERMLDNRIAHCHIKSSNSPKAGAELFIGEDQVSVTVQGRHENLYVVEFSQPILSVLDRYGQLPIPPYFNREAEAIDTERYQTVFHNPDKIASVAAPTASLHFDETLLAKLEAKGIQKTFVTLHVGAGTFLPVRTDDIKNHIMHSEWCDVPEHTAELIRQVQARGNKVIAVGTTATRALESAAQANGGKIGAWTGDTQIFIYPGYQFCAVDRLITNFHLPESTLLMLVSALSNRDNILNAYAHAVEAKYRFFSYGDAMLIDRAATQVN

SEQ ID NO: 62831 - protein, 348 aa, Acinetobacter soli
  REGION 1..348: note = tr|N9BY69|N9BY69_9GAMM S-adenosylmethionine:tRNA ribosyltransferase-isomerase OS=Acinetobacter soli NIPH 2899 OX=1217677 GN=queA PE=3 SV=1
MQLSDFNFDLPDELIARYPLETRSASRLLHLDAQGQYHDHAFTDILELLDEGDLLVLNDTKVMKARLKGKRASGGAVEVLVERMLDNRIAHCHIKSSNSPKAGAELFIGEDQVSVTVQGRHENLYVVEFSQPILSVLDRYGQLPIPPYFNREAEAIDTERYQTVFHNPDKIASVAAPTASLHFDETLLAKLEAKGIQKTFVTLHVGAGTFLPVRTDDIKNHIMHSEWCDVPEHTAELIRQVQARGNKVIAVGTTATRALESAAQANGGKIDAWTGDTQIFIYPGYQFCAVDRLITNFHLPESTLLMLVSALSNRDNILNAYAHAVEAQYRFFSYGDAMLIDRAATQVN

SEQ ID NO: 62832 - protein, 345 aa, Acinetobacter sp.
  REGION 1..345: note = tr|A0A178FVS5|A0A178FVS5_9GAMM S-adenosylmethionine:tRNA ribosyltransferase-isomerase; OS = Acinetobacter sp. SFB OX=1805634 GN=queA PE=3 SV=1
MQLSDFKFDLPDQLIARYPLNTRSASRLLHLDHQGQYHDCHFTDILDLLDAGDLLILNDTKVMKARLKGKRASGGAVEVLVERMQDKFIAHCHIKASNSPKAGAELFMGEDAVKVTVQGRHENLFIVEFSQPILDVLDQYGALPIPPYFNREAEAIDTERYQTVFNDPTKLASVAAPTASLHFDQDLLEKLEAKGIQKAFVTLHVGAGTFLPVRTDDIQNHIMHSEWCDVPQHTVELILQTKARGNKVISVGTTATRAVESAAQAHGGTLNAWTGDTQIFIYPGYDFKVVDRLITNFHLPESTLLMLVSALSNRDNILNAYHHAVEEKYRFFSYGDAMLIDKITS

SEQ ID NO: 62833 - protein, 344 aa, Acinetobacter sp.
  REGION 1..344: note = tr|A0A1E3GM48|A0A1E3GM48_9GAMM S-adenosylmethionine:tRNA ribosyltransferase-isomerase; OS = Acinetobacter sp. 51m OX=1856846 GN=queA PE=3 SV=1
MQLSDFNFDLPDELIARYPLETRSASRLLHLDAQGQYHDHQFTDILDLLEDGDLLVLNDTKVMKARLKGKRASGGAVEVLVERMQDRFIAYCHIKASNTPKAGAELFIGPDAVKVTVQGRHENLFIVEFSQPILDVLDQYGALPIPPYFNREAEEIDTERYQTVFNDPTKLASVAAPTASLHFDADLLAKLEAKGIQKTFVTLHVGAGTFLPVRTDDIQNHIMHSEWCDVPETAVEMIRQTKARGNKVISVGTTATRAVESAAQAHNGELAAWTGDTQIFIYPGYQFKVVDRLITNFHLPESTLLMLVSALSNRDNILNAYKHAVDSKYRFFSYGDAMLVDQAQ

SEQ ID NO: 62834 - protein, 345 aa, Acinetobacter tandoii
  REGION 1..345: note = tr|A0A515BCB1|A0A515BCB1_9GAMM S-adenosylmethionine:tRNA ribosyltransferase-isomerase; OS = Acinetobacter tandoii OX=202954 GN=queA PE=3 SV=1
MQLSDFNFDLPDELIARYPLDTRSASRLLHLDAQGQYHDHQFTDILDLLNDGDLLVLNDTKVMKARLKGKRATGGAVEVLVERLQDTHIAHCHIKASNSPKAGAELFIGTEEIKVTVQGRHENLFIVEFSQPILEVLDRCGQLPIPPYFNREAEAIDTERYQTVFNDPTKLASVAAPTASLHFDQTLLEKLEAKGISKAFVTLHVGAGTFLPVRTDDIANHIMHSEWCDVPAATVELIRQTKARGNKVIAVGTTATRAVESAAQAHSGVLDAWVGDTQIFIYPGYDFKVVDRLITNFHLPESTLLMLVSALSNRDNILNAYQHAVAAQYRFFSYGDAMLIDRYTG

SEQ ID NO: 62835 - protein, 345 aa, Acinetobacter tandoii
  REGION 1..345: note = tr|R9BAI7|R9BAI7_9GAMM S-adenosylmethionine:tRNA ribosyltransferase-isomerase OS=Acinetobacter tandoii DSM 14970 = CIP 107469 OX=1120927 GN=queA PE=3 SV=1
MQLSDFNFDLPDELIARYPLDTRSSSRLLHLDAQGQYHDHQFTDILDLLNDGDLLILNDTKVMKARLKGKRATGGAVEVLVERLQDAHIAHCHIKASNSPKAGAELFIGTEEIKVTVQGRHENLFIVEFSQPILDVLDRCGQLPIPPYFNREAEAIDTERYQTVFNDPSKLASVAAPTASLHFDQALLEKLEAKGIHKAFVTLHVGAGTFLPVRTDDIANHVMHSEWCDVPAHTVELIRETKARGNKVIAVGTTATRAVESAAQAHNSVLDAWVGDTQIFIYPGYDFKVVDRLITNFHLPESTLLMLVSALSNRDNILNAYQHAVATQYRFFSYGDAMLIDRFTG

SEQ ID NO: 62836 - protein, 345 aa, Acinetobacter tjernbergiae
  REGION 1..345: note = tr|V2V729|V2V729_9GAMM S-adenosylmethionine:tRNA ribosyltransferase-isomerase OS=Acinetobacter tjernbergiae DSM 14971 = CIP 107465 OX=1120928 GN=queA PE=3 SV=1
MQLSDFSFDLPDELIARYPLDSRSASRLLHIDAQGQYHDHAFTDILDLLEDGDLLVLNDTKVMKARLKGKRATGGAIEVLVERMLDTHTAHCHIKSSNSPKAGAELYIGADAIPVTVQGRHENLFVVEFSQPILSVLDQYGQLPIPPYFNREAEEIDTERYQTVFHDPEKIASVAAPTASLHFDQNLLEKLAAKGVQKTFVTLHVGAGTFMPVRTTDISNHIMHSEWCDVPQATIDLILATKALGNKVIAVGTTATRALESAAQANQGQIAAWTGDTQIFIYPGYQFCIVDRLITNFHLPESTLLMLVSALSNRDHILAAYQHAVEQRYRFFSYGDAMLVDQLNA

SEQ ID NO: 62837 - protein, 345 aa, Acinetobacter towneri
  REGION 1..345: note = tr|N9CLT0|N9CLT0_9GAMM S-adenosylmethionine:tRNA ribosyltransferase-isomerase OS=Acinetobacter towneri DSM 14962 = CIP 107472 OX=1120929 GN=queA PE=3 SV=1
MQLSDFNFNLPDELIARYPLASRSASRLLHLDAQGQYHDHQFTDLLNLLEAGDLLVLNDTKVMKARLKGKRATGGAVEVLVERLQDQFIAHCHIKASNSPKAGAELFIGPDAVKVTVQGRHENLFIVEFSQPILDVLDAYGQLPIPPYFNREAEAIDTERYQTVFNDPTKLASVAAPTASLHFDEALLQQLADKGIQKTFVTLHVGAGTFLPVRTDDIANHIMHSEWCEVSEAAVALIRETKARGNKVISVGTTATRAVESAAQAHAGKLAAWSGDTQIFIYPGYQFKVVDRLITNFHLPESTLLMLVSALSSRESVMQAYQHAVAERYRFFSYGDAMLIDQAQT

SEQ ID NO: 62838 - protein, 345 aa, Acinetobacter towneri
  REGION 1..345: note = tr|A0A1E8E4P1|A0A1E8E4P1_9GAMM S-adenosylmethionine:tRNA ribosyltransferase-isomerase; OS = Acinetobacter towneri OX=202956 GN=queA PE=3 SV=1
MQLSDFNFNLPDELIARYPLASRSASRLLHLDAQGQYHDHQFTDLLNLLEAGDLLILNDTKVMKARLKGKRATGGAVEVLVERLQDQFIAHCHIKASNSPKAGAELFIGPDAVKVTIQGRHENLFIVEFSQPILDVLDAYGQLPIPPYFNREAEAIDTERYQTVFNDPTKLASVAAPTASLHFDEALLQQLEAKGIQKTFVTLHVGAGTFLPVRTEDIANHIMHSEWCEVSEAAVALIRETKARGNKVISVGTTATRAVESAAQAHAGELAAWSGDTQIFIYPGYQFKVVDRLITNFHLPESTLLMLVSALSSRENVMRAYQHAVAERYRFFSYGDAMLIDQAQS

SEQ ID NO: 62839 - protein, 348 aa, Acinetobacter ursingii
  REGION 1..348: note = tr|N9DHP8|N9DHP8_9GAMM S-adenosylmethionine:tRNA ribosyltransferase-isomerase OS=Acinetobacter ursingii ANC 3649 OX=1257043 GN=queA PE=3 SV=1
MSRIMQLSDFNFDLPDELIARYPLESRSASRLLHLDAQGQYHDRMFTEIVDLLNEGDLLVLNDTKVMKARLKGKRVSGGAVEVLVERMLDQTIAHCHIKASNTPKAGAELFMGEDGVKVVVQGRHENLFVVEFSQPILSVLDRYGQLPIPPYFNREAEAIDTERYQTVFHDPEKIASVAAPTASLHFDETLLEQLAQKGIQKTFVTLHVGAGTFMPVRTDDIKNHIMHSEWCDVPEATVELIRQTKARGNKVIAVGTTATRALESAAQAHQGQIAAWTGDTQIFIYPGYQFCVVDRLITNFHLPESTLLMLVSALSNRDNILKAYAHAVESKYRFFSYGDAMLIDQAQ

SEQ ID NO: 62840 - protein, 348 aa, Acinetobacter ursingii
  REGION 1..348: note = tr|N9S6A5|N9S6A5_9GAMM S-adenosylmethionine:tRNA ribosyltransferase-isomerase OS=Acinetobacter ursingii NIPH 706 OX=1217716 GN=queA PE=3 SV=1
MSRIMQLSDFNFDLPDELIARYPLESRSASRLLHLDAQGQYHDRMFTEIVDLLNEGDLLVLNDTKVMKARLKGKRASGGAVEVLVERMLDQTIAHCHIKASNTPKAGAELFMGEDGVRVVVQGRHENLFVVEFSQPILSVLDRYGQLPIPPYFNREAEAIDTERYQTVFHDPEKIASVAAPTASLHFDEDLLKKLEQKGIQKTFVTLHVGAGTFMPVRTDDITNHTMHSEWCDVPDATVKLIRQTKARGNKIIAVGTTATRALESAAQAHQGQIAAWTGDTQIFIYPGYQFCMVDRLITNFHLPESTLLMLVSALSNRDNILKAYAHAVESKYRFFSYGDAMLIDQAQ

SEQ ID NO: 62841 - protein, 344 aa, unidentified
  source 1..344: note = Acinetobacter variabilis
  REGION 1..344: note = tr|N9MNU9|N9MNU9_9GAMM S-adenosylmethionine:tRNA ribosyltransferase-isomerase OS=Acinetobacter variabilis; OX = 70346 GN=queA PE=3 SV=1
MQLSDFSFDLPDELIARYPLEQRSASLLLHLDAQGQYHDHQFTDILDLLNEGDLLVLNDTKVMKARLKGKRASGGAVELLVERMMDQFIAHCHIKASNTPKAGAELFIGPDEVKVTVQGRHENLFIVEFSQPILDVLDKYGALPIPPYFNREAEEIDTVRYQTVFNDPTKLASVAAPTASLHFDEELLKKLEEKGIQKTFVTLHVGAGTFLPVRTNDIENHIMHSEWCQVSDESMELIKATKARGNKVIAVGTTATRATESAAQANGGELKGWTGDTQIFIYPGYEFKVVDRLITNFHLPESTLLMLVSALSNRENILNAYKHAVESKYRFFSYGDAMLIDQAQ

SEQ ID NO: 62842 - protein, 344 aa, unidentified
  source 1..344: note = Acinetobacter variabilis
  REGION 1..344: note = tr|A0A427M688|A0A427M688_9GAMM S-adenosylmethionine:tRNA ribosyltransferase-isomerase; OS = Acinetobacter variabilis OX=70346 GN=queA PE=3 SV=1
MQLSDFSFDLPDELIARYPLEQRSASRLLHLDAQGQYHDHQFTDILDLLNEGDLLVLNDTKVMKARLKGKRASGGAVEVLVERMMDQFIAHCHIKASNTPKTGAELFIGPDEVKVTVQGRHENLFIVEFSQPILDVLDQYGALPIPPYFNREAEEIDTVRYQTVFNDPTKLASVAAPTASLHFDEELLKKLEEKGIQKTFVTLHVGAGTFLPVRTNDIENHIMHSEWCQVSDESMELIKATKARGNKVIAVGTTATRATESAAQANGGELKGWTGDTQIFIYPGYEFKVVDRLITNFHLPESTLLMLVSALSNRENILNAYKHAVESKYRFFSYGDAMLIDQAQ

SEQ ID NO: 62843 - protein, 345 aa, Acinetobacter venetianus
  REGION 1..345: note = tr|N8YP72|N8YP72_ACIVR S-adenosylmethionine:tRNA ribosyltransferase-isomerase OS=Acinetobacter venetianus (strain ATCC 31012 / CIP 110063 / RAG-1) OX=1191460; GN = queAPE=3 SV=1
MQLSDFSFDLPDELIARYPLDSRSASRLLHIDANGQFHDHAFTDILDLLKDGDLLVLNDTKVMKARLKGKRATGGAIEVLVERMLDTHTAHCHIKSSNSPKAGAELYIGEDAVPVTVQGRHENLFVVKFSQPILSVLDQYGQLPIPPYFNREAEDIDTERYQTVFHDPEKIASVAAPTASLHFDQDLLEKLAAKGVQKTFVTLHVGAGTFMPVRTTDITNHIMHSEWCDVPQATIDLILETKARGNKVIAVGTTATRALESAAQANQGQIAAWTGDTQIFIYPGYQFCIVDRLITNFHLPESTLLMLVSALSNRDNILAAYKHAVEQRYRFFSYGDAMLVDQAKF

SEQ ID NO: 62844 - protein, 345 aa, Acinetobacter venetianus
  REGION 1..345: note = tr|A0A150I0X8|A0A150I0X8_9GAMM S-adenosylmethionine:tRNA ribosyltransferase-isomerase; OS = Acinetobacter venetianus OX=52133 GN=queA PE=3 SV=1
MQLSDFSFDLPDELIARYPLDSRSASRLLHIDADGQYHDHAFTDILDLLEDGDLLVLNDTKVMKARLKGKRATGGAIEVLVERMLDTHTAHCHIKSSNSPKAGAELYIGEDAVPVTVQGRHENLFVVKFSQPILSVLDQYGQLPIPPYFNREAEDIDTERYQTVFHDPEKIASVAAPTASLHFDQDLLEKLAAKGVQKTFVTLHVGAGTFMPVRTTDITNHIMHSEWCDVPQATIDLILETKARGNKVIAVGTTATRALESAAQANQGQIAAWTGDTQIFIYPGYQFCIVDRLITNFHLPESTLLMLVSALSNRDNILAAYKHAVEQRYRFFSYGDAMLVDKLDA

SEQ ID NO: 62845 - protein, 344 aa, unidentified
  source 1..344: note = Acinetobacter wuhouensis
  REGION 1..344: note = tr|A0A3G2T8X1|A0A3G2T8X1_9GAMM S-adenosylmethionine:tRNA ribosyltransferase-isomerase; OS = Acinetobacter wuhouensis OX=1879050 GN=queA PE=3 SV=1
MQLTDFNFELPDELIARYPLETRSASRLLHLNADGTYKDLHFTDILDLFQEGDLMVLNDTKVMKARLKGKRASGGAIEVLVERIFDQTIAHCHIKASNSPKAGAELFIGSDEVKVTVTGRHENLYIVEFSQPILQVLDAYGQLPIPPYFNREAEAVDTERYQTVFNDPTKLASVAAPTASLHFDADLLQKLEQKGVKKTFVTLHVGAGTFLPVRTDNIENHIMHSEWCEVTEEAAQLIAETKARGNKVIAVGTTATRATESAAQACGGKIGAWTGDTQIFIYPGYEFCVVDRLITNFHLPESTLLMLVSALSSRDNILNAYQHAVESKYRFFSYGDAMLIEKAN

SEQ ID NO: 62846 - protein, 344 aa, unidentified
  source 1..344: note = Acinetobacter wuhouensis
  REGION 1..344: note = tr|A0A385C936|A0A385C936_9GAMM S-adenosylmethionine:tRNA ribosyltransferase-isomerase; OS = Acinetobacter wuhouensis OX=1879050 GN=queA PE=3 SV=1
MQLTDFNFELPDELIARYPLETRSASRLLHLNADGTYQDLHFTDILDLFQEGDLMVLNDTKVMKARLKGKRASGGAIEVLVERIFDQTTAHCHIKASNSPKAGAELFIGSDEVKVTVTGRHENLYIVEFSQPILQVLDAYGQLPIPPYFNREAEAVDTERYQTVFNDPTKLASVAAPTASLHFDEDLLKKLEQKGVKKTFVTLHVGAGTFLPVRTDNIENHIMHSEWCEVTEEAAQLIAETKARGNKVIAVGTTATRATESAAQACGGKIGAWTGDTQIFIYPGYEFCVVDRLITNFHLPESTLLMLVSALSSRDNILNAYQHAVESKYRFFSYGDAMLIEKAN

SEQ ID NO: 62847 - protein, 349 aa, unidentified
  source 1..349: note = Actibacterium atlanticum
  REGION 1..349: note = tr|A0A058ZP91|A0A058ZP91_9RHOB S-adenosylmethionine:tRNA ribosyltransferase-isomerase; OS = Actibacterium atlanticum OX=1461693 GN=queA PE=3 SV=1
MKLSDFDFDLPEALIATRPVKPRPSAKMLVAQGTRTEDLHVYDLPDLLCAGDRLILNNTKVIPARLFGRRLRETEQGLVEAKVEITLLEPTAQGGWRALAKPLRKLKAAEEIVFSDDLSARVQALGQGEVTLDFNLSGDDFDAALAQAGAMPLPPYIAAKRPADAQDKDDYQTVFARHSGAVAAPTASLHFDADLLDKLRARGVQFTEVTLHVGAGTFLPVKVDDIATHKMHAEWGEVTAQAAAEMNQTRAAGGRVIPVGTTALRLIESAAQNDGTMLAWQGETDIFITPGYQFKITDALMTNFHLPKSTLLMLVSALMGMDRMRQVYDHAVRNNYRFFSYGDASLLIP

SEQ ID NO: 62848 - protein, 351 aa, unidentified
  source 1..351: note = Actibacterium mucosum
  REGION 1..351: note = tr|A0A037ZDD2|A0A037ZDD2_9RHOB S-adenosylmethionine:tRNA ribosyltransferase-isomerase; OS = Actibacterium mucosum KCTC 23349 OX=1454373 GN=queA; PE = 3 SV=1
MKLSDFDFDLPDSLIATRPVHPRPSARLLFAKGQEPLQDLQVYDLPNLLQPGDRMILNNTKVLPARLFGTRARQTAQGLVTAKVEVTLLEPMDNAGLWRALAKPLRKIKPGEVVEFGAGLRARVEAVADGEAHFRFDLQGDAFEDALGQAGTMPLPPYIAAKRPADAQDNEDYQTVFAREPGAVAAPTASLHFDDALLQSLRDKGVDFTEVTLHVGAGTFLPVKVDDVTTHRMHAERGEVTAAAAAEINQTRARGGRIIAVGTTALRLIETAAAPDGTMHPWQGDTDIFIYPGYDFRVTDGLMTNFHLPKSTLLMLVSALLGADRIRQIYDHAVAREYRFFSYGDASLLLP

SEQ ID NO: 62849 - protein, 338 aa, unidentified
  source 1..338: note = Actinoallomurus bryophytorum
  REGION 1..338: note = tr|A0A543CKD6|A0A543CKD6_9ACTN S-adenosylmethionine:tRNA ribosyltransferase-isomerase; OS = Actinoallomurus bryophytorum OX=1490222 GN=FB559_2937; PE = 3 SV=1
MREFTLPSTLEAHEPPARRDAVRLLAGTRDGVTHRPFAGLPELLRPGDLLVVNTSPTLPAAVRLDRIALHFSGPLPPSAPHASGEGAWLVELRLRTGEATVPYDGGRCGEWFPLPGGATLTLLGRQTPRLWRARLDTAVVPYLRRYGVPIRYAYVGRDWPLSAYQTIFGTPGLDGGSAEMPSAGRPFTPELVTRLVTHGVQIAPITLHTGVASPEKDEPPYAERYDVPAPTATLVNHVRWEGGRVIAVGTTVVRALETAVADDGFVRASRGWTSHVVTPEEGVRAVDGLLTGLHEPRSSHLRMLTAVAGEDLLEEVYDEALAREYKWHEFGDVNLLIR

SEQ ID NO: 62850 - protein, 358 aa, Actinobacillus delphinicola
  REGION 1..358: note = tr|A0A448TUG4|A0A448TUG4_9PAST S-adenosylmethionine:tRNA ribosyltransferase-isomerase; OS = Actinobacillus delphinicola OX=51161 GN=queA PE=3 SV=1
MRVSDFYFDLPDELIARYPVPDRKSCRLLTLNGTTGELSHGHFSDVLDCIEEGDLVIFNNTRVIPARMFGKKTSGGKIEVLVERILDDKRCLAHVRASKAPKEGTVLILGEDKLGEGNGFEMEMVARHDALFELKLLNTTETLLERLQEAGHIPLPPYIDRPDEDADKELYQTVYSKVPGAVAAPTAGLHFDDELLAQLKAKGVNFAFVTLHVGAGTFQPVRVERIEDHVMHSEYAEVPQDVVDLILETKARGKRVIAVGTTSVRSIESAALRAEENHAQQIIEPFFSDTSIFIYPGKKFRVVDAMITNFHLPESTLIMLVSAFAGFDHTMQAYKEAVENKYRFFSYGDAMFITKNQA

SEQ ID NO: 62851 - protein, 62 aa, Actinobacillus equuli
  REGION 1..62: note = tr|A0A448QQ95|A0A448QQ95_ACTEU S-adenosylmethionine:tRNA ribosyltransferase-isomerase; OS = Actinobacillus equuli OX=718 GN=queA_3 PE=3 SV=1
MLVSDFHFDLPDELIARYPTAERTASRLLQLTGETGEFADKQFSDLLAQIEEGDLLISITHV

SEQ ID NO: 62852 - protein, 361 aa, Actinobacillus equuli
  REGION 1..361: note = tr|A0A0A7MEG6|A0A0A7MEG6_ACTEU S-adenosylmethionine:tRNA ribosyltransferase-isomerase; OS = Actinobacillus equuli subsp. equuli OX=202947 GN=queA; PE = 3 SV=1
MLVSDFHFDLPDELIARYPTAERTASRLLQLTGETGEFADKQFSDLLAQIEEGDLLIFNNTRVIPARLYGRKASGGKLEVLVERVLDEHRCLAHVRASKAPKEGAELVLGEDKLGEGNGFKAIMAARHEALFELHFNEEQPLFDLLQQAGHMPLPPYIDRPDEDADQERYQTVYSKVLGAVAAPTAGLHFDTPTLEKLKAKGVNIAFVTLHVGAGTFQPVRVDNILDHKMHAEYAEVSQEVVDQILATKAAGKRVIAVGTTSVRSIESAAQAAEQEGKLIAPFFSDTSIFLYPGKTFRIVDALVTNFHLPESTLIMLVSAFAGYRNTMKAYQHAVEAKYRFFSYGDAMFISKNPNALNDVP

SEQ ID NO: 62853 - protein, 364 aa, Actinobacillus indolicus
  REGION 1..364: note = tr|A0A4P7CHC7|A0A4P7CHC7_9PAST S-adenosylmethionine:tRNA ribosyltransferase-isomerase; OS = Actinobacillus indolicus OX=51049 GN=queA PE=3 SV=1
MRVTDFHFDLPDELIARYPTAERSASRLLYLNGNTGEYQDQQFNDLLEHIHSGDLLIFNNTRVIPARLYGRKASGGKLEVLVERVLDEHRCLAHIRSSKAPKENAEIFLGEDKLGEGNGFKAIMVARHDALFELKFEEAQPLFDLLQQAGHMPLPPYIDRPDEDADQERYQTVYSKVLGAVAAPTAGLHFDHQMLQKLQEKGVQTAFVTLHVGAGTFQPVRVETIEEHKMHAEYAEVSQDVVDKILATKAQGKRVICVGTTSVRSIESAAQAAEKEGKLITPFYSDTAIFLYPGKTFRIVDALVTNFHLPESTLIMLVSAFAGFKNCMNAYQHAVESQYRFFSYGDAMFITKNENALGDVPALS

SEQ ID NO: 62854 - protein, 364 aa, Actinobacillus indolicus
  REGION 1..364: note = tr|A0A4V0IA66|A0A4V0IA66_9PAST S-adenosylmethionine:tRNA ribosyltransferase-isomerase; OS = Actinobacillus indolicus OX=51049 GN=queA PE=3 SV=1
MRVTDFHFDLPDELIARYPTAERSASRLLYLNGNTGEYQDQQFNDLLEHIHSGDLLIFNNTRVIPARLYGRKASGGKLEVLVERVLDEHRCLAHIRSSKAPKENAEIFLGEDKLGEGNGFKAIMVARHDALFELKFEEAQPLFDLLQQAGHMPLPPYIDRPDEDADQERYQTVYSKVLGAVAAPTAGLHFDHQMLQKLQEKGVQTAFVTLHVGAGTFQPVRVETIEEHKMHAEYAEVSQDVVDKILATKAQGKRVICVGTTSVRSIESAAQAAEKEGKLIAPFYSDTAIFLYPGKTFRIVDALVTNFHLPESTLIMLVSAFAGFKNCMNAYQHAVENQYRFFSYGDAMFITKNENALGDVPALS

SEQ ID NO: 62855 - protein, 361 aa, Actinobacillus lignieresii
  REGION 1..361: note = tr|A0A380TT98|A0A380TT98_ACTLI S-adenosylmethionine:tRNA ribosyltransferase-isomerase; OS = Actinobacillus lignieresii OX=720 GN=queA PE=3 SV=1
MLVSDFHFDLPDELIARYPTEERTASRLLHLNGETGHFEDKQFFDLLDQINEGDLLIFNNTRVIPARLYGRKASGGKLEVLVERVLDEHRCLAHVRASKAPKEGAELVLGEDKLGEGNGFKAIMTARHDALFELHFNEEQPLFDLLQQAGHMPLPPYIDRPDEDADQERYQTVYSKVLGAVAAPTAGLHFDKPTLEKLKAKGVNIAFVTLHVGAGTFQPVRVDNILDHKMHAEYAEVSQAVVDQILATKAAGKRVIAVGTTSVRSIESAAQAAEKEGKLIAPFFSDTSIFLYPGKTFRVVDALVTNFHLPESTLIMLVSAFAGYRNTMKAYQHAVEAKYRFFSYGDAMFINKNPNALNDLP

SEQ ID NO: 62856 - protein, 363 aa, Actinobacillus minor
  REGION 1..363: note = tr|C5S393|C5S393_9PAST S-adenosylmethionine:tRNA ribosyltransferase-isomerase OS=Actinobacillus minor NM305; OX = 637911 GN=queA PE=3 SV=1
MLVSDFHFDLPDNLIARYPMPDRSASRLLYLNGETGEFADQHFTDLLEHLHEGDLLVFNNTRVIPARLYGRKISGGKVEALIERVLDEHRCLAHVRASKAPKEGTQLIFGEDKLGEGNGLVATMAARHDTLFELHFESQNNLFDLLQSAGHMPLPPYIDRPDEDADQERYQTVYSKVLGAVAAPTAGLHFDNTMLEKLKEKGVNTAFVTLHVGAGTFQPVRVENILDHKMHAEYAEVSQDVVDKILETKAKGKRVIAVGTTSVRSIESAAQAVKNSDTLIEPFFSDTSIFIYPGKTFKVVDALVTNFHLPESTLIMLVSAFAGYKNTMNAYQHAVESQYRFFSYGDAMFIQKNPRATEDLPTS

SEQ ID NO: 62857 - protein, 361 aa, Actinobacillus pleuropneumoniae
  REGION 1..361: note = sp|A3N0C7|QUEA_ACTP2 S-adenosylmethionine:tRNA ribosyltransferase-isomerase OS=Actinobacillus pleuropneumoniae serotype 5b (strain L20) OX=416269; GN = queA PE=3 SV=1
MLVSDFHFDLPDELIARYPTEERTASRLLHLNGETGHFEDKQFFDLLDQINEGDLLIFNNTRVIPARLYGRKASGGKLEILVERVLDEHRCLAHVRASKAPKEGAELVLGEDKLGEGNGFKAIMTARHDALFELHFNEEQPLFDLLQQAGHMPLPPYIDRPDEDADQERYQTVYSKVLGAVAAPTAGLHFDNPTLEKLKAKGVNIAFVTLHVGAGTFQPVRVDNILDHKMHAEYAEVSQAVVDQILATKATGKRVIAVGTTSVRSIESAAQAAEKEGKLITPFFSDTSIFLYPGKTFRIVDALVTNFHLPESTLIMLVSAFAGYRNTMKAYQHAVEAKYRFFSYGDAMFINKNPNALNDLP

SEQ ID NO: 62858 - protein, 361 aa, Actinobacillus pleuropneumoniae
  REGION 1..361: note = sp|B3GXL9|QUEA_ACTP7 S-adenosylmethionine:tRNA ribosyltransferase-isomerase OS=Actinobacillus pleuropneumoniae serotype 7 (strain AP76) OX=537457; GN = queA PE=3 SV=1
MLVSDFHFDLPDELIARYPTEERTASRLLHLNGETGHFEDKQFFDLLDQINEGDLLIFNNTRVIPARLYGRKASGGKLEVLVERVLDEHRCLAHVRASKAPKEGAELVLGEDKLGEGNGFKAIMTARHDALFELHFNEEQPVFDLLQQAGHMPLPPYIDRPDEDADQERYQTVYSKVLGAVAAPTAGLHFDNPTLEKLKAKGVNIAFVTLHVGAGTFQPVRVDNILDHKMHAEYAEVSQAVVDQILATKATGKRVIAVGTTSVRSIESAAQAAEKEGKLIAPFFSDTSIFLYPGKTFRIVDALVTNFHLPESTLIMLVSAFAGYRNTMKAYQHAVEAKYRFFSYGDAMFINKNPNALNDLP

SEQ ID NO: 62859 - protein, 359 aa, Actinobacillus porcinus
  REGION 1..359: note = tr|A0A4V0IC95|A0A4V0IC95_9PAST S-adenosylmethionine:tRNA ribosyltransferase-isomerase; OS = Actinobacillus porcinus OX=51048 GN=queA PE=3 SV=1
MKVSDFHFDLPDELIARYPKPERTASRLLQLNGENGEIFHRTFSDVLDLIQEGDLLVFNNTRVIPARMFGHKASGGKIEVLVERVLSETTFLAHVRSSKAPKAGAELILGEDKLGEGNGVRVNMLGRQDALFELEIADKSTALLDVLQQIGHMPLPPYIDRPDEDADQERYQTVYNKVPGAVAAPTAGLHFDDELLAKLNAKGVNFAFVTLHVGAGTFQPVRVENIEDHHMHAEYVEVSQEVCDAILATKAAGKRVIAVGTTSVRSIESAALAAEEKGSAQLIEPFFSDTAIFIYPGKKFRVIDCLITNFHLPESTLIMLVSAFAGYAHTMNAYKSAVENRYRFFSYGDSMFITKNTQL

SEQ ID NO: 62860 - protein, 363 aa, unidentified
  source 1..363: note = Actinobacillus porcitonsillarum
  REGION 1..363: note = tr|A0A2U8FKW7|A0A2U8FKW7_9PAST S-adenosylmethionine:tRNA ribosyltransferase-isomerase; OS = Actinobacillus porcitonsillarum OX=189834 GN=queA PE=3; SV = 1
MLVSDFHFDLPDNLIARYPMPDRTASRLLYLNGETGVFADQHFTDLLDHLHEGDLLVFNNTRVIPARLYGRKISGGKVEALIERVLDKHRCLAHVRASKAPKEGTQLIFGEDKLGEGNGLVATMVARHDTLFELHFESQTNLFDLLQSAGHMPLPPYIDRPDEDADQERYQTVYSKVLGAVAAPTAGLHFDNVMLEKLKEKGVNTAFVTLHVGAGTFQPVRVENILDHKMHAEYAEVSQDVVDKILETKANGKRVIAVGTTSVRSIESAAQAVKNSDALIEPFFSDTSIFIYPGKTFKVVDALVTNFHLPESTLIMLVSAFAGYKNTMNAYQHAVESQYRFFSYGDAMFIQKNPHATEDLPTS

SEQ ID NO: 62861 - protein, 363 aa, Actinobacillus seminis
  REGION 1..363: note = tr|A0A263HGT9|A0A263HGT9_9PAST S-adenosylmethionine:tRNA ribosyltransferase-isomerase; OS = Actinobacillus seminis OX=722 GN=queA PE=3 SV=1
MHLSNFYFDLPDELIARYPKVERTSSRLLQLNGQNGELFHRTFSDIADLINEGDLLIFNNTRVIPARIFGSKASGGKIEVLIERILTENRFLAHIRASKSPKEGAELILGEDKLGEGKGIKARMVSRHEALFEVEIAEKNTALLEILPQIGHMPLPPYIDRPDEEADKERYQTVYNKVPGAVAAPTAGLHFDQPLLEKLKAKGVSFAFVTLHVGAGTFQPVRVERIEDHKMHAEYVEVPQEAVEAILATKANGKRVIAVGTTSVRSIESAALFAEENQLNTLIAPFFSDTSIFIYPGKKFRVTDALITNFHLPESTLIMLVSAFAGYQHTMNAYKSAVENRYRFFSYGDAMFISKNPNVKELE

SEQ ID NO: 62862 - protein, 380 aa, Actinobacillus succinogenes
  REGION 1..380: note = tr|A6VN76|A6VN76_ACTSZ S-adenosylmethionine:tRNA ribosyltransferase-isomerase OS=Actinobacillus succinogenes (strain ATCC 55618 / DSM 22257 / 130Z); OX = 339671 GN=queAPE=3 SV=1
MCPPFLLSPCGRFHPRLHQIDMLVSDFHFDLPDELIARYPKPERTSSRLLQLNGENGEIFHRTFSDVYGLINEGDLLVFNNTRVIPARMYGRKISGGKVEVLAERILTETSFLAHVRSSKAPKAGAELILGEDKLGEGNGVRMKMLGRQGALFELEISEKPTALLDVLQKIGHMPLPPYIDRPDEEADQERYQTVYNKVPGAVAAPTAGLHFDDELLAKLKAKGVNFAFVTLHVGAGTFQPVRVDKIEDHHMHAEYAEVPQEVVNAVLATKAAGKRVIAVGTTSVRSLESAALAAEEKGSSQLIEPFFSDTSIFIYPGKKFRVVDCLITNFHLPESTLIMLVSAFAGYKNIMQAYKSAVENRYRFFSYGDAMFLTKKISS

SEQ ID NO: 62863 - protein, 361 aa, Actinobacillus suis
  REGION 1..361: note = tr|K0GAR6|K0GAR6_ACTSU S-adenosylmethionine:tRNA ribosyltransferase-isomerase OS=Actinobacillus suis H91-0380 OX=696748 GN=queA PE=3 SV=1
MLVSDFHFDLPDELIARYPTAERTASRLLQLTGETGEFADKQFSDLLTQIEAGDLLIFNNTRVIPARLYGRKASGGKLEVLVERVLDEHRCLAHVRASKAPKEGAELVLGEDKLGEGNGFKAIMAARHEALFELHFNEEQPLFDLLQQAGHMPLPPYIDRPDEDADQERYQTVYSKVLGAVAAPTAGLHFDTPTLEKLKAKGVNIAFVTLHVGAGTFQPVRVDNILDHKMHAEYAEVSQDVVDQILATKAAGKRVIAVGTTSVRSIESAAQAAEQEGKLIAPFFSDTSIFLYPGKTFRIVDALVTNFHLPESTLIMLVSAFAGYRNTMNAYKHAVEAKYRFFSYGDAMFISKNPNALHDVP

SEQ ID NO: 62864 - protein, 361 aa, Actinobacillus ureae
  REGION 1..361: note = tr|E8KH49|E8KH49_9PAST S-adenosylmethionine:tRNA ribosyltransferase-isomerase OS=Actinobacillus ureae ATCC 25976 OX=887324 GN=queA PE=3 SV=1
MLVSDFHFNLPDELTARYPTSERTASRLLHLNGETGEFADKQFSDLLTHIEEGDLLIFNNTRVIPARLYGRKASGGKLEVLVERVLDEQRCLAHVRASKAPKEGAELVLGEDKLGEGNGFKAIMATRHEALFELHFNEEQPLFDLLQQAGHIPLPPYIDRPDEDADQERYQTVYSKVLGAVAAPTAGLHFDTPTLEKLKAKGVNIAFVTLHVGAGTFQPVRVDNILDHKMHAEYAEVSQDVVDQILATKAAGKRVIAVGTTSVRSIESAAQAAEQEGKLIAPFFSDTSIFLYPGKTFRIVDALVTNFHLPESTLIMLVSAFAGYRNTMNAYKHAVEAKYRFFSYGDAMFISKNPNALNDVP

SEQ ID NO: 62865 - protein, 351 aa, unidentified
  source 1..351: note = Actinobacteria bacterium
  REGION 1..351: note = tr|A0A1F2WFP3|A0A1F2WFP3_9ACTN S-adenosylmethionine:tRNA ribosyltransferase-isomerase; OS = Actinobacteria bacterium RBG_13_55_18 OX=1797197; GN = queA PE=3 SV=1
MQTDLFDYHLPPQLIAQKPLERRRDSLLLAVNCEKRTFEHTLFRDLRLYLQEGDCLVLNSSRVRRARIHGFKEGGGAEIEILLLNKDDNGKWNALARPARRLRPGVRLKFAGGEMEAEVIETHERGEVSIRLSGRAGRSVEAIIEEIGEIPLPPYIKAEPDDPERYQTVFASQLGSAAAPTAGLHFEQEELRALEETGVKPAFLRLDIGLDTFRPIETELLEDHRIHMENYAIDESACNLINSTREEGGRIVAVGTTVVRALESCASGGEAKAFSGDTDLFIYPGFRFQLVDCLLTNFHMPKSSLLALVCAFAGTGLVMEAYQAAVMSGYRFLSLGDACFFNFPNGRDTFK

SEQ ID NO: 62866 - protein, 336 aa, unidentified
  source 1..336: note = Actinobacteria bacterium
  REGION 1..336: note = tr|A0A1F2XCV1|A0A1F2XCV1_9ACTN S-adenosylmethionine:tRNA ribosyltransferase-isomerase; OS = Actinobacteria bacterium RBG_16_68_21 OX=1797204; GN = queA PE=3 SV=1
MKTAEFFYDLPETAIAQAAIEPRDASRLLDTRTMTDHRFSDLPGLLREGDVVVVNHTRVRPARLIGEKDRSGGRVEALLLRPRGDGSWEALVRPARRIRSGTRLRFGDALVVVTDAPTSGRVTLRAEEGDIAAAAEDIGEVPLPPYFRGTLSDPERYQTVYARQPGSAAAPTAGLHFTAGVLEGLAARGIAVVGIDLEIGLDTFRPIGAEDIADHVMHAENATVGTEAAAAIAAARGAGGRVVAIGTTVVRTLETAAAASGEVEAFAGETRLFITPGYRFRAVDLVVTNFHVPGSTLVVLIAAFVGPRWRQIYDTVLARGYRFLSFGDAMLAECAR

SEQ ID NO: 62867 - protein, 333 aa, unidentified
  source 1..333: note = Unknown
  REGION 1..333: note = tr|A0A094PLC4|A0A094PLC4_9ACTN S-adenosylmethionine:tRNA ribosyltransferase-isomerase; OS = actinobacterium acAcidi OX=1504320 GN=queA PE=3 SV=1
MNLSDIDYELPEKLIAQHPVEPRDSARLLVATHPSQIEHKHVTDLVDFLEAGDVVVVNDTRVLPARLALHRKTGGAAEVLLLEQRSSDFRLWEALVKPASKLKPDEVLEYFGKRVVRVGPRTEAGDTFVVEILDENPMELLQRIGAMPLPPYIRSSLTDLERYQTVYARRMASAAAPTAGLHFTPELMARIVEKGVVVETVELVVGLDTFKPISTDDPLDHLIHSEFYSVEQRVMDACEQAKRVIAIGTTATRALESVAASGQLTGRTSLFITPGFQWKVVDMMLTNFHLPKTSLLLMIESFIGTRWRDIYAEAISEQYRFLSFGDAMLLARS

SEQ ID NO: 62868 - protein, 342 aa, unidentified
  source 1..342: note = Unknown
  REGION 1..342: note = tr|A0A094PIE8|A0A094PIE8_9ACTN S-adenosylmethionine:tRNA ribosyltransferase-isomerase; OS = actinobacterium acAcidi OX=1504320 GN=queA PE=3 SV=1
MQLSDIDYVLPVDLIAQTPIEPRDSARLLVDQGTRRPLHQHVRDLCSFLNPNDVLVLNHTRVLPARLRARRSTGGAVEILLLNQTSDDSVSWEAMIKPGGKLRNGELLTINDSGMNVEIGDRTIHGDTFAIKLIGPNVLTELLRIGEVPLPPYITQTLQDAERYQTVFSHDQRSAAAPTAGLHFTLELLERIRNMGVRVLEVELVVGLDTFKPISDEDPLKHLIHSEAYSVSQEVLDGCNIARNNGGRVIAVGTTATRALESAATSGLLSGNTTLFITPGYQWKMVDVMMTNFHMPKTTLLLMIESFVGKRWRILYQHAIDEKYRMLSFGDAMLLQRQTDTV

SEQ ID NO: 62869 - protein, 328 aa, unidentified
  source 1..328: note = Actinocrispum wychmicini
  REGION 1..328: note = tr|A0A4R2K7C9|A0A4R2K7C9_9PSEU S-adenosylmethionine:tRNA ribosyltransferase-isomerase; OS = Actinocrispum wychmicini OX=1213861 GN=EV192_1011668; PE = 3 SV=1
MITSAIEPPEAHGVARDEVRMLVATPRGVTHARFADLPRFLEPGDLVVVNNSGTLAAAVTGHRDGSELTVHFSTRLDDGSWVVELRPPGPATGPVSDTRAGQKVDLPDGVLVLVEEYVLGRLWRAAVSVDVPAMLARYGRPIKYAYVPGDWPIEDYQTVFARHPGSAEMPSAGRPFSAELVTDLVSAGVSVAPITLHTGVSSIEEGKAPLPERFHVPESTARMVNLTRDAGRRVVAVGTTVTRALESVACNGIVRPGAGWTDLVLGPDRPARVVTGLITGWHEPGASHLLLLRAVAGDRLVADAYRAAAAGGYLWHEFGDSCLLLPGD

SEQ ID NO: 62870 - protein, 340 aa, Actinokineospora auranticolor
  REGION 1..340: note = tr|A0A2S6GCI9|A0A2S6GCI9_9PSEU S-adenosylmethionine:tRNA ribosyltransferase-isomerase; OS = Actinokineospora auranticolor OX=155976 GN=CLV40_13542; PE = 3 SV=1
MKTLQFRVTGDLEAHEPPEARGLTRSGVRLLVGDGAEVSHRRFEELPDILRPGDVLVVNTSATMPAAVPVVGADLALHFSTESPGGLWLVELRAVAEKATKPYTGGVVGLRLALPGGGAATLVQPYSRGRLWVASIYPGRFGSVLEYLEVFGAPIRYGYVSRPWPLRYYQTVFGTEPGSAEMPSASRPFTDRVVTRLVSAGVQFAPVLLHTGVASPEAHERPYPERFQVADTTARVVNTARAAGGRVVAVGTTAVRALESAADEDGVVRAASGWTDLIVTPERGVLAVDGLLTGFHEPEASHVDMLVAVAGEELLAQCYQEALAERYLWHEFGDVNLLLR

SEQ ID NO: 62871 - protein, 334 aa, Actinokineospora cianjurensis
  REGION 1..334: note = tr|A0A421B006|A0A421B006_9PSEU S-adenosylmethionine:tRNA ribosyltransferase-isomerase; OS = Actinokineospora cianjurensis OX=585224 GN=CLV68_4890; PE = 3 SV=1
MTTDLTLPAGLDAHEPPEARGLTRDGIRLLVSDGGELSHHRFSDLPSVLRAGDVLVVNTSGTLPASVAVVGGSLRVHLSTENADGSWLLELRSGTQPYPFGAAGDRLPLVGGASVLLRGRYSRNRLWEATIDPGRFATVQAYLAAVGEPIRYGYVPHSWPLRYYQTVFGVDPGSAEMPSAGRPFTDRLVTRLVAAGVQFAPVLLHTGVASPEAHERPYPEWFRVSAETARTVNAARADGRRVIAVGTTAVRAVESAVRDGVVQEVSGWTELVVTPERGVAVVDGLLTGFHEAAASHVDMLVAVAGRGVVERCYAAAVGGGYLWHEFGDVNLLMR

SEQ ID NO: 62872 - protein, 334 aa, Actinokineospora terrae
  REGION 1..334: note = tr|A0A1H9QHU0|A0A1H9QHU0_9PSEU S-adenosylmethionine:tRNA ribosyltransferase-isomerase; OS = Actinokineospora terrae OX=155974; GN = SAMN04487818_104278 PE=3 SV=1
MTTDLTLPAGLDAHEPPEARGLARDGVRLLVSDGGELSHHRFSDLPSVLRAGDVLVVNTSGTLPASVAVVGGSLRVHLSTENADGTWLLELRSGTQPYPFGAAGDRLPLVGGASVLLRGRYSRNRLWEATIDPGPFATVQAYLAAVGEPIRYGYVPHSWPLRYYQTVFGVDPGSAEMPSAGRPFTDRLVTRLVAAGVQFAPVLLHTGVASPEAHERPYPEWFRVSAETARMVNAAKADGRRVIAVGTTAVRAVESAVRDGVVREACGWTELVVTPERGVAVVDGLLTGFHEASASHVDMLVAVAGRGVVERCYAEAVGGGYLWHEFGDVNLLVR

SEQ ID NO: 62873 - protein, 338 aa, Actinomadura bangladeshensis
  REGION 1..338: note = tr|A0A4R4NLR5|A0A4R4NLR5_9ACTN S-adenosylmethionine:tRNA ribosyltransferase-isomerase; OS = Actinomadura bangladeshensis OX=453573 GN=E1284_28465; PE = 3 SV=1
MTVEFTLPASLEAHEPPEARGRSRDGVRLLVSRRATGTVSHHAFGDLPTLLDPGDLLVVNTSATLPAAVRLDRISVHFSTPVPGGDDRLWLVELRRLAGKASRPYRGGSPGEWIPLPGGATLTLVGRRTERLWEARLSTDVIPFLLSHGVPIRYGYVRRDWPAAAYQTAFAYDSSTGSAEMPSAARPFTPGLVTSLVSRGVLIAPITLHTGVASPEAHEPPYAERYRVPPPTAALVEHVRSEGHRVIAVGTTAVRALETAVNASGRVTASSGWTEHIVTPEKGVRAVDGLLTGLHEPKSSHLMMLTAIAGTDLLTATYDAALAERYLWHEFGDLNLIL

SEQ ID NO: 62874 - protein, 342 aa, Actinomadura chibensis
  REGION 1..342: note = tr|A0A5D0NYC5|A0A5D0NYC5_9ACTN S-adenosylmethionine:tRNA ribosyltransferase-isomerase; OS = Actinomadura chibensis OX=392828 GN=FXF69_08460 PE=3; SV = 1
MTVEFTLPPALEAHEPPEARGRSRDGVRLLVSRRATGEVSHHGFRDLPALLDPGDLLVVNTSATLPAAVRLDRIGVHFSTPVPPAEDDDRLWLVELRRLTGKASKPYSGGCPGEWIPLPGGATLTLVGRRTRRLWEARLSTDVVPYLRRYGVPIRYGYVRRDWPTAAYQTAFAYDRSSGGAEMPSAARPFTPELVTRLVSGGVHIAPITLHTGVASPEAGEPPYAERYEVPEPTAALVGHVRKRGGRVIAVGTTAVRALETSVDGSGNVRAAKGWTEHVVTAEGGVRAVDGLLTGLHEPRSSHLLMLTAIAGQDLLAATYAAALSEGYLWHEFGDANLIVAR

SEQ ID NO: 62875 - protein, 345 aa, unidentified
  source 1..345: note = Actinomadura darangshiensis
  REGION 1..345: note = tr|A0A4R5AJK4|A0A4R5AJK4_9ACTN S-adenosylmethionine:tRNA ribosyltransferase-isomerase; OS = Actinomadura darangshiensis OX=705336 GN=E1293_32305; PE = 3 SV=1
MTVEFTLPAALEAHEPPEERGSGTGARTRDGVRLLVSRRATGEVSHHGFRDLPSLLDPGDLLVVNTSATLPAAVRLDRISVHFSTPVPGADDRLWMVELRRRTGKASRPYSGGCPGEWIPLPGGATLTLVGRGTDRLWQARLSTDVVPYLRRHGVPIRYGYVRRDWPAAAYQTVFAHDRSTGSAEMPSAARPFTAELVTRLVSGGVLLAPITLHTGVASPEAHEPPYAERYAVPEPTAALVEHVRSQGRRVIAVGTTAVRALETSVDASGHVQASSGWTEHIVTPSKGVRAVDGLLTGLHEPKSSHLMMLTAIAGHDLLTATYEAALAEGYLWHEFGDLNLLMNR

SEQ ID NO: 62876 - protein, 335 aa, Actinomadura echinospora
  REGION 1..335: note = tr|A0A1H6CEG4|A0A1H6CEG4_9ACTN S-adenosylmethionine:tRNA ribosyltransferase-isomerase; OS = Actinomadura echinospora OX=1992 GN=SAMN04489712_109257; PE = 3 SV=1
MIDFALPPALEAHEPPEAHGRTRDGVRLLVARGDGIGHHAFTELPDLLNPGDLLVVNTSATLPAAVRLDKLAVHFSTPYAEDSDLWLVELRRRVGKTSRPYRGGSPGEWIPMPGGATLALVRRQTERLWQARLSTDVVPYLRRYGVPIRYGYVRRDWPATAYQTAFALDRREGSAEMPSAGRPFTPELVTRLVSRGVLMSPLSLHTGVASPEAHEPPYAERYDVPAVTADLVGHVRARGGRVIAVGTTVVRALETAAEPSGGVRPSRGWTRHVVTPETGVRVVDGLLTGLHEPKSSHLRMLTAIAGPRLLERAYEAALAESYLWHEFGDLNLLLP

SEQ ID NO: 62877 - protein, 350 aa, Actinomadura hallensis
  REGION 1..350: note = tr|A0A543ING2|A0A543ING2_9ACTN S-adenosylmethionine:tRNA ribosyltransferase-isomerase; OS = Actinomadura hallensis OX=337895 GN=FHX41_5875 PE=3 SV=1
MTVEFTLPPALEAHEPPEARGRTRDGVRLLVSRRATGEISHHAFRDLPSLLDPGDVLVVNTSSTLPAAVRLDRISVHFSTPVPGGDDKLWTVELRRLTGKTSSPYSGGRSGEWIPMPGGVTLTLVERHASGEPGHRRVSDRLWRARLSTDVVPYLRRHGTPIRYGYVRRDWPAAAYQTVFAHDRAAGSAEMPSAARPFTPELVTRLVSRGVHIAPITLHTGVASPEAHEPPYAERYEVPGPTAALVEHVRSRGGRVIAVGTTSVRALETSVDGSGRVRASAGWTDHVVTPERGVQAVDGLLTGLHEPRSSHLMMLTALAGPDLLAATYEAALAERYLWHEFGDVNLLLPG

SEQ ID NO: 62878 - protein, 346 aa, Actinomadura madurae
  REGION 1..346: note = tr|A0A1I5V6C7|A0A1I5V6C7_9ACTN S-adenosylmethionine:tRNA ribosyltransferase-isomerase; OS = Actinomadura madurae OX=1993 GN=SAMN04489713_1219 PE=3; SV = 1
MTVEFTLPPALEAHEPPEARGRTRDGVRLLVGRRATGEVAHHEFRDLPALLDPGDLLVVNTSATLPAAVRLDRISVHFSTPVPGADDRLWIVELRRLAGKSSRPYSGGCPGEWIPMPGGATLTLVGRHAAGSRESDRLWQARLSTDVVPYLRRYGTPIRYGYVRRDWPVSAYQTAFAHDRSTGSAEMPSAARPFTPELVTRLVSRGVLFAPLTLHTGVASPEAHEPPYAERYEVPESTAALVEHVRSRGRRVIAVGTTAVRALETSADAFGRVQPSSGWTEHVVTPESGVRAVDGLLTGLHEPRSSHLMMLTAIAGRELLAATYESALAEGYLWHEFGDLNLIVAG

SEQ ID NO: 62879 - protein, 347 aa, Actinomadura mexicana
  REGION 1..347: note = tr|A0A238VTX6|A0A238VTX6_9ACTN S-adenosylmethionine:tRNA ribosyltransferase-isomerase; OS = Actinomadura mexicana OX=134959 GN=SAMN06265355_102370; PE = 3 SV=1
MTVDFTLPAALEAHEPPEARGRTRDGVRLLVSRRAAGEVSHHAFRDLPGLLDPGDLLVVNTSATLPAAVRLDRISVHFSTPVPGADDRLWLVELRRLAGKTSRPYAGGSPGEWIPMPGGATLTLVGRHGHRARGESDRLWQARLSTDVGPYLRRHGTPIRYGYVHRDWPASAYQTVFAHDRSSGGAEMPSAARPFTPELVTRLVSRGVLIAPITLHTGVASPEAHEPPYAERYTVPEPTAALVGHVRAQGRRVIAVGTTAVRALETAVDAAGGVRASSGWTEHVVTPEGGVRAVDGLLTGLHEPRSSHLMMLTAIAGRDLLTATYEAALAERYLWHEFGDLNLILPG

SEQ ID NO: 62880 - protein, 345 aa, Actinomadura meyerae
  REGION 1..345: note = tr|A0A239NIV6|A0A239NIV6_9ACTN S-adenosylmethionine:tRNA ribosyltransferase-isomerase; OS = Actinomadura meyerae OX=240840 GN=SAMN05443665_104218; PE = 3 SV=1
MTVDFTLPPALEAHEPPEARGRTRDGVRLLVSRRATGAVSHHAFRDLPALLDPGDLLVVNTSATLPAAVRLDRISVHFSTPLPGDSTPLPDDDDRLWLVELRRLAGKGSLPYAGGCPGEWIPLPGGATLTLVERHTPRLWRARLSTDVVPYLRRHGTPIRYGYVRGDWPTAAYQTAFAHDRSTGSAEMPSAGRPFTPELVTELVSRGVLVAPITLHTGVASPEAHEPPYAERYRVPEPTAALVEHVRARGRRVIAVGTTAVRALETAVDGSGRVRPSSGWTEHVVTPEGGVRAVDGLLTGLHEPESSHLMMLTALAGRDLLAATYAAALAERYLWHEFGDLNLIL

SEQ ID NO: 62881 - protein, 335 aa, unidentified
  source 1..335: note = Actinomadura parvosata
  REGION 1..335: note = tr|A0A2P9IHP6|A0A2P9IHP6_9ACTN S-adenosylmethionine:tRNA ribosyltransferase-isomerase; OS = Actinomadura parvosata subsp. kistnae OX=1955414; GN = KIS93_07007 PE=3 SV=1
MTAALDFSLPPGLSAAEPPEAKGMRRDGVRLMLSRGAAEPSHHHFSDLPELLEPGDLIVVNNSATLPAAVRLDRLAVHFSTVRPDGTWLVELRRRTANGSEPYGGGEPGEWLPMPGRATLRLVGRETPRLWRAVLDRDVEAYLRVHGVPIRYSYVERDWPIEAYQTVFATVPGSAEMPSAARPFTVELVTALVARGVGIAPITLHTGVASTEKDEPPYAERYEVPASTARLVNLTRENGGRVVAAGTTVVRALETAAGADGRVTAAAGWTEHVVTPESGVRAVTGLITGLHEPRSSHLLMLTAIAGEAALARAYEEALRKGYLWHEFGDTHLILK

SEQ ID NO: 62882 - protein, 354 aa, Actinomadura pelletieri
  REGION 1..354: note = tr|A0A495QY82|A0A495QY82_9ACTN S-adenosylmethionine:tRNA ribosyltransferase-isomerase; OS = Actinomadura pelletieri DSM 43383 OX=1120940; GN = BZB76_0593 PE=3 SV=1
MTVDFTLPTALEAHEPPEARGRTRDGVRLLVSRRATGEIAHHEFRELPDLLDPGDLLVVNTSATLPAAVRLDRISVHFSTPVPGADDRLWIVELRRNTGKTSKPYTGGCAGEWIPLPGGATLTLVGRHGGGPGECGRSSPHGGSERLWEARLSTDVVPYLRRHGAPIRYGYVRRDWPTTAYQTVFARDRSTGSAEMPSAGRPFTPELVTRLVSRGVLMAPITLHTGVASPEAHEPPYAERYEVPEATAALVEHVRSRGGRVIAVGTTAVRALETAVDASGHVRPSTGWTEHVVTPDHGVRAVNGLLTGLHEPKSSHLMMLTAIAGPDLLTATYDAALAEGYLWHEFGDINLVLG

SEQ ID NO: 62883 - protein, 351 aa, Actinomadura sp.
  REGION 1..351: note = tr|A0A4R4M144|A0A4R4M144_9ACTN S-adenosylmethionine:tRNA ribosyltransferase-isomerase; OS = Actinomadura sp. 7K534 OX=2530366 GN=E1266_30790 PE=3; SV = 1
MTVEFALPAALEAHEPPEARGRARDGVRLLVSRRATGEVSHHGFRDLPSLLEPGDLLVVNTSATLPAAVRLDRISVHFSTPVPGGDDRLWIVELRRRAGKADRPYSGGRCGEWIPMPGGATLTLVRRHASGRDGPSPRESDRLWEARLSTDVVPYLRGHGTPIRYGYVRQDWPVAAYQTAFAHDRAAGGAEMPSAGRPFTPELVTRLVSGGVLIAPITLHTGVASPEAHEPPYAERYEVPEATAALVGHVRSRGGRVIAVGTTAVRALETSVDASGRVRASAGWTEHVVTPERGVRAVDGLLTGLHEPKSSHLMMLTAIAGPGLLAATYESALAERYLWHEFGDANLILPG

SEQ ID NO: 62884 - protein, 339 aa, Actinomadura sp.
  REGION 1..339: note = tr|A0A4R4X884|A0A4R4X884_9ACTN S-adenosylmethionine:tRNA ribosyltransferase-isomerase; OS = Actinomadura sp. KC06 OX=2530369 GN=E1287_36165 PE=3; SV = 1
MTVEFTLPSALEAHEPPEARGRARDGVRLLVSRRATGEVSHHEFRDLPALLTPGDLLVVNTSATLPAAVRLDRISVHFSTPVPGADERLWITELRRLTGKSSHPYTGGCPGEWIPLPGGATLTLVGRHTDRLWQARLSTDVVPYLRRHGVPIRYGYVRRDWPTASYQTVFANDRSTGSAEMPSAGRPFTPELVTRLVSRGVLIAPITLHTGVASPEAHEPPYAERYEVPEPTAALVEHVRSRGGRVIAVGTTAVRALETSVDASGRVQPSEGWTEHIVTPERGVQAVDGLITGLHEPKSSHLMMLTAIAGSELLTATYEAALAERYLWHEFGDTNLILP

SEQ ID NO: 62885 - protein, 341 aa, unidentified
  source 1..341: note = Actinomadura syzygii
  REGION 1..341: note = tr|A0A5D0UAZ3|A0A5D0UAZ3_9ACTN S-adenosylmethionine:tRNA ribosyltransferase-isomerase; OS = Actinomadura syzygii OX=1427538 GN=FXF65_14045 PE=3 SV=1
MTVEFTLPPALEAHEPPESRGRSRDGVRLLVSRRATGEVSHYGFRDLPALLDPGDLLVVNTSATLPAAVRLDRIGVHFSTPVPSADDDRLWLVELRRLTGKASAPYSGGSPGEWIPLPGGATLTLVGRRTRRLWEARLSTEVVPYLRRHGVPIRYGYVRRDWPTAAYQTAFAYDRSSGGAEMPSAARPFTPELVTRLVSGGVHIAPITLHTGVASPEAGEPPYAERYEVPEATAALVGHVRKRGGRVIAVGTTAVRALETSVDGSGNVRAAKGWTEHVVTPKSGVRAVDGLLTGLHEPKSSHLLMLTAIAGQDLLAATYAAALSEGYLWHEFGDVNLIVAR

SEQ ID NO: 62886 - protein, 338 aa, Actinomadura umbrina
  REGION 1..338: note = tr|A0A3D9SNK0|A0A3D9SNK0_9ACTN S-adenosylmethionine:tRNA ribosyltransferase-isomerase; OS = Actinomadura umbrina OX=111806 GN=DFJ69_3005 PE=3 SV=1
MIDFVLPSALEAHEPPEARGRARDGVRLLVSRDDGVSHHAFTDLPELLSPGDLLVVNTSATLPAAVRLDRLWVHFSTPYAEGDDTWLVELRRRVGKAGRPYGGGNPGEWIPMPGGVTLTLVRRRTERLWQARLSTDVLPYLRRHGMPIRYGYVQRDWPTGAYQTAFALDGREGSAEMPSAGRPFTPELVTRLVSRGVLMSPLTLHTGVASPEAHEPPYPERYEVPEVTAALVGHVRSQGGRVIAVGTTVVRALETAVAASGEVVASQGWTEHVVTPEKGVRAVDGLLTGLHEPRSSHLQMLTAIAGARLLEESYEAALAEGYLWHEFGDLNLLLPRPR

SEQ ID NO: 62887 - protein, 340 aa, Actinomadura viridilutea
  REGION 1..340: note = tr|A0A2P6UGK3|A0A2P6UGK3_9ACTN S-adenosylmethionine:tRNA ribosyltransferase-isomerase; OS = Actinomadura viridilutea OX=58112 GN=CLV66_105225 PE=3; SV = 1
MTTPPGVALPAAPAAREPPEERGLARDAVRLLVGRRSTGEIAHHRFRDLPGLLDPGDLLVVNTSATLPAAVRLDRLAVHFSTPLPGDDGLWLVELRRRTATASVPYGGGSPGEWIPMPGGATLVLVRRHTERLWAARLDRTVVPYLHRHGVPIRYGYVRRDWPIAAYQTVFARDRDSGGAEMPSATRPFTTDLVTALVSRGILLAPLTLHTGLSSPEAHEPPSAERYEVPEPTAALIEHVRAHGGRVIAVGTTVVRALETAVDADGQVRPSHGWTEHVVTPDSGVRAVDGLLTGLHDPRSSHMTVLTAIAGPGLVAASYRAAVDHGYLGHEFGDAHLVLP

SEQ ID NO: 62888 - protein, 254 aa, Actinomyces sp.
  REGION 1..254: note = tr|A0A3M2GHQ6|A0A3M2GHQ6_ACTSX S-adenosylmethionine:tRNA ribosyltransferase-isomerase (Fragment) OS=Actinomyces sp. OX=29317 GN=D6683_09375 PE=3; SV = 1
LVRPSRRIAPGTVVTCGPLRVEVGEDLGEGRRLVRPDPGGRDLAAVLDEVGEMPLPPYLHARLDDPERYQTVFARRPASAAAPTAGLHLTHEILEALRRRGARLARVELVVGLDTFRPVTAARLDEHRIHTEAYTVPDATLEAVAGARRVVAVGTTVVRALETWARTGRPRGRSDLFIRRPFDWRVVDVLMTNFHLPRSTLLCLVDAFVGPRWRDLYRLALDEGYRFLSFGDACWLTRAGDPAPGGGTDGGTDR

SEQ ID NO: 62889 - protein, 348 aa, Actinomycetospora cinnamomea
  REGION 1..348: note = tr|A0A2U1FFS7|A0A2U1FFS7_9PSEU S-adenosylmethionine:tRNA ribosyltransferase-isomerase; OS = Actinomycetospora cinnamomea OX=663609 GN=C8D89_104279; PE = 3 SV=1
MSVVPATRFVLPAGAEAHEPPEHRGLARDEVRLLVARPGGVAHRRFLDLADVLEPGDLLVVNTSATLAAALDARHADGRAMTVHVATALDDGTWVVEPRRPDGPERDVAAGDRLELPGVALTLVAPYPDEDAPRRLWRARPWPPVGLVGYLARYGRPIAYGHLGGRFPLADHQTVYATLPGSAEMPSAGRPLSERLLVRLVARGVTVAPLVLHAGVSSPEKHEPPTPERFSVPSATARLVNSARDAGARVVAVGTTVVRALETVATPDGTVSPGHGWTDLVLGTHRPARTVTGLVSGLHEPEASHLALLEAVAGPELVGRTYEAAVREGYLWHEFGDSTLLLPTEVSR

SEQ ID NO: 62890 - protein, 343 aa, Actinomycetospora succinea
  REGION 1..343: note = tr|A0A4R6VI96|A0A4R6VI96_9PSEU S-adenosylmethionine:tRNA ribosyltransferase-isomerase; OS = Actinomycetospora succinea OX=663603 GN=EV188_103717; PE = 3 SV=1
MTVVPMTSFLLPPGAEAHEPPEHRGLARDGVRLLVARPGLVEHRRFDELADVLDPGDLLVVNTSATLPAALDVRHHDGRAMTLHVATALDDGDWVVEPRRPDGPETDVAPGDRLGPPGLVLTLVAPYPDEDAPRRLWRARPWPPVGLAGYLATYGRPIAYGHLAGRFPLSDHHTVYAAVPGSAEMPSAGRPLSERLLVRLMARGVTVAPLVLHAGVSSPEKHEPPSPEPFAVPAVTARLVNSAREAGSRVVAVGTTVVRALETVAAPDGTVSPGHGWTDLVLGAHRPARTITGLVSGLHEPEASHLALLEAVAGPALVGETYEAAVAARYLWHEFGDSTLLLP

SEQ ID NO: 62891 - protein, 326 aa, Actinophytocola oryzae
  REGION 1..326: note = tr|A0A4V3FU66|A0A4V3FU66_9PSEU S-adenosylmethionine:tRNA ribosyltransferase-isomerase; OS = Actinophytocola oryzae OX=502181 GN=CLV71_104560 PE=3; SV = 1
MTVEFTLPAALEAHVPPEARGLGRDGVRLLVSSSEGVEHHRFTDLPSQLRAGDVLVVNTSATVPAAVPVPDSGLVAHISTEQPDGRWLVELRQATGPFRDGTAGTRYPLFGGGSVTLRRPFSAGRLWESDVDTDGLGVLAYLAAFGSPIRYSYVGDAWPISCYQTVFGVTPGSAEMPSASRPFTERLVTRLVARGVQFAPVLLHTGVASPEAHERPYPERFAVPRTSRDVVARARAEGRRVIAVGTTAVRAIESDADGGWTDVIITPERGVRHVDGLLTGFHEPMASHLDMLAAIAGPGLLNETYRQAIEGGYLWHEFGDVNLLLP

SEQ ID NO: 62892 - protein, 336 aa, unidentified
  source 1..336: note = Actinoplanes atraurantiacus
  REGION 1..336: note = tr|A0A285KFI8|A0A285KFI8_9ACTN S-adenosylmethionine:tRNA ribosyltransferase-isomerase; OS = Actinoplanes atraurantiacus OX=1036182; GN = SAMN05421748_13736 PE=3 SV=1
MTTATLDFELPADLEAREPAEARGRRREDVRLLVSRGAAVSHHRFPELPRILEAGDLLVVNNSATVPAAIDTEDGLVVHVSTEHADGSWLVELRRSAGGSTAPFAPGTGPARAGLRLPVPEGAVTLLHPYTSRLWTAKADVPGTRVDYLARHGRPIRYDYTDRDWPLATYQNAYATEPGSAEMPSAGRPLTGAVLAELAGRGILVAPITLHTGVASAEVDEPPYPEWYAVPRPTTRLIEHVRAGGGRVIAVGTTVVRALETAWDGPASGWTDLVIGPERPVRSVDGLLTGLHEPRASHLRMLSAVTGPAALRAAYDEALRGRYRWHEFGDVHLLLP

SEQ ID NO: 62893 - protein, 317 aa, Actinoplanes brasiliensis
  REGION 1..317: note = tr|A0A4R6J7G0|A0A4R6J7G0_9ACTN S-adenosylmethionine:tRNA ribosyltransferase-isomerase; OS = Actinoplanes brasiliensis OX=52695 GN=C8E87_6873 PE=3; SV = 1
MTTFTVPPVLEARAPAEARGVARDGVRLMVSRGTAVSHHRFTDLPGLLDPGDLLVVNNSATLPAAIETIDGVRVHVSTEQPDGTWLVEPRDFDAARPGLRLRVPSGSLTLLRPFTSRLWVAAADVPGGRVEYLTRHGRPIRYSYTDRDWPISTYQNAYATVPGSAEMPSAGRPLTGAVLSALAGRGVLVAPLTLHTGVASAEVDEPPYPEWFRVPSSTASLIGHVRRSGGRVIAVGTTVVRALETGTPEGWTDVVIGPDHPIRYVDGLLTGLHEPRASHLKMLTAVAGEEALRASYESALRERYLWHEFGDVHLLLR

SEQ ID NO: 62894 - protein, 331 aa, Actinoplanes friuliensis
  REGION 1..331: note = tr|U5VXE5|U5VXE5_9ACTN S-adenosylmethionine:tRNA ribosyltransferase-isomerase OS=Actinoplanes friuliensis DSM 7358 OX=1246995 GN=AFR_16775 PE=3 SV=1
MIDFALPPALEADRPPPARDGVRMLVGERSSGRVTHHRFTDLPDLLRPGDVLVVNTSATLPAAVPVTDSPLTVHFSTECDDGSWLVELRRNRGKATEPFPEGSSGRRYPLPGGGAVVLGEPWSAGRLWRAEVVTGGARSVQAFLYAHGRPIRYGYVRRRWPLAAYQTVFGVSPGSAEMPSAGRPFTDVLVTRLVTAGVLFAPVLLHTGVASPEAHERPYPERFVVPPASRRLVARARADGGRIIAVGTTAVRALETAWDGPAQGWTELVITPDRGLRAVDGLLTGFHEPRASHLDMLAAVAGTPLLERCYAEALDARYLWHEFGDVNLLLP

SEQ ID NO: 62895 - protein, 376 aa, Actinopolymorpha cephalotaxi
  REGION 1..376: note = tr|A0A1I2R0I1|A0A1I2R0I1_9ACTN S-adenosylmethionine:tRNA ribosyltransferase-isomerase; OS = Actinopolymorpha cephalotaxi OX=504797; GN = SAMN05421678_10588 PE=3 SV=1
MSSSTKTGVQATRTAPTILPAPRVDFVLPPELEAHEPPEARGLSRDGVRLLLGRGDGSGDGPANEVAHHSFVDLPRLLEPGDVVVVNRSGTRPAAVDLPPGPDGTGTGERRSVHFSTLAADGSWLVELRRGDGPDPGGRPGQRVDLPGDRQGGAALVLRERHRSGRLWHAVPILPSGVPDVPAYLARHGRPIRYGYVGREWPLHAYQTAFATTPGSAEMPSAGRPFTPEVVTELVARGILVVPITLHTGVASAEFHEPPYAEWFEVPAATAAVVNDANRRGARVVAVGTTVVRALESAAHGPWVRGASGWTELVITAERGVAVVSGLLTGFHEPQASHLLMLEAIAGPDLVRQCYSAAVDGGYLWHEFGDVNLLLP

SEQ ID NO: 62896 - protein, 384 aa, Actinopolymorpha singaporensis
  REGION 1..384: note = tr|A0A1H1XJ38|A0A1H1XJ38_9ACTN S-adenosylmethionine:tRNA ribosyltransferase-isomerase; OS = Actinopolymorpha singaporensis OX=117157; GN = SAMN04489717_4987 PE=3 SV=1
MSAGTTTAVQAAGTAPNVLPAPRVDFVLPPELEAHEPPEARGLTRDGVRLLLGRGDGSGDGPANEVAHHRFVDLPHLLEPGDVVVVNRSGTRPAAVDLPTHPEDTDSTDSTDSTGTTGEGERRSVHFSTLAADGSWLVELRRGDGPDPGGRPGRRIDLPGGASLVLRERHRSGRLWHAVPIVPPAVPDVPAYLARYGRPIRYGYVGRDWPLHAYQTAFATTPGSAEMPSAGRPFTPEVVTELVARGILVVPITLHTGVASAEFHEPPYAEWFEVPAATAAVVNDANERGARVVAVGTTVVRALESAAHGSWVRAASGWTELVVTAERGVAVVSGLLTGFHEPQASHLLMLEAIAGPELVRRCYAAAVEEGYLWHEFGDVNLLLP

SEQ ID NO: 62897 - protein, 346 aa, unidentified
  source 1..346: note = Acutalibacter muris
  REGION 1..346: note = tr|A0A1Z2XRC0|A0A1Z2XRC0_9FIRM S-adenosylmethionine:tRNA ribosyltransferase-isomerase; OS = Acutalibacter muris OX=1796620 GN=queA PE=3 SV=1
METTPIKTSDFFFDLPQELIAQTPIEPRDASRLMILDKRTGEVEHRHFYEIAELLGPKDCLILNDSRVLPARIYGVKEGTGAHVEFLLLENKGNDTWEVLCKPGKRAKEGSRFIFGDGLFTGEVVRVKEDGGRLVRFTYEGVFFTLLDKIGQMPLPPYIKERLENKERYQTVYSKEVGSAAAPTAGLHFTPELLQRLRNKGIELGYVTLHVGLGTFRPVSAEFITGHKMHAEHYYMPAAAAELINRTKQRGGRVIAVGTTSCRTIESVAQREGCFKESSGWTDIFIYPGYEFRGVDALITNFHLPESTLIMLVSALAGREKVLRAYKEAVEERYRFFSFGDAMYIG

SEQ ID NO: 62898 - protein, 344 aa, unidentified
  source 1..344: note = Acutalibacter sp.
  REGION 1..344: note = tr|A0A3A9ENA9|A0A3A9ENA9_9FIRM S-adenosylmethionine:tRNA ribosyltransferase-isomerase; OS = Acutalibacter sp. 1XD8-33 OX=2320081 GN=queA PE=3 SV=1
MKTSDFYYDLPQELIAQTPIEPRDASRLMVLDKSSGRISHRRFTDIVDLLRPEDCLILNDSRVMPARIYGVKEGTGAHVEFLLLENKGGDTWEALCKPGKRAREGARFDFGEGLMKGEIIGVKEDGNRLVRFQYEGVFFSLLDRIGQMPLPPYIKAKLEDKERYQTIYSRETGSAAAPTAGLHFTPQLLDRLREKGIETGFVTLHVGLGTFRPVSAERIADHKMHAEHYYMPTETAELINRTRARGGRVIAVGTTSCRTIESAPCPGGKFRECAGWTDIFIYPGYTFQGVDGLITNFHLPESTLIMLVSALAGRENVLRAYQEAVKERYRFFSFGDAMFIGDLK

SEQ ID NO: 62899 - protein, 409 aa, Adhaeribacter aerolatus
  REGION 1..409: note = tr|A0A512AUS6|A0A512AUS6_9BACT S-adenosylmethionine:tRNA ribosyltransferase-isomerase; OS = Adhaeribacter aerolatus OX=670289 GN=queA_1 PE=3 SV=1
MATDPKALKIKDFIYPLPEDRIAKFPLADRAASKLLFYQKGNIQDKSFTALPDLLPPDALLVFNNTKVVQARLFFKRPSGATIEIFCLEPVAPVTDMQLAMQQTGACTWKCLVGNAKRWKEESLELEITLPEQSTGRLKVTKCEKLEDSYFIHFTWEPVGLTFADILATAGNLPLPPYLNRLATEQDKQTYQTVYARQEGAVAAPTAGLHFTQEIFEALAARQIKTLQVTLHVGAGTFKPVKAEEMAQHNMHGEEIFVSAAAINQIRNHLPRPVIPVGTTSLRTLESLYWLGVMLIQEPELSLPDLCVPQWLPYETLNIPEPAEALSALTDYLQKNQLEYLSANTQIIIAPGYSFKLVRGLVTNFHQPESTLLLLVSALIGEDWRRIYDHGLANNYRFLSYGDSSLLLP

SEQ ID NO: 62900 - protein, 348 aa, Adhaeribacter aerolatus
  REGION 1..348: note = tr|A0A512B0W9|A0A512B0W9_9BACT S-adenosylmethionine:tRNA ribosyltransferase-isomerase; OS = Adhaeribacter aerolatus OX=670289 GN=queA_2 PE=3 SV=1
MKLSEFRFDLPANLMATHPPKIRDEARMMVVHRSTGKIEHKVFKDILEYFDDGDVMVINDTKVFPARLYGNKEKTGAKIEVFLLRELNKENHLWDVLVDPARKIRVGNKLYFGDSDLVAEVIDNTTSRGRTIKFLYDGSDEDFYKTINDLGETPLPKYLKRAAEPEDRDRYQTVYAKHVGAVAAPTAGLHFTREVLKRLELNGVDVVPVTLHVGLGTFRPVDVEDLTKHKMDSEHFIIPEETAQVVNRALENKKRVCAVGTTTMRGMESSVSANARLKPTEGWTDKFIFPPHDFKIPNSLITNFHMPESTLLMMTCAFGGYDLIMDAYKVAVKEKYNFFSYGDVMLIL

SEQ ID NO: 62901 - protein, 403 aa, Adhaeribacter sp.
  REGION 1..403: note = tr|A0A2T2YAL8|A0A2T2YAL8_9BACT S-adenosylmethionine:tRNA ribosyltransferase-isomerase; OS = Adhaeribacter sp. HMF7605 OX=2072846 GN=queA PE=3 SV=1
MTDNPKNLTIQDFRYHLPDAAIAQYPLVNRDESKLLVYHQGALSDHIFWEIPDLLPSHSLLVFNDTKVVQARLLFTKPTGGTIEIFCLEPVFPHTEMQQAMLQTGFCTWQCLVGNAKRWKSGTLQLRLPEVTLQAELQERVADAYLIKFSWQPQNLTFAEILEKVGKIPLPPYVNRTAEETDKNRYQTIYAVSAGAVAAPTAGLHFTEEVLSALTQRQIAQVKVTLHVGAGTFKPVKASAMADHQMHAEEIYVSADSIHQIQTHLAAPVIPVGTTSLRTLESLYWLGVLVAQNPETENLHVPQWLPYEAGATLPTPTAALQALSNYVQATQRDYLRATTQLLIAPGYSFKICSGLITNFHQPESTLLLLISALIGEKWRVVYEHALQHQYRFLSYGDSSLLLP

SEQ ID NO: 62902 - protein, 348 aa, Adhaeribacter sp.
  REGION 1..348: note = tr|A0A369QFS1|A0A369QFS1_9BACT S-adenosylmethionine:tRNA ribosyltransferase-isomerase; OS = Adhaeribacter sp. HMF7616 OX=2072847 GN=queA PE=3 SV=1
MKLSEFKFDLPANLLAMHPAKERDEARMMVVHRDNGKIEHKIFKEILNYFDDGDTMVINDTKVFPARMYGNKEKTGAKIEVFLLRELNKDIHLWDVLVDPARKIRVGNKLYFGESDLVAEVIDNTTSRGRTIKFLFDGTDEEFYKTINELGETPLPKYIKREAQPEDRERYQTVYAKHVGAVAAPTAGLHFTKEVLKRLEFKGINVTPVTLHVGLGTFRPVDVEDLTKHKMDSESFIVPEETTILVNQALDNKKRVCAIGTTTLRALESSVSANGRLKPNQGWTDKFIFPPHDFRIANALLTNFHMPESTLLMMAAAFGGYDLIMEAYNAAVKEKYNFFSYGDAMLII

SEQ ID NO: 62903 - protein, 365 aa, Adlercreutzia equolifaciens
  REGION 1..365: note = tr|A0A3E2ER85|A0A3E2ER85_9ACTN S-adenosylmethionine:tRNA ribosyltransferase-isomerase; OS = Adlercreutzia equolifaciens OX=446660 GN=queA PE=3 SV=1
MRTDDFDYNLPEELIAQEPAAVRDECRLLVMDRVSGEVEDRIFKDIIDYLQPGDLLVANETRVMPARLLGTKRGTGGAAEVFLLRECGGPEPRTNRVAFWEVLVRPGKRLKPGSGAVVDFTNAAGDVVLSAEIIDWARDGQRGERVARLSTPLPSLDEALHAVGHTPLPPYIRDYAGDEELYQTVYSRRESSAAAPTAGLHFTPELIERLRERGIGWATVELEVGLDTFRVVDEDDPEKHHIHTEFYTVPQATVDAVNATHAAGGRVIAVGTTSVRSLESAWDPEADGGRGALVARDREATSLYILPGYEFHVVDALITNFHVPRSTLMMLVSAFSTRENILAAYQHAIDERYRLLSFGDAMFLH

SEQ ID NO: 62904 - protein, 352 aa, Advenella incenata
  REGION 1..352: note = tr|A0A4Q7VSP3|A0A4Q7VSP3_9BURK S-adenosylmethionine:tRNA ribosyltransferase-isomerase; OS = Advenella incenata OX=267800 GN=queA PE=3 SV=1
MLPIDPSLSIADFDYELPEDLIAQVPPATRTDSRLLLVQNDGALQDLNFSALPDLLLPGDLLIFNDTKVIKARLYGQKDSGGRVEALIERIIEPTRALAHVRASKSPRPGTNLIFDGAITCSVVARHDDLFELQFDTDILPVLDKHGNLPLPPYIKHSADQQDETRYQTVYARHPGAVAAPTAGLHFDATLLQRLQDKGIDSAWVTLHVGAGTFQPVRVEKISEHIMHAEWYTVPETTVAAIAAARERGGRVIAVGTTSVRALESAAQQGGTLNNLRCPVAHSADTQLFITPGYTFRVIDGLITNFHLPQSTLLMLVSALTGRERMQQAYRHAIEQRYRFFSYGDAMFIAPG

SEQ ID NO: 62905 - protein, 349 aa, Advenella kashmirensis
  REGION 1..349: note = tr|V8QQB3|V8QQB3_9BURK S-adenosylmethionine:tRNA ribosyltransferase-isomerase OS=Advenella kashmirensis W13003 OX=1424334 GN=queA PE=3 SV=1
MDPSLSIADFDYELPEELIAQTPPATRTDSRLLLLEADGGLQDLRFSALPDLLQPGDLLIFNDTKVIKARLYGQKDSGGRVEALIERILEPTRALAHVRASKSPRPGTTLIFDGEVRCQVTARHEDLFELQFEADILPLLDRHGNLPLPPYIKHNADQEDETRYQTVYARHPGAVAAPTAGLHFDQALMQHLQDKRIDTAWVTLHVGAGTFQPVRVDKISEHIMHAEWYTVPQETVDAIAAARSRGARVIAVGTTSVRALESAAQQAGTVDDLRCPRAHSADTQLFITPGYEFRVIDGLITNFHLPQSTLLMLVSALTGRERMHRAYRHAIEQRYRFFSYGDAMFITPR

SEQ ID NO: 62906 - protein, 352 aa, Advenella kashmirensis
  REGION 1..352: note = tr|A0A356LEM1|A0A356LEM1_9BURK S-adenosylmethionine:tRNA ribosyltransferase-isomerase; OS = Advenella kashmirensis OX=310575 GN=queA PE=3 SV=1
MLPIDPSLSIADFDYELPEDLIAQTPPATRTDSRLLRVQNNGALQDLNFSALPDLLLPGDLLIFNDTKVIKARLYGQKDSGGRVEALIERIIEPTRALAHVRASKSPRPGTTLVFDGAVTCTVVARHDDLFQLQFDTDILPVLDKHGNLPLPPYIKHSADQQDETRYQTVYARHPGAVAAPTAGLHFDATLLQRLQDKGINTAWVTLHVGAGTFQPVRVEKISEHIMHAEWYTVPETTVAAIAAARERGGRVIAVGTTSVRALESAAQQGGTLDNLRCPVAHSADTQLFITPGYTFRVIDGLITNFHLPQSTLLMLVSALTGRERMQQAYRHAIEQRYRFFSYGDAMFIAPA

SEQ ID NO: 62907 - protein, 352 aa, Advenella mimigardefordensis
  REGION 1..352: note = tr|W0PGN1|W0PGN1_9BURK S-adenosylmethionine:tRNA ribosyltransferase-isomerase OS=Advenella mimigardefordensis DPN7 OX=1247726 GN=queA PE=3 SV=1
MLPIDPSLSIADFDYDLPEDLIAQAPPATRTDSRLLLMQHNGQLQDLNFSALPDLLQPNDLLIFNDTKVIKARLYGQKDSGGRVEALIERILEPTRALAHVRASKSPRPGTTLIFDDAVACTVIARHDDLFELQFDTDILPVLDKHGNLPLPPYIKHSADQQDETRYQTVYARHPGAVAAPTAGLHFDAALLQRLQDKGIQTAWVTLHVGAGTFQPVRVEKISEHIMHAEWYTVSENTVAAIAATRERGGRVIAVGTTSVRALESAAQQGGTLGELRCPVAHSADTQLFITPGYTFRVIDGLITNFHLPQSTLLMLVSALTGRERMREAYRHAIEARYRFFSYGDAMFIAPG

SEQ ID NO: 62908 - protein, 355 aa, Advenella sp.
  REGION 1..355: note = tr|A0A2M9TZY2|A0A2M9TZY2_9BURK S-adenosylmethionine:tRNA ribosyltransferase-isomerase; OS = Advenella sp. S44 OX=1982755 GN=queA PE=3 SV=1
MLPIDPSLSIADFDYELPEDLIAQTPPATRTESRLLLLQDDGGLQDLNFATLPDLLLPGDLLVFNDTKVIKARLYGQKDSGGRIEALIERILEPTRALAHVRASKSPRPGTTLIFDGDIVCTVAARHDDLFELHFETDILPALDKHGNLPLPPYIKHSADQQDEARYQTVYARHPGAVAAPTAGLHFDAPLLQRLQDKGIDTAWVTLHVGAGTFQPVRVDKISDHIMHAEWYTVPEKTVSAIAAARKRGARIIAVGTTSVRALESAAQQGGTLDALRCPIAHSADTRLFITPGYTFRVVDGLITNFHLPQSTLLMLVSALTGRERMQLAYRHAIEKRYRFFSYGDAMFIAPRHNP

SEQ ID NO: 62909 - protein, 349 aa, Aequorivita antarctica
  REGION 1..349: note = tr|A0A5C6YZU4|A0A5C6YZU4_9FLAO S-adenosylmethionine:tRNA ribosyltransferase-isomerase; OS = Aequorivita antarctica OX=153266 GN=queA PE=3 SV=1
MKLSNFSFNLPEELLAEYPAPNRDESRLMVLNRKDKTIEHKMFKDIIDYFEEDDVLITNNTKVFPARLFGNKEKTGARIEVFLLRELNPETRLWDVLVDPARKIRIGNKLYFGDDETLVAEVIDNTTSRGRTLRFLFDGSYEEFRNKLTELGETPLPKYIKREVEPEDAERYQTIFAKNEGAVAAPTAGLHFSKHLLKRLEIKGINIAEVTLHVGLGTFSSVEVEDLSKHKMDSEEMSILQDSVDIINTGIKRKKRVCAVGTTAMRAVESSVSSNHTLNAYTGWTNKFIFPPYDFSIANAMITNFHTPKSTLLMMVSAFAGHDFIKEAYAEAIKEKYRFYTYGDAMLII

SEQ ID NO: 62910 - protein, 349 aa, Aequorivita lipolytica
  REGION 1..349: note = tr|A0A5C6YVN5|A0A5C6YVN5_9FLAO S-adenosylmethionine:tRNA ribosyltransferase-isomerase; OS = Aequorivita lipolytica OX=153267 GN=queA PE=3 SV=1
MKLSNFSFNLPEELLAEYPAPNRDESRLMVLDRKTKTIEHKMFKDLIDYFDEDDVLVTNNTKVFPARLFGNKEKTGARIEVFLLRELNPETRLWDVLVDPARKIRIGNKLYFGDDETLVAEVIDNTTSRGRTLRFLFDGSYEEFRGKLTELGETPLPKYIKREVEPEDAERYQTIFAKIEGAVAAPTAGLHFSKHLLKRLEIKGVNIAEVTLHVGLGTFSSVEVEDLSKHKMDSEEMEIKEDAVGVINTGIKKKKRVCAVGTTAMRALESSVSSNHTLNAYKGWTNKFIFPPYDFSIANAMITNFHTPKSTLLMMAAAFAGHEFMKEAYAEAIKEKYRFYTYGDAMLII

SEQ ID NO: 62911 - protein, 349 aa, unidentified
  source 1..349: note = Aequorivita soesokkakensis
  REGION 1..349: note = tr|A0A1A9LA82|A0A1A9LA82_9FLAO S-adenosylmethionine:tRNA ribosyltransferase-isomerase; OS = Aequorivita soesokkakensis OX=1385699 GN=queA PE=3 SV=1
MKLSNFNFNLPEELLAEYPAPNRDESRLMVLNRKTKTIEHKMFKDLIDYFEEDDVLVTNNTKVFPARLFGNKEKTGARIEVFLLRELNSETRLWDVLVDPARKIRIGNKLYFGDDETLVAEVIDNTTSRGRTLRFLFDGSYEEFRNKLTELGETPLPKYIKREVEPEDAERYQTIFAKNEGAVAAPTAGLHFSKHLLKRLEIKGVNVAEVTLHVGLGTFSSVEVEDLSKHKMDSEEMSILQDAVDIINTGIKKKKRVCAVGTTAMRALESSVSSNHTLNSYSGWTNKFIFPPYDFSIANAMVTNFHTPKSTLLMMVSAFAGHDFIKQAYAEAIKEKYRFYTYGDAMLII

SEQ ID NO: 62912 - protein, 351 aa, Aequorivita sp.
  REGION 1..351: note = tr|A0A330MQ49|A0A330MQ49_9FLAO S-adenosylmethionine:tRNA ribosyltransferase-isomerase; OS = Aequorivita sp. CIP111184 OX=2211356 GN=queA PE=3 SV=1
MGMKLSNFSFNLPEELLAEYPAPNRDESRLMVLNRKTKTIEHKMFKDLIDYFEEDDVLVTNNTKVFPARLFGNKEKTGARIEVFLLRELNSETRLWDVLVDPARKIRIGNKLYFGDDETLVAEVIDNTTSRGRTLRFLFDGSYEEFRNKLTELGETPLPKYIKREVEPEDADRYQTIFAKIEGAVAAPTAGLHFSKHLLKRLEIKGVNIAEVTLHVGLGTFSSVEVEDLSKHKMDSEEMSILQDSVDVINTGIKRKKRVCAVGTTAMRALESSVSSNHTLNAYTGWTNKFIFPPYDFSIANAMVTNFHTPKSTLLMMVSAFAGHDFIKEAYAEAIKEKYRFYTYGDAMLII

SEQ ID NO: 62913 - protein, 349 aa, Aequorivita sp.
  REGION 1..349: note = tr|A0A2E4RVZ8|A0A2E4RVZ8_9FLAO S-adenosylmethionine:tRNA ribosyltransferase-isomerase; OS = Aequorivita sp. OX=1872390 GN=queA PE=3 SV=1
MKLSNFNFNLPEELLAEYPAPNRDESRLMVLDRKNKTIEHKMFKDLIDYFEEDDVLVTNNTKVFPARLFGNKEKTGARIEVFLLRELNPETRLWDVLVDPARKIRIGNKLYFGDDETLVAEVIDNTTSRGRTLRFLFDGSYEEFRNKLTELGETPLPKYIKREVEPEDAERYQTIFAKNEGAVAAPTAGLHFSKHLLKRLEIKGVNVAEVTLHVGLGTFSSVEVEDLSKHKMDSEEMEIDQKAVSIINAGIQKKKRVCAVGTTAMRALESSVSSNHTLNPYKGWTNKFIFPPYDFSIANAMVTNFHTPKSTLLMMVSAFAGHDFIKEAYAEAIKEKYRFYTYGDAMLII

SEQ ID NO: 62914 - protein, 351 aa, Aequorivita sublithincola
  REGION 1..351: note = tr|I3YWG4|I3YWG4_AEQSU S-adenosylmethionine:tRNA ribosyltransferase-isomerase OS=Aequorivita sublithincola (strain DSM 14238 / LMG 21431 / ACAM 643 / 9-3); OX = 746697GN=queA PE=3 SV=1
MGMKLSNFSFNLPEELLAEYPAPNRDESRLMVLNRKDKTIEHKTFKDIIDYFEEDDVLITNNTKVFPARLFGNKEKTGARIEVFLLRELNPETRLWDVLVDPARKIRIGNKLYFGDDETLVAEVIDNTTSRGRTLRFLFDGSYEEFRNKLTELGETPLPKYIKREVEPEDAERYQTIFAKNEGAVAAPTAGLHFSKHLLKRLEIKGVNIAEVTLHVGLGTFSSVEVEDLSKHKMDSEEMAILQDAVDIINTGIKRKKRVCAVGTTAMRAVESSVSSNHTLNAYAGWTNKFIFPPYDFSIANAMITNFHTPKSTLLMMVSAFAGHDFIKEAYAEAIKEKYNFYTYGDAMLII

SEQ ID NO: 62915 - protein, 351 aa, unidentified
  source 1..351: note = Aequorivita viscosa
  REGION 1..351: note = tr|A0A1M6CQU1|A0A1M6CQU1_9FLAO S-adenosylmethionine:tRNA ribosyltransferase-isomerase; OS = Aequorivita viscosa OX=797419 GN=queA PE=3 SV=1
MGRKLSNFNFDLPPELLAEHPAPNRDESRLMVLNRKDKTIEHKTFKDLIDYFEEDDVLITNNTKVFPARLFGNKEKTGARIEVFLLRELNSETRLWDVLVDPARKIRIGNKLYFGEDESLVAEVIDNTTSRGRTLRFLFDGSYEEFRNKLTELGETPLPKYIKRDVEPEDAERYQTIFAKNEGAVAAPTAGLHFSKHLLKRMEIKGVNIAEITLHVGLGTFSSVEVEDLSKHKMDSEEMMIDQVAADIINKGIENKRRVCAVGTTAMRAVESSVSSNHRLNPFSGWTNKFIFPPYDFSIANAMITNFHTPKSTLLMMTSAFAGHEFIKEAYEVAIKEKYNFYSYGDAMLII

SEQ ID NO: 62916 - protein, 342 aa, unidentified
  source 1..342: note = Aeribacillus composti
  REGION 1..342: note = tr|A0A559U9R7|A0A559U9R7_9BACI S-adenosylmethionine:tRNA ribosyltransferase-isomerase; OS = Aeribacillus composti OX=1868734 GN=queA PE=3 SV=1
MNIELFDFELPEELIAQTPLKERDASRLMIVDKKSGDITHSRFKSLIEYVSPGDCLVLNDTRVMPARLYGVKEETGAKVEVLLLKEKEGNVWETLVKPSKRVKVGTTLNFGNGLLKGTCVGTLEHGGRIIEFQYEGIFLEILDQLGEMPLPPYIKEQLDNKERYQTVYSREIGSAAAPTAGLHFTDEILENIKNKGIHIAFITLHVGLGTFRPVSSTNITEHKMHAEFYQMTEGTARLLNEVREKGGRIIAVGTTSTRTLETIAGKHGGKFVEESGWTDIFIYPGYNFKGIDGLVTNFHLPKSSLIMLVSALAGRETILRAYEEAIKEKYRFFSFGDAMLII

SEQ ID NO: 62917 - protein, 342 aa, Aeribacillus pallidus; identical to SEQ ID NO: 62916
  REGION 1..342: note = tr|A0A165XN18|A0A165XN18_9BACI S-adenosylmethionine:tRNA ribosyltransferase-isomerase; OS = Aeribacillus pallidus OX=33936 GN=queA PE=3 SV=1

SEQ ID NO: 62918 - protein, 344 aa, unidentified
  source 1..344: note = Aerococcaceae bacterium
  REGION 1..344: note = tr|A0A347WNT5|A0A347WNT5_9LACT S-adenosylmethionine:tRNA ribosyltransferase-isomerase; OS = Aerococcaceae bacterium ZY16052 OX=2036206 GN=queA PE=3; SV = 1
MTYTTQDFNYELPDDLIAQTPLADRSASRLMVIDRETDKIKDTDFKHILDYLEAGDGLVVNHSRVIPARIFGVKPDTGGHLEILLLHNTQGNRWETLVKPAKRAKVGTKISFGDGELTAEVVESLEHGGRIIEFYYEGVFLEHLEKLGQMPLPPYIKERLEDPDRYQTVYAKENGSAAAPTAGLHFTEELLQAAKAKGVELIPLTLHVGLGTFRPVSVDRIEDHDMHAEFYHLSAESAERINRIKANGGKITAVGTTSVRTLETIAQENHGEVLPQSGWTKIFITPGFEYQVVDHLITNFHLPQSTLMMLVSAFYDRNHVLAAYAHAVEKRYRFFSFGDAMLLL

SEQ ID NO: 62919 - protein, 344 aa, unidentified
  source 1..344: note = Aerococcaceae bacterium
  REGION 1..344: note = tr|A0A3D0CGT6|A0A3D0CGT6_9LACT S-adenosylmethionine:tRNA ribosyltransferase-isomerase; OS = Aerococcaceae bacterium OX=2053495 GN=queA PE=3 SV=1
MLTTKDFDYELPEHLIAQTPLEDRSASRLLVLNREDDTLEDTDFKHILDYVNPGDALVVNETRVIPARIFGVKPDTGGHLEVLLLNNTQGNEWEVLVKHARRAKVGTVIEFGKEAQLRAVVKEELEHGGRIIEFEYEGVFLEILETLGQMPLPPYIKERLEDPERYQTVYAKENGSAAAPTAGLHFTNELFQQAKEKGIEIIPLTLHVGLGTFRPVSVENLEEHEMHSEFYNLSAQSAERINKIKDNGGKIVAVGTTSVRTLETIANDNNGEIKAGSGWTSIFITPGYEFKAVDHLITNFHLPQSTLVMLVSAFYNRERILQAYRHAVDNEYRFFSFGDAMLIL

SEQ ID NO: 62920 - protein, 357 aa, Aerococcus christensenii
  REGION 1..357: note = tr|A0A133XSW1|A0A133XSW1_9LACT S-adenosylmethionine:tRNA ribosyltransferase-isomerase; OS = Aerococcus christensenii OX=87541 GN=queA PE=3 SV=1
MTLKTSDYDYDLPEELIAQTPTKDRLACRLLKLRATDGHYEDCQFEDVASEFEAGDVLVLNNTRVLPARLYGHRQGTGGHVEVLLLKNTTGDQWEVLVRPARKLHEGGVLEFGDGRLKATILKELNYGGGRLIEFSYDGIFLEILESLGEMPLPPYIKEKLDDPERYQTVYAKENGSAAAPTAGLHFTKDYLKKLEEKGVKIAYLTLHVGLGTFRPVNEEDIEDHEMHSEFYHLDEENAEIIRRAKEEGRQVVACGTTCIRTLETIGAKFDGKVQADSGWTSIFIYPGFKYRLVDSFITNFHLPKSTLVMLVAAFTGREHILAAYRHAVEEKYMFFSFGDAMFIRGPQNPKALEENH

SEQ ID NO: 62921 - protein, 352 aa, Aerococcus sanguinicola
  REGION 1..352: note = tr|A0A120I9H1|A0A120I9H1_9LACT S-adenosylmethionine:tRNA ribosyltransferase-isomerase; OS = Aerococcus sanguinicola OX=119206 GN=queA PE=3 SV=1
MTLKTSDYDYDLPEELIAQTPTKDRLNCRLLTLDAQTGHYADHMFADLLDILEAGDVLVLNDTRVLPARLLGTKEETGGHAELLLLNNLEGDRWEVLAKPARRLKTGTIIQFGDGQLRAKVVKELDHGGREIEFLYEGIFMEVLEALGEMPLPPYIKEHLDDPDRYQTVYAKENGSAAAPTAGLHFTEDFLDQVQAKGVDLAYLTLHVGLGTFRPVSADDLTDHEMHSEFYRLDEENAQKIKTAKAAGKRVVAVGTTCIRTLETIAQKFDGQLQADSGWTSIFIYPGFDFKVVDAIITNFHLPKSTLVMLVSAFAGRQHVLAAYKHAVEASYRFFSFGDAMYIQGPQYREDD

SEQ ID NO: 62922 - protein, 373 aa, Aerococcus sp.
  REGION 1..373: note = tr|A0A3N4GIR6|A0A3N4GIR6_9LACT S-adenosylmethionine:tRNA ribosyltransferase-isomerase; OS = Aerococcus sp. SJQ22 OX=2487350 GN=queA PE=3 SV=1
MTLTTNDFDFDLPEELIAQVPIEDRLASRLLKLDAPTGEFTDGHFPDVASELNAGDVLVLNNTRVLPARLHGVRPDTGGHVEVLLLNNISGDKWETLVKPARRIYVGTEIVFGDGQLKAVVTEVLEHGGRIVEFHYDGIFLEVLEALGEMPLPPYIKEKLDDPDRYQTVYAKENGSAAAPTAGLHFTQEFMAELAEKGVEIAYLTLHVGLGTFRPVSVNDIDEHKMHSEFYRLDEENAAKIRTAKANGNKIVAVGTTSIRTLETIGTKFKGDIQSDSGWTDIFIAPGYTFTVVDAFITNFHLPKSTLIMLVSAFAGRDHVLAAYQHAVEEKYRFFSFGDAMFLRGPQFNDPTLTDEDIAAAKHRNRQFFPEEG

SEQ ID NO: 62923 - protein, 373 aa, Aerococcus sp.
  REGION 1..373: note = tr|A0A1F2EJ03|A0A1F2EJ03_9LACT S-adenosylmethionine:tRNA ribosyltransferase-isomerase; OS = Aerococcus sp. HMSC10H05 OX=1581084 GN=queA PE=3 SV=1
MTLTTNDFDFNLPEQLIAQVPIQNRLASRLLKLDAQTGEYEDGHFPDIASELEPGDVLVLNNTRVLPARLHGIRPDTGGHVEVLLLNNTEGDRWETLVKPARRIRVGTEIAFGDGQLVAVVAEELDHGGRIVEFIYQGIFLEVLEALGEMPLPPYIKEKLDNPDRYQTVYAKENGSAAAPTAGLHFTQEFMADLEARGIDIAYLTLHVGLGTFRPVSVDDIDAHKMHSEFYSLDQENSDKIRRAQQGGHKVVAVGTTSIRTLETIGTKFDGEVKADSGWTDIFIAPGYQFTVVNSFITNFHLPKSTLIMLVSAFAGREHVLTAYQHAVAEEYRFFSFGDAMFLRGPQYQDPAISEEDIEAAKRRNSQFFTQKD

SEQ ID NO: 62924 - protein, 371 aa, Aerococcus suis
  REGION 1..371: note = tr|A0A1W1YLS7|A0A1W1YLS7_9LACT S-adenosylmethionine:tRNA ribosyltransferase-isomerase; OS = Aerococcus suis OX=371602 GN=queA PE=3 SV=1
MGLTTNDFDFELPEELIAQTPIPNRLGSKLLTLDAQTGDYQDGHFPDLADQLEAGDVLVLNNTRVLPARLYGVKEETGGHQEVLLLNNIEGDKWEVLMKPARRAKVGSTVTFGNGDLKATVTKELEHGGRIVEFSYDGIFLEILESLGEMPLPPYIKEKLDNPDRYQTVYAKENGSAAAPTAGLHFTTEFLEELKAKGVKIAYLTLHVGLGTFRPVTAEAIDDHHMHAEFYRFDEQAAQMINEAKANHHRVIAVGTTSIRTLETIGTKFNGEIKPDSGWTDIFIAPGYEFKVVDAFITNFHLPKSTLIMLVSAFAGRQHVLNAYSHAVDERYRFFSFGDAMFLKGPQFLDPELTDDDIAAAKQRNQSLLAK

SEQ ID NO: 62925 - protein, 352 aa, Aerococcus urinae
  REGION 1..352: note = tr|A0A329PY11|A0A329PY11_9LACT S-adenosylmethionine:tRNA ribosyltransferase-isomerase; OS = Aerococcus urinae OX=1376 GN=queA PE=3 SV=1
MTLKTTDYDYDLPEELIAQSPTKDRLNCRLLCLNARDGHYQDKMFSAIEEEFEAGDVLVLNNTRVLPARLYGEKEATGGHVEVLLLNNVEGDLWETLVKPGRRLKAGARLSFGDGRLKAEIKETLDYGGGRLLEFYYDGIFLEILESLGEMPLPPYIKNKLTDPDRYQTVYAKVNGSAAAPTAGLHFTEDYLKSLQEKGVKIAYLTLHVGLGTFRPVNEEDLSDHQMHSEFYRLDPENAEIISQAQANGHHVIACGTTCIRTLETIGQKFDGQVKADSGWTDIFIYPGFKFTVVDHFITNFHLPKSTLVMLVAAFAGRDHVLNAYRHAVEEKYQFFSFGDAMFVRGPQYTEK

SEQ ID NO: 62926 - protein, 352 aa, Aerococcus urinae
  REGION 1..352: note = tr|A0A0X8FDY8|A0A0X8FDY8_9LACT S-adenosylmethionine:tRNA ribosyltransferase-isomerase; OS = Aerococcus urinae OX=1376 GN=queA PE=3 SV=1
MTLKTTDYDYDLPEELIAQSPTKDRLNCRLLCLNAKDGHYQDKMFSAIKEEFEAGDVLVLNNTRVLPARLYGEKEETGGHVEVLLLNNVEGDLWETLVKPGRRLKAGTKLSFGDGRLKAEIKETLDYGGGRLLEFYYDGIFLEILESLGEMPLPPYIKNKLTDPDRYQTVYAKVNGSAAAPTAGLHFTEDYLKSLQEKGVKIAYLTLHVGLGTFRPVNEEDLSDHQMHSEFYRLDPENAEMISQAQANGHHVIACGTTCIRTLETIGQKFDGQVKADSGWTDIFIYPGFKFTVVDHFITNFHLPKSTLVMLVAAFAGRDHVLNAYRHAVEEKYQFFSFGDAMFVRGPQYIEK

SEQ ID NO: 62927 - protein, 374 aa, Aerococcus urinaeequi
  REGION 1..374: note = tr|A0A0U4WTM6|A0A0U4WTM6_9LACT S-adenosylmethionine:tRNA ribosyltransferase-isomerase; OS = Aerococcus urinaeequi OX=51665 GN=queA PE=3 SV=1
MTLTTNDFDFDLPEELIAQVPIQDRLASRLLKLDAQTGDFQDGYFPDVASELEAGDVLVLNNTRVLPARLHGIRPDTGGHIEVLLLNNTEGDKWETLVKPARRIRVGTEIVFGDGQLVAVITEVLDHGGRIVEFKYNGIFLEVLEALGEMPLPPYIKEKLDNPDRYQTVYAKENGSAAAPTAGLHFTEEFMADLKDRGVEIAYLTLHVGLGTFRPVSVDDIDAHKMHSEFYRLDQENATKIRRAQEGGHKVIAVGTTSIRTLETIGTKFKGQVQADSGWTDIFIAPGYQFSVVEGFITNFHLPKSTLIMLVSAFAGRDHVLAAYQHAVEEKYRFFSFGDAMFLRGPQYADPAITAEDNEAAKQRNSQFFTNEDK

SEQ ID NO: 62928 - protein, 354 aa, Aerococcus urinaehominis
  REGION 1..354: note = tr|A0A109RH64|A0A109RH64_9LACT S-adenosylmethionine:tRNA ribosyltransferase-isomerase; OS = Aerococcus urinaehominis OX=128944 GN=queA PE=3 SV=1
MTLTTKDFDFDLPEAQIAQKPTEDRLAARLLKLDAQTGDYQDSMFEDLLTELNAGDVLVLNDTKVLPARLYGQKAETGGHVEVLLLNNTEGDQWECLVKPARRIKTGTKISFGDGRLQAVVTDELDHGGRMVTFSYQGIFLEVLESLGEMPLPPYIHERLEDKDRYQTVYAKEAGSAAAPTAGLHFTVDFLDQIKAKGVAIAYLTLHVGLGTFRPVSVENLADHQMHSEFYALDEKNAAIINQARQAGGRVVAVGTTAIRTLESIGQKYAGQIKADSDWTDIFIAPGYRFKVVDAFVTNFHLPMSTLIMLVSAFAGRQQVLAAYRHAVKAGYLFFSFGDAMFVKGPQYSGNPEA

SEQ ID NO: 62929 - protein, 374 aa, Aerococcus viridans
  REGION 1..374: note = tr|D4YIK8|D4YIK8_9LACT S-adenosylmethionine:tRNA ribosyltransferase-isomerase OS=Aerococcus viridans ATCC 11563 = CCUG 4311 OX=655812 GN=queA PE=3 SV=1
MTLTTNDFDFDLPEELIAQVPIQDRLASKLLKLDAQTGDFQDGHFPDVASELEAGDVLVLNNTRVLPARLQGIRPDTGGHIEVLLLNNTEGDKWETLVKPARRIRVGTEIVFGNGQLVAVVTEVLEHGGRIVEFKYNGIFLEVLEALGEMPLPPYIKEKLDNPDRYQTVYAKENGSAAAPTAGLHFTEEFMADLKDRGVEIAYLTLHVGLGTFRPVSVDDIDAHKMHSEFYRLDQENAAKIRRAQEGGHKVIAVGTTSIRTLETIGTKFKGQVQADSGWTDIFIAPGYQFSVVEGFITNFHLPKSTLIMLVSAFAGRDHVLAAYQHAVEEKYRFFSFGDAMFLRGPQYADPAITAEDIEAAKQRNSQFFTDEDK

SEQ ID NO: 62930 - protein, 373 aa, Aerococcus viridans
  REGION 1..373: note = tr|A0A2N6UEZ9|A0A2N6UEZ9_9LACT S-adenosylmethionine:tRNA ribosyltransferase-isomerase; OS = Aerococcus viridans OX=1377 GN=queA PE=3 SV=1
MTLTTNDFDFNLPEQLIAQVPIQNRLASRLLKLDAQTGEYEDGHFPDIASELEPGDVLVLNNTRVLPARLHGIRPDTGGHVEVLLLNNTEGDRWETLVKPARRIRVGTEIAFGDGQLVAVVAEELDHGGRIVEFKYQGIFLEVLEALGEMPLPPYIKEKLDNPDRYQTVYAKENGSAAAPTAGLHFTQEFMADLEARGIDIAYLTLHVGLGTFRPVSVDDIDAHKMHSEFYSLDQENSDKIRRAQQGGHKVVAVGTTSIRTLETIGTKFDGEVKADSGWTDIFIAPGYQFTVVNSFITNFHLPKSTLIMLVSAFAGREHVLTAYQHAVAEEYRFFSFGDAMFLRGPQYQDPAISEEDIEAAKRRNSQFFTQKD

SEQ ID NO: 62931 - protein, 364 aa, Aeromicrobium sp.
  REGION 1..364: note = tr|A0A5C8NK46|A0A5C8NK46_9ACTN S-adenosylmethionine:tRNA ribosyltransferase-isomerase; OS = Aeromicrobium sp. CC-CFT486 OX=2498846 GN=FHP06_07295; PE = 3 SV=1
MIGIAPLTQFTPPGERTAPSPAEARGIARDDVRLLVAGASGIEHAHFADLADHLEPGDLVVVNASQTVAGQVDARSSDGEDVVVHVAMDLRDGTWVVELRTSPDATRAVLDASPGRTLRLRDAAATLTLVEPYPREGSSPTGTGNRLWRAVHDGDEPLRDVLDRIGRPISYGYLDRQYDLSDYQTIFGTTPGSAEMPSAARPFTPEVVTRLVSRGIGIAPVLLHTGISSQEAGEAPQPEWFEVGESTARLVNATRAGGGRVVAVGTTVTRALESAVDRSGSVLAVSGWTERIVTREHPPRVVDGLVTGWHDPQASHLLLVEAIAGPVLTQTAYDEAVSGGYRWHEFGDSALFLPERAEVRESAA

SEQ ID NO: 62932 - protein, 371 aa, Aeromicrobium sp.
  REGION 1..371: note = tr|A0A0Q6VM33|A0A0Q6VM33_9ACTN S-adenosylmethionine:tRNA ribosyltransferase-isomerase; OS = Aeromicrobium sp. Root344 OX=1736521 GN=ASC61_00820; PE = 3 SV=1
MTRIDIAPLTMFSPPGERTAPSPAEARGMRRDDVRLLVAHGDRVTHARFGDLADHLEPGDLVVVNASQTVAGELDAVLSGVGASTGDVVVHVATDLRDGTWVVEVRTAPDAAWAVLDAAAGQTLVLAAPGAELTLLEPYPRESSSPTGHGNRLWRASYAGQAALPDVLASLGRPIAYGYLDRRYPIEDYRTIFGTTPGSAEMPSAARPFTPDVVTRLVSRGIAIAPILLHTGVSSQEAGEAPQPEWFEVSEPAARLVNATRAGGGRVIAVGTTVTRALESAVRGAPGRAVVEASSGWTERVITRDAPPRVVDGLITGWHDPAASHLLLVEAVAGPRLTQRAYDAAVEAGYHWHEFGDSALLLPARAEALAA

SEQ ID NO: 62933 - protein, 355 aa, Aeromonas allosaccharophila
  REGION 1..355: note = tr|A0A1Q5VLK0|A0A1Q5VLK0_9GAMM S-adenosylmethionine:tRNA ribosyltransferase-isomerase; OS = Aeromonas allosaccharophila OX=656 GN=queA PE=3 SV=1
MQVSDFHFDLPDELIARYPMAERTASRLLQLDGQTGALRHGQFVDVLDQLNPGDLLVFNNTRVIPARMFGQKASGGKLEVLVERILDPHSVLAHVRASKAPKPGTRMIMDGGPDGVKVEAEMRARHDALFEIHFLDPRPVLEILEAIGHMPLPPYIDRPDEDADKERYQTVYNQKPGAVAAPTAGLHFDEPLLEKIRAKGVETAFVTLHVGAGTFQPVRVDKIEDHHMHSEYAEVPQEVVDAIAATRARGGRVIAVGTTSVRSLESAAKVTLAQGKPLAPFFSDTDIFIFPGYQFQIVDAMVTNFHLPESTLIMLVSAFAGYDNVMAAYQAAVVENYRFFSYGDAMFVTRRQAEA

SEQ ID NO: 62934 - protein, 350 aa, Aeromonas allosaccharophila
  REGION 1..350: note = tr|A0A0T6U0H7|A0A0T6U0H7_9GAMM S-adenosylmethionine:tRNA ribosyltransferase-isomerase; OS = Aeromonas allosaccharophila OX=656 GN=queA PE=3 SV=1
MQVSDFHFDLPDELIARYPMAERTASRLLQLDGQTGALRHGQFVDVLDQLNPGDLLVFNNTRVIPARMFGQKASGGKLEVLVERILDPHSVLAHVRASKAPKPGTRMILDGGVEAEMRARHDALFEIHFLDPRPVLEILEAIGHMPLPPYIDRPDEDADKERYQTVYNQKPGAVAAPTAGLHFDEPLLEKIRAKGVETAFVTLHVGAGTFQPVRVEKIEDHHMHSEYAEVPQEVVDAIAATRARGGRVIAVGTTSVRSLESAAKVTLAQGKPLAPFFSDTDIFIFPGYQFQIVDAMVTNFHLPESTLIMLVSAFAGYDNVMAAYQAAVAENYRFFSYGDAMFVTRRQAEA

SEQ ID NO: 62935 - protein, 355 aa, unidentified
  source 1..355: note = Aeromonas cavernicola
  REGION 1..355: note = tr|A0A2H9U5X8|A0A2H9U5X8_9GAMM S-adenosylmethionine:tRNA ribosyltransferase-isomerase; OS = Aeromonas cavernicola OX=1006623 GN=queA PE=3 SV=1
MQVSDFHFDLPDALIARYPMAERTASRLLQLNGQTGALRHGQFVDVLDQLNPGDLLVFNNTRVIPARMFGQKASGGKLEVLVERILDEHSVLAHVRASKAPKPGTRLIMAAGPDGKSVEAEMRARHDALFEIHFLDPRPVLEILEAIGHMPLPPYIDRPDEDADKERYQTVYNQKPGAVAAPTAGLHFDTPLLEKIRAKGVETAFVTLHVGAGTFQPVRVEKIEDHHMHAEYAEVPQEVVAAIAATRARGGRVIAVGTTSVRSLESAAKVTLAQGKPLAPFFGDTDIFIFPGYEFQLVDAMVTNFHLPESTLIMLVSAFAGYDQVMAAYQAAVAEQYRFFSYGDAMFVTRRRGDA

SEQ ID NO: 62936 - protein, 355 aa, Aeromonas caviae
  REGION 1..355: note = tr|A0A3N6TUR0|A0A3N6TUR0_AERCA S-adenosylmethionine:tRNA ribosyltransferase-isomerase; OS = Aeromonas caviae OX=648 GN=queA PE=3 SV=1
MQVSDFHFDLPDELIARYPMAERTASRLLQLDGQTGALRHGHFVDVLDQLNPGDLLVFNNTRVIPARMFGQKASGGKLEVLVERILDEHSVLAHVRSSKSPKPGTRLLLDGGADGVPVEAEMRARHDALFEIHFLDPRPVLTILDAIGHMPLPPYIDRPDEDADKERYQTVYNQKPGAVAAPTAGLHFDEPLLEQIRAKGVEMAFVTLHVGAGTFQPVRVDKIEDHHMHSEYAEVPQEVVDAIAATRARGGRVVAVGTTSVRSLESAAKATLAQGKPLAPFFNDTDIFIFPGYEFQVVDAMITNFHLPESTLIMLVSAFAGYDNVMAAYQAAVAGQYRFFSYGDAMFVTRRRVQG

SEQ ID NO: 62937 - protein, 355 aa, Aeromonas caviae
  REGION 1..355: note = tr|A0A2X4NMA6|A0A2X4NMA6_AERCA S-adenosylmethionine:tRNA ribosyltransferase-isomerase; OS = Aeromonas caviae OX=648 GN=queA PE=3 SV=1
MQVSDFHFDLPDELIARYPMAERTASRLLQLDGQTGALRHGHFVDVLDQLNPGDLLVFNNTRVIPARMFGQKASGGKLEVLVERILDEHSVLAHVRSSKSPKPGTRLLLDGGADGVPVEAEMRARHDALFEIHFLDPRPVLTILDAIGHMPLPPYIDRPDEDADKERYQTVYNQKPGAVAAPTAGLHFDEPLLEQIRAKGVEMAFVTLHVGAGTFQPVRVDKIEDHHMHSEYAEVPQEVVDAIAATRARGGRVVAVGTTSVRSLESAAKATLAQGMPLAPFFSDTDIFIFPGYEFQVVDAMITNFHLPESTLIMLVSAFAGYDNVMAAYQAAVAGQYRFFSYGDAMFVTRRRVQG

SEQ ID NO: 62938 - protein, 355 aa, unidentified
  source 1..355: note = Aeromonas dhakensis
  REGION 1..355: note = tr|A0A433GBT7|A0A433GBT7_9GAMM S-adenosylmethionine:tRNA ribosyltransferase-isomerase; OS = Aeromonas dhakensis OX=196024 GN=queA PE=3 SV=1
MQVSDFHFDLPDELIARYPMAERTASRLLQLDGQTGALRHGQFVDVLDQLNPGDLLVFNNTRVIPARMFGQKASGGKLEVLVERILDEHSVLAHVRSSKSPKPGTRLILDAGADGVPVEAEMRARHDALFEIHFLDPRPVLEILEAIGHMPLPPYIDRPDEDADKERYQTVYNQKPGAVAAPTAGLHFDEPLLEKIRAKGVETAFVTLHVGAGTFQPVRVDKIEDHHMHSEYAEVPQEVVDAIAATRARGGRVIAVGTTSVRSLESAAKVTLAQGKPLAPFFSDTDIFIFPGYQFQVVDAMVTNFHLPESTLIMLVSAFAGYDNVMAAYQAAVAEQYRFFSYGDAMFVTRRRAAA

SEQ ID NO: 62939 - protein, 355 aa, unidentified
  source 1..355: note = Aeromonas dhakensis
  REGION 1..355: note = tr|K1JDC0|K1JDC0_9GAMM S-adenosylmethionine:tRNA ribosyltransferase-isomerase OS=Aeromonas dhakensis; OX = 196024 GN=queA PE=3 SV=1
MQVSDFHFDLPDELIARYPMAERTASRLLQLDGQTGALRHGQFVDVLDQLNSGDLLVFNNTRVIPARMFGQKASGGKLEVLVERILDEHSVLAHVRSSKSPKPGTRLILDAGADGVPVEAEMRARHDALFEIHFLDPRPVLEILEAIGHMPLPPYIDRPDEDADKERYQTVYNQKPGAVAAPTAGLHFDEPLLEKIRAKGVETAFVTLHVGAGTFQPVRVDKIEDHHMHSEYAEVPQEVVDAIAATRARGGRVIAVGTTSVRSLESAAKVTLAQGKPLAPFFSDTDIFIFPGYQFQVVDAMVTNFHLPESTLIMLVSAFAGYDNVMAAYQAAVAEQYRFFSYGDAMFVTRRRAAA

SEQ ID NO: 62940 - protein, 349 aa, Aeromonas diversa
  REGION 1..349: note = tr|N9V890|N9V890_9GAMM S-adenosylmethionine:tRNA ribosyltransferase-isomerase OS=Aeromonas diversa CDC 2478-85 OX=1268237 GN=queA PE=3 SV=1
MQVSDFHFDLPDELIARYPTAERTASRLLQLDGESGARRHGQFVDVLNLLNPGDLLVFNNTRVIPARMFGQKASGGKLEVLVERILGEHAVLAHVRASKAPKPGTRLILDGGVEAEMRARHDALFEIHFLDPRPVLEILDAIGHMPLPPYIDRPDEDADKERYQTVYNAKPGAVAAPTAGLHFDESLLEAIRAKGIETAFVTLHVGAGTFQPVRVDKIEDHHMHSEYAEVPQEVVDAIAATRARGGRVIAVGTTSVRSLESAARVTLAQGQPLAPFFSDTDIFIYPGFEFQVVDAMVTNFHLPESTLIMLISAFAGYDNVMAAYREAVAEQYRFFSYGDAMFITRRRGR

SEQ ID NO: 62941 - protein, 355 aa, Aeromonas encheleia
  REGION 1..355: note = tr|A0A3S4TN77|A0A3S4TN77_9GAMM S-adenosylmethionine:tRNA ribosyltransferase-isomerase; OS = Aeromonas encheleia OX=73010 GN=queA PE=3 SV=1
MQVSDFHFDLPDELIARYPMTERTASRLLQLDGQSGALRHGQFVDVLDRLNPGDLLVFNNTRVIPARMFGQKASGGKLEVLVERILDEHSVLAHVRSSKSPKPGTRLILDGGPDGEKVEAEMRARHDALFEIHFLDPRPVLEILEAIGHMPLPPYIDRPDEDADKERYQTVYNQKPGAVAAPTAGLHFDEPLLAKIRAKGVETAFVTLHVGAGTFQPVRVDRIEDHHMHSEYAEVPQEVVDAINATRARGGRVIAVGTTSVRSLESAAKVSLAQGKPLAPFFSDTDIFIFPGYEFQIVDAMVTNFHLPESTLIMLVSAFAGYDHVMAAYQAAVAEQYRFFSYGDAMFVTRRRAQA

SEQ ID NO: 62942 - protein, 355 aa, Aeromonas enteropelogenes
  REGION 1..355: note = tr|A0A175VKR7|A0A175VKR7_AEREN S-adenosylmethionine:tRNA ribosyltransferase-isomerase; OS = Aeromonas enteropelogenes OX=29489 GN=queA PE=3 SV=1
MQVSDFHFDLPDELIARYPMAERTASRLLQLDGQTGALRHGQFVDVLDQLNPGDLLVFNNTRVIPARMFGQKASGGKLEVLVERILDEHSVLAHVRSSKSPKPGTRLILDGGPDGEKVEAEMRARHDALFEIHFLDARSVLEILEAIGHMPLPPYIDRPDEDADKERYQTVYNAKPGAVAAPTAGLHFDEPLLEKIRAKGVETAFVTLHVGAGTFQPVRVDKIEDHHMHSEYAEVPQEVVDAIAATRARGGRVIAVGTTSVRSLESAAKVTLAQGKPLAPFFSDTDIFIFPGYEFQVVDAMVTNFHLPESTLIMLVSAFAGYDNVMAAYQAAVAEQYRFFSYGDAMFVTRRRAQA

SEQ ID NO: 62943 - protein, 355 aa, Aeromonas hydrophila
  REGION 1..355: note = sp|A0KJ19|QUEA_AERHH S-adenosylmethionine:tRNA ribosyltransferase-isomerase OS=Aeromonas hydrophila subsp. hydrophila (strain ATCC 7966 / DSM 30187 / JCM 1027 / KCTC2358 / NCIMB 9240) OX=380703 GN=queA PE=3 SV=1
MQVSDFHFDLPDELIARYPMTERTASRLLQLDGQTGALRHGQFVDVLDQLNPGDLLVFNNTRVIPARMFGQKASGGKLEVLVERMLDEHSVLAHVRSSKSPKPGTRLILDGGADGEKVEAEMRARHDALFEIHFLDPRPVLEILEAIGHMPLPPYIDRPDEDADKERYQTVYNQKPGAVAAPTAGLHFDEPLLEKIRAKGVETAFVTLHVGAGTFQPVRVDKIEDHHMHSEYAEVPQEVVDAIAATRARGGRVIAVGTTSVRSLESAAKVTLAQGKPLAPFFSDTDIFIFPGYQFQVVDAMVTNFHLPESTLIMLVSAFAGYDNVMSAYQAAVAEQYRFFSYGDAMFVTRRRAQA

SEQ ID NO: 62944 - protein, 355 aa, Aeromonas hydrophila
  REGION 1..355: note = tr|A0A1V2F319|A0A1V2F319_AERHY S-adenosylmethionine:tRNA ribosyltransferase-isomerase; OS = Aeromonas hydrophila OX=644 GN=queA PE=3 SV=1
MQVSDFHFDLPDELIARYPMTERTASRLLQLDGQTGALRHGQFVDVLDQLNPGDLLVFNNTRVIPARMFGQKASGGKLEVLVERMLDEHSVLAHVRSSKSPKPGTRLILDGGADGEKVEAEMRARHDALFEIHFLDPRPVLEILEAIGHMPLPPYIDRPDEDADKERYQTVYNQKPGAVAAPTAGLHFDEPLLEKIRAKGVETAFVTLHVGAGTFQPVRVDKIEDHHMHSEYAEVPQEVVDAIAATRARGGRVIAVGTTSVRSLESAAKVTLAQGKPLAPFFSDTDIFIFPGYQFQVVDAMVTNFHLPESTLIMLVSAFAGYDNVMAAYQAAVAEQYRFFSYGDAMFVTRRRAQA

SEQ ID NO: 62945 - protein, 350 aa, Aeromonas jandaei
  REGION 1..350: note = tr|A0A3N6VL62|A0A3N6VL62_AERJA S-adenosylmethionine:tRNA ribosyltransferase-isomerase; OS = Aeromonas jandaei OX=650 GN=queA PE=3 SV=1
MQVSDFHFDLPDELIARYPMAERTASRLLQLDGQTGALRHGQFVDVLDQLNPGDLLVFNNTRVIPARMFGQKASGGKLEVLVERILDEHSVLAHVRASKAPKPGTRMIMDGGVEAEMRARHDALFEIHFLDARPVLEILEAIGHMPLPPYIDRPDEDADKERYQTVYNQKPGAVAAPTAGLHFDEPLLEKIRAKGVETAFVTLHVGAGTFQPVRVEKIEDHHMHSEYAEVPQEVVDAIAATRARGGRVIAVGTTSVRSLESAAKVTLAQGKPLAPFFGDTDIFIFPGYQFQIVDAMVTNFHLPESTLIMLVSAFAGYDNVMTAYQAAVAGQYRFFSYGDAMFVTRRRGEA

SEQ ID NO: 62946 - protein, 350 aa, Aeromonas jandaei
  REGION 1..350: note = tr|A0A2S5FFG6|A0A2S5FFG6_AERJA S-adenosylmethionine:tRNA ribosyltransferase-isomerase; OS = Aeromonas jandaei OX=650 GN=queA PE=3 SV=1
MQVSDFHFDLPDELIARYPMAERTASRLLQLDGQTGALRHGQFVDVLDQLNPGDLLVFNNTRVIPARMFGQKASGGKLEVLVERILDEHSVLAHVRASKAPKPGTRMIMDGGVEAEMRARHDALFEIHFRDARPVLEILEAIGHMPLPPYIDRPDEDADKERYQTVYNQKPGAVAAPTAGLHFDEPLLEKIRAKGVETAFVTLHVGAGTFQPVRVEKIEDHHMHSEYAEVPQEVVDAIAATRARGGRVIAVGTTSVRSLESAAKVTLAQGKPLAPFFGDTDIFIFPGYQFQIVDAMVTNFHLPESTLIMLVSAFAGYDNVMTAYQAAVAGQYRFFSYGDAMFVTRRRGEA

SEQ ID NO: 62947 - protein, 355 aa, unidentified
  source 1..355: note = Aeromonas lusitana
  REGION 1..355: note = tr|A0A2M8HC82|A0A2M8HC82_9GAMM S-adenosylmethionine:tRNA ribosyltransferase-isomerase; OS = Aeromonas lusitana OX=931529 GN=queA PE=3 SV=1
MQVSDFHFDLPDELIARYPMTERTASRLLQLDGQSGALRHGQFVDVLDQLKPGDLLVFNNTRVIPARMFGQKASGGKLEVLVERILDEHSVLAHVRSSKSPKPGTRLILDGGPDGDKVDAEMRARHDALFEIHFLDPRPVLDILEAIGHMPLPPYIDRPDEDADKERYQTVYNQKPGAVAAPTAGLHFDEPLLERIKAKGVELAFVTLHVGAGTFQPVRVDKIEDHHMHSEYAEVPQEVVDAIAATRARGGRVIAVGTTSVRSLESAAKVTLAQGKPLAPFFSDTDIFIFPGYEFQIVDAMVTNFHLPESTLIMLISAFAGYDHVMAAYQAAVAERYRFFSYGDAMFITRRRAEA

SEQ ID NO: 62948 - protein, 355 aa, Aeromonas media
  REGION 1..355: note = tr|A0A023RL27|A0A023RL27_AERME S-adenosylmethionine:tRNA ribosyltransferase-isomerase; OS = Aeromonas media WS OX=1208104 GN=queA PE=3 SV=1
MQVSDFHFDLPDELIARYPMAERTASRLLQLDGQSGALRHGQFVDVLDQLNPGDLLVFNNTRVIPARMFGQKASGGKLEVLVERILDEHSVLAHVRSSKSPKPGTRLILDGGPDGEKVEAEMRARHDALFEIHFLDPRPVLEILEAIGHMPLPPYIDRPDEDADKERYQTVYNQKPGAVAAPTAGLHFDEPLLEKIRAKGVETAFVTLHVGAGTFQPVRVEKIEDHHMHSEYAEVPQEVVDAIAATRARGGRVVAVGTTSVRSLESAAKVTLAQGKPLAPFFSDTDIFIFPGYQFQVVDAMVTNFHLPESTLIMLVSAFAGYDNVMAAYQAAVAEQYRFFSYGDAMFVTRRQVEA

SEQ ID NO: 62949 - protein, 350 aa, Aeromonas molluscorum
  REGION 1..350: note = tr|R1H3R9|R1H3R9_9GAMM S-adenosylmethionine:tRNA ribosyltransferase-isomerase OS=Aeromonas molluscorum 848; OX = 1268236 GN=queA PE=3 SV=1
MQVSDFSFELPDELIARYPMSERTASRLLQLDGDSGALRHGQFVDVLDLLNPGDLLVFNNTRVIPARMFGQKASGGKLEVLVERILDEKSVLAHVRASKAPKPGTRLILDGGVEAEMRARHDALFEIHFLDPRPVLDILDAIGHMPLPPYIDRPDEDADKERYQTVYNQKPGAVAAPTAGLHFDEPLLERIRAKGVETAFVTLHVGAGTFQPVRVDKIEDHHMHSEYAEVPQEVVDAIAATRARGGRVIAVGTTSVRSLESAAKATLAQGQPLAPFFSDTDIFIFPGYQFQVVDAMVTNFHLPESTLIMLVSAFAGYDNVMAAYQAAVAEQYRFFSYGDAMFVTRRRAKV

SEQ ID NO: 62950 - protein, 350 aa, unidentified
  source 1..350: note = Aeromonas rivipollensis
  REGION 1..350: note = tr|A0A2P1PGH6|A0A2P1PGH6_9GAMM S-adenosylmethionine:tRNA ribosyltransferase-isomerase; OS = Aeromonas rivipollensis OX=948519 GN=queA PE=3 SV=1
MQVSDFHFDLPDELIARYPMAERTASRLLQLDGQSGALRHGQFVDVLDQLNPGDLLVFNNTRVIPARMFGQKASGGKLEVLVERILDEHSVLAHVRSSKSPKPGTRLILDGGVEAEMRARHDALFEIHFLDPRPVLEILEAIGHMPLPPYIDRPDEDADKERYQTVYNQKPGAVAAPTAGLHFDEPLLAKIRAKGVETAFVTLHVGAGTFQPVRVEKIEDHHMHSEYAEVPQEVVDAIAATRARGGRVIAVGTTSVRSLESAAKVTLAQGKPLAPFFSDTDIFIFPGYEFQIVDAMVTNFHLPESTLIMLVSAFAGYDQVMAAYQAAVEEQYRFFSYGDAMFVTRRQVEA

SEQ ID NO: 62951 - protein, 355 aa, Aeromonas salmonicida
  REGION 1..355: note = sp|A4SP27|QUEA_AERS4 S-adenosylmethionine:tRNA ribosyltransferase-isomerase OS=Aeromonas salmonicida (strain A449) OX=382245 GN=queA PE=3 SV=1
MQVSDFHFDLPDELIARYPMAERTASRLLQLDGQSGALRHGQFVDVLDQLNPGDLLVFNNTRVIPARMFGQKASGGKLEVLVERILDEHSVLAHVRASKAPKPGTRLILDGGPDGEKVDAEMRARHDALFEIHFLDPRPVLEILEAIGHMPLPPYIDRPDEDADKERYQTVYNQKPGAVAAPTAGLHFDEPLLAKIRAKGVETAFVTLHVGAGTFQPVRVDKIEDHHMHSEYAEVPQEVVDAIAATRARGGRVIAVGTTSVRSLESAAKASLALSKPLAPFFSDTDIFIFPGYQFQVVDAMVTNFHLPESTLIMLVSAFAGYDHVMAAYQAAVAEQYRFFSYGDAMFVTRRRAVA

SEQ ID NO: 62952 - protein, 355 aa, Aeromonas salmonicida; identical to SEQ ID NO: 62951
  REGION 1..355: note = tr|A0A4Y4YBI4|A0A4Y4YBI4_AERSA S-adenosylmethionine:tRNA ribosyltransferase-isomerase; OS = Aeromonas salmonicida OX=645 GN=queA PE=3 SV=1

SEQ ID NO: 62953 - protein, 349 aa, Aeromonas schubertii
  REGION 1..349: note = tr|A0A0S2SKC3|A0A0S2SKC3_9GAMM S-adenosylmethionine:tRNA ribosyltransferase-isomerase; OS = Aeromonas schubertii OX=652 GN=queA PE=3 SV=1
MQVSDFHFDLPDELIARYPTAVRTASRLLQLDGESGERRHGQFVDVLDLLNPGDLLVFNNTRVIPARLFGQKASGGKLEVLVERIIGDHAVLAHVRASKAPKPGTRLILDGGVEAEMRARHDALFEIHFLDPRPVLAILEAIGHMPLPPYIDRPDEDADKERYQTVYNAKPGAVAAPTAGLHFDQALLEQIRAKGVETAFVTLHVGAGTFQPVRVDKIEDHHMHSEYAEVPQEVVDAIAATRARGGRVIAVGTTSVRSLESAARVTLAQSQPLAPFFSDTDIFIYPGFEFQVVDAMVTNFHLPESTLIMLISAFAGYDNVMTAYREAVAEQYRFFSYGDAMFITRRRSR

SEQ ID NO: 62954 - protein, 349 aa, Aeromonas schubertii
  REGION 1..349: note = tr|A0A0W7U259|A0A0W7U259_9GAMM S-adenosylmethionine:tRNA ribosyltransferase-isomerase; OS = Aeromonas schubertii OX=652 GN=queA PE=3 SV=1
MQVSDFHFDLPDELIARYPTAVRTASRLLQLDGESGERRHGQFVDVLDLLNPGDLLVFNNTRVIPARLFGQKASGGKLEVLVERIIGDHAVLAHVRASKAPKPGTRLILDGGVEAEMRARHDALFEIHFLDPRPVLAILEAIGHMPLPPYIDRPDEDADKERYQTVYNAKPGAVAAPTAGLHFDQALLEQIRAKGVETAFVTLHVGAGTFQPVRVDKIEDHHMHSEYAEVPQEVVDSIAATRARGGRVIAVGTTSVRSLESAARVTLAQGQPLVPFFSDTDIFIYPGFEFQVVDAMVTNFHLPESTLIMLISAFAGYDNVMTAYREAVAEQYRFFSYGDAMFITRRRSR

SEQ ID NO: 62955 - protein, 349 aa, Aeromonas simiae
  REGION 1..349: note = tr|A0A5J6WWS7|A0A5J6WWS7_9GAMM tRNA preQ1(34) S-adenosylmethionine ribosyltransferase-isomerase QueA; OS = Aeromonas simiae OX=218936 GN=queA PE=4 SV=1
MQVSDFHFDLPDELIARYPTAVRTASRLLQLDGECGERRHGQFVDILGLLNPGDLLVFNNTRVIPARLFGQKASGGKLEMLVERIIDEHSVLAHVRASKAPKPGTRLIFDGGIEAEMRARHDALFEIHFLDPRPVLEILEAVGHMPLPPYIDRPDEDADKERYQTVYNAKPGAVAAPTAGLHFDEALLAQIRAKGVETAFVTLHVGAGTFQPVRVDKIEDHHMHSEYAEVPQEVVDAINATRARGGRVIAVGTTSVRSLESAARVTLAEGKPLAPFFSDTDIFIFPGYEFQVVDAMITNFHLPESTLIMLVSAFAGYDNVMAAYREAVAEQYRFFSYGDAMFVTRRRSR

SEQ ID NO: 62956 - protein, 355 aa, Aeromonas sobria
  REGION 1..355: note = tr|A0A2N3J3D6|A0A2N3J3D6_AERSO S-adenosylmethionine:tRNA ribosyltransferase-isomerase; OS = Aeromonas sobria OX=646 GN=queA PE=3 SV=1
MQVSDFHFDLPNELIARYPMAERTASRLLQLDGQTGALRHGQFVDVLDQLNPGDLLVFNNTRVIPARMFGQKASGGKLEVLVERILDEHSVLAHVRASKAPKPGTRLIMDAGQDGKSVEAEMRARHDALFEIHFLDPRPVLEILEAIGHMPLPPYIDRPDEDADKERYQTVYNQKPGAVAAPTAGLHFDQALLEKIRAKGVETAFVTLHVGAGTFQPVRVDKIEDHHMHSEYAEVPQEVVDAIAATRARGGRVIAVGTTSVRSLESAAKVTLAQGKPLAPFFSDTDIFIFPGYQFQIVDAMVTNFHLPESTLIMLVSAFAGYDNVMAAYQAAVAGQYRFFSYGDAMFVTRRQVEA

SEQ ID NO: 62957 - protein, 355 aa, Aeromonas sobria
  REGION 1..355: note = tr|A0A2N3IWC5|A0A2N3IWC5_AERSO S-adenosylmethionine:tRNA ribosyltransferase-isomerase; OS = Aeromonas sobria OX=646 GN=queA PE=3 SV=1
MQVSDFHFDLPNELIARYPMAERTASRLLQLDGQTGALRHGQFVDVLDQLKPGDLLVFNNTRVIPARMFGQKASGGKLEVLVERILDEHSVLAHVRASKAPKPGTRLIMDAGQDGKSVEAEMRARHDALFEIHFLDPRPVLEILEAIGHMPLPPYIDRPDEDTDKERYQTVYNQKPGAVAAPTAGLHFDQALLEKIRAKGVETVFVTLHVGAGTFQPVRVDKIEDHHMHSEYAEVSQEVVDAIAATRARGGRVIAVGTTSVRSLESAAKVTLAQGKPLAPFFSDTDIFIFPGYQFQIVDAMVTNFHLPESTLIMLVSAFAGYDNVMAAYQAAVAGQYRFFSYGDAMFVTRRQVEA

SEQ ID NO: 62958 - protein, 355 aa, Aeromonas sp.
  REGION 1..355: note = tr|A0A291TIB9|A0A291TIB9_9GAMM S-adenosylmethionine:tRNA ribosyltransferase-isomerase; OS = Aeromonas sp. CU5 OX=2033033 GN=queA PE=3 SV=1
MQVSDFHFDLPNELIARYPMAERTASRLLQLDGQTGALRHGQFVDVLDQLNPGDLLVFNNTRVIPARMFGQKASGGKLEVLVERILDEHSVLAHVRASKAPKPGTRLIMDAGQDGKSVEAEMRARHDALFEIHFLDPRPVLEILEAIGHMPLPPYIDRPDEDADKERYQTVYNQKPGAVAAPTAGLHFDEALLEKIRAKGVETAFVTLHVGAGTFQPVRVDKIEDHHMHSEYAEVPQEVVDAIAATRARGGRVIAVGTTSVRSLESAAKVTLAQGKPLAPFFSDTDIFIFPGYQFQIVDAMVTNFHLPESTLIMLVSAFAGYDNVMAAYQAAVAGQYRFFSYGDAMFVTRRRGEA

SEQ ID NO: 62959 - protein, 355 aa, Aeromonas sp.; identical to SEQ ID NO: 62936
  REGION 1..355: note = tr|A0A369SU19|A0A369SU19_9GAMM S-adenosylmethionine:tRNA ribosyltransferase-isomerase; OS = Aeromonas sp. ARM81 OX=1747384 GN=queA PE=3 SV=1

SEQ ID NO: 62960 - protein, 355 aa, Aeromonas taiwanensis
  REGION 1..355: note = tr|A0A5F0KDF0|A0A5F0KDF0_9GAMM S-adenosylmethionine:tRNA ribosyltransferase-isomerase; OS = Aeromonas taiwanensis OX=633417 GN=queA PE=3 SV=1
MQVSDFHFDLPDELIARYPMAERTASRLLQLDGQTGALRHGHFVDVLDQLNPGDLLVFNNTRVIPARMFGQKASGGKLEVLVERILDEHSVLAHVRSSKSPKPGTRLILDAGADGVPVEAEMRARHDALFEIHFLDPRPVLEILEAIGHMPLPPYIDRPDEDADKERYQTVYNQKPGAVAAPTAGLHFDEPLLERIRAKGIETAFVTLHVGAGTFQPVRVDKIEDHHMHSEYAEVPQEVVDAIAATRARGGRVVAVGTTSVRSLESAAKVTLAQGKPLAPFFSDTDIFIFPGYEFQVVDAMITNFHLPESTLIMLVSAFAGYDNVMTAYQAAVTGQYRFFSYGDAMFVTRRRAQA

SEQ ID NO: 62961 - protein, 350 aa, Aeromonas veronii
  REGION 1..350: note = tr|A0A318DIL5|A0A318DIL5_9GAMM S-adenosylmethionine:tRNA ribosyltransferase-isomerase; OS = Aeromonas veronii OX=654 GN=queA PE=3 SV=1
MQVSDFHFDLPDELIARYPMAERTASRLLQLDGQTGALRHGQFVDVLDQLNPGDLLVFNNTRVIPARMFGQKASGGKLEVLVERILDEHSVLAHVRASKAPKPGTRMIMDGGVEAEMRARHDALFEIHFLDPRPVLEILEAIGHMPLPPYIDRPDEDADKERYQTVYNQKPGAVAAPTAGLHFDEPLLEKIRAKGVETAFVTLHVGAGTFQPVRVEKIEDHHMHSEYAEVPQEVVDAIAATRARGGRVIAVGTTSVRSLESAAKVTLALGKPLAPFFSDTDIFIFPGYKFQIVDAMVTNFHLPESTLIMLVSAFAGYDNVMAAYQAAVAGQYRFFSYGDAMFVTRRQVEA

SEQ ID NO: 62962 - protein, 350 aa, Aeromonas veronii
  REGION 1..350: note = tr|A0A4R8UAL1|A0A4R8UAL1_9GAMM S-adenosylmethionine:tRNA ribosyltransferase-isomerase; OS = Aeromonas veronii OX=654 GN=queA PE=3 SV=1
MQVSDFHFDLPDELIARYPMAERTASRLLQLDGQTGALRHGQFVDVLDQLNPGDLLVFNNTRVIPARMFGQKASGGKLEVLVERILDEHSVLAHVRASKAPKPGTRMIMDGGVEAEMRARHDALFEIHFLDPRPVLEILDAIGHMPLPPYIDRPDEDADKERYQTVYNQKPGAVAAPTAGLHFDEPLLEKIRAKGVETAFVTLHVGAGTFQPVRVEKIEDHHMHSEYAEVPQEVVDAIAATRARGGRVIAVGTTSVRSLESAAKVTLALGKPLAPFFSDTDIFIFPGYKFQIVDAMVTNFHLPESTLIMLVSAFAGYDNVMAAYQAAVAGQYRFFSYGDAMFVTRRQVEA

SEQ ID NO: 62963 - protein, 348 aa, Aestuariibacter sp.
  REGION 1..348: note = tr|A0A506RUU0|A0A506RUU0_9ALTE S-adenosylmethionine:tRNA ribosyltransferase-isomerase; OS = Aestuariibacter sp. GS-14 OX=2590670 GN=queA PE=3 SV=1
MKLSDFSFTLPEHLIAKYPTPDRTASRLLHLNGNTGEVAHSQFQHMLDLVQPGDLLVFNNTRVIPARMLGQKASGGKVEVLIERILDDHNALAHVRASKAPKPGADLLLENAVSVTVTGRQDALFELRFNGDATVLEQLEQYGHMPLPPYIDRPDENSDKERYQTVYNQAPGAVAAPTAGLHFDQQLLEKLKAKGVKLAYVTLHVGAGTFQPVRVDNILEHKMHSEFAIVPQEVVDAVRATKAAGKRVIAVGTTSVRSLESSALAASKDEILQVYQSDTDIFIYPGFEFKVVDAMFTNFHLPESTLIMLISAFAGRDNVLYAYEQAIQQEYRFYSYGDSMFIEKATNA

SEQ ID NO: 62964 - protein, 351 aa, unidentified
  source 1..351: note = Aestuariispira insulae
  REGION 1..351: note = tr|A0A3D9HXK9|A0A3D9HXK9_9PROT S-adenosylmethionine:tRNA ribosyltransferase-isomerase; OS = Aestuariispira insulae OX=1461337 GN=queA PE=3 SV=1
MHVDLFDFELPQETIAQHPASPRDSARMLDLTGNGFADRIVRDLPDVLQPGDLLVCNDTKVIPTRITGKRGDATVEVTLHKQEAPNKWWAFARPAKKLRVGETFTVTDGFHAEVQEKRDGGEVLLAFNLSGNELITELWSHGIMPLPPYIRRTKGGDAAEEAEDRNDYQTLFAKEEGAVAAPTAGLHFTDELRSRLEAKGISFQTITLHVGAGTFLPMKVEDTRHHVMHSEFGVITQEEADIINKAKAEGRRIVSVGTTSMRLLESAATAEGIIKPFEGETDIFITPGYRFKAVDLLMTNFHLPKSTLFMLVSAFSGLDQMQAAYKHAIETGYRFYSYGDCCLLKCEADHA

SEQ ID NO: 62965 - protein, 352 aa, unidentified
  source 1..352: note = Aestuariivirga litoralis
  REGION 1..352: note = tr|A0A2W2CA40|A0A2W2CA40_9RHIZ S-adenosylmethionine:tRNA ribosyltransferase-isomerase; OS = Aestuariivirga litoralis OX=2650924 GN=queA PE=3 SV=1
MRVSDFDFDLPPERIALRPANPRDSSKLLVVRPDGLEDRIFRQLPDLLRAGDVLVFNNTRVIPAALSGHRMGRLGTTPKIEALLHMRLDGSRWKAFVKPAKKLEKGDRVRFGAEGKVCLLGTLYATVEEKGEAGEVTLAFDFHGPALDEAIAAVGEMPLPPYIAGKRGTDAQDRSDYQTIYAVKEGAVAAPTAGLHFTPQVMERLQVSGISQEFVTLHVGAGTFLPVKAEDTRDHRMHAEWGEVTAATCERLKAARARGGRIVAVGTTSLRLLESSGLEPFSGTTEIFITPGYRFRATDLLVTNFHLPKSTLFMLVSAFAGLKRMRSAYAHAIANDYRFYSYGDSSLLFPAP

SEQ ID NO: 62966 - protein, 366 aa, Afifella marina
  REGION 1..366: note = tr|A0A1G5NGD0|A0A1G5NGD0_AFIMA S-adenosylmethionine:tRNA ribosyltransferase-isomerase; OS = Afifella marina DSM 2698 OX=1120955 GN=queA PE=3 SV=1
MRIDAFDFELPEERIALRPARPRDSARLLVVPSEGAFRDLRVFDLPALLEPGDLLVLNDTAVIPARLAGRRLPRTQDGQAIRVEATLIERLDQSHWMALAKPGRKLKPGDILRFGGEGETCLAGTLDARVVEKGEAGAITLGFSLSGPVLDEAIHGQGSMPLPPYIASRRQADAADLEDYQTIYAAKEGAVAAPTAGLHFTDDLLAALADKGVERRLVTLHVGAGTFLPVKSEETDDHVMHEEWGEVSEETAEAVNETRRRGGRVVAIGTTALRILESAGDENGLLRPFSGKTGIFITPGYRFRIIDRLFTNFHLPRSTLFMLVSAFSGLDRMKASYAHAIEEQYRFYSYGDASLLEPATPSIRPK

SEQ ID NO: 62967 - protein, 360 aa, Afipia broomeae
  REGION 1..360: note = tr|K8PI79|K8PI79_9BRAD S-adenosylmethionine:tRNA ribosyltransferase-isomerase OS=Afipia broomeae ATCC 49717; OX = 883078 GN=queA PE=3 SV=1
MRTDLFDFELPEGNIALRPVSPRDAARMLVVKPGQPLTDSTVSDLPLFLQPGDQLVVNDTKVIPAQLTGRRIGRETEPKIEATLIKRLDGSRWQALVKPAKKLTAGDAIRFGNEGRVCLLGNLDAEVESKGENGEVTLAFSFHGPILDQAIADVGAPPLPPYIASRRTPDERDAADYQTMFAVSEGAVAAPTAGLHFTPALEAALRDRGIGLNRVTLHVGAGTFLPVKADDTAGHKMHSEWGTVSSETAAALNQARTRGGRIVAVGTTSLRLLESAAADDGTIQPFSDDTAIFITPGYRFKAVDILMTNFHLPRSTLFMLVSAFSGLETMQKAYAHAIETGYRFYSYGDASLLFRNQPDR

SEQ ID NO: 62968 - protein, 358 aa, Afipia broomeae
  REGION 1..358: note = tr|A0A2M8ZI10|A0A2M8ZI10_9BRAD S-adenosylmethionine:tRNA ribosyltransferase-isomerase; OS = Afipia broomeae OX=56946 GN=queA PE=3 SV=1
MRTDLFDFELPPDSIALRPASPRDSARMLIVQPEAVLRDRSVADLPQWLEPGDQLVVNDTKVIAAQLAGRRIGRDTEPKIEATLIKRLDGSRWQALVKPAKKLAQGDVVRFGNEGRVCLLGHLDAEVEHKGDSGEITLSFSFHGPTLDQAIADLGSPPLPPYIASKRTPDERDAEDYQTMFAAKEGAVAAPTAGLHFTPALEMALRDRGVGLHRITLHVGAGTFLPVKVEDTVGHKMHAEWGVITGDTAAALNEARARGGRIVAVGTTSLRLLESATAEDGTIEPFADDTSIFITPGYRFRAVDILLTNFHLPRSTLFMLVSAFSGLDTMKRAYAHAIASGYRFYSYGDACLLFRANE

SEQ ID NO: 62969 - protein, 373 aa, Afipia clevelandensis
  REGION 1..373: note = tr|K8PHX9|K8PHX9_9BRAD S-adenosylmethionine:tRNA ribosyltransferase-isomerase OS=Afipia clevelandensis ATCC 49720 OX=883079 GN=queA PE=3 SV=1
MDGRAYVPAIDILSIMRTDLFDFELPEANIALRPVSPRDAARMLVVKPDQPLIDAIVSDLPRFLQPGDQLVVNDTKVIPAQLTGRRIGRETEPKIEATLIKRFDGSRWQALVKPAKKLAQGDVIRFGNEGRVCLLGNLDAQVEHKGENGEVTLSFSFHGPILDQAIADVGAPPLPPYIASRRTPDERDNADYQTMFAVSEGAVAAPTAGLHFTPGLEAALRARGVGLHRVTLHVGAGTFLPVKADDTAEHKMHAEWGTVSVETAAALNEARAKGGRIVAVGTTSLRLLESAAADDGTIKPFTAETAIFITPGYRFKAVDVLMTNFHLPRSTLFMLVSAFSGLETMQQAYAHAIGSGYRFYSYGDASLLFRRST

SEQ ID NO: 62970 - protein, 361 aa, Afipia felis
  REGION 1..361: note = tr|A0A380W9U7|A0A380W9U7_AFIFE S-adenosylmethionine:tRNA ribosyltransferase-isomerase; OS = Afipia felis OX=1035 GN=queA PE=3 SV=1
MRTDLFDFDLPPESIALRPVEPRESARLLVVRPRVGLEDYTVRDLPDLLRAGDQLVVNDTKVIAAQLSGRRIGGATEPRIDVTLIKRVDGSRWQALVRPARKLAEGDVVRFGNEGRVCLLGTLDATVEAKGEAGEITLAFAFHGPVLDQAIADLGAPPLPPYIASRRAPDEKDVGDYQTMFAKHEGAVAAPTAGLHFTPALEAALASRGIGVQRLTLHVGAGTFLPVKADDTEDHKMHSEWGSISAETADVLNNARAKGGRIVAVGSTAMRLLESAADENGTIQPFTGETAIFITPGYRFRAVDVMMTNFHLPRSTLFMLVSAFSGLETMRASYAHAIEKGYRFYSYGDACLLFADKGHAA

SEQ ID NO: 62971 - protein, 361 aa, Afipia felis
  REGION 1..361: note = tr|A0A090MKJ8|A0A090MKJ8_AFIFE S-adenosylmethionine:tRNA ribosyltransferase-isomerase; OS = Afipia felis OX=1035 GN=queA PE=3 SV=1
MRTDLFDFDLPPESIALRPVEPRESARLLVVRPGDGLDDYTVRDLPDLLRAGDQLVVNDTKVIAAQLAGRRVGGATEPRIDVTLIKRVDGSRWQALVRPARKLAEGDVVRFGNEGRVCLLGNLDATVEAKGEAGEITLSFAFHGPVLDQAIADLGAPPLPPYIASRRAPDEKDVGDYQTMFAKHEGAVAAPTAGLHFTPALEAALQARGIGVQRLTLHVGAGTFLPVKTDDTADHKMHAEWGTISAETACTLNEARAKGGRIVAVGSTAMRLLESAADENGTIQPFTGETAIFITPGYRFRAVDVMMTNFHLPRSTLFMLVSAFSGLETMQAAYAHAIEKGYRFYSYGDACLLFADTGHAA

SEQ ID NO: 62972 - protein, 358 aa, Afipia massiliensis
  REGION 1..358: note = tr|A0A4U6BS54|A0A4U6BS54_9BRAD S-adenosylmethionine:tRNA ribosyltransferase-isomerase; OS = Afipia massiliensis OX=211460 GN=queA PE=3 SV=1
MRTDLFDFELPEANIALRPVSPRDTARMLVVTPGKPLAEATVSDLPRFLQPGDQLVVNDTKVIPAQLTGRRVGRETEPKIEATLIKRIDGSRWQALVKPAKKLAAGDAIRFGNEGRVCLLGNLDAQVEHKGENGEVTLSFSFHGPILDQAIADVGAPPLPPYIASRRTPDERDTADYQTMFAVSEGAVAAPTAGLHFTPALEAALRDRGIGLHRVTLHVGAGTFLPVKADDTSSHKMHAEWGTVSGETATALNDARAKGGRVVAIGTTSLRLLESAAADNGTIQPFTGETAIFITPGYRFKAVDVLMTNFHLPRSTLFMLVSAFSGLETMQQAYAHAISTGYRFYSYGDACLLFRQST

SEQ ID NO: 62973 - protein, 358 aa, Afipia sp.
  REGION 1..358: note = tr|A0A1G9WYS9|A0A1G9WYS9_9BRAD S-adenosylmethionine:tRNA ribosyltransferase-isomerase; OS = Afipia sp. GAS231 OX=1882747 GN=queA PE=3 SV=1
MRTDLFDFELPAANIALRPASPRDSARMLVVQPDGVLRDRTVGELPQWLEPGDQLVVNDTKVISAQLKGRRIGRDTEPKIEATLIKRLDGSRWQALVKPAKKLAPGDVVRFGNEGKVCLLGHLDATVEAKGEEGEITFSFSFHGPTLDQAIEDLGTPPLPPYIASKRTPDEQDAADYQTMFAAREGAVAAPTAGLHFTPALEAALRARGVELHRLTLHVGAGTFLPVKVDDTAGHKMHAEWGSISAETAAALNAARARGGRIVAVGTTSLRLLESAAAEDGTIQPFSAETSIFITPGYRFRAVDILLTNFHLPRSTLFMLVSAFSGLETMKAAYAHAIAGGYRFYSYGDACLLFRAES

SEQ ID NO: 62974 - protein, 358 aa, Afipia sp.
  REGION 1..358: note = tr|W3RG95|W3RG95_9BRAD S-adenosylmethionine:tRNA ribosyltransferase-isomerase OS=Afipia sp. P52-10; OX = 1429916 GN=queA PE=3 SV=1
MRTDLFDFELPPDRIALRPASPRDAARLLVVKPGEGLADRSVRDLPDYLRAGDQLVVNDTKVIAAQLSGRRIGREPEPRIEATLIKRIDGSRWQAFAKPAKRLAVGDVVRFGSEGRVCFLGQLDATVEAKGEAGEVTLAFTFHGPVLDQAIAEMGAPPLPPYIASKREADDQDATDYQTMFAREEGAVAAPTAGLHFTPELEAALTAKGVAIRRVTLHVGAGTFLPVKADDTAGHTMHAEWGTVSMETAEALNAAKRNGGRIVAVGSTSLRLLESAADEDGTIHPFSGETAIFITPGYRFRAVDLMMTNFHLPRSTLFMLVSAFSGLETMQAAYAHAIASGYRFYSYGDASLLFRAEA

SEQ ID NO: 62975 - protein, 348 aa, Agarivorans albus
  REGION 1..348: note = tr|R9PJF9|R9PJF9_AGAAL S-adenosylmethionine:tRNA ribosyltransferase-isomerase OS=Agarivorans albus MKT 106; OX = 1331007 GN=queA PE=3 SV=1
MRVADFSFELPDELIARYPKQQRRDSRLLCLNGNTGELQHQQFPELLNHIQANDLLVFNNTRVIPARLFGQKASGGKLEVLIERVLDEHRVLAHVRCSKSPKPGSALRLADAFDATMLARHDSLFELRFDDQRTVLELLEAYGHMPLPPYIDRPDEDADKERYQTVYNEKPGAVAAPTAGLHFDDALMQQIQDKGADIAFVTLHVGAGTFQPVKVESVDEHVMHSEYAEVGDDVVAKIAKAKAAGGRVIAVGTTSVRSLESAAKDAKAKGQALQAYAAETDIFIYPGYQFELVDAMVTNFHLPESTLIMLISAFAGKDNVTKAYQAAIEQRYRFFSYGDAMFIERKDA

SEQ ID NO: 62976 - protein, 348 aa, Agarivorans sp.
  REGION 1..348: note = tr|A0A4D4IRQ1|A0A4D4IRQ1_9ALTE S-adenosylmethionine:tRNA ribosyltransferase-isomerase; OS = Agarivorans sp. Toyoura001 OX=2283141 GN=queA PE=3 SV=1
MRVADFSFDLPDELIARYPKQQRRDSRLLYLNGNSGELQHQQFPDLLDHIQENDLLVFNNTRVIPARLFGQKSTGGKLEVLIERVLDDRRVLAHVRCSKSPKPGNQLRLADAFDATMIARHDALFELRFDDTRTVLELLESYGHMPLPPYIDRPDEDADKERYQTVYNEKPGAVAAPTAGLHFDDALMQQIKDKGADTAFVTLHVGAGTFQPVKVESVDEHVMHSEYAEVGQEVVSKIAKAKAAGGRVIAVGTTSVRSLESAAKDAKSKGVELQAYAAETDIFIFPGYQFEVVDAMVTNFHLPESTLIMLVSAFAGKDHVTQAYQAAIDNQYRFFSYGDAMFITRKDA

SEQ ID NO: 62977 - protein, 352 aa, unidentified; identical to SEQ ID NO: 62553
  source 1..352: note = Agathobacter rectalis
  REGION 1..352: note = tr|C4ZBJ2|C4ZBJ2_AGARV S-adenosylmethionine:tRNA ribosyltransferase-isomerase OS=Agathobacter rectalis (strain ATCC 33656 / DSM 3377 / JCM 17463 / KCTC 5835 / VPI 09 90) OX=515619 GN=queA PE=3 SV=1

SEQ ID NO: 62978 - protein, 345 aa, unidentified
  source 1..345: note = Agathobacter ruminis
  REGION 1..345: note = tr|A0A2G3E5J0|A0A2G3E5J0_9FIRM S-adenosylmethionine:tRNA ribosyltransferase-isomerase; OS = Agathobacter ruminis OX=1712665 GN=queA PE=3 SV=1
MDVKDFYYDLPQELIAQDPLEDRSSSRLMVLNRTTGAVTHKIFSDIIDYLNPGDCLVLNNTKVIPARLFGVKEETGAHVEVLLLKRKENDNWECLVRPGKKLKPGAKVIFGDGLLHGEITDVLEEGNREIHFTYEGIFEEILDQLGQMPLPPYITHELKDKNRYQTVYAKYDGSAAAPTAGLHFTKELLQKVKDKGVLIAEVTLHVGLGTFRPVKVENVLDHHMHSEYYQITQEAADLINQTKANGHRVISVGTTSTRTLESAADENGFLKATSGWTQIFIYPGYQFKVIDCLITNFHLPESTLVMLVSALAGREHVLAAYEEAVKERYRFFSFGDAMFITDDEK

SEQ ID NO: 62979 - protein, 341 aa, unidentified
  source 1..341: note = Agathobaculum butyriciproducens
  REGION 1..341: note = tr|A0A2U1BBW3|A0A2U1BBW3_9FIRM S-adenosylmethionine:tRNA ribosyltransferase-isomerase; OS = Agathobaculum butyriciproducens OX=1628085 GN=queA PE=3; SV = 1
MKKSDFYFDLPERLIAQHPLEQRDASRLMVLDRRDGSVTHRHFRDLLEYVQPGDCMVFNNSRVIPARLMGHAVGHVTPIEVLLLTDKGDGLWECLTRPGKKTRTGVELTFGDGLLTATVEAVQPDGNRLIRFHYEGIFLEILDKLGTMPLPPYIKEKLDDPERYQTVYSKTPGSAAAPTAGLHFTTELLDALKAKGVKLAFVTLHVGLGTFRPVKEDEITDHIMHSEYYIMDEETAGIINDTRAAGGKIWAVGTTATRTLETIAADDGTVRAQSGWTDIFIYPGYKFKAVDHLVTNFHLPESTLMMLISAFATREMVMNAYQEAIKEEYRFFSFGDSMLLY

SEQ ID NO: 62980 - protein, 363 aa, Aggregatibacter actinomycetemcomitans
  REGION 1..363: note = tr|H0KHC0|H0KHC0_AGGAC S-adenosylmethionine:tRNA ribosyltransferase-isomerase OS=Aggregatibacter actinomycetemcomitans RhAA1 OX=1089447 GN=queA PE=3 SV=1
MRVADFYFDLPDELIARYPKAERTASRLLQLNGENGEIFHRTFADVLELINPGDLMIFNNTRVIPARMFGRKISGGKIEVLVERVLSDSRFLAHVRASKAPKEGAELILGEDKLGEGNGVNATMIGRQGSLFEIEITEKQTALFDVLQKIGHMPLPPYIDRPDEEADQERYQTVYNKVPGAVAAPTAGLHFDDELLAQLNAKGVNFAFVTLHVGAGTFQPVRVENIEDHVMHVEYVEVPQKVCDAILATKKAGKRVIAVGTTSVRSIESAALAAEEKQSAVLIEPYFSDTSIFIYPGKSFRVVDCLITNFHLPESTLIMLVSAFAGFSHTMNAYKSAVENRYRFFSYGDAMFISKNPDVKGLE

SEQ ID NO: 62981 - protein, 363 aa, Aggregatibacter actinomycetemcomitans
  REGION 1..363: note = tr|A0A142FYC7|A0A142FYC7_AGGAC S-adenosylmethionine:tRNA ribosyltransferase-isomerase; OS = Aggregatibacter actinomycetemcomitans OX=714 GN=queA; PE = 3 SV=1
MRVADFYFDLPDELIARYPKTERTASRLLQLDGENGEIFHRTFADVLELINPGDLMIFNNTRVIPARMFGRKSSGGKIEVLVERVLSESRFLAHVRASKAPKEGTELILGEDKLGEGHGVNAVMVGRQGSLFEIEITEKQTALFDVLQKIGHMPLPPYIDRPDEEADQERYQTVYNKVPGAVAAPTAGLHFDDELLAKLNAKGVNFAFVTLHVGAGTFQPVRVENIEDHVMHAEYVEVPQEVCDAILATQKAGKRVIAVGTTSVRSIESAALAAEQKKSAVLIEPYFSDTSIFIYPGKSFRVVDCLITNFHLPESTLIMLVSAFAGFSHTMNAYKSAVENRYRFFSYGDAMFISKNPDVKGLK

SEQ ID NO: 62982 - protein, 363 aa, Aggregatibacter aphrophilus
  REGION 1..363: note = tr|A0A3S4Q6K5|A0A3S4Q6K5_AGGAP S-adenosylmethionine:tRNA ribosyltransferase-isomerase; OS = Aggregatibacter aphrophilus ATCC 33389 OX=985008; GN = queA PE=3 SV=1
MRVADFNFDLPDELIARYPKPERTASRLLQLNGENGEIFHRTFADVLDLIQPGDLVVFNNTRVIPARMFGRKTSGGKLEVLVERVLSESRFLAHVRSSKAPKAGAELILGEDKLGEGNGVKAIMLGRQDSLFEIEIAEKQTALFDVLQQIGHMPLPPYIDRPDEEADQERYQTVYNKVPGAVAAPTAGLHFDDELLAKLKEKGVNFAFVTLHVGAGTFQPVRVENIEDHVMHAEYVEVPQSVCDAILTTKQAGKRVIAVGTTSVRSIESAALAAEEKQSAVLIEPYFSDTSIFIYPGKKFRIVDCLITNFHLPESTLIMLVSAFAGFSHTMNAYKSAVENRYRFFSYGDAMFINKNPNVKGLE

SEQ ID NO: 62983 - protein, 305 aa, Aggregatibacter aphrophilus
  REGION 1..305: note = tr|A0A336N4P8|A0A336N4P8_AGGAP S-adenosylmethionine:tRNA ribosyltransferase-isomerase; OS = Aggregatibacter aphrophilus OX=732 GN=queA PE=3 SV=1
MRVADFNFDLPDELIARYPKPERTASRLLQLNGENGEIFHRTFADVLDLIQPGDLVVFNNTRVIPARMFGRKTSGGKLEVLVERVLSESRFLAHVRSSKAPKAGAELILGEDKLGEGNGVKAIMLGRQDSLFEIEIAEKQTALFDVLQQIGHMPLPPYIDRPDEEADQERYQTVYNKVPGAVAAPTAGLHFDDELLAKLKEKGVNFAFVTLHVGAGTFQPVRVENIEDHVMHAEYVEVPQSVCDAILTTKQAGKRVIAVGTTSVRSIESAALAAEEKQSAVLIEPYFSDTSILFTQAKSSASWIV

SEQ ID NO: 62984 - protein, 363 aa, Aggregatibacter segnis
  REGION 1..363: note = tr|E6KYW1|E6KYW1_9PAST S-adenosylmethionine:tRNA ribosyltransferase-isomerase OS=Aggregatibacter segnis ATCC 33393 OX=888057 GN=queA2 PE=3 SV=1
MRVADFYFDLPDELIARYPKTERTASRLLQLNGENGDIFHRTFADVLELIHPGDLMIFNNTRVIPARMFGRKISGGKIEVLVERVLSESRFLAHVRASKAPKEGAELILGEDKLGEGNGVKALMVGRQGSLFEIEIAEKQTALFDVLQQIGHMPLPPYIDRPDEEADQERYQTVYNKVPGAVAAPTAGLHFDDELLAKLKEKGVNFAFVTLHVGAGTFQPVRVENIEDHVMHAEYVEVSQEVCDAIFATKKAGKRVIAVGTTSVRSIESAALAAEEKQRDVLIEPYFSDTSIFIYPGKKFRVVDCLITNFHLPESTLIMLVSAFAGFSHTMNAYKSAVENRYRFFSYGDAMFISKNPHVKGME

SEQ ID NO: 62985 - protein, 363 aa, Aggregatibacter segnis
  REGION 1..363: note = tr|A0A369Y7S0|A0A369Y7S0_9PAST S-adenosylmethionine:tRNA ribosyltransferase-isomerase; OS = Aggregatibacter segnis OX=739 GN=queA PE=3 SV=1
MRVADFYFDLPDELIARYPKTERTASRLLQLNGENGDIFHRTFADVLELIHPGDLMIFNNTRVIPARMFGRKISGGKIEVLVERVLSESRFLAHVRASKAPKEGAELILGEDKLGEGNGVKATMIGRQGSLFEIEIAEKQTALFDVLQQIGHMPLPPYIDRPDEEADQERYQTVYNKVPGAVAAPTAGLHFDDELLAKLKEKGVNFAFVTLHVGAGTFQPVRVENIEDHVMHAEYVEVPQEVCDAILATKKAGKRVIAVGTTSVRSIESAALAAEEKQAATLIEPYFSDTSIFIYPGKQFRVVDCLITNFHLPESTLIMLVSAFAGFRHTMNAYKSAVENHYRFFSYGDAMFISKNPNVKGME

SEQ ID NO: 62986 - protein, 363 aa, Aggregatibacter sp.
  REGION 1..363: note = tr|U1S4E4|U1S4E4_9PAST S-adenosylmethionine:tRNA ribosyltransferase-isomerase OS=Aggregatibacter sp. oral taxon 458 str. W10330 OX=1321772 GN=queA PE=3 SV=1
MRVADFYFDLPDELIARYPKTERTASRLLQLNGENGDIFHRTFADVLELIHPGDLMIFNNTRVIPARMFGRKISGGKIEVLVERVLSESRFLAHVRASKAPKEGAELILGEDKLGEGNGVKALMVGRQGSLFEIEIAEKQTALFDVLQQIGHMPLPPYIDRPDEEADQERYQTVYNKVPGAVAAPTAGLHFDDELLAKLKEKGVNFAFVTLHVGAGTFQPVRVENIEDHVMHAEYVEVPQEVCDAILATKKAGKRVIAVGTTSVRSIESAALAAEEKQGAALIEPYFSDTSIFIYPGKKFRIVDCLITNFHLPESTLIMLVSAFAGFSHTMNAYKSAVENRYRFFSYGDAMFISKNPNVKGME

SEQ ID NO: 62987 - protein, 343 aa, Agitococcus lubricus
  REGION 1..343: note = tr|A0A2T5J102|A0A2T5J102_9LACT S-adenosylmethionine:tRNA ribosyltransferase-isomerase; OS = Agitococcus lubricus OX=1077255 GN=queA PE=3 SV=1
MQLSDFSYHLPDELIARYPLAQRSASRLLYLSQQGVQHKQVVDLPSLIKPNDLLVFNDTRVLAARLYGQKSSGGKVEVLIERIINDDTALVHLRASKSPKAGAQLLFANGQVQAQMLDRVEDLFKLQFSQPIRGVLAQYGEMPLPPYLNRQVEQADSERYQTVYSDPNKQNSVAAPTAGLHFDEALLANINAVGANFAYVTLHVGAGTFRPVKTEDIRDHQMHSEWLNVPQETVQAIKDTKAKGGRVIAIGTTSVRALESAALYNEGQLKAWSGETQIFIYPSYQWKVVDALFTNFHLPESTLLMLVCAFAGKEAVMNAYAQAVEQKYRFFSYGDAMFVEKSG

SEQ ID NO: 62988 - protein, 364 aa, unidentified
  source 1..364: note = Agrobacterium albertimagni
  REGION 1..364: note = tr|K2QSD4|K2QSD4_9RHIZ S-adenosylmethionine:tRNA ribosyltransferase-isomerase OS=Agrobacterium albertimagni AOL15 OX=1156935 GN=queA PE=3 SV=1
MRVDLFDFDLPDDNIALRPASPRDHARFLVVRPEDEPVLEDHHVYDLPSFLRPGDALVFNDTKVIPAQLEGIRHREGAEEIAVSCTLHMRVSTSRWKAFAKPGKRIKQGDRIDFGVGQGESAACLAGSLVATVAEKGEAGEITLAFDLSGPDLDQAIATVGHIPLPPYIAAKRPEDEKDRADYQTIYAREEGAVAAPTAGLHFTPDLFAKLDAAGIERHFVTLHVGAGTFLPVKADDTAEHKMHEEIGHIDAKTAAALNAVRARGNRIIAVGTTSLRLLESAAEDNGHIPAWSGATGIFITPGYRFKAVDLLMTNFHLPKSTLFMLVSAFAGLDTMRQAYAHAIETGYRFYSYGDSSLLFRKDD

SEQ ID NO: 62989 - protein, 360 aa, unidentified
  source 1..360: note = Agrobacterium arsenijevicii
  REGION 1..360: note = tr|A0A0D8KM89|A0A0D8KM89_9RHIZ S-adenosylmethionine:tRNA ribosyltransferase-isomerase; OS = Agrobacterium arsenijevicii OX=1585697 GN=queA PE=3 SV=1
MRVDLFDFDLPEENIALRPANPRDSARLLVVDPNVGRMEDHRVFDLISFLKPGDALVFNDTRVIPAQLEGVRLREGAPETQVSATLHMRADQSRWKAFARPGKRIKQGDRIRFGYERDNACGLAHLEATVEEKGEEGEITLLFDVSGPVLDEAIASVGHIPLPPYIAAKRPEDAQDQTDYQTIYAREKGAVAAPTAGLHFTPDLFEALDKAGIERHFVTLHVGAGTFLPVKSDDTDDHKMHFEIGHVSEETAAKLNAVKARGGRIVSVGTTSLRLIESATDENGVVQPWSGATGIFITPGYKFRAVDILMTNFHLPKSTLFMLVSAFCGLETMRDAYAHAIESGYRFYSYGDSSLLFRKN

SEQ ID NO: 62990 - protein, 360 aa, unidentified
  source 1..360: note = Agrobacterium bohemicum
  REGION 1..360: note = tr|A0A135P6A2|A0A135P6A2_9RHIZ S-adenosylmethionine:tRNA ribosyltransferase-isomerase; OS = Agrobacterium bohemicum OX=2052828 GN=queA PE=3 SV=1
MRVDLFDFDLPDDNIALRPASPRDSARLLVVDPNAGSMADHQVFDLPSFLKPGDALVFNDTRVIPAQLEGVRLREGAPETAVSATLHMRTDASRWKAFARPGKRIKQGDRIRFGYERDNACSLAFLEATVEEKGEEGEITLLFDVSGPVLDEAIASVGHIPLPPYIAAKRPEDAQDQTDYQTIYAREKGAVAAPTAGLHFTPELFEKLDQAGVERHFVTLHVGAGTFLPVKADDTEEHKMHLEIGYVSEETAAKLNAVKARGGRIICVGTTSLRLIESAATDEGQIKPWSGPTGIFITPGYRFKAVDILMTNFHLPKSTLFMLVSAFCGLDTMRNAYAHAISTGYRFYSYGDSSLLFRKI

SEQ ID NO: 62991 - protein, 360 aa, unidentified
  source 1..360: note = Agrobacterium deltaense
  REGION 1..360: note = tr|A0A1S7TKI3|A0A1S7TKI3_9RHIZ S-adenosylmethionine:tRNA ribosyltransferase-isomerase; OS = Agrobacterium deltaense NCPPB 1641 OX=1183425 GN=queA; PE = 3 SV=1
MRVDLFDFDLPEENIALRPANPRDSARLLVVDPNENRMEDHRVFDLPSFLKPGDALVFNDTRVIPAQLEGVRLREGAPETAVSATLHMRADQSRWKAFARPGKRIKQGDRIRFGYERDNACGFAHLEATVEEKGEEGEITLLFDVSGPVLDEAIASVGHIPLPPYIAAKRPEDAQDQTDYQTIYAREKGAVAAPTAGLHFTPDLFAALDKVGIERHFVTLHVGAGTFLPVKSDDTDDHKMHFEVGHVSQETADRLNAVKARGGRIVCVGTTSLRLIESAADENGVVHPWSDATGIFITPGYRFRAVDILMTNFHLPKSTLFMLVSAFCGLETMRDAYKHAIETGYRFYSYGDSSLLFRKN

SEQ ID NO: 62992 - protein, 360 aa, unidentified
  source 1..360: note = Agrobacterium deltaense
  REGION 1..360: note = tr|A0A1S7P9V1|A0A1S7P9V1_9RHIZ S-adenosylmethionine:tRNA ribosyltransferase-isomerase; OS = Agrobacterium deltaense Zutra 3/1 OX=1183427 GN=queA; PE = 3 SV=1
MRVDLFDFDLPEENIALRPANPRDSARLLVIDPNEDRMEDHRVFDLPSFLKPGDALVFNDTRVIPAQLEGVRLREGAPETAVSATLHMRTDQSRWKAFARPGKRIKQGDRIRFGYERDNACGLAHLEATVEEKGEDGEITLLFDVSGPVLDEAIASVGHIPLPPYIAAKRPEDAQDQTDYQTIYAREKGAVAAPTAGLHFTPDLFAALDKVGIERHFVTLHVGAGTFLPVKSDDTDDHKMHFEIGHVSQETADRLNAVKARGGRIVCVGTTSLRLIESAADENGVIHPWSDATGIFITPGYRFRAVDILMTNFHLPKSTLFMLVSAFCGLETMRDAYRRAIETGYRFYSYGDSSLLFRKN

SEQ ID NO: 62993 - protein, 366 aa, unidentified
  source 1..366: note = Agrobacterium fabrum
  REGION 1..366: note = sp|Q8UES7|QUEA_AGRFC S-adenosylmethionine:tRNA ribosyltransferase-isomerase OS=Agrobacterium fabrum (strain C58 / ATCC 33970) OX=176299 GN=queA PE=3 SV=2
MRVDLFDFDLPEENIALRPANPRDSARLLVVDPNENRMEDHRVFDLPSFLRPGDALVFNDTRVIPAQLEGVRLREGAPETAVSATLHMRADQSRWKAFARPGKRIKEGDRIRFGYDRDTVNSSSGACGLAHLEATVEEKGEEGEITLLFDISGPVLDEAIASVGHIPLPPYIAAKRPEDQQDQTDYQTIYAREKGAVAAPTAGLHFTPDLFEALDSAGIERHFVTLHVGAGTFLPVKSDDTDDHKMHFEIGYVSQETADRLNAVKARGGRIVCVGTTSLRLIESAATEDGTIHPWSDATGIFITPGYRFRAVDMLMTNFHLPKSTLFMLVSAFCGLETMRDAYRHAIETGYRFYSYGDSSLLFRKN

SEQ ID NO: 62994 - protein, 366 aa, unidentified
  source 1..366: note = Agrobacterium fabrum
  REGION 1..366: note = tr|A0A3G2D445|A0A3G2D445_9RHIZ S-adenosylmethionine:tRNA ribosyltransferase-isomerase; OS = Agrobacterium fabrum OX=1176649 GN=queA PE=3 SV=1
MRVDLFDFDLPEENIALRPANPRDSARLLVVDPNENRMEDHRVFDLPSFLRPGDALVFNDTRVIPAQLEGVRLREGAPETAVSATLHMRADQSRWKAFARPGKRIKEGDRIRFGYERDTVNSSSGACGLAHLEATVEEKGEEGEITLLFDVSGPVLDEAIASIGHIPLPPYIAAKRPEDQQDQTDYQTIYAREKGAVAAPTAGLHFTPDLFEALDSAGIERHFVTLHVGAGTFLPVKSDDTDDHKMHFEIGYVSQETADRLNAVKARGGRIVCVGTTSLRLIESAATEDGTIHPWSDATGIFITPGYRFRAVDMLMTNFHLPKSTLFMLVSAFCGLETMRDAYKHAIETGYRFYSYGDSSLLFRKN

SEQ ID NO: 62995 - protein, 360 aa, unidentified
  source 1..360: note = Agrobacterium genomosp.
  REGION 1..360: note = tr|A0A1S7P9Q6|A0A1S7P9Q6_9RHIZ S-adenosylmethionine:tRNA ribosyltransferase-isomerase; OS = Agrobacterium genomosp. 3 str. CFBP 6623 OX=1183432; GN = queA PE=3 SV=1
MRVDLFDFDLPEENIALRPANPRDSARLLVVDPNENRMEDHRVFDLPSFLRPGDALVFNDTRVIPAQLEGVRLREGAPETAVSATLHMRADQSRWKAFARPGKRIKEGDRIRFGYERDNACGLAHLEATVEAKGEDGEITLLFDVSGPVLDEAIASVGHIPLPPYIAAKRPEDAQDQSDYQTIYAREKGAVAAPTAGLHFTPDLFAALDKAGIERHFVTLHVGAGTFLPVKSDDTDDHKMHFEIGQVSQETADRLNAVKARGGRIVCVGTTSLRLIESAADENGVIHPWSDATGIFITPGYRFRAVDILMTNFHLPKSTLFMLVSAFCGLETMRDAYKRAIETGYRFYSYGDSSLLFRKN

SEQ ID NO: 62996 - protein, 360 aa, unidentified
  source 1..360: note = Agrobacterium genomosp.
  REGION 1..360: note = tr|A0A1S7MA46|A0A1S7MA46_9RHIZ S-adenosylmethionine:tRNA ribosyltransferase-isomerase; OS = Agrobacterium genomosp. 2 str. CFBP 5494 OX=1183436; GN = queA PE=3 SV=1
MRVDLFDFDLPEENIALRPANPRDSARLLVVDPNENRMEDHRVFDLPSFLRAGDALVFNDTRVIPAQLEGVRLREGAPETAVSATLHMRADQSRWKAFARPGKRIKQGDRIRFGYERDNACGLAHLEATVEQKGEEGEITLLFDVSGPVLDEAIASIGHIPLPPYIAAKRPEDAQDQTDYQTIYAREKGAVAAPTAGLHFTPDLFAALDKAGIERHFVTLHVGAGTFLPVKADDTDDHKMHFEIGHVSQETADRLNAVKARGGRIVCVGTTSLRLIESAAAEDGTIHPWSDATGIFITPGYRFRAVDMLMTNFHLPKSTLFMLVSAFCGLETMRDAYKHAIETGYRFYSYGDSSLLFRKN

SEQ ID NO: 62997 - protein, 360 aa, unidentified
  source 1..360: note = Agrobacterium larrymoorei
  REGION 1..360: note = tr|A0A4D7DNP5|A0A4D7DNP5_9RHIZ S-adenosylmethionine:tRNA ribosyltransferase-isomerase; OS = Agrobacterium larrymoorei OX=160699 GN=queA PE=3 SV=1
MRVDLFDFDLPEENIALRPANPRDSARLLVVDPNTDRMTDHQVFDLPTFLKPGDALVFNDTRVIPAQLEGVRLREGAQETAVSATLHMRADASRWKAFARPGKRIKQGDRIRFGYERDNACGLAFLEATVEEKGDEGEITLLFDVSGPALDEAIASVGHIPLPPYIAAKRPEDAQDQTDYQTIYAREKGAVAAPTAGLHFTPALFEALDKAGIERHFVTLHVGAGTFLPVKADDTADHKMHLEIGYVSEETAEKLNAVKARGGRIICVGTTSLRLIESAAGDDGQILPWSGATGIFITPGYRFKAVDILMTNFHLPKSTLFMLVSAFCGLETMRAAYAHAIETGYRFYSYGDSSLLFRKI

SEQ ID NO: 62998 - protein, 360 aa, unidentified
  source 1..360: note = Agrobacterium larrymoorei
  REGION 1..360: note = tr|A0A4Z1PUI3|A0A4Z1PUI3_9RHIZ S-adenosylmethionine:tRNA ribosyltransferase-isomerase; OS = Agrobacterium larrymoorei OX=160699 GN=queA PE=3 SV=1
MRVDLFDFDLPEENIALRPANPRDSARLLVVDPNTDRMTDHQVFDLPTFLKPGDALVFNDTRVIPAQLEGVRLREGAQETAVSATLHMRADASRWKAFARPGKRIKQGDRIRFGYERDNACGLAFLEATVEEKGDEGEITLLFDVSGPVLDEAIASVGHIPLPPYIAAKRPEDAQDQTDYQTIYAREKGAVAAPTAGLHFTPALFEALDRAGIERHFVTLHVGAGTFLPVKADDTADHKMHLEIGYVSEETAEKLNAVKARGGRIICVGTTSLRLIESAAGDDGQILPWSGATGIFITPGYRFKAVDILMTNFHLPKSTLFMLVSAFCGLETMRAAYAHAIETGYRFYSYGDSSLLFRKI

SEQ ID NO: 62999 - protein, 360 aa, unidentified
  source 1..360: note = Agrobacterium radiobacter
  REGION 1..360: note = tr|W1L7Q7|W1L7Q7_RHIRD S-adenosylmethionine:tRNA ribosyltransferase-isomerase OS=Agrobacterium radiobacter DSM 30147 OX=1336745 GN=queA PE=3 SV=1
MRVDLFDFDLPEENIALRPANPRDSARLLVVDPNENRMEDHRVFDLPSFLKPGDALVFNDTRVIPAQLEGVRLREGAPETAVSATLHMRADQSRWKAFARPGKRIKQGDRIRFGYERDNACGLAHLEATVEEKGEEGEITLLFDVSGPVLDEAIASVGHIPLPPYIAAKRPEDAQDQTDYQTIYAREKGAVAAPTAGLHFTPDLFAALDKVGIERHFVTLHVGAGTFLPVKSDDTDDHKMHFEIGHVSQETADRLNAVKARGGRIVCVGTTSLRLIESAADENGVIHPWSDATGIFITPGYRFRAVDILMTNFHLPKSTLFMLVSAFCGLETMRDAYKHAIETGYRFYSYGDSSLLFRKN

SEQ ID NO: 63000 - protein, 360 aa, unidentified
  source 1..360: note = Agrobacterium radiobacter
  REGION 1..360: note = sp|B9JFA8|QUEA_AGRRK S-adenosylmethionine:tRNA ribosyltransferase-isomerase OS=Agrobacterium radiobacter (strain K84 / ATCC BAA-868) OX=311403 GN=queA PE=3 SV=1
MRVDLFDFDLPDERIALRPAEPRDSARLLVVDPNAEMVLSDRQIRDLSSYLRPGDAIVFNDTKVIPAQLEGIRHREGAPGQQVSATLHMRAAPDRWKAFAKPGKRIKIGDRIQFGHGENVCALGALDAVVEEKGEGGEITLRFDLSGPALDEAIAAVGHIPLPPYIAAKRPEDERDRADYQTIYAREEGAVAAPTAGLHFTPSLFATLDAMGVERHFVTLHVGAGTFLPVKADDTEDHKMHFEIGHVDAATAEKLNAVKARGGRIVCVGTTSLRLLESAAAEDGTIKPWSGATGIFITPGYRFKTVDLLMTNFHLPRSTLFMLVSAFAGLDTMRAAYTHAIETGYRFYSYGDGSLLHRKD

SEQ ID NO: 63001 - protein, 360 aa, unidentified
  source 1..360: note = Agrobacterium rhizogenes
  REGION 1..360: note = tr|A0A178HBK6|A0A178HBK6_AGRRH S-adenosylmethionine:tRNA ribosyltransferase-isomerase; OS = Agrobacterium rhizogenes OX=359 GN=queA PE=3 SV=1
MRVDLFDFDLPEENIALRPANPRDSARLLVVDPNENRMEDHRVFNLPSFLRPGDALVFNDTRVIPAQLEGVRLREGAPETSVSATLHMRADQSRWKAFARPGKRIKEGDRIRFGYERDNACGLAHLEATVEEKGEDGEITLLFDVSGPVLDEAIASVGHIPLPPYIAAKRPEDQRDQTDYQTIYAREKGAVAAPTAGLHFTPDLFEALDKAGIERHFVTLHVGAGTFLPVKSDDTDDHKMHFEIGHVSQETADRLNAVKARGGRIVCVGTTSLRLIESAADENGVIHPWSDATGIFITPGYRFRAVDMLMTNFHLPKSTLFMLVSAFCGLETMRDAYKRAIETGYRFYSYGDSSLLFRKN

SEQ ID NO: 63002 - protein, 360 aa, unidentified
  source 1..360: note = Agrobacterium rhizogenes
  REGION 1..360: note = tr|A0A546XJV1|A0A546XJV1_AGRRH S-adenosylmethionine:tRNA ribosyltransferase-isomerase; OS = Agrobacterium rhizogenes OX=359 GN=queA PE=3 SV=1
MRVDLFDFDLPEENIALRPANPRDSARLLVVDPNENRMEDHHVFNLPSFLRPGDALVFNDTRVIPAQLEGVRLREGAPETAVSATLHMRTDQSRWKAFARPGKRIKEGDRIRFGYERDNACGLAHLEATVEEKGEDGEITLLFDVSGPVLDEAIASVGHIPLPPYIAAKRPEDQQDQTDYQTIYAREKGAVAAPTAGLHFTPDLFEALDKAGIERHFVTLHVGAGTFLPVKSDDTDDHKMHFEIGHVSQETADRLNAVKARGGRIICVGTTSLRLIESAADENGVIHPWSDATGIFITPGYRFRAVDMLMTNFHLPKSTLFMLVSAFCGLETMRDAYRRAIETGYRFYSYGDSSLLFRKN

SEQ ID NO: 63003 - protein, 360 aa, unidentified
  source 1..360: note = Agrobacterium rosae
  REGION 1..360: note = tr|A0A2S4EF44|A0A2S4EF44_9RHIZ S-adenosylmethionine:tRNA ribosyltransferase-isomerase; OS = Agrobacterium rosae OX=1972867 GN=queA PE=3 SV=1
MRVDLFDFHLPDDNIALRPASPRDSARLLVVDPNAGSMTDHQVFDLPSFLKPGDALVFNDTRVIPAQLEGVRLREGAPETAVSATLHMRADASRWKAFARPGKRIKQGDRIRFGYERDNACGLAFLEATVEEKGEEGEITLLFDVSGPVLDEAIASVGHIPLPPYIAAKRQEDAQDQTDYQTIYAREKGAVAAPTAGLHFTPALFEALDAAGIERHFVTLHVGAGTFLPVKADDTEEHKMHLEIGTVSEETAAKLNAVKARGGRIVCVGTTSLRLIESAATDDGQIMPWSGPTGIFITPGYRFKAVDILMTNFHLPKSTLFMLVSAFCGLETMREAYGRAIKTGYRFYSYGDSSLLFRKI

SEQ ID NO: 63004 - protein, 360 aa, unidentified
  source 1..360: note = Agrobacterium rubi
  REGION 1..360: note = tr|A0A1B9T836|A0A1B9T836_9RHIZ S-adenosylmethionine:tRNA ribosyltransferase-isomerase; OS = Agrobacterium rubi OX=28099 GN=queA PE=3 SV=1
MRVDLFDFDLPDDNIALRPASPRDSARLLVVDPNADSMTDHHVFDLPSFLKPGDALVFNDTRVIPAQLEGVRLREGAPETAVSATLHMRADASRWKAFARPGKRIKQGDRIRFGYERDNACGLAFLEATVEEKGEEGEITLLFDVSGPVLDEAIASVGHIPLPPYIAAKRPEDAQDQTDYQTIYAREKGAVAAPTAGLHFTPALFEALDAAGIERHFVTLHVGAGTFLPVKADDTEEHKMHFEIGTVSEETAAKLNAVKARGGRIVCVGTTSLRLIESAARDDGQIAPWSGATGIFITPGYRFKAVDILMTNFHLPKSTLFMLVSAFCGLETMREAYRHAIDTGYRFYSYGDSSLLFRKT

SEQ ID NO: 63005 - protein, 360 aa, unidentified
  source 1..360: note = Agrobacterium rubi
  REGION 1..360: note = tr|A0A081CWF5|A0A081CWF5_9RHIZ S-adenosylmethionine:tRNA ribosyltransferase-isomerase; OS = Agrobacterium rubi TR3 = NBRC 13261 OX=1368415 GN=queA; PE = 3 SV=1
MRVDLFDFDLPDDNIALRPASPRDSARLLVVDPNANSMTDHNVFDLPSFLKPGDALVFNDTRVIPAQLEGVRLREGAPETAVSATLHMRADASRWKAFARPGKRIKQGDRIRFGYERDNACGLAFLEATVEEKGEEGEITLLFDVSGPVLDEAIASVGHIPLPPYIAAKRPEDAQDQTDYQTIYAREKGAVAAPTAGLHFTPALFEALDAAGIERHFVTLHVGAGTFLPVKADDTEEHKMHFEIGTVSEETAAKLNAVKARGGRIVCVGTTSLRLIESAARDDGQIAPWSGATGIFITPGYRFKAVDILMTNFHLPKSTLFMLVSAFCGLETMREAYRHAIETGYRFYSYGDSSLLFRKT

SEQ ID NO: 63006 - protein, 360 aa, unidentified
  source 1..360: note = Agrobacterium salinitolerans
  REGION 1..360: note = tr|A0A4Z1R6N4|A0A4Z1R6N4_9RHIZ S-adenosylmethionine:tRNA ribosyltransferase-isomerase; OS = Agrobacterium salinitolerans OX=1183413 GN=queA PE=3; SV = 1
MRVDLFDFDLPEENIALRPANPRDSARLLVVDPNENRMEDHRVFDLPSFLRPGDALVFNDTRVIPAQLEGVRLREGAPETAVSATLHMRADQSRWKAFARPGKRIKEGDRIRFGYERDNACGLAHLEATVEEKGEDGEITLLFDVSGPVLDEAIASVGHIPLPPYIAAKRPEDVQDQTDYQTIYAREKGAVAAPTAGLHFTPELFAALDKAGIERHFVTLHVGAGTFLPVKADDTDDHKMHFEIGHVSQETADRLNAVKARGGRIVCVGTTSLRLIESAATEDGAIHPWSNATGIFITPGYRFRAVDMLMTNFHLPKSTLFMLVSAFCGLETMRDAYKHAIETGYRFYSYGDSSLLFRKN

SEQ ID NO: 63007 - protein, 360 aa, unidentified
  source 1..360: note = Agrobacterium salinitolerans
  REGION 1..360: note = tr|A0A1S7U5Q8|A0A1S7U5Q8_9RHIZ S-adenosylmethionine:tRNA ribosyltransferase-isomerase; OS = Agrobacterium salinitolerans str. Hayward 0363; OX = 1183434 GN=queA PE=3 SV=1
MRVDLFDFDLPEENIALRPANPRDSARLLVVDPNQDRMEDHRVFDLPSFLRPGDALVFNDTRVIPAQLEGVRLREGAPETAVSATLHMRADQSRWKAFARPGKRIKEGDRIRFGYERDNACGLAHLEATVEEKGEDGEITLLFDVSGPVLDEAIASVGHIPLPPYIAAKRPEDQQDQTDYQTIYAREKGAVAAPTAGLHFTPELFAALDKAGIERHFVTLHVGAGTFLPVKADDTDDHKMHFEIGHVSQETADRLNAVKARGGRIVCVGTTSLRLIESAAAEDGTIQPWSDATGIFITPGYRFRAVDILMTNFHLPKSTLFMLVSAFCGLETMRDAYKHAIETGYRFYSYGDSSLLFRKN

SEQ ID NO: 63008 - protein, 360 aa, unidentified
  source 1..360: note = Agrobacterium sp.
  REGION 1..360: note = tr|A0A437KTK3|A0A437KTK3_9RHIZ S-adenosylmethionine:tRNA ribosyltransferase-isomerase; OS = Agrobacterium sp. CNPSo 2736 OX=2499627 GN=queA PE=3; SV = 1
MRVDLFDFDLPEENIALRPANPRDSARLLVVDPNENRMEDHRVFDLPSFLKPGDALVFNDTRVIPAQLEGVRLREGAPETAVSATLHMRTDQSRWKAFARPGKRIKQGDRIRFGYERDNACGLAHLEATVEEKGEDGEITLLFDVSGPVLDEAIASVGHIPLPPYIAAKRPEDAQDQTDYQTIYAREKGAVAAPTAGLHFTPDLFAALDKVGIERHFVTLHVGAGTFLPVKSDDTDDHKMHFEIGHVSQETADRLNAVKARGGRIVCVGTTSLRLIESAADENGVIHPWSDATGIFITPGYRFKAVDILMTNFHLPKSTLFMLVSAFCGLETMRDAYRRAIETGYRFYSYGDSSLLFRKN

SEQ ID NO: 63009 - protein, 360 aa, unidentified
  source 1..360: note = Agrobacterium sp.
  REGION 1..360: note = tr|A0A0X6ZT08|A0A0X6ZT08_9RHIZ S-adenosylmethionine:tRNA ribosyltransferase-isomerase; OS = Agrobacterium sp. D14 OX=1336743 GN=queA PE=3 SV=1
MRVDLFDFDLPEENIALRPANPRDSARLLVVDPNENRMEDHRVFDLPSFLKPGDALVFNDTRVIPAQLEGVRLREGAPETAVSATLHMRADQSRWKAFARPGKRIKQGDRIRFGYERDNACGLAHLEATVEEKGEEGEITLLFDVSGPVLDEAIASVGHIPLPPYIAAKRPDDAQDQTDYQTIYAREKGAVAAPTAGLHFTPDLFAALDKVGIERHFVTLHVGAGTFLPVKSDDTDDHKMHFEIGHVSRETADRLNAVKARGGRIVCVGTTSLRLIESAADENGVVHPWSDATGIFITPGYRFRAVDILMTNFHLPKSTLFMLVSAFCGLETMRDAYKHAIETGYRFYSYGDSSLLFRKN

SEQ ID NO: 63010 - protein, 360 aa, unidentified
  source 1..360: note = Agrobacterium tumefaciens
  REGION 1..360: note = tr|A0A1S7QT61|A0A1S7QT61_RHIRD S-adenosylmethionine:tRNA ribosyltransferase-isomerase; OS = Agrobacterium tumefaciens str. Kerr 14 OX=1183424; GN = queA PE=3 SV=1
MRVDLFDFDLPEENIALRPANPRDSARLLVVDPNENRMEDHRVFDLPSFLKPGDALVFNDTRVIPAQLEGVRLREGAPETAVSATLHMRADQSRWKAFARPGKRIKEGDRIRFGYERDNACGLAHLEATVEEKGEEGEITLLFDVSGPVLDEAIASVGHIPLPPYIAAKRPEDAQDQTDYQTIYAREKGAVAAPTAGLHFTPDLFEALDGVGVERHFVTLHVGAGTFLPVKSDDTDDHKMHFEIGHVSQETAARLNAVKARGGRIVCVGTTSLRLIESAASEDGVIHPWSGPTGIFITPGYRFRAVDILMTNFHLPKSTLFMLVSAFCGLETMRDAYKHAIETGYRFYSYGDSSLLFRKN

SEQ ID NO: 63011 - protein, 360 aa, unidentified
  source 1..360: note = Agrobacterium tumefaciens
  REGION 1..360: note = tr|M8AUT3|M8AUT3_RHIRD S-adenosylmethionine:tRNA ribosyltransferase-isomerase OS=Agrobacterium tumefaciens str. Cherry 2E-2-2 OX=1281779 GN=queA PE=3 SV=1
MRVDLFDFDLPEENIALRPASPRDSARLLVVDPNENRMEDHRVFDLPSFLKPGDALVFNDTRVIPAQLEGVRLREGAPETAVSATLHMRVDQSRWKAFARPGKRIKQGDRIRFGYERDNACGLAHLEATVEEKGEDGEITLLFDVSGPVLDEAIASVGHIPLPPYIAAKRPEDARDQTDYQTIYAREKGAVAAPTAGLHFTPNLFEALDKVGIERHFVTLHVGAGTFLPVKSDDTDDHKMHFEIGHVSRETADRLNAVKARGGRIVCVGTTSLRLIESAADENGVIHPWSDATGIFITPGYRFRAVDILMTNFHLPKSTLFMLVSAFCGLETMRDAYKHAIETGYRFYSYGDSSLLFRKN

SEQ ID NO: 63012 - protein, 352 aa, unidentified
  source 1..352: note = Agrobacterium vitis
  REGION 1..352: note = sp|B9JWX0|QUEA_AGRVS S-adenosylmethionine:tRNA ribosyltransferase-isomerase OS=Agrobacterium vitis (strain S4 / ATCC BAA-846) OX=311402 GN=queA PE=3 SV=1
MRVDLFDFDLPDENIALRPANPRDQARFLIVRPDGSLMLEDRRVFELPSFLRAGDALVFNDTKVIPAQLEGVRIREGAERTPVSCTLHMRVAANRWKAFARPGKRIKQGDVIDFDGLSANVAEKGEAGEIDLEFAASGPDLDRAIAGVGHIPLPPYIAAKRPEDSQDRTDYQTIYAREEGAVAAPTAGLHFTPALFEALDKAGIERHFVTLHVGAGTFLPVKADDTDDHKMHQEIGHVSAETAEALNAVKARGGRIVSVGTTSLRLLESAASEDGRLLPWSDATGIFITPGYRFKAVDVLMTNFHLPKSTLFMLVSAFAGLETMRAAYAHAIETGYRFYSYGDSSLLFRKDK

SEQ ID NO: 63013 - protein, 352 aa, unidentified
  source 1..352: note = Agrobacterium vitis
  REGION 1..352: note = tr|A0A1S2DQF4|A0A1S2DQF4_AGRVI S-adenosylmethionine:tRNA ribosyltransferase-isomerase; OS = Agrobacterium vitis OX=373 GN=queA PE=3 SV=1
MRVDLFDFDLPDENIALRPANPRDQARFLVVRPDGAPMLEDRKVFELPSFLRAGDALVFNDTKVIPAQLEGVRIREGAERTPVSCTLHMRVAANRWKAFARPGKRIKQGDVIDFDGLLATVTEKGEAGEIDLEFAASGPDLDRAIAGVGHIPLPPYIAAKRPEDGQDRTDYQTIYAREEGAVAAPTAGLHFTPALFEALDKAGIERHFVTLHVGAGTFLPVKADDTDDHKMHQEIGHVSAETAEALNAVKARGGRIVSVGTTSLRLLESAASEDGRILPWSDATGIFITPGYRFKAVDVLMTNFHLPKSTLFMLVSAFAGLETMRAAYAHAIETGYRFYSYGDSSLLFRKDK

SEQ ID NO: 63014 - protein, 351 aa, Agromyces sp.
  REGION 1..351: note = tr|A0A542JQ49|A0A542JQ49_9PSED S-adenosylmethionine:tRNA ribosyltransferase-isomerase; OS = Agromyces sp. SLBN-50 OX=744977 GN=queA PE=3 SV=1
MRVADFQFDLPDSLIARHPLAERRASRLLVLDGPTGALAHRQFADLLEYLRPGDLMVFNDTRVIPARLFGQKASGGKLEVLVERVLDEYRVLAHVRSSKSPKPGSLIHIEGGGEAEMLARHDALFELRFSEPVLPLLDRVGHMPLPPYIDRPDEAADRERYQTVYSDRSKAGAVAAPTAGLHFDEALLTAIRDKGIDTAFVTLHVGAGTFQPVRVERIEDHHMHREWLQVGQDVVDAVSACRARGGRVIAVGTTSVRSLESAARDGELKAFSGDTDIFLYPGKRFHVVDALVTNFHLPESTLLMLVSAFAGYPETMAAYAAAVEQQYRFFSYGDAMFITRNPDPRGPEETL

SEQ ID NO: 63015 - protein, 347 aa, unidentified
  source 1..347: note = Ahniella affigens
  REGION 1..347: note = tr|A0A2P1PY23|A0A2P1PY23_9GAMM S-adenosylmethionine:tRNA ribosyltransferase-isomerase; OS = Ahniella affigens OX=2021234 GN=queA PE=3 SV=1
MRKQDFHFELPKELIASVPLPERSASRLLVLDGESGPLLDRQFRDLSQWLRPGDLLVFNNTKVIPARTFGQKETGGAVEIMLERVLDEHRALAQIRASHAPKPGALITLANGEHVRVGGRIDGFFEIATTTSARNLLDLFEAVGEMPLPHYMERRPEDADRERYQTVYAKNPGAVAAPTAGLHFDQPLLDALHAQGINRCEVTLHVGAGTFQPVRVDDIREHRMHAEWVSVSAETVAQIAATRQAGGRIIAVGTTSVRALESAAASGELQPFSGDTRIFITPGYSFKVIDALITNFHLPESTLLMLVSALAGRERVLAAYAHAVQQRYRFFSYGDAMLILPGGFARD

SEQ ID NO: 63016 - protein, 352 aa, unidentified
  source 1..352: note = Ahrensia marina
  REGION 1..352: note = tr|A0A0M9GMG4|A0A0M9GMG4_9RHOB S-adenosylmethionine:tRNA ribosyltransferase-isomerase; OS = Ahrensia marina OX=1514904 GN=queA PE=3 SV=1
MRVNDFDFELPEKHIALRPAEPRDSAKLLVVKPSGREDSQVSNLAQFLKAGDCLVFNDTKVIPAQLNGIRERDGAPGAEVGFTLHLRGAADSWNAFAKGAKKLRVGDSVTFGADLTARIAEKLDGGEVRLVFNRTGPELDTAIMAVGHVPLPPYIAAKREDDGKDLKDYQTIYAREDGAVAAPTAGLHFTDRLFNSLDKAGIKREFVTLHVGAGTFLPVKVDDTKDHKMHSEIGTISDDVAQRLNAVKQAGGRIVAVGTTSLRLLESAANSDGTLSAWRGATDIFITPGYKFKFVDLLMTNFHLPRSTLMMLVSAFAGYENMRKAYEHAKTHDYRFYSYGDSSLLFPEGSEE

SEQ ID NO: 63017 - protein, 356 aa, Ahrensia sp.
  REGION 1..356: note = tr|A0A2E0IU25|A0A2E0IU25_9RHOB S-adenosylmethionine:tRNA ribosyltransferase-isomerase; OS = Ahrensia sp. OX=1872419 GN=queA PE=3 SV=1
MRVDAFDFDLPEACIAVRPASPRDAARMLVVRPGEPLADAGVRDLTRFLKAGDVLVFNDTKVIPAQLEGDRTRADGAKAHIGATLHMRVAPDCWKAFIRGAKKLKVGDTVDFSANGHQLTAEVLARGVDGEADLRFDRSGGDLDAALALVGHVPLPPYIASKRAEDARDRLDYQTIYAREEGAVAAPTAGLHFTDELFAALDEAGIHRAFVTLHVGAGTFLPVKADDTDAHKMHAEIGHVDEKTAQFLNQARARGGRIVSVGTTSLRLLESATSEEGTIEPWSGATEIFITPGYRFKAIDVLMTNFHLPRSTLFMLVSAFSGLETMQAAYRHAIDTGYRFYSYGDSCLLFPQETAR

SEQ ID NO: 63018 - protein, 356 aa, Ahrensia sp.
  REGION 1..356: note = tr|A0A2E2RJT2|A0A2E2RJT2_9RHOB S-adenosylmethionine:tRNA ribosyltransferase-isomerase; OS = Ahrensia sp. OX=1872419 GN=queA PE=3 SV=1
MRVDAFDFDLPEECIAVRPASPRDAARMLVVRPGETLADAGIRDLPGLLRPGDVLVFNDTKVIPAQLEGDRIRADGAKAHIGATLHMRVAPDCWKAFIRGAKKLKIGDTVDFSANGHGLTAEVLARGDDGEADLRFDRSGGDLDAALALVGHVPLPPYIASKRAEDAQDRLAYQTIYAREEGAVAAPTAGLHFTDGLFAALDEAGIHRAFVTLHVGAGTFLPVKADDTDAHKMHAEIGHVDEKTALFLNEARAKGGRIVSVGTTSLRLLESAASEDGTIEPWSGATDIFITPGYRFRAVDVLMTNFHLPRSTLFMLVSAFCGLETMQAAYRHAIETGYRFYSYGDSSLLFPQETAR

SEQ ID NO: 63019 - protein, 346 aa, Aidingimonas halophila
  REGION 1..346: note = tr|A0A1H2ZR93|A0A1H2ZR93_9GAMM S-adenosylmethionine:tRNA ribosyltransferase-isomerase; OS = Aidingimonas halophila OX=574349 GN=queA PE=3 SV=1
MQRADFHYDLPEELIARYPSEQRSDCRLLCVDGPSGELAHRRFPDLVDLLAPGDLLVFNDTRVIPARLHGHKVSGGKVEMLLERPLDTHRGLAHLRASKAPRPGTQLMFEGDIHAVVEARREAFFELRFLGDTPMIELLERHGHMPLPPYIDRADETSDRDRYQTVYARRDGAVAAPTAGLHFDEPMLERLAAKGVESAFVTLHVGAGTFQPVRVDDIREHDMHSEWLEVDEATCAKVQRTKAAGRRVIAVGTTSVRCLETAAMNAPDGDIAPFQGDTDIFIYPGYEWRCVDALITNFHLPESTLLMLVSSFSGHATVMEAYREAVDRHYAFFSYGDAMFLTRRSP

SEQ ID NO: 63020 - protein, 325 aa, unidentified
  source 1..325: note = Akkermansia glycaniphila
  REGION 1..325: note = tr|A0A1C7PCD1|A0A1C7PCD1_9BACT S-adenosylmethionine:tRNA ribosyltransferase-isomerase; OS = Akkermansia glycaniphila OX=1679444 GN=queA PE=3 SV=1
MRTIDFDYHLPEELIADRPAPHREDSRMLVVHRSTGLIEHRKFTDLLEYVRPGDEFVMNNTKVVPARYFSNDGRIELVRASLHTDLLWKCLVRPGRKMKIGKTVAIGEAIGTVESIDEEGYRLIRFDRPVDEETYGRLALPHYMNRESDPDDKERYQTVYARHEGAIAAPTAGLHFTPEILEQIPHSFVTLHVGVGTFRPVKVDRIEEHHMHTESFVLPEETARRIAAAQRVVAVGTTSVRVLEHLAARNGLPLSPAAGETDIFIYPPYEYKIVDALLTNFHLPQSTLLMLVSALAGRELILEAYRQAVEQRYRFFSYGDCMLIL

SEQ ID NO: 63021 - protein, 329 aa, Akkermansia muciniphila
  REGION 1..329: note = tr|A0A2N8I066|A0A2N8I066_9BACT S-adenosylmethionine:tRNA ribosyltransferase-isomerase; OS = Akkermansia muciniphila OX=239935 GN=queA PE=3 SV=1
MHLAVRTIDFDYPLPEELIADRPLPDRSASRMMVIHRDTGMIEHRHFCDLPEYVREGDHFILNDTRVVPARYFSNDGSIEIVRAEVLNPLLWKCMVRPGRKMKLGRTVAIGEAVGIVEDIDGEGYRLIRFDREVDEEKYGRLALPHYMNRESDPSDKERYQTVYARHEGAIAAPTAGLHFTPELLASVPHDFLTLHVGVGTFRPVKADRIEDHQMHTEHFFLPEAAARAVNNARRVIAVGTTSVRVLEHVATAEGLPLRECAGSTNIFIYPPYNYKVVDALITNFHLPQSTLLMLVSAFAGKELIMKAYLEAIRERYRFFSYGDCMLIL

SEQ ID NO: 63022 - protein, 329 aa, Akkermansia muciniphila
  REGION 1..329: note = tr|A0A2N8ILC2|A0A2N8ILC2_9BACT S-adenosylmethionine:tRNA ribosyltransferase-isomerase; OS = Akkermansia muciniphila OX=239935 GN=queA PE=3 SV=1
MHLAVRTIDFDYPLPEELIADRPLPDRSASRMMVIHRDTGMIEHRHFCDLPEYVREGDHFILNDTRVVPARYFSNDGSIEIVRAEVLNPLLWKCMVRPGRKMKLGRTVAVGEAVGTVEGIDEEGYRLIRFDREVDEEKYGRLALPHYMNRESNPSDRERYQTVYARHEGAIAAPTAGLHFTPELLASVPHDFLTLHVGVGTFRPVKADRIEDHQMHTEHFFLPEAAARAVNNARRVIAVGTTSVRVLEHVATAEGLPLRECAGSTNIFIYPPYNYKVVDALITNFHLPQSTLLMLVSAFAGKELIMKAYLEAIRERYRFFSYGDCMLIL

SEQ ID NO: 63023 - protein, 329 aa, Akkermansia sp.
  REGION 1..329: note = tr|R7E138|R7E138_9BACT S-adenosylmethionine:tRNA ribosyltransferase-isomerase OS=Akkermansia sp. CAG:344; OX = 1262691 GN=queA PE=3 SV=1
MHLAVRTIDFDYPLPEELIADRPLPDRAASRMMVIHRDTGLIEHRHFCDLPEYVREGDHFILNDTRVVPARYFSNDGAIEVVRAEVLNPLLWKCMVRPGRKMKLGRTVSIGDAVGTVEGIDGEGYRLIRFDREVDEEKYGRLALPHYMNRESDPSDKERYQTVYARHEGAIAAPTAGLHFTPELLAAVPHDFLTLHVGVGTFRPVKADRIEDHQMHTEHFFLPEATARAINEAGRVIAVGTTSVRVLEHVATAEGLPLKECSGSTNIFIYPPYKYKVVDALITNFHLPQSTLLMLVSAFAGKELVMKAYLEAIRERYRFFSYGDCMLIL

SEQ ID NO: 63024 - protein, 329 aa, Akkermansia sp.
  REGION 1..329: note = tr|A0A139TTK1|A0A139TTK1_9BACT S-adenosylmethionine:tRNA ribosyltransferase-isomerase; OS = Akkermansia sp. KLE1798 OX=1574265 GN=queA PE=3 SV=1
MHLAVRTIDFDYPLPEELIADRPLPDRAASRMLVLHRDTGLMEHRHFCDLPEYVRPGDHFILNDTRVVPARYFSNDGSIEIVRAEVLNPLLWKCMVRPGRKMKVGRTVSVGESVGTVEGIDAEGYRLIRFDREVDEEKYGRLALPHYMNRESDPSDRERYQTVYARNEGAIAAPTAGLHFTPELLASVPHDFLTLHVGVGTFRPVKADNIEDHQMHTEHFFLPEATARAINEAERVIAVGTTSVRVLEHVAAAEGLPLRECSGSTNIFIYPPYKYKVVDALITNFHLPQSTLLMLVSAFAGKELVMKAYMEAIRERYRFFSYGDCMLIL

SEQ ID NO: 63025 - protein, 349 aa, Albidiferax sp.
  REGION 1..349: note = tr|A0A1H0UNG1|A0A1H0UNG1_9BURK S-adenosylmethionine:tRNA ribosyltransferase-isomerase; OS = Albidiferax sp. OV413 OX=1855285 GN=queA PE=3 SV=1
MRPYTLSDFDFTLPEALIAQHPAPERSSSRLLDGTGPAAQDRIFRDLPSLLKAGDLLVFNDTKVLKARLFGEKASGGKVELLVERVLTGNQVAAHMRVSKKPEPGATINLVGDGGFRATLLGRWPDADGTLFRFVLSNDAGDDPYTLMERHGHVPLPPYITHTDSAEDAQRYQTVFARAPGAVAAPTAALHFDDALLAQLEAQGVQRASVTLHVGAGTFQPVKTENIAEHQMHSEWYEVPAATQQAIAACKARGGRVVAVGTTTVRTLESWAQSGVASGDTRIFITPGFAFQHVDLLVTNFHLPKSSLMMLVSAFAGYEHIMDLYRHAIANQYRFFSYGDAMLLQRKTA

SEQ ID NO: 63026 - protein, 353 aa, Albidovulum inexpectatum
  REGION 1..353: note = tr|A0A2S5JJU7|A0A2S5JJU7_9RHOB S-adenosylmethionine:tRNA ribosyltransferase-isomerase; OS = Albidovulum inexpectatum OX=196587 GN=queA PE=3 SV=1
MKLSDFDFDLPEELIATRPIRPRPAARLLVAEGDRIRDMHVRDLVDLLGPGDRLVLNDTKVIPARLTGTRARQTPQGEAIARIEVTLAEPRPDGRWSALVRPLRKLRQGEEIRFSDRLTAHVVSIDDGRAELDFNLKGEDFDAALAQAGAMPLPPYIAQRRAPDEQDREDYQTVFARRPGAVAAPTASLHFDDDLLARLAERGVAFTHVTLHVGAGTFLPVKVEDVTTHKMHAEWGEVSAEAAAEINATRAAGGRVIPVGTTALRLIESAADPDGLMHPWQGETDIFIYPGYRFRVTDGLMTNFHLPKSTLMMLVSALMGMDRIRRIYDHAVRNRYRFFSYGDASLLLPEGRN

SEQ ID NO: 63027 - protein, 352 aa, unidentified
  source 1..352: note = Albidovulum xiamenense
  REGION 1..352: note = tr|A0A1G9GH01|A0A1G9GH01_9RHOB S-adenosylmethionine:tRNA ribosyltransferase-isomerase; OS = Albidovulum xiamenense OX=990712 GN=queA PE=3 SV=1
MQLSDFDFDLPEELIATRPARPRSAARLLVASRSQMVDARVFELPRLLRAGDLLVLNDTRVIPARLDGVRRRETAQGHVEAGIEATLVEALGGGRWRALLKPLRKVRPGERLHFGAGLEAVCEAHEEGMARLAFNLEGAAFEAALAEAGAMPLPPYIAARRPPDAQDREDYQTVWAERPGSVAAPTASLHFDAPLLAALEAAGVRFARVTLHVGAGTFLPVKTEDISRHRMHAEWGEVSEAAAEAINATRRAGGRVIPVGTTALRVIESAAPEPGRVAPFRGETDIFIRPGYDFRIADGLMTNFHLPKSTLMMLVSALMGLERIRQIYAHAVAERYRFFSYGDASLLLPGGL

SEQ ID NO: 63028 - protein, 359 aa, Albimonas donghaensis
  REGION 1..359: note = tr|A0A1H2SS08|A0A1H2SS08_9RHOB S-adenosylmethionine:tRNA ribosyltransferase-isomerase; OS = Albimonas donghaensis OX=356660 GN=queA PE=3 SV=1
MRVDDFDFELPEALIALRPARPRSSARMLVSRPGGGGETGGGIEDRRVSDLASILRPGDLLVFNDTRVIPARLFGERRRESADGPGVAKVEATLIAREGDAAWRALARPGKRLRVGDRLYFGADGALGAELTEKAEGGEVRLVFDRGGPALDTAIAEAGVMPLPPYIAQRRAADAADRDDYQTVFASKLGAVAAPTASLHFDAPLLAALEAAGVRSTRLTLHVGAGTFLPVKSDTLDGHKMHSEWGEVPEAAAEAVLETRAAGGRVIPVGTTALRLVETAGREDRFLEPWAGDTDIFIRPGHRFRIADGLMTNFHLPRSTLMMLVAGLVGMDRMRAIYAHAVAERYRFYSYGDSSLLFP

SEQ ID NO: 63029 - protein, 353 aa, unidentified
  source 1..353: note = Albimonas pacifica
  REGION 1..353: note = tr|A0A1I3G8B0|A0A1I3G8B0_9RHOB S-adenosylmethionine:tRNA ribosyltransferase-isomerase; OS = Albimonas pacifica OX=1114924 GN=queA PE=3 SV=1
MRVDDFDFDLPEELIALRPVRPRSSARMLHAQGGAISDRHVHDLPSLLRPGDLLVFNDTRVIPARLFGERRRPSPDGSGVAKVEATLLSREAPDAWEALARPAKRLREGDRLVFGPPEAELGATVAAKGEAGAVRLVFDVAGPALDAAIAAAGVMPLPPYIAHRRPADEKDAEDYQTVFAERPGAVAAPTASLHFDAPLLAALEAAGVRSTRLTLHVGAGTFLPVKVEDVENHRMHSEWGEVPESAAEAVNETRAAGGRVIPVGTTALRLLETAGTEDRRLEPWVGDTDIFIRPGHRFRVADGLMTNFHLPRSTLLMLVSALVGVEPARAIYAHAIAGRYRFYSYGDSSLLFP

SEQ ID NO: 63030 - protein, 372 aa, unidentified
  source 1..372: note = Alcaligenaceae bacterium
  REGION 1..372: note = tr|A0A354K123|A0A354K123_9BURK S-adenosylmethionine:tRNA ribosyltransferase-isomerase; OS = Alcaligenaceae bacterium OX=2021368 GN=queA PE=3 SV=1
MTGCRFYFLPVSSSLTVADFDYNLPSELIAQAPAAARTDSRLLHLDSEGRLNDLDFTAITSLVRPGDLLVFNDTRVIKARLFGRKASGGQVEVLIERITSEHEALAHIRASKSPGPGTSLRLSDAIDVTVMGRDNDLFILKFDGPILDLLDRYGSIPLPPYISHQPDALDDLRYQTVYAREPGAVAAPTAGLHFDENILEKFARMGVARAFVTLHVGAGTFQPVRVDKLSDHVMHAERYTVPAATAQAIARTRAEGGRIIAVGTTSVRALESAAKAQREDALAHPDRNIPDPRNQLLANSGDTRLFITPGFAYQVVDAMVTNFHLPQSTLLMLVSAFIGMEQMKAAYTHAIKQRYRFFSYGDAMFLERNPLL

SEQ ID NO: 63031 - protein, 355 aa, unidentified
  source 1..355: note = Alcaligenaceae bacterium
  REGION 1..355: note = tr|A0A4S1EIP7|A0A4S1EIP7_9BURK S-adenosylmethionine:tRNA ribosyltransferase-isomerase; OS = Alcaligenaceae bacterium 429 OX=2562948 GN=queA PE=3; SV = 1
MPVDPSLELSQFDYDLPPELIAQTPAATRTGSRLLHLNAAGQLTDMQFSQISQLLRPGDLLVFNNTKVIKARLLGEKQSGGKVEVLVERITSAHQALAHIRASKSPKPGTRLVLADGQLEVTVTGRQDALFELSFEQPALEALEQFGATPLPPYIQQVPTAEDDQRYQTVYAEAPGAVAAPTAGLHFDENLLNSLQELGVDQAFVTLHVGAGTFQPVRSEQLSEHQMHAERFFVPAETLEKLQRTREQGGRIIAVGTTSVRALESAVRYQECNGHQNADGSIEGDTRLFITPGYTFTWVDALVTNFHLPQSTLLMLVSALSKLPFIQQAYSHAIKQHYRFFSYGDAMFIEAAQQS

SEQ ID NO: 63032 - protein, 354 aa, Alcaligenes aquatilis
  REGION 1..354: note = tr|A0A427LYD7|A0A427LYD7_9BURK S-adenosylmethionine:tRNA ribosyltransferase-isomerase; OS = Alcaligenes aquatilis OX=323284 GN=queA PE=3 SV=1
MSIDPSLTIAQFDYELPPDLIAQSPPAQRQGSRLLHLDSASQLHDRQFTDLPSLLRKGDLLVFNDTRVIKARLHGQKSSGGKVEVLIERVTGPDTALAHIRASKSPKPGTLLELAEGRVLADCTGREDALFALRFHEPVLDMLEQYGATPLPPYITHAADEQDDSRYQTVYARHPGAVAAPTAGLHFTDDMLATLREQGVDQAFVTLHVGAGTFQPVRVDNISEHVMHAERYHVPAATLTKIEATRAAGGRVIAVGTTSVRSLESAASKEPGMNQRCADGSIEGDTRLFITPGFQYQWVDALITNFHLPQSTLLMLVSALAGIEPIQRAYQHAVQSRYRFFSYGDAMFIEPPTP

SEQ ID NO: 63033 - protein, 354 aa, Alcaligenes aquatilis
  REGION 1..354: note = tr|A0A3G2HRR7|A0A3G2HRR7_9BURK S-adenosylmethionine:tRNA ribosyltransferase-isomerase; OS = Alcaligenes aquatilis OX=323284 GN=queA PE=3 SV=1
MSIDPSLTIAQFDYELPPDLIAQSPPAQRQGSRLLHLDSASQLHDRQFTDLPSLLRKGDLLVFNDTRVIKARLHGQKSSGGKVEVLIERVTGPDTALAHIRASKSPKPGTLLELAEGRVLADCTGREDALFALRFHEPVLDMLEQYGATPLPPYITHAADEQDDSRYQTVYARHPGAVAAPTAGLHFTDAMLATLREQGVDQAFVTLHVGAGTFQPVRVDNISEHVMHAERYHVPAATLAKIEATRAAGGRVIAVGTTSVRSLESAASNEPGMNQRCADGSIEGDTRLFITPGFQYQWVDALITNFHLPQSTLLMLVSALAGIEPIQRAYQHAVQSRYRFFSYGDAMFIEPPTP

SEQ ID NO: 63034 - protein, 354 aa, Alcaligenes faecalis
  REGION 1..354: note = tr|A0A411T219|A0A411T219_ALCFA S-adenosylmethionine:tRNA ribosyltransferase-isomerase; OS = Alcaligenes faecalis OX=511 GN=queA PE=3 SV=1
MSIDPSLTIAQFDYELPPELIAQSPPAQRQGSRLLHLDGAGQLHDRQFTDLPGLLRKGDLLVFNDTRVIKARLHGQKSSGGKVEVLIERVTGPDTALAHIRASKSPKPGTLLELADGKVLADCTGREDALFALRFHEPVLDMLEQYGATPLPPYITHAADEQDESRYQTVYARHPGAVAAPTAGLHFTDDMLATLRAQGVDQAFVTLHVGAGTFQPVRVDNISEHVMHAERYHVPAATLAKIEATRAAGGRIIAVGTTSVRSLESAASKEPGMNQRCADGSIEGDTRLFITPGFQYQWVDALITNFHLPQSTLLMLVSALAGIEPIQRAYQHAVQSRYRFFSYGDAMFIEPPTP

SEQ ID NO: 63035 - protein, 354 aa, Alcaligenes faecalis
  REGION 1..354: note = tr|A0A3G6HEF6|A0A3G6HEF6_ALCFA S-adenosylmethionine:tRNA ribosyltransferase-isomerase; OS = Alcaligenes faecalis OX=511 GN=queA PE=3 SV=1
MSIDPSLTIAQFDYELPPDLIAQSPPAQRQGSRLLHLDGASQLHDRQFTDLPSLLRKGDLLVFNDTRVIKARLHGQKSSGGKVEVLIERVTGPDTALAHIRASKSPKPGTLLELAEGRVLADCTGREDALFALRFHEPVLDMLEQYGATPLPPYITHAADEEDDSRYQTVYARHPGAVAAPTAGLHFTDDMLATLREQGVDQAFVTLHVGAGTFQPVRVDNISEHVMHAERYHVPAATLAKIDATRAAGGRVIAVGTTSVRSLESAASKEPGMNQRCADGSIEGDTRLFITPGFQYQWVDALITNFHLPQSTLLMLVSALAGIEPIQRAYQHAVQSRYRFFSYGDAMFIEPPTP

SEQ ID NO: 63036 - protein, 354 aa, Alcaligenes sp.
  REGION 1..354: note = tr|U7UA86|U7UA86_9BURK S-adenosylmethionine:tRNA ribosyltransferase-isomerase OS=Alcaligenes sp. EGD-AK7; OX = 1386079 GN=queA PE=3 SV=1
MSIDPSLTIAQFDYELPPDLIAQSPPAQRQGSRLLHLDGASQLHDRQFTDLPSLLRKGDLLVFNDTRVIKARLHGQKSSGGKVEVLIERVTGPDTALAHIRASKSPKPGTLLELADGKVLADCTGREDALFALRFHEPVLDMLEQYGATPLPPYITHAADEEDDSRYQTVYARHPGAVAAPTAGLHFTDDMLNTLREQGVDQAFVTLHVGAGTFQPVRVDNISEHVMHAERYHVPAATLAKIEATRAAGGRVIAVGTTSVRSLESAASKEPGMNQRCTDGSIEGDTRLFITPGFQYQWVDALITNFHLPQSTLLMLVSALAGIEPIQRAYQHAVQSRYRFFSYGDAMFIEPPTP

SEQ ID NO: 63037 - protein, 351 aa, unidentified
  source 1..351: note = Alcaligenes xylosoxydans
  REGION 1..351: note = tr|A0A1R1JZU8|A0A1R1JZU8_ALCXX S-adenosylmethionine:tRNA ribosyltransferase-isomerase; OS = Alcaligenes xylosoxydans xylosoxydans OX=85698 GN=queA; PE = 3 SV=1
MQALTVSDFDYELPPELIAQTPAAQRTGSRLLHLDGASQLHDRQFADLEGLLRPGDLLVFNDTRVIKARLAGHKITGGKVEVLVERITDTDRALAHVRASKSPGAGMVLRLADAFDATVLGREGELFDIRFPGPVLELLDAHGATPLPPYITHAADAGDDDRYQTVYAREPGAVAAPTAGLHFDQPTLDRLAALGVERAFVTLHVGAGTFQPVRVDNLTDHIMHAEWFTVPQATVDAIAATRARGGRVIAVGTTSVRALESAAAQTEGRTAPGLPLAAAQGDTRLFITPGYQYRVIDALVTNFHLPQSTLLMLVSALAGVEPIRRAYAHAVAQRYRFFSYGDAMFIESPAP

SEQ ID NO: 63038 - protein, 351 aa, unidentified
  source 1..351: note = Alcaligenes xylosoxydans
  REGION 1..351: note = tr|A0A5C2NG43|A0A5C2NG43_ALCXX S-adenosylmethionine:tRNA ribosyltransferase-isomerase; OS = Alcaligenes xylosoxydans xylosoxydans OX=85698 GN=queA; PE = 3 SV=1
MQALTVSDFDYELPPELIAQTPAAQRTGSRLLHLDGASQLHDRQFADLEGLLRPGDLLVFNDTRVIKARLAGHKITGGKVEVLVERITDTDRALAHVRASKSPGAGMVLRLADAFDATVLGREGELFDIRFPGPVLELLDAHGATPLPPYITHAADAGDDDRYQTVYAREPGAVAAPTAGLHFDQPTLDRLAAQGVERAFVTLHVGAGTFQPVRVDNLADHVMHAEWFTVPQATVDAIAATRARGGRVIAVGTTSVRALESAAAQTEGRTAPGLPLAAAQGDTRLFITPGYQYRVIDALVTNFHLPQSTLLMLVSALAGVEPIRRAYAHAVAQRYRFFSYGDAMFIESPAP

SEQ ID NO: 63039 - protein, 340 aa, unidentified
  source 1..340: note = Alcanivoracaceae bacterium
  REGION 1..340: note = tr|A0A3L8AVW1|A0A3L8AVW1_9GAMM S-adenosylmethionine:tRNA ribosyltransferase-isomerase; OS = Alcanivoracaceae bacterium GenoA1_TS13_700 OX=2072747; GN = queA PE=3 SV=1
MKRADFHYELPERLIARYPMPERSGSRLLCLDRQSGALQDQRFTDVLRWLQGGDLLVFNNTRVIPARIFGRKETGGRVEVLVERITSPDSCLAHVRASKAPKPGSRILVEGADSLLMEGRSGDLFCLRSLQGDLLNWLQQVGHMPLPPYIDREDERLDQERYQTVYASTPGAVAAPTAGLHFDDALLSALAEAGVDSAYVTLHVGAGTFQPVRADDIRDHVMHSEWLQVDQATVDKIRRTKARGGRVIAVGTTSVRSLETAASCNQGQIAPFEGDTDIFIYPGYSFSVVDGLITNFHLPESTLIMLVSAFAGQQAVLNAYHHAVAQEYRFFSYGDAMLIL

SEQ ID NO: 63040 - protein, 347 aa, unidentified
  source 1..347: note = Alcanivoracaceae bacterium
  REGION 1..347: note = tr|A0A2E2DDP2|A0A2E2DDP2_9GAMM S-adenosylmethionine:tRNA ribosyltransferase-isomerase; OS = Alcanivoracaceae bacterium OX=2024895 GN=queA PE=3 SV=1
  VARIANT 21: note = Xaa can be any naturally occurring amino acid
  VARIANT 89..90: note = Xaa can be any naturally occurring amino acid
  VARIANT 139: note = Xaa can be any naturally occurring amino acid
  VARIANT 199: note = Xaa can be any naturally occurring amino acid
  VARIANT 224: note = Xaa can be any naturally occurring amino acid
  VARIANT 311: note = Xaa can be any naturally occurring amino acid
  VARIANT 315: note = Xaa can be any naturally occurring amino acid
MNVDDFDFELPDGLIARHPPXQRRDARLLALTRDALQHQQFPDLLGHVRPGDLLIFNDTRVIPARLFGHKDSGGKVEVLIERVVDDHEXXAHVRASKSPKPGSWLQFDEGVRAQVTGRRDALFILQFHGCETLLGALEXIGHVPLPPYIDRPDEQGDMERYQTVYAREPGAVAAPTAGLHFDEAMLAALQQHGVDIGYXTLHVGAGTFQPVRVDKVEDHHMHSXRYQIPETLVEQVAQAHARGGRIVAVGTTALRALEAASQSGSLKAGQGETDIFIYPGYQFRLVECLLTNFHLPKSTLLMLISAFAGQXRVMXAYQAAIEAEYRFFSYGDAMFIERVDVSTAERV

SEQ ID NO: 63041 - protein, 359 aa, Alcanivorax borkumensis
  REGION 1..359: note = sp|Q0VSA0|QUEA_ALCBS S-adenosylmethionine:tRNA ribosyltransferase-isomerase OS=Alcanivorax borkumensis (strain ATCC 700651 / DSM 11573 / NCIMB 13689 / SK2); OX = 393595GN=queA PE=3 SV=1
MNVDDFDFELPDRLIARHPPAQRRDARLLALTCDALEHQQFPDLLSHVHPGDLLIFNDTRVIPARLFGQKESGGKVEVLIERVVDDHEALAHVRASKSPKPGSWLEFAKGIRAQVTGRRGALFILHFSLPGNGCDTLLSALELIGHVPLPPYIDRPDEDGDMERYQTVYAREPGAVAAPTAGLHFDDAMLAALEQRGVDIGFVTLHVGAGTFQPVRVDKVEDHHMHSERYQIPGSLVEQVAQAHARGGRVVAVGTTALRALEAASQSGGLHAGQGETDIFIFPGYRFRLVDALVTNFHLPKSTLLMLISAFAGRDRIMGAYRAAIEAQYRFFSYGDAMFIEGTQPASRNTQHVKSGADE

SEQ ID NO: 63042 - protein, 355 aa, Alcanivorax dieselolei
  REGION 1..355: note = tr|K0CJL7|K0CJL7_ALCDB S-adenosylmethionine:tRNA ribosyltransferase-isomerase OS=Alcanivorax dieselolei (strain DSM 16502 / CGMCC 1.3690 / B-5) OX=930169 GN=queA; PE = 3 SV=1
MQVDDFDFDLPDELIARYPPAQRRDARLLTLTGAGMGHGRFPDLSAWLRPGDLLVFNDTRVIPARLFGRKQTGGRVEVLIERLLGGREALAHVRASKSPKAGGWLEFDQGVAAEVRGRRGELFHLMFTGCEQVLDALERVGHVPLPPYIDRPDEDTDLQRYQTVYAREPGAVAAPTAGLHFDEAFIEQLREQGVETGFVTLHVGAGTFQPVRVDKVEEHHMHSERFRISEALVEQVLAARARGGRVVAVGTTALRALEAASAGGALSSGEAETDIFIYPGYRFRQVDALVTNFHLPRSTLLMLISAFAGQDRVLAAYQEAVREGYRFFSYGDAMFIEGTQHAARNTQHAQDGGDV

SEQ ID NO: 63043 - protein, 354 aa, Alcanivorax hongdengensis
  REGION 1..354: note = tr|L0WAX8|L0WAX8_9GAMM S-adenosylmethionine:tRNA ribosyltransferase-isomerase OS=Alcanivorax hongdengensis A-11-3 OX=1177179 GN=queA PE=3 SV=1
MNVDDFDFDLPDGLIARHPPAQRRDARLLALKRDQLLHQQFPDLLSHLRPGDLLVFNDTRVIPARLYGQKESGGKVEVLIERILDEHQALAHVRASKSPKPGSWLHFDQGIIAQVSGRRDALFHLTFSGCGTLLDALERIGHVPLPPYIDRPDEQGDLERYQTVYAREPGAVAAPTAGLHFDDEMLAALTDAGIDTGFITLHVGAGTFQPVRVDKVEDHQMHSERYQVPEALAEQVAQAHARGGRVVAVGTTALRALEAASQSGRLQAGQGETDIFIFPGYRFRLVDALVTNFHLPRSTLLMLISAFAGRERVMHAYQAAIEARYRFFSYGDAMFIERQPDVGCQTSDAGESRV

SEQ ID NO: 63044 - protein, 347 aa, Alcanivorax jadensis
  REGION 1..347: note = tr|A0A095UEP3|A0A095UEP3_9GAMM S-adenosylmethionine:tRNA ribosyltransferase-isomerase; OS = Alcanivorax jadensis T9 OX=1177181 GN=queA PE=3 SV=1
MNVDDFDFDLPDGLIARHPPAERRDARLLALTCDALQHQQFPDLLSHVHPGDLLIFNDTRVIPARLFGQKESGGKVEVLIERVVDEREALAHVRASKSPKPGTWLQFDEGVRAQVTGRRDALFILLFQGCDTLLGALERIGHVPLPPYIDRPDEAGDMERYQTVYAREPGAVAAPTAGLHFDDEMLAALEQHGVDIGFVTLHVGAGTFQPVRVDKVEDHHMHSERYQIPDSLVEQVAQAHARGGRVVAVGTTALRALEAASQTGGLVAGQGETEIFIYPGYRFRLVDCLVTNFHLPKSTLLMLISAFAGRERVMAAYQAAIDAQYRFFSYGDAMFIERVAVPPAEGL

SEQ ID NO: 63045 - protein, 369 aa, unidentified
  source 1..369: note = Alcanivorax nanhaiticus
  REGION 1..369: note = tr|A0A095SLP0|A0A095SLP0_9GAMM S-adenosylmethionine:tRNA ribosyltransferase-isomerase; OS = Alcanivorax nanhaiticus OX=1177154 GN=queA PE=3 SV=1
MPVQYVNVDDFDFELPDGLIARHPPAQRRDARLLALTRDNLQHQQFPDLLSHVRPGDLLIFNDTRVIPARLFGQKDSGGKVEVLIERVVDDHEALAHVRASKSPKPGSWLQFDQGVRAQVTGRRDALFILQFQGCGSSQESGCGTLLDVLEQIGHVPLPPYIDRPDEVGDMERYQTVYAREPGAVAAPTAGLHFDDEMLAALEQHGVDIGYVTLHVGAGTFQPVRVDRVEDHHMHSERYQIPDTLVEQVAQAHARGGRIVAVGTTALRALEAASQSGGLQAGQGETDIFIFPGYQFRLVECLLTNFHLPKSTLLMLISAFAGQQRVMAAYQAAIEAEYRFFSYGDAMFIERQSGVGRPASDQKVHPCPE

SEQ ID NO: 63046 - protein, 343 aa, Alcanivorax pacificus
  REGION 1..343: note = tr|A0A0B4XJB7|A0A0B4XJB7_9GAMM S-adenosylmethionine:tRNA ribosyltransferase-isomerase; OS = Alcanivorax pacificus W11-5 OX=391936 GN=queA PE=3 SV=1
MRVDDFDFDLPEQLIARRPATERAGSRLLALTRDALAHRQFPDLTALLRPGDLLVFNDTRVIPARLFGQKDSGGRVEVLIERLTGTHTALAHVRASKAPKPGTGLQFDDGVSATMVARQGDLFELVFQGEAPLLDVLARIGHVPLPPYIDRPDDEQDMSRYQTVYARHPGAVAAPTAGLHFDEPLLAALAEQGVAQAFVTLHVGAGTFQPVRVDKVEDHVMHSERYQVPQSLVDEVAATRARGGRVVAVGTTSLRALEAAAGDGALRAGEGDTDIFIVPGYRFRVVDALVTNFHLPRSTLLMLISAFAGRERVLAAYAEAVAQQYRFFSYGDAMFIERAEDAT

SEQ ID NO: 63047 - protein, 347 aa, unidentified
  source 1..347: note = Alcanivorax profundi
  REGION 1..347: note = tr|A0A418XW15|A0A418XW15_9GAMM S-adenosylmethionine:tRNA ribosyltransferase-isomerase; OS = Alcanivorax profundi OX=2338368 GN=queA PE=3 SV=1
MNVDDFDFELPDGLIARHPPAQRRDARLLALTRDALQHQQFPDLLGHVRPGDLLIFNDTRVIPARLFGHKDSGGKVEVLIERVVDDHEALAHVRASKSPKPGSWLQFDEGVRAQVTGRRDALFILQFHGCETLLGALERIGHVPLPPYIDRPDEQGDMERYQTVYAREPGAVAAPTAGLHFDEAMLAALQQHGVDIGYVTLHVGAGTFQPVRVDKVEDHHMHSERYQIPETLVEQVAQAHARGGRIVAVGTTALRALEAASQSGGLKAGQGETDIFIYPGYQFRLVECLLTNFHLPKSTLLMLISAFAGQERVMNAYQAAIEAEYRFFSYGDAMFIERVDVSTAKGD

SEQ ID NO: 63048 - protein, 363 aa, Alcanivorax sp.
  REGION 1..363: note = tr|B4X5W8|B4X5W8_9GAMM S-adenosylmethionine:tRNA ribosyltransferase-isomerase OS=Alcanivorax sp. DG881; OX = 236097 GN=queA PE=3 SV=1
MPVQYVNVDDFDFELPDGLIARHPPAERRDARLLALTRDALLHQQFPDLLSHVHPGDLLIFNDTRVIPARLFGQKESGGKVEVLIERVVDDHEALAHVRASKSPKPGSWLEFDEGIRAQVTGRRDALFILQFSLPGQGCDTLLTALEKIGHVPLPPYIDRPDEDGDMERYQTVYAREPGAVAAPTAGLHFDDAMLAALEQHGVDIGFVTLHVGAGTFQPVRVDKVEDHHMHSERYQIPDSLVEQVAQAHARGGRVVAVGTTALRALEAASQSGGLQTGQGETDIFIYPGYRFRLVDALVTNFHLPKSTLLMLISAFAGRDRVMNAYQAAIESQYRFFSYGDAMFIEGTQHASRDTQHAGGADE

SEQ ID NO: 63049 - protein, 350 aa, Alcanivorax sp.
  REGION 1..350: note = tr|A0A2E4YJE4|A0A2E4YJE4_9GAMM S-adenosylmethionine:tRNA ribosyltransferase-isomerase; OS = Alcanivorax sp. OX=1872427 GN=queA PE=3 SV=1
  VARIANT 81: note = Xaa can be any naturally occurring amino acid
  VARIANT 92: note = Xaa can be any naturally occurring amino acid
  VARIANT 102: note = Xaa can be any naturally occurring amino acid
  VARIANT 108: note = Xaa can be any naturally occurring amino acid
  VARIANT 128: note = Xaa can be any naturally occurring amino acid
  VARIANT 138: note = Xaa can be any naturally occurring amino acid
  VARIANT 148: note = Xaa can be any naturally occurring amino acid
  VARIANT 165: note = Xaa can be any naturally occurring amino acid
  VARIANT 180: note = Xaa can be any naturally occurring amino acid
  VARIANT 187: note = Xaa can be any naturally occurring amino acid
  VARIANT 189: note = Xaa can be any naturally occurring amino acid
  VARIANT 202: note = Xaa can be any naturally occurring amino acid
  VARIANT 208: note = Xaa can be any naturally occurring amino acid
  VARIANT 230..231: note = Xaa can be any naturally occurring amino acid
  VARIANT 237: note = Xaa can be any naturally occurring amino acid
  VARIANT 267: note = Xaa can be any naturally occurring amino acid
  VARIANT 274: note = Xaa can be any naturally occurring amino acid
  VARIANT 277..278: note = Xaa can be any naturally occurring amino acid
  VARIANT 282: note = Xaa can be any naturally occurring amino acid
  VARIANT 301: note = Xaa can be any naturally occurring amino acid
  VARIANT 346: note = Xaa can be any naturally occurring amino acid
MRVDDFDFDLPEALIARHPPERRRDARLLALTVDALKHQRFPDLADHLRPGDLLVFNDTRVIPARLFGHKSSGGRVEVLIXRLLEGTRALAXVRASKSPKPXTGLVFXQGIGARVEGRRGELFELDFXGCETALEALXRIGHVPLPPXIDRPDEGADQERYQTVXAREPGAVAAPTAGLXFDQPMLXQXQAMGVETGFVTLXVGAGTXQPVRVERVEDHPMHSERFRVEXXLVEQVXATRARGGRVVAVGTTALRTLEAASAGGALXAGESETXIFXXPGYXFRQVDALVTNFHLPRSTLXMLVSAFAGRERVLAAYEEAIRERYRFFSYGDAMFIERAPDAQRGXSCPE

SEQ ID NO: 63050 - protein, 349 aa, unidentified
  source 1..349: note = Algibacter alginicilyticus
  REGION 1..349: note = tr|A0A0N7HYD3|A0A0N7HYD3_9FLAO S-adenosylmethionine:tRNA ribosyltransferase-isomerase; OS = Algibacter alginicilyticus OX=1736674 GN=queA PE=3 SV=1
MKLSHFGFNLPEELLAEHPAENRDESRLMVLDRAKQTIEHKQFKDLIEYFNEDDVMILNDTKVFPARLYGNKEKTGARIEVFLLRELNEEQRLWDVLVDPARKIRIGNKLYFGDDDTLVAEVIDNTTSRGRTLRFLYDGSYTEFRRKLTELGETPLPKYIKREVEPEDEDRYQTIFAEKEGAVAAPTAGLHFSKHLLKRLEIKGVEFAKVTLHVGLGTFNPVEVEDLSKHKMDSEELFIGPEAVKTVNTAIENKRRVCAVGTTSMRAIESAVSSNGRLNEMSGWTNKFIFPPYDFSIANCMITNFHTPKSTLLMMASAFAGHDFIKRAYEEAVKEKYKFYSYGDAMLII

SEQ ID NO: 63051 - protein, 349 aa, unidentified
  source 1..349: note = Algibacter amylolyticus
  REGION 1..349: note = tr|A0A556QUP6|A0A556QUP6_9FLAO S-adenosylmethionine:tRNA ribosyltransferase-isomerase; OS = Algibacter amylolyticus OX=1608400 GN=queA PE=3 SV=1
MKLSHFGFELPEERLAEYPAENRDESRLMVLNRKEQTIEHKMFKDVIDYFDEDDVLVLNNTKVFPARLFGNKEKTGARIEVFLLRELNEEQRLWDVLVDPARKIRIGNKLYFGDDDTLVAEVIDNTTSRGRTLRFLYDGSYREFRIKLNELGETPLPKYIKRDVEPEDEARYQTIFAKNEGAVAAPTAGLHFSRHLLKRLEIKGVNFAEVTLHVGLGTFNPVEVEDLSKHKMDSEELKIGPEAVNIVNRGLKEKRRICAVGTTAVRAVESAVSTNGQLNEYDGWTNKFIFPPYEFTIPNAMITNFHTPKSTLLMMVSAFAGHDFIKRAYDEAIKEGYNFYSYGDAMLII

SEQ ID NO: 63052 - protein, 349 aa, unidentified
  source 1..349: note = Algibacter aquaticus
  REGION 1..349: note = tr|A0A1E5T9F9|A0A1E5T9F9_9FLAO S-adenosylmethionine:tRNA ribosyltransferase-isomerase; OS = Algibacter aquaticus OX=1849968 GN=queA PE=3 SV=1
MKLSHFGFDLPDELLAEYPAENRDESRLMVLNRKEQTIEHKMFKDLIDYFKEDDVLILNNTKVFPARLYGNKEKTGARIEVFLLRELNEEQRLWDVLVDPARKIRIGNKLYFGDDDTLVAEVIDNTTSRGRTLRFLYDGSYKEFRRKLNELGETPLPKYIKREVEPEDEARYQTIFAKNEGAVAAPTAGLHFSKHLLKRLEIKGVDFAEVTLHVGLGTFNPVEVEDLSKHKMDSEELKIDEKAVKVVNEAIENKRRVCAVGTTAMRAIESAVSSNGRLNEIDGWTNKFIFPPYDFSIANCMITNFHTPKSTLLMMVSAFAGHDFIKKAYDEAVKEKYKFYSYGDAMLII

SEQ ID NO: 63053 - protein, 349 aa, Algibacter lectus
  REGION 1..349: note = tr|A0A090V9A3|A0A090V9A3_9FLAO S-adenosylmethionine:tRNA ribosyltransferase-isomerase; OS = Algibacter lectus OX=221126 GN=queA PE=3 SV=1
MKLSHFGFNLPDELLAEYPAENRDESRLMVLNRKEQTIEHKMFKDIIDYFQEDDVLILNDTKVFPARLYGNKEKTGARIEVFLLRELNEEQRLWDVLVDPARKIRIGNKLYFGDDETLVAEVIDNTTSRGRTLRFLYDGSYTEFRKKLNELGETPLPKYIKRDVEPEDQDRYQTIYAKTEGAVAAPTAGLHFSRHLLKRLEIKGVKFAEVTLHVGLGTFNPVEVEDLSKHKMDSEELKIEAKAVEIVNTALSEKRRICAVGTTAMRAIESAVSTSGKLNEVEGWTNKFIFPPYDFSIANCMITNFHTPKSTLLMMISAFAGHDFAKKAYEEAVKEKYKFYSYGDAMLII

SEQ ID NO: 63054 - protein, 349 aa, unidentified
  source 1..349: note = Algibacter pectinivorans
  REGION 1..349: note = tr|A0A1I1PPU8|A0A1I1PPU8_9FLAO S-adenosylmethionine:tRNA ribosyltransferase-isomerase; OS = Algibacter pectinivorans OX=870482 GN=queA PE=3 SV=1
MKLSHFGFELPEERLAEYPAENRDESRLMVLNRKEQTIEHKMFKDVIDYFDEDDVLVLNNTKVFPARLFGNKEKTGARIEVFLLRELNEEQRLWDVLVDPARKIRIGNKLYFGDDDTLVAEVIDNTTSRGRTLRFLYDGSYREFRIKLNELGETPLPKYIKRDVEPEDEERYQTIFAKNEGAVAAPTAGLHFSKHLLKRLEIKGVNFAEVTLHVGLGTFNPVEVEDLSKHKMDSEELKIGPEAVKIVNKGLKEKRRICAVGTTAVRAVESAVSTNGELNEFDGWTNKFIFPPYDFSIPNAMITNFHTPKSTLLMMVSAFAGHDFVKRAYDEAIKEGYNFYSYGDAMLII

SEQ ID NO: 63055 - protein, 349 aa, Algibacter sp.
  REGION 1..349: note = tr|A0A2N0J8T3|A0A2N0J8T3_9FLAO S-adenosylmethionine:tRNA ribosyltransferase-isomerase; OS = Algibacter sp. RHA_19 OX=1798237 GN=queA PE=3 SV=1
MKLSSFNFELPDNLLAEYPSEHRDEAKLMVIHRETGKIEHKMFKDLINYFDEGDVMVLNNTKVFPARLYGNKEKTGARIEVFLLRELNAEQRLWDVLVDPARKIRIGNKLYFGDDETLVAEVIDNTTSRGRTLRFLYDGSYTDFRQKLKDLGETPLPKYIKRDVEETDEDRYQTIYAKHEGAVAAPTAGLHFSKHLLKRLEIKGVDFAELTLHVGLGTFNPVEVEDLSKHKMDSEELVIDEKATEVVNSAIDGKRRICAIGTTAMRGLESAVSSNGHLNTYEGWTNKFIFPPYDFSIANSMVTNFHLPKSTLLMMVSAFVGHDLMKKAYKEAILESYKFYSYGDAMLII

SEQ ID NO: 63056 - protein, 349 aa, Algibacter sp.
  REGION 1..349: note = tr|A0A2U2X9A8|A0A2U2X9A8_9FLAO S-adenosylmethionine:tRNA ribosyltransferase-isomerase; OS = Algibacter sp. ZY111 OX=2100723 GN=queA PE=3 SV=1
MKLSHFGFELPEERLAEYPAENRDESRLMVLNRKEQTIEHKMFKDVIDYFDEDDVLVLNNTKVFPARLFGNKEKTGARIEVFLLRELNEEQRLWDVLVDPARKIRIGNKLYFGEDESLVAEVIDNTTSRGRTLRFLYDGSYREFRIKLNELGETPLPKYIKRDVEPDDESRYQTIYAKNEGAVAAPTAGLHFSRHLLKRLEIKGVNFAEVTLHVGLGTFNPVEVEDLSKHKMDSEELIINEDAVKIVNKGLKEKRRICAVGTTAVRAVESAVSTSGQLNEFDGWTNKFIFPPYEFSIPNAMITNFHTPKSTLLMMVSAFAGHDFIKRAYDEAIKEGYNFYSYGDAMLII

SEQ ID NO: 63057 - protein, 349 aa, unidentified; identical to SEQ ID NO: 63053
  source 1..349: note = Algibacter wandonensis
  REGION 1..349: note = tr|A0A4R8MFH5|A0A4R8MFH5_9FLAO S-adenosylmethionine:tRNA ribosyltransferase-isomerase; OS = Algibacter wandonensis OX=1343161 GN=queA PE=3 SV=1

SEQ ID NO: 63058 - protein, 351 aa, unidentified
  source 1..351: note = Algoriella xinjiangensis
  REGION 1..351: note = tr|A0A1I4ZUA1|A0A1I4ZUA1_9FLAO S-adenosylmethionine:tRNA ribosyltransferase-isomerase; OS = Algoriella xinjiangensis OX=684065 GN=queA PE=3 SV=1
MKMKTSDFDFNLPEELLAEHPSENRDESRLMVIHRDTGVIEHKLFKDVIDYFEEGDVMIRNNTKVFPARLMGNKEKTGAQIEVFLLRELDAETRLWDVLVDPARKIRIGNKLFFDNDDTLVAEVVDNTTSRGRTLRFLFDGSYEEFRAKLKELGETPLPKYILRDVEPEDAERYQTIYAKHEGAVAAPTAGLHFSKHLLKRLEIKGVEFAELTLHIGLGTFQAVEVEDLSKHKMESEQVIIPQITADIVNRAIDDKKRVCAIGTSSMRSIESAVSADGHLNALDSWTNKFVHPPYDFSIANCMITNFHTPKSTLIMMISAFAGHDLTMKAYNEAVKEGYRFYSYGDAMLIL

SEQ ID NO: 63059 - protein, 405 aa, Algoriphagus alkaliphilus
  REGION 1..405: note = tr|A0A1G5YGR7|A0A1G5YGR7_9BACT S-adenosylmethionine:tRNA ribosyltransferase-isomerase; OS = Algoriphagus alkaliphilus OX=279824 GN=queA PE=3 SV=1
MEIPKIDLSEYEYTLPDERIAKFPLEKRDASKLLHFLKGNIKHLHFYDLPELLTSDTLLVYNDTKVIPARLIFLRETGAKIEIFLLQPISPTTVIPEIMLANYPVTWETMIGNAKKWKDGEILQGQVQVNDRKVVLSAKLINRETKAVEFSWDDPEIAFVDLVEASGEVPLPPYLNRKPNEADKSRYQTVYSKKEGAVAAPTAGLHFTEEVFQKLRAKGIREAQVTLHVSAGTFQPIKAENVVEHPMHSEQIQVSRETIELLLAQKGNTVAVGTTSVRTLESLFWYGVKLLEGKGEDLLIEKLFAYQPRTAVPTKSESLHAIVEFMEKNGLESILGSTEIFIFPGYRYRMIEGLITNFHQPGSTLILLIATILGEDWKRVYKEAMESDYRFLSYGDSSLLWISYG

SEQ ID NO: 63060 - protein, 349 aa, Algoriphagus alkaliphilus
  REGION 1..349: note = tr|A0A1G5WF48|A0A1G5WF48_9BACT S-adenosylmethionine:tRNA ribosyltransferase-isomerase; OS = Algoriphagus alkaliphilus OX=279824 GN=queA PE=3 SV=1
MKLSDFKFDVPKKLISLYPTENRDDSRLMVVHRKTGQIEHRIFKDILEYFEEGDVFVTNDTKVFPARLYGNKEKTGAKIEVFLLRELNPELRLWDVLVDPARKIRVGNKLYFGDSDLVAEVIDNTTSRGRTIRFLFDGNHDEFEKTIDTLGETPLLKDIIERKIEPEDRERYQTVFAKNVGAVAAPTAGLHFTPQLLKRLELKGVEVTPITLHVGLGTFRQVDVEDLTKHKMDSENYNIPANTVKLVNEALDAKKRVVAVGTTSLKTIESSVTAGGRLKESTGWTDKFIIPPYEFKIANSLITNFHLPESTLLMTASAFGGYDLVMKAYREAIKEKYRFFSYGDAMLIL

SEQ ID NO: 63061 - protein, 349 aa, Algoriphagus antarcticus
  REGION 1..349: note = tr|A0A3E0DHN4|A0A3E0DHN4_9BACT S-adenosylmethionine:tRNA ribosyltransferase-isomerase; OS = Algoriphagus antarcticus OX=238540 GN=queA PE=3 SV=1
MKLSDFKFDVPKKLISLYPAANRDESRLMVLHRDTGKIEHRVFKDITEYFGEGDVFVTNDTKVFPARLYGNKEKTGAEIEVFLLRELNSELKLWDVLVDPARKIRVGNKLYFGDSDLVAEVIDNTTSRGRTIRFLFDGTDEEFHKTIDTLGETPLLKEFIERKVEAEDKERYQTVFAKNVGAVAAPTAGLHFTPHLLKRLELQGVDVTPITLHVGLGTFRQVDVEDLTKHKMDSENYSIPDNTVALVNRALDAKKRVVAVGTTSLKTIESSVTANGRLKASSGWTDKFIIPPYEFKIANSLITNFHLPESTLLMTASAFGGYDLVMKAYKEAIKEKYRFFSYGDAMLIL

SEQ ID NO: 63062 - protein, 403 aa, Algoriphagus antarcticus
  REGION 1..403: note = tr|A0A3E0DKE4|A0A3E0DKE4_9BACT S-adenosylmethionine:tRNA ribosyltransferase-isomerase; OS = Algoriphagus antarcticus OX=238540 GN=queA PE=3 SV=1
MKISAIDLTAYEYTLPEEKIAKFPLAKRDASKLLHYKDGEISHLNFSNIPDLLPADTLLVYNDTKVIPARLIFQRETGARIEIFLLQPVLPTTVIPEIMLAKHPVVWETMIGNAKKWKDGEILKGLIPFNDGTITLQARLIDRATRQVEFSWDNAEVAFVDVVEARGEVPLPPYLNRKPVEEDKSRYQTVYSEKEGAVAAPTAGLHFTPEIFEQLRLKGIMEAQVTLHVSAGTFQPIKASQVTEHPMHSEQIHISRKTIELIISHLGKVVTVGTTSVRTLESLYWYGVKLLEGKGEDLKIEKLFPYENRRSLPAAKESYAAILTYMNEKSLETIMGTTEIFIFPGYEFKIVKGLITNFHQPGSSLILLIATILGEDWKRVYDEALANEYRFLSYGDSSLLWLK

SEQ ID NO: 63063 - protein, 349 aa, Algoriphagus aquaeductus
  REGION 1..349: note = tr|A0A326RQP9|A0A326RQP9_9BACT S-adenosylmethionine:tRNA ribosyltransferase-isomerase; OS = Algoriphagus aquaeductus OX=475299 GN=queA PE=3 SV=1
MKLSDFKFDVPKKLIALYPTDNRDESRLMVVHRKTGEIEHRTFKDILDYFGEGDVFVTNDTKVFPARLYGNKEKTGAKIEVFLLRELNPELRLWDVLVDPARKIRVGNKLYFGDSDLVAEVIDNTTSRGRTIRFLFDGNEEEFQKTIDTLGETPLLKEIIERKIEPEDRERYQTVFAKNVGAVAAPTAGLHFTPQLLKRLELKGVEVTPITLHVGLGTFRQVDVEDLTKHKMDSENYFIPEKTVALVNEALDNKKRVVAVGTTSLKTVESSVTAGGRLKASSGWTDKFIIPPYDFKIANALITNFHLPESTLLMTASAFGGYDLIMKAYKEAVKEKYRFFSYGDAMLIL

SEQ ID NO: 63064 - protein, 402 aa, Algoriphagus aquaeductus
  REGION 1..402: note = tr|A0A326RTX0|A0A326RTX0_9BACT S-adenosylmethionine:tRNA ribosyltransferase-isomerase; OS = Algoriphagus aquaeductus OX=475299 GN=queA PE=3 SV=1
MEIPKIDLKDFEYTLPEERIAKFPLEKRDASQLLHYQNGKIDHYHFFDLPELLPGNTLLVYNNTKVIPARLIFQRETGAKIEIFLLQPVAPTTVIPEIMLAKHPVTWETMIGNAKKWKDGEVLKGRIAVNGREVILSARIVNRENKQVEFTWENYEIAFVDLVEASGEVPLPPYLNRKPTANDKSRYQTVYSKKEGAVAAPTAGLHFTEEVFAKLRTKGIEEAEVTLHVSAGTFQPIKVANVLEHPMHSEQMEIKRETVEKLLSHSGKIVAVGTTSVRTLESLYWYGVKLIERKGSDFQIEKLYPYASHHHVPSREQSLQAIIEEMNIRATDTIMGTTEIFIFPGYRFQLVDGLITNFHQPGSTLILLISAILGGKWRNVYQEALDKNYRFLSYGDSSLLWI

SEQ ID NO: 63065 - protein, 403 aa, Algoriphagus aquimarinus
  REGION 1..403: note = tr|A0A5C7ANV8|A0A5C7ANV8_9BACT S-adenosylmethionine:tRNA ribosyltransferase-isomerase; OS = Algoriphagus aquimarinus OX=237018 GN=queA PE=3 SV=1
MQIPAIDLTAYEYTLPEEKIAKFPLAKRDASKLLHYKDGQISHLNFSNIPDLLPADTLLVYNDTKVIPARLIFQRETGARIEIFLLQPISPTTVIPEIMLAKHPVIWETMIGNSKKWKDGEILKGVIPFQGSTITLFAKLIDRESRQVEFSWDNAEVAFVDVVEASGEVPLPPYLNRKPVEEDKSRYQTVYSEKEGAVAAPTAGLHFTPEIFERLKTKGIKEAQVTLHVSAGTFQPIKASQVTEHPMHSEQIHVDRKTIETIIPNLGKIVTVGTTSVRTLESLYWYGVKLLEGKGEELRIEKLFPYEDRENLPSAQKSYEAILIHMKEKGLQTIMGTTEIFIFPGYEFKIVKGLITNFHQPGSTLILLIATILGEDWRHVYKDALANNYRFLSYGDSSLLWIE

SEQ ID NO: 63066 - protein, 349 aa, Algoriphagus aquimarinus
  REGION 1..349: note = tr|A0A1I0YZ10|A0A1I0YZ10_9BACT S-adenosylmethionine:tRNA ribosyltransferase-isomerase; OS = Algoriphagus aquimarinus OX=237018 GN=queA PE=3 SV=1
MKLSDFKFDVPKKLVAHYPAANRDESRLMVLHRDTGEIEHRIFKDITEYFGEGDVFVTNDTKVFPARLYGNKEKTGAEIEVFLLRELNAELKLWDVLVDPARKIRVGNKLYFGDSDLVAEVIDNTTSRGRTIRFLFDGTEEEFHKTIDTLGETPLLKEFIERKVEAEDKERYQTVFAKNVGAVAAPTAGLHFTPHLLKRLELQGVDVTPITLHVGLGTFRQVDVEDLTKHKMDSENYSIPDGTVELVNRSLDAKKRVVAVGTTSLKTIESSVTANGRLKASSGWTDKFIIPPYEFKIANSLITNFHLPESTLLMTASAFGGYDLVMKAYKEAIKEKYRFFSYGDAMLIL

SEQ ID NO: 63067 - protein, 402 aa, Algoriphagus boritolerans
  REGION 1..402: note = tr|A0A1H5RS56|A0A1H5RS56_9BACT S-adenosylmethionine:tRNA ribosyltransferase-isomerase; OS = Algoriphagus boritolerans DSM 17298 = JCM 18970; OX = 1120964 GN=queA PE=3 SV=1
MEIPKIDLRDYEYTLPEERIAKFPLEKRDSSKLLHVRKGAMEHLHFYDLPSLLSSDTLLVYNDTKVIPARLIFQRETGARIEIFLLQPVAPTTVISEIMLTRHPVTWETMIGNSKKWKDDEILTGQVRVNGRVVILSAQLADRESKSVVFSWDDATVAFVDLVEASGEVPLPPYLNRKPNEEDKSRYQTVYSKKEGAVAAPTAGLHFTAEIFEKLRAKGIQEAQVTLHVSAGTFQPIKAQNILEHPMHSEQIQIGRETVEKLLAQKGKTVAVGTTSVRTLESLFWFGVKLLENKGSEFRIEKLFAYENRSTVPSKEDALQAVLNYMEKNQLETILGSTEIFIFPGYRFRMIEGLITNFHQPGSTLILLIATILGKSWSVVYQEALDRDYRFLSYGDSSLLWI

SEQ ID NO: 63068 - protein, 349 aa, Algoriphagus boritolerans
  REGION 1..349: note = tr|A0A1H5UXM3|A0A1H5UXM3_9BACT S-adenosylmethionine:tRNA ribosyltransferase-isomerase; OS = Algoriphagus boritolerans DSM 17298 = JCM 18970; OX = 1120964 GN=queA PE=3 SV=1
MKLSDFKFDVPKKLISLYPTENRDDSRLMVVHRKTGQIEHRIFKDILEYFEEGDVFVTNDTKVFPARLYGNKEKTGAKIEVFLLRELNPELRLWDVLVDPARKIRVGNKLYFGDSDLVAEVIDNTTSRGRTIRFLFDGNHDEFEKTIDTLGETPLLKEIIERKIEPEDRERYQTVFAKNVGAVAAPTAGLHFTPQLLKRLELKGVEVTPITLHVGLGTFRQVDVEDLTKHKMDSENYNIPAGTVKLVNEALDSKKRVVAVGTTSLKTIESSVTAGGRLKESNGWTDKFIIPPYEFKIANALITNFHLPESTLLMTASAFGGYDLVMKAYKEAIKEKYRFFSYGDAMLIL

SEQ ID NO: 63069 - protein, 349 aa, unidentified
  source 1..349: note = Algoriphagus boseongensis
  REGION 1..349: note = tr|A0A4R6T4V6|A0A4R6T4V6_9BACT S-adenosylmethionine:tRNA ribosyltransferase-isomerase; OS = Algoriphagus boseongensis OX=1442587 GN=queA PE=3 SV=1
MKLSDFKFDVPKKLIALYPTENRDESRLMVVHRKTGQIEHKSFKDILDYFDEGDVFVTNDTKVFPARLYGNKEKTGAKIEVFLLRELNPELRLWDVLVDPARKIRVGNKLYFGDSDLVAEVIDNTTSRGRTIRFLFDGTPEEFQKTIDSLGETPLLKEYIDRKIEPEDRERYQTVFAKNLGAVAAPTAGLHFTPQLLKRLELKGIDVTPITLHVGLGTFRQVDVEDLTKHKMDSENYDIPQKTVDLVNEALDNKRKVVAVGTTSLKTVESSVTAGGRLKVSSGWTDKFIIPPYEFKIANALITNFHLPESTLLMTAAAFGGYDLIMKAYKEAIKEKYRFFSYGDAMLIL

SEQ ID NO: 63070 - protein, 402 aa, unidentified
  source 1..402: note = Algoriphagus boseongensis
  REGION 1..402: note = tr|A0A4R6T8T8|A0A4R6T8T8_9BACT S-adenosylmethionine:tRNA ribosyltransferase-isomerase; OS = Algoriphagus boseongensis OX=1442587 GN=queA PE=3 SV=1
MEIPQIDLKNYEYTLPDERIAKFPLEKRDHSQLLQYLKGEIRHYHFYDLPDLLPTDTLLVYNDTKVIPARLIFQRETGAKIEIFLLAPVAPTTVIPEIMLAKHPVTWETMIGNAKKWKDGEILQGRIQMGAKEVVLQAKLVDRESKQVEFSWNDPEIAFVDLVEASGEIPLPPYLNRKAEASDKDRYQTVYSKKEGAVAAPTAGLHFTEEVFERLRKKGVREAQVTLHVSAGTFQPIKVDNVLEHPMHSEQIQVNRETLEILLSNSGKTVAVGTTSVRTLESLFWYGVKLIEGKGEDFFVPKLFAYEKRERIPSRAEAMQAILDLMERQQVETILGQTEIFIFPGYSYQMIEGLITNFHQPGSTLVLLIATILGEDWKKVYQEALDNDYRFLSYGDSSLLWL

SEQ ID NO: 63071 - protein, 349 aa, Algoriphagus chordae
  REGION 1..349: note = tr|A0A2W7QTM8|A0A2W7QTM8_9BACT S-adenosylmethionine:tRNA ribosyltransferase-isomerase; OS = Algoriphagus chordae OX=237019 GN=queA PE=3 SV=1
MKLSDFKFDVPKKLVALYPEANRDESRLMVLHRDTGKIEHRIFKDITEYFGEGDVFVTNDTKVFPARLYGNKEKTGAEIEVFLLRELNAELKLWDVLVDPARKIRVGNKLYFGDSDLVAEVIDNTTSRGRTIRFLFDGTEEEFHKTIDTLGETPLLKDFIERKVEAEDKERYQTVFAQNVGAVAAPTAGLHFTPHLLKRLELQGVDVTPITLHVGLGTFRQVDVEDLTKHKMDSENYSIPDGTVELVNRSLDAKKRVVAVGTTSLKTIESSVTANGRLKASSGWTDKFIIPPYEFKIANSLITNFHLPESTLLMTASAFGGYDLVMKAYKEAIKEKYRFFSYGDAMLIL

SEQ ID NO: 63072 - protein, 403 aa, Algoriphagus chordae
  REGION 1..403: note = tr|A0A2W7R8I5|A0A2W7R8I5_9BACT S-adenosylmethionine:tRNA ribosyltransferase-isomerase; OS = Algoriphagus chordae OX=237019 GN=queA PE=3 SV=1
MQIPAIDLKSYEYTLPEEKIAKFPLAKRDSSKLLLYKDTQISHLNFSNISDLLPADSLLVYNDTKVIPARLIFQRETGARIEIFLLQPISPTTVIPEIMLAKHPVIWETMIGNAKKWKDGEILKGLIPFRGGTITLNAKLIDRATRQVEFSWDNADVAFVDVVEASGEVPLPPYLNRKPVEDDKSRYQTVYSEKDGAVAAPTAGLHFTPEILAQIKAKGIKQAQVTLHVSAGTFQPIKADQVTEHPMHSEQINVNRQTIEMISSQLGKVVAVGTTSVRTLESLYWYGVKLIEGKGEELIIEKLFPYENRESVPTAQESYEAILNHMTENNLETIMGSTEIFIFPGYEFKIVEGLITNFHQPGSTLILLIATILGEDWKRVYAEALANDYRFLSYGDSSLLWIE

SEQ ID NO: 63073 - protein, 402 aa, Algoriphagus faecimaris
  REGION 1..402: note = tr|A0A1G6U674|A0A1G6U674_9BACT S-adenosylmethionine:tRNA ribosyltransferase-isomerase; OS = Algoriphagus faecimaris OX=686796 GN=queA PE=3 SV=1
MFDPKIDLKDYEYFLPDDRIAKFPLEKRDHSNLLQFKGGKISHHHFYDLPVFLPSDTLLVYNNTKVIPARLIFQRETGARIEIFLLQPLTPSTVIPEVMLSTRPVSWDVMIGNAKKWKDGEVLSGEIHINGAQVILQARLENREKRIVSFEWNAQNIAFVDIVEASGEVPLPPYLNRKPVEEDKERYQTVYSKKEGAVAAPTAGLHFTETVFENLRAKGIKEAEVTLHVSAGTFQPIKADNITEHNMHSEQIHLQRETIAQLFNQESKIVAVGTTSVRTLESLYWYGVKLLKNEGDHFLIEKLYPYQDHGGLPTRKESLAAILAQMEKTGKQEIMGSTEIFIFPGYKFQMIEGLITNFHQPGSTLVLLIASILGEDWKKIYQEALDKNYRFLSYGDSSLLWV

SEQ ID NO: 63074 - protein, 349 aa, Algoriphagus faecimaris
  REGION 1..349: note = tr|A0A1G6XJQ4|A0A1G6XJQ4_9BACT S-adenosylmethionine:tRNA ribosyltransferase-isomerase; OS = Algoriphagus faecimaris OX=686796 GN=queA PE=3 SV=1
MKLSDFKFDVPKKLIALYPTDNRDESRLMVVHRKTGEIEHKTFKDIIEYFGEGDVFVTNDTKVFPARLYGNKEKTGAEIEVFLLRELNPELRLWDVLVDPARKIRVGNKLYFGDSDLVAEVIDNTTSRGRTIRFLFDGTEEEFHKTIDTLGETPLLKDIIERKIEPEDRDRYQTVFAKNVGAVAAPTAGLHFTPHLLKRLELQGVEVTPITLHVGLGTFRQVDVEDLTKHKMDSENYDIPDGTVKLVNEALDHKKRVVAVGTTVLKTVESSVTASNHLKASSGWTDKFIIPPYEFKIANALITNFHLPESTLLMTASAFGGYDLVMKAYKEAIKEKYRFFSYGDAMLIL

SEQ ID NO: 63075 - protein, 349 aa, Algoriphagus halophilus
  REGION 1..349: note = tr|A0A1N6D345|A0A1N6D345_9BACT S-adenosylmethionine:tRNA ribosyltransferase-isomerase; OS = Algoriphagus halophilus OX=226505 GN=queA PE=3 SV=1
MKLSDFKFDVPKKLVSLYPTENRDESRLMVLHRDTGKIEHRVFKDIVEYFGEGDVFVTNDTKVFPARLYGNKEKTGAEIEVFLLRELNSELRLWDVLVDPARKIRVGNKLYFGDSDLVAEVIDNTTSRGRTIRFLFDGTEEEFHKTIDSLGETPLLKEFIERKVEAEDRERYQTVFAKNVGAVAAPTAGLHFTPHLLKRLELQGVDVTPITLHVGLGTFRQVDVEDLTKHKMDSENYSIPEETVALVNRALDEKKRVVAVGTTSLKTVESSVTANGRLKASAGWTDKFIIPPYEFKIANALITNFHLPESTLLMTASAFGGYDLVMKAYKEAIKEKYRFFSYGDAMLIL

SEQ ID NO: 63076 - protein, 403 aa, Algoriphagus halophilus
  REGION 1..403: note = tr|A0A1N6EFQ9|A0A1N6EFQ9_9BACT S-adenosylmethionine:tRNA ribosyltransferase-isomerase; OS = Algoriphagus halophilus OX=226505 GN=queA PE=3 SV=1
MNIPQIDLKEYEYTLPEERIARFPLEKRDSSKLLHFKNQVITHQRFSDIPNLLPEDSLLVYNNTKVIPARLIFQRETGARIEIFLLQPIAPTTVIPEIMLAKHPVIWETMIGNLKKWKDGEILQGRIIYQNQEIILSAKLINRDRREVEFSWDQEQIAFVDVVEASGEVPLPPYLNRKPVAEDRDRYQTVYSQKEGAVAAPTAGLHFTNEVLEKLRKKGVKTEEVTLHVSAGTFQPIKSKNITEHPMHSEQIHVAIDTIRNLLQHEGKMVAVGTTSVRTLESLYWYGVKLLRNDGEEFNIPKLYPYTESSVHPHYKDSFQAILSHMEAKGMDTLVGSTEIFIFPGYQFQVVNGLITNFHQPGSTLILLIASILGNRWREIYEEALNSGYRFLSYGDSSLLWID

SEQ ID NO: 63077 - protein, 349 aa, Algoriphagus hitonicola
  REGION 1..349: note = tr|A0A1I2WDH1|A0A1I2WDH1_9BACT S-adenosylmethionine:tRNA ribosyltransferase-isomerase; OS = Algoriphagus hitonicola OX=435880 GN=queA PE=3 SV=1
MKLSDFKFDVPKKLIALYPTDNRDESRLMVVHRKTGEIEHKTFKDIIEYFGEGDVFVTNDTKVFPARLYGNKEKTGAEIEVFLLRELNPELRLWDVLVDPARKIRVGNKLYFGDSDLVAEVIDNTTSRGRTIRFLFDGTEEEFHKTIDTLGETPLLKEIIERKIEPEDRERYQTVFAKNVGAVAAPTAGLHFTPHLLKRLELQGVEVTPITLHVGLGTFRQVDVEDLTKHKMDSENYNIPDATVKLVNEALDHKKRVVAVGTTVLKTVESSVTASNHLKASSGWTDKFIIPPYEFKIANALITNFHLPESTLLMTASAFGGYDLIMKAYKEAIKEKYRFFSYGDAMLIL

SEQ ID NO: 63078 - protein, 402 aa, Algoriphagus hitonicola
  REGION 1..402: note = tr|A0A1I2XDI7|A0A1I2XDI7_9BACT S-adenosylmethionine:tRNA ribosyltransferase-isomerase; OS = Algoriphagus hitonicola OX=435880 GN=queA PE=3 SV=1
MFDPKIELKDYEYILPEDRIAKFPLEKRDHSNLLHYREGKISHHHFYDLPDFLESNSLLVYNNTKVIPARLIFQRETGARIEIFLLQPIAPSTVIPEIMLSTKDVAWEVMIGNAKKWKDGEVLKGQVNYQGELLVLEARLENREKQLVSFHWESDEIPFVSIVEASGEVPLPPYLNRKPVAEDKSRYQTVYSKKEGAVAAPTAGLHFTDEVFESLRKKGIKEAELTLHVSAGTFQPIKVANVTEHAMHSEQIHIQRETIEQLLDQEGKTIAVGTTSVRSLESLYWFGVKILEENTPEFFIEKLFPYKKRTQLPTKKQALQAVLDRMDQEKSTEIMGSTEIFIFPGYQFQMIEGLITNFHQPGSTLILLIAAILGEDWKKVYEEALGNGYRFLSYGDSSLLWI

SEQ ID NO: 63079 - protein, 403 aa, Algoriphagus locisalis
  REGION 1..403: note = tr|A0A1I6XHB8|A0A1I6XHB8_9BACT S-adenosylmethionine:tRNA ribosyltransferase-isomerase; OS = Algoriphagus locisalis OX=305507 GN=queA PE=3 SV=1
MQIPAIDLREYEYTLPEEKIAKHPLAKRDASKLLHYKDGQISHLNFSNIPDLLPADTLLVYNDTKVIPARLIFQRETGARIEIFLLQPISPTTVIPEIMLAKHPVIWETMIGNVKKWKPSEVLKGQIPFQGGTITLEAKLIDRETRKVEFSWDRTDVAFVDVVEASGEVPLPPYLNRKPIEEDKSRYQTVYSEKEGAVAAPTAGLHFTPEIFQQLKSKGIKEAQVTLHVSAGTFQPIKATHVTEHPMHSEQIHVNRETIEMILLHLGNVVTVGTTSVRTLESLYWYGVKLIEGKDEELKIEKLFPYEDRKSLPSAQKSYEAILIYMKEKGLETIMGTTEIFIFPGYQFKVVKGLITNFHQPGSTLILLIATILGDDWKRVYVEALENNYRFLSYGDSSLLRID

SEQ ID NO: 63080 - protein, 349 aa, Algoriphagus locisalis
  REGION 1..349: note = tr|A0A1I7DVJ2|A0A1I7DVJ2_9BACT S-adenosylmethionine:tRNA ribosyltransferase-isomerase; OS = Algoriphagus locisalis OX=305507 GN=queA PE=3 SV=1
MKLSDFKFDVPKKLVAHYPAANRDESRLMVVHRKTGEIEHRVFKDIIEYFGEGDVFVTNDTKVFPARLYGNKEKTGAEIEVFLLRELNAELKLWDVLVDPARKIRVGNKLYFGDSDLVAEVIDNTTSRGRTIRFLFDGTEEEFHKTIDTLGETPLLKEFIERKVEAEDKERYQTVFAKNVGAVAAPTAGLHFTPHLLKRLELQGVDVTPITLHVGLGTFRQVDVEDLTKHKMDSENYEIPTGTVNLVNKSLDAKKRVVAVGTTALKTIESSVTANGRLKESSGWTDKFIIPPYEFKIANSLITNFHLPESTLLMTAAAFGGYDLVMKAYKEAIKEKYRFFSYGDAMLIL

SEQ ID NO: 63081 - protein, 349 aa, unidentified
  source 1..349: note = Algoriphagus machipongonensis
  REGION 1..349: note = tr|A3HWX0|A3HWX0_9BACT S-adenosylmethionine:tRNA ribosyltransferase-isomerase OS=Algoriphagus machipongonensis OX=388413 GN=queA PE=3 SV=1
MKLSDFKFEVPKKLVSLYPAENRDESRLMVLHRDTGKIEHRVFKDITEYFGEGDVFVTNDTKVFPARLYGNKEKTGAEIEVFLLRELNPELRLWDVLVDPARKIRVGNKLYFGDSDLVAEVIDNTTSRGRTIRFLFDGTEEEFHKTIDTLGETPLLKEFIERKVETEDRERYQTVFAKNVGAVAAPTAGLHFTPHLLKRLELQGVEVSPITLHVGLGTFRQVDVEDLTKHKMDSENYNIPEGTVSLVNKALDEKKRVVAVGTTSLKTVESSVTANGRLKASQGWTDKFIIPPYEFKIANALITNFHLPESTLLMTASAFGGYDLVMKAYKEAIKEKYRFFSYGDAMLIL

SEQ ID NO: 63082 - protein, 405 aa, unidentified
  source 1..405: note = Algoriphagus machipongonensis
  REGION 1..405: note = tr|E2RUD9|E2RUD9_9BACT S-adenosylmethionine:tRNA ribosyltransferase-isomerase OS=Algoriphagus machipongonensis OX=388413 GN=queA PE=3 SV=1
MAMKIPEIDLKAYEYTLPEDRIAKFPLEKRDSSKLLLYKNKSIQHLQFYNIPELIPSESLLVYNDTKVIPARLIFQRVTGARIEIFLLQPVAPTTVIPEIMLAKHPVTWETMIGNAKKWKEGETLHGLVTLGDKNIKLSAQLVDKNQRRVTFSWDDPEISFVDVVEGSGEVPLPPYLNRKPVEDDKNRYQTVYSEKEGAVAAPTAGLHFTNEILSKLKEKGVQTEQVTLHVSAGTFQPIKAEKITEHPMHSEQVHIPIGAIKNFIKHAGQIIAVGTTSVRTLESLYWFGVRLIRKETLEFFIPKLYPYENIENLPSSVEAFQSILEHMEKHNLDTLVGSTEIFIFPGYQYKVVKGLITNFHQPGSTLILLIATILGDDWKKVYEEALNNNYRFLSYGDSSLLWID

SEQ ID NO: 63083 - protein, 349 aa, Algoriphagus marincola
  REGION 1..349: note = tr|A0A0P7XKX9|A0A0P7XKX9_9BACT S-adenosylmethionine:tRNA ribosyltransferase-isomerase; OS = Algoriphagus marincola HL-49 OX=1305737 GN=queA PE=3; SV = 1
MKLSDFKFDVPKKLVALYPTPNRDESRLMVVHRKTGEFEHRSFKDILDYFDEGDVFVTNDTKVFPARLYGNKEKTGAEIEVFLLRELNPELRLWDVLVDPARKIRVGNKLYFGDSDLVAEVIDNTTSRGRTIRFLFDGTPEEFYKAIDTLGETPLLKEIIERKVEPEDRERYQTVFAKNVGAVAAPTAGLHFTPHLLKRLELKGIEVTPITLHVGLGTFRQVDVEDLTKHKMDSENYDIPEKTVKLVNEALDHKKRVVAVGTTVLKTVESSVTASNHLKASSGWTDKFIIPPYEFKIANAMITNFHLPESTLLMTAAAFGGYDLIMKAYKEAIKEKYRFFSYGDAMLIL

SEQ ID NO: 63084 - protein, 402 aa, Algoriphagus marincola
  REGION 1..402: note = tr|A0A0P7XCS8|A0A0P7XCS8_9BACT S-adenosylmethionine:tRNA ribosyltransferase-isomerase; OS = Algoriphagus marincola HL-49 OX=1305737 GN=queA-2 PE=3; SV = 1
MQKVNLQEYEYTLPEQRIAKYPLEKRDSSKLLHYQSGKISHHHFFDLPDFLEKGTLLVYNDTKVIPARLIFQRETGARIEIFLLNPVQPTTVIPEIMLSTQPVTWQTMIGNAKKWKSDEILKGVIEIQGQKVVLEARLVDKENKWVEFNWNSESVPFVDIVESSGEVPLPPYLNRKAEESDKDRYQTVYSEKEGAVAAPTAGLHFTEEVFEKLPKKGIEEAQVTLHVSAGTFQPIKVDDVTAHPMHSEQIHLQKSTIEKLLNQEGPIVAVGTTSVRTLESLYWHGVQLLENKGTAFKVAKLIPYDSRESLPSKNESLQAVLNQMEAEEKVEIMGETEIFIFPGYQFQMIDGLITNFHQPGTTLMLLIGSLIGDDWKKVYQEALDNDYRFLSYGDSSLLWINK

SEQ ID NO: 63085 - protein, 349 aa, Algoriphagus ornithinivorans
  REGION 1..349: note = tr|A0A1I5I8P6|A0A1I5I8P6_9BACT S-adenosylmethionine:tRNA ribosyltransferase-isomerase; OS = Algoriphagus ornithinivorans OX=226506 GN=queA PE=3 SV=1
MKLSDFKFDVPKKLIALYPTDNRDESRLMVVHRKTGEIEHRSFKDIIEYFGEGDVFVTNDTKVFPARLYGNKEKTGAEIEVFLLRELNPELRLWDVLVDPARKIRVGNKLYFGDSDLVAEVIDNTTSRGRTIRFLFDGTEEEFHKTIDTLGETPLLKEIIDRKIEPEDRERYQTVFAKNVGAVAAPTAGLHFTPHLLKRLELQGVEVSPITLHVGLGTFRQVDVEDLTKHKMDSENYDIPEKTVGLVNEALDNKKRVVAVGTTSLKTIESSVTANGRLKASSGWTDKFIIPPYEFKIANALITNFHLPESTLLMTASAFGGYDLIMKAYKEAIKEKYRFFSYGDAMLIL

SEQ ID NO: 63086 - protein, 403 aa, Algoriphagus ornithinivorans
  REGION 1..403: note = tr|A0A1I5HPU0|A0A1I5HPU0_9BACT S-adenosylmethionine:tRNA ribosyltransferase-isomerase; OS = Algoriphagus ornithinivorans OX=226506 GN=queA PE=3 SV=1
MKEPQINLRDYEYTLPEDRIAKYPLEKRDDSKLLHYKAGNITHHRFYNLPDLLEEGMLLIYNDTKVIPARLIFQRETGAKIEIFLLAPVSPSTVIPEIMLAKHPVSWETMIGNAKKWKDGEILKGRVQHLGKEIILEAKLLDRERKLVEFSWSPFDVAFVDIVESSGEVPLPPYLNRKAEEEDKSRYQTVYSKKEGAVAAPTAGLHFTEEVFLAIRKKGVKESEVTLHVSAGTFQPIKVDKVQEHPMHSEQIHLQRSVIEKCLEQEGKTVAVGTTSVRSLESLYWYGVKLIENKGEEFFVEKLFPYEIREVLPSKKEALQAVLDLMDSTGQTEVMGSTEIFIFPGYQFQMIEGLITNFHQPGTTLVLLIAAMIGNDWKSVYQEALEKDYRFLSYGDSSLLWFD

SEQ ID NO: 63087 - protein, 349 aa, Algoriphagus ratkowskyi
  REGION 1..349: note = tr|A0A2W7TDI5|A0A2W7TDI5_9BACT S-adenosylmethionine:tRNA ribosyltransferase-isomerase; OS = Algoriphagus ratkowskyi OX=57028 GN=queA PE=3 SV=1
MKLSDFKFDVPKKLVALYPAPNRDESRLMVLHRDSGKIEHRVFKDITEYFGEGDVFVTNDTKVFPARLYGNKEKTGAEIEVFLLRELNSELKLWDVLVDPARKIRVGNKLYFGDSDLVAEVIDNTTSRGRTIRFLFDGTDEEFHKTIDTLGETPLLKEFIERKVEAEDKERYQTVFAKNVGAVAAPTAGLHFTPHLLKRLELQGVDVTPITLHVGLGTFRQVDVEDLTKHKMDSENYSIPEETVELVNRSLDAKKRVVAVGTTSLKTIESSVTANGRLKASSGWTDKFIIPPYEFKIANSLITNFHLPESTLLMTASAFGGYDLVMKAYKEAIKEKYRFFSYGDAMLIL

SEQ ID NO: 63088 - protein, 403 aa, Algoriphagus ratkowskyi
  REGION 1..403: note = tr|A0A2W7R9P8|A0A2W7R9P8_9BACT S-adenosylmethionine:tRNA ribosyltransferase-isomerase; OS = Algoriphagus ratkowskyi OX=57028 GN=queA PE=3 SV=1
MQIPSIDLKAYEYTLPEEKIAKFPLAKRDSSKLLQYKDGQISHFNFSDISELLPAETLLVYNDTKVIPARLIFQRETGARIEIFLLQPISPTTVIPEIMLAKHPVIWETMIGNAKKWKDGEVLKGIIPLENRTIVLLAKLIDRESRKVEFSWDDDEVAFVDVVEASGEVPLPPYLNRKPNEEDKIRYQTVYSEKEGAVAAPTAGLHFTPEIFELIRSKGIKEAQVTLHVSAGTFQPIKASEVTEHPMHSEQIHVNRNTIRHILSHLGNVVTVGTTSVRTLESLYWYGVKLLEEKGEDLTIEKLFPYLDRKSLPTAKESYDAILSYMDEKGIDTIMGTTEIFIFPGYKFKIVNGLITNFHQPGSTLILLIATILGEDWKRVYAEAMANEYRFLSYGDSSLLWIK

SEQ ID NO: 63089 - protein, 349 aa, Algoriphagus sp.
  REGION 1..349: note = tr|A0A418PTZ0|A0A418PTZ0_9BACT S-adenosylmethionine:tRNA ribosyltransferase-isomerase; OS = Algoriphagus sp. N3 OX=2056311 GN=queA PE=3 SV=1
MKLSDFKFDVPRKLISLYPTENRDESRLMVVHRKTGQIEHRLFKDILEYFGEGDVFVINDTKVFPARLYGNKEKTGAKIEVFLLRELNPELRLWDVLVDPARKIRVGNKLYFGDSDLVAEVIDNTTSRGRTIRFLFDGNEEEFQKTIDSLGETPLLKEFIDRKIEPEDRERYQTVFAKNVGAVAAPTAGLHFTPQLLKRLELKGVEIAPITLHVGLGTFRQVDVEDLTKHKMDSENYNIPEKTVQLVNEALDSKKRVVAVGTTSLKTVESSVTAGGRLKASSGWTDKFIIPPYEFKIANSLITNFHLPESTLLMTAAAFGGYDLIMKAYKEAVKEKYRFFSYGDAMLIL

SEQ ID NO: 63090 - protein, 349 aa, Algoriphagus sp.
  REGION 1..349: note = tr|A0A142EI43|A0A142EI43_9BACT S-adenosylmethionine:tRNA ribosyltransferase-isomerase; OS = Algoriphagus sp. M8-2 OX=1727163 GN=queA PE=3 SV=1
MKLSDFKFDVPKKLIALYPTDNRDESRLMVVHRKTGEIEHRTFKDILEYFGEGDVFVTNDTKVFPARLYGNKEKTGAKIEVFLLRELNPELRLWDVLVDPARKIRVGNKLYFGDSDLVAEVIDNTTSRGRTIRFLFDGNEEEFQKTIDSLGETPLLKEFIERKIEPEDRDRYQTVFAKNVGAVAAPTAGLHFTPQLLKRLELKGVEVTPITLHVGLGTFRQVDVEDLTKHKMDSENYDIPQKTVELVNEALDAKKRVVAVGTTSLKTVESSVTAGGRLKASNGWTDKFIIPPYDFKIANSLITNFHLPESTLLMTASAFGGYDLIMKAYKEAVKEKYRFFSYGDAMLIL

SEQ ID NO: 63091 - protein, 349 aa, Algoriphagus yeomjeoni
  REGION 1..349: note = tr|A0A327P0V0|A0A327P0V0_9BACT S-adenosylmethionine:tRNA ribosyltransferase-isomerase; OS = Algoriphagus yeomjeoni OX=291403 GN=queA PE=3 SV=1
MKLSDFKFDVPKKLVAHYPAANRDESRLMVLHRNTGEIEHRVFKDIIEYFGDGDVFVTNDTKVFPARLYGNKEKTGAEIEVFLLRELNAELKLWDVLVDPARKIRVGNKLYFGDSDLVAEVIDNTTSRGRTIRFLFDGTEEEFHKTIDTLGETPLLKEFIERKVEAEDKERYQTVFAKNVGAVAAPTAGLHFTPHLLKRLELQGVDVAPITLHVGLGTFRQVDVEDLTKHKMDSENYEIPDGTVDLVNRSLDAKKRVVAVGTTSLKTIESSVTANGRLKASSGWTDKFIIPPYEFKIANSLITNFHLPESTLLMTAAAFGGYDLVMKAYKEAIKEKYRFFSYGDAMLIL

SEQ ID NO: 63092 - protein, 403 aa, Algoriphagus yeomjeoni
  REGION 1..403: note = tr|A0A327PAX0|A0A327PAX0_9BACT S-adenosylmethionine:tRNA ribosyltransferase-isomerase; OS = Algoriphagus yeomjeoni OX=291403 GN=queA PE=3 SV=1
MQIPEIDLKAYEYTLPEEKIAKFPLSRRDSSKLLHYRNGQISHLNFSNLPELLPAETLLVYNDTKVIPARLIFQRETGAKIEIFLLQPLAPTTVIPEIMLAKHPVIWETMIGNAKKWKDNEVLKGQIPFEGGTITLQAKLIDRETRQVEFSWDKAEVAFVDVVEASGEVPLPPYLNRKPIEEDKSRYQTVYSEKEGAVAAPTAGLHFTPEIFLQLKSKGIKEAQVTLHVSAGTFQPIKATQVTEHPMHSEQIHVNRKTIEMVLSQLGSVVTVGTTSVRTLESLYWYGVKLIEGKGEELKIQKLFPYENRDSLPSPQKSFEAILALMEEKGFQTIMGSTEIFIFPGYKFKIVKGLITNFHQPGSTLILLIATILGNEWKRVYTEALANNYRFLSYGDSSLLWID

SEQ ID NO: 63093 - protein, 402 aa, unidentified
  source 1..402: note = Algoriphagus zhangzhouensis
  REGION 1..402: note = tr|A0A1M7ZHG3|A0A1M7ZHG3_9BACT S-adenosylmethionine:tRNA ribosyltransferase-isomerase; OS = Algoriphagus zhangzhouensis OX=1073327 GN=queA PE=3 SV=1
MLEPLVNLRDYEYTLPEDRIAKYPLEKRDHSKLLHYKNGKIEHLQFFDIPDLIESGSLLVYNDTKVIPARLIFQRETGARIEIFLLQPVSPSTVIPEIMLAKHPVQWECMIGNARKWKDGEILKGSIPFRGKEIILSAKIIERETKRVEFSWSDFSLSFVDIVEASGEVPLPPYLNRQADEEDKSRYQTVYSKKEGAVAAPTAGLHFTNEVFEKIRSKRIKEAQVTLHVSAGTFQPIKVDKVTEHPMHSEQIHLSRETIQLCMEQEGKTIAVGTTSVRSLESLYWFGVKLIEGKGKDFKIEKLFPYEDRKALPSKKESLKAVLEFMDSTGIGELMGTTEIFIFPGYQFQMIEGLITNFHQPGTTLVLLIAAMLGDDWKMVYQDAMERDYRFLSYGDSSLLWF

SEQ ID NO: 63094 - protein, 349 aa, unidentified
  source 1..349: note = Algoriphagus zhangzhouensis
  REGION 1..349: note = tr|A0A1M7ZIT1|A0A1M7ZIT1_9BACT S-adenosylmethionine:tRNA ribosyltransferase-isomerase; OS = Algoriphagus zhangzhouensis OX=1073327 GN=queA PE=3 SV=1
MKLSDFKFDVPKKLVALYPTENRDESRLMVVHRKTGEIEHRSFKDIIDYFGEGDVFVTNDTKVFPARLYGNKEKTGAEIEVFLLRELNPELRLWDVLVDPARKIRVGNKLYFGDSDLVAEVIDNTTSRGRTIRFLFDGTEEEFHKTIDSLGETPLLKEIIERKIEPEDRDRYQTVFAKNVGAVAAPTAGLHFTPHLLKRLELQGVEVTPITLHVGLGTFRQVDVEDLTKHKMDSENYDIPDGTVDLVNEALDNKKRVVAVGTTSLKTIESSVTANGRLKASSGWTDKFIIPPYEFKIANALITNFHLPESTLLMTAAAFGGYDLIMKAYKEAIKEKYRFFSYGDAMLIL

SEQ ID NO: 63095 - protein, 362 aa, Alicycliphilus denitrificans
  REGION 1..362: note = tr|A0A420KDF0|A0A420KDF0_9BURK S-adenosylmethionine:tRNA ribosyltransferase-isomerase; OS = Alicycliphilus denitrificans OX=179636 GN=queA PE=3 SV=1
MSTSPRAFTLSDFDFALPEALIAQHPAPVRSASRLLDGRAAPPADRIFHELPALLREGDLLVFNDTRVVKARVFGEKASGGRLELLIERVLAGNEVVAHMKVSKKPLPGATVHMAGGRAAGGFDATLISRWPDADGPLFRFALHGPAGETPWELMERHGHLPLPPYIERQQNAGHDPDEAEDAERYQTIFARTPGAVAAPTAALHFDDAVLAALAERGVQRASVTLHVGAGTFQPVKTESLAEHRMHSEWYEVPLATLAALERCRMRAGRVVAVGTTTVRTLESWARSGQTTGETDIFITPGFQFQVVQLLVTNFHLPKSTLMMLVSAFAGYEHVMQLYRHAIEERYRFFSYGDSMLLERAR

SEQ ID NO: 63096 - protein, 367 aa, Alicycliphilus denitrificans
  REGION 1..367: note = tr|E8TUH8|E8TUH8_ALIDB S-adenosylmethionine:tRNA ribosyltransferase-isomerase OS=Alicycliphilus denitrificans (strain DSM 18852 / JCM 14587 / BC); OX = 596153 GN=queA P E=3 SV=1
MSTSPRAFTLSDFDFALPEALIAQHPAPVRSSSRLLDGRAAPPSDRIFHELPALLREGDLLVFNDTRVVKARVFGEKASGGRLELLIERVLAGNEVVAHMKVSKKPMPGATVHMAGGKAAGGFDATLLSRWPDADGPLFRFALHGPAGETPWELMERHGHLPLPPYIERQQNAGHDPDEAEDAERYQTVFARAPGAVAAPTAALHFDDAVLAALAERGVQRASVTLHVGAGTFQPVKTESLAEHRMHSEWYEVPLATLAALERCRMRAGRVVAVGTTTVRTLESWARSGQTTGETDIFITPGFQFQVVQLLVTNFHLPKSTLMMLVSAFAGYEHVMQLYRHAIEERYRFFSYGDSMLLERKNDPTHP

SEQ ID NO: 63097 - protein, 366 aa, Alicycliphilus sp.
  REGION 1..366: note = tr|A0A5C8C4P1|A0A5C8C4P1_9BURK S-adenosylmethionine:tRNA ribosyltransferase-isomerase; OS = Alicycliphilus sp. OX=1872437 GN=queA PE=3 SV=1
MPPSPRIHTLSDFDFELPELLIAQHPAPERSSSRLLDGRQSPPTDRIFRELPGLLQPGDLVVFNDTKVVKARVFGEKASGGQLELLIERVLTGNEVVAHMKVSKKPLPGATIHMAGGRRAGGFDATLLARWPDENGPLFHFALHGPAGESAWELMERHGHLPLPPYIERQQNAAHDPDAAEDAERYQTVFARAPGAVAAPTAALHFDAAVLAQLQQRGVETANVTLHVGAGTFQPVKTENLAEHQMHSEWYEIPLATLAALERCRQRGGRVLAVGTTTVRTLESWAQSGQARGDTRIFITPGFAFQVVDLLLTNFHLPKSTLMMLVSAFAGYEHIMLLYRHAIAQRYRFFSYGDAMLLQRRERTTP

SEQ ID NO: 63098 - protein, 367 aa, Alicycliphilus sp.
  REGION 1..367: note = tr|A0A0E9L7W8|A0A0E9L7W8_9BURK S-adenosylmethionine:tRNA ribosyltransferase-isomerase; OS = Alicycliphilus sp. B1 OX=1603291 GN=queA PE=3 SV=1
MSTSPRAFTLSDFDFALPEALIAQHPAPVRSSSRLLDGRAAPPSDRIFHELPALLREGDLLVFNDTRVVKARVFGEKASGGRLELLIERVLTGNEVVAHMKVSKKPLPGATVHMAGGKAAGGFDATLLARWPDAGGTLFRFALHGPAGETPWELMERHGHLPLPPYIERQQNADHDPDEAEDAERYQTVFARTPGAVAAPTAALHFDDAVLAALAARGVERASVTLHVGAGTFQPVKTESLAEHRMHSEWYEVPLATLAALERCRARGGRVVAVGTTTVRTLESWARSGQNTGETDIFITPGFAFQVVDLLVTNFHLPKSTLMMLVSAFAGYEHVMALYQHAIAQRYRFFSYGDSMLLERRNEPTPP

SEQ ID NO: 63099 - protein, 355 aa, Alicyclobacillus acidocaldarius
  REGION 1..355: note = tr|B7DNX3|B7DNX3_9BACL S-adenosylmethionine:tRNA ribosyltransferase-isomerase OS=Alicyclobacillus acidocaldarius LAA1 OX=543302 GN=queA PE=3 SV=1
MRVEDFDYELPEHLIAQQPLPERDQSRLLVVDPVDRVVRHRIFAEIVEELNSGDVLVMNDSRVLPARLHAVKPDTGGHVELLLVRPVDDQPNTWQCLARPAKRLRVGHRLVVGEGDGRVEIEVVGEEDEGIRLVRFHTNESVIDVAHRLGEMPLPPYIHEKLEDQERYQTVYAKRVGSVAAPTAGLHFTERLLQKLRDKGVQLCHVTLHVGIGTFRPVQVENVEEHRMHSEWYEVSPATAEIVNRAKSEGRPVIAVGTTALRTLEAAGQSGMLEAKQGETDIFIYPGFKFHIMDGLITNFHLPKSTLFMLVCAIMGTDYAKAVYREAVERSYRFFSFGDAMFIKRRADVAGTSEV

SEQ ID NO: 63100 - protein, 357 aa, Alicyclobacillus acidocaldarius
  REGION 1..357: note = tr|F8IFQ0|F8IFQ0_ALIAT S-adenosylmethionine:tRNA ribosyltransferase-isomerase OS=Alicyclobacillus acidocaldarius (strain Tc-4-1) OX=1048834 GN=queA PE=3 SV=1
MFVRVEDFDYELPEHLIAQQPLPERDQSRLLVVDPVDRVVRHRIFADIVEELNPGDVLVMNDSRVLPARLHAVKPDTGGHVELLLVRPIDHQPNTWQCLARPAKRVRVGHRLVLGEGGDVVEMEVVGEEDEGIRLVRFDTTESVIDIANRLGEMPLPPYIHEKLEDQERYQTVYAKRVGSVAAPTAGLHFTERLLQRLRDKGVQLCHVTLHVGIGTFRPVQVENVEEHRMHSEWYEVSPETAEMVNRAKADGRPVIAVGTTALRTLEAAGQSGVLEAKQGETDIFIYPGFKFHIMDGLITNFHLPKSTLFMLVCAIMGTDYAKAVYREAVERSYRFFSFGDAMFIKRRADIAGTREV

SEQ ID NO: 63101 - protein, 354 aa, Alicyclobacillus acidoterrestris
  REGION 1..354: note = tr|A0A512CSC5|A0A512CSC5_9BACL S-adenosylmethionine:tRNA ribosyltransferase-isomerase; OS = Alicyclobacillus acidoterrestris OX=1450 GN=queA PE=3; SV = 1
MRVEDFDYELPERLIAQTPLSSRDESRLLVVDPVTHDIQHTHFREITSFLRKGDVLVLNDSRVIPARMYGEKVDTGGRVEILLLRPSEREQIWIALTRPAKRLRLGTKIRVGNGDDQVMVEVVGVEGEGLREVRFWSDEPVVEIANRLGEMPLPPYIHASLEDKDRYQTVYAKHVGSVAAPTAGLHFTEELLNRVREMGVEVHTVTLHVGIGTFRSVQVEEVEAHEMHSEWYEVSEATAEAINRAKSEGRRIISVGTTSLRTLESAGATGRLMPGAQETDIFIYPGYKFRMADALITNFHLPKSTLFMLVSAWMGTDFAKEVYGVAIKEEYRFFSFGDAMFLTRRAPVDGTSQV

SEQ ID NO: 63102 - protein, 354 aa, Alicyclobacillus acidoterrestris
  REGION 1..354: note = tr|T0DTH2|T0DTH2_ALIAG S-adenosylmethionine:tRNA ribosyltransferase-isomerase OS=Alicyclobacillus acidoterrestris (strain ATCC 49025 / DSM 3922 / CIP 106132 / NCIMB13137 / GD3B) OX=1356854 GN=queA PE=3 SV=1
MRVEDFDYELPERLIAQTPLSSRDESRLLVVDPVTHDIQHTHFREITSFLREGDVLVLNDSRVIPARMYGEKVDTGGRVEILLLRPSEREQSWIALTRPAKRLRLGTKIRVGNDDDHVMVEVVGVEGEGLREVRFWSDEPVVDIANRLGEMPLPPYIHASLEDKDRYQTVYAKHVGSVAAPTAGLHFTEELLKRVREMGVEVHTVTLHVGIGTFRSVQVEEVEAHEMHSEWYEVSEATAEAINRAKSEGRRIISVGTTSLRTLESAGATGRLIPGAQETDIFIYPGYKFRMVDALITNFHLPKSTLFMLVSAWMGTDYAKEVYGVAIKEEYRFFSFGDAMFLTRRAPVDGTSQV

SEQ ID NO: 63103 - protein, 364 aa, Alicyclobacillus ferrooxydans
  REGION 1..364: note = tr|A0A0P9EHU2|A0A0P9EHU2_9BACL S-adenosylmethionine:tRNA ribosyltransferase-isomerase; OS = Alicyclobacillus ferrooxydans OX=471514 GN=queA PE=3; SV = 1
MYQRKTSDLRVEDFDYALPDELIAQHPLEDRDASRLMVLDPVVETIEHRTFRDIVRYLNAGDVLVFNNSKVLPARLYGKKEDTGANVELLLTKRLGPYEWEAMAKPAKRLREGHVVIFPSNHGLEGSGTDVLGQAVVAGVEEDGIRRLRFTLSGSMEEFLYEIGQMPLPPYIHEPLREADRYQTVYAKDEGSVAAPTAGLHFTESLLDSLREKGVDLQFVTLHVGIGTFRPVTVDRVEDHHMHSETYYVDPTVADAVNRAKREGRRVIAVGTTALRTLESAGQSGEVHPGHGDTDIFIYPGYQFQVIDALITNFHLPKSTLIMLVSALMGTEFTKRVYEAAVRERYRFFSFGDAMFITRKGQSE

SEQ ID NO: 63104 - protein, 355 aa, Alicyclobacillus hesperidum
  REGION 1..355: note = tr|J9HPM3|J9HPM3_9BACL S-adenosylmethionine:tRNA ribosyltransferase-isomerase OS=Alicyclobacillus hesperidum URH17-3-68 OX=1200346 GN=queA PE=3 SV=1
MRVDEFDYYLPEHLIAQEPLPERDQSRLLVVDPVVQAIWHRKFADIVEELHPGDVLVMNDSRVLPARLYARKSATGAQVELLLLRPSEADSHTWYALARPAKRLRQGTPLTLGEGEDAIEIEVVAEGEEGIREIRFLTEESVIDIANRYGEMPLPPYIHNNLEDQERYQTVYAKRVGSVAAPTAGLHFTPQLLERIGAKGVDIRHVTLHVGLGTFRPVQVETVESHHMHSEWYEVSPETAAAVNQAKAEGRRIVAVGTTALRTLEAAGASGTLEAKQDETDIFVYPGYKFKMIDALITNFHLPKSTLFMLVCALMGTEFAKTVYAEAVAESYRFFSFGDAMFITRRAAVEATGNV

SEQ ID NO: 63105 - protein, 355 aa, Alicyclobacillus hesperidum; identical to SEQ ID NO: 63104
  REGION 1..355: note = tr|A0A1H2Q2U0|A0A1H2Q2U0_9BACL S-adenosylmethionine:tRNA ribosyltransferase-isomerase; OS = Alicyclobacillus hesperidum OX=89784 GN=queA PE=3 SV=1

SEQ ID NO: 63106 - protein, 376 aa, Alicyclobacillus macrosporangiidus
  REGION 1..376: note = tr|A0A1I7J0D9|A0A1I7J0D9_9BACL S-adenosylmethionine:tRNA ribosyltransferase-isomerase; OS = Alicyclobacillus macrosporangiidus OX=392015 GN=queA; PE = 3 SV=1
MRVEDFDYELPEELIAQTPLERRTDSRLMVVDPVARTVRHTRFANLRDHLVPGDVLVLNNSKVLPARIMAVKTDTGARIELLLSKAIADDEWEVLARPAKRLKAGTTLDILEPVPGEADGWRPSGGTAVVTAVREEGLRHLRFSAQEPLEAFFQRVGNVPLPPYIHAKLKDPNRYQTVYAQHAGSVAAPTAGLHFTEDLLQEVREMGVEVHFVTLHVGLGTFKPVKVERVEEHRMHSEAYYVPPSVADAVRRAKREGRRVIAVGTTALRTLESAGQDGDIRAGGGDTSIFIYPGYQFRVIDALITNFHLPKSTLLMLVAAMMGLDFTKRVYETAVAERYRFFSFGDAMFIVRGVWAGDGKGKVAAAGGDSNGTGTV

SEQ ID NO: 63107 - protein, 359 aa, Alicyclobacillus macrosporangiidus
  REGION 1..359: note = tr|A0A1I7L089|A0A1I7L089_9BACL S-adenosylmethionine:tRNA ribosyltransferase-isomerase; OS = Alicyclobacillus macrosporangiidus OX=392015; GN = SAMN05421543_1224 PE=3 SV=1
MTQSALDLNLHLSRPPAPAPLPPEARGLRRDEVRLLVMDRATGACRHARFVDLPHFLSAGDLMVVNTSATIPGRLRAVYRGEPLYLHLAIRLTEDTCILERRRADGGPDPRPFEPGDTLRVVHPEDGRVLARIQVEAHFHPDSRLWRVRADRDLFRVAEAAGVPIQYGYVTRPLETGAFQTLFSRTPGSAEMPSAARPFTHRVLRGLAARGVRFCSLLLHTGVSSHEVASDLARHPVLPEWYHIPPATAAAVNRAMAEGRRVIAVGTTVVRALESAAVPARGGEGVRVRSGSNWTTHLVTPATPPRVVHGLITGMHDNHTSHLALLYAFARPEFLRRAYEEAVQLGYLWHEFGDISLLV

SEQ ID NO: 63108 - protein, 355 aa, unidentified
  source 1..355: note = Alicyclobacillus montanus
  REGION 1..355: note = tr|A0A1M6KAF1|A0A1M6KAF1_9BACL S-adenosylmethionine:tRNA ribosyltransferase-isomerase; OS = Alicyclobacillus montanus OX=1830138 GN=queA PE=3 SV=1
MRVDEFDYQLPSHLIAQHPIENRSESRLMVVDPVTKTWQHRRFAQIVEELQSGDVLVVNDSRVLPARLVGEKCDTGGRFELLLLQPTGEDTYTALARPAKRLRQGSTLQFYPKGDLSQPLVGEAEVLKELPDGVREIRFTQMSSSDTLHAYIEKIGVMPLPPYIRAPLKDEERYQTVYARVTGSVAAPTAGLHFTQELLEELRSQGVLIAPVTLHVGLGTFRPVQVEEVSAHQMHSEWYEVPKETADIVNQAHANGKRVVAVGTTALRTLESAGSSGVLQATSGETDIFIYPGYRFRMADALITNFHLPKSTLFMLVSAWMGREFALQVYEAAIAEEYRFFSFGDAMFLKRRGEA

SEQ ID NO: 63109 - protein, 364 aa, Alicyclobacillus sacchari
  REGION 1..364: note = tr|A0A4R8LTM3|A0A4R8LTM3_9BACL S-adenosylmethionine:tRNA ribosyltransferase-isomerase; OS = Alicyclobacillus sacchari OX=392010 GN=queA PE=3 SV=1
MYGKDGTTTVRVDEFDYYLPEHLIAQEPLPERDQSRLLVVDPVAQRVWHRQFADIVEELHPGDVLVMNDSRVLPARLYARKSATGAQVEVLLLRPSESDAHTWFALARPAKRLRQGTPLTLGEGEDAIEIEVVAEGEEGIREIRFLTDESVIDIANRFGEMPLPPYIHNNLEDQERYQTVYAKRVGSVAAPTAGLHFTSQLLERIRAKGVDIRHVTLHVGLGTFRPIQVETVESHHMHSEWYEVSPETAEAVNRAKAEGRRIVAVGTTALRTLEAAGASGKLEAKQDETDIFVYPGYKFKMVDALITNFHLPKSTLFMLVCALMGTEFAKSVYAQAVAESYRFFSFGDAMFITRRADVEATGNV

SEQ ID NO: 63110 - protein, 355 aa, unidentified
  source 1..355: note = Alicyclobacillus tengchongensis
  REGION 1..355: note = tr|A0A0V0PS05|A0A0V0PS05_9BACL S-adenosylmethionine:tRNA ribosyltransferase-isomerase; OS = Alicyclobacillus tengchongensis OX=368812 GN=queA PE=3; SV = 1
MRVDEFDYYLPEHLIAQEPLPERDQSRLLVVDPVVQAIWHRKFADIVEELHPGDVLVMNDSRVLPARLYARKSATGAQVELLLLRPSEADSHTWYALARPAKRLRQGTPLTLGEGEDAIEIEVVAEGEEGIREIRFLTEESVIDIANRYGEMPLPPYIHNNLEDQERYQTVYAKRVGSVAAPTAGLHFTPQLLERIGAKGVDIRHVTLHVGLGTFRPVQVETVESHHMHSEWYEVSPETAAAVNQAKAEGRRIVAVGTTALRTLEAAGASGTLEAKQDETDIFVYPGYKFKMIDALITNFHLPKSTLFMLVCALIGTEFAKTVYAEAVAESYRFFSFGDAMFITRRADVEATGNV

SEQ ID NO: 63111 - protein, 355 aa, Alicyclobacillus vulcanalis
  REGION 1..355: note = tr|A0A1N7P9E7|A0A1N7P9E7_9BACL S-adenosylmethionine:tRNA ribosyltransferase-isomerase; OS = Alicyclobacillus vulcanalis OX=252246 GN=queA PE=3 SV=1
MRVEDFDYELPEHLIAQHPLPERDQSRLLVVDPVDRVVSHRIFADIVDELHPGDVLVMNDSRVLPARLFAVKPDTGGRVELLLVKPDESQPNTWQCLARPAKRLRVGHRLVLGEGADRVELEIVGEEDEGIRLVRFLTDEAVTDVAHRFGEVPLPPYIHETLEDKERYQTVYAKREGSVAAPTAGLHFTDRLLQRLREKGVQLCHVTLHVGIGTFRPVQVENVEEHRMHSEWYEVSPETAEIVNRAKAEGRPVIAVGTTALRTLEAAGQTGVLEAKQGETDIFIYPGFQFRIMDGLITNFHLPKSTLFMLVCAIMGTDYAKAVYREAVEREYRFFSFGDAMFIKRRADVAGTGQV

SEQ ID NO: 63112 - protein, 352 aa, unidentified
  source 1..352: note = Aliidiomarina haloalkalitolerans
  REGION 1..352: note = tr|A0A432VTP4|A0A432VTP4_9GAMM S-adenosylmethionine:tRNA ribosyltransferase-isomerase; OS = Aliidiomarina haloalkalitolerans OX=859059 GN=queA PE=3; SV = 1
MNKSDFYFELPDHLIAHYPQPDRSASRLLTLSGPTGEVNHRQFRDLPDLLEAGDLLVFNDTRVIPARMLGQKVSGGKIEVLVERILDDHRVLAHVRANRAPKAGTKLLLEEAVAAEIGERSDALFEVHFDPAKTVLEWLDAYGHMPLPPYIERPDEASDRERYQTVYGKKPGAVAAPTAGLHFDETIMQRLQEKGVNTAYVTLHVGAGTFQPVRTDDIREHKMHSEYAEVPAHVVETIRATKAAGKRVVAVGTTSVRSLESAAKANGGEIGEFAAETDIFIFPGYEFKVIDAMVTNFHLPESTLIMLISAFAGKEQVMGAYQAAIDHEYRFFSYGDAMFITRNDRAPEQASA

SEQ ID NO: 63113 - protein, 349 aa, unidentified
  source 1..349: note = Aliidiomarina iranensis
  REGION 1..349: note = tr|A0A432VVA8|A0A432VVA8_9GAMM S-adenosylmethionine:tRNA ribosyltransferase-isomerase; OS = Aliidiomarina iranensis OX=1434071 GN=queA PE=3 SV=1
MKRSDFYFELPEKLIAHYPQPDRSSSRLLTLDGPTGAIAHRQFRELPDLLNAGDLLVFNDTRVIPARLLGQKVSGGKIEVLVERVIDDHHVLAHVRANRAPKPGTELLLENAVSCVIGERADALFEVHFDKSRTVLEWLEEYGHMPLPPYIDRPDEASDRERYQTVYGVKPGAVAAPTAGLHFDSAVMDALAAKGVETAYVTLHVGAGTFQPVRADDIREHKMHSEYAVVPESVVAAVEATRARGGRVVAVGTTSVRSLESAAQAHGGELAEFAAETDIFIYPGYKFNVVDAMLTNFHLPESTLIMLISAFAGKAEVMAAYEAAIEQEYRFFSYGDAMFITGKHTATQD

SEQ ID NO: 63114 - protein, 346 aa, unidentified
  source 1..346: note = Aliidiomarina maris
  REGION 1..346: note = tr|A0A327WUN2|A0A327WUN2_9GAMM S-adenosylmethionine:tRNA ribosyltransferase-isomerase; OS = Aliidiomarina maris OX=531312 GN=queA PE=3 SV=1
MKVADFSFDLPDELIARYPQPERSASRMLQVDASTGELTHSQFGDIVAAINPGDLLIFNDTRVIPARLLGQKVSGGKVEVLVERVLDEHHVLAHVRANRAPKAGVRVRLEDAFEAEVIGREGALFKLHFDAPQTVLELLEAHGHMPLPPYIDRPDEDSDRERYQTVYNRKPGAVAAPTAGLHFDQKILQQLQDKGVEFAYVTLHVGAGTFQPVRVESIEAHVMHSEYAEVGQDTIDAIQAARARGNRVIAVGTTSVRSLESMARASQGEGLQPFFAETDIFIYPGYQFAVVDAMVTNFHLPESTLLMLVSAFASRDIMLNAYASAVQHEYRFFSYGDAMFLHNRAG

SEQ ID NO: 63115 - protein, 343 aa, unidentified
  source 1..343: note = Aliidiomarina minuta
  REGION 1..343: note = tr|A0A432W4G3|A0A432W4G3_9GAMM S-adenosylmethionine:tRNA ribosyltransferase-isomerase; OS = Aliidiomarina minuta OX=880057 GN=queA PE=3 SV=1
MKVSDYTFTLPDELIARYPQAERSASRLLDLHAKSGAVTHRQFRDIVDLVAPGDLLVFNDTRVIPARMLGQKVSGGKVEILVERIVDEHSVLAHVRCNRAPKAGTQLLLEGIVEAEVTGRQDTLFEVTFAGNEGVLNILELHGHMPLPPYIDRPDESSDRERYQTVYNRKPGAVAAPTAGLHFDDKILQALRDKGVEFAYVTLHVGAGTFQPVRVESIEEHVMHSEYAEVAEPCIAAIEATKARGGRVIAVGTTSVRSLESMAQASGSEGLQPFFEETDIFIFPGYEFQVVDAMLTNFHLPESTLLMLVSAFAGREHIIAAYDEAVQQEYRFFSYGDAMFIHA

SEQ ID NO: 63116 - protein, 344 aa, unidentified
  source 1..344: note = Aliidiomarina sanyensis
  REGION 1..344: note = tr|A0A432WCH4|A0A432WCH4_9GAMM S-adenosylmethionine:tRNA ribosyltransferase-isomerase; OS = Aliidiomarina sanyensis OX=1249555 GN=queA PE=3 SV=1
MKKSDFYFDLPDHLIARYPQPDRSSSRLLTLDGESGAIGHRGFRDLPSLLAPGDLLVFNDTRVIPARLLGQKVSGGKIEVLVERILDQHRVLAHVRSNRSPKNGAQLLLEGAVHAEVVGRVEALFEIAFDPAKTVLEWLDAYGHMPLPPYIDRPDEQSDRERYQTVYSKKPGAVAAPTAGLHFDDSVMQALADKGIETAYVTLHVGAGTFQPVRTENILEHKMHSEYAEVSEAVVDAVATCKARGGRVIAVGTTSVRSLESAAHFNGGTLAPYTAETDIFIYPGYRFHVVDAMVTNFHLPESTLIMLISAFAGKSEVMQAYQAAIQEEYRFFSYGDAMFITRKP

SEQ ID NO: 63117 - protein, 345 aa, unidentified
  source 1..345: note = Aliidiomarina shirensis
  REGION 1..345: note = tr|A0A432WQY6|A0A432WQY6_9GAMM S-adenosylmethionine:tRNA ribosyltransferase-isomerase; OS = Aliidiomarina shirensis OX=1048642 GN=queA PE=3 SV=1
MKRSDFYFELPENLIAHYPQPDRSSSRLLTLDGPSGDLAHRQFRELPDLLNPGDLLVFNDTRVIPARLLGNKVSGGKIEVLVERIVDDHRVLAHVRANRAPKPGTELLLEDAVPCVIGERADALFEVHFDKGRTVLEWLEEFGHMPLPPYIDRPDEASDRERYQTVYGVKPGAVAAPTAGLHFDSAVMDALAAKGIETAYVTLHVGAGTFQPVRTDDIREHKMHSEYAVVPESVVAAVAATRARGGRVIAVGTTSVRSLESAAKANGGELAEFAAETDIFIYPGYRFNVVDAMLTNFHLPESTLIMLISAFAGQAEVMAAYQAAIEQEYRFFSYGDAMFITAKQG

SEQ ID NO: 63118 - protein, 345 aa, unidentified
  source 1..345: note = Aliidiomarina soli
  REGION 1..345: note = tr|A0A432WDX2|A0A432WDX2_9GAMM S-adenosylmethionine:tRNA ribosyltransferase-isomerase; OS = Aliidiomarina soli OX=1928574 GN=queA PE=3 SV=1
MKVADFSFELPDELIARYPQPERSASRMLDVDASSGELTHRQFKDIVDLLQRGDLLVFNDTRVIPARLLGQKVSGGKVEVLVERVLDEHHVLAHVRANRAPKAGVRVLLEEAFEAEVLGREGALFKLHFDSQQTVLELLEAHGHMPLPPYIDRPDEDSDRERYQTVYNRKPGAVAAPTAGLHFDDAILQQLQDKGVEFAYVTLHVGAGTFQPVRVESIEEHIMHSEYAEVGEDTIAAIQAAKARGGRVVAVGTTSVRSLESMAKASATDQLQPFFAETDIFIYPGYQFAVVDAMVTNFHLPESTLLMLVSAFASRDIMLNAYQSAVEHNYRFFSYGDAMFLHSRA

SEQ ID NO: 63119 - protein, 362 aa, Aliidiomarina sp.
  REGION 1..362: note = tr|A0A552WZF8|A0A552WZF8_9GAMM S-adenosylmethionine:tRNA ribosyltransferase-isomerase; OS = Aliidiomarina sp. IM1326 OX=2593535 GN=queA PE=3 SV=1
MKKSEFHFDLPDHLIARYPQPDRSSSRLLTLDGPSGAISHQQFRELPNLLRAGDLLVFNDTRVIPARLLGQKVSGGKVEVLVERVLDQHRVLAHLRSNRSPKAGTKLLLENAVQATVMGREDALFEIAFDPSRSVLEWLDAYGHMPLPPYIDRPDEASDRERYQTVYSKKPGAVAAPTAGLHFDDAVMQALAEKGVETAYVTLHVGAGTFQPVRTDDIRDHTMHSEYAEVPADVVAAVERTKARGGRVIAVGTTSVRSLESAAHFNQGTLAPFTAETNIFIYPGYRFHVVDAMITNFHLPESTLIMLISAFAGKEHVMAAYQAAIQAEYRFFSYGDAMFITQNPRVEAMSTSTPHQNEKVDS

SEQ ID NO: 63120 - protein, 346 aa, Aliidiomarina taiwanensis
  REGION 1..346: note = tr|A0A432X1C3|A0A432X1C3_9GAMM S-adenosylmethionine:tRNA ribosyltransferase-isomerase; OS = Aliidiomarina taiwanensis OX=946228 GN=queA PE=3 SV=1
MKRQEYHFELPDELIARYPQKDRATSRLLHLNGSTGTCEHKQFRDLLELIEPNDLLVFNDTRVIPARLLGQKVSGGKLEVLVERVTGSHTAFAHVRSNRAPKVGAELLLECAVKVQVIGREDALFELEFDHEKSVLEWLDTYGHMPLPPYIDRPDEQADRERYQTVYGRKLGAVAAPTAGLHFDEPMLQALREKGVHFAHVTLHVGAGTFQPVRVDNILEHKMHSEYAEVPTEVVQAIAEARQRGGRVIAVGTTSVRSLESAAVAGNGELKPFANETDIFIYPGYEFKVVDAMLTNFHLPESTLIMLVSAFAGKSHVMGAYKEAIEHKYRFFSYGDAMFISKKITE

SEQ ID NO: 63121 - protein, 333 aa, unidentified
  source 1..333: note = Aliifodinibius roseus
  REGION 1..333: note = tr|A0A1M4VSD9|A0A1M4VSD9_9BACT S-adenosylmethionine:tRNA ribosyltransferase-isomerase; OS = Aliifodinibius roseus OX=1194090 GN=queA PE=3 SV=1
MNYTLSDFDYDLPEKLIAQQPAQPRDHARLLVYDRSTGTITDAVFYNLRNYLPGDTTLVLNNSKVEKCRLLFEDGKKEIFILDAANDTTVRALVRPGKKFQKGRTLSLTDRISATVVDIDKEGIRTLRLRPPLNEEVYDHYKYTPFPPYIEQDESLSEEYQTVYARDSGSKAAPTAGLHFTDELLSEIQDSGILKAEVTLHVGLGTFAPVKTETIEEHTMHSEWFRLTPKTARQLNQADHLTAVGTTSVRVLETCLQQNDRFTPTAMDTDIFIRPGYSFKAVDALITNFHLPKSTLLMLVAAFTGFEEMRHIYQHAIDEQYRFYSFGDAMLIL

SEQ ID NO: 63122 - protein, 348 aa, unidentified
  source 1..348: note = Aliifodinibius roseus
  REGION 1..348: note = tr|A0A1M4WMJ6|A0A1M4WMJ6_9BACT S-adenosylmethionine:tRNA ribosyltransferase-isomerase; OS = Aliifodinibius roseus OX=1194090 GN=queA PE=3 SV=1
MKLTDFKFDIDDYNVPEEPVEPRDAARLMVLDREDETITHKKFSDIHEYLNEGDVLIYNDTKVFPARLKGKKEKTDADIEVFLLRELVPENMLWDVLVEPARKIRIGNKLYFGPNLMAEVIDNTTSRGRTIRFLFEGTNEELYKLLDDIGEMPLPPYIERDAKEEDKEQYQTIFAKERGSVAAPFAAMHFTEELVEKLEDKGVEMLPITLHIGWGTFRPVEVEDLTKHRMDSENFHISQETSDKINEALASSDHKVVGCGTTAVRTIETSITASGISKPGTGWTDKFIYPPYDFKITEGVITNFHRPESTMLMLGAAFGGYDFVMEAYEEAKENDYRFFAFGDAMLII

SEQ ID NO: 63123 - protein, 348 aa, unidentified
  source 1..348: note = Aliifodinibius sediminis
  REGION 1..348: note = tr|A0A521CNF1|A0A521CNF1_9BACT S-adenosylmethionine:tRNA ribosyltransferase-isomerase; OS = Aliifodinibius sediminis OX=1214077 GN=queA PE=3 SV=1
MKLTDFKFETDDFNVPEEPVEPRDASKLMVLDREDESITHKKFSDIHEYLNEGDVLIYNDTKVFPARLKGKKEKTDADIEVFLLRELVPENMLWDVLVEPARKIRIGNKLYFGPNLMAEVIDNTTSRGRTIRFLFEGTNEELYKLLDEIGEMPLPPYIEREAREEDKEQYQTIFAKERGSVAAPFAAMHFTHELVEKLEDKGVEVLPITLHIGWGTFRPVEVEDLTKHRMDSENYHISKETSDKINKALASRDNKVVGCGTTAVRTIETSITASGISKPGTGWTDKFIYPPYDFKITEGVITNFHRPESTMLMLGAAFGGYDFVMRAYEEAKENDYRFFGFGDSMLII

SEQ ID NO: 63124 - protein, 337 aa, unidentified
  source 1..337: note = Aliifodinibius sediminis
  REGION 1..337: note = tr|A0A521ED04|A0A521ED04_9BACT S-adenosylmethionine:tRNA ribosyltransferase-isomerase; OS = Aliifodinibius sediminis OX=1214077 GN=queA PE=3 SV=1
MMSYSLSDFDYDLPEELIAQEPAQPRDHARLLIYNRSADTITDDYFYNLPDYLPEETTLVLNNSKVEKCRLLFDDGKKEIFILDAVNDTTVRALVRPGKKFKKGRTVQLADGISATVQDIDEEGIRMLELTPSLSHKLYEEFKHTPFPPYIEQNESLSEEYQTVYARPDSSGGSKAAPTAGLHFTDELLARISRAGIAKAEVTLHVGLGTFAPVKSETIDEHTMHAEWFRLRRETAQQLNEAAHITAVGTTSVRVLESCAQHNNHFSSTAMKTDIFIRPGFTFQATDALITNFHLPKSTLLMLVAAFTGYENMKKIYQHAISEEYRFYSFGDAMLIV

SEQ ID NO: 63125 - protein, 348 aa, unidentified
  source 1..348: note = Aliifodinibius sp.
  REGION 1..348: note = tr|A0A2A2GB46|A0A2A2GB46_9BACT S-adenosylmethionine:tRNA ribosyltransferase-isomerase; OS = Aliifodinibius sp. WN023 OX=2032627 GN=queA PE=3 SV=1
MKLTDFKFDTEDFNVPDEPVQPRDAAKLMVLNREDQSIKHETFADIHKYLDEGDVLIYNNTKVFPARLKGKKEKTDADIEVFLLRELVPENMLWDVLVEPARKIRIGNKLYFGPNLMAEVIDNTTSRGRTIRFLFEGSNEELYHILDNIGEMPLPPYIEREAREEDKEQYQTIFAKERGSVAAPFAAMHFTEELVEKLEDKGVEMLPITMHIGWGTFRPCEVEDLTKHRTDSENYYISEETSSKINEALADEDRKVVGCGTTSVRTIETSITASGISKPGTGWTDKFIFPPYDFKITEGVITNFHRPESTMLMLGAAFAGYDFLMEAYEEAQEKDYRFFAFGDSILIL

SEQ ID NO: 63126 - protein, 333 aa, unidentified
  source 1..333: note = Aliifodinibius sp.
  REGION 1..333: note = tr|A0A2A2GD71|A0A2A2GD71_9BACT S-adenosylmethionine:tRNA ribosyltransferase-isomerase; OS = Aliifodinibius sp. WN023 OX=2032627 GN=queA PE=3 SV=1
MSYTLSDFDYDLPDEFIAQKPADPRDHSRLLVYDRESETITDDHFYNIYKYLPKNTTLVVNNSKVEKCRLLFDDGKKEIFILDTANNTTVQAMVRPGKKFKKGKTVDLTDTISAEILDIDEEGLRTLKMSPSLDNQVYEQYKHTPFPPYIEQNESLSEKYQTVYADHLGSKAAPTAGLHFTDELLAKIKEEGVNQAEVTLHVGLGTFAPVKADSIEEHTMHSEWFKITEKTADQLNNAEHLTAVGTTSVRVLESALRKHQQFTSTKMDTDIFIRPGFEFKGTDALITNFHLPKSTLLMLVAAFTGYEEMKKIYQHAIDEEYRFYSFGDAMLIL

SEQ ID NO: 63127 - protein, 346 aa, unidentified
  source 1..346: note = Aliiglaciecola lipolytica
  REGION 1..346: note = tr|K6X5N9|K6X5N9_9ALTE S-adenosylmethionine:tRNA ribosyltransferase-isomerase OS=Aliiglaciecola lipolytica E3 OX=1127673 GN=queA PE=3 SV=1
MKLSDFHFDLPEHLIARYPTEQRTASRLLCLDGKTGALNHTRFSSILDLIEVGDLLIFNNTRVIPARLLGKKSSGGKVEVLVERILDDKTVLAHVKSSKSPKPGAQLILEEQIQMEMVKRHDQLFELKVLNDEPVLSLLEQYGHMPLPPYIDRPDEDSDKERYQTVYSDKPGAVAAPTAGLHFDEQTLEALKQKGINIAFVTLHVGAGTFQPVRVDNIYEHHMHSEYAEVPQDVVDAIVQTKANGKRVIAVGTTSVRSLESAAAATIKQGKPLAPFFEDTDIFIYPGYQFEVVDAMLTNFHLPESTLIMLISAFAGRENVMHAYQDAIANEYRFFSYGDAMFIEKS

SEQ ID NO: 63128 - protein, 346 aa, unidentified
  source 1..346: note = Aliiglaciecola sp.
  REGION 1..346: note = tr|A0A553KXZ1|A0A553KXZ1_9ALTE S-adenosylmethionine:tRNA ribosyltransferase-isomerase; OS = Aliiglaciecola sp. M165 OX=2593649 GN=queA PE=3 SV=1
MKVSDFHFDLPDELIARYPTEQRSASRLLCLDGKSGEVNHSHFTAFVEHVDAGDLLIFNNTRVIPARLLGQKATGGKVEVLVERIIDEQTLLAHVKASKSPKPGTVLKLESYIELEMVQRRDQLFELRVLNDQPILALLEAYGHMPLPPYIDRPDEDSDKERYQTVYSEKPGAVAAPTAGLHFDDEILAALKAKGVNMEFVTLHVGAGTFQPVRVDNIEEHHMHSEYAEVPQTVVDAINQTKASGKRVIAVGTTSVRSLESMAAATVKKGKPMAPFFEDTEIFIYPGYQFEVVDAMLTNFHLPESTLIMLISAFAGRDNVMNAYQQAIEKEYRFFSYGDAMLIEKA

SEQ ID NO: 63129 - protein, 346 aa, unidentified
  source 1..346: note = Aliikangiella marina
  REGION 1..346: note = tr|A0A545THX8|A0A545THX8_9GAMM S-adenosylmethionine:tRNA ribosyltransferase-isomerase; OS = Aliikangiella marina OX=1712262 GN=queA PE=3 SV=1
MQKQDFRFDLPESLIANEPCSNRTDSRLMVLDPVENTCQHKHFRDLVDFLNPEDCLIFNNTKVIPARLQGTRESGGKVEVLVERVIPGDDYDTCVAQVRASNTPKKGAKINIAEELALEVIGREGAFFKLKSLSQGPLFELIEKYGAMPLPPYIKREAEEVDKQRYQTVYAEKQGAVAAPTAGLHFDEALMQKITNKGVATGFVTLHVGAGTFTPVRVDNITQHQMHSEWYELSESVVQLVNETRSKGGRVIAVGTTSVRCLESASRAGEIKASSGETDIFIYPGYEFKAVDGLITNFHLSESTLLMLVSAFAGKDFMLEQYRVAVENQYRFFSYGDSMFIQNRLP

SEQ ID NO: 63130 - protein, 369 aa, unidentified
  source 1..369: note = Aliikangiella sp.
  REGION 1..369: note = tr|A0A545UAF2|A0A545UAF2_9GAMM S-adenosylmethionine:tRNA ribosyltransferase-isomerase; OS = Aliikangiella sp. M105 OX=2592383 GN=queA PE=3 SV=1
MRKQDFQFQLPDSLIANQPSENRTDSRLMVIDPKTQTVGDHHFFNLVDFLQPNDCLIFNNTKVIPARLQGSRETGGKVEVLIERIIPRRYESVKKDAHIPGQDDLSNKDVCIAQLRASNAPKPGAEIILADDFRLVVVGREGAFFKLESQTDEPLLELVERYGSTPLPPYIRRETEALDKQRYQTVYAEKQGAVAAPTAGLHFDEALLKKINDKGVETDFVTLHVGAGTFSPIRVDNILEHQMHSEWFEVPESVVELVSRTRRNGGRVIAVGTTSVRCLESASQKGQLESCCGETDIFIYPGYQFKSVDALVTNFHLSESTLLMLVSAFAGREFILDAYNKAVERAYRFFSYGDAMFIQNTEDSEKETK

SEQ ID NO: 63131 - protein, 354 aa, unidentified
  source 1..354: note = Aliiroseovarius crassostreae
  REGION 1..354: note = tr|A0A0P7I076|A0A0P7I076_9RHOB S-adenosylmethionine:tRNA ribosyltransferase-isomerase; OS = Aliiroseovarius crassostreae OX=154981 GN=queA PE=3 SV=1
MKLSDFDFDLPEELIATRPVRPRPASRMLVATPGGQVDAHVRDLCDWLRPGDRLVLNNTKVIPGRLFGTRSRAGQAPGEGQAKIEVTLLSPTADGHWRAMIKPLRKVREGEVIAFAAGLSATLLNKQDGQGALAFNMSGADFDAALQEAGEMPLPPYIAAKRAADAQDAVDYQTVFAKKTGAVAAPTASLHFDEALLARVAEMGVGITEVTLHVGAGTFLPVKVDDVRDHKMHAEWGHVSENAAEEINATKAAGGRVIPVGTTALRLIESAATSQGQIAAWAGETDIFIMPGYGFKIADGLMTNFHLPKSTLMMLVSALMGQGRMRAVYQHAITHRYRFFSYGDSSLLLPGGVG

SEQ ID NO: 63132 - protein, 353 aa, unidentified
  source 1..353: note = Aliiroseovarius halocynthiae
  REGION 1..353: note = tr|A0A545SWM8|A0A545SWM8_9RHOB S-adenosylmethionine:tRNA ribosyltransferase-isomerase; OS = Aliiroseovarius halocynthiae OX=985055 GN=queA PE=3 SV=1
MKLSDFDFDLPEELIATRPVRPRTASRLLVATADCLTDAHVGDLTDWLRPGDRLVLNDTKVIPGRLFGTRTRPGQAPGEGIAHIEVTLLSPDGQGRWHAMAKPLRKLKEGDVIVFSDALNAEFLSRDDDQAVLRFNLEGDAFGAAIEDAGKMPLPPYIAAKRAADAQDNEDYQTVFARNTGAVAAPTASLHFDTDLLARVAAMGVGLTHVTLHVGAGTFLPVKVDDISKHKMHAEWGEVGQNAADQINATLAAGGRVIPVGTTALRLIESAAIAKGQIAPWTGETDIFITPGFNFSIASGLMTNFHLPKSTLMMLVSALMGQDRMRQVYDHAISQKYRFFSYGDSSLLLPDGT

SEQ ID NO: 63133 - protein, 357 aa, unidentified
  source 1..357: note = Aliiroseovarius pelagivivens
  REGION 1..357: note = tr|A0A2R8AJF7|A0A2R8AJF7_9RHOB S-adenosylmethionine:tRNA ribosyltransferase-isomerase; OS = Aliiroseovarius pelagivivens OX=1639690 GN=queA PE=3; SV = 1
MKLSDFDFDLPEDLIATRPARPRTASRLLVATPDNLTDAHVGGLTDWLRPGDRLILNDTKVIPGRLFGTRTRPGQAPGEGVASIEVTLLSPDGQGQWHAMAKPLRKLKEGDVIAFSDALSAEFLGRDDEQAVLRFNLEGDAFDAAIAEAGKMPLPPYIAAKRAADAQDNEDYQTVFARNTGAVAAPTASLHFDTDLLSRITAMGVDLTHVTLHVGAGTFLPVKVDDVSKHKMHAEWGEVSQSAADEINATIAAGGRVIPVGTTALRLIESAATAKGQIAPWTGETDIFITPGFEFSIADGLMTNFHLPKSTLMMLVSALMGTQRMRDVYSHAIAQKYRFFSYGDSSLLLPQGANIGA

SEQ ID NO: 63134 - protein, 365 aa, unidentified
  source 1..365: note = Aliiroseovarius sediminilitoris
  REGION 1..365: note = tr|A0A1I0PFR9|A0A1I0PFR9_9RHOB S-adenosylmethionine:tRNA ribosyltransferase-isomerase; OS = Aliiroseovarius sediminilitoris OX=1173584 GN=queA PE=3; SV = 1
MTRTDKPPTRAAMKLSDFDFNLPDALIATRPVRPRTASRLLVATPDQITDAHVSDLTRWLSPGDRLVLNDTKVIPGRLFGTRTRAGQAPGEGVAKIEVTLLSPDSAGQWHVMAKPLRKLRDGDVIIFSDDLCAQFVGRDGEQAVICFNLEGAAFDAALAAAGNMPLPPYIAAKRAADAQDNEDYQTVFARHSGAVAAPTASLHFDDGLLDRIAAMGVGLTHVTLHVGAGTFLPVKVDDIAQHKMHAEWGRVSTVAAHEIEATVAAGGRIIPVGTTALRLIESAATAPGKIRPWQGDTDIFITPGFRFNITDGLMTNFHLPKSTLMMLVSALMGTDRMRAVYDHAIAHRYRFFSYGDSSLLLPNQP

SEQ ID NO: 63135 - protein, 352 aa, unidentified
  source 1..352: note = Aliishimia ponticola
  REGION 1..352: note = tr|A0A4S4NHJ4|A0A4S4NHJ4_9RHOB S-adenosylmethionine:tRNA ribosyltransferase-isomerase; OS = Aliishimia ponticola OX=2499833 GN=queA PE=3 SV=1
MKLSDFDFDLPDALIATRPARPRTSARLLVAQGDAIEDRHVFDLPQILRAGDRLVLNDTRVIPARLTGLRRRDSAQGPVEAKIEVTLLSPDAGGGWRALVKPLRKLRQGETVAFDAGLSATLERVDDGQALLRFNLEGDAFQEALNAAGAMPLPPYIASQRAADAQDKDDYQTVFAKREGAVAAPTASLHFDEALLESLREIGVEFTTVTLHVGAGTFLPVKVEDVTTHRMHAEWGKVSAEAAQQIATTKAQGGRVIPVGTTALRLIETAARATGEIAPWEGDTDIFIYPGFTFNVADALMTNFHLPKSTLMMLVSALMGRERMMRVYAHAVADKYRFFSYGDASLLIPPAK

SEQ ID NO: 63136 - protein, 350 aa, Aliivibrio finisterrensis
  REGION 1..350: note = tr|A0A4V1Z8B1|A0A4V1Z8B1_9GAMM S-adenosylmethionine:tRNA ribosyltransferase-isomerase; OS = Aliivibrio finisterrensis OX=511998 GN=queA PE=3 SV=1
MQVSDFHFELPDELIARYPQPERTASRLLHLNGNSGELIDGQFTDVLDLVQSGDLVVFNNTRVIPARMFGVKASGGKLEVLVERVLDEHSVLAHVRCSKSPKPGNQLWLGENQEYEAEMVARHDTLFEIRFTSEKKVLDILDEIGHMPLPPYIDRPDEDADKERYQTVYNEKPGAVAAPTAGLHFDTEILEKMKAKGVEFAYVTLHVGAGTFQPVRVDNILEHHMHSEYAEVSQEVVDAIKATKARGGRVVSVGTTSVRSLESAAQHALKQGTELAPFFDDTEIFIYPGYEFQVVDALVTNFHLPESTLIMLVSAFAGYENTMKAYDQAVNNQYRFFSYGDAMFITKKTA

SEQ ID NO: 63137 - protein, 350 aa, Aliivibrio finisterrensis
  REGION 1..350: note = tr|A0A4Q5KWN8|A0A4Q5KWN8_9GAMM S-adenosylmethionine:tRNA ribosyltransferase-isomerase; OS = Aliivibrio finisterrensis OX=511998 GN=queA PE=3 SV=1
MQVSDFHFELPDELIARYPQPERTASRLLHLNGNSGELIDGQFTDVLDLVQSGDLVVFNNTRVIPARMFGVKASGGKLEVLVERVLDEHSVLAHVRCSKSPKPGNQLWLGENQEYEAEMIARHDTLFEIRFTSEKKVLDILDEIGHMPLPPYIDRPDEDADKERYQTVYNEKPGAVAAPTAGLHFDTEILEKMKAKGVEFAYVTLHVGAGTFQPVRVDNILEHHMHSEYAEVSQEVVDAIKATKARGGRVVSVGTTSVRSLESAAQHALKQGTELAPFFDDTEIFIYPGYEFQVVDALVTNFHLPESTLIMLVSAFAGYENTMKAYDQAVNNQYRFFSYGDAMFITKKTA

SEQ ID NO: 63138 - protein, 350 aa, Aliivibrio fischeri
  REGION 1..350: note = sp|Q5E3D1|QUEA_ALIF1 S-adenosylmethionine:tRNA ribosyltransferase-isomerase OS=Aliivibrio fischeri (strain ATCC 700601 / ES114) OX=312309 GN=queA PE=3 SV=1
MQVSDFHFELPDELIARYPQPERTASRLLQLNGNSGELNDGQFTDILDLVQAGDLLVFNNTRVIPARMFGMKASGGKLEVLVERVLDEHSVLAHVRCSKSPKPGTMLLLGENQEHEAEMVARHDTLFEIRFTSDKKVLDILDEIGHMPLPPYIDRPDEDADKERYQTVYNKKPGAVAAPTAGLHFDTEILEKMKAKGVEFAYVTLHVGAGTFQPVRVDNILEHHMHSEYAEVSQEVIDAINATKARGGRVVSVGTTSVRSLESAAQHALKQGTELAPFFDDTEIFIYPGYEFQVVDALVTNFHLPESTLIMLVSAFAGYENTMKAYEQAVNNKYRFFSYGDAMFITKKTA

SEQ ID NO: 63139 - protein, 350 aa, Aliivibrio fischeri
  REGION 1..350: note = sp|B5F9Y4|QUEA_ALIFM S-adenosylmethionine:tRNA ribosyltransferase-isomerase OS=Aliivibrio fischeri (strain MJ11) OX=388396 GN=queA PE=3 SV=1
MQVSDFHFELPDELIARYPQPERTASRLLQLNGNSGELNDGQFTDILDLVQAGDLLVFNNTRVIPARMFGMKASGGKLEVLVERVLDEHSVLAHVRCSKSPKPGTMLLLGENQEHEAEMVARHDTLFEIRFTSDKKVLDILDEIGHMPLPPYIDRPDEDADKERYQTVYNKKPGAVAAPTAGLHFDTEILEKMKAKGVEFAYVTLHVGAGTFQPVRVDNILEHHMHSEYAEVSQEVIDAINATKARGGRVVSVGTTSVRSLESAAQHALKQGTELAPFFDDTEIFIYPGYEFQVVDALVTNFHLPESTLIMLVSAFAGYDNTMKAYEQAVNNKYRFFSYGDAMFITKKTA

SEQ ID NO: 63140 - protein, 350 aa, Aliivibrio logei
  REGION 1..350: note = tr|A0A1B9NXS0|A0A1B9NXS0_ALILO S-adenosylmethionine:tRNA ribosyltransferase-isomerase; OS = Aliivibrio logei OX=688 GN=queA PE=3 SV=1
MQVSDFHFELPDELIARYPQPERTASRLLHLNGNSGELHDGQFTDVLDLVQHGDLVVFNNTRVIPARMFGVKASGGKLEVLVERVLDDHSVLAHVRCSKSPKPGNQLWLGENQEYEAEMVARHDTLFEIRFTSEKKVLDILDEIGHMPLPPYIDRPDEDADKERYQTVYNEKPGAVAAPTAGLHFDTDILEKMKAKGGEFAYVTLHVGAGTFQPVRVDNILDHHMHSEYAEVSQEVVDAIKATKARGGRVISVGTTSVRSLESAAQHALKQGTELAPFFDDTEIFIYPGYEFQVVDALVTNFHLPESTLIMLVSAFAGYDNTMKAYDQAVNHQYRFFSYGDAMFITKKTS

SEQ ID NO: 63141 - protein, 350 aa, Aliivibrio salmonicida
  REGION 1..350: note = sp|B6EK66|QUEA_ALISL S-adenosylmethionine:tRNA ribosyltransferase-isomerase OS=Aliivibrio salmonicida (strain LFI1238) OX=316275 GN=queA PE=3 SV=1
MQVSDFHFELPDELIARYPQPERTASRLLHLNGNSGELHDGQFTDVLDLVQHGDLVVFNNTRVIPARMFGVKASGGKLEVLVERVLDDHSVLAHVRCSKSPKPGNQLWLGENQEYEAEMVARHDTLFEIRFTSEKKVLDILDEIGHMPLPPYIDRPDEDADKERYQTVYNEKPGAVAAPTAGLHFDTDILEKMKAKGVEFAYVTLHVGAGTFQPVRVDNILDHHMHSEYAEVSQEVVDAIKATKARGGRVISVGTTSVRSLESAAQHALKQGTELAPFFDDTEIFIYPGYEFQVVDALVTNFHLPESTLIMLVSAFAGYDNTMKAYDQAVNHQYRFFSYGDAMFITKKTS

SEQ ID NO: 63142 - protein, 350 aa, Aliivibrio sifiae
  REGION 1..350: note = tr|A0A2S7XG99|A0A2S7XG99_9GAMM S-adenosylmethionine:tRNA ribosyltransferase-isomerase; OS = Aliivibrio sifiae OX=566293 GN=queA PE=3 SV=1
MQVSDFHFELPDELIARYPQPERTASRLLQLNGNSGELVDGQFTDVLDLVQSGDLVVFNNTRVIPARMFGVKASGGKLEVLVERVLDEHSVLAHVRCSKSPKPGNQLWLGENQEYEAEMVARHDTLFEIRFSSEKKVLDILDEIGHMPLPPYIDRPDEDADKERYQTVYNEKPGAVAAPTAGLHFDTDILEKMKAKGVEFAYVTLHVGAGTFQPVRVDNILEHHMHSEYAEVSQEVVDAVNAAKARGGRVISVGTTSVRSLESAAQHALKQGTELAPFFDDTEIFIYPGYEFQVVDALVTNFHLPESTLIMLVSAFAGYENTMKAYEQAVNNQYRFFSYGDAMFITKKTA

SEQ ID NO: 63143 - protein, 350 aa, Aliivibrio sifiae
  REGION 1..350: note = tr|A0A2S7XES2|A0A2S7XES2_9GAMM S-adenosylmethionine:tRNA ribosyltransferase-isomerase; OS = Aliivibrio sifiae OX=566293 GN=queA PE=3 SV=1
MQVSDFHFELPDELIARYPQPERTASRLLHLNGNSGELVDGQFTDVLDLVQSGDLVVFNNTRVIPARMFGVKASGGKLEVLVERVLDEHSVLAHVRCSKSPKPGNQLWLGENQEYEAEMVARHDTLFEIRFTSEKKVLDILDEIGHMPLPPYIDRPDEDADKERYQTVYNEKPGAVAAPTAGLHFDTDILEKMKAKGVEFAYVTLHVGAGTFQPVRVDNILEHHMHSEYAEVSQEVVDAVNATKARGGRVISVGTTSVRSLESAAQHALKQGTELAPFFDDTEIFIYPGYEFQVVDALVTNFHLPESTLIMLVSAFAGYENTMKAYEQAVNNKYRFFSYGDAMFITKKTA

SEQ ID NO: 63144 - protein, 350 aa, Aliivibrio sp.
  REGION 1..350: note = tr|A0A1B9P908|A0A1B9P908_9GAMM S-adenosylmethionine:tRNA ribosyltransferase-isomerase; OS = Aliivibrio sp. 1S175 OX=1840087 GN=queA PE=3 SV=1
MQVSDFHFELPDELIARYPQPERTASRLLRLNGNSGELVDGQFTDVLDLVQSGDLVVFNNTRVIPARMFGVKASGGKLEVLVERVLDEHSVLAHVRCSKSPKPGNQLWLGENQEYEAEMVARHDTLFEIRFTSEKKVLDILDEIGHMPLPPYIDRPDEDADKERYQTVYNEKPGAVAAPTAGLHFDTDILEKMKAKGVEFAYVTLHVGAGTFQPVRVDNILEHHMHSEYAEVSQEVVDAVNATKARGGRVISVGTTSVRSLESAAQHALKQGTELAPFFDDTEIFIYPGYEFQVVDALVTNFHLPESTLIMLVSAFAGYENTMKAYEQAVNNQYRFFSYGDAMFITKKTA

SEQ ID NO: 63145 - protein, 350 aa, Aliivibrio wodanis
  REGION 1..350: note = tr|A0A090IS53|A0A090IS53_9GAMM S-adenosylmethionine:tRNA ribosyltransferase-isomerase; OS = Aliivibrio wodanis OX=80852 GN=queA PE=3 SV=1
MQVSDFHFELPDELIARYPQPERTASRLLQLNGNSGELVDGQFTNVLDLVQSGDLVVFNNTRVIPARMFGVKASGGKLEVLVERVLDEHSVLAHVRCSKSPKPGNQLWLGENQEYEAEMVARHDTLFEIRFISEKKVLDILDEIGHMPLPPYIDRPDEDADKERYQTVYNEKPGAVAAPTAGLHFDTEILEKMKAKGVEFAYVTLHVGAGTFQPVRVDNILEHHMHSEYAEVSQEVVDAVKATKARGGRVISIGTTSVRSLESAAQHALKQGTELAPFFDDTEIFIYPGYEFQVVDALVTNFHLPESTLIMLVSAFAGYENTMKAYDQAVNNQYRFFSYGDAMFITKKTA

SEQ ID NO: 63146 - protein, 341 aa, Alishewanella aestuarii
  REGION 1..341: note = tr|J1Q5G0|J1Q5G0_9ALTE S-adenosylmethionine:tRNA ribosyltransferase-isomerase OS=Alishewanella aestuarii B11 OX=1197174 GN=queA PE=3 SV=1
MLVKDFSFELPEQLIASEPQAERSASRLLCMNKHSGALSHHIFKDILALLNPGDLLVFNNTRVIPARLFGQKASGGKVEVLVERMLSGPRFLAHIRASKAPKVGTELILENDARVTMVARHDSLFELEYQSAEPVLTMLERLGHMPLPPYIARPDTEADKARYQTVYNQKPGAVAAPTAGLHFDEPLLAALQQKGIEFAYVTLHVGAGTFQPVRVDSVTEHKMHSEYFEVEQQVVDAIAACKARGNRVVAVGTTSVRSLESAAMQHGGTLAPYSGDTAIFIYPGYQFKVVDALITNFHLPESTLIMLVSAFSQREHIMAAYQTAIAEQYRFYSYGDAMFIS

SEQ ID NO: 63147 - protein, 341 aa, Alishewanella agri
  REGION 1..341: note = tr|I8U9X6|I8U9X6_9ALTE S-adenosylmethionine:tRNA ribosyltransferase-isomerase OS=Alishewanella agri BL06; OX = 1195246 GN=queA PE=3 SV=1
MLVKDFSFELPEQLIASEPQAERSASRLLCMDKQNGTLSHYIFKDILQLLNPGDLLVFNNTRVIPARLFGQKDSGGKVEVLVERLLNEQRFLAHIRASKAPKVGTELLLEQEARVRMVARHDSLFELEYLATEPVLSMLERLGHMPLPPYIARPDTEADKARYQTVYNQKPGAVAAPTAGLHFDEPLLAALQQKGIEFAYVTLHVGAGTFQPVRVDEISAHKMHSEYFEVEQQVVDAITACKARGNRVVAVGTTSVRSLESAAMQHGGVLAPFSGDTAIFIYPGYQFKVIDALITNFHLPESTLIMLVSALSSREHIMAAYQTAIAEKYRFYSYGDAMFIS

SEQ ID NO: 63148 - protein, 341 aa, Alishewanella jeotgali
  REGION 1..341: note = tr|H3ZGM3|H3ZGM3_9ALTE S-adenosylmethionine:tRNA ribosyltransferase-isomerase OS=Alishewanella jeotgali KCTC 22429 OX=1129374 GN=queA PE=3 SV=1
MLVKDFSFELPEQLIASEPQAERSASRLLCMNKHSGALSHHIFKDILALLNPGDLLVFNNTRVIPARLFGQKASGGKVEVLVERMLSGPRFLAHIRASKAPKVGTELILENDARVTMVARHDSLFELEYQSVEPVLTMLERLGHMPLPPYIARPDTEADKARYQTVYNQKPGAVAAPTAGLHFDEPLLAALQQKGIEFAYVTLHVGAGTFQPVRVDSVTEHKMHSEYFEVEQQVVDAIAACKARGNRVVAVGTTSVRSLESAAMQHGGILAPYSGDTAIFIYPGYQFKVVDALITNFHLPESTLIMLVSAFSQREHIMAAYQTAIAERYRFYSYGDAMFIS

SEQ ID NO: 63149 - protein, 341 aa, Alishewanella sp.; identical to SEQ ID NO: 63148
  REGION 1..341: note = tr|A0A1C2C899|A0A1C2C899_9ALTE S-adenosylmethionine:tRNA ribosyltransferase-isomerase; OS = Alishewanella sp. HH-ZS OX=1856684 GN=queA PE=3 SV=1

SEQ ID NO: 63150 - protein, 341 aa, Alishewanella sp.
  REGION 1..341: note = tr|A0A0T5PIH6|A0A0T5PIH6_9ALTE S-adenosylmethionine:tRNA ribosyltransferase-isomerase; OS = Alishewanella sp. WH16-1 OX=1651088 GN=queA PE=3 SV=1
MLVKDFSFELPEQLIASEPQAERSASRLLCMNKQNGTLSHYIFKDILQLLNPGDLLVFNNTRVIPARLFGQKDSGGKVEVLVERLLNEQRFLAHIRASKAPKVGTELLLEQEARVRMVARHDSLFELEYLATEPVLSMLERLGHMPLPPYIARPDTEADKARYQTVYNQKPGAVAAPTAGLHFDEPLLAALQQKGIEFAYVTLHVGAGTFQPVRVDEISAHKMHSEYFEVEQQVVDAITACKARGNRVVAVGTTSVRSLESAAMQHGGVLAPFSGDTAIFIYPGYQFKVIDALITNFHLPESTLIMLVSALSSREHIMAAYQTAIAEKYRFYSYGDAMFIS

SEQ ID NO: 63151 - protein, 405 aa, Alistipes finegoldii
  REGION 1..405: note = tr|I3YKD6|I3YKD6_ALIFI S-adenosylmethionine:tRNA ribosyltransferase-isomerase OS=Alistipes finegoldii (strain DSM 17242 / JCM 16770 / AHN 2437 / CCUG 46020 / CIP 107 999) OX=679935 GN=queA PE=3 SV=1
MPMSERHIDINEFDYDLPDGRIAKFPLAERSASKLLVYRGGEIGEAHFADIGDVLPEGQLLVFNNTKVIRARIIMHKPSGARIEVFCLEPHDPADYERAFAVVGRCEWSCIVGNLKKWKEGYVEINFEHEGRPEHLRAWLVENRGREHTVRFEWSAAMTFGQLLEYLGRIPIPPYLNRESEEIDYTRYQTVYSKFEGSVAAPTAGLHFTPELIEGMKARGFGFEEVTLHVGAGTFLPVKDDDAARHPMHTEHFEVRRAAVARLLEKWGRITAVGTTSVRTLESLTALAWRIRTAGTPDAERVVGQWELYDVPAEFSGREALETLLKYMDEKGLERIKAATQIMITPLGYEFRIVRNIVTNFHQPKSTLLLLVSAFVGGDWKRIYEYALGHGFRFLSYGDSSVLMR

SEQ ID NO: 63152 - protein, 403 aa, Alistipes finegoldii
  REGION 1..403: note = tr|A0A4Q5JN67|A0A4Q5JN67_9BACT S-adenosylmethionine:tRNA ribosyltransferase-isomerase; OS = Alistipes finegoldii OX=214856 GN=queA PE=3 SV=1
MNERHIDINEFDYDLPDGRIAKFPLAERSASKLLVYRGGEIGEAHFADIGDVLPEGQLLVFNNTKVIRARIIMHKPSGARIEVFCLEPHDPADYERAFAVVGRCEWSCIVGNLKKWKEGYVEINFEHEGRPEHLRAWLVENRGREHTVRFEWSAAMTFGQLLEYLGRIPIPPYLNRESEEIDYTRYQTVYSKFEGSVAAPTAGLHFTPELIEGMKARGFGFEEVTLHVGAGTFLPVKDDDAARHPMHTEHFEVRRAAVARLLEKWGRITAVGTTSVRTLESLTALAWRIRTAGTPDAERVVGQWELYDVSAEFSGREALETLLKYMDEKGLERIKAATQIMITPLGYEFRIVRNIVTNFHQPKSTLLLLVSAFVGGDWKRIYEYALGHGFRFLSYGDSSVLMR

SEQ ID NO: 63153 - protein, 349 aa, Alistipes indistinctus
  REGION 1..349: note = tr|A0A412SF74|A0A412SF74_9BACT S-adenosylmethionine:tRNA ribosyltransferase-isomerase; OS = Alistipes indistinctus OX=626932 GN=queA PE=3 SV=1
MKLSQYNYSFSPNMLAKYPAENRDESRLMVIDRASGKIEHSVFKNVIDYFDEGDVLTFNDTKVFPARLYGNKEKTGAEIEIFLLRELNRDLRLWDVLVDPARKIRIGNKLYFGDDDLLVAEVIDNTTSRGRTLRFLFDGDYDEFKATLYKMGETPLPKWIRSKVEPIDDERYQTIFARHEGAVAAPTAGLHFSKHLMKRLEIKGVDMAFLTLHVGLGNFRTVDVEDLTKHKMDSEQVVIPEETAEKVNQIKRAGGKVCAVGTTVMRSMESSVSTEGFLKPFDGWTNKFIFCPYEFSVANCMITNFHLPYSTQLMMVSAFAGYDLLMEAYKVAKEEKYRFGTYGDAMLIL

SEQ ID NO: 63154 - protein, 437 aa, Alistipes indistinctus
  REGION 1..437: note = tr|A0A5B5UGT6|A0A5B5UGT6_9BACT S-adenosylmethionine:tRNA ribosyltransferase-isomerase; OS = Alistipes indistinctus OX=626932 GN=F1988_02680 PE=3; SV = 1
MNNRHTAIRDCHFIATFARDRPLRGGNRDSHPILPAVNNELLISDYNYPLPEDRIAKFPLERREMSKLLVYEKGGISESRFARIGEALPAGAMLVFNNTKVIRARLVFYKPTGARIEIFCLEPHDPADYERAFAVKGSCRWSCIVGNLKKWKDDELHIDFEAEGRAQRLTARKAGQTDKEQIIEFSWNGDQSFGQLLEALGRIPIPPYLCRESEELDNSRYQTVYSKFEGSVAAPTAGLHFTPEIIAELRNTGHLTDEVTLHVGAGTFLPVKADEVTRHKMHTEHFEIRLSTIRNLIDHLGEVIAVGTTSVRTLESLCALGWRILSSGSPDAERPVGQWEIYDVPAQRETGELLEALSVYLEQERLAKLKTATQIMIMPGYRYRIVRGIITNFHQPQSTLLLLVSAFIGEDWRKVYDFALNNDFRFLSYGDCSLLLP

SEQ ID NO: 63155 - protein, 349 aa, unidentified
  source 1..349: note = Alistipes inops
  REGION 1..349: note = tr|A0A0B0C1R0|A0A0B0C1R0_9BACT S-adenosylmethionine:tRNA ribosyltransferase-isomerase; OS = Alistipes inops OX=1501391 GN=queA PE=3 SV=1
MKLSQYNYNFSPELLAKYPADNRDESRLMVVERKTGKIEHRIFKEIIDYFNEKDVFIFNNTKVFPARLYGNKEKTGAEIEIFLLRELNRDLRLWDVLVDPARKIRIGNKLYFGDDDLLVAEVIDNTTSRGRTLRFLFDGTYEEFRAALYKLGETPLPKWIRDKVEPIDEERYQTIFATEEGAVAAPTAGLHFSKHLMKRLEIKGIESAMITLHVGLGNFRTVDVEDLTKHKMDSEQVHIPEEAAAKVNRAKEGGHRVCAIGTTVQRAIESSVSTNGMLKPCDGWTNKFIFCPYDFSVADSMVSNFHLPCSTQLMLVAAFGGYETVMHAYKVAIEEGYRFGTYGDAMLLL

SEQ ID NO: 63156 - protein, 405 aa, unidentified
  source 1..405: note = Alistipes inops
  REGION 1..405: note = tr|A0A0B0BUK0|A0A0B0BUK0_9BACT S-adenosylmethionine:tRNA ribosyltransferase-isomerase; OS = Alistipes inops OX=1501391 GN=queA PE=3 SV=1
MTPKDSVNISDFDYPLPDERIARFPADERDASRLLVYRRGALSETRFRGIGGELPEGAVLVFNNTKVIRARIVMHKPSGARVEVFCLEPHAPADYERAFAAQGECRWQCIVGNLKKWKEGPLAIDFDCNGVPCRVQAWREGTAGTSQVVRFTWDAALSFGQLLEHLGRIPIPPYLGRDSEEIDNTRYQTVYSRFEGSVAAPTAGLHFTPELIERLRREGVRTEEVTLHVGAGTFLPVKTDNPLQHTMHTEHFEVTAATVRRLAAAAAGRHIVAVGTTSVRTLESLPVLGWRILREGNPHTDTPVGQWEAYDLPAEADGAELLGTLASYMEAAGTEKLQAATQIMIMPGFTYRLTSGMITNFHQPKSTLLLLVSAFIGEEWRRLYDYALSHGFRFLSYGDSSLLLP

SEQ ID NO: 63157 - protein, 408 aa, unidentified
  source 1..408: note = Alistipes obesi
  REGION 1..408: note = tr|A0A3D3YM88|A0A3D3YM88_9BACT S-adenosylmethionine:tRNA ribosyltransferase-isomerase; OS = Alistipes obesi OX=1118061 GN=DIT81_07150 PE=3 SV=1
MERHIDINQFDYDLPDERIAKFPLAERSASKLLVYRNGAISESRFDRLGEELPEGAMLVFNNTKVIRARIIMHKPSGARIEVFCLEPHAPADYERAFAVKGKCAWSCIVGNLKKWKEGALVIDFTLDGTPQQLRAYRTGTGGREQIVRFEWEADLTFGELLELLGRIPIPPYLNRDSQQIDYTRYQTVYSKFEGSVAAPTAGLHFTPELIASLGAAGVEFEEVTLHVGAGTFLPVKDDDACRHAMHTEHFEIRRTTVERLLHRWGHIVAVGTTSVRTLESLAALAWRIRREGSPDEMRAVGQWELYDIPASYTGREALEELLAYMERNDLGTLKASTQIMIAPLGYRWRIVRAIVTNFHQPKSTLLLLVSAYVGEDWHRIYDYALRNDFRFLSYGDSSLLVNDAPFAG

SEQ ID NO: 63158 - protein, 349 aa, unidentified
  source 1..349: note = Alistipes obesi
  REGION 1..349: note = tr|A0A3D3YLF3|A0A3D3YLF3_9BACT S-adenosylmethionine:tRNA ribosyltransferase-isomerase; OS = Alistipes obesi OX=1118061 GN=queA PE=3 SV=1
MKLSQYGYEFKPEMLAKYPAENRDEARLMVVNRAKGTIEHRIFKDIIDYFDEGDLFVFNDTKVFPARLYGNKEKTGAEIEIFLLRELNRELRLWDVLVDPARKIRIGNKLYFGDDDLMVAEVIDNTTSRGRTLRFLFDGDYDEFKTALFKLGETPLPRWVREKVEPEDSERYQTIFAAKEGAVVAPTAGMHFSKHLMKRMEIRGVERAFLTLHAGLGNFRTVDVEDLSKHKMDSEQYIVDDATAASVNRAKRNGRKVVSIGTTVMRTLETVVSTNGTINAGEGWTNKFIFSPYEFTVADAMVSNFHLPYSTQLMMVAAFGGYDCVMNAYKIAREEGYRFGTYGDAMLLL

SEQ ID NO: 63159 - protein, 191 aa, Alistipes onderdonkii
  REGION 1..191: note = tr|A0A5B3H844|A0A5B3H844_9BACT S-adenosylmethionine:tRNA ribosyltransferase-isomerase (Fragment) OS=Alistipes onderdonkii OX=328813; GN = F2Y11_16955 PE=3 SV=1
MKLSQYGYDFAPEMLAKHPTENRDDSRLMVIDRAKGTIEHRIFKDIIEYFDEKDLFVFNDTKVFPARLYGNKEKTGAEIEIFLLRELNRELRLWDVLVDPARKIRIGNKLYFGDDDLLVAEVIDNTTSRGRTLRFLFDGSYEEFKQTLFSLGETPLPKWVRDKVEPEDAERYQTIFAEHEGAVAAPTAGMH

SEQ ID NO: 63160 - protein, 403 aa, Alistipes onderdonkii
  REGION 1..403: note = tr|A0A1Y3QRW1|A0A1Y3QRW1_9BACT S-adenosylmethionine:tRNA ribosyltransferase-isomerase; OS = Alistipes onderdonkii OX=328813 GN=B5G41_11970 PE=3 SV=1
MIERHIDINRFDYDLPDGRIAKFPLAERSSSKLLVYRGGEISEAHFADMGDVLPAGQLLVFNNTKVIRARIIMHKPSGARIEVFCLEPHDPADYERAFAVTGTCQWSCIVGNLKKWKEGYVEINFEHEGRPEHLRAWIAENRGREHTVRFEWSAAMTFGQLLEYLGRIPIPPYLNRESELIDYTRYQTVYSKFEGSVAAPTAGLHFTPELIEGMKARGFGFEEVTLHVGAGTFLPVKDEDAAKHPMHTEHFEVRRATIVALLAKPGAVTAVGTTSVRTLESLPALAWRIHTGDSIDGPGPVGQWELYDIPADYTGRDALEELLAYMDARGLDRIKAATQIMIAPLGYEFRIVRNIITNFHQPKSTLLLLVSAFAGEDWRRIYDYALSHDFRFLSYGDSSVLMR

SEQ ID NO: 63161 - protein, 405 aa, Alistipes putredinis
  REGION 1..405: note = tr|R7JHN8|R7JHN8_9BACT S-adenosylmethionine:tRNA ribosyltransferase-isomerase OS=Alistipes putredinis CAG:67 OX=1263036 GN=queA PE=3 SV=1
MLKMERHIDIDHFDYDLPDERIAKYPLEERSASKLLVYERGEISERRFRDIGDILPAGTLLVFNNTKVIRARIIMHKPSGARIEVFCLEPHDPADYERAFAVKGSCRWSCIVGNLKKWKEGPLVIDFEYEGRAERMLAWREGEGGREQIVRFEWTADLTFGQLLEHLGRIPIPPYLNRESQEIDNTRYQTVYSKFEGSVAAPTAGLHFTPELIERMRTQGFSFEEVTLHVGAGTFLPVKDRDAAAHPMHTEHFEIRRSSVGRLLEKWDNITAVGTTSVRTLESLAALAWRIRTSGTPDASRVIGQWELYDLPEAFTGREALQVLSDYMVREGIEKLKAATQIMITPLGYRFRIVRNIVTNFHQPKSTLLLLVSAYVGDDWHRIYDYALTHDFRFLSYGDSSVLMR

SEQ ID NO: 63162 - protein, 349 aa, Alistipes putredinis
  REGION 1..349: note = tr|A0A1Q6F603|A0A1Q6F603_9BACT S-adenosylmethionine:tRNA ribosyltransferase-isomerase; OS = Alistipes putredinis OX=28117 GN=queA PE=3 SV=1
MKLSQYGYDFSADLLAKYPAENRDESRLMVVNRAKGTIEHRIFKEIIEYFDEKDLFIFNDTKVFPARLYGNKEKTGAEIEIFLLRELNRELRLWDVLVDPARKIRIGNKLYFGDDDLLVAEVIDNTTSRGRTLRFLFDGSYEEFKETLFKLGETPLPKWVREKVEPEDAERYQTIFASKEGAVAAPTAGMHFSKHLFKRMEIKGIEKAFITLHVGLGNFRTVDVEDLSKHKMDSEQFFVDEPTAEAVNKTKREGHKIVSIGTTVMRTLETAVSTGGMIKPMEGWTNKFIFAPYEFSVADAMVTNFQLPYSTQLMMVSAFGGYDLIMNAYKIAKEEGYRFGTYGDAMLIL

SEQ ID NO: 63163 - protein, 336 aa, Alistipes shahii
  REGION 1..336: note = tr|D4IMF0|D4IMF0_9BACT S-adenosylmethionine:tRNA ribosyltransferase-isomerase OS=Alistipes shahii WAL 8301; OX = 717959 GN=queA PE=3 SV=1
MLAKYPADNRDESRLMVINRAKGTIEHRIFKDIIEYFDEKDLFVFNDTKVFPARLYGNKEKTGAEIEIFLLRELNRELRLWDVLVDPARKIRIGNKLYFGDDDLLVAEVIDNTTSRGRTLRFLFDGSYEEFKHALFALGETPLPKWVREKVEPEDAERYQTIFAEKEGAVAAPTAGMHFSKHLMKRMEIKGIDKTFVTLHVGLGNFRTVDVEDLSKHKMDSEQFFVEEAAAEAVNAAKRQERKVVAIGTTVMRTIETAVSTNGMIKPMEGWTNKFIFAPYEFTVADAMVTNLHLPYSTQLMMVAAFGGYETVMNAYKVAKEEGYRFGTYGDAMLIL

SEQ ID NO: 63164 - protein, 349 aa, Alistipes shahii
  REGION 1..349: note = tr|A0A5B3GT36|A0A5B3GT36_9BACT S-adenosylmethionine:tRNA ribosyltransferase-isomerase; OS = Alistipes shahii OX=328814 GN=queA PE=3 SV=1
MKLSQYGYDFSPEMLAKYPADNRDESRLMVINRAKGTIEHRIFKDIIEYFDEKDLFVFNDTKVFPARLYGNKEKTGAEIEIFLLRELNRELRLWDVLVDPARKIRIGNKLYFGDDDLLVAEVIDNTTSRGRTLRFLFDGSYEEFKHALFALGETPLPKWVREKVEPEDAERYQTIFAEKEGAVAAPTAGMHFSKHLMKRMEIKGIDKTFVTLHVGLGNFRTVDVEDLSKHKMDSEQFFVEEAAAEAVNAAKRQERKVVAIGTTVMRTIETAVSTNGMIKPMEGWTNKFIFAPYEFTVADAMVTNLHLPYSTQLMMVAAFGGYETVMNAYKVAKEEGYRFGTYGDAMLIL

SEQ ID NO: 63165 - protein, 349 aa, Alistipes sp.
  REGION 1..349: note = tr|A0A4Y1WJR4|A0A4Y1WJR4_9BACT S-adenosylmethionine:tRNA ribosyltransferase-isomerase; OS = Alistipes sp. 3BBH6 OX=2585117 GN=queA_1 PE=3 SV=1
MKLSQYGYDFAPEMLAKHPTENRDDSRLMVIDRAKGTIEHRIFKDIIEYFDEKDLFVFNDTKVFPARLYGNKEKTGAEIEIFLLRELNRELRLWDVLVDPARKIRIGNKLYFGDDDLLVAEVIDNTTSRGRTLRFLFDGSYEEFKQTLFSLGETPLPKWVRDKVEPGDAERYQTIFAEHEGAVAAPTAGMHFSKHLMKRMEIKGIDRAFVTLHVGLGNFRTVDVEDLSKHKMDSEQFFVTEEAAGTVNEAKRNGHKVAAIGTTVMRTLETAVSTNGMIKPMEGWTNKFIFAPYEFTVADAMVTNFHLPYSTQLMMVAAFGGYETIMNAYKIAKEEGYRFGTYGDAMLIL

SEQ ID NO: 63166 - protein, 349 aa, Alistipes sp.; identical to SEQ ID NO: 63164
  REGION 1..349: note = tr|A0A1Q6EM57|A0A1Q6EM57_9BACT S-adenosylmethionine:tRNA ribosyltransferase-isomerase; OS = Alistipes sp. 56_sp_Nov_56_25 OX=1896969 GN=queA PE=3; SV = 1

SEQ ID NO: 63167 - protein, 403 aa, unidentified
  source 1..403: note = Alistipes timonensis
  REGION 1..403: note = tr|A0A1H4EUN1|A0A1H4EUN1_9BACT S-adenosylmethionine:tRNA ribosyltransferase-isomerase; OS = Alistipes timonensis JC136 OX=1033731 GN=queA PE=3 SV=1
MERHIDINRFDYDLPDERIAKFPLAERSASKLLVWRGGGISERHFADIGDVLPAGELLVFNNTKVIRARIIMHKPSGARIEVFCLEPHDPADYERAFAVTGGCAWSCIVGNRKKWKEGYVEINFDCQGRAEHLRAWIAEDHGRECVVRFEWSAPMTFGQLLEHLGRIPIPPYLNRESEEIDNTRYQTVYSKFEGSVAAPTAGLHFTPGLIGAMEARGFGFEEVTLHVGAGTFLPVKDDDAAKHPMHTEHFEVRRATVARLLEKWGHITAVGTTSVRTLESLAALAWRIRTAGTPDAGRVVSQWELYDIPADYSGRDALEELLAWMDANGVERLKASTQIMITPLGYEFRIVRNIVTNFHQPKSTLLLLVSAFAGDDWRRIYDYALGHDFRFLSYGDSSVLMRE

SEQ ID NO: 63168 - protein, 349 aa, unidentified
  source 1..349: note = Alistipes timonensis
  REGION 1..349: note = tr|A0A1H4C1U7|A0A1H4C1U7_9BACT S-adenosylmethionine:tRNA ribosyltransferase-isomerase; OS = Alistipes timonensis JC136 OX=1033731 GN=queA PE=3 SV=1
MKLSQYGYDFSPEMLAKYPADNRDESRLMVINRAKGTIEHRIFKDIIEYFDEKDLFVFNDTKVFPARLYGNKEKTGAEIEIFLLRELNRELRLWDVLVDPARKIRIGNKLYFGDDDLLVAEVIDNTTSRGRTLRFLFDGSYEEFKQTLFALGETPLPKWVREKVEPEDADRYQTIFAEKEGAVAAPTAGMHFSKHLMKRMEIKGVDKTFVTLHVGLGNFRTVDVEDLSKHKMDSEQFFVTEEAAGAVNEAKNAGRKVVAIGTTVMRTIETAVSTNGLIKPMEGWTNKFIFAPYEFTVADAMVTNLHLPYSTQLMMVAAFGGYETVMNAYKIAKEEGYRFGTYGDAMLIL

SEQ ID NO: 63169 - protein, 382 aa, unidentified
  source 1..382: note = Aliterella atlantica
  REGION 1..382: note = tr|A0A0D9A2K2|A0A0D9A2K2_9CYAN S-adenosylmethionine:tRNA ribosyltransferase-isomerase; OS = Aliterella atlantica CENA595 OX=1618023 GN=queA PE=3; SV = 1
MNSFPKTIQSEPSSGRGREDKERSLSSYDYELPPSAIAQNPVIPRDSAKLLVVDSPHTHCHRIFSDLPQLLKPGDLLIMNDTRVIPARLHGRKTSGAAVEVLLLEEKQYNTWLALVKPGKRLQKGARIVFAREAGEAGEAQYVSISATVLEVNEATGGRLLRFDLPNGVSLLQILDSFGEIPLPPYITDSQAEDDQYQTVYAQNAGAIAAPTAGLHFTPELLQKLAEKGINSAFITLHVGVGTFRPVEVEDVTTHQMHGEWIDVSAATVEQIRATKARGGRVIAVGTTAVRALEGAAALSGQLEPFCGKTQLFIYPGYQWRVVDGLITNFHLPRSSLMMLVSALIGRQRLLDLYTEAIANAYRFYSFGDAMLILPEARVTHP

SEQ ID NO: 63170 - protein, 341 aa, Alkalibacillus haloalkaliphilus
  REGION 1..341: note = tr|A0A511W5R1|A0A511W5R1_9BACI S-adenosylmethionine:tRNA ribosyltransferase-isomerase; OS = Alkalibacillus haloalkaliphilus OX=94136 GN=queA PE=3; SV = 1
MRVEDFDFELPEELIAQTPLKERASSKMMIIDREEESVSHKRFADVVNYLNPGDCLVLNNTKVLPARLLGVKEETGANIELLLLHQIEGDRWEVLAKPAKKFKEGATVSFGDGLLSATCIESLDQGGKVVEFHYDGIFLEVLNELGEMPLPPYIKEQLDDQDRYQTVYAEESGSAAAPTAGLHFTEELLQQIKAKGVNVAYLTLHVGLGTFRPVQVDNLEEHDMHAEYYRLTEETANLLTETKANGGRVVAVGTTSIRTLETIMRDYDEFRAVSGWTDIFIYPPYQFKAVDGLITNFHLPKSTLIMLVSAFSTKELIMSAYQEAIEQRYRFFSFGDAMLIL

SEQ ID NO: 63171 - protein, 340 aa, Alkalibacter saccharofermentans
  REGION 1..340: note = tr|A0A1M4S484|A0A1M4S484_9FIRM S-adenosylmethionine:tRNA ribosyltransferase-isomerase; OS = Alkalibacter saccharofermentans DSM 14828 OX=1120975; GN = queA PE=3 SV=1
MKTRDFNFELPQELIAQHPIEKRDASRLMVIDRNTGDIHHKNFFDVTHHLKAGDTLVLNNTRVMPARLYGKNKDREGVVEILLLKRTEKDEWETMVKPGKKAKLGDVLVFEDVLQGEVVSIKEDGLRIIRFQYEGIFENILDKLGHMPLPPYIKETLSDKERYQTVYSKEVGSAAAPTAGLHFTGELLEKIKKKGVNIAYITLHVGIGTFRPVKVDDVTKHKMHSEYYSIDEKTAEMLNHTRDNGGRIIAVGTTSVRTLETVAQRGFPLKSCSGWTDIFIYPPHDFQAVDGMITNFHLPESTLLMLVSAFAQKDLIMGAYKKAVEEKYRFFSFGDSMIII

SEQ ID NO: 63172 - protein, 344 aa, unidentified
  source 1..344: note = Alkalibacterium gilvum
  REGION 1..344: note = tr|A0A1H6UKK8|A0A1H6UKK8_9LACT S-adenosylmethionine:tRNA ribosyltransferase-isomerase; OS = Alkalibacterium gilvum OX=1130080 GN=queA PE=3 SV=1
MGLSTEDFDFQLPEELIAQTPLKNRSASKMMVLSKENKEIKDQQFNDILDELNPGDALVMNNTRVLPARLHGVKEETKAHMEVLLLKNTQGDQWETLMKPARKAKEGTTISFGDGRLKATVIEELEHGGRIVEFTYEGLFLETLESLGEMPLPPYIKERLDDQERYQTVYAKENGSAAAPTAGLHFTEEILDRVKEKGIEIVFLTLHVGLGTFRPVSVSNIDEHEMHAEFYQLSEESAKKLNDTKEKGGRIIAVGTTSIRTLETIGRDNSGVLKAASGWTDIFISPGYTFNTVDAFLTNFHLPKSTLLMLVSAFAGREFVLNAYSHAVDERYRFFSFGDAMFVK

SEQ ID NO: 63173 - protein, 344 aa, Alkalibacterium kapii
  REGION 1..344: note = tr|A0A511ATD9|A0A511ATD9_9LACT S-adenosylmethionine:tRNA ribosyltransferase-isomerase; OS = Alkalibacterium kapii OX=426704 GN=queA PE=3 SV=1
MGLSTKDFDFQLPEELIAQTPLKNRSASKMMIISRENKEIKDQKFDDIIDELNPGDALVMNNTRVLPARLHGIKEETHAHLELLLLKNTDGDKWETLMKPAKKAKKNTVISFGDGRLKATVVEELEHGGRIVEFSYDGVFLEILESLGEMPLPPYIKERLDDQERYQTVYAKENGSAAAPTAGLHFTEDILDKIKQKGIEIVFLTLHVGLGTFRPVSVSDIDQHEMHTEFYQLSEAAAKKLNETKEKGGRIIAVGTTSIRTLETIGRDNAGTLKAASGWTDIFISPGYTFNTVDAFLTNFHLPKSTLLMLVSAFAGRDFTLEAYKHAVEEKYRFFSFGDAMFVK

SEQ ID NO: 63174 - protein, 121 aa, Alkalibacterium olivapovliticus
  REGION 1..121: note = tr|A0A2T0W2C6|A0A2T0W2C6_9LACT S-adenosylmethionine:tRNA ribosyltransferase-isomerase; OS = Alkalibacterium olivapovliticus OX=99907 GN=CLV38_12422; PE = 3 SV=1
MHEEFYQLSQTSADMLNETKNNGGRIIAIGTTSIRTLETIGQEYDGQFKAASGWTSIFISPGYQFKAVDAFLTNFHLPKSTLIMLVSAFLGREFVLRSYHHAVEEKYRFFSFGDAMFVKKR

SEQ ID NO: 63175 - protein, 208 aa, Alkalibacterium olivapovliticus
  REGION 1..208: note = tr|A0A2T0W2R3|A0A2T0W2R3_9LACT S-adenosylmethionine:tRNA ribosyltransferase-isomerase; OS = Alkalibacterium olivapovliticus OX=99907 GN=CLV38_12423; PE = 3 SV=1
MTLTTDDFDFALPEELIAQTPLKNRSSSKMMVLTKESETIEDRQFESIVDELNEGDALVMNDTRVLPARLYGEKEDTHAHIEVLLLKNIEDDKWETLMKPAKKAKPGTVLSFGDGRLKATVLESLEHGGRIVEFSYDGIFLETLESLGEMPLPPYIKERLQDSERYQTVYAKENGSAAAPTAGLHFTEELLEKIKNKGVKLVFLTLHV

SEQ ID NO: 63176 - protein, 346 aa, Alkalibacterium pelagium
  REGION 1..346: note = tr|A0A1H7NAV8|A0A1H7NAV8_9LACT S-adenosylmethionine:tRNA ribosyltransferase-isomerase; OS = Alkalibacterium pelagium OX=426702 GN=queA PE=3 SV=1
MTLTTNDFDFELPEELIAQTPLKNRSSSKMMVLNKETESIEDRQFESIIDELNPGDALVMNNTRVLPARLYGEKEDTKAHMEVLLLKNLEGDKWETLMKPAKKAKPGTVITFGDGRLKATVIESLEHGGRIVEFSYDGIFLETLESLGEMPLPPYIKERLDDSERYQTVYAKENGSAAAPTAGLHFTEDILEKIQEKGVKLVFLTLHVGLGTFRPVSVDNIEEHKMHEEFYQLSEESAATLNKTRDEGGRIIAIGTTSIRTLETIGQEFDGRFQAASGWTDIFIAPGYQFKAVDGFLTNFHLPKSTLIMLVSAFLGRDFVLEAYNHAVQERYRFFSFGDAMFVKKR

SEQ ID NO: 63177 - protein, 351 aa, Alkalibacterium putridalgicola
  REGION 1..351: note = tr|A0A1H7T0S1|A0A1H7T0S1_9LACT S-adenosylmethionine:tRNA ribosyltransferase-isomerase; OS = Alkalibacterium putridalgicola OX=426703 GN=queA PE=3; SV = 1
MTLSTKDFDFQLPDELIAQTPLEDRSSSRMMVLTTETKKIEDKQFEDIVDELNPGDALVMNNTRVLPARLYGTKEETNAHIEVLLLKNTEGDTWETLMKPAKKAKKGTVISFGDGRLKGTVVEELEHGGRMVEFSYEGIFLETLESLGEMPLPPYIKERLENQERYQTVYAKENGSAAAPTAGLHFTEAILDKIKAKDVKIVFLTLHVGLGTFRPVSVENIDEHKMHAEFYQLSEEAAEELNETRKSGGRIIAVGTTSIRTLETIGKANDGLLKATSGWTDIFISPGYEFSVVDGFLTNFHLPKSTLIMLVSAFAGREFVLQAYNHAVKEKYRFFSFGDAMFVKKKEYKED

SEQ ID NO: 63178 - protein, 344 aa, Alkalibacterium sp.
  REGION 1..344: note = tr|A0A1L8PKL0|A0A1L8PKL0_9LACT S-adenosylmethionine:tRNA ribosyltransferase-isomerase; OS = Alkalibacterium sp. 20 OX=1798803 GN=queA PE=3 SV=1
MTLSTKDFDFQLPEELIAQTPLEKRSSSRMMVLTSDTERIEDKQFESIVDELQPGDALVVNNSRVLPARLHGTKEETNAHIEVLLLKNTEEDTWETLMKPAKKAKIGTVIIFGDGRLKATVVDELEHGGRMVEFSYEGIFLETLESLGEMPLPPYIKERLENQERYQTVYAKENGSAAAPTAGLHFTEEILEKIKAKGVKLIFLTLHVGLGTFRPVSVENIDEHKMHAEFYQLSEESAAELNETRKNGGRIIAVGTTSIRTLETIGKANDDLLKATSGWTDIFISPGYEFSVVDAFLTNFHLPKSTLIMLVSAFAGREFILNAYKHAVEEKYRFFSFGDAMFVK

SEQ ID NO: 63179 - protein, 346 aa, Alkalibacterium sp.
  REGION 1..346: note = tr|A0A011RKK2|A0A011RKK2_9LACT S-adenosylmethionine:tRNA ribosyltransferase-isomerase; OS = Alkalibacterium sp. AK22 OX=1229520 GN=queA PE=3 SV=1
MTLTTEDFDFELPEELIAQTPLSDRSSSRMMVLNREKQTIEDRGFESIIDELQPGDALVMNDTRVLPARLYGEKEETAAHIEVLLLKNKEGDRWETLMKPAKKAKPGTVISFGDGRLKATVVESLEHGGRIVEFSYEGIFLEILESLGEMPLPPYIKERLNDSDRYQTVYARENGSAAAPTAGLHFTEEILDKIRSKEIKTVFLTLHVGLGTFRPVSVENIDEHKMHEEFYQLSEESASILNQTRSEGGQIVAVGTTSIRTLETIAQEHDGMFKASSGWTSIFIAPGYSFKAVDAFLTNFHLPKSTLIMLVSAFLGREFVLEAYHHAVKERYRFFSFGDAMFVKKK

SEQ ID NO: 63180 - protein, 351 aa, Alkalibacterium subtropicum
  REGION 1..351: note = tr|A0A1I1E7J8|A0A1I1E7J8_9LACT S-adenosylmethionine:tRNA ribosyltransferase-isomerase; OS = Alkalibacterium subtropicum OX=753702 GN=queA PE=3 SV=1
MNLSTKDFDFQLPEELIAQTPLENRSSSRMMVLTTETEQIEDKQFEDIIDELHPGDALVMNNTRVLPARLYGTKEETNAHVEVLLLKNTEGDTWETLMKPAKKAKKGTVISFGDGRLKATVVEELEHGGRMVEFSYEGIFLETLESLGEMPLPPYIKERLENQERYQTVYAKENGSAAAPTAGLHFTEEILDKIKAKGIKLVFLTLHVGLGTFRPVSVENIDEHKMHAEFYQLSEEAAEELNETRKSGGRIIAVGTTSIRTLETIGKANEGVLKATSGWTDIFISPGYKFSVVDAFLTNFHLPKSTLIMLVSAFAGREFVLKAYNHAVEEKYRFFSFGDAMFVKKKEYKED

SEQ ID NO: 63181 - protein, 346 aa, Alkalibacterium thalassium
  REGION 1..346: note = tr|A0A1G9BHB7|A0A1G9BHB7_9LACT S-adenosylmethionine:tRNA ribosyltransferase-isomerase; OS = Alkalibacterium thalassium OX=426701 GN=queA PE=3 SV=1
MTLTTNDFDFELPEELIAQTPLKNRSSSKMMVLTKETEAIEDRQFESIIDELNPGDALVMNNTRVLPARLYGEKEDTKAHMEVLLLKNLEGDKWETLMKPAKKAKPGTVITFGDGRLKATVIESLEHGGRIVEFSYEGIFLETLESLGEMPLPPYIKERLDDSERYQTVYAKENGSAAAPTAGLHFTEEILEKIQKKGVKLVFLTLHVGLGTFRPVSVDNIEEHKMHEEFYQLSEESADTLNRTREEGGRIIAIGTTSIRTLETIGQAFDGRFQAASGWTDIFIAPGYEFKAVDGFLTNFHLPKSTLIMLVSAFLGRDFVLEAYNHAVQERYRFFSFGDAMFVKKR

SEQ ID NO: 63182 - protein, 340 aa, Alkalibaculum bacchi
  REGION 1..340: note = tr|A0A366IF58|A0A366IF58_9FIRM S-adenosylmethionine:tRNA ribosyltransferase-isomerase; OS = Alkalibaculum bacchi OX=645887 GN=queA PE=3 SV=1
MNTKDFNYDLPEELIAQTPCEKRDNSRLMVVNREHTTITHKHFYDILEYLGEGDTLVLNNTRVIPARLFGTKADTGAVIEILLLKRVQGDIWETLVKPGKKARVGAVIEFGDTLRGEVIEIKEDGNRHIQFQYDGIFEEILDELGMMPLPPYIKEKLEDQERYQTIYSKVKGSAAAPTAGLHFTEELLKEIRQKGVHIAYVTLHVGLGTFRPVKVDHVEEHKMHSEYYVLTQETADIINETKRRGNKVIAVGTTSVRTLETVAQKSCPLQESSGWTDIFIYPGYEFKVVDRIITNFHLPESTLMMLVSAFASKDFIMKAYKEAVEEKYRFFSFGDSMIIV

SEQ ID NO: 63183 - protein, 342 aa, unidentified
  source 1..342: note = Alkalicoccus halolimnae
  REGION 1..342: note = tr|A0A5C7FGT5|A0A5C7FGT5_9BACI S-adenosylmethionine:tRNA ribosyltransferase-isomerase; OS = Alkalicoccus halolimnae OX=1667239 GN=queA PE=3 SV=1
MDVSQFDYTLPESLIAQTPLSDREASRMLVLDRNSGERGHHYFHELTKHLRAGDTLVLNNTKVIPARLYGMKQETGAKIEVLLLKEEPGYIWEALVKPAKRIKKGTFIDFGEGLLRAQCTEVLPDGRRKLAFQFEGIFTEILDQLGEMPLPPYIQEQLEEKDRYQTVFAKHRGSAAAPTAGLHFTETMIEKLEKQGVSIVYLTLHVGLGTFRPVSVDEVESHTMHAEFYNLPEETAGILNRTKENGGRIVAVGTTSARTLETITRDNNGSFTGASGWTDIFIYPGFTFRAIDGLLTNFHLPKSTLVMLVSAFAGRESVLKAYEEAVEKKYRFFSFGDAMLII

SEQ ID NO: 63184 - protein, 342 aa, unidentified
  source 1..342: note = Alkalicoccus saliphilus
  REGION 1..342: note = tr|A0A2T4U2Q1|A0A2T4U2Q1_9BACI S-adenosylmethionine:tRNA ribosyltransferase-isomerase; OS = Alkalicoccus saliphilus OX=200989 GN=queA PE=3 SV=1
MDVSQFDYELPEDLIAQTPLQDRESSRMLVLERSEGEIKHQHFHDLSRHLKQGDTLVLNNTKVIPARLFGIKEETGANIEVLLLKEEAGSVWEALVKPAKRVKKGTKLTFGEGLLKAECTEILPDGRRKLAFSFEGIFHEILDKLGEMPLPPYIQEQLEEKDRYQTVFAKHRGSAAAPTAGLHFTDTMLEKLQKQGIDIVYLTLHVGLGTFRPVSVETVENHTMHAEFYNLPPETAEKLNETKKRGGRIVAVGTTSARTLETIARDTDGEFKEASGWTDIFIYPGFTFRAIDGLLTNFHLPKSTLVMLVSAFAGRDNIMKAYHEAVENRYRFFSFGDAMLII

SEQ ID NO: 63185 - protein, 345 aa, Alkalilimnicola ehrlichii
  REGION 1..345: note = sp|Q0A9C4|QUEA_ALKEH S-adenosylmethionine:tRNA ribosyltransferase-isomerase OS=Alkalilimnicola ehrlichii (strain ATCC BAA-1101 / DSM 17681 / MLHE-1) OX=187272; GN = que A PE=3 SV=1
MHVDDFSFDLPEALIAHHPPEQRRDSRLLCLDRDTGAVADRRFPDLVDLLRPEDLLVLNDTRVIPARLFGHKPTGGRVEVLVERPLDRHRVLARLRASKVPAPGTVLTLEGGVAAEVTGREGEFFTLRFTAEQTVLELLEHHGHMPLPPYIRRADVAADRERYQTVFARRPGAVAAPTAGLHFDNELLARIGARGVDTAWVTLHVGSGTFAPLRVSDPREHRMHSEWLDVPPATCAAIERARGRGGRVVAVGTTVVRALETAAQDGAVQPYQGETDIFIYPGHRFHAVDALVTNFHLPGSTLLMLVSAFAGRERVLAAYRHAVAQRYRFFSYGDAMFIAAGAADE

SEQ ID NO: 63186 - protein, 348 aa, Alkalilimnicola ehrlichii
  REGION 1..348: note = tr|A0A3E0X0X2|A0A3E0X0X2_9GAMM S-adenosylmethionine:tRNA ribosyltransferase-isomerase; OS = Alkalilimnicola ehrlichii OX=351052 GN=queA PE=3 SV=1
MQRSDFQFDLPPELIADYPLAERSGSRLLQLNGRTGECRDGRFRDLEQLLRPGDLLVLNDTRVIPARLHGEKATGGKVEVLIERVLDQRRALAHIRASKAPKPGASLWLEGAISVTVVGREGEFFLIEVEAAENLLGLLERHGHMPLPPYIRRPDEEHDRERYQTVYAQRPGAVAAPTAGLHFDDELLARLSAKGVGQARVTLHVGAGTFQPMRAERLEEHRMHREYLEVSPETCAQITAAKEAGGRIVAVGTTVVRSLETAARHGRLAPFQGETDIFIYPGFTFRVVDALVTNFHLPESTLIMLVSAFAGYQNTMQAYRHAIEERYRFFSYGDAMFISPPQPAAVAE

SEQ ID NO: 63187 - protein, 344 aa, Alkalimonas amylolytica
  REGION 1..344: note = tr|A0A1H4E1N2|A0A1H4E1N2_ALKAM S-adenosylmethionine:tRNA ribosyltransferase-isomerase; OS = Alkalimonas amylolytica OX=152573 GN=queA PE=3 SV=1
MQLADFHFELPDALIARYPQAERSASRLLCMDRHTGALSHRVFRDLADQLKAGDLLVFNNTKVIPARLFGQKASGGKVEVLVERMLDEQRFLAHVRASKSPKPGTELLLENDARVTMLGRQGELFELELQGDENVLSMLERLGHMPLPPYIDRPDSEEDKARYQTVYHQKPGAVAAPTAGLHFDQPLLDTLKEKGIQFAFITLHVGAGTFQPVRVEDVTTHQMHAEYIEVDQAVIDAVNACKARGNKVIAVGTTSVRALESTAQHALSQQHPLAPFQGDTQIFIYPGYQFQLVDALITNFHLPESTLIMLVSAFSSRDHVMQAYNTAVEQQYRFYSYGDAMFIS

SEQ ID NO: 63188 - protein, 358 aa, unidentified
  source 1..358: note = Alkalinema sp.
  REGION 1..358: note = tr|A0A251WDQ5|A0A251WDQ5_9CYAN S-adenosylmethionine:tRNA ribosyltransferase-isomerase; OS = Alkalinema sp. CACIAM 70d OX=1934309 GN=queA PE=3 SV=1
MDLDRSLSAYDYTLPETQIAQNPANPRDCSRLMVIDNRTQHHHQHFYELEQFLKPGDLLVMNNTRVIPARLYGHKPTGSQVEVLLLEEKSPNQWLALVKPGRKLQPGAVIEFTPIDPQSASVQLAATILDRDSATGGRLLEFRTATHQSLLEVIEQYGHMPLPPYIQDSQSTPEQYQTVYGDRLGSAAAPTAGLHFTPELLERLTQKGVDRTFVTLHVGVGTFRPVEVEDITQHEMHGEWIEVPAETVEKVRQTQINGGRVIAVGTTSARSLEGASQRSGKLEPYCGKTEIFIYPGYEWKTVDGMITNFHLPKSSLMMMISALIGRQRLLDLYAEAIRENYRFYSFGDAMLILPEAKI

SEQ ID NO: 63189 - protein, 341 aa, unidentified
  source 1..341: note = Alkaliphilus metalliredigens
  REGION 1..341: note = sp|A6TQM7|QUEA_ALKMQ S-adenosylmethionine:tRNA ribosyltransferase-isomerase OS=Alkaliphilus metalliredigens (strain QYMF) OX=293826 GN=queA PE=3 SV=1
MKTNEFDFDLPDRLIAQTPLEKRDHSRLMVLDKNKQEIVHKHFYDITDYLNPGDCLVINNTRVLPARLFGVKENTGGKMEFLLLKRIDLNTWEVLVKPGKKAKIGSRFEFGEGILKAEVLSMADEGARIVRFEYEGVFEELLDQLGKMPLPPYITEELADRERYQTVYSKHEGSSAAPTAGLHFTPELLSEIKKKGINVVSITLHVGLGTFRPVKVDSLENHEMHAEYYEITEEAAQVINDTKKAGNRVFAVGTTSCRTLESASTEKGKIEANKGWTNIFIFPGYQFKILDGLITNFHLPESTLIMLVSALLGKEKTLQAYKVAVDEQYRFFSFGDAMLIV

SEQ ID NO: 63190 - protein, 341 aa, Alkaliphilus oremlandii
  REGION 1..341: note = tr|A8MGP0|A8MGP0_ALKOO S-adenosylmethionine:tRNA ribosyltransferase-isomerase OS=Alkaliphilus oremlandii (strain OhILAs) OX=350688 GN=queA PE=3 SV=1
METKDFDYDLPEELIAQVPLEHRDQSRLMVLDKETGDIAHRHFYDIIDFLNEGDCLVLNDTRVLPARLIGEKEGSGGKIEFLLLKRIELDTWEALVKPGKKAKVGSRFIFGDGRLCTEVIGIGEEGSRIIKFQYDGVFEDILDQLGQMPLPPYITEKLEDKERYQTVYSKNQGSAAAPTAGLHFTSELLKKLEEKGVKTAYITLHVGLGTFRPVKVEKIEEHTMHSEFYTIDDKNANIINEAKANGKRIIAVGTTSCRTLESVATKDGIIEPKSGWTDIFIYPGYDFKIVDNLITNFHLPESTLIMLVSTLAGKEATLNAYKIAVKEGYRFFSFGDAMFIK

SEQ ID NO: 63191 - protein, 341 aa, Alkaliphilus peptidifermentans
  REGION 1..341: note = tr|A0A1G5L3B8|A0A1G5L3B8_9CLOT S-adenosylmethionine:tRNA ribosyltransferase-isomerase; OS = Alkaliphilus peptidifermentans DSM 18978 OX=1120976; GN = queA PE=3 SV=1
MKTSEFNYHLPEHLIAQTPLEQRDESRLMVLDKSKGEISHRHFYDILDYLDDGDCLVLNDTRVIPARLIGEKIETGGKIEFLLLKRIELDKWEVLVKPGKRAKVGSSFQFGDGLLTAKVVDIGDEGSRIVEFFYEGIFEEILDKLGNMPLPPYITETLEDAERYQTVYSKNQGSAAAPTAGLHLTTELLKKIENKGVNIVFITLHVGLGTFRPVKVENILEHKMHAEYYSIEENTALLINTAKNNGRKIVAVGTTCCRTLESAASEDGQLKASSGWTDIFIYPGYKFKMVDNLITNFHLPESTLIMLVSALAGKELVMSAYETAVKESYRFFSFGDAMLIK

SEQ ID NO: 63192 - protein, 341 aa, Alkaliphilus sp.
  REGION 1..341: note = tr|A0A2G2MM94|A0A2G2MM94_9CLOT S-adenosylmethionine:tRNA ribosyltransferase-isomerase; OS = Alkaliphilus sp. OX=1872455 GN=queA PE=3 SV=1
MKKEDFDFDLPQELIAQTPLEKRDLSRLMVLDRKTGNIDHSHFYNIIDFMTKDDCLVLNNSRVLPARLIGEKIGTKGKIEFLLLKRLELDTWEVLVKPGKKAKVGAEFQFGEGLLKAKILRIIDEGIRVVKFEHDGVFENIIDELGEMPLPPYITTKLKDQERYQTVYSKHTGSAAAPTAGLHFTNELLERIKEKGVKVVYITLHVGLGTFRPVAVDNIEEHKMHAEFYMIDEETAKTINDVRKKGGNVITVGTTCCRTLESVADDNGQVEASSGWTDIFIYPGYKYKIVTSMITNFHLPKSSLVMMISALVGRENILNAYRVAVEERYRFFSFGDAMFLK

SEQ ID NO: 63193 - protein, 345 aa, Alkalispirillum mobile
  REGION 1..345: note = tr|A0A498C3U1|A0A498C3U1_9GAMM S-adenosylmethionine:tRNA ribosyltransferase-isomerase; OS = Alkalispirillum mobile OX=85925 GN=queA PE=3 SV=1
MHVDDFHFDLPEALIAHHPPEQRRDSRLLCLDRETGAIADRRFPDLEGLLRPEDLLVLNDTRVIPARLFGQKPTGGRVEVLVERPLDPHRVLARLRASKTPSTGTVLHLEGGAEAEVTGREGEFFTLRFAGERTVLEILEQHGHMPLPPYIRREDVAADRQRYQTVFARKPGAVAAPTAGLHFDNEMLARIGARGVDTAWVTLHVGSGTFAPLRVTDPREHRMHSEWLDVPATTCAAVERARARGGRVVAIGTTVVRALETAAGDGALRPYQGETDIFIYPGYRFQAVDALVTNFHLPGSTLLMLVSAFAGRERVLAAYRHAVAEHYRFFSYGDAMFLAKGAADE

SEQ ID NO: 63194 - protein, 342 aa, unidentified
  source 1..342: note = Alkalispirochaeta americana
  REGION 1..342: note = tr|A0A1N6P9G5|A0A1N6P9G5_9SPIO S-adenosylmethionine:tRNA ribosyltransferase-isomerase; OS = Alkalispirochaeta americana OX=159291 GN=queA PE=3 SV=1
MKTSDLFFDLPQELIAQEPPRERGASRLFLAHRATGGVEHRVMTDIIDAVAPGTVMVFNDSRVRRARVYARTVDTGSSQEFLLVEPRGENRWLAIGPNTKKQRLGRVFRFDPSGVTARISSVEPPYRELTFSQPVTDQWLEEHGHIPLPPYIHRSDSSDDAQRYQTVYARTVGSVAAPTAGLHFTRDMLQALGDRGVEIHFVTLHVGIGTFLPVRTEVLEEHKMHSERYSVSRETARAIGKAKDEGRPVLAVGTTAVRTLESAWNEALQRVEAGEDETGIFIYPGYRFRVVDQLFTNFHTPGSTLLALVSAFATPEDIKEWYRQAVEERYRFFSYGDAMLIR

SEQ ID NO: 63195 - protein, 111 aa, unidentified
  source 1..111: note = Alkalispirochaeta odontotermitis
  REGION 1..111: note = tr|A0A0A0E2J1|A0A0A0E2J1_9SPIO S-adenosylmethionine:tRNA ribosyltransferase-isomerase (Fragment) OS=Alkalispirochaeta odontotermitis OX=1329640; GN = JY97_01050 PE=3 SV =1
NIPYETAEKITAAKKDGRKVLAVGTTTVRTLETSWSSNKLASGAGKTDLFIYPGYRFKVVDQLFTNLHTPKSTLLMLVSAFLGRKRLLEAYDIAIEENYRFFSYGDAMLIR

SEQ ID NO: 63196 - protein, 342 aa, unidentified
  source 1..342: note = Alkalispirochaeta sphaeroplastigenens
  REGION 1..342: note = tr|A0A2S4JFA8|A0A2S4JFA8_9SPIO S-adenosylmethionine:tRNA ribosyltransferase-isomerase; OS = Alkalispirochaeta sphaeroplastigenens OX=1187066; GN = queA PE=3 SV=1
MKTSDLFFDLPQELIAQEPPPERGTSRLFLADRAGGTAEHRVMADIVEAVAPGTVMIFNDSRVRRARVYARTVDTGSSQEFLLIEPRDPNRWLVIGPNTKKQRLGRVFRFDPSGITARVSSVEPPYRELTFSEPVTDQWLDEHGHIPLPPYIARTDSPDDAQRYQTVYARAVGSVAAPTAGLHFTKEILQALQDRGVEIHFVTLHVGIGTFLPVRTEVLEDHQMHTERYSVSPETARAIGRAKEEGRPVLAVGTTAVRTLESAWDESLQRLVPGENDTGIFIYPGYRFRVVDQLFTNFHTPGSTLLALVSAFATPDDIRRWYRLAVEERYRFFSYGDAMLIR

SEQ ID NO: 63197 - protein, 400 aa, unidentified
  source 1..400: note = Alkalitalea saponilacus
  REGION 1..400: note = tr|A0A1T5CZW0|A0A1T5CZW0_9BACT S-adenosylmethionine:tRNA ribosyltransferase-isomerase; OS = Alkalitalea saponilacus OX=889453 GN=queA PE=3 SV=1
MPVPEINISDFNYHLPDERIAKYPLTNRDESNLLVYKNQSVNHTNFKNLPEYLPQNTLLVFNNTRVIRARIHFFKSTGAKIEIFCLEPHNPSDAAMAFQQTQEVEWICLVGNLKKWKGETLSAVANTTVGDVNIFAQLVERINDACIIKFSWKNQHANFADILEGMGQTPIPPYLNRESETIDTERYQTVYSKLNGSVAAPTAGLHFSKTILKNIEEQNHKRLEITLHVGAGTFQPVKSEKISGHAMHTEQFEISCTSIEQLLNHNNPVIAVGTTSVRTLESLYYAGVRIINKLEYKKIGQWDGFEMPSDIPVNEALKALLNHLNQSGETTFKASTSIMVAPGYQFKIINGLITNFHQPKSTLLLLISALIGDNWKAVYEYAMNNDFRFLSYGDSSILIP

SEQ ID NO: 63198 - protein, 349 aa, unidentified
  source 1..349: note = Alkalitalea saponilacus
  REGION 1..349: note = tr|A0A1T5E6G5|A0A1T5E6G5_9BACT S-adenosylmethionine:tRNA ribosyltransferase-isomerase; OS = Alkalitalea saponilacus OX=889453 GN=queA PE=3 SV=1
MKLSKFKYKLPEELIALHPTHNRDESRLMVVHRATGKIEHKVFKEIINYFVTDDVFVFNDTKVFPARLYGNKEKTGAEIEVFLLRELNAEQRLWDVLVDPARKIRIGNKLYFGDDDALVAEVIDNTTSRGRTLRFLYDGSHEDFKKTLYSLGETPLPKFIKREVEPEDSERYQTIFARNEGAVAAPTAGLHFSRELLKRLEIKGTHFSYITLHVGLGNFRTVDVEDLTKHKMDSEQIQITDEAAQIINDGKDRKNRICAVGTTVMRTLETSVSTFGHVKPFEGWTNKFIFPAYDFQVANCMVSNFHLPYSTLLMMVAAFGGYDLVMKAYKTAVKEKYRFGTYGDAMLII

SEQ ID NO: 63199 - protein, 344 aa, Alkanindiges illinoisensis
  REGION 1..344: note = tr|A0A4Y7X958|A0A4Y7X958_9GAMM S-adenosylmethionine:tRNA ribosyltransferase-isomerase; OS = Alkanindiges illinoisensis OX=197183 GN=queA PE=3 SV=1
MQLSDFSYNLPDELIARYPLAKRSASRLLHLNAQGQTKDCTIAQLPELLQAGDLLVLNDTRVIKARLHGKRASGGAVEVLVERITGTDTALAHVKASNSPKAGATLYLADSQLEAQVEGRQNNLYALRFNQPVLPALEQFGALPIPPYFNRAADETDDERYQTVFNNPDKAASVAAPTASLHFDDELLTALAQKGIDKAFVTLHVGAGTFQPVRTDNIAEHVMHSEWGEVPQATVELVEKTKANGGKIIAVGTTATRALESAAKANNGELKAWSGETDIFIYPGYRFKVIDRLLTNFHLPESTLLMLVSALAGREPVLQAYAHAIQEKYRFFSYGDAMLIDRKI

SEQ ID NO: 63200 - protein, 344 aa, Alkanindiges sp.
  REGION 1..344: note = tr|A0A1S8CTU0|A0A1S8CTU0_9GAMM S-adenosylmethionine:tRNA ribosyltransferase-isomerase; OS = Alkanindiges sp. H1 OX=1907941 GN=queA PE=3 SV=1
MQLSDFSYDLPDELIARYPLATRSASRLLYLNAQGHTQDCTIKQLPELLQAGDLLVLNDTRVIKARLHGRRASGGAVEVLVERITGIDTALAHIKASNSPKAGTTLYLANDQLEAQVAGRQNNLYELRFNQPVLAALEQFGALPIPPYFNRAADETDDERYQTVFHNPDKAASVAAPTASLHFDDELLAALEQSGINKAFVTLHVGAGTFQPVRTDNIVEHVMHSEWGEVPQATVELIAKTKANGGKIIAVGTTATRALESAAKANHGELKAWSGETDIFIYPGYSFKVIDRLLTNFHLPESTLLMLVSALAGRDPVLKAYEHAIRQQYRFFSYGDAMLIDKKI

SEQ ID NO: 63201 - protein, 339 aa, Allisonella histaminiformans
  REGION 1..339: note = tr|A0A1G5VN82|A0A1G5VN82_9FIRM S-adenosylmethionine:tRNA ribosyltransferase-isomerase; OS = Allisonella histaminiformans OX=209880 GN=queA PE=3 SV=1
MKLEEFNYDLPKELIAQEPAEPRDSCRLMMLDRKTGEYTHHTFRDILDEIRPGDVFVFNNTKVIPARLYGHRKETGGKVEILLLTPKGNDNWEILVNPGKKALPGQVIEFNEHLSCEILDKTDFGGRVAHFTYDQDFDSILEEIGEMPIPPYIHKKLEDNDEYQTVYAKYKGSAAAPTAGLHFTKELMEEMKNRGAEIRYVTLHVGLGTFRPVSEENIEEHEMHKEFYSVTEETAEAVNRAKAEGRRIIAVGTTSVRTLESAGQSGKLQAGSGWTQLYIYPGYTWHIVDAICTNFHLPESTLIMMMCSFAGKEHVLNAYKEAVRQKYRFFSFGDAMFIR

SEQ ID NO: 63202 - protein, 349 aa, Alloactinosynnema album
  REGION 1..349: note = tr|A0A1H0HVR3|A0A1H0HVR3_9PSEU S-adenosylmethionine:tRNA ribosyltransferase-isomerase; OS = Alloactinosynnema album OX=504798; GN = SAMN05192558_102268 PE=3 SV=1
MRNASPDIQMSTMEFELPSELEAHEPPEARGLSRDGVRLLVGTGSSVDHRRFADLPSALRAGDLLVVNTSATVPAAVKVPDTDLSVHFSTELRDGSWLVELRQAQGKTTARYRDGVAGRRYALPAGGSVTLTRPYSRDRLWEAEVDRGPFGSVIGYLRAVGSPIRYGYVPRDWPIAYYQTVFGTEPGSAEMPSASRPFTDRMVTTLVTKGVRIAPVLLHTGVASQEAHERPYPERFRVPASSATLINDTRTTGGRVIAIGTTAVRAVESAVAPDGTVKAAEGWTDLIITPERGVTVTDGLLTGFHEPRASHLDMLEAVAGRRLLRECYQEAIEAGYLWHEFGDLNLLIP

SEQ ID NO: 63203 - protein, 340 aa, unidentified
  source 1..340: note = Alloactinosynnema iranicum
  REGION 1..340: note = tr|A0A1G6N3N5|A0A1G6N3N5_9PSEU S-adenosylmethionine:tRNA ribosyltransferase-isomerase; OS = Alloactinosynnema iranicum OX=1271860; GN = SAMN05216174_103158 PE=3 SV=1
MSTLEFTLPEELEAHEPPEARGLPRDGVRLLVGEGKTVTHERFTNLPALLRAGDVLVVNTSATLPAAAGVVGGGLTVHLSTEASDGTWLVELRQAGDKATAPYPFGVAGARYDLVGGATVTLLSRYSDDRLWVAAVDPGGFDSVSGYLHCFGSPIRYGYVPKSWPLRYYQTVFGTEPGSAEMPSAARPFTDRLVTRLVSAGIQFAPVLLHTGVASPEAHERPYPERFRVSSTTARLVNRARADGGRVVAVGTTAVRALESAVGDDGDVHAREGWTDLIITPGRGVRAVDGLLTGFHEPRASHLDMLAAIAGQELLDRCYRAAIDHGYLWHEFGDVNLLIP

SEQ ID NO: 63204 - protein, 362 aa, Alloactinosynnema sp.
  REGION 1..362: note = tr|A0A0H5CMD1|A0A0H5CMD1_9PSEU S-adenosylmethionine:tRNA ribosyltransferase-isomerase; OS = Alloactinosynnema sp. L-07 OX=1653480 PE=3 SV=1
MDRETRPLNEFGAGMTTVIEGAMSAMEFALPPDLEAHEPPEARGLSRDGVRLLVGSGSSVQHHRFADLPTILTPGDLLVVNTSATIPAAVRVLGSDLSVHFSTELPNGRWLVELRKAGGQATVPYRSGVPDTRYDLPEGASVTLTAPYSRDRLWEATVDPGAFGSMLGYLRALGRPIRYEYVPRDWPIRYYQSVFGTNPGSAEMPSASRPFTDRIVTTLVSAGVRFAPVMLHTGVASPEAHERPYPERFSVGEPTAALVNHTRQEGHRVIAVGTTAVRALESAVGPDRTVQPTAGWTDLIVSPDRGVQVVDGLLTGFHEPRASHLDMLAAIAGTSLLSECYREAIAHRYLWHEFGDLNLLVP

SEQ ID NO: 63205 - protein, 342 aa, Allobacillus sp.
  REGION 1..342: note = tr|A0A556PTU8|A0A556PTU8_9BACI S-adenosylmethionine:tRNA ribosyltransferase-isomerase; OS = Allobacillus sp. SKP4-8 OX=1955272 GN=queA PE=3 SV=1
MDINEFDFDLPEELIAQTPLEDRSASRLLTIDRAKDQFHHQQFTDIIDYLNPGDCLVLNNTKVLPARLMGYKADTYGKVELLLLHQVNGDDWEVLVKPAKKVKAGTWIQFGDGLLKAECLEEKEHGGRVVRFHYEGIFMEILDQLGEMPLPPYIKEQLDDQDRYQTVYAKEVGSAAAPTAGLHFTEQLLERIKQKGVHIAYITLHVGLGTFRPVQTDDIEKHEMHAEFYRLDEQTASDLNDIKAKGNRIIAVGTTSIRTLETIARDTGGVFEARSGWTDIFIYPPYKFQAIDAMITNFHLPKSTLIMLVSAFAGQERTLKAYKEAVEKSYRFFSFGDAMFIY

SEQ ID NO: 63206 - protein, 342 aa, Allobacillus sp.
  REGION 1..342: note = tr|A0A556PVB2|A0A556PVB2_9BACI S-adenosylmethionine:tRNA ribosyltransferase-isomerase; OS = Allobacillus sp. SKP2-8 OX=1955271 GN=queA PE=3 SV=1
MDINEFDFDLPEQLIAQTPLKDRSASRLLTIDRAKDQFYHQQFTDIIDYLNPGDCLVLNNTKVLPARLMGYKADTYGKVELLLLHQVNGDDWEVLVKPAKKVKVGTWIHFGDGLLKAECLDEKEHGGRVVRFHYEGIFMEILDQLGEMPLPPYIKEQLEDQDRYQTVYAKEVGSAAAPTAGLHFTEGLLEQIKQKGVHIAYVTLHVGLGTFRPVQTDDIENHEMHAEFYRLDEQTASSLNEIKAKGNRIIAVGTTSIRTLETIARDTNGTFEARSGWTDIFIYPPYTFQAIDAMITNFHLPKSTLIMLVSAFAGKERTLRAYKEAVEKSYRFFSFGDAMFIY

SEQ ID NO: 63207 - protein, 343 aa, Allochromatium vinosum
  REGION 1..343: note = tr|D3RMI6|D3RMI6_ALLVD S-adenosylmethionine:tRNA ribosyltransferase-isomerase OS=Allochromatium vinosum (strain ATCC 17899 / DSM 180 / NBRC 103801 / NCIMB 10441 / D)OX=572477 GN=queA PE=3 SV=1
MRRSDFHYELPAELIAQHPLPERSGSRLLVLDGSQTPPRDRMFTDLPSLLKPHDLLIFNNTQVMRARLFGHKETGGQVEILIERLLDAREALAHVRASKSPKPGSRIRVTDGAWLSVVGREGDLFRLRALESDFGEQMARHGHMPLPPYIQRPDDVLDESRYQTVFARRTGAVAAPTAALHFDEPMLARLDALGVARAEITLHVGAGTFQPVREDDLERHHMHSEWLEVDETVCERIERTRQLGGRVIAVGTTSVRSLETAAADGRLRPFRGESRLFIRPGYRFRVVDAMITNFHLPESTLLMLVAAFSGYSEIMKAYRHAIDQRYRFFSYGDAMFLTRQDAA

SEQ ID NO: 63208 - protein, 343 aa, Allochromatium warmingii
  REGION 1..343: note = tr|A0A1H3B6J6|A0A1H3B6J6_ALLWA S-adenosylmethionine:tRNA ribosyltransferase-isomerase; OS = Allochromatium warmingii OX=61595 GN=queA PE=3 SV=1
MRRSDFHYELPAELIAQHPLPERSGSRLLVFDAATGQRSDRLFTDLPSLLQPHDLLIFNNTRVMRARLFGQKESGGRVEILIERLLTANTALAHVRASKAPKAGTRLRITDGAWLLVEGREGDLFRLRALDANFDEQMRQHGHIPLPPYIQRPDDALDETRYQTILARHLGAVAAPTAALHFDPALLARLDALGIARAEITLHVGAGTFQPVREDDLDRHPMHSEWLEVNAQVCEQIATTRQFGGRVIAVGTTSVRSLETAAATGMLAPFCGDSRLFIRPGYRFKVVDALITNFHLPESTLLMLVSAFAGHAAIMDAYRHAIAERYRFFSYGDAMFLTRCDPD

SEQ ID NO: 63209 - protein, 338 aa, unidentified
  source 1..338: note = Allofrancisella guangzhouensis
  REGION 1..338: note = tr|A0A0A8EAG7|A0A0A8EAG7_9GAMM S-adenosylmethionine:tRNA ribosyltransferase-isomerase; OS = Allofrancisella guangzhouensis OX=594679 GN=queA PE=3; SV = 1
MKTDDFDYKLPEELIASYPLGKRDESRLLKLSKATGNIEDYKFKNFIDFISSKDLLVFNNSKVMLARLYGEKITGAKLEFLIEKIRSPKLFLTHIKANRSPVIGSEIYIQDTLAKVLDKDSGIYLLELQGQRNIYQLMEKFGHIPLPPYMKREDEEFDAERYQTVYAKDLGSVAAPTAGLHFSEELMQKIKDKGVNAAYITLHVGSGTFKPVQVDDIESHKMHSEVISVPEDVCQKIRQTKANGGRVIAIGTTSVRSLETAGQSGQIQAYQGETDIFLYPGKKFNVVDAMITNFHLPKSTLIMLVSAFAGKENVIKAYNHAIDKKYRFYSYGDAMFIV

SEQ ID NO: 63210 - protein, 338 aa, unidentified
  source 1..338: note = Allofrancisella inopinata
  REGION 1..338: note = tr|A0A4R7LIB9|A0A4R7LIB9_9GAMM S-adenosylmethionine:tRNA ribosyltransferase-isomerase; OS = Allofrancisella inopinata OX=1085647 GN=queA PE=3 SV=1
MKTDDFDYKLPEEQIASYPLDKRDESRLLKLSKETGNIKDYKFKDFIDFINPKDLLVFNNSKVMLARLYGKKTTGAKLEFLVEKIKTPKVFETHIKANRSPNIGSEIYVQDTLAKVLDKDGGVYLLELQGEKNIYQLMEEFGHIPLPPYMKREDEEFDAERYQTVYAKDLGSVAAPTAGLHFSEELMQQIKNKEVGTAYITLHVGSGTFKPVQVDDVESHKMHSEVISVPEDVCQKIRQTKANGGRVIAIGTTSVRSLETAGQSGQIQAYQGETDIFLYPGKKFNVVDAMITNFHLPKSTLIMLVSAFAGKENIIKAYKHAIDKKYRFYSYGDAMFIY

SEQ ID NO: 63211 - protein, 354 aa, unidentified
  source 1..354: note = Alloprevotella rava
  REGION 1..354: note = tr|G5GCS3|G5GCS3_9BACT S-adenosylmethionine:tRNA ribosyltransferase-isomerase OS=Alloprevotella rava F0323; OX = 679199 GN=queA PE=3 SV=1
MKLSQFKFDLPQEQIAPDPNPHRDDCRMMVLHRQTGEIEHKQFGDILSYFQPHDLFVFNDTKVFPARLYGRKEKTGARIEVFLLRELNHEQHFWDVLVDPARKIRIGNKLYFGEAEDIVAEVIDNTTSRGRTLRFLYEGEREDFKRSLYALGEAPIPRFTGHVSTPENRESDIEDFQCIFARHEGAVTAPTAGMHFSKILMKKMEIQDINTAYLTLHCGLGNFRSTDVEDLTKHKMESEEMIVGTECCAAVNKAKDEGRRILAVGTTVQRALEVCVGPDHRIREFEGHTNKFIFPPYNFLVADSMVVNFHLPESTMVMLTAAFGGYEQTMAAYEEAIKEGYMFGPFGDAMLIVD

SEQ ID NO: 63212 - protein, 409 aa, unidentified
  source 1..409: note = Alloprevotella rava
  REGION 1..409: note = tr|G5GBJ9|G5GBJ9_9BACT S-adenosylmethionine:tRNA ribosyltransferase-isomerase OS=Alloprevotella rava F0323; OX = 679199 GN=queA PE=3 SV=1
MQDPRHIHIKDFSYNLPDERIAKHPLEKRDEAKLLLYNQEGIGEDVFRNLTNYLQPGQLIVFNNTKVIYARLHFRKATGALIEVFCLEPHTPSDYQVNFSTTRRVTWTCLIGNMKKWKEGRLEQEIKVGDKLLTLTAERGGVSGTGFEVTFDWNDDTVAFSEILDAIGELPIPPYLNRDTEQRDLEEYQTVYSKIKGSVAAPTAGLHFTDELLSQLDAHGIERDEITLHVGAGTFKPVKSEEIEGHTMHSEWIAVARTSIEKLIAHGGQCIAVGTTSVRTLESLYYIGVILQQNPNATEEELRVPQWMPYEYAVQTAEPLTTLQALQNILDYLERNNLPTLHTSTQIMIAPSYEYHVVRTMITNFHQPQSTLLLLVSAFVKGDWQRIYNYALEHDFRFLSYGDGCLLNF

SEQ ID NO: 63213 - protein, 351 aa, unidentified
  source 1..351: note = Alloprevotella sp.
  REGION 1..351: note = tr|A0A3P1ZD99|A0A3P1ZD99_9BACT S-adenosylmethionine:tRNA ribosyltransferase-isomerase; OS = Alloprevotella sp. OH1205_COT-284 OX=2491043 GN=queA; PE = 3 SV=1
MKLSQFKFKLPEEQIAEYPTPHRDESRMMVLHRTTGEIEHRMFKDFLEYFDEHDVFVFNDTKVFPARLYGNKEKTGARIEVFLLRELNRDLRLWDVLVDPARKIRIGNKLYFGDDNSIVAEVIDNTTSRGRTLRFLYDGEHEEFKKSLYALGEAPIPHEIIKRPSEPEDLERFQCIFAKHEGAVTAPTAGLHFSKSMMKRMEIKGIESAFITLHCGLGNFRQTDVEDLTKHKMDSEQMFVNHECCSIVNKAKDEGRKICAVGTTVQRALEASVSTEGHIKEYEGWTNKFIFPPHDFSVANAMFSNFHMPLSTLLMLTAAFGGYDYTMAAYEEAIKEGYRFGTYGDVMLIVD

SEQ ID NO: 63214 - protein, 351 aa, unidentified
  source 1..351: note = Alloprevotella sp.
  REGION 1..351: note = tr|A0A496KIM0|A0A496KIM0_9BACT S-adenosylmethionine:tRNA ribosyltransferase-isomerase; OS = Alloprevotella sp. OX=1872471 GN=queA PE=3 SV=1
MKLSQFKYKLPQEKIAEYPAPHRDDCRMLVLHRKTGEIEHREFKDFLEYFDEEDVFVFNDTKVFPARLYGNKEKTGARIEVFLLRELNRDLRLWDVLVDPARKIRIGNKLYFGEDNSIVAEVIDNTTSRGRTLRFLYDGDHDEFRQQLYALGEAPIPHEIIKRPSEPEDLERFQCIFAKHEGAVTAPTAGLHFSKNMMKRMEIKGIESAFVTLHCGLGNFTQTDVEDLTKHKMYSEQMFVRKECCEMVNTAKEKGRKICAVGTTVQRALEASVSTEGRIKEFEGWTSKFIFPPYDFSVADAMFSNFHMPESTLLMLTAAFGGYEHVMNAYEVALKEDYRFGTFGDVMLIVD

SEQ ID NO: 63215 - protein, 409 aa, unidentified
  source 1..409: note = Alloprevotella tannerae
  REGION 1..409: note = tr|C9LDQ1|C9LDQ1_9BACT S-adenosylmethionine:tRNA ribosyltransferase-isomerase OS=Alloprevotella tannerae ATCC 51259 OX=626522 GN=queA PE=3 SV=1
MEDTKHIQIKDYNYTLPEDRIAKYPVAPRDHSKLLLYRDGRVSEDSFYNLPTYLKPGALMVFNNTKVIFARLHFQKATGALIEIFCLEPHTPADYQQSFAATRRVTWTCLVGNMKKWKEGRLERTVKVGDRELLLTAEHKGPAGTGFEIAFDWGDDAVSFSEVLDAIGELPIPPYLNRQTEQSDLNNYQTVYSKIEGSVAAPTAGLHFTDDVLRRLDEAGIVREEITLHVGAGTFKPVKSEEIEGHTMHAEWIAVSRQNIEHLLAHDCSCIAVGTTSVRTLESLYYIGVLIHRNPHVAPEDLHVPQWLPYEYETSTEEKLTPEAALREILAYLDRNRMSVLHTATQIIIAPGYTYKIVKTMVTNFHQPQSTLLLLVSAFVGGNWRTIYDYALAHDFRFLSYGDSSLLNY

SEQ ID NO: 63216 - protein, 349 aa, unidentified
  source 1..349: note = Alloprevotella tannerae
  REGION 1..349: note = tr|C9LGY1|C9LGY1_9BACT S-adenosylmethionine:tRNA ribosyltransferase-isomerase OS=Alloprevotella tannerae ATCC 51259 OX=626522 GN=queA PE=3 SV=1
MKLSQFNFKLPAEKIAKYPSPLRDDCRMMVLDKTTGKIEHRKFDELLDYFDEKDLFVFNDTKVFPARLYGNKEKTGARIEVFLLRELNQELRLWDVLVDPARKIRIGNKLYFGEDNSIVAEVIDNTTSRGRTLRFLYDGDHEEFKRSLYALGEAPIPREINRPTEPEDLERFQTIFARNEGAVTAPGAGLHFSKVMMKKMELKGIDAAYLTLHCGLGNYRTTDVEDLTKHKMESEQMFVDAKCCRHVNSAQDANRKILAVGSTVMRALEVCVGPDGHIKEFEGWTNKFIFPPYEFSVADAMLVNFQFPYSTLLMLASAFGGYDQVMGAYKEAIKGEYMFGPYGDAMLII

SEQ ID NO: 63217 - protein, 347 aa, unidentified
  source 1..347: note = Unknown
  REGION 1..347: note = tr|A0A2A5XY64|A0A2A5XY64_9PROT S-adenosylmethionine:tRNA ribosyltransferase-isomerase; OS = alpha proteobacterium MED-G10 OX=2007300 GN=queA PE=3; SV = 1
MKLEQLDYHIPKNLIATEPTKPRDESSLVVVNKEFEVIKFKEILNQLRKGDTLVFNNTKVINAHLDGQIKKRKVSVNLNKLIDKQKTIWSAFLKSNKKPLINEEIIFPFDLKAKIIDVIKNNNTDFFQIQFSCDYEKLRKILNSFGKIPLPPYIKKIREIKRKDSVDYQTIFAKTEGAVAAPTASLHFSEKLFEKIKKKKVNIVYVTLHINGGTFLPIKAENVFEHSMHSEFGAISKKSAEIINEHKKKGGRVIAVGTTVLRLLESSKDKNGLIKEFNGETDIYLKPGSKINSVDGLITNFHTPKSTLLLLVYAFIGEQKTKKLYEYAIKKKLRFFSYGDACLLWKM

SEQ ID NO: 63218 - protein, 366 aa, unidentified
  source 1..366: note = Unknown
  REGION 1..366: note = tr|J9DHZ7|J9DHZ7_9PROT S-adenosylmethionine:tRNA ribosyltransferase-isomerase OS=alpha proteobacterium IMCC14465 OX=1220535 GN=queA PE=3 SV=1
MQVEAFDFNLPEELIALRPASPRDSAKLLHVASDGNLSDKIIRDLPSYFSKGEVLVVNDTRVIPAKLTGTRLRDSASNSASETEQNSGAQIDLNLIERQGASMWKCLLKPAKKVRSGDVISFADAEGGSYIATVREKEQGEALIDFNLSLEKMDEVLGLIGSMPLPPYIAGRRTPDEKDNQDYQTLFAEHDGAVAAPTAGLHFTPELQAKLENIGVEICRVTLHVGAGTFLPIKVEDTNHHKMHAEWGEVKPETADRLNAAKQNGFKICCVGTTSLRLLESAARDDGLIAPFAAPTDIFIKPGYQFKAADRLLTNFHLPKSTLFMLVSAFSGLATMKKAYDHAVHSRYRFYSYGDACLLELTEKMD

SEQ ID NO: 63219 - protein, 339 aa, unidentified
  source 1..339: note = Alphaproteobacteria bacterium
  REGION 1..339: note = tr|A0A2P5VMN1|A0A2P5VMN1_9PROT S-adenosylmethionine:tRNA ribosyltransferase-isomerase; OS = Alphaproteobacteria bacterium MarineAlpha1_Bin1; OX = 2013065 GN=queA PE=3 SV=1
MDVELFNFELPDEAVALRPARPRDSARLLIVGKDGCQDRVIGDLPQLLLPGDLLIFNNTRVLPLQLLARRGAGRVELTLMQHLGPGRWRAFAKPARKLSGGDVLLISEGFAATVEAPHQDGQVVLNFAFSDDVMMEALQRFGTMPLPPYIRKHRAVDDQDAVDYQTVLARHDGAVAAPTAGLHFTEELLHRLSEAEIERGEVTLHVGPGTFLPVTANDTDDHIMHNEWGQIDGPLAAQIRFTKANGGRVVAVGTTSLRLLESAGEEAFSGETDIFITPGYEFRVVDALLTNFHLPRSTLFMLVAAFSGLETMQAAYAYAIRSGYRFYSYGDACLLERPA

SEQ ID NO: 63220 - protein, 340 aa, unidentified
  source 1..340: note = Alphaproteobacteria bacterium
  REGION 1..340: note = tr|A0A424T7C5|A0A424T7C5_9PROT S-adenosylmethionine:tRNA ribosyltransferase-isomerase; OS = Alphaproteobacteria bacterium TMED54 OX=1986640 GN=queA; PE = 3 SV=1
  VARIANT 34..35: note = Xaa can be any naturally occurring amino acid
  VARIANT 49: note = Xaa can be any naturally occurring amino acid
  VARIANT 56: note = Xaa can be any naturally occurring amino acid
  VARIANT 191: note = Xaa can be any naturally occurring amino acid
  VARIANT 201: note = Xaa can be any naturally occurring amino acid
MNINQFDFDLPEVLIAQQPIYPRHNSRLLSCIKXXMEDDFFYNLPNLLXPGDVVVXNDTKVLKARLIGLINQKKISFTLHMKVDENKWYSFCKPAKKCKLNDEVKFSQSFNAKIIDKNNYGEVLLSFNYSGKELFEQISKHGLMPLPPYIKNKSFETESHYQTYFAKKIGAVAAPTAGLHFTKDVINLLIXNKIIITSITXHVGAGTFLPVKTQNIDDHKMHFELFEVSQKTSDIINYAKKNGNKIVAIGTTVMRTLETVFLKYNKIMSLSDKTDLFIKPGFKFNAVDYLLTNFHLPKSTLLILISAFSGKEEIKQIYNHAIKQSYRFYSYGDCCLLRKK

SEQ ID NO: 63221 - protein, 366 aa, unidentified
  source 1..366: note = Alsobacter sp.
  REGION 1..366: note = tr|A0A2T1HNF7|A0A2T1HNF7_9RHIZ S-adenosylmethionine:tRNA ribosyltransferase-isomerase; OS = Alsobacter sp. SH9 OX=2109933 GN=queA PE=3 SV=1
MRVDLFDFDLPEDRIALRPAQPRDAARMLVVRPGDEPALEDRTVRDLPDLLQAGDRLVVNDTRVIPARLDGIRVRGDSVAHIQATLHLREGPDLWRAFVRPAKRLAVGERIRFGEESESMACLLASLDAEVVEKGEGGEVLLRFAFTGPALDEAIARLGHIPLPPYIAAKRPDDERDRQDYQTLFAEREGAVAAPTAGLHFTPELTQRLAARGVGLTRLTLHVGAGTFLPVKADDTADHKMHAEWGMISPEAAAELNATRAAGGRIVSVGTTSLRLLESAVSEDGRFAPWQGQTSIFITPGHRFRAVDVLMTNFHLPRSTLFMLVSAFSGLDAMRAAYAHAIEAGYRFYSYGDASLLFPAPPESTP

SEQ ID NO: 63222 - protein, 343 aa, unidentified
  source 1..343: note = Altererythrobacter aquimixticola
  REGION 1..343: note = tr|A0A4T3EZH3|A0A4T3EZH3_9SPHN S-adenosylmethionine:tRNA ribosyltransferase-isomerase; OS = Altererythrobacter aquimixticola OX=2489173 GN=queA; PE = 3 SV=1
MRVDLFDFDLPPELIALRPVRPRDAARMLVVRGADAPFEDRGVLDLPQLLEPGDVMVFNDTRVIPAQLEGRRGEARIGATLHKRVDLRRWQAFIRNAKRVREGDVLEFPADVSAIAEKRHEDGSFTLAFEGGEPVEVLLERAGRMPLPPYIAGKRETDEQDRKDYQTIFAREEGAVAAPTASLHFTQRLLDALDERGVIRTTLTLHVGAGTFLPVKAGDTADHRMHAEFGRIDAETAQLLNETRAKGGRIIAAGTTALRLLESAADEDGIIHPFEGDTAIFITPGYRFRGVDGLMTNFHLPKSTLFMLVSALMGLDRMQAAYAHAIAQGYRFYSYGDSSLLLP

SEQ ID NO: 63223 - protein, 343 aa, unidentified
  source 1..343: note = Altererythrobacter atlanticus
  REGION 1..343: note = tr|A0A0F7KPH1|A0A0F7KPH1_9SPHN S-adenosylmethionine:tRNA ribosyltransferase-isomerase; OS = Altererythrobacter atlanticus OX=1267766 GN=queA PE=3; SV = 1
MRVDLFDFDLPPERIALRPARPRDASRMLVVRAEGAFEDRIARDLPAMLRPGDVLVFNDTKVIPAQLEGRRGEARIGATLHKRLDLRRWQAFIRNAKRLRPEDIIDFGADVTALAEQRHDDGSWTLAFQGEEPVEVLLERAGRMPLPPYIAGKREMDEADREDYQTIFAREEGAVAAPTAALHFTPQLLAALDEAGVKRETLTLHVGAGTFLPVKAEDTADHAMHSEWGRIEQATADRLNAARKAGNRVIAVGTTSLRLLESATGEDGVIRPFAGDTAIFITPGYRFRAIDGLMTNFHLPKSTLFMLVSALMGLERMQAAYAHAIEAGYRFYSYGDASLLLPD

SEQ ID NO: 63224 - protein, 342 aa, Altererythrobacter dongtanensis
  REGION 1..342: note = tr|A0A1B2AEN9|A0A1B2AEN9_9SPHN S-adenosylmethionine:tRNA ribosyltransferase-isomerase; OS = Altererythrobacter dongtanensis OX=692370 GN=queA PE=3; SV = 1
MRVDLFDFELPNELIALRPAVPRDAARMLVLRGPHETIDGGVRDLPDLLAPGDVLVFNDTRVIPAQLEGRRGDARIGATLHKRIDLRRWQAFVRNGKRLREGDAIDFGGSVSATAQKRFPDGSWVLAFAGDEPVEVLLEHAGRMPLPPYIAGKRPTDERDRADYQTMFADKDGAVAAPTAALHFTPELMEDLATRGILTETLTLHVGAGTFLPVKAEDTEDHAMHAEWGRIDAETADRLNAVRAHGGRVIAVGTTSLRLLESAAEEDRIIRPFEGDTSIFITPGYRFRAIDGLMTNFHLPKSTLFMLVSALMGRERMQAAYAHAIAERYRFYSYGDSSLLLP

SEQ ID NO: 63225 - protein, 343 aa, Altererythrobacter epoxidivorans
  REGION 1..343: note = tr|A0A0M5L088|A0A0M5L088_9SPHN S-adenosylmethionine:tRNA ribosyltransferase-isomerase; OS = Altererythrobacter epoxidivorans OX=361183 GN=queA PE=3; SV = 1
MRVDLFDFDLPTELIALRPAKPRDAARMLVAKGGDQPLIDAGVRDLPSFLRVGDVLVFNDTRVIPAQLEGMRGEAKIGATLHKRIDLRRWQAFIRNAKRVREGDQLVFGGGVTAIAETRHDDGSYSLCFGGDEPVEVLLERAGRMPLPPYIAGKRPTDEQDREDYQTMFAEKDGAVAAPTAALHFTPQLLAALKDAGIRSETLTLHVGAGTFLPVKVDDTDDHRMHAEWGTISEETADRLNAARAAGGRIISVGTTSLRLLESAARDDGTIMPFEGDTSIFITPGYRFKAIDGLMTNFHLPKSTLFMLVSALMGRERMQEVYAHAIANSYRFYSYGDSSLLLP

SEQ ID NO: 63226 - protein, 344 aa, Altererythrobacter ishigakiensis
  REGION 1..344: note = tr|A0A562UWE7|A0A562UWE7_9SPHN S-adenosylmethionine:tRNA ribosyltransferase-isomerase; OS = Altererythrobacter ishigakiensis OX=476157 GN=queA PE=3; SV = 1
MRVDLFDFELPQELIALRPVRPRDAARMLYVPGTGPFEDRGVRDLPKLLSAGDVLVFNDTRVIPGQLEGRRAGGEAKIGATLHKREDLRRWIAFIRNAKRLKEGDQIVFGGGVTALAETRNQDGSFTLLFEGDEPVEVLLDRAGTMPLPPYIAGKRDIDEQDYEDYQTMFAQKDGAVAAPTASLHFTERLMSELDAAGIRHETLTLHVGAGTFLPVKADDTDDHQMHSEWGRITPQVAERLNAARVAGKRIIAVGTTSLRLLESAACDDRTIAPFEGDTDIFITPGYRFKGVDGLMTNFHLPKSTLIMLVSALIGRERMMEAYAHAINANYRFYSYGDSSLLLP

SEQ ID NO: 63227 - protein, 342 aa, Altererythrobacter marensis
  REGION 1..342: note = tr|A0A0G3X917|A0A0G3X917_9SPHN S-adenosylmethionine:tRNA ribosyltransferase-isomerase; OS = Altererythrobacter marensis OX=543877 GN=queA PE=3 SV=1
MRIDLFDFELPQDLIALRPVAPRDTARMLVVDDEKDFADRIVRDLPDILAPGDVLVFNDTRVIPAQLEGQRGDARIGATLHKRIDLRRWQAFVRNAKRCRPGDRVEFGGGVTALVEGRGEDGSITFAFEGEEPVEVLLERAGRMPLPPYIAGKRPADERDERDYQTMFAARDGAVAAPTAALHFTPELIAALDARGVARETLTLHVGAGTFLPVKVDDTDDHRMHSEWGRIDAATADRLNAARQRGGRVIAVGTTSLRLLESAAGADGVIRPFEGDTAIFITPGYTFRAIDGLMTNFHLPKSTLFMLVSALMGRERMRAVYTQAIERKYRFYSYGDSSLLLP

SEQ ID NO: 63228 - protein, 353 aa, Altererythrobacter marensis
  REGION 1..353: note = tr|A0A2W4YP89|A0A2W4YP89_9SPHN S-adenosylmethionine:tRNA ribosyltransferase-isomerase; OS = Altererythrobacter marensis OX=543877 GN=queA PE=3 SV=1
MQVDLFDFELPPERIALRPVSPRDAARMLVVGGEGAFADAAVRDLPRLLAPGDVLVFNDTRVIPAQLDGRREGADGGEGARIGATLHKRIDLRRWQAFIRNGKRLRPGDRIDFPANVSAVAEQRHEDGSWTLSFAGDEPVEVLLERAGTMPLPPYIAGKRATDARDREDYQTIFAAQDGAVAAPTAALHFTPGLLGALDDAGIGRETLTLHVGAGTFLPVKADDTGDHQMHAEWGRIDAATASRLNAVRARGGRLIAVGTTSLRLLESAADAQGIIQPFEGDTAIFITPGYRFRAVDGLMTNFHLPRSTLFMLVSALIGLERMQAAYAHAIAEGYRFYSYGDSSLLLPERAGG

SEQ ID NO: 63229 - protein, 346 aa, Altererythrobacter namhicola
  REGION 1..346: note = tr|A0A1C7D8Z4|A0A1C7D8Z4_9SPHN S-adenosylmethionine:tRNA ribosyltransferase-isomerase; OS = Altererythrobacter namhicola OX=645517 GN=queA PE=3 SV=1
MKVDLFDFDLPQDLIALRPARPRDAARMLVVDGDAPFADRTVMDLPGMLRPGDVLVFNDTRVIPAQLEGRRGEARIGATLHKRIDLRRWQAFIRNAKRLKTGQQIEFPAGVTAIAETRHEDGSWTLAFAGEEPVEVLLERAGRMPLPPYIAGKRATDEQDKADYQTMFAREDGAVAAPTAALHFTDRLLAALDERGVRRETLTLHVGAGTFLPVKAEDTDDHRMHAEFGRIDAETAERLNAARASGGRLIAVGTTVLRLLESAADPDGTIQPFADDTSIFITPGYAFRAVDGLMTNFHLPKSTLMMLVSALMGRERMQAVYAHAIENGYRFYSYGDSSLLLPQENA

SEQ ID NO: 63230 - protein, 342 aa, Altererythrobacter sp.
  REGION 1..342: note = tr|A0A1Q3M8B6|A0A1Q3M8B6_9SPHN S-adenosylmethionine:tRNA ribosyltransferase-isomerase; OS = Altererythrobacter sp. 66-12 OX=1895714 GN=queA PE=3; SV = 1
MRVDLFDFHLPPECIALRPARPRDAARMLLVPGEGAFADCTVRDLPGVLRAGDVLVFNDTRVIPAQLEGRRGQARIGATLHKRIDLRRWQAFVRNAKRLREGDVIEFPAGVSALAEARHDDGSWTLAFAGEEPVEVLLDRAGRMPLPPYIAGKRETDEADRTDYQTIFAREDGAVAAPTAALHFTPALLAALDAGGIGRETLTLHVGAGTFLPVKAEDTEGHRMHAEWGRIDAATAERLNAARRAGRRVIAVGTTSLRLLESAADQHGTIREFAGDTAIFITPGYRFRAIDGLMTNFHLPRSTLFMLVSALMGLERMQAAYAHAIAAHYRFYSYGDASLLLP

SEQ ID NO: 63231 - protein, 342 aa, Altererythrobacter sp.
  REGION 1..342: note = tr|A0A369Q8H7|A0A369Q8H7_9SPHN S-adenosylmethionine:tRNA ribosyltransferase-isomerase; OS = Altererythrobacter sp. HME9302 OX=2161824 GN=queA PE=3; SV = 1
MRVDLFDFDLPTENIALRPARPRDSARLLVARGAEPFDDSIVSELPQLLEPGDVLVFNDTRVIPAQLEGKRGNAAIGATLHKRIDLRRWQAYIRNAKRLSTGDRIDFPAEVQATAEHRHDDGSWTLAFAGDEPVEVLLERAGNMPLPPYIARKRGTDEQDREDYQTMFAAEDGAVAAPTAALHFTPDLIAALDERGVGRETLTLHVGAGTFLPVKAEDTDDHAMHSEWGRIEPDVARRLNEARARGGRIIAVGTTSLRLLESAARPDGTIEAFAGDTDIFITPGYAFRAVDGLMTNFHLPKSTLMMLVSALVGRDRIMAAYAHAIAQDYRFYSYGDSSLLLP

SEQ ID NO: 63232 - protein, 343 aa, unidentified
  source 1..343: note = Altererythrobacter xiamenensis
  REGION 1..343: note = tr|A0A1Y6FHS0|A0A1Y6FHS0_9SPHN S-adenosylmethionine:tRNA ribosyltransferase-isomerase; OS = Altererythrobacter xiamenensis OX=1316679 GN=queA PE=3; SV = 1
MRVDLFDFDLPQELIALRPVRPRDAARMLVVKGSDAPLEDRGVRDLPSLLRPGDILVFNDTRVIPAQLEGRRGEAKIGATLHKRLDLRRWQAFIRNAKRVREGDQLTFGGGVTAIAEARHADGSFTLAFEGDEPVEVLLERAGTMPLPPYIAGKRGVDAQDREDYQTMFAEKDGAVAAPTASLHFTPELIATLDEAGIGRETLTLHVGAGTFLPVKAEDTDDHAMHAEWGRIEPETAARLNAARAAGGRIIAVGTTSLRLLESAAQEDGTIAPFAGDTAIFITPGYRFKAVDGLMTNFHLPKSTLMMLVSALMGRERMMDVYAHAIAHKYRFYSYGDSSLLLP

SEQ ID NO: 63233 - protein, 350 aa, unidentified
  source 1..350: note = Alteribacillus bidgolensis
  REGION 1..350: note = tr|A0A1G8N8L5|A0A1G8N8L5_9BACI S-adenosylmethionine:tRNA ribosyltransferase-isomerase; OS = Alteribacillus bidgolensis OX=930129 GN=queA PE=3 SV=1
MNVEDFNFTLPEELIAQIPLKKRDASRLMVLDPEAASYKHEMFPALLNYLKEGDCLVLNDTRVLPARLFGEKETGGQVEVLLLNQEQEDEWETLIKPAKRVKPGTKLSFGNGKLTAECTGILEHGGRMLRFEYEGVFLEILDELGEMPLPPYINEKLSDNDRYQTVYAKHDGSAAAPTAGLHFTEDLLHRIKKMGVHVTTVTLHVGLGTFRPVAAETIEDHHMHAEFFQISEGTAKLLNETKDNGNNIIAVGTTSARTLETVAQKEQGRFKKDSGWTDIFIYPGYCFQGIDALLTNFHLPKSTLVMLVSAMAGREFLLSSYQEAVKERYRFFSFGDAMLIMKGSHNKWRQ

SEQ ID NO: 63234 - protein, 351 aa, unidentified
  source 1..351: note = Alteribacillus iranensis
  REGION 1..351: note = tr|A0A1I1Z9Z3|A0A1I1Z9Z3_9BACI S-adenosylmethionine:tRNA ribosyltransferase-isomerase; OS = Alteribacillus iranensis OX=930128 GN=queA PE=3 SV=1
MNVDEFDFYLPDELIAQTPLKKRDASRLMVLDPEVKERKHDTFPGLLHYLEEGDCLVLNNTKVLPARLYGIKEETGAQVEVLLLNEEGNDEWETLVKPAKRVKPGNVLTFGNGKLKAECISTLEHGGRMLKFFYEGVFLEILEDLGEMPLPPYIKEKLQEKDRYQTVYAKHDGSAAAPTAGLHFTEDLLQEIKQRGVNVAYITLHVGLGTFRPVSVDTVEDHNMHEEFYEMDQVTADMLNDTRTKGKKIVAVGTTSARTLESVARKRKGKFDKESGWTDIFIYPGYEFFGIDGMLTNFHLPKSTLVMLVSAIAGQDFLLSSYEEAVKERYRFFSFGDAMLIMKGSHHRWQQ

SEQ ID NO: 63235 - protein, 350 aa, unidentified
  source 1..350: note = Alteribacillus persepolensis
  REGION 1..350: note = tr|A0A1G8DH86|A0A1G8DH86_9BACI S-adenosylmethionine:tRNA ribosyltransferase-isomerase; OS = Alteribacillus persepolensis OX=568899 GN=queA PE=3 SV=1
MNVEDFNFTLPEELIAQTPLQRRDASRLMVLDPDVEVFKHEMFPDIVQYLNEGDCLVLNDTRVLPARLFGEKETGGQVEVLLLNQERNDEWETLIKPAKRVKPGTVLSFGGGKLKAECTSILEHGGRMLRFKYSGVFLEILEELGEMPLPPYIKEKLADKDRYQTVYAKHDGSAAAPTAGLHFTEELLENIKEKGVHVTTITLHVGLGTFRPVSAETVEDHQMHAEFYQMTEGTANLLNETKENGNKVVAVGTTSLRTLETIAKKHGGYFKKESGWTDIFIYPGYTFYGIDALLTNFHLPKSTLVMLVSALAGTDFLLSAYEEAVRQRYRFFSFGDAMFIMKGSRQTWQQ

SEQ ID NO: 63236 - protein, 347 aa, unidentified
  source 1..347: note = Alteromonadaceae bacterium
  REGION 1..347: note = tr|A0A420E7U4|A0A420E7U4_9ALTE S-adenosylmethionine:tRNA ribosyltransferase-isomerase; OS = Alteromonadaceae bacterium ALS 81 OX=2164068 GN=queA; PE = 3 SV=1
MRVADYSFDLPEELIARYPNPERSSSRLLCLEGNTGRIEHRQFTDLLDYIAPGDLLVFNDTRVIPARLFGQKLSGGKIEVLIERVLDDHRVLAHVRSSKSPKVGAQLRLADTISVTMLARHEALFELEFDHQHTVLEWLEQYGHMPLPPYIDRPDEDSDKERYQTVYNRNPGAVAAPTAGLHFDDAMLEKVKAKGAQLAFVTLHVGAGTFQPVRVETIAEHVMHREIAEVSQAVVDKIKQTKANGGRVIAVGTTSVRSLESAAKASKNVGSELQAYKADTDIFIYPGYEFELVDAMVTNFHLPESTLMMLVSAFAGKNHIDAAYQSAIENKYRFFSYGDAMFLQRRT

SEQ ID NO: 63237 - protein, 341 aa, unidentified
  source 1..341: note = Alteromonadaceae bacterium
  REGION 1..341: note = tr|A0A2E6EEM9|A0A2E6EEM9_9ALTE S-adenosylmethionine:tRNA ribosyltransferase-isomerase; OS = Alteromonadaceae bacterium OX=1916082 GN=queA PE=3 SV=1
  VARIANT 59: note = Xaa can be any naturally occurring amino acid
  VARIANT 68: note = Xaa can be any naturally occurring amino acid
  VARIANT 132: note = Xaa can be any naturally occurring amino acid
  VARIANT 217: note = Xaa can be any naturally occurring amino acid
  VARIANT 238: note = Xaa can be any naturally occurring amino acid
  VARIANT 243: note = Xaa can be any naturally occurring amino acid
  VARIANT 248: note = Xaa can be any naturally occurring amino acid
  VARIANT 269: note = Xaa can be any naturally occurring amino acid
  VARIANT 276: note = Xaa can be any naturally occurring amino acid
  VARIANT 290: note = Xaa can be any naturally occurring amino acid
  VARIANT 293: note = Xaa can be any naturally occurring amino acid
  VARIANT 297: note = Xaa can be any naturally occurring amino acid
  VARIANT 299: note = Xaa can be any naturally occurring amino acid
MQVKDFSFELPEQLIARFPKTERSSSRLLAMDKQSGELSHHIFKDLADFLQAGDLLVFXNTKVIPARXFGQKASGGKVEVLVERMLDNKRFLAHVRASKAPKPGTELLLEGSARVKMNQRHDELFELEVTGXEPVLEMLERLGHMPLPPYIDRPDTEEDKARYQTVYNEKPGAVAAPTAGLHFDQPLLDKLKAKGVEFAYVTLHVGAGTFQPVRVDXVLEHKMHAEYIEVSEQVVDAXAACKXRGGRXVAVGTTSVRSLESAAQQGGGXLIAYNGXTQIFIYPGYDFKVXDAXITNXHXPESTLIMLVSAFSSREHVMNAYETAIAEQYRFYSYGDAMFIY

SEQ ID NO: 63238 - protein, 343 aa, unidentified
  source 1..343: note = Alteromonadales bacterium
  REGION 1..343: note = tr|A0XWQ8|A0XWQ8_9GAMM S-adenosylmethionine:tRNA ribosyltransferase-isomerase OS=Alteromonadales bacterium TW-7 OX=156578 GN=queA PE=3 SV=1
MRVADFSFDLPDELIARFPKKDRTSSRLLSLDGPTGEISHKVFSDILELVNENDLLIFNNTRVIPARMFGQKASGGKVEVLVERVLDEHRVLAHVRASKSLKPGNEVILEGKAKATMIARHDTLFELEFDHSKNVLDTLNDIGHMPLPPYIDRPDDEADRERYQTVYGEKPGAVAAPTAGLHFDEPLMAALKNKGVNMAFVTLHVGAGTFQPVRVETIDEHVMHSEYIEVPQDVVDAVAQTKANGGRVIAVGTTSMRSLESAAKIHGGKLDTYFGDTDIFIFPGYQFNVVDAMVTNFHLPESTLIMLVSAFSGQDNIMGAYNTAIEQKYRFFSYGDAMFLTRK

SEQ ID NO: 63239 - protein, 348 aa, unidentified
  source 1..348: note = Alteromonadales bacterium
  REGION 1..348: note = tr|A0A2N0WU85|A0A2N0WU85_9GAMM S-adenosylmethionine:tRNA ribosyltransferase-isomerase; OS = Alteromonadales bacterium alter-6D02 OX=2058087 GN=queA; PE = 3 SV=1
MKVSDFSFELPEQLIARYPQEQRSASRLLGLDGNSGELTDGQFLDVIDKVNPGDLVIFNDTRVIPARVFGRKASGGKIEVLVERMLDEHRVLAHVRASKTPKPGTELILDGDVKATMVARHDTLFELKFDDARGVLEVLESVGHMPLPPYIDRPDEDSDKERYQTVYNKNPGAVAAPTAGLHFDDQVLAKLKDKGANIAFVTLHVGAGTFQPVRVETIAEHQMHKEYIEVSEQVCEQIKATKAAGSRVIAVGTTSMRSIESAANRALEDGELIAPFYDDSDIFIYPGYDFKVIDAMVTNFHLPESTLIMLISAFAGYDNVMKAYHHAIEKEYRFFSYGDAMFIEKKQS

SEQ ID NO: 63240 - protein, 346 aa, unidentified
  source 1..346: note = Alteromonas aestuariivivens
  REGION 1..346: note = tr|A0A3D8MEL4|A0A3D8MEL4_9ALTE S-adenosylmethionine:tRNA ribosyltransferase-isomerase; OS = Alteromonas aestuariivivens OX=1938339 GN=queA PE=3 SV=1
MKLSDFSFELPEHLIAKYPTEKRTASRLLHLNGATGDVFHRQFTDMLELVEEGDLLVFNNTRVIPARLLGNKATGGQVEVLVERILPDDSVLAHVRASKAPKPGTKLILEQQVDVTVLGRQEALFHLQFDGDAPVLSILESFGHMPLPPYIDRPDEGSDKERYQTVYNQKPGAVAAPTAGLHFDDDILTALRKKGVNLAFVTLHVGAGTFQPVRVDNIKEHKMHAEYAEVGQEVVDAILATKAAGKRVIAVGTTSVRSLESAAVAAENSDKPLLPFFADTDIFIYPGFRFKVVDAMFTNFHLPESTLMMLISAFAGREKVMAAYQQAIEQEYRFFSYGDSMFIEKA

SEQ ID NO: 63241 - protein, 344 aa, unidentified
  source 1..344: note = Alteromonas australica
  REGION 1..344: note = tr|A0A350P678|A0A350P678_9ALTE S-adenosylmethionine:tRNA ribosyltransferase-isomerase; OS = Alteromonas australica OX=589873 GN=queA PE=3 SV=1
MKLSEFSFTLPEKLIAKYPTENRSASRLLQLDGKTGKVSHSMFTDMLDLVDEGDLLVFNNTRVIPARLLGKKETGGQVEVLVERIIDEHTALAHVRASKAPKPGTKLTLEDKVNVTVKGREEALFVLTFNHEETVLQLLEAHGHMPLPPYIDRPDETSDKERYQTVYNDKPGAVAAPTAGLHFDDDILAALTRKGVKLAFVTLHVGAGTFQPVRVDNILEHKMHAEYAEVPDSVVDAVRETKAAGHRVIAVGTTSVRSLESAAKAAGDELIAPFYADTDIFIYPGFNFKVVDAMFTNFHLPESTLMMLISAFAGKEHVMSAYQEAIEQEYRFFSYGDSMFIKKR

SEQ ID NO: 63242 - protein, 344 aa, unidentified
  source 1..344: note = Alteromonas australica
  REGION 1..344: note = tr|A0A075P3H9|A0A075P3H9_9ALTE S-adenosylmethionine:tRNA ribosyltransferase-isomerase; OS = Alteromonas australica OX=589873 GN=queA PE=3 SV=1
MKLSEFSFTLPEKLIAKYPTENRSASRLLQLDGKTGKVSHSMFTDMLDLVDEGDLLVFNNTRVIPARLLGKKETGGQVEVLVERIIDEHTALAHVRASKAPKPGTKLTLEDKVNVTVKGREEALFVLTFNHEETVLQLLEAHGHMPLPPYIDRPDETSDKERYQTVYNDKPGAVAAPTAGLHFDDDILAALTRKGVKLAFVTLHVGAGTFQPVRVDNILEHKMHAEYAEVPDSVVDAVRETKAAGHRVIAVGTTSVRSLESAAKAAGDELIAPFYADTDIFIYPGFNFKVVDAMFTNFHLPESTLMMLISAFAGKEHVMSAYQEAIEQEYRFFSYGDSMFIKKC

SEQ ID NO: 63243 - protein, 345 aa, unidentified
  source 1..345: note = Alteromonas confluentis
  REGION 1..345: note = tr|A0A1E7ZAY6|A0A1E7ZAY6_9ALTE S-adenosylmethionine:tRNA ribosyltransferase-isomerase; OS = Alteromonas confluentis OX=1656094 GN=queA PE=3 SV=1
MKLSDFSFELPERLIAKYPTEKRRASRLLCLKGSSGEVVHRQFAEMLELVNPGDLLVFNNTRVIPARLRGKKATGGQIEVLVERILDDHQVLAHVRASKSPKPGAELLLEDNVKVTVTGREGALFLLQFEKHASVLSQLEQYGHMPLPPYIDRADESSDKERYQTVYNQKPGAVAAPTAGLHFDDEMLTALRAKGVNLAFVTLHVGAGTFQPVRVENINDHVMHSEYAEVPQEVVDVVLNTKAAGNRVIAVGTTSVRSLESAAKAAGDELIAPFFDDTDIFIYPGFNFKIIDAMFTNFHLPESTLMMLISAFAGREHVMAAYQDAIEKEYRFFSYGDSMFIEKAE

SEQ ID NO: 63244 - protein, 348 aa, unidentified
  source 1..348: note = Alteromonas lipolytica
  REGION 1..348: note = tr|A0A1E8FEC7|A0A1E8FEC7_9ALTE S-adenosylmethionine:tRNA ribosyltransferase-isomerase; OS = Alteromonas lipolytica OX=1856405 GN=queA PE=3 SV=1
MKLSDFTFTLPEHLIAKHPTAERTASRLLHLDGKTGTVAHQQFRDMLVLVEPGDLLVFNNTRVIPARLLGQKASGGKVEVLIERIVDDKNALAHVRASKAPKPGTALLLEGAVNVTVTGRQDALFELHFEGDKSVLEQLESYGHMPLPPYIDRADEDSDKERYQTVYNQAPGAVAAPTAGLHFDDAILQALQEKQVNLAYVTLHVGAGTFQPVRVDNVLEHKMHSEFAIVPDSVVDAVRATKAAGKRVIAVGTTSVRSLESAALHASKDAIIEPFQADTDIFIYPGFEFKVVDAMFTNFHLPESTLIMLISAFAGRDNVLHAYAEAIKEQYRFYSYGDSMFIEKAINT

SEQ ID NO: 63245 - protein, 348 aa, Alteromonas macleodii
  REGION 1..348: note = tr|A0A2K9ID59|A0A2K9ID59_ALTMA S-adenosylmethionine:tRNA ribosyltransferase-isomerase; OS = Alteromonas macleodii OX=28108 GN=queA PE=3 SV=1
MKLSDFSFELPERLIAKYPTQQRTASRLLHLDGKTGNVAHTMFADMLKFVEPGDLLVFNNTRVIPARLLGKKETGGQVEVLIERITSDNTALAHVRASKAPKPGSKLILEEKVNVTVTGRDDALFILQFDHDETVLTLLEAHGHMPLPPYIDRPDESSDKERYQTVYNQKPGAVAAPTAGLHFDDAILAALKEKGVNLAFVTLHVGAGTFQPVRVDNIQEHKMHAEFAEVPQDVVDAVLTTKANGKRVIAVGTTSVRSLESAAKASAERGDEEVIAPFNEDTEIFIYPGFEFKVVDAMFTNFHLPESTLMMLISAFAGKENVMKAYQEAIEKEYRFFSYGDSMFIERA

SEQ ID NO: 63246 - protein, 348 aa, Alteromonas macleodii
  REGION 1..348: note = tr|A0A1E7DBM0|A0A1E7DBM0_ALTMA S-adenosylmethionine:tRNA ribosyltransferase-isomerase; OS = Alteromonas macleodii OX=28108 GN=queA PE=3 SV=1
MKLSDFSFELPEKLIAKYPTQQRTASRLLHLDGKTGNVAHTMFADMLKFVEPGDLLVFNNTRVIPARLLGKKETGGQVEVLIERITSDNTALAHVRASKAPKPGSKLILEEKVNVTVTGRDDALFILQFDHDETVLTLLEAHGHMPLPPYIDRPDESSDKERYQTVYNQKPGAVAAPTAGLHFDDAILAALKEKGVNLAFVTLHVGAGTFQPVRVDNIQEHKMHAEFAEVPQDVVDAVLTTKANGKRVIAVGTTSVRSLESAAKASAERGDEEVIAPFNEDTEIFIYPGFEFKVVDAMFTNFHLPESTLMMLISAFAGKENVMKAYQEAIEKEYRFFSYGDSMFIERA

SEQ ID NO: 63247 - protein, 348 aa, Alteromonas marina
  REGION 1..348: note = tr|A0A0B3YAI7|A0A0B3YAI7_9ALTE S-adenosylmethionine:tRNA ribosyltransferase-isomerase; OS = Alteromonas marina OX=203795 GN=queA PE=3 SV=1
MKLSDFSFELPEKLIAKYPTQQRTASRLLHLEGKTGNVAHTMFADMLKFVEPGDLLVFNNTRVIPARLLGKKETGGQVEVLIERITSDNTALAHVRASKAPKPGTRLILEEKVNVTVTGRDDALFILQFDHDETVLTLLEAHGHMPLPPYIDRPDENSDKERYQTVYNQKPGAVAAPTAGLHFDDAILAALKEKGVNLAFVTLHVGAGTFQPVRVDNIQEHKMHAEFAEVPQDVVDAVLATKANGKRVIAVGTTSVRSLESAAKASAERGDEEVIAPFNEDTEIFIYPGFEFKVVDAMFTNFHLPESTLMMLISAFAGKDNVMNAYQEAIEKEYRFFSYGDSMFIERA

SEQ ID NO: 63248 - protein, 348 aa, unidentified
  source 1..348: note = Alteromonas mediterranea
  REGION 1..348: note = tr|S5C4G5|S5C4G5_9ALTE S-adenosylmethionine:tRNA ribosyltransferase-isomerase OS=Alteromonas mediterranea UM7 OX=1300258 GN=queA PE=3 SV=1
MKLSDFSFVLPENLIAKYPTQQRTASRLLHLDGKNGKVEHTMFADMLKFVEPGDLLVFNNTRVIPARLLGKKETGGQVEVLIERITSDTTALAHVRASKAPKPGTKLILEEKVNVTVTGRDDALFILQFDHDETVLTLLEAHGHMPLPPYIDRPDENSDKERYQTVYNEKPGAVAAPTAGLHFDDSILNALKEKGVNLAFVTLHVGAGTFQPVRVDYIQEHKMHAEFAEVPQDVVDAVLNTKANGKRVIAVGTTSVRSLESAAKASAERGDEQIIAPFNEDTEIFIYPGFEFKVVDAMFTNFHLPESTLMMLISAFAGKENVMNAYQEAIAKEYRFFSYGDSMFIERA

SEQ ID NO: 63249 - protein, 348 aa, unidentified
  source 1..348: note = Alteromonas mediterranea
  REGION 1..348: note = sp|B4RVF4|QUEA_ALTMD S-adenosylmethionine:tRNA ribosyltransferase-isomerase OS=Alteromonas mediterranea (strain DSM 17117 / CIP 110805 / LMG 28347 / Deep ecotype); OX = 1774373 GN=queA PE=3 SV=1
MKLSDFSFVLPENLIAKYPTQQRTASRLLHLDGKNGKVEHTMFADMLKFVEPGDLLVFNNTRVIPARLLGKKETGGQVEVLIERITSDTTALAHVRASKAPKPGTKLILEEKVNVTVTGRDDALFILQFDHDETVLTLLEAHGHMPLPPYIDRPDENSDKERYQTVYNEKPGAVAAPTAGLHFDDSILNALKEKGVNLAFVTLHVGAGTFQPVRVDNIQEHKMHAEFAEVPQDVVDAVLNTKANGKRVIAVGTTSVRSLESAAKASAERGDEQIIAPFNEDTEIFIYPGFEFKVVDAMFTNFHLPESTLMMLISAFAGKENVMNAYQEAIAKEYRFFSYGDAMFIERA

SEQ ID NO: 63250 - protein, 354 aa, unidentified
  source 1..354: note = Alteromonas naphthalenivorans
  REGION 1..354: note = tr|F5ZAU9|F5ZAU9_ALTNA S-adenosylmethionine:tRNA ribosyltransferase-isomerase OS=Alteromonas naphthalenivorans OX=715451 GN=queA PE=3 SV=1
MKLSDYRFTLPENLIAKYPTENRTASRLLQLNGKSGAVTHSMFNDMLSLVDEGDLLVFNNTRVIPARLLGKKETGGHVEVLIERILTEHTALAHVRASKAPKPGTRLLLEEHVNITVEGRDDALFLLRFDHEETALSLLEQYGHMPLPPYIDRPDESTDKERYQTVYNETPGAVAAPTAGLHFDDNMLAALKAKGVNLAFVTLHVGAGTFQPVRVENIEEHKMHAEYAEVSQEVVDAVLATKAKGKRVIAVGTTSVRSLESAAKASAEQSIENNTGENPVIAPFYSDTEIFIYPGFTFKVVDAMFTNFHLPESTLMMLISAFAGRENVMNAYQEAIENEYRFFSYGDSMFIEKA

SEQ ID NO: 63251 - protein, 348 aa, unidentified
  source 1..348: note = Alteromonas pelagimontana
  REGION 1..348: note = tr|A0A2A6ASJ7|A0A2A6ASJ7_9ALTE S-adenosylmethionine:tRNA ribosyltransferase-isomerase; OS = Alteromonas pelagimontana OX=1858656 GN=queA PE=3 SV=1
MKLSDFSFTLPDHLIAKYPTEKRSASRLMHLDGKTGNVVHRQFEETLSLVEEGDLLVFNNTRVMPARLKGKKASGGQVEVLVERILPDNTVYAHVRASKAPKPDTKLVLEEAVHATVIGRLDALFHLRFDHDTPVLAILEAHGHMPLPPYIDRPDENSDKERYQTVYNQKPGAVAAPTAGLHFDDTILTALRQKGVNLAFVTLHVGAGTFQPVRVDNILEHKMHAEYAEVSQSVVDAVLATKAAGKRVIAVGTTSVRSLESAAVVAESSESLIMPFFADTDIFIYPGYRFKVVDAMFTNFHLPESTLMMLISAFAGRDNVMQAYAQAIAEEYRFFSYGDSMFIEKADG

SEQ ID NO: 63252 - protein, 346 aa, Alteromonas sp.
  REGION 1..346: note = tr|A0A3N5XYL3|A0A3N5XYL3_9ALTE S-adenosylmethionine:tRNA ribosyltransferase-isomerase; OS = Alteromonas sp. U0105 OX=2259342 GN=queA PE=3 SV=1
MKLSDFHFDLPEHLIAKYPTAQRTASRLLTLDGNTGKVEHKAFTDCIDLLQEGDLLVFNNTKVIPARMLGKKETGGNVEVLVERITGTHECVAHVRASKAPKAGTHLILEGTVNVKVTGRRDALFELTFEEKDSVLSLLENYGHMPLPPYIDRPDEDADKDRYQTVYSKEPGAVAAPTAGLHFDKDILKKLEEKGIQQAFLTLHVGAGTFQPVRVDDITTHKMHAEFADVPQDVVDKIVATKAAGKRVIAVGTTSVRSLETAAKVAGDQLIAPYCDDTDIFIYPGFEFKVVDAMFTNFHLPESTLMMLISAFGGYDNVMQAYQQAIAEEYRFFSYGDSMLISRKTA

SEQ ID NO: 63253 - protein, 354 aa, Alteromonas sp.
  REGION 1..354: note = tr|A0A448Y1F6|A0A448Y1F6_9ALTE S-adenosylmethionine:tRNA ribosyltransferase-isomerase; OS = Alteromonas sp. 76-1 OX=2358187 GN=queA PE=3 SV=1
MKLSDYRFTLPENLIAKYPTENRTASRLLQLNGKSGAVTHAMFNDMLSLVEEGDLLVFNNTRVIPARLLGKKETGGHVEVLIERILTENTALAHVRASKAPKPGTRLLLEEHVNITVEGRDDALFLLRFDHEETALSLLEQYGHMPLPPYIDRPDESTDKERYQTVYNETPGAVAAPTAGLHFDDNMLAALKAKGVNLAFVTLHVGAGTFQPVRVENIEEHKMHAEYAEVSQEVVDAVLATKAKGKRVIAVGTTSVRSLESAAKASAEQSIESNTGENPVIAPFYSDTEIFIYPGFTFKVVDAMFTNFHLPESTLMMLISAFAGRENVMNAYQEAIENEYRFFSYGDSMFIEKA

SEQ ID NO: 63254 - protein, 354 aa, Alteromonas stellipolaris
  REGION 1..354: note = tr|A0A0S1YHL2|A0A0S1YHL2_9ALTE S-adenosylmethionine:tRNA ribosyltransferase-isomerase; OS = Alteromonas stellipolaris LMG 21856 OX=1160720 GN=queA; PE = 3 SV=1
MKLSDYRFTLPENLIAKYPTEDRTASRLLQLNGKSGAVTHSMFNDMLSLVEEGDLLVFNNTRVIPARLLGKKETGGQVEVLIERILTEHTALAHVRASKAPKPGTRLLLEDHVNISVEGRDDALFLLRFDHDETALSLLEQYGHMPLPPYIDRPDESTDKERYQTVYNETPGAVAAPTAGLHFDDDMLAALKAKGVNLAFVTLHVGAGTFQPVRVENIEEHKMHAEYAEVSQDVVDAVLTTKANGKRVIAVGTTSVRSLESAAKASAEQAIENNAGESPVIAPFHSDTEIFIYPGFTFKVVDAMFTNFHLPESTLMMLISAFAGRENVMNAYQEAIEKEYRFFSYGDSMFIEKA

SEQ ID NO: 63255 - protein, 349 aa, unidentified
  source 1..349: note = Altibacter sp.
  REGION 1..349: note = tr|A0A2D9N961|A0A2D9N961_9FLAO S-adenosylmethionine:tRNA ribosyltransferase-isomerase; OS = Altibacter sp. OX=2024823 GN=queA PE=3 SV=1
MKLSHFNFNLPPELLAEYPAANRDESRLMVLNRKEKTIEHKMFKDLIDYFKEDDVLVLNNTKVFPARLFGNKEKTGARIEVFLLRELNSETRLWDVLVDPARKIRIGNKLYFGDDESLVAEVIDNTTSRGRTLRFLFDGSYEEFRSKLTELGETPLPKYIKREVEPEDAERYQTIFAKKEGAVAAPTAGLHFSKHLLKRLEIKGVNFAEVTLHVGLGTFSPVEVEDLSKHKMDSEEIIITEDAVQTINKGIKTKRRVCAVGTTVMRALESSVSSDHTLNDYSGWTNKFIFPPYDFSIANSMVTNFHTPKSTLLMMVSAFAGHDFIKEAYAEAIKEKYRFYTYGDAMLII

SEQ ID NO: 63256 - protein, 341 aa, Alysiella crassa
  REGION 1..341: note = tr|A0A376BKL2|A0A376BKL2_9NEIS S-adenosylmethionine:tRNA ribosyltransferase-isomerase; OS = Alysiella crassa OX=153491 GN=queA PE=3 SV=1
MHISQFDFDLPEQLIAQNPPAIRGNSRLLVALPQQDFADRHFADLLDYVNAGDVLVFNNTKVMKARLFGQKASGGKIEALIERVLDNQTALAHIRSSKSPKAGAELIFDGEIHATMVERVGELFKIQFSGSLNVYELLEQHGALPLPPYIERAADDSDDSRYQTVYAKHQGAVAAPTAGLHFTDEILNALQNKGVEFAEVTLHVGAGTFQPVRVDNIAEHKMHSEWFDVPAETVAKIQAAQTRGNKIWSVGTTSLRAIESAARSGSLQAGTGDTDIFITPGYEFQVIDRLITNFHLPKSTLLMLVSAFSGSQRIREVYQHAIGREYRFFSYGDAMILGREQ

SEQ ID NO: 63257 - protein, 341 aa, Alysiella filiformis
  REGION 1..341: note = tr|A0A286E6U3|A0A286E6U3_9NEIS S-adenosylmethionine:tRNA ribosyltransferase-isomerase; OS = Alysiella filiformis DSM 16848 OX=1120981 GN=queA PE=3; SV = 1
MHISEFDFDLPEQLIAQNPPQVRGSSRLLVATQAQQIEDKQFADLLDYVNAGDVLVFNNTKVMKARLFGQKASGGKIEALIERVLDAQTALAHIRSSKSPKAGAELIFDGTIHATMVERVGELFKIQFSGSLNVYELLEQHGALPLPPYIERTAQADDDERYQTVYAKHQGAVAAPTAGLHFTEELLCALKNKGIVFAEVTLHVGAGTFQPVRVENIAEHQMHSEWFDVPAETVAQIQAAKARGNKVWSVGTTSLRAIESAARSGSLKAGQGDTNIFITPGFEFQVIDCLITNFHLPKSTLLMLVSAFSGSARIRQIYQHAIEHQYRFFSYGDAMILARAD

SEQ ID NO: 63258 - protein, 341 aa, unidentified
  source 1..341: note = Amantichitinum ursilacus
  REGION 1..341: note = tr|A0A0N1JT09|A0A0N1JT09_9NEIS S-adenosylmethionine:tRNA ribosyltransferase-isomerase; OS = Amantichitinum ursilacus OX=857265 GN=queA PE=3 SV=1
MQLSDFDYHLPEHLIAQFPPEVRGGSRLLHVAGATLEDRMFADLPHYLRAGDVLVFNDTRVIKARLFGQKESGGQVEALVERVLDTHRALAHIRASKSPKPGSRIIFNGDHAATMVERQGELFLLQFEEDTPVLDILEQAGQLPLPPYITHVPDDEDAKRYQTVYARDPGAVAAPTAGLHFTDDLLARLREMGVHTAFLTLHVGAGTFQPVRVENLAEHKMHHERYTIAPETVALLKRVREAGGRIIAVGTTSLRALEAASQHEFLGEPQGDTDIFITPGYQFRVVDRLVTNFHLPKSTLLMLVAAFAGFDTMRAAYAHAVAAEYRFFSYGDAMLLEKQSH

SEQ ID NO: 63259 - protein, 348 aa, Amaricoccus sp.
  REGION 1..348: note = tr|A0A501WUQ3|A0A501WUQ3_9RHOB S-adenosylmethionine:tRNA ribosyltransferase-isomerase; OS = Amaricoccus sp. HB172011 OX=2589815 GN=queA PE=3 SV=1
MRLDDFDFDLPEDLIALRPLRPRPASRLLVAEPARITDSTVAALGDWLRPGDLLVLNDTKVIPARLSGVRRRANGGEARIEATLIAAGTDGTWRALARPGKRLAVGDRIAFGEILSAEVREKDGAEVVLAFDQAGEGLDAALETVGEMPLPPYIAARRAPDAADREDYQTVFATRPGAVAAPTASLHFDEDLLGALAAKGVGQARVTLHVGAGTFLPVKVENIETHRMHAEWGEIGAETAAAIEATLAAGGRVIPVGTTALRLIETAATAPGRIAPWRGDTDIFIRPGFEFRVTRGLMTNFHLPKSTLLMLVSALMGVERIREIYAHAIAARYRFFSYGDSSLLLPRG

SEQ ID NO: 63260 - protein, 98 aa, Amaricoccus sp.
  REGION 1..98: note = tr|A0A2M9P9H9|A0A2M9P9H9_9RHOB S-adenosylmethionine:tRNA ribosyltransferase-isomerase (Fragment) OS=Amaricoccus sp. HAR-UPW-R2A-40 OX=1985299; GN = CNY89_15960 PE=3 SV= 1
RVIPVGTTALRVLETAAAAGHLAPWRGETDIFIRPGHRFRVADGLMTNFHLPKSTLMILAAAFMGLTRIRRVYAHALARDYRFLSYGDASLLLPESRP

SEQ ID NO: 63261 - protein, 348 aa, unidentified
  source 1..348: note = Aminicella lysinilytica
  REGION 1..348: note = tr|A0A4V3CQV7|A0A4V3CQV7_9FIRM S-adenosylmethionine:tRNA ribosyltransferase-isomerase; OS = Aminicella lysinilytica OX=433323 GN=queA PE=3 SV=1
MNIEDFDYDLPKELIAQTPAEQRDSCRLMVLNRENGTIEHRHFHDILEYLKPTDCLVMNDSRVIPARLYGIKDGTGAHVEFLLSKRIDGDEWESLVRPGRRLKPGDSVTFGDGKLKADVIGYGSDGTRKVKFNYEGIFMERLEELGKMPLPPYIERESNDEDKDMYQTVYAREDGSVAAPTAGLHFTDQLLEEAKAKGVKLAYVTLHVGIGTFRPVKCEKIEDHHMHFEEYFINEVTADVINGTIKAGGRIVSVGTTSTRTLESAAYKDDASGEYLVKAGHGNTGIFIYPGYEYKIIDALITNFHLPKSTLIMLISALYDREKILEAYKVAVDEKYRFFSYGDAMLIE

SEQ ID NO: 63262 - protein, 354 aa, unidentified
  source 1..354: note = Aminipila sp.
  REGION 1..354: note = tr|A0A410PUV8|A0A410PUV8_9FIRM S-adenosylmethionine:tRNA ribosyltransferase-isomerase; OS = Aminipila sp. JN-39 OX=2507160 GN=queA PE=3 SV=1
MHINDFDYDLPSELIAQKPADKRDNSRLMVVHRDTGAVEHKHFYNILEYLEPGDCLVLNNSKVLPARLFGIKAETGAKVEFLLIKRLDGDLWETMVRPGKRLKPGDVVDFSREGATAKFQATVVDYGEEGTRHVKFEYEGIFLERLEELGSMPLPPYIERESEEQDKDRYQTVYCKEEGSVAAPTAGLHFTEELLGQAQEKGIRLAYVTLHVGIGTFRPVKCDIIEEHKMHFEEYEVSEESARIINETKENGGRIFSVGTTSCRTVESAATLNEDGQSSAYQVKPGHGNTGIFIYPGYEFKIIDCLITNFHLPKSTLLMLISALYDREKILEVYKTAVEEKYRFFSYGDAMLIL

SEQ ID NO: 63263 - protein, 346 aa, unidentified
  source 1..346: note = Aminivibrio pyruvatiphilus
  REGION 1..346: note = tr|A0A4R8M4Z8|A0A4R8M4Z8_9BACT S-adenosylmethionine:tRNA ribosyltransferase-isomerase; OS = Aminivibrio pyruvatiphilus OX=1005740 GN=queA PE=3 SV=1
MDLFDLASYGYLLPEELIAQNPAEPRDSSRLMVLSREREEILHNTFASLGDFLDEGDLLVLNDTRVIPARLFGSKKNGGGRVEILLLKALDASFLQWEALVKPGRKNPPGTGIFLADGTEILVGARGGEGVRNVAFPAGTEVLPLLERIGETPLPPYITSSSAPRSSYQTVFARTDGSAAAPTASLHFTPGLLGELQRERGVRLGWLTLHVGLGTFRPVKSGDIREHKIHEEYCFLPAETRKLILETKRRGRKVIAAGTTVARTLESLAGENGSLESGERMTRLFIYPGYRFKIIDGLITNFHLPKSSLLMLVAAFAGYEFTMRAYGEAVSRRYRFFSFGDAMFIR

SEQ ID NO: 63264 - protein, 358 aa, Aminobacter aminovorans
  REGION 1..358: note = tr|A0A380WM18|A0A380WM18_AMIAI S-adenosylmethionine:tRNA ribosyltransferase-isomerase; OS = Aminobacter aminovorans OX=83263 GN=queA PE=3 SV=1
MRVDLFDFDLPEANIALRPAQPRDTARLLTVRPGAELADLSVRDLPTLLEPGDVLVLNDTRVIPAQLKGVRVRGEAVAHVDATLHMRTAPDRWLAFMRPGKRVAVGDRIQFGHDAEACMLGQLDATVLEKGEGGEALLAFDLAGPALDEALHDVGHIPLPPYIASKRADDERDRKDYQTVYAREEGAVAAPTAGLHFTPELFAALEAKGVEKQFVTLHVGAGTFLPVKADDTADHKMHSEIGHVSAETATVLNAARARGNKVVAVGTTSLRLMESAARQDGTLAAWSGPTDIFITPGYRFKFVDALMTNFHLPRSTLFMLVSAFAGLERMHDVYAHAISSGYRFYSYGDSSLLFRDDR

SEQ ID NO: 63265 - protein, 358 aa, Aminobacter aminovorans
  REGION 1..358: note = tr|A0A142M8H7|A0A142M8H7_AMIAI S-adenosylmethionine:tRNA ribosyltransferase-isomerase; OS = Aminobacter aminovorans OX=83263 GN=queA PE=3 SV=1
MRVDLFDFELPEANIALRPAEPRDMARLLCVRPDEALADLSVRDLPSLLNPGDVLVLNDTRVIPAQLKGVRVRGEAVAHVDATLHMRTAPDRWLAFMRPGKRVAIGDRIRFGHDAEACMLGQLDATVLEKGEGGEALLAFDLSGPGLDEALHAVGHIPLPPYIASKRPDDERDRKDYQTVYAREEGAVAAPTAGLHFTPELFAALEARGIEKQFVTLHVGAGTFLPVKADDTADHKMHSEVGYVSAETATVLNAARARGNKVVAVGTTSLRLMESAAREDGTLAAWSGPTDIFITPGYRFKFVDALMTNFHLPRSTLFMLVSAFAGLERMRDVYAHAISSGYRFYSYGDSSLLFRDDR

SEQ ID NO: 63266 - protein, 358 aa, Aminobacter sp.
  REGION 1..358: note = tr|A0A316GX49|A0A316GX49_9RHIZ S-adenosylmethionine:tRNA ribosyltransferase-isomerase; OS = Aminobacter sp. AP02 OX=2135737 GN=queA PE=3 SV=1
MRVDLFDFELPEERIALRPAEPRDSARMLVVRPDDKLADFSVRDLPSLLEPGDVLVLNDTRVIPAQLKGTRVRGEAQAHVDATLHMRVGPDRWLAFMRPGKRVAVGDRIHFGHSGEVCAIGQLDATVIEKGEAGEALLAFDFSGAALDEALHAVGHIPLPPYIASKRPDDARDRSDYQTVYAKEEGAVAAPTAGLHFTPELFAQLEAKGIERQFVTLHVGAGTFLPVKADDTAEHKMHSEIGHVSEETAQALNAARARGNQVVAVGTTSLRLMESAARADGTIAAWSGPTDIFITPGYRFKFVDALMTNFHLPRSTLFMLVSAFRGLERMHEVYAHAISSGYRFYSYGDASLLFRNDR

SEQ ID NO: 63267 - protein, 358 aa, Aminobacter sp.
  REGION 1..358: note = tr|A0A562FI36|A0A562FI36_9RHIZ S-adenosylmethionine:tRNA ribosyltransferase-isomerase; OS = Aminobacter sp. J15 OX=935260 GN=queA PE=3 SV=1
MRVDLFDFDLPDERIALRPADPKDSARMLVVRQGEPFEDRIVRDLPSLLRKGDALVFNDTRVIPAQLTGLRRRDGSVAQIDATLHMRVAADRWKAFARPAKRLIVGDRINFGHGGNTCLIGSLDATVVEKGEAGEVTLAFDLSGPALDEALHAVGHIPLPPYIATRRMDDERDRIDYQTIYAREEGAVAAPTAGLHFTPQLFEALDAAGIERHFVTLHVGAGTFLPVKADDTADHKMHSEIGHVSARTAEALNAVKARGGRIISVGTTSLRLMESAVGSDGLLKEWSGATDIFITPGYRFRTADVLMTNFHLPRSTLFMLVSAFCGLETMQAAYAHAIASGYRFYSYGDSSLLFRSDT

SEQ ID NO: 63268 - protein, 349 aa, Aminobacterium colombiense
  REGION 1..349: note = tr|D5EEL0|D5EEL0_AMICL S-adenosylmethionine:tRNA ribosyltransferase-isomerase OS=Aminobacterium colombiense (strain DSM 12261 / ALA-1) OX=572547 GN=queA PE=3 SV=1
MVPNLYDIESYAYDLPEGRIAQTPASPRNHSRLLVLDKNSGTMIHSRFYELHRFLKEGDVIVLNDTRVIPARLFGVKEKGSARAEILLLKPLDGLWKRWEALVRPGRRLRPGSIVIVREDIPVQVQEALADGVRVVRFPEECNVLSLLEEVGEIPFPPYIKSTTATALDYQTVFAKRNGSSAAPTASLHFTENQLRDLEDKHGITFAWVTLHVGLGTFRPVQEEDIRQHVIHEEYCEVPEETAALIRKAKEEGRRIIASGTTVARTLESMATHDENVVQYGRKNTSLFIYPAYQFSVIDGLITNFHLPRSTLLMLVAALAGYDNIMEVYETAVKMGYRFFSFGDAMLIQ

SEQ ID NO: 63269 - protein, 355 aa, Aminomonas paucivorans
  REGION 1..355: note = tr|E3D0N2|E3D0N2_9BACT S-adenosylmethionine:tRNA ribosyltransferase-isomerase OS=Aminomonas paucivorans DSM 12260 OX=584708 GN=queA PE=3 SV=1
MNPPQKTAAVDLASVSAYQYDLPEELIAQDPAEPRDSSRLLVLERGRGVAAHRTFRDLEEYLREGDLLVLNDTRVRPARLRARKTSSGRVEILVLRPLDPASNLWTALVRPGRRVPPGTPLLLEDGTEVRVEERLEDGLRALRLPQETDPTRLFRRLGEVPLPPYITRSVAPAERYQTVYSRPDREGSAAAPTAGLHFTAPLLKRLEARGIGQAFVTLDVGLGTFRPVQTERAEDHVMHLERCSLGEETAEAIRQTRRRGGRVVAVGTTVVRTLETFANEEGQVLPGERDTRLYIRPGYRFRVVDGLITNFHLPRSTLLMLVAAFGGYEPVLEAYREAVQLRYRFFSFGDAMILL

SEQ ID NO: 63270 - protein, 343 aa, Ammonifex degensii
  REGION 1..343: note = tr|C9R8Q0|C9R8Q0_AMMDK S-adenosylmethionine:tRNA ribosyltransferase-isomerase OS=Ammonifex degensii (strain DSM 10501 / KC4) OX=429009 GN=queA PE=3 SV=1
MALKRSDFEYYLPKELIAQEPLPERDKSRLMVVYRDREEFEHRLFRDLPEYLVPGDVLVLNRTRVLPARLYGVKEDTGGKVEVLLLRQLEPDLWEVLVRPGRRVPEGTRIVFGGGLLRGEVLSRLESGGRLVRFTYEGDFFALLHQLGEIPLPPYIKRKLAEPERYQTVYASEPGSAAAPTAGLHFTPELLQKLQEKGVEVVTLTLHIGLDTFRPVKEEDITAHRMHSEEYHLPEATAEAVNRAKEEGRRIVAVGTTVVRCLESVADERGRVRAGRGFTDLFIYPGYRFKVVDALVTNFHLPGSTLLMLVAAFAGREKILRAYAEAVRLRYRFFSFGDAMLIL

SEQ ID NO: 63271 - protein, 343 aa, Ammonifex thiophilus
  REGION 1..343: note = tr|A0A3D8P554|A0A3D8P554_9THEO S-adenosylmethionine:tRNA ribosyltransferase-isomerase; OS = Ammonifex thiophilus OX=444093 GN=queA PE=3 SV=1
MALKRSDFEYYLPKELIAQEPLPERDKSRLMVVYRDREEFEHRLFRDLPEYLVPGDVLVLNRTRVLPARLYGAKEGTGGKVEVLLLRQLEPDLWEVLVRPGRRVPEGTRIVFGGGLLRGEVLSRLGSGGRLIRFTCEGDFFSLLHRLGEIPLPPYIKRKLAEPERYQTVYASEPGSAAAPTAGLHFTPELLQKLQEKGVEVVTLTLHIGLDTFRPVKEEDITAHRMHSEEYHLPEATAEAVNRAKREGRRIVAVGTTVVRCLESVADERGLVRAGRGFTDLFIYPGYRFKVIDALVTNFHLPGSTLLMLVAAFAGREKILRAYAEAVRLRYRFFSFGDAMLIL

SEQ ID NO: 63272 - protein, 342 aa, Ammoniphilus oxalaticus
  REGION 1..342: note = tr|A0A419SIS9|A0A419SIS9_9BACL S-adenosylmethionine:tRNA ribosyltransferase-isomerase; OS = Ammoniphilus oxalaticus OX=66863 GN=queA PE=3 SV=1
MDVTLFDFDLPEKLIAQTPLQERTASRLLAVDKQTGKIEHRKFTDLLGYLQAGDLLVLNDTRVLPARLFGVKQDTGAKVELLLLKQLADDRWETLARPGKKIKQGATLSFGDGKLTGVCEGYTSAGGRVVRFEYEGIFNEILDELGQMPLPPYIKEQLNDAERYQTVFAKHPGSAAAPTAGLHFSEAYLQQIRRKGIQIAYITLHVGLGTFRPVQVDEITEHKMHAEYYSISEENAALINRAKSEGKRVIAIGTTATRALETVASSHDGTIVEGDGWTDIFIYPGYSFSIVDGMITNFHLPKSTLVMLVSAFAGRELILRAYHEAIQNEYRFFSFGDAMFIV

SEQ ID NO: 63273 - protein, 342 aa, Ammoniphilus sp.
  REGION 1..342: note = tr|A0A4Q1TAB3|A0A4Q1TAB3_9BACL S-adenosylmethionine:tRNA ribosyltransferase-isomerase; OS = Ammoniphilus sp. CFH 90114 OX=2493665 GN=queA PE=3 SV=1
MDVNEFDFELPEELIAQSPLKERSASRLLVLNKETGEVKHQSFKDLIDYLSPGDVIVLNDTRVIPARLFGAKADTGAKIEVLLLKQLDGDRWETLVKPGKKMKPGSVVTFGDGRLTGICEESTEVGGRIIRFQYTGIFNEILDELGQMPLPPYIKEQLEDSERYQTVFAKNPGSAAAPTAGLHFTEEYLQQIRDKGIHIAYITLHVGLGTFRPVQVENVLEHKMHTEYFEISQENADRINAAKASGNRVVAVGTTATRTLETVGGKNEGKVVADSGWTDIFIYPGYHFTVVDGLLTNFHLPKSTLVMLVSSLAGKEPILNAYREAVEQRYRFFSFGDAMLII

SEQ ID NO: 63274 - protein, 348 aa, unidentified
  source 1..348: note = Amoebophilaceae bacterium
  REGION 1..348: note = tr|A0A3R7X3H6|A0A3R7X3H6_9BACT S-adenosylmethionine:tRNA ribosyltransferase-isomerase; OS = Amoebophilaceae bacterium TMED152 OX=1986680 GN=queA; PE = 3 SV=1
MKLSEFDFKLASTRTAIHPAENRDESRLMIVHKDSGKIEHKQFKDILKYFKEDDVLVLNDTKVFPARLYGQKEKTGAKIEVFLLRELNPDLNLWDVLVDPARKIRVGNKLYFGEGELVAEVIDNTTSRGRTIRFIPEDNERNFHDIIQEYGKTPLPKEIKRKVDKKDEERFQTVYAKNIGAVAAPAAGLHFTDILLKKLILKGVKIVNITSHTGLGTFKDIDVEDLTKHKMDSENYSIPEETAEIVNEAIKNGKRIFAVGTSTMKTLETAVTANDLLKAKSGWTDKFIFPPYDFKICGAMITNFHSPKSTLLMMASAFGGFDQIMKVYKVAIKEKYMFHTYGDALMII

SEQ ID NO: 63275 - protein, 348 aa, unidentified
  source 1..348: note = Amoebophilaceae bacterium
  REGION 1..348: note = tr|A0A3C1MCM7|A0A3C1MCM7_9BACT S-adenosylmethionine:tRNA ribosyltransferase-isomerase; OS = Amoebophilaceae bacterium OX=2053498 GN=queA PE=3 SV=1
MKLSAFKFDLPAKLIASHPVENRDESRLMVVHKDAGKIEHKYFQDVINYLGEDDTLVVNDTKVFSAMLYGNKEKTGAQIEVMLLRELSEEHHLWDTLVDPARKIRVGNKLFFGNGELVAEVLDNTTSRGRTLKFLFDGTTEELHSIIEQLGSTPLPKEIKRKVAPEDRSRYQTVYAQQTGAVVAPTAGLHFTPHLLKRLELQGTHIASLTLHIGLGTLRPVDVEDLSKYKVDSEFLSINTATAQLVNQSLDKNKRVCAVGTSTAKAIEASVSAAGGLKANHGWTNKFIFPPYPFKVCTSLITNFHLPASAPLMTATALGGYDLLMEAYQIAIKEKYRFFVYGDAMLIL

SEQ ID NO: 63276 - protein, 348 aa, unidentified
  source 1..348: note = Amoebophilus asiaticus
  REGION 1..348: note = sp|B3ESF6|QUEA_AMOA5 S-adenosylmethionine:tRNA ribosyltransferase-isomerase OS=Amoebophilus asiaticus (strain 5a2) OX=452471 GN=queA PE=3 SV=1
MKLSSFKFTLPSKLIASHPVENREDARLMVVHKRTGQIEHKTFKDLIDYLGENDTLVLNDAKIFPSKLYGSKEKTGAQIEVFLLRELESGEHLWDTLVEPARKIRVGNKLYFGDGELVAEVLDNTTSRGRTLKFLFEGTREEFYEIVDQLGFVPLPNQLKRKPETEDRERYQTVYAQHIGAVVPPFAGLHFSAHLLKRLELKGVHITPLTLHIGLNSMKIIDVEDLTKYRIGSEQFLIPDNTVTTVNTALDDKKQVCAVGTSTIKALETSVSVAGRLKPAQGWTNKLIFPPYDFKVCTSLITNFHLPESLPLVNAAAFGGYELMMEAYQIAIKEKYRFFVYGDAMLII

SEQ ID NO: 63277 - protein, 342 aa, unidentified
  source 1..342: note = Amphibacillus marinus
  REGION 1..342: note = tr|A0A1H8P0D8|A0A1H8P0D8_9BACI S-adenosylmethionine:tRNA ribosyltransferase-isomerase; OS = Amphibacillus marinus OX=872970 GN=queA PE=3 SV=1
MRVEDFDFHLPEQLIAQTPLKDRTSSKLLVMKKDSQQIEHQQFGNIIDYLQPGDCLVLNNTKVLPARLYGSKSDTGAKIELLLLHQRDTDQWEVLVKPAKKISIGTEIVFGNGQLRAVCTELQDHGGRVVKFTYQGIFLEVLNELGEMPLPPYIKEQLADRDRYQTVYAKEEGSAAAPTAGLHFTEALLAQIEAKGVKIAYVTLHVGLGTFRPVSVEAIEEHAMHAEFYHLTEEEAKKITTAKQSGGRIIAVGTTSTRTLETIATEHDGALVAASGWTSIFIYPPYHYQAIDGLITNFHLPKSTLVMLVSALAGRDFIMKGYQEAVTNHYRFFSFGDAMLII

SEQ ID NO: 63278 - protein, 342 aa, Amphibacillus xylanus
  REGION 1..342: note = tr|K0IXQ1|K0IXQ1_AMPXN S-adenosylmethionine:tRNA ribosyltransferase-isomerase OS=Amphibacillus xylanus (strain ATCC 51415 / DSM 6626 / JCM 7361 / LMG 17667 / NBRC 15 112 / Ep01) OX=698758 GN=queA PE=3 SV=1
MNIEEFDFDLPEHLIAQTPLKDRTASKLMVLNRNDKSLEHRHFSDILDYLKPGDCLVLNNTKVLPARLYGVKEDTGAKVEVLLLHQKENDHWEVLVKPAKKVKLGTKLSFGEGRLTATCTEILEHGGRIVRFDYDGIFLEVLTELGEMPLPPYIKEQLADQDRYQTVYAKAEGSAAAPTAGLHFTNDLLEEIKAKGIEIAFVTLHVGLGTFRPVSVDRIEEHDMHSEYYHLSSKEAEKINRVKSQDGRIIAVGTTSTRTLEAIASENNGEIVPTSGWTSIFIYPPYQFKAVDAMITNFHLPKSTLIMLISALAGREFILDAYHEAIKQEYRFFSFGDAMLIV

SEQ ID NO: 63279 - protein, 359 aa, unidentified
  source 1..359: note = Amphiplicatus metriothermophilus
  REGION 1..359: note = tr|A0A239PUP0|A0A239PUP0_9PROT S-adenosylmethionine:tRNA ribosyltransferase-isomerase; OS = Amphiplicatus metriothermophilus OX=1519374 GN=queA; PE = 3 SV=1
MRVSDFDFDLPEERIALEPARPRDSARLLHVRADGLADRVVRDLPALLRPGDLLVLNDTKVIPAQLRGRRPARTAGGGEPVEIDVTLHRRLAPEEPAGARWRAFVRPAKRLREGDALDFGAGLTAVIEARSEAEAVLRFNRAGADFDAGLARAGAPPLPPYIARRRPARPEDAADYQTVYAAEPGSVAAPTAGLHFTEALLDALDKRGVRRLTITLHVGAGTFLPVTAEDTRDHVMHAEWGEITPAQAEAINAARAKGGRILAVGTTALRLLESTADREGRVRPCAEETSIFITPGYRFRAVDLLMTNFHLPRSTLFMLVCAFSGTARMKAAYAHAIKAGYRFYSYGDACLLERGPENE

SEQ ID NO: 63280 - protein, 349 aa, Amphritea atlantica
  REGION 1..349: note = tr|A0A1H9JRQ3|A0A1H9JRQ3_9GAMM S-adenosylmethionine:tRNA ribosyltransferase-isomerase; OS = Amphritea atlantica OX=355243 GN=queA PE=3 SV=1
MQVKDFHFDLPDELIARYPLEKRSDSRLFCVDGNSGEFQHRQFFEVLDLLEPGDLVVFNNTRVIPARMFGEKASGGKIEVLIERVLDERSALAHIRSSRSPKPGAELTLEGGLKATMVARHDDLFELEFDLAEGHLIEALEQFGHMPLPPYMKREDELSDRERYQTVYNEKPGAVAAPTAGLHFDDALLASLEEKGVNKAFVTLHVGAGTFRPVKVENIQDHKMHAEYIEVPEAVCQAVRETKARGNRVLAVGTTSVRCLETASQAGEIQPFFGDTDIFIFPGYRFRTVDLLITNFHLPESTLLMLVSAFAGYEQMMAAYKEAVAQCYRFFSYGDAMFLSKKTRQNGAD

SEQ ID NO: 63281 - protein, 344 aa, Amphritea balenae
  REGION 1..344: note = tr|A0A3P1SRB9|A0A3P1SRB9_9GAMM S-adenosylmethionine:tRNA ribosyltransferase-isomerase; OS = Amphritea balenae OX=452629 GN=queA PE=3 SV=1
MNVKDFHFELPDELIARYPLENRSDSRLLCVDGDSGAQQHRQFFEVLEFLEPGDLVVFNNTRVIPARMFGQKASGGKIEVLVERLLDEQSALCHIRSSRSPKPGAELTLDGGLKATMVARHDDLFELLFDLNEGNLIEALEQFGHMPLPPYMNREDELSDRERYQTVYNEKPGAVAAPTAGLHFDDALLAKLEAKGVNKAFVTLHVGAGTFRPVKVENIQDHKMHAEYIEVSEQVCQQVKETKARGNKVLAVGTTSVRCLETASQSGEIEPFFGDTDIFIFPGYTFKTVDMLITNFHLPESTLLMLVSAFAGYEHMMSAYKEAVAQQYRFFSYGDAMFLTKQGS

SEQ ID NO: 63282 - protein, 345 aa, Amphritea sp.
  REGION 1..345: note = tr|A0A430KTN8|A0A430KTN8_9GAMM S-adenosylmethionine:tRNA ribosyltransferase-isomerase; OS = Amphritea sp. MCCC 1K03512 OX=2490544 GN=queA PE=3 SV=1
MQVKDFHFDLPDELIARYPLEKRSDSRLFCVDGNSGEFEHRQFFDVLEWLEPGDLVVFNNTRVIPARMFGEKASGGKIEVLIERVLDERSALAHIRSSRSPKPGAELTLDGGLKATMVRRHDDLFELEFDLAEGHLIDALEQFGHMPLPPYMKREDELSDRERYQTVYNEKPGAVAAPTAGLHFDDALMRRLEEKGVNKAFVTLHVGAGTFRPVKVDNIQDHKMHAEYIEVSEEVCQAVRETKARGNRVLAVGTTSVRCLETASKSGEIEPFFGDTDIFIFPGYEFRTVDLLITNFHLPESTLLMLVSAFAGYEHMMAAYKEAVAQQYRFFSYGDAMFLTKQTVK

SEQ ID NO: 63283 - protein, 338 aa, unidentified
  source 1..338: note = Amycolatopsis acidiphila
  REGION 1..338: note = tr|A0A558A589|A0A558A589_9PSEU S-adenosylmethionine:tRNA ribosyltransferase-isomerase; OS = Amycolatopsis acidiphila OX=715473 GN=FNH06_24450 PE=3; SV = 1
MTIPFTLPPDSEAGRPPERRGLRRDGVRLLVARPGGIEHRRFRDVAELLEPGDLVVVNTSATLPAALDAVRDNGSPAPVHVSTPLDDGDWVVEVRRTDASGPDLSLRAGERLGLPGGVTLTLVGPYLSARLWRASVSPKVSAQHYLPEHGRPIGYGYLTGRFPLRDYQTVYATEPGSAEMASAGRPFTEPLLVRLMARGVIVAPVLLHAGVSSPELHEPPNAERFAVPAATARLVDVVRAAGQRVVAVGTTVVRALESAAGPDGAMHAASGWTELVLGPDRPARVVGGLVTGLHVPEASHLLLLEAVAGRRLVEAAYAAAVERRYLWHEFGDSTLFLP

SEQ ID NO: 63284 - protein, 335 aa, Amycolatopsis australiensis
  REGION 1..335: note = tr|A0A1K1T5P2|A0A1K1T5P2_9PSEU S-adenosylmethionine:tRNA ribosyltransferase-isomerase; OS = Amycolatopsis australiensis OX=546364; GN = SAMN04489730_8272 PE=3 SV=1
MSVRFELPDELSASAPPEARGLARDEVRLLVAAPSGVHHTVFASLGDHLRAGDLLVVNTSGTLPAAVDAVRAGRPVAVHFATALDDGTWVVELRGPGGPLLDGRPGERVELPAGASLTLLAPVAPGAARLWRAQVSVPVPGLLAAAGRPIRYGYVPRAWPLSDYQTVFAREPGSAEMPSAARPFTTALVTRLVTDGVLFAPLLLHTGVSSPEAGEPPQAERFRVPAATAALVSWVRSRGGRVIAVGTTAARALESAVADGEVRAAEGWTDLVLGPDRPAAVVDGIVTGLHAPDASHLLLLEAVAGRELVQRAYDAAVQRRYLWHEFGDVSLLLRR

SEQ ID NO: 63285 - protein, 338 aa, Amycolatopsis balhimycina
  REGION 1..338: note = tr|A0A428VXV7|A0A428VXV7_AMYBA S-adenosylmethionine:tRNA ribosyltransferase-isomerase; OS = Amycolatopsis balhimycina DSM 5908 OX=1081091; GN = DMA12_43400 PE=3 SV=1
MNVRFELPDELSASAPPEARGLARDEVRLLVASPSGVHHTVFASLGEHLRPGDLLVVNTSGTLPAAVDAIRGGRPVVVHFSTSLDDGSWVVELRAPGGPLLDGRPGEHLELPRGASLTLLAPAAPGDRRLWRAEVAVEGPVPGFLAAAGRPIRYGYVPRAWPLADYQTVFAREPGSAEMPSAARPFTTELVTRLVTDGVLFAPLLLHTGVSSPEAGEPPQPERFRVPPPTAALVAWVRARGGRVIAVGTTAARALESAASAHGMVRAAEGWTNLVLGPDRPARVADGIITGLHAPDASHLLLLQAVTGAEVVQRAYDAAVEERYLWHEFGDVSLLLRR

SEQ ID NO: 63286 - protein, 338 aa, Amycolatopsis eurytherma
  REGION 1..338: note = tr|A0A3N2H810|A0A3N2H810_9PSEU S-adenosylmethionine:tRNA ribosyltransferase-isomerase; OS = Amycolatopsis eurytherma OX=196083 GN=EDD35_6894 PE=3; SV = 1
MTIPFTLPPDSEATAPPERRGVPRDAVRLLVARPGGIEHHRFRDLPDLVEPGDLVVVNTSATVPAALDAVRGNGKPSPVHLSTTLDDGDWVVEVRLADGSGPDLSVHPGERMRLPGGVILTLVEPFTSARLWRAAVTPEVPVRDYLARHGRPIGYGYLAGRFPLRDYQNVYATEPGSAEMASAGRPFTAPLLVRLIARGVVVAPIVLHAGVSSPELHEPPAAERFTVPEATARLVELTRAAGRRVIAVGTTVVRALESAAETSGAMHAATGWTELVLGLARPPRVVTGLVTGLHAPEASHLGLLAAVAGRPLVAAAYDAALEHHYLWHEFGDSTLFLP

SEQ ID NO: 63287 - protein, 335 aa, Amycolatopsis mediterranei
  REGION 1..335: note = tr|G0FHN4|G0FHN4_AMYMS S-adenosylmethionine:tRNA ribosyltransferase-isomerase OS=Amycolatopsis mediterranei (strain S699) OX=713604 GN=RAM_07815 PE=3 SV=1
MNIRFDLPAELSASAPPEARGLSRDEVRLLVASPAGVHHTAFTGLGEHLRPGDLLVVNTSGTLPAAVDARRNGRPVVVHFATRLDDGSWVVELRAPDGPLLDGRPGERLALAGDASLTLLAPAVPGTARLWRATASIEVRALLAAAGRPIRYGYVPRAWPLSDYQTVFAREPGSAEMPSAARPFTPELVTGLVTDGVLFAPLLLHTGVSSPEAAEPPQAERYRVPPTTAALVSWVRERGGRVVAVGTTAARALESAASAGRVRAAEGWTELVLGPDRPARVVDGIVTGLHAPEASHLLLLEAVAGAEVVQKAYEAAVEERYLWHEFGDVSLLLRR

SEQ ID NO: 63288 - protein, 335 aa, Amycolatopsis mediterranei; identical to SEQ ID NO: 63287
  REGION 1..335: note = tr|A0A0H3CXJ5|A0A0H3CXJ5_AMYMU S-adenosylmethionine:tRNA ribosyltransferase-isomerase; OS = Amycolatopsis mediterranei (strain U-32) OX=749927; GN = AMED_1539 PE=3 SV=1

SEQ ID NO: 63289 - protein, 338 aa, Amycolatopsis methanolica
  REGION 1..338: note = tr|A0A076MY55|A0A076MY55_AMYME S-adenosylmethionine:tRNA ribosyltransferase-isomerase; OS = Amycolatopsis methanolica 239 OX=1068978 GN=AMETH_3839; PE = 3 SV=1
MTIPFTLPPDSEATAPPEHRGVPRDAVRLLVARPGRIEHHRFRDLPDLVEPGDLVVVNTSATVPAALDAVRGNGNPAPVHLSTTLDDGGWVVEVRLADGSGPDLSVHPGERMRLPDGVTLTLVEPFTSARLWRAAVTPEVPVRDYLARHGRPIGYGYLAGRFPLRDYQNVYASEPGSAEMASAGRPFTAPLLVRLIARGVVVAPIVLHAGVSSPELYEPPAAERFTVPKATARLVELTRAAGRRVIAVGTTVVRALESATEPGGTMHAATGWTELVLGPARPPRVVTGLVTGLHAPEASHLGLLAAVAGRPLVTAAYDAALEHHYLWHEFGDSTLFLP

SEQ ID NO: 63290 - protein, 341 aa, Amycolatopsis niigatensis
  REGION 1..341: note = tr|A0A2N3WBV6|A0A2N3WBV6_9PSEU S-adenosylmethionine:tRNA ribosyltransferase-isomerase; OS = Amycolatopsis niigatensis OX=369932 GN=ATK30_2129 PE=3; SV = 1
MTAPRTRFDLAEDRSASAPPEARGLARDEVRLLAAGPEGVRHAVFRDLAAFLDPGDLLVINTSGTLPAAVDAVRDDHVIAVHFSTELDDGTWVVELRAPDGPLLDGHAGERLSLPAGAVVTLREPHVAGAQRLWRAKIEVEGEVPRYLAKVGRPIRYGYVPRAWPLPNYQTVFALDPGSAEMPSAARPFTAELVTQLVSRGVLFAPILLHTGVSSPEAGEPPYGERFRVPATTAALVNWVRDQGGRVIAVGTTAVRAIESAANPGGLVTAAAGWTELVLGPDRPARAVDGLLTGLHAPQASHLLLLEAVVGPELVQRAYDAAVRREYLWHEFGDVSLLTSR

SEQ ID NO: 63291 - protein, 332 aa, Amycolatopsis pretoriensis
  REGION 1..332: note = tr|A0A1H5RET8|A0A1H5RET8_9PSEU S-adenosylmethionine:tRNA ribosyltransferase-isomerase; OS = Amycolatopsis pretoriensis OX=218821; GN = SAMN05421837_11222 PE=3 SV=1
MNIRFDLPAELSASAPPEARGVARDGVRLLVASPAGVHHSVFSSLGSFLSAGDLLVVNTSGTLPAAVDAVRDGRPIAVHFSTALDDGSWIVELRAPGGPLLDGRAGELVSLPGGASLTLQAPFAPGSRRLWRATVSVPVQGFLASAGRPIRYGYVPGEWPLSDYQTVFAREPGSAEMPSAARPFTASLVTRLVSDGVLFAPLVLHTGVSSPEAGEPPQAERYRVPPTTAALVSWVRSQGGRVIAVGTTAARALESAAQLGTASGWTNLVLGPERPARVVDGIVTGLHAPDASHLLLLEAVAGRELVQRAYDAAVERKYLWHEFGDVSLLLRR

SEQ ID NO: 63292 - protein, 335 aa, Amycolatopsis rifamycinica
  REGION 1..335: note = tr|A0A066TZE6|A0A066TZE6_9PSEU S-adenosylmethionine:tRNA ribosyltransferase-isomerase; OS = Amycolatopsis rifamycinica OX=287986 GN=DV20_21465 PE=3; SV = 1
MNVRFDLPPELSASAPPEARGLSRDEVRLLVASPSGVHHTAFGSLGDHLRPGDLLVVNTSGTLPAAVDARRAGHPIVVHFATALDDGSWIVELRAPGGPLLDGRPGERLSLAAGASLTLLAPATPGAARLWRAEVPVDVPGFLAAHGRPIRYGYVPRAWPLADYQTVFAREPGSAEMPSAARPFTPELVTRLVTDGVLVAPLVLHTGVSSPEAAEPPQAERFRVPATTAALVSWARTRGGRVIAVGTTAARALESSAPDGEVRAAEGWTELVLGPDRPARVVDGIVTGLHAPEASHLLLLEAVAGAPVVQRAYEAAVAERYLWHEFGDVSLLLRH

SEQ ID NO: 63293 - protein, 341 aa, Amycolatopsis rubida
  REGION 1..341: note = tr|A0A1I5N6K0|A0A1I5N6K0_9PSEU S-adenosylmethionine:tRNA ribosyltransferase-isomerase; OS = Amycolatopsis rubida OX=112413 GN=SAMN05421854_104277; PE = 3 SV=1
MTAPRTRFDLAEDRSASAPPEARGLARDEVRLLAAGPEGVRHAAFRELAAFLHPGDLVVINTSGTLPAAVDAIRDDYVITIHFSTELDDGTWVVELRAPGGPLLDGRVGERLRLPAGAVVTLREPHVADAQRLWRAKIEVEGEVPRYLAKVGRPIRYGYVPRAWPLPNYQTVFALDPGSAEMPSAARPFTAELVTQLVSRGVLFAPILLHTGVSSPEAGEPPYGERFRVPATTAALVNWVRDQGGRVIAVGTTAVRAIESAANPGGLVTAAAGWTELVLGPDRPARAVDGLLTGLHAPEASHLLLLEAVVGPELVQRAYDAAVRREYLWHEFGDVSLLASR

SEQ ID NO: 63294 - protein, 341 aa, Amycolatopsis sp.
  REGION 1..341: note = tr|A0A178WSN4|A0A178WSN4_9PSEU S-adenosylmethionine:tRNA ribosyltransferase-isomerase; OS = Amycolatopsis sp. M39 OX=1825094 GN=queA PE=3 SV=1
MTAPRTRFDLAEDRSASAPPEARGLARDEVRLLAAGPEGVRHAAFRELAAFLHPGDLVVINTSGTLPAAVDAIRDDYVITIHFSTELDDGTWVVELRAPGGPLLDGRVGERLRLPAGAVVTLREPHVAGAQRLWRAKIEVEGEVPRYLAKVGRPIRYGYVPRAWPLPNYQTVFALDPGSAEMPSAARPFTAELVTQLVSRGVLFAPILLHTGVSSPEAGEPPYGERFRVPATTAALVNWVRDQGGRVIAVGTTAVRAIESAANPGGLVTAAAGWTELVLGPDRPAHAVDGLLTGLHAPEASHLLLLEAVVGPELVQRAYDAAVRREYLWHEFGDVSLLASR

SEQ ID NO: 63295 - protein, 334 aa, Amycolatopsis sp.
  REGION 1..334: note = tr|A0A427TNT7|A0A427TNT7_9PSEU S-adenosylmethionine:tRNA ribosyltransferase-isomerase; OS = Amycolatopsis sp. GLM-1 OX=2267691 GN=EIY87_00865 PE=3; SV = 1
MNIRFDLPAELSASAPPEARGLARDEVRLLVASPSGVHHTVFSALGAHLRPGDLLVVNTSGTLPAAVDAVRSGRPVVVHFASPLDDGGWVVELRAPGGPLLDGRPGEVLELPGGASLTLRSPVTERLWRASVAVEGPVPGFLATAGRPIRYGYVPRAWPLSDYQTVFAREPGSAEMPSAARPFTTELVTRLVTDGVLFAPLLLHTGVSSPEADEPPQPERFRVPATTAALVSWVRSRGGRVIAVGTTAARALESAFAGGEVRAAEGWTDLVLGPDHPARVVDGIVTGLHAPEASHLLLLEAVAGRDRVQRAYDAAVERRYLWHEFGDVSLLLRR

SEQ ID NO: 63296 - protein, 335 aa, Amycolatopsis tolypomycina
  REGION 1..335: note = tr|A0A1H4P382|A0A1H4P382_9PSEU S-adenosylmethionine:tRNA ribosyltransferase-isomerase; OS = Amycolatopsis tolypomycina OX=208445; GN = SAMN04489727_2257 PE=3 SV=1
MNVHFDLPPELSASAPPEARGLSRDEVRLLVASPSGVHHTAFGSLGDHLRPGDVLVVNTSGTLPAAVDARRAGRPIAVHFATALDDGSWVVELRAPGGPLLDGRPGERVALPEDASLTLLAPAVPGAARLWRASVSVPVPSLLAAAGRPIRYGYVPRSWPLADYQTVFAREPGSAEMPSAARPFTPELVTRLVTDGVVIAPLLLHTGVSSPEAGEPPQAERFRVPATTAALVSWVRGRGGRVIAVGTTAARALESAASGGEVRAAEGWTNLVLGPDRPARVVDGIVTGLHAPEASHLLLLEAVAGAEVVRQAYAAAVAERYLWHEFGDVSLLLRH

SEQ ID NO: 63297 - protein, 111 aa, Amycolatopsis vancoresmycina
  REGION 1..111: note = tr|R1H4K7|R1H4K7_9PSEU S-adenosylmethionine:tRNA ribosyltransferase-isomerase (Fragment) OS=Amycolatopsis vancoresmycina DSM 44592 OX=1292037 GN=H480_43055 PE=3 SV=1
MSMNVRFDLPPDLSASAPPEARGLARDGVRLLVASPESVHHTVFSALGEHLRPGDLLVVNTSGTLPAAVDARRDGRPVVVHFSTPLDDGSWVVELRAPGGPLLDDPGTVVE

SEQ ID NO: 63298 - protein, 327 aa, Amycolatopsis xylanica
  REGION 1..327: note = tr|A0A1H3NB36|A0A1H3NB36_9PSEU S-adenosylmethionine:tRNA ribosyltransferase-isomerase; OS = Amycolatopsis xylanica OX=589385 GN=SAMN05421504_107215; PE = 3 SV=1
MTIRFELPSELNASAPPEARGLARDEVRLLVADTQGVEHTTFTDLDRFLKAGDLLVVNTSATLPAAVDTTTPGIVAHFSTELDERTWVVELRTPDGPYLKAHQGDRFGLPAGAELVLTERHGRLWHAEFAVEGRVTAFLARVGRPISYGYVPRRWPIENYQTVFGRDPGSAEMPSAGRPFTAELVTKLVSRGVLFAPILLHTGVSSLESHEPPQDEWFRVPATTARLADWVRGEGGRVIAVGTTVVRALESAAPGGSEGWTGLVLGPDRPATVVDGLVTGLHAPNASHLLLLEAVAGASVVEKAYREALEHRYLWHEFGDVSLLLNQ

SEQ ID NO: 63299 - protein, 352 aa, unidentified
  source 1..352: note = Amylibacter cionae
  REGION 1..352: note = tr|A0A2N5IF23|A0A2N5IF23_9RHOB S-adenosylmethionine:tRNA ribosyltransferase-isomerase; OS = Amylibacter cionae OX=2035344 GN=queA PE=3 SV=1
MKLSDFDFDLPESLIALRPAKPRPSSRLLLAEGTALSDHHFYDLPKFLRRGDRLVLNDTKVIPARLNGKRRRMSDQGETFAAVEVTLLSLDGQGDWMALAKPGRRVRVGEEIAFSPELSATVLDKSADGLRLRFSLSGPAFDAQLAALGAMPLPPYIAAKRAADAQDAQDYQTVFAQNSGAVAAPTASLHFDQGILDALADTGVTFTKVTLHVGAGTFLPVKVDDVSDHKMHAEWGRVDEQAAAEIAQTKAQGGRVIPVGTTALRLIETAARDTGEIAPWVGETDIFIKPGFEFAVTDGLITNFHLPKSTLMMLVSALMGVDTIKSVYAHAIAEKYRFFSYGDSSLLLPERR

SEQ ID NO: 63300 - protein, 348 aa, unidentified
  source 1..348: note = Amylibacter kogurei
  REGION 1..348: note = tr|A0A2G5K5I9|A0A2G5K5I9_9RHOB S-adenosylmethionine:tRNA ribosyltransferase-isomerase; OS = Amylibacter kogurei OX=1889778 GN=queA PE=3 SV=1
MKLSDFDFELPEELIALRPAKPRSASRMLVAQSNDIKHQTFADLAQFLRPNDRLVLNNTKVIPARLNGQRRRISDNGETFAGLEITLLSMDTNGHWLTLAKPAKRANIGEQIIFADGFWAMVISKSEQGMVLEFNQSGNAFDQQLAANGFMPLPPYIASKRPADEQDMSDYQTVFAKTMGAVAAPTASLHFETDQLDKLREMGVNTSEVTLHVGAGTFLPVKVDDITDHKMHSEWGEVSATAAAEIAQTHASGGRVIPVGTTALRLIETAARGGEIKPWVGDTDIFITPGFEFHATDALITNFHLPKSTLLMLVSALMGMDRMKEIYQTAIAQNYRFFSYGDASLLVP

SEQ ID NO: 63301 - protein, 372 aa, Anabaena cylindrica
  REGION 1..372: note = tr|K9ZQH6|K9ZQH6_ANACC S-adenosylmethionine:tRNA ribosyltransferase-isomerase OS=Anabaena cylindrica (strain ATCC 27899 / PCC 7122) OX=272123 GN=queA PE=3 SV=1
MSDLEIQDINLDRSLSGYDYELPTELIAQNPAVPRDSSRLLVVNSPNAGREMLALNHIFRDLPELLQPGDLLVMNNTKVMPARLYGRKSTGAKVEVLLLEERQHNCWLALVKPGKHFKVGTQIVFDGNKLSVNTGLTATVLETDAATGGRLLQFDLPEHISLVQVLEDFGEIPLPPYITASTAADEQYQTVYAQEQGAIAAPTAGLHFTPELLQKLSDRSINQAFVTLHVGVGTFRPVEVDDVTTHQMHEEWIEVSAATVEQIRATQAAGGRIIAVGTTVVRALEGAAQFGDLQPYVGKVNLFIYPGFQWRVVEGLITNFHLPRSSLLMLVSALIGRKRLLKIYQQAIASQYRFYSFGDAMLILPDGVMSMN

SEQ ID NO: 63302 - protein, 380 aa, Anabaena sp.
  REGION 1..380: note = tr|A0A1B7VHA1|A0A1B7VHA1_9NOST S-adenosylmethionine:tRNA ribosyltransferase-isomerase; OS = Anabaena sp. WA113 OX=1710889 GN=queA PE=3 SV=1
MKQQILQNQTQLEAANDINLDCLLSSYDYELPPELIAQNPAVPRDSSKLLVVNSAETGKTIPPLHHIFRDLSELLKPGDLLVMNNTKVIPARLYGCRSTGAEVEVLLLEERRHNCWLALVKPGKRFKVGSEIIFTAVDDGEQQELRATVVESDPGTGGRLLQFDLPPEVPLVQVLGKFGQIPLPPYITASTAADEQYQTVYAQEQGAIAAPTAGLHFTPSLLEKLRNYGINQAFITLHVGIGTFRPVEVKDVTTHVMHKEWIEVSSDTVEQVLATRAAGGRIIAVGTTAVRALEGAAQLGALQPFVGQTNLFIYPGYKWQVVEGLITNFHLPRSSLLMLVSALIGRKRLLDLYEQAIAAQYRFYSFGDAMLILPEGKNIQ

SEQ ID NO: 63303 - protein, 376 aa, Anabaena sp.
  REGION 1..376: note = tr|A0A1B7V246|A0A1B7V246_9NOST S-adenosylmethionine:tRNA ribosyltransferase-isomerase; OS = Anabaena sp. AL09 OX=1710891 GN=queA PE=3 SV=1
MKQKILQAESQDINLDCSLSGYEYELPPGRIAQNPAVPRDSSKLLVVNSPETAKTIPPLHHIFRNLPELLKPGDLLVMNNTKVIPARLYGYTSTSGSVEVLLVEERRHNCWLALVKPGKQFKIGNEIIFTSGEQGNKQTLKATVVESDSETGGRLLQFELPEQVPLLQVLGTFGQIPLPPYITASTAADEQYQTVYAAEEGAIAAPTAGLHFTPELLEKLRSCGINQAFITLHVGIGTFRPVEVKDVTTHAMHEEWIEVPADTVEQIRATQAAGGRIIAVGTTAVRALEGAAQLGDLQPFVGKTNLFIYPGYKWQVVEGLITNFHLPRSSLLMLVSALIGRERLLDLYQEAITSEYRFYSFGDAMLILPEGKSIKL

SEQ ID NO: 63304 - protein, 388 aa, Anabaenopsis circularis
  REGION 1..388: note = tr|A0A1Z4GKJ4|A0A1Z4GKJ4_9CYAN S-adenosylmethionine:tRNA ribosyltransferase-isomerase; OS = Anabaenopsis circularis NIES-21 OX=1085406 GN=queA PE=3; SV = 1
MEPAITQGNFNKVTATGVEEVNLDCSLIGYDYVLPPELIAQNPAVPRDSSRLLVVNSAATGRDSAPLHHIFRDLPELLRPGDLLVMNNTRVIPARLYGNKSTGAEIEVLLLEERQHNCWLALVKPGKRFKSGSQIIFSGKGLENDSSTPQLTATVLETDAATGGRLLQFDVPPGKSLVELLDKFGEIPLPPYITTSAAADEQYQTVYAEQPGAIAAPTAGLHFTPELLEKLRDRNIHQAFVTLHVGVGTFRPVEVEDVTTHAMHEEWIEVPAATVEQIRATKAAGGRIIAVGTTVVRSLEGAAQSGELQPFCGKTNLFIYPGYQWRVVEGLITNFHLPRSSLLMLVSALIGRQRLLKIYQEAIASRYRFYSFGDAMLILPEGREKCEV

SEQ ID NO: 63305 - protein, 347 aa, Anaerobacillus alkalidiazotrophicus
  REGION 1..347: note = tr|A0A1S2MBJ9|A0A1S2MBJ9_9BACI S-adenosylmethionine:tRNA ribosyltransferase-isomerase; OS = Anaerobacillus alkalidiazotrophicus OX=472963 GN=queA; PE = 3 SV=1
MEVKDFDFYLPEELIAQTPLLERTSSRLMVLDRSSGDIHHRIFSDVIDYLSEGDCLVLNDTRVLPARLYGTKEDTGANIEFLLLKQMEKNQWETLVKPAKRVRKGTIVTFGDGRLRGICKEELEHGGRIIEFQYEGIFHEILDSLGEMPLPPYITEKLEDRERYQTVYAKHRGSAAAPTAGLHFTEELLDKIASKGVEIVYITLHVGLGTFRPVSVDTIEDHEMHAEFYQMSCEAAETLNKAKKNGNKIVSVGTTSTRTLETIAQANGGKFTESSGWTNIFIYPGYKFKGINALITNFHLPKSTLIMLVSALAGTDHTLHAYKEAVKERYRFFSFGDAMLIIEGSKN

SEQ ID NO: 63306 - protein, 347 aa, Anaerobacillus alkalilacustris
  REGION 1..347: note = tr|A0A1S2LWP0|A0A1S2LWP0_9BACI S-adenosylmethionine:tRNA ribosyltransferase-isomerase; OS = Anaerobacillus alkalilacustris OX=393763 GN=queA PE=3; SV = 1
MEVKDFDFYLPEELIAQTPLLERTSSRLMVLDRSSGDIHHRIFSDVIDYLSEGDCLVLNDTRVLPARLYGTKEDTGANIEFLLLKQMEKNQWETLVKPAKRVRKGTIVTFGDGRLRGICKEELDHGGRIIEFQYEGIFHEILDSLGEMPLPPYITEKLEDRERYQTVYAKHRGSAAAPTAGLHFTEELLDKIASKGVEIVYITLHVGLGTFRPVSVDTIEDHEMHAEFYQMSREAAETLNKAKKNGNKIVSVGTTSTRTLETIAQANGGKFIESSGWTNIFIYPGYKFKGINALITNFHLPKSTLIMLVSALAGTEHTLHAYKEAVKERYRFFSFGDAMLIIEGSKN

SEQ ID NO: 63307 - protein, 347 aa, Anaerobacillus arseniciselenatis
  REGION 1..347: note = tr|A0A1S2L5G1|A0A1S2L5G1_9BACI S-adenosylmethionine:tRNA ribosyltransferase-isomerase; OS = Anaerobacillus arseniciselenatis OX=85682 GN=queA PE=3; SV = 1
MEVKDFDFYLPEELIAQTPLMDRTASRLMVLDPKTGEIKHRKFYDVIDFLNEGDCLVLNDTRVLPARLYGTKEDTGANIEFLLLKQVQGDQWETLVKPAKKVKKGTVVTFGDGRLKGICKGELDHGGRIIEFQYDGIFHEILDAFGEMPLPPYITEQLEDQDRYQTVFAKHRGSAAAPTAGLHFTEELLEEIKAKGVQIVYITLHVGLGTFRPVSVDSIEEHEMHAEFYQMTSETAEILNETRRNGQKIITVGTTSTRTLETIAQENDGVFRESSGWTSIFIYPGYQYRGIDGLITNFHLPKSTLIMLVSALASREHTLNAYREAVKNKYRFFSFGDAMLIMEGSNK

SEQ ID NO: 63308 - protein, 342 aa, unidentified
  source 1..342: note = Anaerobacillus isosaccharinicus
  REGION 1..342: note = tr|A0A1S2KU10|A0A1S2KU10_9BACI S-adenosylmethionine:tRNA ribosyltransferase-isomerase; OS = Anaerobacillus isosaccharinicus OX=1532552 GN=queA PE=3; SV = 1
MEVKDFDFYLPEELIAQTPLKDRTASRLLVLDSKTGGINHRIFSDVIDFLTEGDCLVLNDTRVLPARLYGTKEDTGANIEFLLLKQNENDEWETLVKPAKRVRKGTVVSFGDGRLKGICKEELDHGGRIMEFQYEGIFHEILESLGEMPLPPYITEQLEDKERYQTVFAKHRGSAAAPTAGLHFTVALLEAMKAKGIHIVYITLHVGLGTFRPVSVDDIKEHQMHAEFYQMTEETAETLNSVKKSGKKIVTVGTTSTRTLETIAHANDGVFKESSGWTSIFIYPGFEFKAINGLITNFHLPKSTLIMLVSALAGREHTLHAYEEAVKERYRFFSFGDAMLIL

SEQ ID NO: 63309 - protein, 348 aa, unidentified
  source 1..348: note = Anaerobacillus macyae
  REGION 1..348: note = tr|A0A0J6CX33|A0A0J6CX33_9BACI S-adenosylmethionine:tRNA ribosyltransferase-isomerase; OS = Anaerobacillus macyae OX=157733 GN=queA PE=3 SV=1
MNVNDFDFELPERLIAQVPLKERTKSRLMVLDPAVQKLEHREFSNLEDYIKPGDCLVLNDTRVMPARLYGTKEETGAKIEVLLLKQIENDSWETLVKPAKRVKPGTEISFGDGRLTAVCTESLEHGGRVLEFKYDGVFYEVLDQLGEMPLPPYITETLDDQERYQTVFAKNRGSAAAPTAGLHFTEEMLERLENKGVHVAFITLHVGLGTFRPVSVDNILEHEMHGEFYQLTKGTAELLNRVKEEGGRIISVGTTSTRTLETVASSYNGRFEEASGWTDIFIYPGYTFKAIDGLITNFHLPQSTLIMLVSALAGREFIISAYRTAVEEEYRFFSFGDAMLILEGSTKE

SEQ ID NO: 63310 - protein, 341 aa, unidentified
  source 1..341: note = Anaerobacterium chartisolvens
  REGION 1..341: note = tr|A0A369AXE8|A0A369AXE8_9FIRM S-adenosylmethionine:tRNA ribosyltransferase-isomerase; OS = Anaerobacterium chartisolvens OX=1297424 GN=queA PE=3; SV = 1
MNIKEFDYCLPPELIAQEPLEERSLSRLMVLDKQTGELWHKSFTDIVHYLNKGDCLVLNNTRVIPARLLGQKEDTGAKIEFVLLKRLNGDVWEVILKPGKRARAGSRFVFGDGLLKAEIIEVIEGGNRLVRFEYEGVFEKILDSVGVMPLPPYITKKLEHPERYQTIYSEHRGSAAAPTAGLHFTGELLEEIQNKGIGIAYVTLHIGLGTFRPVKCENILEHKMHSEFYTISQEACDKINASKSLGNRVVAVGTTSCRVLETASGDDGTLFPGTGWTDIFIYPGYKFKAVDSLITNFHLPESTLIMLVSALAGRENTLAAYGKAVELGYRFFSFGDAMLIK

SEQ ID NO: 63311 - protein, 368 aa, Anaerobiospirillum thomasii
  REGION 1..368: note = tr|A0A2X0VG92|A0A2X0VG92_9GAMM S-adenosylmethionine:tRNA ribosyltransferase-isomerase; OS = Anaerobiospirillum thomasii OX=179995 GN=queA PE=3 SV=1
MRGFILLRSDFNFDLPMELIANYPSEQRTMCKMLCLDGNSGQMEDRTFIDLKEYLRPGDLLVFNDTRVIPARLFGSKESGGKIEILIERITSPASALAHIRASKAPKAGAVLFIDGSDTRLEVTGRDGALFLIQTQDGSELLDLLEAAGHMPLPPYIEREDEKEDRERYQTVYSKVPGAVAAPTAGLHFDNEQIEDLKAMGVKTAFVTLHVGAGTFQPVREDDILKHHMHKEYVSLPSDVANAVIETHRQGNRVVAVGTTAVRSLESAAQHAIQIGSDDEIVPFFDDTSIFIYPGYKYQVVDCLITNFHLPESTLIMLVSAFAGYANTMRAYEHAIDERYRFFSYGDCMFIQKRTADTDDLPPSAIKE

SEQ ID NO: 63312 - protein, 341 aa, unidentified
  source 1..341: note = Anaerobium acetethylicum
  REGION 1..341: note = tr|A0A1D3TP07|A0A1D3TP07_9FIRM S-adenosylmethionine:tRNA ribosyltransferase-isomerase; OS = Anaerobium acetethylicum OX=1619234 GN=queA PE=3 SV=1
MNVKDFDFYLPLELIAQDPLEDRSSSRLLTLDKKTGEVEHHVFTDIIDYLNPGDCLVVNDTKVIPARLIGSKIGTEAKIEVLLLKRMENDIWECLVKPGKKARPGAEISFGDGLLTGTVMDVVEEGNRLIQFSYDGIFEEILDRLGQMPLPPYITHQLQDKNRYQTVYAKHEGSAAAPTAGLHFTPELMKKIEEKGVEIAYVTLHVGLGTFRPVKVDNILDHHMHSEFFSVEEAEAEKINKAKDQGRRVIGVGTTSCRTLESAAGQDNRLRAGSGWTEIFIYPGYEFKIIDGLVTNFHLPESTLLMLISALAGRENVMEAYKMAVAEKYRFFSFGDAMFIH

SEQ ID NO: 63313 - protein, 153 aa, Anaerobranca californiensis
  REGION 1..153: note = tr|A0A1M6LP83|A0A1M6LP83_9FIRM S-adenosylmethionine:tRNA ribosyltransferase-isomerase; OS = Anaerobranca californiensis DSM 14826 OX=1120989; GN = SAMN02745227_00593 PE=3SV=1
MDKIREKGIQTAFVTLHVGLGTFRPVQVDNILEHKMHSEFYSLPQETVEAIEKCKKNNGRVIAVGTTVVRTLETVGSTESKLKAKSGWTDIFIYPGYNFKVVDGLFTNFHLPKSTLIMLVSAFAGRETTLWAYEQAVKEQYRFFSFGDSMLII

SEQ ID NO: 63314 - protein, 137 aa, Anaerobranca californiensis
  REGION 1..137: note = tr|A0A1M6LPG0|A0A1M6LPG0_9FIRM S-adenosylmethionine:tRNA ribosyltransferase-isomerase; OS = Anaerobranca californiensis DSM 14826 OX=1120989; GN = SAMN02745227_00594 PE=3SV=1
MELKDFDFYLPEHLIAQQPTKRRDESRLLVLYKKEKKIEHKRFYQCIDYLNPEDLLIFNDTKVLPARLFGQKESGAKVEVMLLNEVASGKWECLAKPGKKLKAGSKVIFPLGLEGIVEEDTDFGGKKFNLINIVESF

SEQ ID NO: 63315 - protein, 340 aa, Anaerobranca gottschalkii
  REGION 1..340: note = tr|A0A1I0BIN8|A0A1I0BIN8_9FIRM S-adenosylmethionine:tRNA ribosyltransferase-isomerase; OS = Anaerobranca gottschalkii DSM 13577 OX=1120990 GN=queA; PE = 3 SV=1
MELKDFDFYLPEHLIAQQPTKKRDESRLLVLYKKEKKIEHKKFFQCIDYLNPEDLLIFNDTKVLPARLFGQKESGAKVEVMLLNEVGQGKWECLAKPGKKLKVGSKVVFPLGLEGVVEGDTDFGGKRIQFNKHSGEFLETIDKIGELPLPPYIKEKPEDYNRYQTVYAKKEGAVAAPTAGLHFTEELLNKIREKGIQTAFVTLHVGLGTFRPVQVDNILEHKMHSEFYSLPQETVEAIERCKKNNGRVIAVGTTVVRTLETVGSTEEKLKAKSGWTDIFIYPGYNFKVVDGLFTNFHLPKSTLIMLVSAFAGRETTLWAYEQAVKEGYRFFSFGDSMLII

SEQ ID NO: 63316 - protein, 341 aa, unidentified
  source 1..341: note = Anaerobutyricum hallii
  REGION 1..341: note = tr|A0A414B5E5|A0A414B5E5_9FIRM S-adenosylmethionine:tRNA ribosyltransferase-isomerase; OS = Anaerobutyricum hallii OX=39488 GN=queA PE=3 SV=1
MKTSDFNFDLPQELIAQDPLEDRSSSRLMVLNKENGEITHRIFHDITEYLHPGDCLVINDTKVIPARLIGTKEDTGAHIEILLLKRKENDVWETLVKPGKKCRPGARVVFGNGELKAEIVDVLEDGNRLVHFEYEGIFEEVLDRLGQMPLPPYITHKLQDKNRYQTVYAKYEGSAAAPTAGLHFTKELLKQIEDMGVNIARVTLHVGLGTFRPVKVENVLEHHMHSEYYNVTETAAKMINDTKKNGGRIIAVGTTSTRTLESVADENGIIHPGCGNTEIFIYPGYKFKAIDCLITNFHLPESTLLMLVSALAGKEHIMAAYEEAVKEKYRFFSFGDAMFIE

SEQ ID NO: 63317 - protein, 341 aa, unidentified
  source 1..341: note = Anaerobutyricum hallii
  REGION 1..341: note = tr|A0A413PYT5|A0A413PYT5_9FIRM S-adenosylmethionine:tRNA ribosyltransferase-isomerase; OS = Anaerobutyricum hallii OX=39488 GN=queA PE=3 SV=1
MKTSDFNFDLPQELIAQDPLEDRSSSRLMVLNKESGEIAHRIFHDITEYLHPGDCLVINDTKVIPARLIGTKEDTGAHIEILLLKRKENDVWETLVKPGKKCRPGARVVFGNGELKAEIVDVLEDGNRLVHFEYEGIFEEVLDRLGQMPLPPYITHKLQDKNRYQTVYAKYEGSAAAPTAGLHFTKELLKQIEDMGVNIARVTLHVGLGTFRPVKVENVLEHHMHSEYYNVTETAAKMINDTKKNGGRIIAVGTTSTRTLESVADENGIIHPGCGNTEIFIYPGYKFKAIDCLITNFHLPESTLLMLVSALAGKEHIMAAYEEAVKERYRFFSFGDAMFIQ

SEQ ID NO: 63318 - protein, 340 aa, Anaerococcus hydrogenalis
  REGION 1..340: note = tr|A0A133M765|A0A133M765_9FIRM S-adenosylmethionine:tRNA ribosyltransferase-isomerase; OS = Anaerococcus hydrogenalis OX=33029 GN=queA PE=3 SV=1
MRTEDFDYYLPEELIAQHPADKRDFSRLMVVDRKTGQREDKHFYDIIDYLNEGDLLVMNDTRVIPARLFGHREGKEEEIEVFLLENIEKDKWEVLVRPGKKMKIGTKCIFSDELCLEVVDIKEDGNRIVEFSYEGIFQEILDRLGNMPLPPYIKEKLKDKERYQTVYSKNPGSVAAPTAGLHFTKELLKKIEKKGVKLAYITLNVGLGTFRPVKVDDVKNHKMHSEFYQISKETADLINETKKNNKRIISTGTTTTRTLESVYKKNGEIKEDSGWTDIFIYPGFEFNVIDCQITNFHLPKSTLIMLVSALASKEIILDAYKDAVEKKYRFFSFGDAMFLK

SEQ ID NO: 63319 - protein, 340 aa, Anaerococcus hydrogenalis
  REGION 1..340: note = tr|B6W864|B6W864_9FIRM S-adenosylmethionine:tRNA ribosyltransferase-isomerase OS=Anaerococcus hydrogenalis DSM 7454 OX=561177 GN=queA PE=3 SV=1
MRTEDFDYNLPEELIAQHPADKRDFSRLMVVDRKTGQREDKHFYDIIDYLNEGDLLVMNDTRVIPARLFGHRPEKEEKIEVFLLENIEKDKWEVLVKPGKKMKIGTKCIFSDELSLEVVDIKEDGNRVVEFSYEGIFQEILDRLGNMPLPPYIKEKLKDKERYQTVYSKNPGSVAAPTAGLHFTKELLKKIEDKGVKLAFITLNVGLGTFRPVKVDDVKNHKMHSEYYQISKESADLINETKKNNKRIISTGTTTTRTLESVFKKNGQIKEDSGWTDIFIYPGFKFNVIDCQITNFHLPKSTLIMLVSALANKEIILDAYKDAVEKKYRFFSFGDAMFLK

SEQ ID NO: 63320 - protein, 340 aa, Anaerococcus lactolyticus
  REGION 1..340: note = tr|C2BDC7|C2BDC7_9FIRM S-adenosylmethionine:tRNA ribosyltransferase-isomerase OS=Anaerococcus lactolyticus ATCC 51172 OX=525254 GN=queA PE=3 SV=1
MRTSEFDYYLPEELIAQHPTSKRDEARMMVLDRKSGEREDKYFFEIIDYLKAGDVLVMNDTRVIPARLFGHRPEKEEKIEVFLLNNTEGAKWEVLVRPGKKMKIGTEVIFSDDLSCKVVDVKDDGNRIVEFYYEGIFNEILDRLGNMPLPPYIKEKLKDNEDYQTVYSKNPGSVAAPTAGLHFTKELLEKIEEKGVKLAYLTLNVGLGTFRPVNEDEITNHKMHSEFYTLSEETSKILNEAKSEGRRIIAVGTTSIRTLESVYKKNNKICADSGWTDIFIYPGFEFKVVDAIITNFHLPKSTLIMLIAAFTSKDIILDAYKDAVNKKYRFFSFGDCMFIK

SEQ ID NO: 63321 - protein, 340 aa, Anaerococcus lactolyticus; identical to SEQ ID NO: 63320
  REGION 1..340: note = tr|A0A095WZS8|A0A095WZS8_9FIRM S-adenosylmethionine:tRNA ribosyltransferase-isomerase; OS = Anaerococcus lactolyticus S7-1-13 OX=1284686 GN=queA; PE = 3 SV=1

SEQ ID NO: 63322 - protein, 340 aa, unidentified
  source 1..340: note = Anaerococcus nagyae
  REGION 1..340: note = tr|A0A3E2TIM1|A0A3E2TIM1_9FIRM S-adenosylmethionine:tRNA ribosyltransferase-isomerase; OS = Anaerococcus nagyae OX=1755241 GN=queA PE=3 SV=1
MKTDDFDYYLPEELIAQHPAEKRDHARLLVLDKETGETEDKYFYDIIDYLDPGDVLVMNDTRVIPARLFGHRESKEESIEVFLLTNIEGKTWECLVRPGKKMKIGTNVIFSEELSGEVKDIKEDGNRIIEFCYEGIFNELLDRLGNVPLPPYIKEELQEPEEYQTVYSKNPGSVAAPTAGLHFTQELLEEIESKGIKLAYLTLNVGLGTFRPVSVEDVTDHKMHSEFYTISKETADIINKAHKKGNKVIATGTTSIRTLESVYKKNGKIQGDSGWTDIFIYPGFKFEVVDAMITNFHLPKSTLVMLVSAFSSKDIILNAYEHAVNDKYRFFSFGDAMYIH

SEQ ID NO: 63323 - protein, 340 aa, Anaerococcus octavius
  REGION 1..340: note = tr|A0A2I1M9W1|A0A2I1M9W1_9FIRM S-adenosylmethionine:tRNA ribosyltransferase-isomerase; OS = Anaerococcus octavius OX=54007 GN=queA PE=3 SV=1
MKTDDFDYYLPEELIAQHPAEKRDHARMLVLDRKTGQTEDKYFYDIIDYLNPGDVLVMNDTRVIPARLFGHREGKEESIEVFLLHNTKGKTWECLVRPGKKMKVGTKIIFSEELKAEVKDIKEDGNRIIEFFYEGIFNEILDRLGNVPLPPYIKEELDEPEEYQTVYSKNPGSVAAPTAGLHFTKELLEDIENKGIKLAYLTLNVGLGTFRPVSVEDVNDHKMHSEFYTISQETADIINEAHENGHRVIATGTTTIRTLESVYKKHGKVTEDSGWTDIFIYPGFEYKVIDAMITNFHLPKSTLVMLVAAFTSKDMILDTYKHAVDEKYRFFSFGDAMFIH

SEQ ID NO: 63324 - protein, 340 aa, Anaerococcus octavius
  REGION 1..340: note = tr|A0A380WTS0|A0A380WTS0_9FIRM S-adenosylmethionine:tRNA ribosyltransferase-isomerase; OS = Anaerococcus octavius OX=54007 GN=queA PE=3 SV=1
MKTDDFDYYLPEELIAQHPAEKRDHARMLVLDRKTGQTEDKYFYDIIDYLNPGDVLVMNDTRVIPARLFGHREGKEESIEVFLLHNTKGKTWECLVRPGKKMKIGTKIIFSEELKAEVKDIKEDGNRIIEFFYEGIFNEILDRLGNVPLPPYIKEELDEPEEYQTVYSKNPGSVAAPTAGLHFTKELLEDIENKGIKLAYLTLNVGLGTFRPVSVEDVNDHKMHSEFYTISQETADIINEAHENGHRVIATGTTTIRTLESVYKKHGKVTEDSGWTDIFIYPGFEYKVIDAMITNFHLPKSTLVMLVAAFTSKDMILDTYKHAVDEKYRFFSFGDAMFIH

SEQ ID NO: 63325 - protein, 340 aa, Anaerococcus prevotii
  REGION 1..340: note = tr|C7RHH3|C7RHH3_ANAPD S-adenosylmethionine:tRNA ribosyltransferase-isomerase OS=Anaerococcus prevotii (strain ATCC 9321 / DSM 20548 / JCM 6508 / PC1) OX=525919; GN = q ueA PE=3 SV=1
MRTEEFDYELPESLIAQHPSDKRDEARMMLLDKSTGDIEDKHFFDIIDYLKPGDVLVMNDTRVIPARLFGHREGKDESIEVFLLHNIKGKKWEVLVRPGKKMKIGVEVIFSDELKAKVIDIKEDGNRVVEFTYEGIFNEILDKLGNMPLPPYIKEKLKDPEEYQTVYSKNPGSVAAPTAGLHFTKELLKKIEEKGIKLAFLTLNVGLGTFRPVNEDDITDHKMHSEFYTISQETADIINQAKREGNRVIAVGTTSIRTLESVYKKCGKIQEDSGWTDIFIYPGFEYKVVDAIITNFHLPKSTLIMLVAAFTSKKIILNAYEYAVKEKYRFFSFGDCMFIC

SEQ ID NO: 63326 - protein, 345 aa, Anaerococcus prevotii
  REGION 1..345: note = tr|A0A449IA93|A0A449IA93_9FIRM S-adenosylmethionine:tRNA ribosyltransferase-isomerase; OS = Anaerococcus prevotii OX=33034 GN=queA PE=3 SV=1
MKTSDFNYDLDESFIAQHPISPRDHAKLMLVSRNSKEIQHKIFYDILDELRPGDVLVVNDTRVRPARLYGHRKGKEEEIEVLLLKPLNAKVWECLVKPGKKMKLGTEIYFQDILKGTVVGITEDGSRHISFEIKGTEQDIEKVFEEIGQMPLPPYIKEKLDRQEEYQTVYSKYIGSAAAPTAGLHFTQDLLKKIGEKGVKIVPITLHVGLGTFRPVSVDNVENHHMHSELCLVSDQAAEEINKAKAEGRRVIAVGTTSMRTLESMAEDGKLTSGHKWTDIFIYPGFNFQIVDGLITNFHLPQSTLLMLVSAFSSKEIILHAYEEAKKNNYRFFSFGDAMFIRKDD

SEQ ID NO: 63327 - protein, 340 aa, Anaerococcus sp.
  REGION 1..340: note = tr|A0A1E9DBG6|A0A1E9DBG6_9FIRM S-adenosylmethionine:tRNA ribosyltransferase-isomerase; OS = Anaerococcus sp. HMSC068A02 OX=1739286 GN=queA PE=3 SV=1
MRTEDFDYNLPEELIAQHPADKRDFSRLMVVDRKTGKREDKHFYDIIDYLNEGDLLVMNDTRVIPARLFGHREGKEEEIEVFLLENIEDDKWEVLVRPGKKMKIGTKCIFSDELSLEVIDIKEDGNRVIEFFYNGIFQEILDRLGNMPLPPYIKEKLKDKERYQTVYSKNPGSVAAPTAGLHFTKELLKKIEEKGVKLAYITLNVGLGTFRPVKVDDVKNHKMHSEFYQISKETADLINETKKNNKRIISTGTTTTRTLESVYKKNGKIKEDSGWTDIFIYPGFEFNVIDCQITNFHLPKSTLIMLVSALASKEIILDAYKDAVDKKYRFFSFGDAMFLK

SEQ ID NO: 63328 - protein, 340 aa, Anaerococcus sp.
  REGION 1..340: note = tr|A0A1E8RBA0|A0A1E8RBA0_9FIRM S-adenosylmethionine:tRNA ribosyltransferase-isomerase; OS = Anaerococcus sp. HMSC065G05 OX=1739356 GN=queA PE=3 SV=1
MRTEDFDYNLPEELIAQHPADKRDFSRLMVVDRKTGKREDKHFYDIIDYLNEGDLLVMNDTRVIPARLFGHREGKEEEIEVFLLENIEDDKWEVLVRPGKKMKIGTKCIFSDELSLEVIDIKEDGNRIVEFFYNGIFQEILDRLGNMPLPPYIKEKLKDKERYQTVYSKNPGSVAAPTAGLHFTKELLKKIEEKGVKLAYITLNVGLGTFRPVKVDDVKNHKMHSEFYQISKETADLINETKKNNKRIISTGTTTTRTLESVYKKNGQIKEDSGWTDIFIYPGFEFNVIDCQITNFHLPKSTLIMLVSALASKEIILDAYKDAVDKKYRFFSFGDAMFLK

SEQ ID NO: 63329 - protein, 340 aa, Anaerococcus tetradius
  REGION 1..340: note = tr|A0A133KD59|A0A133KD59_9FIRM S-adenosylmethionine:tRNA ribosyltransferase-isomerase; OS = Anaerococcus tetradius OX=33036 GN=queA PE=3 SV=1
MKTEDFDYYLPEKLIAQHPSDKRDGARMMVLDKKNGAIEDKYFYDIIDYLNPGDVLVMNDTRVIPARLFGHRKDKEESIEVFLLHNIEGKVWEVLVRPGKKMKIGAEVIFSEELSCKVIDIKEDGNRIVEFTYDGIFNEILDKLGNVPLPPYIKEKLKDPEEYQTVYSKNPGSVAAPTAGLHFTKELLKRIEDKGVKLAFLTLNVGLGTFRPVNEEDITDHKMHSEFYTLSKETASIINEGRKNGNKIIAVGTTSIRTLESVFKKCGEIREDSGWTDIFIYPGFEYKVVDSVITNFHLPKSTLIMLVAAFTSREIILNAYNYAVKEEYRFFSFGDCMFIH

SEQ ID NO: 63330 - protein, 340 aa, Anaerococcus tetradius; identical to SEQ ID NO: 63329
  REGION 1..340: note = tr|C2CFR1|C2CFR1_9FIRM S-adenosylmethionine:tRNA ribosyltransferase-isomerase OS=Anaerococcus tetradius ATCC 35098 OX=525255 GN=queA PE=3 SV=1

SEQ ID NO: 63331 - protein, 340 aa, Anaerococcus vaginalis
  REGION 1..340: note = tr|C7HTY6|C7HTY6_9FIRM S-adenosylmethionine:tRNA ribosyltransferase-isomerase OS=Anaerococcus vaginalis ATCC 51170 OX=655811 GN=queA PE=3 SV=1
MRTEDFDYNLPEELIAQHPADKRDFSRLMVVDRKTGQREDKHFYDIIDYLNEGDLLVMNDTRVIPARLFGHREEKEEEIEVFLLENIEDDKWEVLVRPGKKMKIGTKCIFSDELSLEVIDIKEDGNRVIEFFYDGIFQEILDRLGNMPLPPYIKEKLKDKERYQTVYSKNPGSVAAPTAGLHFTKELLKKIEEKGVKLAYITLNVGLGTFRPVKVDDVKNHKMHSEFYQISKETADLINETKKNNKRIISTGTTTTRTLESVYKKNGQIKEDSGWTDIFIYPGFEFNVIDCQITNFHLPKSTLIMLVSALASKEIILDAYKDAVDKKYRFFSFGDAMFLK

SEQ ID NO: 63332 - protein, 341 aa, unidentified
  source 1..341: note = Anaerocolumna aminovalerica
  REGION 1..341: note = tr|A0A1I5J0Z0|A0A1I5J0Z0_9FIRM S-adenosylmethionine:tRNA ribosyltransferase-isomerase; OS = Anaerocolumna aminovalerica OX=1527 GN=queA PE=3 SV=1
MTKEDFNFYLPEELIAQDPLEDRSSSRLLVLDKETGELEHKVFKDIIDYLKEGDCLVINNTKVIPARLIGEREGSGAKVELLLLKRQENDVWETLVKPGKKAKTGDRISFGDGLLVGEIIKVVDEGNRLVKFYYEGIFEEILDKLGQMPLPPYITHQLKDKNRYQTVYAKHEGSAAAPTAGLHFTKELLEQIAAKEVTIANVTLHVGLGTFRPVKVENIKEHHMHSEFYHIEEEEAEKINNTKKNGGRIICVGTTSCRTVESAAGEDGMVKPGSGNTEIFIYPGYKFKVLDALITNFHLPESTLIMLVSALAGREHVLQAYDAAVKERYRFFSFGDAMLIV

SEQ ID NO: 63333 - protein, 362 aa, unidentified
  source 1..362: note = Anaerocolumna jejuensis
  REGION 1..362: note = tr|A0A1M6WL93|A0A1M6WL93_9FIRM S-adenosylmethionine:tRNA ribosyltransferase-isomerase; OS = Anaerocolumna jejuensis DSM 15929 OX=1121322 GN=queA; PE = 3 SV=1
MKTQDFYYDLPEELIAQDPLEDRSSSRLMVLDKETGAVTHKIFRQITEYLKPGDCLVVNNTKVIPARLLGEKIHEDSQDKEKGVHGARIELLLLKRRENDIWETLVKPGKKARTGTRISFGNGLLTAEIIDQLEDGNRLVQFSYKGIFEEILDQLGEMPLPPYITHELADKNRYQTVYAKEEGSAAAPTAGLHFTKELLAEIEAMGIPIVNVTLHVGLGTFRPVKVENVLEHHMHTEFYQVSGEAAAVINDTRKKGGRVVCVGTTSCRTVESAADESGIVHPGSGDTSIFIYPGYKFKVLDALITNFHLPESTLMMLVSALAGRDNIMAAYEEAVKERYRFFSFGDAMLITTQNVANVSKNK

SEQ ID NO: 63334 - protein, 352 aa, unidentified
  source 1..352: note = Anaerocolumna xylanovorans
  REGION 1..352: note = tr|A0A1M7Y0F8|A0A1M7Y0F8_9FIRM S-adenosylmethionine:tRNA ribosyltransferase-isomerase; OS = Anaerocolumna xylanovorans DSM 12503 OX=1121345 GN=queA; PE = 3 SV=1
MKTQDFNYDLPEELIAQDPLEDRSSSRLMVLDKKTGAVSHKVFKQITEYLRPGDCLVINNTKVIPARLLGEKIHEKEPQAGEREVHGARIELLLLKRRENDIWETLVKPGKKARTGTKISFGNGLLTGEIIDQLEDGNRLVQFSYKGIFEEILDQLGEMPLPPYITHELADKNRYQTVYAKEEGSAAAPTAGLHFTKELLAQIEAMGVPIVNVTLHVGLGTFRPVKVENVLEHHMHTEFYQVSAEAAAVINDTRKKGGRVVCVGTTSCRTVESAADENGVVHPGSGDTSIFIYPGYRFKVLDALITNFHLPESTLMMLVSALAGRDNIMAAYEEAVKERYRFFSFGDAMFIV

SEQ ID NO: 63335 - protein, 343 aa, Anaerofilum sp.
  REGION 1..343: note = tr|A0A1Y4H4T5|A0A1Y4H4T5_9FIRM S-adenosylmethionine:tRNA ribosyltransferase-isomerase; OS = Anaerofilum sp. An201 OX=1965588 GN=queA PE=3 SV=1
MQKHDFWYDLPKELIAQEPCLPRDAARLLCLGRQSGEISHHIFHELPALLHAGDLLIVNNSKVLPARLIGHKAETGAVCELLLLREESRDVWECLARPGKKLKPGVRVVFGDGTLTAEILETREDGNKLVRFSYDTDTLYEKLDAFGKMPLPPYITKQLDDGSQYQTVYAKELGSAAAPTAGLHFTPELMETLRQKGVRFAEVTLHVGLGTFRPVKEETVEDHVMHSEWYCISEETAALINRTKQEGGRVIAVGTTSCRTLEAAAGAHGGQVCACSGDTDIFIYPGYTFRCIDGLITNFHLPESTLIMLVSAFCGYENTMNAYRVAVENKYRFFSFGDAMLIV

SEQ ID NO: 63336 - protein, 340 aa, Anaerofustis stercorihominis
  REGION 1..340: note = tr|A0A3E3E006|A0A3E3E006_9FIRM S-adenosylmethionine:tRNA ribosyltransferase-isomerase; OS = Anaerofustis stercorihominis OX=214853 GN=queA PE=3 SV=1
MKTSDFDYNLPEELIAQTPIEKRDTSRLMVVDRDTKKIKHKHFYDLIEYLNEGDTLVLNDSKVFHARLYGVKEETGAKIETFVLKPLADNMFEVMIKPAKRLKVGSVVKFDENLSMEVLEKYEEGLAKVRFFGCSDVFSYIDKIGTVPLPPYIKEKLDDDERYQTVYSKDKGSAAAPTAGLHFTNELLEKIKQKGINICYVTLHVGLGTFRPVKEDEITNHKMHSEFFIISNDTAKMINETKKNGKDIYAVGTTTVRTLESCYQKYGDIRATNMDTNIFIYPGFEFKAIDHLITNFHLPKSTLLMLISAFYNKDDILKAYKEAIKERYRFFSFGDAMLIL

SEQ ID NO: 63337 - protein, 340 aa, Anaerofustis stercorihominis; identical to SEQ ID NO: 63336
  REGION 1..340: note = tr|B1C6M9|B1C6M9_9FIRM S-adenosylmethionine:tRNA ribosyltransferase-isomerase OS=Anaerofustis stercorihominis DSM 17244 OX=445971 GN=queA PE=3 SV=1

SEQ ID NO: 63338 - protein, 109 aa, Anaeroglobus geminatus
  REGION 1..109: note = tr|G9YFF2|G9YFF2_9FIRM S-adenosylmethionine:tRNA ribosyltransferase-isomerase OS=Anaeroglobus geminatus F0357 OX=861450 GN=HMPREF0080_00364 PE=3 SV=1
MPAAAAKVNRAKDEGRRVIAVGTTSIRTLESAGSNGRVEAGAGRTDIFIYPGYTFRVVDALVTNFHLPESTLLMLVSAMSKREKILRAYETAVREKYRFFSFGDAMFIH

SEQ ID NO: 63339 - protein, 238 aa, Anaeroglobus geminatus
  REGION 1..238: note = tr|G9YFF1|G9YFF1_9FIRM S-adenosylmethionine:tRNA ribosyltransferase-isomerase OS=Anaeroglobus geminatus F0357 OX=861450 GN=HMPREF0080_00363 PE=3 SV=1
MILKLSDFSYELPQELIAQHPVEPRDAARLMLYDRVSGEVEHARFYDLVDALKSGDVLVFNDSRVIPARLYGTRVPTGGKVEVLLLAPVGEDMWEVLVKPGKKALPGTVISFGDDLTGTVLKRTDFGGRIVQFKYTGVFDDIIGRIGEMPLPPYIHEKLENPDDYQTVYAREKGSAAAPTAGLHFTEALLDRIRAKGVETVFVTLHVGLGTFRPVGETLKTMSCTANFTALCRQPRRK

SEQ ID NO: 63340 - protein, 339 aa, Anaerolinea thermolimosa
  REGION 1..339: note = tr|A0A3D1JEP7|A0A3D1JEP7_9CHLR S-adenosylmethionine:tRNA ribosyltransferase-isomerase; OS = Anaerolinea thermolimosa OX=229919 GN=queA PE=3 SV=1
MKTSDFDYHLPPERIAQTPVEPRHASRLLVLHRNTGELEHTIFRNIGQFLTPGDLLVVNQTRVIPARLFARKETGGRVEVLLLRRVDSLTWEGLVGGKRLTRGKRLQVENGPAVEILSDLEGSRRLLRFETPIEEMLPHIGQMPLPPYIHEPLRDPERYQTVYATAPGSAAAPTAGLHFTPELIAELKAQGIGFTTVTLHVGLDTFAPVTEEDPREHTIHTEWCEVLPAAAEAINATRRAGRRIVAVGTTSVRTLETAARNAREGDTVAPFSGPTDLYILPGYTFRAVDAMVTNFHLPRSSLIMLVSAFAGLELTLATYRKAIEMEYRFYSFGDAMLIL

SEQ ID NO: 63341 - protein, 339 aa, Anaerolinea thermophila
  REGION 1..339: note = tr|E8N6F0|E8N6F0_ANATU S-adenosylmethionine:tRNA ribosyltransferase-isomerase OS=Anaerolinea thermophila (strain DSM 14523 / JCM 11388 / NBRC 100420 / UNI-1); OX = 9265 69 GN=queA PE=3 SV=1
MKTSDFDYFLPPECIAQHPVEPRHNSRLMVLNRANDSIQHTIFWNITEYLHPGDILVVNQTRVIPARIYAHKETGGKLEILLLRRVDDHTWEALIGGKRPRKGKSFMINEHLHGTIIEELEESRRLVRFNQPVEPYLERIGQMPLPPYIHEPLRDPERYQTIFARQPGSAAAPTAGLHFTSELIERIAQMGIQFAEVTLHVGLDTFMPVHEENPLEHKIHTEWCELTEETAQKINAAKKEGGRIIAVGTTSVRTLETAAQYAREGEWVGAVSGATSLYILPGYTFRAVDAMITNFHLPRSTLIMLVSAFAGRERILNAYKVAIEQGYRFYSFGDAMLIL

SEQ ID NO: 63342 - protein, 115 aa, unidentified
  source 1..115: note = Anaerolineaceae bacterium
  REGION 1..115: note = tr|A0A1W9V967|A0A1W9V967_9CHLR S-adenosylmethionine:tRNA ribosyltransferase-isomerase (Fragment) OS=Anaerolineaceae bacterium 4572_5.1; OX = 1971724 GN=B6I38_03985 PE=3SV=1
MKTSDFNYDLPQEYIAQFPADPRDSSRLLVFNRQTGAVQHTRFHQLGEFLKPNDLLVLNQTRVIPARLFGHKIPTGGKVELLLLTKEDERTWKAFGGGSGLRAGKKIQITDGPQA

SEQ ID NO: 63343 - protein, 344 aa, unidentified
  source 1..344: note = Anaerolineaceae bacterium
  REGION 1..344: note = tr|A0A1B3WRD4|A0A1B3WRD4_9CHLR S-adenosylmethionine:tRNA ribosyltransferase-isomerase; OS = Anaerolineaceae bacterium oral taxon 439 OX=1889813; GN = queA PE=3 SV=1
MKTADFNYPLPPERIAQTPIEPRDSSRLFVYNRKTDRVEHRHFRDIGDYLNPGDLLVRNQTKVLPARIYGKKESGGKVELLLLRKRTDSEWECLIGGKKIREGAKIVLSDNLFALVLTNADSPRRVVRFEGDLNAYLSANGQMPLPPYIHEKLSDQTRYQTVYANPAFTGSAAAPTAGLHFTNELIASLEKSGVEFADVTLHVGLDTFQPVSEDDPAAHTIHKEWCEVDPASAARINRTKASGRRVIAVGTTSARTLETAAQAAIEQGLNEPVAPIRGDTGIFILPGFAFRAVDALITNFHLPKSTLIMMISAFIGRGKTIELYELAIREEYRFFSFGDAMLIL

SEQ ID NO: 63344 - protein, 51 aa, unidentified
  source 1..51: note = Anaerolineae bacterium
  REGION 1..51: note = tr|A0A3M1I9E3|A0A3M1I9E3_9CHLR S-adenosylmethionine:tRNA ribosyltransferase-isomerase (Fragment) OS=Anaerolineae bacterium OX=2052143; GN = D6770_01640 PE=3 SV=1
DALITNFHLPRSTLIMLVSAFAGRERILEAYEIAKREGYRFYSFGDAMLIL

SEQ ID NO: 63345 - protein, 337 aa, unidentified
  source 1..337: note = Anaerolineae bacterium
  REGION 1..337: note = tr|A0A1J4ZTC6|A0A1J4ZTC6_9CHLR S-adenosylmethionine:tRNA ribosyltransferase-isomerase; OS = Anaerolineae bacterium CG2_30_58_95 OX=1805004 GN=queA; PE = 3 SV=1
MRTSDFEYNLPPSFIAQTPLEPRDASRLLVLRRDTGTLEHAVFRDIGKYLHSGDLLVLNQTRVIPARLFARKPTGGRVELLLLRREDTHTWECTVGGKGLKTGIRLLLEENGPEAEIVGMLDGARRLVRFARPVELYLPRIGHVPLPPYIHEPLANPERYQTVYARDPGSAAAPTAGLHFTPSLLDELQSQGIKIAYVTLHIGLDTFAPVTEVSPEKHPIHTEWCELPQETADAIHRTRQSGGRVIAVGTTSVRTLESAAVGRDTISSYTGNTNLFILPGYKFKVVDCMITNFHLPRSTLIMLVSAFAGRERILHAYEIARREKYRFYSFGDAMFIT

SEQ ID NO: 63346 - protein, 339 aa, unidentified
  source 1..339: note = Anaerolineales bacterium
  REGION 1..339: note = tr|A0A524PQ94|A0A524PQ94_9CHLR S-adenosylmethionine:tRNA ribosyltransferase-isomerase; OS = Anaerolineales bacterium OX=2073117 GN=queA PE=3 SV=1
MRTSDFDYLLPPDRIAQRPASPRDHSRMLVLQRPTGQIEHRNFRELPEFLRSGDALVINETRVIPGRLKAHKLPGGGKVELLLLREVDPTTWEALVGGKGLSPGRSVRIQDGPSATILQDLGGPRRLVEFSEPISPLLDQIGEMPLPPYIKTPLRNHEEYQTTFARQPGSAAAPTAGLHFTDEILAQVKARGVEILRITLHVGLDTFAPVTEQDPQTHPIHTEWCSLDPHVAQSINQIKQRGGRIFAVGTTCVRTLETAASASPSDQIVAFEGPTALFIIPGFQFQLVDAMLTNFHLPRSTLLMLVSAFSGREQILHAYAQAIEHGYRFYSFGDAMLIV

SEQ ID NO: 63347 - protein, 342 aa, unidentified
  source 1..342: note = Anaerolineales bacterium
  REGION 1..342: note = tr|A0A363TAB4|A0A363TAB4_9CHLR S-adenosylmethionine:tRNA ribosyltransferase-isomerase; OS = Anaerolineales bacterium OX=2073117 GN=queA PE=3 SV=1
MRTSDFDYELPLRYIAQTPIEPRDRSRLMVLNRQSGEINHAVFKDIGEYLHPGDILVLNETRVIPARLYAHKLPSRGKVEILLLRQRDNLTWEALVGGKGLTVGKKLQVEAIREGDRAPLAQIEAVLHGAERLVRFSEPLELFFPKVGHTPLPPYIHTPINDPERYQTVYARTSGSAAAPTAGLHFTPWLMDELKSRGIKFAKVTLHVGLDTFAPVTEGDPTKHKIHSEWCQLTEQNAMAINAVKAAGGRVVAVGTTSVRTLESAAADGMLRPYEGATGLYILPGYHFNAVDAIVTNFHLPRSTLIMLVSAFATRELVSKAYEIAKNENYRFYSFGDAMLIV

SEQ ID NO: 63348 - protein, 357 aa, unidentified
  source 1..357: note = Anaeromassilibacillus sp.
  REGION 1..357: note = tr|A0A1Y4EXL5|A0A1Y4EXL5_9FIRM S-adenosylmethionine:tRNA ribosyltransferase-isomerase; OS = Anaeromassilibacillus sp. An250 OX=1965604 GN=queA PE=3; SV = 1
MEETKRNWSTHDFYYDLPKELIAQTPLEPRDSSRLLVLHKETGEMEHRHFYDVIDYLNPGDCLVLNDSRVLPARLYGIKDGTGAKVEFLLLTHREGDTWEVLTGPGKRAKPGTHFTFGDGLLRADVLDVVEGGNRIVEFHYEGNFYAILDQIGQMPLPHYITEDLKDKERYQNVYSKEVGSAAAPTAGLHFTPELLERIRQKGIKTAFVTLHVGLGTFRPVTVENVSDHKMHSEHYAMNKETADLINETKRNGGRVIAVGTTSCRTLESIALKEGCIRESAGWTDIFIYPGFQFRVLDGLITNFHLPESTLIMLVSALAGYDNIMRAYRTAVQEKYRFFSFGDAMFIGSMKELDDKK

SEQ ID NO: 63349 - protein, 346 aa, unidentified
  source 1..346: note = Anaeromassilibacillus sp.
  REGION 1..346: note = tr|A0A1Y4NFD8|A0A1Y4NFD8_9FIRM S-adenosylmethionine:tRNA ribosyltransferase-isomerase; OS = Anaeromassilibacillus sp. An172 OX=1965570 GN=queA PE=3; SV = 1
MTLKNKTSDYFYELPEELIAQTPVEPRDHSSMLVLDRETGKTQHKHFYDVSDYLKPGDCLILNDSRVLPARIFGTKKDTGAHVEFLLLKCVGNNRWETLVKPGRKAKVGAEFVFSPGVLEGKITDVLEDGNRIIDFSCEGNFYTILEELGKMPLPPYITAELKDQERYQTVYSHELGSAAAPTAGLHFTKELLKKIEEKGVKIGYVTLHVGLGTFRPVKAENITEHKMHSEHYHLPKETADLINETKKNGGRVIAVGTTSCRTLESVATFNDGKILESDGWTSIFIYPGYEFKVLDGLITNFHLPESTLIMLVSAFAGYEHVMAAYKEAVEKRYRFFSFGDAMLII

SEQ ID NO: 63350 - protein, 341 aa, unidentified
  source 1..341: note = Anaeromicrobium sediminis
  REGION 1..341: note = tr|A0A267MPR2|A0A267MPR2_9CLOT S-adenosylmethionine:tRNA ribosyltransferase-isomerase; OS = Anaeromicrobium sediminis OX=1478221 GN=queA PE=3 SV=1
MNKSDFYFDLPEELIAQTPIKERDTSKLMVVDRQTGNIDHKQFKDIIKYLKAGDCLVLNNTKVLPARLFGAKEHTGGKVEFLLLKRIEGNKWETLVKPGKKAKPGDVIVFGDGILKANILEVGQEGSRIVEFVYKGIFEEILDQLGSMPLPPYIKEKLDEKERYQTVYAKEQGSAAAPTAGLHFTKELIEDVKNKGVKIAYVTLHVGLGTFRPVKADSIYDHKMHEELYIIDKEAADIINKTKEEGGRVISVGTTSTRTLESAADELGKVKAESRWTDIFMYPGYEFKVVDGIITNFHLPESTLIMLVSAFMGRERTLNAYEEAIKNKYRFFSFGDAMFII

SEQ ID NO: 63351 - protein, 345 aa, Anaeromyxobacter dehalogenans
  REGION 1..345: note = sp|B8JH48|QUEA_ANAD2 S-adenosylmethionine:tRNA ribosyltransferase-isomerase OS=Anaeromyxobacter dehalogenans (strain 2CP-1 / ATCC BAA-258) OX=455488; GN = queA PE=3 SV= 1
MRLSDFDFALPEGLVAQAPVTPRDASRLMVLAPEEGSPAHRGFADLPELLAPGDLLVFNDTRVIPARLLGHKASGGKVELLLCEPLEGGLGRRWRAMGQASKPIREGAVLTFDGLEARVDDVEGEGFYRVTLDRQGPELEAALGRAGRIPLPPYIRRAPDAEDAARYQTIWARAPGSAAAPTAGLHFTEPLLARLAARGIRRTAVTLHVGPGTFLPIRGDDLDLHRMHGERYEVSPAAAAELAATRARGGRIVAVGTTSVRTLESAWRDGAVAAGPGRTELFIRPGHPFHAVDAMVTNFHLPRSTLLVLVCAFGGQGRVLAAYREAVARGYRFFSYGDAMLLLRR

SEQ ID NO: 63352 - protein, 345 aa, Anaeromyxobacter dehalogenans
  REGION 1..345: note = sp|Q2IKY3|QUEA_ANADE S-adenosylmethionine:tRNA ribosyltransferase-isomerase OS=Anaeromyxobacter dehalogenans (strain 2CP-C) OX=290397 GN=queA PE=3 SV=1
MRLSDFDFALPEGLVAQAPVTPRDASRLMVLAPGEGAPAHRGFADLPELLAPGDLLVFNDTRVIPARLLGHKASGGKVELLLCEPLEGGLGRRWRAMGQASKPIREGAVLAFDGLEARVDAVEGEGFYRVTLDRQGAELEAALGRAGRIPLPPYIRRAPDAEDAARYQTIWARAPGSAAAPTAGLHFTEPLLARLAARGVRRTAVTLHVGPGTFLPIRGDDLDAHRMHGERYEVSPAAAAELAAARARGGRIVAVGTTSVRTLESAWRDGEVAPGPGRTELFIRPGHPFRAVDAMVTNFHLPRSTLLVLVCAFGGQGRVLAAYREAVARGYRFFSYGDAMLLLRR

SEQ ID NO: 63353 - protein, 343 aa, Anaeromyxobacter sp.
  REGION 1..343: note = tr|A0A1F3BRC7|A0A1F3BRC7_9DELT S-adenosylmethionine:tRNA ribosyltransferase-isomerase; OS = Anaeromyxobacter sp. RBG_16_69_14 OX=1797238 GN=queA; PE = 3 SV=1
MKLSDFDYDLPEALIAQEPVSPRDASRLLVVPRGSGAVEDARFTDLESLLREGDLLVFNDTRVIPARLVGVKESGGRCELLLVEPMDGEGGARWRALGQSSKPMREGALLAFGTLEAKVEEVEGDGFFAVRFDRSGAELAAAVEREGRIPLPPYIRREPGPADRERYQTVFARIPGSAAAPTAGLHFTSSALARLAARGVERTAVTLHVGPGTFLPIRTEDIARHRMHEERYRVPEEAARATAACRARGGRVVAVGTTAVRTLESAWKGGNLAVGEGRTHIFIRPGYSFEVVDALVTNLHLPRSTLLMLVCAFAGREQVMGAYELAVREGYRFFSYGDAMFLS

SEQ ID NO: 63354 - protein, 345 aa, Anaeromyxobacter sp.
  REGION 1..345: note = sp|B4UID2|QUEA_ANASK S-adenosylmethionine:tRNA ribosyltransferase-isomerase OS=Anaeromyxobacter sp. (strain K) OX=447217 GN=queA PE=3 SV=1
MRLSDFDFALPEGLVAQAPVTPRDASRLMVLAPGEGAPAHRGFADLPELLAPGDLLVFNDTRVIPARLLGHKASGGKVELLLCEPLEGGLGRRWRAMGQASKPIREGAVLTFDGLEARVDGVEGEGFYRVTLDRQGPELEAALGRAGRIPLPPYIRRAPDAEDAARYQTIWARAPGSAAAPTAGLHFTEPLLARLAARGIRRTAVTLHVGPGTFLPIRGDDLDLHRMHGERYEVSPAAAEELAATRARGGRIVAVGTTSVRTLESAWRDGAVAAGPGRTELFIRPGHPFHAVDAMVTNFHLPRSTLLVLVCAFGGQGRVLAAYREAVARGYRFFSYGDAMLVLRR

SEQ ID NO: 63355 - protein, 310 aa, Anaeroplasma bactoclasticum
  REGION 1..310: note = tr|A0A397S1B5|A0A397S1B5_9MOLU S-adenosylmethionine:tRNA ribosyltransferase-isomerase; OS = Anaeroplasma bactoclasticum OX=2088 GN=queA PE=3 SV=1
MVLDKKTKTWEHKHFTDIIDYLDSNDVLVLNDTKVIPARLIGTRDTGGVTEVLLLKDLGENVWQTLARPQRKVHIGQIISFGDGMLKAECIEKEDQGICKFKLIYDGILVEILDKLGEMPLPPYIHEKLADKDRYQTVYAKHPGSAAAPTAGLHFTPEILKKLEEKGVELIYVTLHVGLGTFRPVEEEDLTNHVMHSEYYEISKEAAERLNLAKKNGKRIVAVGTTSTRTLESAYDNGFKETCANTSIFIYPGYKFKAIDAQITNFHLPKSTLIMLVSAFAGREFILDAYKEAVKEKYRFFSFGDAMFIK

SEQ ID NO: 63356 - protein, 342 aa, Anaerorhabdus furcosa
  REGION 1..342: note = tr|A0A1T4LJW7|A0A1T4LJW7_9BACT S-adenosylmethionine:tRNA ribosyltransferase-isomerase; OS = Anaerorhabdus furcosa OX=118967 GN=queA PE=3 SV=1
MKTSEFDFELPESLIAQHPLDDRTTSRLLVVHKNTGELEHKHFYDIVNYFKKGDVLVRNNTRVIPARLFGTKEETGAHVELLLLKQEGDLWECLVGNARVVKLGTVISFNEGELKAECIGIGDKGIRKMRMIYDGIFMEILENLGQVPLPPYITEKLDDAERYQTVYAKIKGSAAAPTAGLHFTDEIFDQLREKGVIITDVTLHVGLGTFRPMDTETIEDHIMHSELYWMSQETADLCNLAKQEGRRIISVGTTSTRTLEAIYKTYGTFKECHGETDIFIFPGYKWEAVDCIITNFHLPKSTLIMMISSFASKDLIFKAYKEAIDKEYRFFSFGDCMMITNE

SEQ ID NO: 63357 - protein, 341 aa, Anaerosphaera aminiphila
  REGION 1..341: note = tr|A0A1M5RFX6|A0A1M5RFX6_9FIRM S-adenosylmethionine:tRNA ribosyltransferase-isomerase; OS = Anaerosphaera aminiphila DSM 21120 OX=1120995 GN=queA; PE = 3 SV=1
MKTSDFNYDLPKELIAQHPLEKRSNSRLLLLNKKTGEIKHEHFYDIYDHLNKGDVLVLNDTRVLPARIHGSREGKEEHIEFLLLKRLNGGDVWECLCKPGKKVKIGTKIFFSDKLKAEVIDIAEDGNRFIEFKYDGIFEEILDELGEMPLPPYITEKLEDKERYQTVYSKVEGSAAAPTAGLHFTLELLEKLEEKGVEILYITLHVGLGTFRPVKVDDVKNHNMHSEFYVISEEVAEKINRAKSENRRIVSVGTTSVRTLETASDEDGFVKESSGWTDIFIYPGYKFKCVDALITNFHLPESTLLMLVSAFSSKDIILNAYKVAVDEKYRFFSFGDAMFLY

SEQ ID NO: 63358 - protein, 340 aa, Anaerosphaera sp.
  REGION 1..340: note = tr|A0A437S866|A0A437S866_9FIRM S-adenosylmethionine:tRNA ribosyltransferase-isomerase; OS = Anaerosphaera sp. GS7-6-2 OX=2487351 GN=queA PE=3 SV=1
MNTSDFNYNLPKDLIAQHPLEDRTESKLLLLNKRTGEVEHSHFYNILDYLNKGDLLVLNDTRVIPARLFGSREGKEESIEFLLLKRVEGDIWECLCKPGKKAKIGTKVFFSDKLKAEVVEISEEGNRFIEFSYNGIFEELLDELGEMPLPPYITEKLKDKERYQTVYSKIEGSAAAPTAGLHFTKELLEKIEDKGIEIAYITLHVGLGTFRPVKVDDVKNHNMHSEFYIINNDAASKINKAKSENRRVISVGTTSVRTIETASDENGFVKESKGWTDIFIYPGYNFKCVDALITNFHLPESTLIMLVSAFASRDMVLNAYKEAVEKRYRFFSFGDAMFLY

SEQ ID NO: 63359 - protein, 342 aa, Anaerosphaera sp.
  REGION 1..342: note = tr|A0A1E9AL53|A0A1E9AL53_9FIRM S-adenosylmethionine:tRNA ribosyltransferase-isomerase; OS = Anaerosphaera sp. HMSC064C01 OX=1739304 GN=queA PE=3; SV = 1
METKDFYYDLPEELIAQHPIDKRDESRLMVLDRKTGKVEHMIFHDIINLLHEGDVLVANDSKVIPARLFGNRPGKEEKIEVLLISQTEEDTWKTLVKPGKKMKIGSEIEFGHGLLRAEVVDIDDDGVRYIKFKYDGIFLEILNELGEMPLPPYIKERLEDKDRYQTVYAKNLGSAAAPTAGLHFTKELLKELEEKGVKIVYLTLHVGLGTFRPVKVTDVEKHKMHSEFYNLSEEASEIINKAKKEGRRVIAVGTTTVRTLETIAAKGEIKASHGWTDIFIYPGFEYKAVDALITNFHLPESTLIMLVSAFASKEMILNAYAEAVKERYRFFSFGDAMFILDR

SEQ ID NO: 63360 - protein, 339 aa, unidentified
  source 1..339: note = Anaerospora hongkongensis
  REGION 1..339: note = tr|A0A4R1PUV3|A0A4R1PUV3_9FIRM S-adenosylmethionine:tRNA ribosyltransferase-isomerase; OS = Anaerospora hongkongensis OX=244830 GN=queA PE=3 SV=1
MLLSDYYYDLPAELIAQFPLEPRDHSRLMVLDRKTGVVSHQHFYNLPDYLEPGDTLVFNNTRVIPARLIGTRADTGGKVEVFLLNRLNHNEWETLVKPGKRARPGMTIKFGDELSCEILDSTDFGGRIVRFTFQGAFEAILDRLGETPLPPYIRERLEDSERYQTVYSRENGSAAAPTAGLHFTEEMLQKIQQMGINLAFVTLHIGLGTFRPVSVADITQHVMHREYYSISPEAAQIINRTKEQGKRVIAVGTTSVRTLETVGASGRIEAGSGWTDIFMYPGFQFHMIDAMVTNFHLPESTLLMLISAFADRESILSAYQEAVDKSYRFFSFGDAMLIL

SEQ ID NO: 63361 - protein, 344 aa, Anaerosporobacter mobilis
  REGION 1..344: note = tr|A0A1M7EMY3|A0A1M7EMY3_9FIRM S-adenosylmethionine:tRNA ribosyltransferase-isomerase; OS = Anaerosporobacter mobilis DSM 15930 OX=1120996 GN=queA; PE = 3 SV=1
MKTKDFDFYLPEELIAQDPLEDRSSSRLLVLNKETGDIEHQIFHNITQYLRKGDCLVINNTKVIPARLIGEKEGTGAKIELLLLKRKENDIWETLVKPGKKARVGTRVVFGDGLLIGEIVDVLDEGNRLVQFHYQGIFEEILDQLGQMPLPPYITHQLEDKNRYQTVYAKYEGSAAAPTAGLHFTKELLKQIEDMGVVIANVTLHVGLGTFRPVKVDDVQSHHMHSEFYLVEEEEAKKINDAKKHGNRVICVGTTSCRTVESASDENGMVKAGSGDTEIFIYPGYKFKVLDALITNFHLPESTLLMLVSALAGKEHIMHAYDIAVKEKYRFFSFGDAMFINTND

SEQ ID NO: 63362 - protein, 339 aa, unidentified
  source 1..339: note = Anaerosporomusa subterranea
  REGION 1..339: note = tr|A0A154BU69|A0A154BU69_ANASB S-adenosylmethionine:tRNA ribosyltransferase-isomerase; OS = Anaerosporomusa subterranea OX=1794912 GN=queA PE=3 SV=1
MKLSEFDYDLPEQLIAQHPIEPRDSSRLLVLDRASTEIRHGMFKDLLEYISPGDTLVFNDTRVIPARLMGRRADTGGQVEVFLLSEKTEGEWEVLVKPGKRAKPGMVIEFGPELSCEVLSGTDFGGRVVRFAFSGIFAEILDRLGETPLPPYIHERLSDSERYQTVYSRQRGSAAAPTAGLHFTPALLSQIKEKGARLAFITLHVGLGTFRPVAAEDITDHVMHREYFSVSEEAAEAVNQAKEQGGRVIAVGTTSIRTLETAVRNGRLSAGSGWTEIFIYPGYQFQLVDGIITNFHLPKSTLIMLISAFAGRERVLAAYKEAVQREYRFFSFGDAMLLL

SEQ ID NO: 63363 - protein, 357 aa, Anaerostipes caccae
  REGION 1..357: note = tr|B0MJ32|B0MJ32_ANACD S-adenosylmethionine:tRNA ribosyltransferase-isomerase OS=Anaerostipes caccae (strain DSM 14662 / NCIMB 13811 / L1-92) OX=411490 GN=queA; PE = 3SV=1
MLYYPIEKKLEKTGAIMKTSDFTFDLPEELIAQDPLTDRSSSRLLVLDKETGEIRHEGFRNIAGYLKRGDCLVLNDTKVIPARLIGEKEGTGAKIEVLLLKRKQDNTWETLVKPGRKAKPGTRISFGQGKLVGEVTDIVDEGNRLVKFEFDGIFEEVLDELGQMPLPPYITHQLKDKNRYQTVYAKHEGSAAAPTAGLHFTKELLKEIEEKGIRLAYVTLHVGLGTFRPVKVEDVTEHHMHSEFYVVDEEAAEKINKTRKEGGRIISVGTTSTRTLESAADENGFIEPKSGWTEIFIYPGYKFKVIDGLITNFHLPESTLLMLVSALAGKEHILKAYDEAVKERYRFFSFGDAMFIM

SEQ ID NO: 63364 - protein, 342 aa, unidentified
  source 1..342: note = Anaerostipes hadrus
  REGION 1..342: note = tr|A0A174C8N0|A0A174C8N0_ANAHA S-adenosylmethionine:tRNA ribosyltransferase-isomerase; OS = Anaerostipes hadrus OX=649756 GN=queA PE=3 SV=1
MKVSDFTFDLPEELIAQDPLEDRSSSRLLTLDKNTGEIGHDIFHNIVNYLKPGDCLVLNNTKVIPARLIGAKEETGGKVEVLLLKRKQDNVWETLVKPGKKARPGARISFGDGKLVGEVIDVVDEGNRLVKFEYEGIFEEVLDELGQMPLPPYITHQLKDKNRYQTVYAKYDGSAAAPTAGLHFTKELLQQIKDMGVNIAYVTLHVGLGTFRPVKVDDVLDHHMHSEFYRIEEDDAKLINETKKNGGRVISVGTTSTRTLESVAEEDGTLHAKSGWTDIFIYPGYKFKVIDGLITNFHLPESTLLMLVSALAGREHILNAYNIAVKERYRFFSFGDAMFIHP

SEQ ID NO: 63365 - protein, 342 aa, unidentified
  source 1..342: note = Anaerostipes hadrus
  REGION 1..342: note = tr|A0A173T2A2|A0A173T2A2_ANAHA S-adenosylmethionine:tRNA ribosyltransferase-isomerase; OS = Anaerostipes hadrus OX=649756 GN=queA PE=3 SV=1
MKVSDFTFDLPEELIAQDPLEDRSSSRLLTLDKNTGEIGHDVFHNIVNYLKPGDCLVLNNTKVIPARLIGAKEETGGKVEVLLLKRKQDNVWETLVKPGKKARPGARISFGDGKLVGEVIDVVDEGNRLVKFEYEGIFEEVLDELGQMPLPPYITHQLKDKNRYQTVYAKYDGSAAAPTAGLHFTKELLQQIKDMGVNIAYVTLHVGLGTFRPVKVDDVLEHHMHSEFYRIEEEDAELINETKKNGGRVISVGTTSTRTLESVAEEDGTLHAKSGWTDIFIYPGYKFKVIDGLITNFHLPESTLLMLVSALAGREHILNAYNIAVKERYRFFSFGDAMFIHP

SEQ ID NO: 63366 - protein, 341 aa, unidentified
  source 1..341: note = Anaerostipes rhamnosivorans
  REGION 1..341: note = tr|A0A4P8IAQ5|A0A4P8IAQ5_9FIRM S-adenosylmethionine:tRNA ribosyltransferase-isomerase; OS = Anaerostipes rhamnosivorans OX=1229621 GN=queA PE=3 SV=1
MKTSDFTFELPEELIAQNPLADRSSSRLLVLDKESGEIRHEVFKNVVSYLKKGDCLVLNDTKVLPARLIGEKEGTGAKIEVLLLKRRQDNVWETLVKPGRKAKPGTRISFGGGRLVGEVTDIVDEGNRLVRFEFEGIFEEVLDELGQMPLPPYITHQLEDKNRYQTVYAKHEGSAAAPTAGLHFTKDLLKEIEEKGVRLAYVTLHVGLGTFRPVKVEDVTDHHMHSEFYSVDETAAQAINQTREDGRRIISVGTTSTRTLESAADMDGHIKPKSGWTDIFIYPGYEFKVIDALITNFHLPESTLLMLVSALAGKEHILAAYEEAVRERYRFFSFGDAMFIQ

SEQ ID NO: 63367 - protein, 341 aa, Anaerostipes sp.
  REGION 1..341: note = tr|R6RM81|R6RM81_9FIRM S-adenosylmethionine:tRNA ribosyltransferase-isomerase OS=Anaerostipes sp. CAG:276; OX = 1262699 GN=queA PE=3 SV=1
MKTSDFTFDLPEELIAQDPLTDRSSSRLLVLDKETGEIRHEGFRNIAGYLKRGDCLVLNDTKVIPARLIGEKEGTGAKIEVLLLKRKQDNTWETLVKPGRKAKPGTRISFGQGKLVGEVTDIVDEGNRLVKFEFDGIFEEVLDELGQMPLPPYITHQLKDKNRYQTVYAKHEGSAAAPTAGLHFTKELLKEIEEKGIRLAYVTLHVGLGTFRPVKVEDVTEHHMHSEFYVVDEEAAEKINKTRKEGGRIISVGTTSTRTLESAADENGFIEPKSGWTEIFIYPGYKFKVIDGLITNFHLPESTLLMLVSALAGKEHILKAYDEAVKERYRFFSFGDAMFIM

SEQ ID NO: 63368 - protein, 341 aa, Anaerostipes sp.
  REGION 1..341: note = tr|A0A1Q9K1D7|A0A1Q9K1D7_9FIRM S-adenosylmethionine:tRNA ribosyltransferase-isomerase; OS = Anaerostipes sp. 992a OX=1261637 GN=queA PE=3 SV=1
MNLHDFYFDLPEELIAQDPLEDRSSSRMLVLDKKTGERQHKIFKDVIDYLNPGDCLVLNNTRVLPARLIGAKEGTGAKIEVLLLKRKQDNVWETLVKPGKKARPGARIVFGDNLLVGEVIDVVEEGNRLIRFEYEGIFEEVLDQLGEMPLPPYITHQLKDKERYQTVYAKHNGSAAAPTAGLHFTKELLKKIQEKGIKIANVTLHVGLGTFRPVKVENILDHHMHSEFYSIEEEDAKCINDTKQAGGRIISVGTTSTRTLESVADENGMVRAGSGWTEIFIYPGYQFKVIDGLITNFHLPESTLLMLVSALAGREHILEAYQEAVKERYRFFSFGDAMLII

SEQ ID NO: 63369 - protein, 343 aa, unidentified
  source 1..343: note = Anaerotignum lactatifermentans
  REGION 1..343: note = tr|A0A1M6VJI0|A0A1M6VJI0_9FIRM S-adenosylmethionine:tRNA ribosyltransferase-isomerase; OS = Anaerotignum lactatifermentans DSM 14214 OX=1121323; GN = queA PE=3 SV=1
MKTSEFYFDLPEELIAQEPLKDRSSSRLLVADKNTESISHRHFRDIKEYLKAGDCLVINDTRVLPARLHGERVGTGAHIEVLLLVRKSIDTWEVLVRPGKKARPGDKISFGDGRLTAEVLETIEGGNRIIKFYYEGVFENILDELGEMPLPPYITHKLEDKERYQTVYAKHDGSAAAPTAGLHFTPELLKEIEEMGVKIAHVTLHVGLGTFRPVKAEDILDHEMHSEYYVVEEDQAAIMNEARKNGGRIIAVGTTSTRTLESVTDENGVVHAGSGWTKIFIYPGYTFKAVDCMITNFHLPESTLIMLVSALMGKDFIMRVYEEAVKERYRFFSFGDACLFLTK

SEQ ID NO: 63370 - protein, 343 aa, unidentified
  source 1..343: note = Anaerotignum lactatifermentans
  REGION 1..343: note = tr|A0A1Y3U4X0|A0A1Y3U4X0_9FIRM S-adenosylmethionine:tRNA ribosyltransferase-isomerase; OS = Anaerotignum lactatifermentans OX=160404 GN=queA PE=3; SV = 1
MKTSEFYFDLPEELIAQEPLKDRSSSRLLVADKNTESISHRHFRDVKEYLKAGDCLVINDTRVLPARLHGERVGTGAHIEVLLLVRKSIDTWEVLVRPGKKARPGDKISFGDGRLTAEVLETIEGGNRIIKFYYEGVFENILDELGEMPLPPYITHKLEDKERYQTVYAKHDGSAAAPTAGLHFTPELLKEIEEMGVKIAHVTLHVGLGTFRPVKAEDILDHEMHSEYYVVEEDQAAIMNEARKNGGRIIAVGTTSTRTLESVTDENGVVHAGSGWTKIFIYPGYTFKAVDCMITNFHLPESTLIMLVSALMGKDFIMRVYEEAVKERYRFFSFGDACLFLTK

SEQ ID NO: 63371 - protein, 344 aa, unidentified
  source 1..344: note = Anaerotignum neopropionicum
  REGION 1..344: note = tr|A0A136WFJ7|A0A136WFJ7_9FIRM S-adenosylmethionine:tRNA ribosyltransferase-isomerase; OS = Anaerotignum neopropionicum OX=36847 GN=queA PE=3 SV=1
MKTSDFYFDLPEELIAQEPLADRASSRLLVVNKETGVWEHKYFRNIMDYLRAGDCLVINNTRVLPARLYGERVGTGAAMEILLLTRKDLDTWEVLVRPGKKAKPGDKISFGNGKLVAEVLEVIEGGNRILRFTYEGVFEAILAELGEMPLPPYITHRLEDKERYQTVYAKHEGSAAAPTAGLHFTPELLEEIKAMGIKIAHVTLHVGLGTFRPVKVEDVLAHEMHSEYYVVEQEQADIINETKRNGGRIFSVGTTSTRTLESAADENGIVQAKSGWTQIFIYPGYQFKIIDCLITNFHLPESTLIMLVSALVGKDLTMAAYGEAVKEKYRFFSFGDACLFLTKP

SEQ ID NO: 63372 - protein, 344 aa, unidentified
  source 1..344: note = Anaerotignum propionicum
  REGION 1..344: note = tr|A0A0X1U850|A0A0X1U850_ANAPI S-adenosylmethionine:tRNA ribosyltransferase-isomerase; OS = Anaerotignum propionicum DSM 1682 OX=991789 GN=queA; PE = 3 SV=1
MKTSDFYYDLPEELIAQEPLEDRASSRLLVVEKDTGKWHHKHFRDIKEYLRNGDCLVINDTRVLPARLYGERVGTGAVMEILLLTRKDLDTWEVLVRPGKKAKPGDKISFGKGKLVAEVLEVIEGGNRIIRFTYEGVFEAILDELGEMPLPPYITHRLEDKERYQTVYAKHEGSAAAPTAGLHFTPELLKEIEGMGVKIAHVTLHVGLGTFRPVKAEDILEHEMHSEYYVVEQEQADIINQAKKNGGRIFSVGTTSTRTLESVTDENGLVQAKSGWTQIFIYPSYTFKIVDCLITNFHLPESTLIMLVSALMGKDLTMEVYAEAVKEKYRFFSFGDACLFLTKP

SEQ ID NO: 63373 - protein, 345 aa, unidentified
  source 1..345: note = Anaerotignum sp.
  REGION 1..345: note = tr|A0A401LDU2|A0A401LDU2_9FIRM S-adenosylmethionine:tRNA ribosyltransferase-isomerase; OS = Anaerotignum sp. KCTC 15736 OX=2358141 GN=queA PE=3 SV=1
MKTSDFYFDLPEELIAQEPLADRASSRLMVVHKDSGKREHRHFRDIKEYLRAGDCLVINNTKVLPARLYGERVGTGAAMEILLLVRKDMDTWEVLVRPGKKARPGDRISFGGGKLIAEVLEVIEGGNRIIKFEYEGVFENILEELGEMPLPPYITHKLEDKNRYQTVYAEHEGSAAAPTAGLHFTPELLKEIEDMGVRIAHVTLHVGLGTFRPVKVEDVLEHEMHSEYYVVEPEQAAIMNETKKNGGRIIAVGTTSTRTLESVTDENGVIQPKSGWTKIFIYPGYTFKAVDCLVTNFHLPESTLIMLVSALMGKELVMESYAEAVKERYRFFSFGDACLFLAKEK

SEQ ID NO: 63374 - protein, 342 aa, Anaerotruncus colihominis
  REGION 1..342: note = tr|B0PB28|B0PB28_9FIRM S-adenosylmethionine:tRNA ribosyltransferase-isomerase OS=Anaerotruncus colihominis DSM 17241 OX=445972 GN=queA PE=3 SV=1
MKTSDFFFELPERQIAQTPIEPRDHSRMLYLDRQTGAVKHLHFYDLPDYLDAGDTLIVNTSRVIPARLYGVKEYSGGHMQFLLLEQKERDIWEVMVKPGKKAKTGARFVFGDGLLVGEVLQTVEGGNRLVRMYYEGPSIYPVLEKIGNMPLPPYITAELSDRERYQTIYSKQPGSAAAPTAGLHFTPELIDRLREKGINLANVVLHVGIGTFRPVRVEDVTKHHMHSEHYYLPQETADLINETHARGKRVIGVGTTSCRTVESVASKCGEIKADEGDTSIFIYPGYTFKVLDGLITNFHLPESTLIMLVSAFAGYEHTMRAYQIAVGENYRFFSFGDAMLIL

SEQ ID NO: 63375 - protein, 342 aa, Anaerotruncus colihominis; identical to SEQ ID NO: 63374
  REGION 1..342: note = tr|A0A174Q1K4|A0A174Q1K4_9FIRM S-adenosylmethionine:tRNA ribosyltransferase-isomerase; OS = Anaerotruncus colihominis OX=169435 GN=queA PE=3 SV=1

SEQ ID NO: 63376 - protein, 343 aa, Anaerotruncus sp.
  REGION 1..343: note = tr|A0A498CU56|A0A498CU56_9FIRM S-adenosylmethionine:tRNA ribosyltransferase-isomerase; OS = Anaerotruncus sp. 22A2-44 OX=2321404 GN=queA PE=3 SV=1
MLKTSDFYFDLPQEQIAQTPIEPRDHSRMLHLFRETGELEHRHFYDLPDYLEAGDTLVVNTSRVIPARLFGAKEGTGGHMQFLLLDQKEKDVWEVMVKPGKKAKTGARFVFGDGLLVGEILATVEGGNRLVRMHYEGANIYPILEKIGNMPLPPYITAELEDNERYQTVYSKQLGSAAAPTAGLHFTTELMDKLRQKGVNIAEVILHVGIGTFRPVKVEDVTKHHMHSEHYHLPKETADLINETHARGKRVIGVGTTSCRTVESVATKLGEVCEDDDDTSIFIYPGYRFKVLDGLITNFHLPESTLIMLVSAFAGYEHTMRAYETAVKENYRFFSFGDSMLIL

SEQ ID NO: 63377 - protein, 343 aa, Anaerotruncus sp.
  REGION 1..343: note = tr|R5XUU7|R5XUU7_9FIRM S-adenosylmethionine:tRNA ribosyltransferase-isomerase OS=Anaerotruncus sp. CAG:528; OX = 1262700 GN=queA PE=3 SV=1
MKTSDFFYELPENLIAQTPIEPRNASRLMILHKKTGELEHRIFKDLGEYLRPGDCLVLNDTRVIPARIYGVKEGTGAVVEFLLVSQKENDVWECLCKPGKRAKIGTKFSFGEGKLIGEIIDINEDDGNRFVKFSCDGSIYAVLDEIGAMPLPPYIKEKLKDKERYQTVYSKELGSAAAPTAGLHFTPEMLDEIRKSGVKTAYVTLHVGLGTFRPVKVDDVTKHKMHTEHYIMPQKTADMINETKKNGGRVICVGTTSCRTVESVATKNGCVCADEDDTSIFIYPGYEFKCMDALITNFHLPESTLIMLVSAFAGFDNIMNAYNTAVAEKYRFFSFGDAMFIED

SEQ ID NO: 63378 - protein, 343 aa, Anaerovibrio lipolyticus
  REGION 1..343: note = tr|A0A1M6GJJ1|A0A1M6GJJ1_9FIRM S-adenosylmethionine:tRNA ribosyltransferase-isomerase; OS = Anaerovibrio lipolyticus DSM 3074 OX=1120997 GN=queA; PE = 3 SV=1
MKLTEFDYNLPEELIAQTPVEPRNSSRLMVLDPVDETIEHRHFYDLKEYLEPGDTLIFNDTRVLPARLLGWREGTGGKVEVFLLRRIDGDTWETLVKPGRKAREGQVVRFSDELTCIVQDSTDFGGRIVKFNYEGIFEEILDRLGETPLPPYIHEKLEDSERYQTVYSREKGSAAAPTAGLHFTKEQMAELKDMGVNLGFVTLHVGLGTFRPVSVDNIEEHVMHKEYYSISQETAELIKATKAAGKRVIAVGTTSIRTLESAATSVGEINGRTDWTNIFIYPGYEFKIVDGIITNFHLPKSTLIMLISAFAGREFVLKAYETAVEEKYRFFSFGDAMMIKRKG

SEQ ID NO: 63379 - protein, 343 aa, Anaerovibrio lipolyticus; identical to SEQ ID NO: 63378
  REGION 1..343: note = tr|A0A0B2JW44|A0A0B2JW44_9FIRM S-adenosylmethionine:tRNA ribosyltransferase-isomerase; OS = Anaerovibrio lipolyticus OX=82374 GN=queA PE=3 SV=1

SEQ ID NO: 63380 - protein, 343 aa, Anaerovibrio sp.
  REGION 1..343: note = tr|A0A1X1Q7I4|A0A1X1Q7I4_9FIRM S-adenosylmethionine:tRNA ribosyltransferase-isomerase; OS = Anaerovibrio sp. JC8 OX=1240085 GN=queA PE=3 SV=1
MKLTEFDYNLPEELIAQTPVEPRNSSRLMVLDPVEETIEHRHFYDLKEYLEPGDTLIFNDTRVLPARLLGWREGTGGKVEVFLLRRIDGDTWETLVKPGRKAREGQIVRFSDELTCTVQDSTDFGGRIVKFNYEGIFEEILDRLGETPLPPYIHEKLEDSERYQTVYSREKGSAAAPTAGLHFTKEQMAELKDMGINLGFVTLHVGLGTFRPVSVDNIEEHVMHKEYYSIPQETADLIKATKAAGKRVIAVGTTSIRTLESAATGVGEIAGRTDWTNIFIYPGYEFKIVDGIITNFHLPKSTLIMLISAFAGREFVLKAYEKAVEEKYRFFSFGDAMMIKRRG

SEQ ID NO: 63381 - protein, 341 aa, Anaerovirgula multivorans
  REGION 1..341: note = tr|A0A239DR43|A0A239DR43_9FIRM S-adenosylmethionine:tRNA ribosyltransferase-isomerase; OS = Anaerovirgula multivorans OX=312168 GN=queA PE=3 SV=1
MKTKDFDFQLPEELIAQRPLEKRDHSKLMVLDKTTGEMNHTHFYDIINYLNPRDCLVLNDTRVIPARLIGEKESTGGKIEFLLLKRIDLNTWETLVKPGKKAKIGSKFQFGNGLLVAEVMDIREEGSRIVKFLYEGIFEDILDQLGKMPLPPYITESLEDNERYQTVYSKHTGSAAAPTAGLHFTEELLNKIEGKGVKIVYITLHVGLGTFRPVKVEDLQNHKMHAEYYMIDSETAKTINETKCQGGKIIAVGTTSCRTLESAAIEKGILNESSGWTDIFIYPGYQFKIIDQLITNFHLPESTLIMLVSALAGKDNVLRAYEVAVEQKYRFFSFGDSMFIK

SEQ ID NO: 63382 - protein, 361 aa, Ancylobacter aquaticus
  REGION 1..361: note = tr|A0A4R1ICG3|A0A4R1ICG3_ANCAQ S-adenosylmethionine:tRNA ribosyltransferase-isomerase; OS = Ancylobacter aquaticus OX=100 GN=queA PE=3 SV=1
MRVDLFDFDLPPERIALRPVSPRDAARMLVVRPGATPELADAQVRDLPDLLAPGDALVVNDTRVFPARLDGIRRRAASQGEGVQVEAMLHKRLGPDSWLALARPGKRLAVGDRIEFSAAQGAVTLAAHIEGKGEGGEVTLRFAASGPALDAAIAAIGHIPLPPYIAAKRPDDAQDRADYQTMFAAHEGSVAAPTAGLHFTPELIARLAARGVETHRVTLHVGAGTFLPVKADDTSDHRMHAEWGEVSADTAAALNAVKARGGRVVTVGTTATRLIESAASEAGRLAAWRGETDIFITPGSDFRFIDGMLTNFHLPRSTLVMLVAAFVGHDTQKRAYAHAIAQGYRFYSYGDACLLLPKARP

SEQ ID NO: 63383 - protein, 361 aa, Ancylobacter aquaticus
  REGION 1..361: note = tr|A0A431QTV2|A0A431QTV2_ANCAQ S-adenosylmethionine:tRNA ribosyltransferase-isomerase; OS = Ancylobacter aquaticus OX=100 GN=queA PE=3 SV=1
MRVDLFDFDLPPERIALRPVSPRDAARMLVVRPGAVPELTDAQVRDLPELLAPGDALVVNDTRVFPARLDGIRRRSSSQGEGVKVEAMLHKRLGPDAWLALARPGKRLAPGDTIEFAAAEGTDRLAAHIEAKGEGGEVTLRFAAAGPALDTAIAAIGHIPLPPYIAAKRADDAQDRADYQTMFAAHEGSVAAPTAGLHFTPELIARLAARGVETHRVTLHVGAGTFLPVKADDTQDHRMHAEWGEVSPEAAASLNAVKARGGKVVTVGTTATRLIESAASEDGRLSAWRGETDIFITPGTRFRFIDGMLTNFHLPRSTLVMLVAAFVGHDTQKRAYAHAIASGYRFYSYGDACLLLPQARP

SEQ ID NO: 63384 - protein, 361 aa, Ancylobacter rudongensis
  REGION 1..361: note = tr|A0A1G4QPL9|A0A1G4QPL9_9RHIZ S-adenosylmethionine:tRNA ribosyltransferase-isomerase; OS = Ancylobacter rudongensis OX=177413 GN=queA PE=3 SV=1
MRVDLFDFDLPPERIALRPVSPRDAARMLVVRPGSVPELTDAQVRDLPELLAPGDALVVNDTRVFPARLDGIRRRSSSQGEGVKVEAMLHKRLGPDAWLALARPGKRLAPGDTIEFASPNGGAVLAARVEGKGEGGEVTLRFAAAGPALDSAIAAIGHIPLPPYIAAKRADDAQDRADYQTMFAAHEGSVAAPTAGLHFTPELIARLAARGVETHRVTLHVGAGTFLPVKADDTQDHRMHAEWGEVSPEAAASLNAVKARGGKVVTVGTTATRLIESAASGDGRLSAWRGETDIFITPGTRFRFIDGMLTNFHLPRSTLVMLVAAFVGHDTQKGAYAHAIASGYRFYSYGDACLLLPQARP

SEQ ID NO: 63385 - protein, 349 aa, unidentified
  source 1..349: note = Ancylomarina sp.
  REGION 1..349: note = tr|A0A4V1MZT6|A0A4V1MZT6_9BACT S-adenosylmethionine:tRNA ribosyltransferase-isomerase; OS = Ancylomarina sp. SHSM-M15 OX=2501299 GN=queA PE=3 SV=1
MKLSKFKFNLPQELIALHPAYNRDESRLMVLHKDTGEIEHRIFKDVIEYFDDKDVMVFNNTKVFPARLYGNKEKTGAEIEVFLLRELNREQRLWDVLVDPARKIRIGNKLYFGDDDLLVAEVIDNTTSRGRTLRFLFDGPYDEFKEALYSLGETPLPKFINREVEAEDAERFQTIFAKHEGAVAAPTAGMHFSRELMKRLEIKGINFAEITLHVGLGNFRDVDVEDLTKHRMDSEQIFINDKAVEIVNRAKEGKHKVCAVGTTVVRTLESSVSTMGTLKPFEGWTNKFLFPPYDFSIPDAMISNFHLPYSTLMMMVAAFGGYDKVMECYKLAIKEKYRFGTYGDAILII

SEQ ID NO: 63386 - protein, 351 aa, unidentified
  source 1..351: note = Ancylomarina sp.
  REGION 1..351: note = tr|A0A425Y860|A0A425Y860_9BACT S-adenosylmethionine:tRNA ribosyltransferase-isomerase; OS = Ancylomarina sp. M1P OX=2283627 GN=queA PE=3 SV=1
MKLSKFKFNLPQELIALHPAYNRDESRLMVLHKDTGEIEHRIFKDVIEYFDDKDVMVFNNTKVFPARLSGNKEKTGAEIEVFLLRELNREQRLWDVLVDPARKIRIGNKLYFGDDDSLVAEVIDNTTSRGRTLRFLFDGSYEEFKEALYGLGETPLPRSIIEKRKVEEEDAERFQTIFAKHEGAVAAPTAGMHFSRELMKRLEIKGVDFAEVTLHVGLGNFRDVDVEDLTKHRMDSEQIFINDEAVSIVNKAKEGKHKVCAVGTTTVRTLESSVSTMGTLKPFEGWTNKFLFPPYDFSIPDAMISNFHLPYSTLMMMVAAFGGYDKVMECYEIAIKEKYRFGTYGDAILII

SEQ ID NO: 63387 - protein, 411 aa, unidentified
  source 1..411: note = Ancylomarina subtilis
  REGION 1..411: note = tr|A0A4Q7VJE2|A0A4Q7VJE2_9BACT S-adenosylmethionine:tRNA ribosyltransferase-isomerase; OS = Ancylomarina subtilis OX=1639035 GN=queA PE=3 SV=1
MEVRTEDTIMNPQCIQISDFTYDLPDEKIAKYPLGNREESKLLVYRNGEIQERGFRNLPEEITEGTTMVFNNTKVIQARLIFYKETGARIEIFCLEPLNPADYNLAFQAKGVCTWKCIIGNLRKWKSGVLKMSFIFEGKEEYLCAEHIENLDGAHEIKFTWDNQELSFSEVLELTGKIPIPPYLNRDTENTDLVRYQTVYSKHEGSVAAPTAGLHFTDSVFNRLHENGVKRAELTLHVGAGTFKPVKAEQIGDHEMHTEHIQVNKDSLQQIIDAENGIVAVGTTSVRTLESLYWLGVKLLTGKENPYLLEQWDAYNLDGTYSRVDAYQAIIDFMKKENLSLFNAATQIIIAPGYEFKIISGLVTNFHQPQSTLLLLISALVGERWRDIYDYALNNKFRFLSYGDSSLLMKS

SEQ ID NO: 63388 - protein, 349 aa, unidentified
  source 1..349: note = Ancylomarina subtilis
  REGION 1..349: note = tr|A0A4Q7VM27|A0A4Q7VM27_9BACT S-adenosylmethionine:tRNA ribosyltransferase-isomerase; OS = Ancylomarina subtilis OX=1639035 GN=queA PE=3 SV=1
MKLSKFKFNLPQELIALHPAYNRDESRLMVLHKDTGEIEHRIFKDVIEYFDDKDVMVFNNTKVFPARLYGNKEKTGAEIEVFLLRELNREQRLWDVLVDPARKIRIGNKLYFGDDDLLVAEVIDNTTSRGRTLRFLFDGPYDEFKEALYSLGETPLPKFINREVEAEDAERFQTIFAKHEGAVAAPTAGMHFSRELMKRLEIKGIDFAEITLHVGLGNFRDVDVEDLTKHRMDSEQIFIDDKAVEIVNRAKEGKHKVCAVGTTVVRTLESSVSTMGTLKPFEGWTNKFLFPPYDFSIPDAMISNFHLPYSTLMMMVAAFGGYDKVMECYQIAIKEKYRFGTYGDAILII

SEQ ID NO: 63389 - protein, 406 aa, unidentified
  source 1..406: note = Anditalea andensis
  REGION 1..406: note = tr|A0A074KZ53|A0A074KZ53_9BACT S-adenosylmethionine:tRNA ribosyltransferase-isomerase; OS = Anditalea andensis OX=1048983 GN=queA PE=3 SV=1
MPEVSKIKLSDYQYILPDERVAKFPLAKRDESKLLHFEDGKISHVRFKELPDLIPSDSLVVFNNTKVIPARIFFIKPTGAKIEIFLLKPVEPTTEINVVMLSRGPVIWETMIGNLKRWKEGETLKGELVLDGNVVSIEATLVNRDSRLVSFTWSGSMAFCHVIEACGEVPLPPYLNRAAVAEDKPRYQTVYSKKQGAVAAPTAGLHFTPQTLTDISDKGILLDYLTLHVSAGTFQPIKEESVDQHPMHSEQVIATRTNIQNILEAKKNILAVGTTSMRSLESLYWYGVKLIEGEDDLFFIPKLYPYREYKNLPNVKESFKAILDHMNDRDLDEITGSTEIFIMPGYDFKVCNGLVTNFHQPGSTLILLVAAFTQGNWRKIYDEAMSGSYRFLSYGDSSLLWYNKIA

SEQ ID NO: 63390 - protein, 349 aa, unidentified
  source 1..349: note = Anditalea andensis
  REGION 1..349: note = tr|A0A074L1K8|A0A074L1K8_9BACT S-adenosylmethionine:tRNA ribosyltransferase-isomerase; OS = Anditalea andensis OX=1048983 GN=queA PE=3 SV=1
MKLSDFKFDVPRKLISLYPQSNRDESRLMVVHKKTGQIEHKVFKDIIDYFDEGDVFVTNNTKVFPARLYGNKEKTGAKIEVFLLRELNQELRLWDVLVDPARKIRVGNKLYFGDSDLVAEVIDNTTSRGRTIRFLFDGTDEEFYKTIDTLGETPILKEFIERPIETEDRERYQTIYAEHVGAVAAPTAGMHFTHHLMRKLEIKGVEVSPITLHIGLGTFRQVDVEDLTKHKMDSENYDIPSETVELVNRALDAKKKVVSVGTTSLKTIESSVTANGRLKQSSGWTDKFIIPPYDFKIANALVTNFHLPESTLLMTTSAFGGYDLIMKAYQEAIKEKYKFFSYGDAMLII

SEQ ID NO: 63391 - protein, 341 aa, unidentified
  source 1..341: note = Andreesenia angusta
  REGION 1..341: note = tr|A0A1S1V8Y7|A0A1S1V8Y7_9FIRM S-adenosylmethionine:tRNA ribosyltransferase-isomerase; OS = Andreesenia angusta OX=39480 GN=queA PE=3 SV=1
MKKSDFNFELPEELIAQTPLEDRTGSRLLIANSETGELIHGKFTDILEYLEEGDTLVMNNTKVIPARIYGKKMDTGAGIEFLLLKDLGDNRWETLVKPGKKAKVGAEIEFGDGLLACRVEDILEDGTRIVKFEYEGIFNEMLESLGEMPLPPYITERLEDRGRYQTVYAEVEGSAAAPTAGLHFTDELLEAARSKGVNIAYVTLHVGLGTFRPVKEDDIDDHIMHSEYYEIGEETARIVNETKKRGNRVIAVGTTSVRTLESCADENNMAEAKSEETDIFIYPGYEFKLVDRIITNFHLPESTLIMLVSAKLGSENTLKAYREAVDQRYRFFSFGDAMFII

SEQ ID NO: 63392 - protein, 341 aa, Andreprevotia lacus
  REGION 1..341: note = tr|A0A1W1XLA8|A0A1W1XLA8_9NEIS S-adenosylmethionine:tRNA ribosyltransferase-isomerase; OS = Andreprevotia lacus DSM 23236 OX=1121001 GN=queA PE=3; SV = 1
MQVADFDYHLPEHLIAQFPPEVRGASRLLHVDGAKLADGMFADLPKLLRVGDILVFNDTKVIKARLFGEKASGGKIEALVERVLDEHRALAHVRASKAPKPGTVLHFNGGASAVMVERRGDLFLLEFAGEQTVLELLEHAGELPLPPYITHTPDDDDAKRYQTVYARDPGAVAAPTAGLHFTEDLLHTLRGMGVHTAFLTLHVGAGTFQPVRVDDVADHVMHHERYSIPAATVDAIKAAKAAGGRVIAVGTTSLRALEAASQHGLLAEPEGDTDIFITPGYQFHAVDRLITNFHLPKSTLLMLVSAFAGYDVMRSAYAHAVAQGYRFFSYGDAMLLEPAQS

SEQ ID NO: 63393 - protein, 342 aa, Aneurinibacillus aneurinilyticus
  REGION 1..342: note = tr|U1YBK4|U1YBK4_ANEAE S-adenosylmethionine:tRNA ribosyltransferase-isomerase OS=Aneurinibacillus aneurinilyticus ATCC 12856 OX=649747 GN=queA PE=3 SV=1
MNVNDFDFHLPEELIAQNPLQERTGSRLLVLDKRTGDMEHRTFTDLKRYLKAGDTLVLNDTRVIPARLFGVKEGTGAHIEVLLLKPLGDDRWETLVRPGKRVKPGTRIVFGEHLLVAECEGNTEVGGRIVRFEYEGIFNELLDQLGEMPLPPYIKEQLEDNERYQTVYAKHRGSAAAPTAGLHFTEEYLEELKAMGVQLAFVTLHVGLGTFRPVAADVVEEHEMHSEFYTLTEENARMINETKARGGRIIAVGTTSCRTLETIGQKHGGKLVAAEGWTNIFIYPGYKFHVIDGLVTNFHLPKSTLVMLVSALAGRENILRAYNEAVNQKYRFFSFGDAMLIL

SEQ ID NO: 63394 - protein, 342 aa, Aneurinibacillus danicus
  REGION 1..342: note = tr|A0A511V2D2|A0A511V2D2_9BACL S-adenosylmethionine:tRNA ribosyltransferase-isomerase; OS = Aneurinibacillus danicus OX=267746 GN=queA PE=3 SV=1
MDVNDFDFYLPETLIAQNPLPDRTSSRLLVLDKRTGEVEHRTFTDLKRYLKAGDTLVLNDTRVIPARLFGVKEGTGAHIEVLLLKPLGEDRWETLVRPGKRVKPGTRIVFGDGLLIAECEESTDVGGRVVRFEYDGIFNELLDQLGEMPLPPYIKAQLEDNERYQTVYAKHRGSAAAPTAGLHFTEEYLEELKAMDVNLAFVTLHVGLGTFRPVSVDTVEEHEMHSEFYTLTEENARIINETKTNGGRIIAVGTTSCRTLETIGRKYGGKLVAEEGWTSIFIYPGYEFSVIDGLVTNFHLPKSTLVMLVSALAGRENILRAYDEAVRQEYRFFSFGDAMLIL

SEQ ID NO: 63395 - protein, 342 aa, Aneurinibacillus migulanus
  REGION 1..342: note = tr|A0A0K2WC13|A0A0K2WC13_ANEMI S-adenosylmethionine:tRNA ribosyltransferase-isomerase; OS = Aneurinibacillus migulanus OX=47500 GN=queA PE=3 SV=1
MNVNDFDFHLPEELIAQNPLQERTGSRLLVLNKRTGDMEHRTFTDLKHYLKAGDTLVLNDTRVIPARLFGVKEGTGAHIEVLLLKPLGEDRWETLVRPGKRVKPGTRIVFGDHLLIAECEESTEVGGRIVRFEYEGIFNELLDQLGEMPLPPYIKAQLEDSERYQTVYAKHRGSAAAPTAGLHFTEEYLEELKAMGVQLAFVTLHVGLGTFRPVAADTVEEHEMHSEFYTLTEENARMINETKARGGRIIAVGTTSCRTLETIGQKHGGKLVAAEGWTSIFIYPGYEFRVIDGLVTNFHLPKSTLVMLVSALAGRENILRAYNEAVEQKYRFFSFGDAMLIL

SEQ ID NO: 63396 - protein, 342 aa, Aneurinibacillus migulanus
  REGION 1..342: note = tr|A0A0D1W364|A0A0D1W364_ANEMI S-adenosylmethionine:tRNA ribosyltransferase-isomerase; OS = Aneurinibacillus migulanus OX=47500 GN=queA PE=3 SV=1
MNVNDFDFHLPEELIAQNPLQERTGSRLLVLNKRTGDMEHRTFTDLKHYLKAGDTLVLNDTRVIPARLFGVKEGTGAHIEVLLLKPLGEDRWETLVRPGKRVKPGTRIVFGDHLLIAECEESTEVGGRIVRFEYEGIFNELLDQLGEMPLPPYIKAQLEDSERYQTVYAKHRGSAAAPTAGLHFTEEYLEELKAMGVQLAFVTLHVGLGTFRPVAADTVEEHEMHSEFYTLTEENARMINETKARGGRIIAVGTTSCRTLETIGQKHGGKLVAAEGWTSIFIYPGYEFSVIDGLVTNFHLPKSTLVMLVSALAGRENILRAYNEAVEQKYRFFSFGDAMLIL

SEQ ID NO: 63397 - protein, 342 aa, unidentified
  source 1..342: note = Aneurinibacillus soli
  REGION 1..342: note = tr|A0A0U5ATC2|A0A0U5ATC2_9BACL S-adenosylmethionine:tRNA ribosyltransferase-isomerase; OS = Aneurinibacillus soli OX=1500254 GN=queA PE=3 SV=1
MNVQDFDFYLPEELIAQNPLADRTGSRLLVLDKESGAVAHRQFTGLKEYVKAGDTLVLNDTRVIPARLFGVKEGTGAHIEVLLLKPLGDDKWETLVRPGKRVREGARIQFGDGLLVAECLGSTDIGGRIMKFEYDGIFNELLDQLGEMPLPPYIKAQLSDRERYQTVYAKHSGSAAAPTAGLHFTEDYLEEIKALGVNLAFVTLHVGLGTFRPVSADTIEEHEMHSEFYSLNEENARIINETKARGNRIIAVGTTSCRTLETIGKKYNGELRAEEGWTGIFIYPGYEFSVIDGMVTNFHLPKSTLVMLISALAGREHVLRAYKEAVEEEYRFFSFGDAMLIL

SEQ ID NO: 63398 - protein, 342 aa, Aneurinibacillus sp.
  REGION 1..342: note = tr|A0A109QIJ6|A0A109QIJ6_9BACL S-adenosylmethionine:tRNA ribosyltransferase-isomerase; OS = Aneurinibacillus sp. XH2 OX=1450761 GN=queA PE=3 SV=1
MNVNDFDFYLPEELIAQNPLPERTASRLLVLNKQTGAVEHRQFTDLKGYLKAGDTLVLNDTRVIPARLFGVKEGTGAHIEVLLLKPLGDDCWETLVKPGKRVKPGTRILFGDGLLTAECLDSTEVGGRMIRFEYKGIFNELLDQLGEMPLPPYIKAQLNDSERYQTVYAKHRGSAAAPTAGLHFTKEYLAELKAMGINLAFLTLHVGLGTFRPVMAETVEEHEMHSEYYMLNEENARIINETKARGGRIVAVGTTSCRTLETIGKKHGGKLVAEEGWTNIFIYPGYTFSVIDGLVTNFHLPKSTLVMLVSALAGRENILRAYEEAIRLKYRFFSFGDAMLIL

SEQ ID NO: 63399 - protein, 342 aa, Aneurinibacillus thermoaerophilus; identical to SEQ ID NO: 63398
  REGION 1..342: note = tr|A0A1G7YA34|A0A1G7YA34_ANETH S-adenosylmethionine:tRNA ribosyltransferase-isomerase; OS = Aneurinibacillus thermoaerophilus OX=143495 GN=queA; PE = 3 SV=1

SEQ ID NO: 63400 - protein, 342 aa, Anoxybacillus amylolyticus
  REGION 1..342: note = tr|A0A160F3Z9|A0A160F3Z9_9BACI S-adenosylmethionine:tRNA ribosyltransferase-isomerase; OS = Anoxybacillus amylolyticus OX=294699 GN=queA PE=3 SV=1
MKVDLFDFYLPEELIAQTPLSDREASRLMVLNKRTGEINHETFRAILSYLQAGDCLVLNDTRVLPARLYGEKEGTGAKVEVLLLKQLDGDRWETLVKPAKRVKEGTIITFGDGRLQAVCEGTLEHGGRVLTFHYNGIFYEILESLGEMPLPPYIKEQLEDRERYQTVYARERGSAAAPTAGLHFTEQLLDDIRQKGVHIAFITLHVGLGTFRPVNVENVEEHDMHAEFYQMSEETARLLNDVKQRGGRIIAVGTTSTRTLETIATRHNGTFVAERGWTDIFIYPGYEFRAIDGMVTNFHLPKSTLIMLVSALAGRENVLHAYEEAVKERYRFFSFGDAMLII

SEQ ID NO: 63401 - protein, 342 aa, Anoxybacillus amylolyticus
  REGION 1..342: note = tr|A0A4R1GKE8|A0A4R1GKE8_9BACI S-adenosylmethionine:tRNA ribosyltransferase-isomerase; OS = Anoxybacillus amylolyticus OX=294699 GN=queA PE=3 SV=1
MKVDLFDFHLPEELIAQTPLPDRAASRLMVLDKRTGAIRHETFRNIISYLNPSDCLVLNDTRVMPARLYGEKEETGGTVEVLLLKQLDGDRWETLVKPGKRVKPGTKLTFGEGKLEAVCLDTLEHGGRVLEFSYDGLFYEVLAELGEMPLPPYIKEKLDDPERYQTVYAREIGSAAAPTAGLHFTEELLDAIREKGVHIVFITLHVGLGTFRPVQVDEVEKHDMHAEFYQMSEETAETLNRVREQGGRIIAVGTTSTRTLETIAGKHNGRFVAESGWTDIFIYPGYEFKGIDGLVTNFHLPKSTLIMLVSALAGRENILHAYQVAVKERYRFFSFGDAMLII

SEQ ID NO: 63402 - protein, 343 aa, Anoxybacillus ayderensis
  REGION 1..343: note = tr|A0A0D0HRZ4|A0A0D0HRZ4_9BACI S-adenosylmethionine:tRNA ribosyltransferase-isomerase; OS = Anoxybacillus ayderensis OX=265546 GN=queA PE=3 SV=1
MKIDLFDFYLPEELIAQTPLPNREASRLMVLHKQTGEVTHEPTFRSILSYLKEGDCLVLNDTRVLPARLYGEKEGTGAHIEVLLLKQLSGDQWETLVKPAKRVKVGTTLSFGDGRLRAECVAELEHGGRILSFSYDGIFLEVLESLGEMPLPPYIKEQLDDRERYQTVYAREAGSAAAPTAGLHFTEQLLEDVKKKGVHLAFITLHVGLGTFRPVNVENIEEHDMHAEFYQMTEETANLLNDVKAKGGRIIAVGTTSTRTLETIASRHDGTFVAESGWTDIFIYPGYTFRAIDGMITNFHLPKSTLIMLVSALAGREHVLRAYEEAVKERYRFFSFGDAMLII

SEQ ID NO: 63403 - protein, 343 aa, Anoxybacillus ayderensis
  REGION 1..343: note = tr|A0A1X6MG10|A0A1X6MG10_9BACI S-adenosylmethionine:tRNA ribosyltransferase-isomerase; OS = Anoxybacillus ayderensis OX=265546 GN=queA PE=3 SV=1
MKVDLFDFHLPEELIAQTPLPNREASRLMVLHKQTGEVTHEPTFRSILSYLKEGDCLVLNDTRVLPARLYGEKEGTGAHIEVLLLKQLDGDQWETLVKPAKRVKVGTTLSFGDGRLRAECVAELEHGGRILSFSYDGIFLEVLESLGEMPLPPYIKAQLDDRERYQTVYAREAGSAAAPTAGLHFTQQLLDDVQKKGVHLAFITLHVGLGTFRPVNVEHIEEHDMHAEFYQMTEETANLLNDVKAKGGRIIAVGTTSTRTLETIASRHDGTFVAESGWTDIFIYPGYTFRAIDGMITNFHLPKSTLIMLVSALAGREHVLRAYEEAVKERYRFFSFGDAMLII

SEQ ID NO: 63404 - protein, 345 aa, Anoxybacillus flavithermus
  REGION 1..345: note = tr|B7GFN0|B7GFN0_ANOFW S-adenosylmethionine:tRNA ribosyltransferase-isomerase OS=Anoxybacillus flavithermus (strain DSM 21510 / WK1) OX=491915 GN=queA PE=3 SV=1
MNMKIDLFDFYLPEELIAQTPLPNRDASRLMVLDKQTGEVTHESTFRSILSYLKEGDCLVLNDTRVLPARLYGEKEETGAHIEVLLLKQLDGDQWETLVKPAKRVKVGTIISFGDGRLRAECVAELEHGGRILSFSYDGIFLEVLESLGEMPLPPYIKAQLHDRERYQTVYAREAGSAAAPTAGLHFTEQLLEDVRKKGVHLAFITLHVGLGTFRPVNVENIEEHDMHAEFYQMSEQTAQLLNDVKAQGGRIIAVGTTSTRTLETIASRHDGTFVAESGWTDIFIYPGYTFRAIDGIITNFHLPKSTLIMLVSALAGREHVLRAYEEAVKERYRFFSFGDAMLII

SEQ ID NO: 63405 - protein, 343 aa, Anoxybacillus flavithermus
  REGION 1..343: note = tr|A0A178T6E4|A0A178T6E4_9BACI S-adenosylmethionine:tRNA ribosyltransferase-isomerase; OS = Anoxybacillus flavithermus OX=33934 GN=queA PE=3 SV=1
MKVDLFDFYLPEELIAQTPLPNREASRLMVLDKKTGEVTHEPTFRSILSYLKEGDCLVLNDTRVLPARLYGEKEETGAHIEVLLLKQLDGDQWETLVKPAKRVKVGTIISFGDGRLRAECVAELEHGGRILSFSYDGIFLEVLESLGEMPLPPYIKAQLHDRERYQTVYAREAGSAAAPTAGLHFTEQLLEDVRKKGVHLAFITLHVGLGTFRPVNVENIEEHDMHAEFYQMSEQTAQLLNDVKAQGGRIIAVGTTSTRTLETIASRHDGTFVAESGWTDIFIYPGYTFRAIDGMITNFHLPKSTLIMLVSALAGREHVLRAYEEAVRERYRFFSFGDAMLII

SEQ ID NO: 63406 - protein, 343 aa, Anoxybacillus gonensis
  REGION 1..343: note = tr|A0A0A2SFH1|A0A0A2SFH1_9BACI S-adenosylmethionine:tRNA ribosyltransferase-isomerase; OS = Anoxybacillus gonensis OX=198467 GN=queA PE=3 SV=1
MKVDLFDFYLPEELIAQTPLPNREASRLMVLHKQTGEVTHEPTFRSILSYLKEGDCLVLNDTRVLPARLYGEKEGTGAHIEVLLLKQLDGDRWETLVKPAKRVKIGTTISFGDGRLRAECVAELEHGGRILSFSYDGIFLEVLESLGEMPLPPYIKAQLDDRERYQTVYAREAGSAAAPTAGLHFTQQLLEDVQKKGVHLAFITLHVGLGTFRPVNVEHIEEHDMHAEFYQMTEETANLLNDVKAKGGRIIAVGTTSTRTLETIASRHDGTFVAESGWTDIFIYPGYTFRAIDGMITNFHLPKSTLIMLVSALAGRENVLRAYEEAVKERYRFFSFGDAMLII

SEQ ID NO: 63407 - protein, 343 aa, Anoxybacillus gonensis
  REGION 1..343: note = tr|M5QTG3|M5QTG3_9BACI S-adenosylmethionine:tRNA ribosyltransferase-isomerase OS=Anoxybacillus gonensis; OX = 198467 GN=queA PE=3 SV=1
MKVDLFDFHLPEELIAQTPLPNREASRLMVLHKQTGEVTHEPTFRSILSYLKEGDCLVLNDTRVLPARLYGEKEGTGAHIEVLLLKQLDGDRWETLVKPAKRVKIGTTISFGDGRLRAECVAELEHGGRILSFSYDGIFLEVLESLGEMPLPPYIKAQLDDRERYQTVYAREAGSAAAPTAGLHFTQQLLEDVQKKGVHLAFITLHVGLGTFRPVNVEHIEEHDMHAEFYQMTEETANLLNDVKAKGGRIIAVGTTSTRTLETIASRHDGTFVAESGWTDIFIYPGYTFRAIDGMITNFHLPKSTLIMLVSALAGRENVLRAYEEAVKERYRFFSFGDAMLII

SEQ ID NO: 63408 - protein, 343 aa, Anoxybacillus kamchatkensis
  REGION 1..343: note = tr|A0A4S3L3Z0|A0A4S3L3Z0_9BACI S-adenosylmethionine:tRNA ribosyltransferase-isomerase; OS = Anoxybacillus kamchatkensis OX=196180 GN=queA PE=3 SV=1
MKVDLFDFHLPEELIAQTPLPNREASRLMVLHKQTGEVTHEPTFRSILSYLKKGDCLVLNDTRVLPARLYGEKEGTGAHIEVLLLKQLDGDRWETLVKPAKRVKIGTTISFGDGRLRAECVAELEHGGRILSFSYDGIFLEVLESLGEMPLPPYIKAQLDDRERYQTVYAREAGSAAAPTAGLHFTQQLLEDVQKKGVHLAFITLHVGLGTFRPVNVEHIEEHDMHAEFYQMTEETANLLNDVKAKGGRIIAVGTTSTRTLETIASRHDGTFVAESGWTDIFIYPGYTFRAIDGMITNFHLPKSTLIMLVSALAGRENVLRAYEEAVKERYRFFSFGDAMLII

SEQ ID NO: 63409 - protein, 343 aa, Anoxybacillus kamchatkensis; identical to SEQ ID NO: 63407
  REGION 1..343: note = tr|A0A346DHS6|A0A346DHS6_9BACI S-adenosylmethionine:tRNA ribosyltransferase-isomerase; OS = Anoxybacillus kamchatkensis G10 OX=1212546 GN=queA PE=3; SV = 1

SEQ ID NO: 63410 - protein, 343 aa, Anoxybacillus pushchinoensis
  REGION 1..343: note = tr|A0A1I0T932|A0A1I0T932_9BACI S-adenosylmethionine:tRNA ribosyltransferase-isomerase; OS = Anoxybacillus pushchinoensis OX=150248 GN=queA PE=3 SV=1
MKVDLFDFYLPEELIAQTPLPNREASRLMVLNKQTGEVTHEPTFRSILSYLHEGDCLVLNDTRVLPARLYGEKEGTGAHIEVLLLKQLDGDHWETLVKPAKRVKVGTVISFGDGRLRAECVAELEHGGRVLSFSYDGIFLEVLESLGEMPLPPYIKAQLDDRDRYQTVYAREAGSAAAPTAGLHFTEQLLDDVKKKGVHLAFITLHVGLGTFRPVSVENVEEHDMHAEFYQMTEGTAQLLNDVKAKGGRIIAVGTTSTRTLETIAFRHQGTFVAESGWTDIFIYPGYTFRAIDGMITNFHLPKSTLIMLVSALAGRENVLRAYEEAVKARYRFFSFGDAMLII

SEQ ID NO: 63411 - protein, 343 aa, Anoxybacillus sp.
  REGION 1..343: note = tr|A0A167U486|A0A167U486_9BACI S-adenosylmethionine:tRNA ribosyltransferase-isomerase; OS = Anoxybacillus sp. B7M1 OX=1490057 GN=queA PE=3 SV=1
MKIDLFDFHLPEELIAQTPLANREASRLLMLNKNTGETKHHETFRAILSYLNEGDCLVLNDTRVLPARLYGEKSDTGAKIEVLLLKQVEGDRWETLVKPAKRVKEGTSILFGDGRLKATCRQELEHGGRILEFAYDGVFYEVLESLGEMPLPPYIKEQLDDQERYQTVYARERGSAAAPTAGLHFTEQLLEDIRQKGVHLAFITLHVGLGTFRPVNVENIEEHDMHAEFYQMTEGTARLLNEVKEKGGRIIAVGTTSTRTLETIASRHNGTFIAESGWTDIFIYPGYQFQAIDGMITNFHLPKSTLIMLVSALAGRENVLRAYKEAVEKRYRFFSFGDAMLII

SEQ ID NO: 63412 - protein, 343 aa, Anoxybacillus sp.
  REGION 1..343: note = tr|A0A094M8P3|A0A094M8P3_9BACI S-adenosylmethionine:tRNA ribosyltransferase-isomerase; OS = Anoxybacillus sp. KU2-6(11) OX=1535751 GN=queA PE=3 SV=1
MKVDLFDFYLPEELIAQTPLPNREASRLMVLNKQTGEVTHEPTFRSILSYLKEGDCLVLNDTRVLPARLYGEKEGTGAHIEVLLLKQLDGDQWETLVKPAKRVKIGTMLSFGDGRLRAECVAELEHGGRILSFSYDGIFLEVLESLGEMPLPPYIKAQLDDRERYQTVYAREAGSAAAPTAGLHFTEQLLEDVRKKGVHLAFITLHVGLGTFRPVNVENIEEHDMHAEFYQMTEQTAQLLNDVKAKGGRIIAVGTTSTRTLETIASRHDGMFVAESGWTDIFIYPGYTFRAIDGMITNFHLPKSTLIMLVSALAGREHVLRAYEEAVKERYRFFSFGDAMLII

SEQ ID NO: 63413 - protein, 343 aa, unidentified
  source 1..343: note = Anoxybacillus suryakundensis
  REGION 1..343: note = tr|A0A0K6GQZ0|A0A0K6GQZ0_9BACI S-adenosylmethionine:tRNA ribosyltransferase-isomerase; OS = Anoxybacillus suryakundensis OX=1325335 GN=queA PE=3; SV = 1
MKVDLFDFYLPEELIAQTPLPNREASRLMVLDKRTGKVTHEPTFRSILSYLKEGDCLVLNDTRVLPARLYGEKEGTGAHIEVLLLKQLDGDQWETLVKPAKRVKIGTTLSFGDGRLRAECVAELEHGGRILSFSYDGIFLEVLESLGEMPLPPYIKAQLHDRERYQTVYAREAGSAAAPTAGLHFTEQLLEDVRKKGVHLAFITLHVGLGTFRPVNVENIEEHDMHAEFYQMSEGTAQLLNDVKAKGGRIIAVGTTSTRTLETIASRHDGTFVAESGWTDIFIYPGYTFRAIDGMITNFHLPKSTLIMLVSALAGREHVLRAYEEAVKERYRFFSFGDAMLII

SEQ ID NO: 63414 - protein, 343 aa, Anoxybacillus thermarum
  REGION 1..343: note = tr|A0A0D0QZL8|A0A0D0QZL8_9BACI S-adenosylmethionine:tRNA ribosyltransferase-isomerase; OS = Anoxybacillus thermarum OX=404937 GN=queA PE=3 SV=1
MKVDLFDFHLPEELIAQTPLPNRESSRLMVLNKRTGEIAHEPTFRSILSYLKEGDCLVLNDTRVLPARLYGEKEGTGAHIEVLLLKQVDGDQWETLVKPAKRVKVGTTLSFGDGRLRAECVAELEHGGRILSFSYEGMFLEVLESLGEMPLPPYIKAQLDDRERYQTVYAREAGSAAAPTAGLHFTQQLLEDVQKKGVHIVFITLHVGLGTFRPVNVEHIEEHDMHAEFYQMTEETANLLNDVKAKGGRIIAVGTTSTRTLETIASRHDGTFVAESGWTDIFIYPGYTFRAIDGMITNFHLPKSTLIMLVSALAGREHVLRAYEEAVKERYRFFSFGDAMLII

SEQ ID NO: 63415 - protein, 342 aa, unidentified
  source 1..342: note = Anoxybacillus vitaminiphilus
  REGION 1..342: note = tr|A0A327Y922|A0A327Y922_9BACI S-adenosylmethionine:tRNA ribosyltransferase-isomerase; OS = Anoxybacillus vitaminiphilus OX=581036 GN=queA PE=3 SV=1
MKVDLFDFYLPEELIAQTPLPDREASRLMVLDKKTGKTKHETFRAILSYLKEGDCLVLNDTRVLPARLYGEKEDTGAKIEVLLLKQTEGDRWETLVKPAKRVKIGTTVSFGDGRLKATCIDTLEHGGRVLEFAYNGVFYEVLESLGEMPLPPYIKEQLDDRERYQTVYARERGSAAAPTAGLHFTEQLLDDIRAKGVHIAFITLHVGLGTFRPISVENVEEHDMHAEFYQMTEGTARLLNEVKQKGGRIIAVGTTSTRTLETIASKHNGTFVAESGWTDIFIYPGYEFKAIDGMVTNFHLPKSTLIMLVSALAGRENVLRAYEEAVKERYRFFSFGDAMLII

SEQ ID NO: 63416 - protein, 340 aa, unidentified
  source 1..340: note = Anoxybacter fermentans
  REGION 1..340: note = tr|A0A3Q9HQ93|A0A3Q9HQ93_9FIRM S-adenosylmethionine:tRNA ribosyltransferase-isomerase; OS = Anoxybacter fermentans OX=1323375 GN=queA PE=3 SV=1
MKVVEFDFDLPEELIAQTPIEPRDHSRLLVVFKNRDGWKEGIFKDIVNYLNPGDLLVFNDTKVIPARLYGNKKTGAVIEVLLLTSLSDDKWEVLVRPGKKMRIGDEVIFGNGLLKGKVIDYTDFGGRVMEFSYKGDFDQIIDQLGEMPLPPYITAELKNPDRYQTVYAARRGSAAAPTAGLHFTEQLIEDLRDKGIQTAYVTLHVGLGTFRPVKVDEVEDHVMHSEFYEVSSKTADLINSIRAKGGRVIAVGTTTTRTLETVADENGIIHPGSGWTDIFIYPGYKFKAIDGLITNFHLPKSTLIMMVSALIGREKVMQAYQYAIKKRYRFFSFGDAMLII

SEQ ID NO: 63417 - protein, 349 aa, unidentified
  source 1..349: note = Anseongella ginsenosidimutans
  REGION 1..349: note = tr|A0A4R3KNW5|A0A4R3KNW5_9SPHI S-adenosylmethionine:tRNA ribosyltransferase-isomerase; OS = Anseongella ginsenosidimutans OX=496056 GN=queA PE=3; SV = 1
MKLSQFGFKLPESLIAHSPAGHRDESRLMVVHKDSGKIEHKVFKDVIDYFDEKDVLILNNTKVFPARLYGTKEKTAAKIEVFLLRELNREMRLWDVLVDPARKIRVGNKLYFGENDLLVAEVVDNTTSRGRTIRFLFDGTDEEFREAIEILGETPLPKYIKRRPTPEDKDRYQTIYAKHEGAVAAPTAGLHFSRELMKRLELKGVDFAEVTLHVGLGTFRQVEVEDLTKHKMDSEHFMISPEHAEMVNKALAAKQRICAVGTTSMRAIESAVSANKKLKPANDWTSKFIFPPYEFSIANSMVTNFHTPESTLLMMVAAFGGYDLIMQAYNIAVKEKYRFYSYGDAMLII

SEQ ID NO: 63418 - protein, 349 aa, unidentified
  source 1..349: note = Antarcticibacterium flavum
  REGION 1..349: note = tr|A0A5B7X8A9|A0A5B7X8A9_9FLAO S-adenosylmethionine:tRNA ribosyltransferase-isomerase; OS = Antarcticibacterium flavum OX=2058175 GN=queA PE=3 SV=1
MKLSNFNFELPKELLAEYPAENRDEARLMVLNRKEQTIEHKLFKDVLDYFEPKDVMVLNNTKVFPARLYGNKEKTGARIEVFLLRELNAETKLWDVLVDPARKIRIGNKLYFGEDESLVAEVIDNTTSRGRTLRFLYDGSYAEFRKKLEELGETPLPKYIKREVEPEDQERYQTIYAKKEGAVAAPTAGLHFSKHLLKRLEIKGVDFAEVTLHVGLGTFNPVEVEDLSKHKMDSEEAFIEKAATDTINKAIAEKRRICAVGTTVMRVLESSVSSNHTLNEFSGWTNKFIFPPYDFSIANCMITNFHTPKSTLMMMVSAFAGHDFMKKAYAEAIKENYKFYTYGDAMLIL

SEQ ID NO: 63419 - protein, 349 aa, unidentified
  source 1..349: note = Antarcticibacterium sp.
  REGION 1..349: note = tr|A0A5B8YL05|A0A5B8YL05_9FLAO S-adenosylmethionine:tRNA ribosyltransferase-isomerase; OS = Antarcticibacterium sp. PAMC 28998 OX=2585771 GN=queA; PE = 3 SV=1
MKLSQFGFDLPEELLAEYPAENRDEARLMVLNRKEQTIEHKLFKDVLEYFEPNDVMVLNNTKVFPARLYGNKEKTGARIEVFLLRELNAETKLWDVLVDPARKIRIGNKLYFGDDESLVAEVIDNTTSRGRTLRFLYDGSYAEFRKKLEDLGETPLPKYIKREVQPEDQERYQTIYAKKEGAVAAPTAGLHFSKHLLKRLEIKGVEFAEVTLHVGLGTFNPVEVEDLSKHKMDSEEAFIEEKAVLTINKAIKERRRICAVGTTSMRVLESAVSSNHTLNEFSGWTNKFIFPPYDFSIANAMITNFHTPKSTLMMMVSAFAGHDFMKKAYAEAIKEKYKFYTYGDAMLII

SEQ ID NO: 63420 - protein, 352 aa, Antarctobacter heliothermus
  REGION 1..352: note = tr|A0A239ANM1|A0A239ANM1_9RHOB S-adenosylmethionine:tRNA ribosyltransferase-isomerase; OS = Antarctobacter heliothermus OX=74033 GN=queA PE=3 SV=1
MKLSDFDFDLPDRLIATRPARPRSSARLLVAEGDAITDAHVFDIAEWLRPGDRLILNDTKVIPARLQGIRKRVSDAGETEARIEVTLLEPQADGTWAALIKPLKKVRDGEDIRFSNDLSAILEAREAGQGKLRFNLSGEDFDAALNAAGAMPLPPYIAAKRAADDRDREDYQTVWARNTGAVAAPTASLHFDDALLAALASKGVTFTHVTLHVGAGTFLPVKVEDVTSHKMHGEWGEVTETAATEIAATRAAGGRIIPVGTTALRLIETAARSGQIAPFRGVTDIFIYPGFTFNVTDALMTNFHLPKSTLMMLVSALMGPERIRAIYDHAVAGDYRFFSYGDASLLLPPQRG

SEQ ID NO: 63421 - protein, 351 aa, Antarctobacter heliothermus
  REGION 1..351: note = tr|A0A222E5X0|A0A222E5X0_9RHOB S-adenosylmethionine:tRNA ribosyltransferase-isomerase; OS = Antarctobacter heliothermus OX=74033 GN=queA PE=3 SV=1
MKLSDFDFDLPDRLIATRPARPRSSARLLVAEGDAITDAHVFDIARWLRPGDRLILNDTKVIPARLQGVRKRVSDAGETEARIEVTLLEPQADGTWAALIKPLKKVRDGEEVIFSNDLSAVLEAREDGRGSLRFNLSGEDFDAALNAAGAMPLPPYIAAKRAADDRDREDYQTVWARNTGAVAAPTASLHFDDALLAALTAKGVSFTHVTLHVGAGTFLPVKVEDVTSHKMHGEWGEVTETAAAEIAATRAAGGRIIPVGTTALRLIETAARGGRIAPFQGVTDIFIYPGFTFNVTDALMTNFHLPKSTLMMLVSALMGSERIRAIYEHAVAEDYRFFSYGDASLLLPHRD

SEQ ID NO: 63422 - protein, 351 aa, unidentified
  source 1..351: note = Antricoccus suffuscus
  REGION 1..351: note = tr|A0A2T0ZZ63|A0A2T0ZZ63_9ACTN S-adenosylmethionine:tRNA ribosyltransferase-isomerase; OS = Antricoccus suffuscus OX=1629062 GN=CLV47_1084 PE=3 SV=1
MIAPNIHFPSPDSTTAPRPPEARGLARDGVRLMVATGESTAHARFRDLPSYVETGDLLVVNNSGTLAAELDAHWRGAPIVVHVATRLDNGHWVIELRSAPDAAEPVLDAEAGDTVDLPAGARLDLLAPYPRENSSPTGHGNRLWQVALIGEASLTNLMALFGRPIAYGYLDKRYPLPAYQTVFGIRPGSAEMASAARPFTTELVTRLISSGVGIVPITLHTGVSSQDAGEFPQAEPFDVPRSTAQAINRTRANGRRVIAVGTTATRAVESAVTADNVVVARSDWTERIVTPADPPRIVDGLITGWHNPEASHLLLVEAVAGRELTQRAYDAAIAHEYLWHEFGDSALLLPR

SEQ ID NO: 63423 - protein, 380 aa, Aphanizomenon flosaquae
  REGION 1..380: note = tr|A0A1B7VMJ7|A0A1B7VMJ7_APHFL S-adenosylmethionine:tRNA ribosyltransferase-isomerase; OS = Aphanizomenon flos-aquae LD13 OX=1710894 GN=queA PE=3; SV = 1
MKQQILPNQTQLEAVNDINLDCLLSNYDYELPPELIAQNPAVPRDSSKLLVVNSAETGKTIPPLHHIFRDLSELLKPGDLLVMNNTKVIPARLYGCRSTGAEVEVLLLEERRHNCWLALVKPGKRFKVGSEIIFTAVDDGEKQELRATVVESDPETGGRLLQFDLPPEVPLVQVLGKFGQIPLPPYITASTAADEQYQTVYAQEQGAIAAPTAGLHFTPSLLEKLRNYGINQAFITLHVGIGTFRPVEVEDVTTHAMHKEWIEVSSDTVEQVLATRAAGGRIIAVGTTAVRALEGAAQLGALQPFVGQTNLFIYPGYKWQVVEGLITNFHLPRSSLLMLVSALIGRKRLLDLYEQAIAAQYRFYSFGDAMLILPEGKNIQ

SEQ ID NO: 63424 - protein, 291 aa, Aphanizomenon flosaquae
  REGION 1..291: note = tr|A0A1B7WJT9|A0A1B7WJT9_APHFL S-adenosylmethionine:tRNA ribosyltransferase-isomerase (Fragment) OS=Aphanizomenon flos-aquae WA102 OX=1710896; GN = AN484_25045 PE=3 SV= 1
MKQQILQNQTQLEAANDINLDCLLSSYDYELPPELIAQNPAVPRDSSKLLVVNSAETGKTIPPLHHIFRDLSELLKPGDLLVMNNTKVIPARLYGCRSTGAEVEVLLLEERRHNCWLALVKPGKRFKVGSEIIFTAVDDGEQQELRATVVESDPGTGGRLLQFDLPPEVPLVQVLGKFVQIPLPPYITASTAADEQSQTVYAQDQGAIAAPAAGLHFTPSLLEKMRNYGINQAFITLHVGIGTFRPVEVKDVTTHVMHKEWIEVSSDTVEQVLATRAAGGRIIAVGTTAVR

SEQ ID NO: 63425 - protein, 364 aa, unidentified
  source 1..364: note = Aphanocapsa feldmannii
  REGION 1..364: note = tr|A0A524RTZ1|A0A524RTZ1_9CYAN S-adenosylmethionine:tRNA ribosyltransferase-isomerase; OS = Aphanocapsa feldmannii 277cI OX=2507554 GN=queA PE=3; SV = 1
MQADGPRCDDRLSSYSYELPEKAIAQMAVEPRHSARLMALDAAGGWRDRIVADLPGLLRPGDLLVLNDTRVLKARLHIRRSDGGAGELLLLEPRSEDTWLSLVKPGRRIRVGDQLQLTTPGGPIGIAVVDADQASGGRLLRFPLRGMDAMEQLLNSCGHMPLPPYIRDSSQADARYQTTYAEKPGAVAAPTAGLHLSHELRHWLAAAGVRSATLTLHVGLGTFRPLDTEDLSRLELHSERVEVSRQLVDAVRTTRAAGGRVIAVGTTSCRALEGAAQAHGGQLDAFSGRVKLCIRPGYRFRVVQGLLTNFHLPCSSLLLLVSALIGRERLLEHYADALASGYRFYSYGDAMWIDPEAVLPEARP

SEQ ID NO: 63426 - protein, 364 aa, unidentified
  source 1..364: note = Aphanocapsa feldmannii
  REGION 1..364: note = tr|A0A524RGH5|A0A524RGH5_9CYAN S-adenosylmethionine:tRNA ribosyltransferase-isomerase; OS = Aphanocapsa feldmannii 288cV OX=2507555 GN=queA PE=3; SV = 1
MQADGPRCDDRLSSYSYELPEKAIAQMAVEPRHSARLMALDAAGGWRDRIVADLPGLLRPGDLLVLNDTRVLKARLRIRRSDGGAGELLLLEPRSEDTWLSLVKPGRRIRVGDQLQLTTPGGPIGIAVVDADQASGGRLLRFPLRGMDAMEQLLNSCGHMPLPPYIRDSSQADARYQTTYAEKPGAVAAPTAGLHLSHELRHWLAAAGVRSATLTLHVGLGTFRPLDTEDLSRLELHSERVEVSRQLVDAVRTTRAAGGRVIAVGTTSCRALEGAAQAHGGQLDAFSGRVKLCIRPGYRFRVVEGLLTNFHLPCSSLLLLVSALIGRERLLEHYADALASGYRFYSYGDAMWIDPEAVLPEARP

SEQ ID NO: 63427 - protein, 373 aa, unidentified
  source 1..373: note = Aphanothece cf.
  REGION 1..373: note = tr|A0A2T1EZ90|A0A2T1EZ90_9CHRO S-adenosylmethionine:tRNA ribosyltransferase-isomerase; OS = Aphanothece cf. minutissima CCALA 015 OX=2107695; GN = queA PE=3 SV=1
MPDPADLRLSSYDFALPQERIAQRPVEPRHAARLLAVDPAGVGPAPHARHLSAWDLQHELRPGDLLVVNDTRVLRARLEARRSGGGAVELLVLEPWPAGAGLWLCLARPAKKLRPGDRLEVVAEGQPPLTVEVVGSDPATGGRIVQFPLECADAAALEPLLVQYGAIPLPPYIHEHDASDNERYQTRYAARPGAVAAPTAGLHLSDELLAAIRERGVGVATTTLHVGLGTFRPIETEDLSALELHSEWVEVSPQLVEAVAACRAAGGRVIAIGTTSVRSLEAVAQLHGGELRPHTGPVNLVIQPGYRFAVVQGLLTNFHLPKSSLLLLVSALIGRERLLALYGEAIGRRYRFFSYGDAMWIAPEAVLPGARPA

SEQ ID NO: 63428 - protein, 365 aa, unidentified
  source 1..365: note = Aphanothece hegewaldii
  REGION 1..365: note = tr|A0A2T1LST1|A0A2T1LST1_9CHRO S-adenosylmethionine:tRNA ribosyltransferase-isomerase; OS = Aphanothece hegewaldii CCALA 016 OX=2107694 GN=queA; PE = 3 SV=1
MTSDQLLSGYDYTLPSELIAQNPVNPRDHSRLLIIDSLNTHKHGIFQDLTNWLLPGDLLVLNNTQVIPARLYGRKATGAPVEILLLEERINNCWLALVKPGKRFKIGSEVWFYPFNHPEQSESNILKAKVIDRDLATGGRLLQFQIPPHQSFLTLLEQFGQIPFPPYVTASEADPSQYQTVYAQELGSVAAPTAGLHFTEELLQKLQEMGVNLAYVTLHVGVGTFRPVEVEDITQHIMHQEWIELPQKTVDLIQETKAKGSRVIAVGTTATRTLEGAMKEIKAAGGDHLAAFRGKTDLFIYPGYQWQVIDGLITNFHLPKSSLLMLVSALIGRERLLALYAEAIKEKYRFYSFGDAMLILPSAVI

SEQ ID NO: 63429 - protein, 390 aa, unidentified
  source 1..390: note = Aphanothece sacrum
  REGION 1..390: note = tr|A0A401IHN6|A0A401IHN6_APHSA S-adenosylmethionine:tRNA ribosyltransferase-isomerase; OS = Aphanothece sacrum FPU1 OX=1920663 GN=queA PE=3 SV=1
MFKLSGSRAVDPDEKDCLPGKSSVICDPMMNDQLLASYDYHLPPELIAQTPVTPRDSSRLLVVNSATTQVHSQFRDLTEWLLPGDLLVFNNTRVIPARLYGRKSTGAPVEILLLEEKSPFCWLALVKPGKRFTLGSQIEFADESGQIKLMATVLERDEETGGRLLKFEINSHELFWQILEQVGLIPFPPYVTESEAQPSQYQTVYAQEPGAVAAPTAGLHFTEDLLERLSQKGIGQAYLTLHVGVGTFRPVEISDITQHKMHQEWVEVPEITVNKIVETKKQGGRVIAVGTTVVRSLEGAAKVAKSEGKDGLIPFRAKTDLFIYPGYKWQVVEGMITNFHLPCSSLLMLVSALIGRERLMSLYQEAIKQKYRFYSFGDGMLILPEGKSNK

SEQ ID NO: 63430 - protein, 349 aa, unidentified
  source 1..349: note = Apibacter adventoris
  REGION 1..349: note = tr|A0A2S8A6Z8|A0A2S8A6Z8_9FLAO S-adenosylmethionine:tRNA ribosyltransferase-isomerase; OS = Apibacter adventoris OX=1679466 GN=queA PE=3 SV=1
MKTSDFDFKLPQELLAERPSETRDEARLMVVHKKTGEIEHKLFKDVIDYFDEGDVFILNNTKVFPARLYGNKEKTGAQIEVFLLRELDAESRIWDVLVDPARKIRIGNKLFFTDDDSLVAEVVDNTTSRGRTLRFLFDGSYEEFRRKLKELGETPLPKYIKRKPDADDIERYQTIYAKEEGAVAAPTAGLHFSKHLLKRLEIKGIEFAEITLHVGLGTFASVEVEDLSKHKMESEQVIISEDTCKIVNHAIETKHRVCAVGTTSMRAIETSVSANNRLNPYNGWTNKFIFPPYDFGIADAMITNFHTPKSTLMMMIAAFADYDLVMKAYKEAVKEKYKFYSYGDAMLIL

SEQ ID NO: 63431 - protein, 349 aa, unidentified
  source 1..349: note = Apibacter mensalis
  REGION 1..349: note = tr|A0A0X3ANI9|A0A0X3ANI9_9FLAO S-adenosylmethionine:tRNA ribosyltransferase-isomerase; OS = Apibacter mensalis OX=1586267 GN=queA PE=3 SV=1
MKTSDFDFKLPPELLADRPSKNRDEARLMVIHKNTGEIEHKLFKDVIDYFNEGDVFILNNTKVFPARLYGNKEKTGAQIEVFLLRELDAESRIWDVLVDPARKIRIGNKLFFTEDDSLVAEVVDNTTSRGRTLRFLFDGSYEEFRRKLKELGETPLPKYIKRKPDADDAERYQTIYAKEEGAVAAPTAGLHFSKHLLKRLEIKGIEFAEITLHVGLGTFASVEVEDLSKHKMESEQISISEKTCKIVNHAIETKHRVCAIGTTSMRAIETSVSANKRLNPFEGWTNKFIFPSYDFGIADSMITNFHTPKSTLMMMVSAFAGYDLIMKAYKEAIKENYKFYSYGDAMLII

SEQ ID NO: 63432 - protein, 349 aa, unidentified
  source 1..349: note = Apibacter sp.
  REGION 1..349: note = tr|A0A2S8ACS3|A0A2S8ACS3_9FLAO S-adenosylmethionine:tRNA ribosyltransferase-isomerase; OS = Apibacter sp. wkB309 OX=1679467 GN=queA PE=3 SV=1
MKTSDFDFKLPPELLADRPSKNRDEARLMVVHKNTGEIEHKLFKDVIDYFDEGDVFILNNTKVFPARLYGNKEKTGAQIEVFLLRELDAESRIWDVLVDPARKIRIGNKLFFTEDDSLVAEVVDNTTSRGRTLRFLFDGSYEEFRRKLKELGETPLPKYIKRKPDSEDAERYQTIYAKEEGAVAAPTAGLHFSKHLLKRLEIKGIEFAEITLHVGLGTFASVEVEDLSKHKMESEQISISEKTCKIVNHAIETKHRVCAVGTTSMRAIETSVSANKRLNPYEGWTNKFIFPSYDFGIADSMITNFHTPKSTLMMMVSAFAGYDLIMKAYKEAIKENYKFYSYGDAMLII

SEQ ID NO: 63433 - protein, 349 aa, unidentified
  source 1..349: note = Apibacter sp.
  REGION 1..349: note = tr|A0A563DIA7|A0A563DIA7_9FLAO S-adenosylmethionine:tRNA ribosyltransferase-isomerase; OS = Apibacter sp. AL1 OX=2509005 GN=queA PE=3 SV=1
MKTSDFDFKLPPELLAERPSENRDESRLMVVHKNSGQIEHKLFKDVIDYFDEGDVFILNNTKVFPARLYGNKEKTGAQIEVFLLRELDAESRIWDVLVDPARKIRIGNKLFFTDDDSLVAEVIDNTTSRGRTLRFLFDGSYEEFRIKLKELGETPLPKYIKRKPDAEDIERYQTIYAKNEGAVAAPTAGLHFSKHLLKRLEIKGIDFAEITLHVGLGTFASVEVEDLSKHKMESEQVSISEKTCEIVNHAIENKRRVCAVGTTSMRAIETSVSANNRLNPYDGWTNKFIFPPYDFGIANCMITNFHTPKSTLMMMISAFAGYDLVMKAYKEAVNEGYKFYSYGDAMLII

SEQ ID NO: 63434 - protein, 357 aa, Aquabacter spiritensis
  REGION 1..357: note = tr|A0A4R3LNF8|A0A4R3LNF8_9RHIZ S-adenosylmethionine:tRNA ribosyltransferase-isomerase; OS = Aquabacter spiritensis OX=933073 GN=queA PE=3 SV=1
MRVDAFDFELNPELIALRPAEPRAAARLLLVRPGESPELEDARVGALPRVLRPGDAVVVNDTKVIPARLDGTRSRVNGARVSVEATLVKRVSEAVWTALARPGKRLAVGDRIVFARGAAQLVADIVHKGEAGEIDLAFACAGPALDAALDQVGHMPLPPYIAARRPEDAQDRTDYQPVFARIDGSVAAPTASLHFTPALMDEIRAAGASFHTVTLHVGPGTFLPVKVEDTSGHRMHAEWGEVSAETAAALNAARARGGRILAVGSTATRLVEAAAAGGTISPFRGETDIFITPGYAFRAVDLMMTNFHLPRSTLVMLVAAFVGHDVQKRAYAHAIAAGYRFYSYGDACLLHRAGGAA

SEQ ID NO: 63435 - protein, 359 aa, Aquabacterium commune
  REGION 1..359: note = tr|A0A4R6RHH3|A0A4R6RHH3_9BURK S-adenosylmethionine:tRNA ribosyltransferase-isomerase; OS = Aquabacterium commune OX=70586 GN=queA PE=3 SV=1
MSLSAPPAFTLADFDFELPEALIAQHPAAERSASRLLDGRALPVTDRIFRELPELLQPGDLLVFNNTRVIKARLYGAKASGGAVEALVERVLPGTNEVWAHMRASKSPKPGAKVRFADAFDAEVLGRCGPDNGLFHLRLDGDPFALLDAHGHVPLPPYITHADEEDDVRRYQTVFAKEPGAVAAPTAALHFDEALLARMRERGIATAEVTLHVGAGTFQPVRTDNLAEHKMHSEWFEVPQATADAIRATRAAGGRIVSVGTTTLRALESAALQASPEDIVQVGSRDTDIFITPGFDFKVVDVLVTNFHLPKSTLMMLVSALAGYEHIRTLYAHAIDQRYRFFSYGDAMLIQRPSLSDRA

SEQ ID NO: 63436 - protein, 355 aa, unidentified
  source 1..355: note = Aquabacterium olei
  REGION 1..355: note = tr|A0A2U8FP49|A0A2U8FP49_9BURK S-adenosylmethionine:tRNA ribosyltransferase-isomerase; OS = Aquabacterium olei OX=1296669 GN=queA PE=3 SV=1
MASLAPSADRAYTLADFDFDLPESLIAQHPAPERSASRLLDGRGTQPVDRVFRELPDLLQTGDLLVFNNTRVIKARLFGAKATGGAVEALIERVLPGTHEVWAHMRASKSPKPGARVRFADAFDADVLGRCGPDNGLFHLRFEGDPFALLEQHGHVPLPPYITHADEEDDVRRYQTVFAKEPGAVAAPTAALHFDEGVLAGLAARGIRTAEVTLHVGAGTFQPVRTDNLAEHKMHSEWFDVPQATAEAIRATRAAGGRIVAVGTTTLRALESAARGAPPEDILEAGQRDTDIFITPGFDFRVVDVLITNFHLPKSTLMMLVSALAGYDHIRALYAHAIAQRYRFFSYGDAMLIQR

SEQ ID NO: 63437 - protein, 217 aa, Aquabacterium sp.
  REGION 1..217: note = tr|A0A521Z3R1|A0A521Z3R1_9BURK S-adenosylmethionine:tRNA ribosyltransferase-isomerase (Fragment) OS=Aquabacterium sp. OX=1872578 GN=queA PE=3; SV = 1
HLRFEADPLVLLEQHGHVPLPPYITHADDADDVRRYQTVFASQPGAVAAPTAALHFDEAVLARLAAKGIRTAEVTLHVGAGTFQPVRTDNLAEHKMHSEWFNVPESTVAAIEATKAAGGRVVSVGTTTLRALESAALNTPEGHILQAGSRDTAIFITPGFQFKVVDVLVTNFHLPKSTLMMLVSALAGYEHVKQIYRHAIAQRYRFFSYGDAMLIQR

SEQ ID NO: 63438 - protein, 352 aa, Aquabacterium sp.
  REGION 1..352: note = tr|A0A0A0DMZ9|A0A0A0DMZ9_9BURK S-adenosylmethionine:tRNA ribosyltransferase-isomerase; OS = Aquabacterium sp. NJ1 OX=1538295 GN=queA PE=3 SV=1
MSSSLTPTTYTLSDFDFELPPELIAQHPAAERSASRLLDGRGAQPVDRVFRELPDLLQPGDLLVFNNTRVIKARLYGHKASGGAVEALVERVLPGNEVWAHLRASKSPKPGSMVRFADAFDAEVLGRGGPDGGLFHLRFAGDPLTLLEQHGHVPLPPYITHADEEDDVRRYQTVFASAPGAVAAPTAALHFDEALLDRLKARGIQTAEVTLHVGAGTFQPVRTDNLAEHKMHSEWFEVPASTVAAIEATKAAGGRVVSVGTTTLRALESAALHAPAGHILQAGSRDTDIFITPGFQFKVVDVLITNFHLPKSTLMMLVSALAGYEHIRQLYQHAIARGYRFFSYGDAMLIQR

SEQ ID NO: 63439 - protein, 358 aa, Aquamicrobium aerolatum
  REGION 1..358: note = tr|A0A1I3PFK9|A0A1I3PFK9_9RHIZ S-adenosylmethionine:tRNA ribosyltransferase-isomerase; OS = Aquamicrobium aerolatum DSM 21857 OX=1121003 GN=queA; PE = 3 SV=1
MRVDLFDFELPDERIAVRPAEPRHAARLLVVKPDQSFEDKVVFDLPSLLRRGDALVFNDTKVIPAQLTGLRRREGSVAQVDATLHMRTAPDRWKAFMRPAKRLAVGDRIQFGHDGNSCFLGTLDATVAEKGEAGEVTLAFDLSGPVLDEALHAVGKIPLPPYIAGKRAEDARDRSDYQTIFAREEGAVAAPTAGLHFTPELMAALDAAGVERHFVTLHVGAGTFLPMKVDDTTDHRMHAEIGHVSEETAAALNGVKARGGRIISVGTTSLRLMESSVADDGTFRAWSGSTDIFITPGHRFRTADILMTNFHLPRSTLFMLVSAFSGLETMHAAYKHAIDSNYRFYSYGDSSLLFRNES

SEQ ID NO: 63440 - protein, 358 aa, Aquamicrobium defluvii
  REGION 1..358: note = tr|A0A011U7I3|A0A011U7I3_9RHIZ S-adenosylmethionine:tRNA ribosyltransferase-isomerase; OS = Aquamicrobium defluvii OX=69279 GN=queA PE=3 SV=1
MRVDLFDFELPDERIALRPAEPRDSARLLKILPGAPPEDLTVRDLPSLLRAGDVLVFNDTKVIPAQLKGMRRRAEAVAQVDATLHMRVGPDRWLAFVRPGKRIAEGDRIHFGHDGNSCFLGQLDATVLEKREGGEVLLGFDVSGPFLDEALHSVGHIPLPPYIASKRSDDERDRCDYQTIYAREEGAVAAPTAGLHFTPELFAALDEKGVERRFVTLHVGAGTFLPVKTDDTDEHRMHAESGSVSAETATALNAARARGGRIVAVGTTSLRLLESAAAEDGTVKEWSGATDIFITPGYRFRTADMLMTNFHLPRSTLFMLVSAFSGLDTMRAAYAHAISTGYRFYSYGDASLLFRQMT

SEQ ID NO: 63441 - protein, 357 aa, Aquamicrobium sp.
  REGION 1..357: note = tr|A0A4U6CB31|A0A4U6CB31_9RHIZ S-adenosylmethionine:tRNA ribosyltransferase-isomerase; OS = Aquamicrobium sp. LC103 OX=1120658 GN=queA PE=3 SV=1
MRVDLFDFDLPEDRIALRPAEPRDSAKLLIVRPGEAPEDRIVRDLPSLLRAGDALVFNDTKVIPAQLRGIRRRGEAIAHVDATLHMRVDADRWKAFVRPAKRLAEGDRISFGHEENACMIGALDATVMEKGEAGEVLLAFDISGPFLDEALHAVGHIPLPPYIASKRADDERDRADYQTIYAREEGAVAAPTAGLHFTPDLMSRLEDAGIERHFVTLHVGAGTFLPVKADDTADHRMHAERGYVPAATARALNEVRARGGRIVCVGTTSLRLLESAAAPDGALGEWSGATDIFITPGYRFRTADMLMTNFHLPRSTLFMLVSAFAGLETMREAYHHAIDTGYRFYSYGDASLLFREK

SEQ ID NO: 63442 - protein, 342 aa, Aquaspirillum sp.
  REGION 1..342: note = tr|A0A1U9JNS8|A0A1U9JNS8_9NEIS S-adenosylmethionine:tRNA ribosyltransferase-isomerase; OS = Aquaspirillum sp. LM1 OX=1938604 GN=queA PE=3 SV=1
MQLSDFDFELPEALIAQFPPEVRGNSRLLHVDGLNCHDDHFSQLIHYLRAGDVLVFNDTRVLKARLFGQKLSGGQVEVLVERVLDSQQVLAHVRASKSPKPGSRLLLEGRWEAEMVERQNELFRLRFSGDTPVLDILDASGKLPLPPYITRTPDAPDDERYQTVYARHQGAVAAPTAGLHFTDAQLDALRGHGVELAFVTLHVGAGTFQPVRVDNIAEHRMHSEIYHVPDDTVAAIARAHAQGRQVTAVGTTSLRALESAARSGSLLAGQGETDIFITPGYRFRVVDRLLTNFHLPKSTLMMLVSAFAGLQPIRAAYQHAIAGQYRFFSYGDAMLLEKAASA

SEQ ID NO: 63443 - protein, 340 aa, unidentified
  source 1..340: note = Aquibacillus sp.
  REGION 1..340: note = tr|A0A516KKD1|A0A516KKD1_9BACI S-adenosylmethionine:tRNA ribosyltransferase-isomerase; OS = Aquibacillus sp. TKL69 OX=2594883 GN=FN924_17665 PE=3; SV = 1
MNEAMFKIPDHLHATEPVEFTKGSRDQVSLMVTDSPSGQCEHTQFPLLINFLKKGDLLVFNNSRTIPALMIGNIGENRAEVRLSHRVNDSQWRALVLTEEIELGDTIIFSKNLLAVVSEGCENTPLYTLSFSQSGSSLVDVFYQIGKPIHYEYIKKDIPLDAYQTVYGTVPGSVELASAGRPFTWAMLQQLKDAGINIAFLQLHTGLSYFENNLWPNPVQQPELFHVPERTARLVHETKKRGGRIIAVGTTVVRALESAGKNRTIKALNGSTNLYIHQAYNLKVIDGLLTGFHEPEASHLDMLSAFLHPDILKSTYEEALSKQYLWHEFGDINLILAGCL

SEQ ID NO: 63444 - protein, 342 aa, unidentified
  source 1..342: note = Aquibacillus sp.
  REGION 1..342: note = tr|A0A516KH46|A0A516KH46_9BACI S-adenosylmethionine:tRNA ribosyltransferase-isomerase; OS = Aquibacillus sp. TKL69 OX=2594883 GN=queA PE=3 SV=1
MDINDFDYHLPEELIAQVPLKDRASSRLLVLNREKKTMSHQHFSDIKSFLRKGDCLVLNDTKVLPARLYGIKEDTGAKVEVLLLTQLEKDNWEVLVKPAKKIKVGTTLTFGDDRLTAVCLEEKEHGGRILSFQYEGIFLEVLNELGEMPLPPYIKEQLPDRDRYQTVYAREEGSAAAPTAGLHFTTELMDELKDIGVEFAYITLHVGLGTFRPVNVDRIEEHDMHSEFYMMSQETADQLNRVKERNGRIISVGTTSTRTLETIARDQKGSFKESRGWTNIFIYPPYEFKAIDGLITNFHLPKSTLIMLVSALAGRDFILSAYEEAVKERYRFFSFGDAMLIL

SEQ ID NO: 63445 - protein, 357 aa, Aquicella lusitana
  REGION 1..357: note = tr|A0A370GYI0|A0A370GYI0_9COXI S-adenosylmethionine:tRNA ribosyltransferase-isomerase; OS = Aquicella lusitana OX=254246 GN=queA PE=3 SV=1
MQLNDFHFPLPTELIARYPLETRSASRLLCINTIQNDLVHREFSSLIDLIDEGDLLVFNDTKVIPARLLGQKITGGKVEVLVERVLDDQRILALVRASKAPKIGDLFIFTPDVRLEVLGRRDQFYELGYLDTTHSILEMIESIGHIPLPPYMRRMADDLDKIRYQTVYARHKGSVAAPTAGLHFDDILLQQLREKNVAMGYLTLHIGAGTFAPVRSERITEHKMHAEYLEVPAELCHQIEAAKSRGNRVIAVGTTSMRALETASQSGTIAPYHGETSIFIYPGYQFRCVDALITNLHLPCSTLLMLVCAFGGYERIMHAYREAVAQSYRFYSYGDAMWIDSPLQKHKQTNVPDFRAI

SEQ ID NO: 63446 - protein, 345 aa, Aquicella siphonis
  REGION 1..345: note = tr|A0A5E4PEG3|A0A5E4PEG3_9COXI S-adenosylmethionine:tRNA ribosyltransferase-isomerase; OS = Aquicella siphonis OX=254247 GN=queA PE=3 SV=1
MQLSDFNFDLPPELIARYPLEKRSASRLICLESRSNSICHRYFPAILELIEEGDLLVFNDTRVIPARLRGRKSTGGEVEILVERILDEKRILAQVRSSKPLRLGSYLSLTNYQFLEVTDRQNQFYELRYNNERESILEMIESIGQIPLPPYMQRSAEEEDRERYQTVYARHKGSVAAPTAGLHFDQDLLRHLQDKKIEMGYLTLHIGAGTFAPVRVNQIQEHVMHPEYLEVSPELCANILAAKARGKRVIAVGTTSLRALETAMQSGTAQPYRGETSIFIYPGYQFRCVDALITNLHLPRSTLLMLVCAFGGYAKVMQAYQDAVRHAYRFYSYGDAMWIEKAESF

SEQ ID NO: 63447 - protein, 351 aa, unidentified
  source 1..351: note = Aquicoccus porphyridii
  REGION 1..351: note = tr|A0A5A9ZU99|A0A5A9ZU99_9RHOB S-adenosylmethionine:tRNA ribosyltransferase-isomerase; OS = Aquicoccus porphyridii OX=1852029 GN=queA PE=3 SV=1
MKLSDFDFDLPEGLIATRPASPRSSARLLVAEGARITDAVVRDLPDWLRPGDRLILNDTKVIPARLSGQRVRQGAGGESRAGMEVTLLEPRPDGRWAALIKPLRKLGMGERIEFGAGFDARCVEKSDGQAVLEFNLAGDDFDAALERAGAMPLPPYIEARRKADARDKHDYQTVWARKRGAVAAPTASLHFDDPLLERLAAKGVQFTHVTLHVGAGTFLPVKVDDVRQHRMHAEWGEVSEDAAREISETRANGGRIIPVGTTALRLIETAARDGGAIAPWEGETDIFIYPGFRFRVTDALMTNFHLPKSTLMMLVAALMGREPVMRIYAHAVEERYRFFSYGDASLLIPGG

SEQ ID NO: 63448 - protein, 379 aa, unidentified
  source 1..379: note = Aquicoccus sp.
  REGION 1..379: note = tr|A0A4U7J411|A0A4U7J411_9RHOB S-adenosylmethionine:tRNA ribosyltransferase-isomerase; OS = Aquicoccus sp. SCR17 OX=2541728 GN=queA PE=3 SV=1
MNLSDFDFDLPEGLIATRPARPRSSARLLVAEGAGPEITDSVVSEITRFLRPGDRLVLNDTRVIPARLSGLRHRSGAQGESAARIEVTLLEPGADGTWSALVKPLKKLREGEEVVFSDALSARLVAREAGEARLAFNLKGEDFDAALAEAGAMPLPPYIAARRPADERDREDYQTIWARHSGAVAAPTASLHFDEGVMAALAAHGVETTHVTLHVGAGTFLPVKVEDVTTHRMHSEWGVVSAQAAEEIAATRAAGGRIIPVGTTALRLIETAARATGEIAPWEGDTDIFIYPGFRFNVTDALMTNFHLPKSTLMMLVSALMGQKQIRNIYSHAVEERYRFFSYGDASLLVPDPRAAGDRDQETRRDPRGRAGPTSGDAR

SEQ ID NO: 63449 - protein, 334 aa, unidentified
  source 1..334: note = Aquifex aeolicus
  REGION 1..334: note = sp|O67043|QUEA_AQUAE S-adenosylmethionine:tRNA ribosyltransferase-isomerase OS=Aquifex aeolicus (strain VF5) OX=224324 GN=queA PE=3 SV=1
MRIEEFDYELPEELIAKYPAVPRHSARLMVLNRKDQSIKHDTFINLPDYLEEGDLLVFNNTKVIPARLYGRKPTGGRVEVVLTDFIKPDEWKALIGGKKIRPGLVIEVAPDFKVEVLEHIEEGKFRVKLLGEEPLKLIDKYGHIPIPPYLKREEEPIDRVYYQTIFAKEKGAVASPTASLHFSEELLEKLKEKGINFAFITLHVSYGTFKPVKVERVEEHRVDPEYVKIPKETVEKIKETKEKGKRVVAVGTTVVRALETKPFEPFEGWTDLYIYPGFKFKVVDAMITNFHLPRSSLLILVSAFAGREFILKAYREAVEKRYRFYSYGDGMLIL

SEQ ID NO: 63450 - protein, 296 aa, Aquifex sp.
  REGION 1..296: note = tr|A0A432Q028|A0A432Q028_9AQUI S-adenosylmethionine:tRNA ribosyltransferase-isomerase (Fragment) OS=Aquifex sp. OX=313370 GN=DSY32_00580 PE=3; SV = 1
KHDTFINLPEYLEEGDLLVFNNTKVIPARLYGRKPTGGKVEVVLSDFIKPEEWNALIGGKKIRPGLVIEVAPDFKVEVLEHIEEGKFRVKLIGEEPLKLIDKYGHIPIPPYLKREEEPIDRVYYQTIFAKEKGAVASPTASLHFSEELLKKLKEKGINFAFITLHVSYGTFKPVKVERVEEHRVDPEYVKIPEETVEKIKETKEKGKRVVAVGTTVVRALETKPFEPFEGWTDLYIYPGFEFKVVDAMITNFHLPRSSLLILVSAFAGREFILKAYKEAVEKRYRFYSYGDGMLIL

SEQ ID NO: 63451 - protein, 334 aa, Aquifex sp.
  REGION 1..334: note = tr|A0A432Q0H0|A0A432Q0H0_9AQUI S-adenosylmethionine:tRNA ribosyltransferase-isomerase; OS = Aquifex sp. OX=313370 GN=queA PE=3 SV=1
MRIEEFDYELPEELIAKYPVVPRHNARLMVLNRKEKSIKHDIFINLPEYLEEGDLLVFNNTKVIPARLYGRKPTGGKVEVVLTDFIKPDEWKALVGGKKIKPGLIIEVAHDFKVEILEHIEEGKFRVKLHGKDPLKLIDKYGHIPIPPYIKREEEPIDRVYYQTIFAQERGAVASPTASLHFSEELMEKLKKKGIETAFITLHVSYGTFKPVKVKNIEEHKVDPEYVKIPRETVKKIRETKERGNKVIAVGTTVVRALETKPYEPFEGWTDLYIYPGFEFKVVDAMITNFHLPKSSLLILVSAFAGKDFILKAYNEAVKKKYRFYSYGDGMLIL

SEQ ID NO: 63452 - protein, 352 aa, unidentified
  source 1..352: note = Aquificaceae bacterium
  REGION 1..352: note = tr|A0A432F5X3|A0A432F5X3_9AQUI S-adenosylmethionine:tRNA ribosyltransferase-isomerase; OS = Aquificaceae bacterium OX=2053503 GN=queA PE=3 SV=1
MKLSDFSYDLPVHLIAQEALQDRTASRLLVVENKANDTASCEDKVFSDLLDMIAPHDLLVFNNTRVIPARLHGKKLTGGKVEVLVERLLSDKTLLAHVKASKSPKKGSVLTLEGEIRIEVLGRQGALFELSVLNDAPILELLEQYGHIPLPPYIERDDTEDDRERYQTVFAKTPGAVAAPTAGLHFTDELLEQLKKKGVETAQVTLHVGAGTFQPVRVNDLSDHIMHAEWVEVDESVCEAVKACKQRGGKVIAVGTTSVRSLESAAKGGELTPFRGDTRLFITPGCRFNVVDRMVTNFHLSESTLLMLVSAFSGYETIKQAYQHAITAEYRFFSYGDAMLLSRREGVQEVSL

SEQ ID NO: 63453 - protein, 334 aa, unidentified
  source 1..334: note = Aquificaceae bacterium
  REGION 1..334: note = tr|A0A350D2K9|A0A350D2K9_9AQUI S-adenosylmethionine:tRNA ribosyltransferase-isomerase; OS = Aquificaceae bacterium OX=2053503 GN=queA PE=3 SV=1
MRVEDFDYHLPEELIAKYPITPRHNAKLMVLNRKDQSIRHDMFWNLPLYLEEGDLLVFNNSKVLPARLYGKKPTGGKVEVLLTDFITKEEWYALIGGKNIKEGLQIYVGEGLIVEVLEHVEGGKFKVKLLSEDPLKALDKYGKIPIPPYLKREEEPIDRVYYQTVFAQIEGSVAAPTASLHFSKELLKRLEEYGIKKAFITLHVSYGTFKPVKVDEVELHRVDPEYVSVPKETIELIKETKKRGKRVIAVGTTVVRALETAGFEPFEGWTELYIYPGYSFKVVDALITNFHLPRSSLLFLVCAFGGREFILRAYQEAVKERYRFYSYGDGMLIL

SEQ ID NO: 63454 - protein, 285 aa, unidentified
  source 1..285: note = Aquificae bacterium
  REGION 1..285: note = tr|A0A3M1BQQ4|A0A3M1BQQ4_9BACT S-adenosylmethionine:tRNA ribosyltransferase-isomerase (Fragment) OS=Aquificae bacterium OX=2202151 GN=queA PE=3; SV = 1
LQEGDLLVFNNSKVLPARLYGRKPTGGRVEVLLTDFISREEWYALIGGRGIREGLSIEVAEDLRVEILEHLEEGRFRVRLHSPDPIKALDRHGKIPIPPYLKREEEPLDRVYYQTVFAQMEGSVAAPTASLHFSEELLKRLEEHGIKRTFITLHISYGTFKPVRVQEVELHRVDPEYVKVSEEAVRAIREAKALGRRVVAVGTTVVRALETAGYEPFEGWTDLYVYPGYSFRVVDALITNFHLPRSSLLFLVCAFGGREFILRAYEEAVREKYRFYSYGDGMLIL

SEQ ID NO: 63455 - protein, 334 aa, unidentified
  source 1..334: note = Aquificae bacterium
  REGION 1..334: note = tr|A0A3M2AEZ8|A0A3M2AEZ8_9BACT S-adenosylmethionine:tRNA ribosyltransferase-isomerase; OS = Aquificae bacterium OX=2202151 GN=queA PE=3 SV=1
MRVEEFDYYLPEELIAKYPAQPRHSARLMVLDRKDKSIKHDIFWNLPLYLQEGDLLVFNNTKVLPARLYGKKPTGGKVEVLLTDYINKHEWYGLVGGKGIKPGLVIEVAQDLRVEVLEQVEKAKFRLRLLSEDPLKALDKHGKIPIPPYLKREEEAIDRVYYQTVFAQVEGSTAAPTASLHFSEELLQRLEDHRIKKTFVTLHVSYGTFKPVKVSNVEEHRVDPEYVKVPKETVELIKETKEKGKRVVAVGTTVVRALETAGYEPYEGWTDLYIYPGYDFKVVDALITNFHLPRSSLLFLVCAFGGKDFVLKAYEVAVKERYRFYSYGDGMLIL

SEQ ID NO: 63456 - protein, 407 aa, Aquiflexum balticum
  REGION 1..407: note = tr|A0A1W2H8E4|A0A1W2H8E4_9BACT S-adenosylmethionine:tRNA ribosyltransferase-isomerase; OS = Aquiflexum balticum DSM 16537 OX=758820 GN=queA PE=3; SV = 1
MESVKNIQEIKLSDYEYTLPEERIAKFPLEKRDESKLIQYNKGEISHHQFFDLPELIQTGSMLVFNNTKVIPARLIFQRETGAKIEIFLLKPIEPTTIISEIMLNTGSVIWETMIGNLKKWKDHEILQGQVLINGEAIIISASIVDKEKKTVKFDWNGENIPFVSIVEAAGEVPLPPYLNRKATDEDRPRYQTVYSKKEGAVAAPTAGLHFTEEILEKLQKKEVKEEFVTLHVSAGTFQPIKDESVSEHPMHSEQVIIDLKTISNLVKHQDKIIAVGTTSMRTLESIYWYGTKLLLEKEEKFIIPKLYPYADYDQLPSRSESFQAVLHYMEEKNIHEITGSTEIFIMPGYQFRVCDGLITNFHQPSSTLVLLVAAFTKGDWRSIYEEAMQNDYRFLSYGDSSLIWNG

SEQ ID NO: 63457 - protein, 349 aa, Aquiflexum balticum
  REGION 1..349: note = tr|A0A1W2H361|A0A1W2H361_9BACT S-adenosylmethionine:tRNA ribosyltransferase-isomerase; OS = Aquiflexum balticum DSM 16537 OX=758820 GN=queA PE=3; SV = 1
MKLSDFKFDVPKKLISLYPAANRDESRLMVIHRKTGQIEHRLFKEIIEYFGEGDVFVMNNTKVFPARLYGNKEKTGAKIEVFLLRELNQELRLWDVLVDPARKIRVGNKLYFGDSDLVAEVIDNTTSRGRTIRFLFDGTDEEFYKTIDTLGETPILKEFIDRKVEAEDRERYQTIFAKHVGAVAAPTAGLHFTPHLLKRLELKGVEISPITLHVGLGTFRQVDVEDLTKHKMDSENYDIPEATVELVNKALDNKKRVVSVGTTTLKTIESSVTANGRLKASSGWTDKFIIPPYEFKIANSLITNFHLPESTLLMTASAFGGYDLIMKAYQEAIKEKYRFFSYGDAMLIL

SEQ ID NO: 63458 - protein, 349 aa, unidentified
  source 1..349: note = Aquimarina aggregata
  REGION 1..349: note = tr|A0A162CLK4|A0A162CLK4_9FLAO S-adenosylmethionine:tRNA ribosyltransferase-isomerase; OS = Aquimarina aggregata OX=1642818 GN=queA PE=3 SV=1
MKLSHFHFDLPQELLAEYPAENRDEARLMVLNRKEQTIEHKYFKDLIDYFEPNDVMVVNNTKVFPARLYGNKEKTGARIEVFLLRELNSETRLWDVLVDPARKIRIGNKLYFGDDESLVAEVIDNTTSRGRTLRFLYDGSYDEFRQKLTDLGETPLPKYIKRDTEPEDEERYQTIYAKNEGAVAAPTAGLHFSKHLMKRLEIKGVDFAEVTLHVGLGTFNPVEVEDLSKHKMDSEEAYITAHATNIINNGITQKRKICAVGTTVMRALESSVSSEHTLNEFRGWTNKFIFPPYDFSIANCMITNFHTPKSTLLMMVSAFAGHDFLKKAYEEAVKEKYKFYSYGDAMLII

SEQ ID NO: 63459 - protein, 349 aa, unidentified
  source 1..349: note = Aquimarina algiphila
  REGION 1..349: note = tr|A0A554VNL7|A0A554VNL7_9FLAO S-adenosylmethionine:tRNA ribosyltransferase-isomerase; OS = Aquimarina algiphila OX=2047982 GN=queA PE=3 SV=1
MKLSHFNFDLPQELLAEYPAENRDESRLMVLNRKEQTIEHKQFKDLIDYFEPNDVMVVNNTKVFPARLYGNKEKTGARIEVFLLRELNSETRLWDVLVDPARKIRIGNKLYFGDDESLVAEVIDNTTSRGRTLRFLYDGSYDEFRQKLNDLGETPLPKYIKREAEPEDEERYQTIYAKNEGAVAAPTAGLHFSKHLMKRLEIKGVDFSEITLHVGLGTFNPVEVEDLSKHKMDSEEAYVTAKAAETINNGITNKRRICAVGTTVMRALESSVSSDRTLNEFRGWTNKFIFPPYDFSIANCMITNFHTPKSTLLMMVSAFAGHDFIKEAYEEAVKEKYKFYSYGDAMLII

SEQ ID NO: 63460 - protein, 349 aa, unidentified
  source 1..349: note = Aquimarina amphilecti
  REGION 1..349: note = tr|A0A1H7MLL5|A0A1H7MLL5_9FLAO S-adenosylmethionine:tRNA ribosyltransferase-isomerase; OS = Aquimarina amphilecti OX=1038014 GN=queA PE=3 SV=1
MKLSHFNFDLPQDLLAEYPSENRDEARLMVLNRKDQTIEHKQFKDLIDYFEPNDVMVLNNTKVFPARLYGNKEKTGARIEVFLLRELNSETRLWDVLVDPARKIRIGNKLYFGDDESLVAEVIDNTTSRGRTLRFLYDGSYDEFRQKLTDLGETPLPKYIKRDAEPEDEERYQTIYAKNEGAVAAPTAGLHFSKHLMKRLEIKGVDFAEITLHVGLGTFNPVEVEDLSKHKMDSEEAYVTARATDTINNGITNKQRICAVGTTVMRALESSVSSDNTLNEFRGWTNKFIFPPYDFSIANSMITNFHTPKSTLLMMVSAFAGHDFIKEAYEEAVKEKYKFYSYGDAMLII

SEQ ID NO: 63461 - protein, 349 aa, unidentified
  source 1..349: note = Aquimarina atlantica
  REGION 1..349: note = tr|A0A023BX46|A0A023BX46_9FLAO S-adenosylmethionine:tRNA ribosyltransferase-isomerase; OS = Aquimarina atlantica OX=1317122 GN=queA PE=3 SV=1
MKLSHFNFNLPQDLLAEYPAENRDESRLMVLNRKDQTIEHKQFKDLIDYFEPNDVMVVNNTKVFPARLYGNKEKTGARIEVFLLRELNSETRLWDVLVDPARKIRIGNKLYFGDDESLVAEVIDNTTSRGRTLRFLYDGSYDEFRQKLNDLGETPLPKYIKRDAEPEDEERYQTIYAKNEGAVAAPTAGLHFSKHLMKRLEIKGVDFAEITLHVGLGTFNPVEVEDLSKHKMDSEEAYVTANAANTINNGIANKRRICAVGTTVMRALESSVSSERTLNEFRGWTNKFIFPPYDFSIANCMITNFHTPKSTLLMMVSAFAGHDFIKEAYEEAVKEKYKFYSYGDAMLII

SEQ ID NO: 63462 - protein, 349 aa, Aquimarina brevivitae
  REGION 1..349: note = tr|A0A4Q7NXS9|A0A4Q7NXS9_9FLAO S-adenosylmethionine:tRNA ribosyltransferase-isomerase; OS = Aquimarina brevivitae OX=323412 GN=queA PE=3 SV=1
MKLSHFNFNLPQDLLAEYPAENRDEARLMVLNRKDQTIEHKMFKDLIDYFEPQDVMVLNNTKVFPARLYGNKEKTGARIEVFLLRELNSETRLWDVLVDPARKIRIGNKLYFGDDESLVAEVIDNTTSRGRTLRFLYDGSYDEFREKLNELGETPLPKYIKRDTEPEDEQRYQTIYAKNEGAVAAPTAGLHFSKHLLKRLEIKGIDFAEITLHVGLGTFSPVEVEDLSKHKMDSEEAFITKQATEVINKGIEEKRRICAVGTTVMRALESSVSSDHTLNEFRGWTNKFIFPPYEFSIANSMITNFHTPKSTLLMMVSAFAGHDFVKEAYAEAVKEKYKFYSYGDAMLII

SEQ ID NO: 63463 - protein, 349 aa, Aquimarina sp.
  REGION 1..349: note = tr|A0A2D9Y517|A0A2D9Y517_9FLAO S-adenosylmethionine:tRNA ribosyltransferase-isomerase; OS = Aquimarina sp. OX=1872586 GN=queA PE=3 SV=1
MKLSHFNFNLPQELLAEYPAENRDEARLMVLNRKNQTIEHKMFKDLIDYFEPKDVMVLNNTKVFPARLYGNKEKTGARIEVFLLRELNSETRLWDVLVDPARKIRIGNKLYFGDDESLVAEVIDNTTSRGRTLRFLYDGSYDEFRQKLNDLGETPLPKYIKRETEPEDEERYQTIYAKNEGAVAAPTAGLHFSKHLMKRLEIKGIDFAEITLHVGLGTFSPVEVEDLSKHKMDSEEAYITKQATEVINNGITNKRRICAVGTTVMRALESSVSSDRTLNEFRGWTNKFIFPPYDFSIANCMITNFHTPKSTLLMMISAFAGHDFVKEAYAEAVKEKYKFYSYGDAMLIL

SEQ ID NO: 63464 - protein, 349 aa, Aquimarina sp.; identical to SEQ ID NO: 63458
  REGION 1..349: note = tr|A0A3A9VCZ3|A0A3A9VCZ3_9FLAO S-adenosylmethionine:tRNA ribosyltransferase-isomerase; OS = Aquimarina sp. AD10 OX=1714849 GN=queA PE=3 SV=1

SEQ ID NO: 63465 - protein, 349 aa, Aquimarina spongiae
  REGION 1..349: note = tr|A0A1M6DYX8|A0A1M6DYX8_9FLAO S-adenosylmethionine:tRNA ribosyltransferase-isomerase; OS = Aquimarina spongiae OX=570521 GN=queA PE=3 SV=1
MKLSHFNFNLPQELLAEYPAENRDEARLMVLNRKDQTIEHKQFKDLIDYFEPNDVMVVNNTKVFPARLYGNKEKTGARIEVFLLRELNSETRLWDVLVDPARKIRIGNKLYFGDDESLVAEVIDNTTSRGRTLRFLYDGSYDEFRQKLTDLGETPLPKYIKRDTEPEDETRYQTIYAKNEGAVAAPTAGLHFSKHLMKRLEIKGVDFAEITLHVGLGTFNPVEVEDLSKHKMDSEEAFITAQATNVINSGIANKQRICAVGTTVMRALESSVSSEKTLNEFRGWTNKFIFPPYDFSIANSMITNFHTPKSTLLMMVSAFAGHDFVKEAYEEAVKEKYKFYSYGDAMLIL

SEQ ID NO: 63466 - protein, 352 aa, unidentified
  source 1..352: note = Aquimixticola soesokkakensis
  REGION 1..352: note = tr|A0A1Y5SNX0|A0A1Y5SNX0_9RHOB S-adenosylmethionine:tRNA ribosyltransferase-isomerase; OS = Aquimixticola soesokkakensis OX=1519096 GN=queA PE=3; SV = 1
MKLSDFDFALPDDLIATRPAKPRPSARLLVATPQALHDARVYDLVTWLQRGDRLVLNDTRVLPARLSGKRGRDTAQGYQEARIEVTLLEPQPQAGQWMALIKPAKKLALGEEVRFSDDLCATLIRKDGGEAILDFNLTGEDFDLALAQAGSMPLPPYIAAKRPADEADKQDYQTVWAARSGAVAAPTASLHFDEDLLAQLAQKGVEFTHVTLHVGAGTFLPVKVENVDDHKMHAEWGEVTPQAAGEIAATKAAGGRVIPVGTTALRLIESAARDSGQIAPFLGTTDIFIKPGFEFRVADALMTNFHLPKSTLMMLVSAVMGAERVREIYAHAIAQRYRFFSYGDASLLLPKG

SEQ ID NO: 63467 - protein, 357 aa, Aquimonas voraii
  REGION 1..357: note = tr|A0A1G6RPD5|A0A1G6RPD5_9GAMM S-adenosylmethionine:tRNA ribosyltransferase-isomerase; OS = Aquimonas voraii OX=265719 GN=queA PE=3 SV=1
MKKTDFDFDLPPELIAQAPLPERSASRLLHLQADGGYTDRHVRDLPELLQPGDLLVFNDTRVIPARLFGHKDSGGRVEILIERITGTHEARAQLGVSKSPKAGVRITLDAGGEFEVLGREGEFYLLRLLGDEALEKLLLRAGRLPLPPYIQREPGQDDAERYQTVFAKHVGAVAAPTAGLHFDEPLLAQLRARGVQMGHITLHVGAGTFQPMRADSVHEHTMHSEWLNVGADLVEQIRRTRTAGKRVVAVGTTVVRALETAMREGEVQPFAGDTQIFIFPGYRIRSVDALITNFHLPQSTLMMLVSAFCGRERILDAYRHAVEQRYRFFSYGDAMLLEPEAQAAVIWDSGFGIRSEQ

SEQ ID NO: 63468 - protein, 342 aa, Aquisalibacillus elongatus
  REGION 1..342: note = tr|A0A3N5BCS5|A0A3N5BCS5_9BACI S-adenosylmethionine:tRNA ribosyltransferase-isomerase; OS = Aquisalibacillus elongatus OX=485577 GN=queA PE=3 SV=1
MNIEDFDFELPEELIAQTPLMNRAESRLMVLNREHEQIDHRYFYQIIDYLNPGDCLVLNNTKVLPARLFGQKEDTGGKVETLLLNQLEGDEWEVLIKPAKKVKVGTRLTFGDGLLKAECVGIKDHGGRVIRFEYEGIFLEVLDKLGEMPLPPYIKEQLDDRDRYQTVYAEEVGSAAAPTAGLHFTQELLEQIKAKGVHIAYITLHVGLGTFRPVQVDNIEEHDMHAEFYQMTQETADLLNEAKQGPNKIVAVGTTSVRTLETIARDENGQFKETSGWTDIFIYPPYDFKAIDGMITNFHLPKSTLIMLVSAFANKDFILNAYHKAVQERYRFFSFGDAMIIL

SEQ ID NO: 63469 - protein, 347 aa, Aquisalimonas asiatica
  REGION 1..347: note = tr|A0A1H8PKX2|A0A1H8PKX2_9GAMM S-adenosylmethionine:tRNA ribosyltransferase-isomerase; OS = Aquisalimonas asiatica OX=406100 GN=queA PE=3 SV=1
MRRRDFHFDLPQELIAERPLERRTDSRLLCLDGATGALADRQFAELESLLRPGDLLVLNDTRVIPARLFGHKASGGRVEVLLERVIGDRRVLAHLRVSRAPAAGARLHLDGGAEAEVEGRDGACFVLAVHGVDDLFAYLDAHGHVPLPPYIQRADEAVDHDRYQTVFAREPGAVAAPTAGLHFDAAMLERLAGAGVEQAQVTLHVGAGTFQPVRAEKVEDHHMHSELLQVPERTCEQVRACRERGGRVVAVGTTVVRALESAARDGELSPFRGETDIFIYPGYRFRVVDALVTNFHLPESSLIMLVSAFAGHRHVMAAYDHAVAQRYRFFSYGDAMFIHPPSAEARA

SEQ ID NO: 63470 - protein, 348 aa, Aquisphaera giovannonii
  REGION 1..348: note = tr|A0A5B9W5G9|A0A5B9W5G9_9BACT S-adenosylmethionine:tRNA ribosyltransferase-isomerase; OS = Aquisphaera giovannonii OX=406548 GN=queA PE=3 SV=1
MLASEFDFDLPVELIAQHPAAAREHSRLMVVRRDGGRIEHRRFDELPALLDGRDILARNCTKVIPARLIGRREATGGKWEGLFLREVEGGAWEILAATRGRPAPGERVVVDHGGGEGLRLALESRGEEGRWIVRPLGPPAASTLALLERHGQIPLPPYIRKGRAGEEDRERYQTVFARAPGSVAAPTAGLHFSDATFRDLAAKGVAWVDLTLHVGVGTFRPIEAERIEDHVMHAEWAELTAEAARALNARRAAGGRVVAVGTTSTRTLETAAAGGEIAPFSGPTGLFIRPGHAFRGLDALVTNFHLPRSSLLVLVSALAGVDLIREAYREAVARRYRFYSYGDAMLIL

SEQ ID NO: 63471 - protein, 343 aa, Aquitalea magnusonii
  REGION 1..343: note = tr|A0A3G9GAI1|A0A3G9GAI1_9NEIS S-adenosylmethionine:tRNA ribosyltransferase-isomerase; OS = Aquitalea magnusonii OX=332411 GN=queA PE=3 SV=1
MLLSDFDYHLPDHLIAQHPPAVRGASRLLHVAGPTLSDGQFADFASLLAPGDVMVFNDTRVIKARLFGEKASGGKIEALIERVLDEHTALAHVRSSKSPKPGTRLIFAERWEAEMLGREGELFKLRFLAEDNLFDILDASGKLPLPPYIERTAEGEDDERYQTVYAREKGAVAAPTAGLHFTEEMLAALQAKGVELAYVTLHVGAGTFQPVRVENIADHKMHSEIYDVPQRTYDLIQAAHARGSKVLAVGTTSMRALESAARSGELVAGRGETDIFITPGYRFRVVDRLLTNFHLPKSTLLMLVSAFAGYAEMRAAYAHAVQQEYRFFSYGDAMLLERKDEQG

SEQ ID NO: 63472 - protein, 343 aa, Aquitalea magnusonii
  REGION 1..343: note = tr|A0A0F3KNT2|A0A0F3KNT2_9NEIS S-adenosylmethionine:tRNA ribosyltransferase-isomerase; OS = Aquitalea magnusonii OX=332411 GN=queA PE=3 SV=1
MLLSDFDYHLPDHLIAQHPPAVRGASRLLHVAGSTLSDGQFADFASLLRPGDVMVFNDTRVIKARLFGEKASGGKIEALIERVLDEHTALAHVRSSKSPKPGTRLIFAERWEAEMLGREGELFKLRFLAEDNLFDILDASGKLPLPPYIERTAEGEDDERYQTVYAREKGAVAAPTAGLHFTEEMLAALQAKGVELAYVTLHVGAGTFQPVRVENIADHKMHSEIYDVPQRTYDLIQAAHARGSKVLAVGTTSMRALESAARSGELVAGRGETDIFITPGYRFRVVDRLLTNFHLPKSTLLMLVSAFAGYAEMRAAYAHAVQQEYRFFSYGDAMLLERKDEQG

SEQ ID NO: 63473 - protein, 343 aa, Aquitalea sp.
  REGION 1..343: note = tr|A0A454JIJ7|A0A454JIJ7_9NEIS S-adenosylmethionine:tRNA ribosyltransferase-isomerase; OS = Aquitalea sp. MWU14-2217 OX=2480983 GN=queA PE=3 SV=1
MLLSDFDYHLPEHLIAQHPPAVRGASRLLHVAGTSLADGQFADFAAHVSAGDVMVFNDTRVIKARLFGEKASGGKIEALVERVLDAHTVLAHVRSSKSPKPGTRLIFAERWEAEMVERDDALFKLRFLAEDNVFDILEASGKLPLPPYIERSAEGDDDERYQTVYAREQGAVAAPTAGLHFNEEMLAALQAKGVELAYVTLHVGAGTFQPVRVENIAEHKMHSEIYEVPQRTYDLIQAAHARGNKVLAVGTTSMRALESAARSGELVAGRGETDIFITPGYRFRVVDRLLTNFHLPKSTLLMLVSAFAGYPEMRAAYAHAVQQQYRFFSYGDAMLLERKDEQG

SEQ ID NO: 63474 - protein, 343 aa, Aquitalea sp.
  REGION 1..343: note = tr|A0A3N7DXK8|A0A3N7DXK8_9NEIS S-adenosylmethionine:tRNA ribosyltransferase-isomerase; OS = Aquitalea sp. FJL05 OX=2153366 GN=queA PE=3 SV=1
MLLSDFDYHLPEHLIAQHPPAVRGASRLLHVAGTSLTDGQFADFASQLKAGDVMVFNDTRVIKARLFGEKASGGKIEALVERVLDAHTVLAHVRSSKSPKPGTRLIFAERWEAEMVERDDALFKLRFLAEDNVFDILEASGKLPLPPYIERSAEGDDDERYQTVYAREQGAVAAPTAGLHFTEAMLAALQAKGVELAYVTLHVGAGTFQPVRVENIAEHKMHSEIYEVPQRTFELIQSARARGNQVLAVGTTSMRALESAARSGELVAGRGETDIFITPGYRFRVVDRLLTNFHLPKSTLLMLVSAFAGYPEMRAAYAHAVEQQYRFFSYGDAMLLERKDEQG

SEQ ID NO: 63475 - protein, 349 aa, unidentified
  source 1..349: note = Arachidicoccus ginsenosidivorans
  REGION 1..349: note = tr|A0A5B8VR12|A0A5B8VR12_9BACT S-adenosylmethionine:tRNA ribosyltransferase-isomerase; OS = Arachidicoccus ginsenosidivorans OX=496057 GN=queA PE=3; SV = 1
MKLSQFRFDLPLNLIAQNPPKRREDSRLMVVERNTGRIEHKQFKDVLDYFDDKDVFVVNNTKVFPARMYGRKEKTGAKIEVFLLRELNKQNRLWDVIVDPARKIRVGNKLYFGENDELVAEVIDNTTSRGRTIRFLWDSDEASFRKMLEFMGETPLPKYIKRKPTEEDKERYQTVYAKYEGAVAAPTAGMHFSKELIKRLEIQGIKFAELTLHTSLGTFRPIEVEDLSKHKMDAEYFRIEDETCKIVNAAKTTGHRVCSIGTTTMRALESSFTAQGLLKPNEGWTNVFVHPPHKFSIADSLITNFHLPKTSLLIMVCAFTGYDLAMEAYQVAIKEKYNFFTYGDAMLVI

SEQ ID NO: 63476 - protein, 421 aa, unidentified
  source 1..421: note = Arachidicoccus ginsenosidivorans
  REGION 1..421: note = tr|A0A5B8VLH9|A0A5B8VLH9_9BACT S-adenosylmethionine:tRNA ribosyltransferase-isomerase; OS = Arachidicoccus ginsenosidivorans OX=496057 GN=queA PE=3; SV = 1
MTAQPHANSSLVHPEELSIESFDYDLPEDRIAKYPLAVRDQSKLLIYNSNDSRQIQEKIYQQLDEQLPADCLLVFNNTKVVEARLIFKKDTGSKIELFCLEPGGAYPDITTAMLQKGTVLWKCLVGGAKKWKTGALKMRLEHNGQTIELQAEKQEKQGDSFLIRFSWIPESLSFAEMLHLTGQLPLPPYLNRATEQNDLKTYQTVYADKDGSVAAPTAGLHFTPSLLQKLSDKGIKEAFVTLHVGAGTFKPVKADKMKDHEMHAEFMEVPLDFLETLYEQAKNKRKILAVGTTSLRTLESLYWMGVKLLTDQLDPFVVEQWQPYRLPQNKTLTEALLAVTDSLKQAGKKTLVTQTRIIIAPGYQLRVADGILTNFHQPHSTLLLLIAAIVGQEWKNIYQYALTHDFRFLSYGDGSLLWKNT

SEQ ID NO: 63477 - protein, 349 aa, unidentified
  source 1..349: note = Arachidicoccus rhizosphaerae
  REGION 1..349: note = tr|A0A1H3WG39|A0A1H3WG39_9BACT S-adenosylmethionine:tRNA ribosyltransferase-isomerase; OS = Arachidicoccus rhizosphaerae OX=551991 GN=queA PE=3 SV=1
MKLSQFRFDLPLNLIAQNPPKNREDARLMVVERSTGRIEHKQFKDVLDYFDDKDVFVVNNTKVFPARMYGRKEKTGAKIEVFLLRELNKQNRLWDVIVDPARKIRVGNKLYFGENDELVAEVIDNTTSRGRTIRFLWDSDEASFRKMLEFMGETPLPKYIKRKPTEEDKERYQTVYAKYEGAVAAPTAGMHFSKELIKRLEIQGVKFAELTLHTSLGTFRPIEVEDLSKHKMDAEYFRIDDETCRIVNAAKTSGHRICSVGTTTMRALESSFTAQGLLKPNEGWTNVFVHPPHTFSIADSLISNFHLPKTSLLIMVCAFTGYDLAMEAYQTAIKEKYNFFTYGDAMLVI

SEQ ID NO: 63478 - protein, 429 aa, unidentified
  source 1..429: note = Arachidicoccus rhizosphaerae
  REGION 1..429: note = tr|A0A1H3XV05|A0A1H3XV05_9BACT S-adenosylmethionine:tRNA ribosyltransferase-isomerase; OS = Arachidicoccus rhizosphaerae OX=551991 GN=queA PE=3 SV=1
MTDKNEQPGNTARRVHPEELSIEDFDYPLPDSRIAKYPLTTRDQSKLLIFNKNNQKDITERIYRDLDEELPKGSLLVFNNTKVVEARLLFKKQTGSTIELFCLEPAGNYPDITTAMLSRGEVLWKCLVGGAKKWKSGPLTLEVAGPHPANTVTVTANKIEKQGDSFIIQLNWTPVELSFAEILHLSGQLPLPPYLNRATEAQDLETYQTVYAKQDGSVAAPTAGLHFTKDLLKRLADKGIKEAFVTLHVGAGTFKPVKADKMKDHEMHAEFMEIPCTFIETLLQQAKLKPEAKILAVGTTSLRTLESLYWMGVKLLTAQKDPYIISQWEPYQLEQGISLVDSLAALWQALQNDGKSALITHTQIIIAPGYNLRVADAILTNFHQPHSTLLLLIAAVVGNHWKSIYEYALGHDFRFLSYGDGSLLWQVKP

SEQ ID NO: 63479 - protein, 403 aa, unidentified
  source 1..403: note = Arachidicoccus sp.
  REGION 1..403: note = tr|A0A386HSS6|A0A386HSS6_9BACT S-adenosylmethionine:tRNA ribosyltransferase-isomerase; OS = Arachidicoccus sp. KIS59-12 OX=2341117 GN=D6B99_16080; PE = 3 SV=1
MHPKQLSINDFTYELPDQKIAKFPLETRDESKLLIYKNGEIADDIYAYLPSYLPEKSFLVFNNTKVVEARLLFEKESGSTVELFCLEPADDYSDITTAMLQKQKVLWKCLIGGAKKWKEGLLRKVIPNHQNKYLNAQKVEKRKDYFLIEFTWEDPDLSFAEILHLLGQIPVPPYLNRKAEEKDKETYQTVYAKYEGSVAAPTAGLHFTETLLQNLKNRNIHSSFVTLHVGAGTFKPVKADSMQAHEMHAEFIDVSLLFLEELLHNISEKIVVVGTTSMRTVESLYWMGVKVLSKIEDYTMVSQWEPYELPQHFSATESLNALIGVLKDKNATRLLARTQIIIAPGYPLQIVDGLITNFHQPKSTLLLLVAAVVGNDWKKIYQHALNQDYRFLSYGDGSLLWKN

SEQ ID NO: 63480 - protein, 403 aa, unidentified
  source 1..403: note = Arachidicoccus sp.
  REGION 1..403: note = tr|A0A191TKJ1|A0A191TKJ1_9BACT S-adenosylmethionine:tRNA ribosyltransferase-isomerase; OS = Arachidicoccus sp. BS20 OX=1850526 GN=A9P82_07875 PE=3; SV = 1
MHPKHLSINDFTYDLSDEKIAKFPLQKRDESKLLIYESGKIEQSVYKNLPEFLSENTLLVFNNTKVVEARLLFKNINGANIELFCLEPADDYSDITTAMLQKGKVFWKCLVGNAKKWKEDLLEKTISSGGKSFILQVRKVEKQNDYFLIEFLWNIDEYSFAEVLHFAGQIPLPPYLHREAEEKDKETYQTVYAKHDGSVAAPTAGLHFTENLLQQLKNKNIQTDFVTLHVGAGTFKPVKSDTMEAHEMHAEFIDVSVELINSLIDNLSGKIVSVGTTSLRTLESLYWLGVKVLSNIFPLEISQWEVYDLPQNISASDALNALKNYLGKNEQQRLLTKTQIIIAPNYELRIANGLITNFHQPKSTLLLLVAAFIGDDWKNVYDYALQNDFRFLSYGDGSLLWRK

SEQ ID NO: 63481 - protein, 354 aa, unidentified
  source 1..354: note = Arboricoccus pini
  REGION 1..354: note = tr|A0A212R694|A0A212R694_9PROT S-adenosylmethionine:tRNA ribosyltransferase-isomerase; OS = Arboricoccus pini OX=1963835 GN=queA PE=3 SV=1
MDVSLFDFDLPSDLIAQTPAVNRDAARLLTIGATLADRAIVELPDLLRPGDLLIVNDTRVLPVRFEGHRAASGERPALVFAATLVEPSGTDHWWALCRPAKRLRAGDPVRLGQTLLARVAGKDDEGRVLLAFELEGQALLAGIKAEGAMPLPPYIHRPAGATAADRLRYQTVFAARDGAVAAPTAALHFTEALLARLAAAGIERASLTLHVGMGTFQPVKAEDTAGHIMHEEWYELPAATVAAIERTRAQGGRVVAVGTTVLRTLESALDDQGRIVARSGRTGIFITPGWQFRTADLLLTNFHLPRSTLFMLVSAFGGMDRLKAAYAHAIKERYRFFSYGDACLIERAEASLPG

SEQ ID NO: 63482 - protein, 334 aa, Archangium gephyra
  REGION 1..334: note = tr|A0A2W5SN22|A0A2W5SN22_9DELT S-adenosylmethionine:tRNA ribosyltransferase-isomerase; OS = Archangium gephyra OX=48 GN=DI536_34515 PE=3 SV=1
MPSPRPAPTSLLLGEGEPRVVDFRELPDQLREGDLLVMNDAATFPGSVHFEHRHLRLEARLFEKTPRGFKAVLFGPGDFHTRTEARTPPPLLDPGEHLRLAGLDAEVIDVSPTSPRLVELAFTAHDDAQWAALYEHGHVIQYAHRAERLPLWSVQNVYGARPWAAEQPSAGHALTFELLRRLHVATLTHATGLSATGDPALDAALPFPERYEIPTATLDAVNAATRVIAVGTSVVRALEAWAMTGERAGVASEPIEPDTPLHVVDGLLTGIHSPGESHYRLLGAFLSPERLRAVCELANRKHLRTHENGDLALLWCDREVTSADAPAETRNVRS

SEQ ID NO: 63483 - protein, 341 aa, Archangium gephyra
  REGION 1..341: note = tr|A0A0G3A677|A0A0G3A677_9DELT S-adenosylmethionine:tRNA ribosyltransferase-isomerase; OS = Archangium gephyra OX=48 GN=AA314_08901 PE=3 SV=1
MNAARWPREQPDSGRLLHVAPRSGRIDDVRMAELPRMLRPGDLLVLNDAATLPAALHGHTEAGAPIELRLVAREEEGTWTAVLFGAGDWRTRTEDRPLPPPVSPGERLVLGGLGARVVAVLPPSPRLLRVSFEAQGAALWAALYRAGRPVQYAHVERPLALWHIQTAYAARPWAVETPSAGLPLTWALLLDLKRRGVRLASLTHAAGLSSTGDAVLDAALPRPERFDVPAASVEAIHATRASGGRVVAVGTTVVRALEGRAAQTGGRLEAGEGVTDLLLGPGFVPRVVDGLLSGMHEPGTSHFTLLQAFAPAELLRAATVLAEAHGYLGHEFGDSCLLLDP

SEQ ID NO: 63484 - protein, 359 aa, Archangium sp.
  REGION 1..359: note = tr|A0A1Q3HWM0|A0A1Q3HWM0_9DELT S-adenosylmethionine:tRNA ribosyltransferase-isomerase; OS = Archangium sp. Cb G35 OX=1920190 GN=BO221_02180 PE=3; SV = 1
MRGPGGCRSRRSGTPGGRMNAARWPREQPDSGRLLHVAPRSGRLDDVRMSELPRMLRPGDLLVLNDAATLPAALHGRTEAGAPIELRLVAREEEGTWTAVLFGAGDWRMRTEDRPLPPSVSPGERLVLGGLGARVVAVLPPSPRLLRVSFEARGAALWSALYRAGRPVQYAHVERPLALWHIQTAYAARPWAVETPSAGLPLTWALLLDLKRRGVRLASLTHAAGLSSTGDAVLDAALPRPERFDVPAATVEAVHATRAAGGRVVAVGTTVVRALEGRAAQTGGRLEAGEGVTDLLLGPGFVPRVVDGLLSGMHEPGTSHFTLLQAFAPVELLRAATVFAEARGYLGHEFGDSCLLLDP

SEQ ID NO: 63485 - protein, 361 aa, Archangium sp.
  REGION 1..361: note = tr|A0A1Q3HFN2|A0A1Q3HFN2_9DELT S-adenosylmethionine:tRNA ribosyltransferase-isomerase; OS = Archangium sp. Cb G35 OX=1920190 GN=queA PE=3 SV=1
MSSLLSDYDFELPEAQIAQAPLASRDASRLLVVSRSSGAREHRHFSGLTGLLREGDLLVVNDARVIPARLLGSKAGTGGRVELLVVRPSAPTLTSQALGGATEALEWICLGQASKGLKPGARVSFPEGLEAEVLEALGGGEYRVRFHAAPGTSLAELLDKAGRLPLPPYITRAPEAADAERYQTVYARASGAVAAPTAGLHFTQATFEALAARGIHRVEVTLDVGPGTFLPVREENLEKHHMHPERYFVPEATAQAVNAAKAEGRRVVAVGTTVVRTLESATDPDSGALRAGTGETTLFIRPGFRFRQVDVLLTNFHLPRSTLVVLVSALLGRERTLDAYREAVAAGYRFFSYGDAMLVTE

SEQ ID NO: 63486 - protein, 341 aa, unidentified
  source 1..341: note = Archangium violaceum
  REGION 1..341: note = tr|A0A084SKJ8|A0A084SKJ8_9DELT S-adenosylmethionine:tRNA ribosyltransferase-isomerase; OS = Archangium violaceum Cb vi76 OX=1406225 GN=Q664_38045; PE = 3 SV=1
MNAARWPREQPDSGRLLHVAPRSGRLDDVRMSDLPRMLRPGDLLVLNDAATLPAALHGRTEAGAPIELRLVAREEEGTWTAVLFGAGDWRMRTEDRPLPPPVSPGERLVLGGLGARVVAVLPPSPRLLRVRFEAQGAALWSALYRAGRPVQYAHVERPLALWHIQTAYAARPWAVETPSAGLPLTWALLLDLKRRGVRLASLTHAAGLSSTGDAVLDAALPRPERFDVPAATVEAIQTTRDSGGRVVAVGTTVVRALEGRAAQTGGRLEAGEGVTDLLLGPGFVPRVVDGLLSGMHEPGTSHFTLLQAFAPVELLRAATVFAEARGYLGHEFGDSCLLLDP

SEQ ID NO: 63487 - protein, 361 aa, unidentified
  source 1..361: note = Archangium violaceum
  REGION 1..361: note = tr|A0A084T1T1|A0A084T1T1_9DELT S-adenosylmethionine:tRNA ribosyltransferase-isomerase; OS = Archangium violaceum Cb vi76 OX=1406225 GN=queA PE=3; SV = 1
MSSLLSDYDFELPEAQIAQAPLASRDASRLLVVSRSSGVREHRHFSDLTGLLREGDLLVVNDARVIPARLLGSKAGTGGRVELLVVRPSAPTLTSQALGGATEALEWICLGQASKGLKPGARVSFPEGLEAEVLEALGGGEYRVRFHAAPGTSLAERLDKAGRLPLPPYITRAPEAADAERYQTVYARASGAVAAPTAGLHFTQATFEALAARGIHRVEVTLDVGPGTFLPVREENLEKHHMHPERYFVPEATARAVNAAKAEGRRVVAVGTTVVRTLESATDPDSGALRTGTGETTLFIRPGFRFRQVDVLLTNFHLPRSTLVVLVSALLGRERTLEAYREAVAAGYRFFSYGDAMLVTE

SEQ ID NO: 63488 - protein, 416 aa, Arcicella aurantiaca
  REGION 1..416: note = tr|A0A316DKR6|A0A316DKR6_9BACT S-adenosylmethionine:tRNA ribosyltransferase-isomerase; OS = Arcicella aurantiaca OX=591202 GN=queA PE=3 SV=1
MQNIKLSDYTYDLPDERIAKFPLPKRDESKLQVYQQGKITHTVFKNITDYLPKNSLLVFNNTKVIPARIHFQKSTGAVIQIFLLHPVLPTPVINLAMEVTDSCVWECMIGNRKRWKKGDVLSQTLTIDGQEVKVNAEIFDEEKNYVKFRYEVENSEIPKPTTSYLLPHTYELPFSKLIQSLGQIPLPPYLNREAETADYETYQTVYSEKKGAVAAPTAGLHFTDEVLKNLENQGIKQEFLTLHVGAGTFQPIKVENIIEHKMHNEQVVISRENVENLLANLGNIIPVGTTSMRTLESLYWYGVKLISDKNSPFFIEKLYPYQHENVPSAEESLKAILEKMIANNDSEITGETEIFIFPSYQFKLCKGIITNYHQPESTLILLIAALIGEDWRRVYEEAMTKDYRFLSYGDSSLLLP

SEQ ID NO: 63489 - protein, 362 aa, Arcicella aurantiaca
  REGION 1..362: note = tr|A0A316EFG9|A0A316EFG9_9BACT S-adenosylmethionine:tRNA ribosyltransferase-isomerase; OS = Arcicella aurantiaca OX=591202 GN=queA PE=3 SV=1
MIPSEKTANIIRMKLSEFRFDLPNNLISLYPTENRGESRMMVVNRKTQTIEHRMFTDILDYFDDGDVMVTNDTKVFPARLFGQKEKTGAKIEVFLLRELNREHRLWDVLVDPARKIRVGNKLYFGDSDLVAEVIDNTTSRGRTIRFLYDGDHDALMKQIHLLGETPLPDEIRFKRNVEPSDEERFQTIYADKVGAVAAPTAGMHFSKIIMKRLELKGINFTPLTLHVGLGTFRQVDVEDLTKHKTDSENFNITQETCDVVNAGIDAKKRICAIGTTSMRALESSVSADGHLKPIEGWTDKFIFPPYDFRIPNALLTNFHLPESVLIMMTSAFGGFELVREAYEVAIKEKYKFFTYGDAMLII

SEQ ID NO: 63490 - protein, 341 aa, unidentified
  source 1..341: note = Arcobacter anaerophilus
  REGION 1..341: note = tr|A0A4V1LQE6|A0A4V1LQE6_9PROT S-adenosylmethionine:tRNA ribosyltransferase-isomerase; OS = Arcobacter anaerophilus OX=877500 GN=queA PE=3 SV=1
MQLDPLKTSSYDYTLPKELIATHPVYPADSAKLLVYDRKKDKIIHTTFKDLYDFIPKDASIFLNDTKVIKARIYGNKDSGGKVELLFNKPLFMDRYLVMIRGKVRVGTKIFFENNLNAEVLEVNEDGSRVVNFFKDDEKLDFLSLVEILNKIGHLPLPPYMNREDEEKDNQDYQTLFAKNYGAVAAPTASLHFTEELLEKINKNFPVNYLTLHVGAGTFKPVDVEEILSHPMHSEYFEIDAKAKKALDEAKKVLAVGTTVTRTVEYYARTNKIQGECDLFLNPLNKPIKVDYLLTNFHLPKSTLIMLIASFIGLEKTLEVYNEAIKQKYRFFSYGDGMLIL

SEQ ID NO: 63491 - protein, 340 aa, unidentified
  source 1..340: note = Arcobacter aquimarinus
  REGION 1..340: note = tr|A0A4Q0UTG3|A0A4Q0UTG3_9PROT S-adenosylmethionine:tRNA ribosyltransferase-isomerase; OS = Arcobacter aquimarinus OX=1315211 GN=queA PE=3 SV=1
MLDPLKTSSYDYDLPKELIATHPVSPADSARLLVYDRKTNKITHSTFKNLMDFLPDDLSIFLNDTKVIKARIFGTKETGGKIELLLNKPLFMDRYLVMIGGKVKVGTKLFFDENLTALVLEINEDGSRVVEFFQNDKKLDFLEVVEILNKIGHLPLPPYMNRADEKKDEQDYQTLFAKNYGAVAAPTASLHFTPELLEKINNKYNVNYLTLHVGAGTFKPVDAEDILNHPMHSEYFEIGIDAKKALDNASKVLAVGTTVTRTVEYYVRTNKIQGECDLFLNPANKPIKVDCLLTNFHLPKSTLIMLIASFVGLEKTLEIYHEAIKEKYRFYSYGDGMLIL

SEQ ID NO: 63492 - protein, 343 aa, unidentified
  source 1..343: note = Arcobacter bivalviorum
  REGION 1..343: note = tr|A0A345IXB1|A0A345IXB1_9PROT S-adenosylmethionine:tRNA ribosyltransferase-isomerase; OS = Arcobacter bivalviorum OX=663364 GN=queA PE=3 SV=1
MKSNLDPLKTSSYDYHLPKELIATKPVYPADSAKLLVYNRQTDTITHTTFKSLMEFLPENLSIFLNDTKVIKARIFGQKQSGGKVELLFNKPLFMDRYLVMIRGKVKVGTKLFFPMDLEAEVLEVNEDGSRIVNFIQKDKKLDFLTLVEILNEIGHLPLPPYMNREDEEKDNEDYQTLFAKNYGAVAAPTASLHFTEELLEKINNKYKVDYLTLHVGAGTFKPVDSEEILEHPMHSEYFEIGIEAKKALDEAQKVLAVGTTVTRTIEYYARTNKIQGECDLFLNPVNKPIKVDHLLTNFHLPKSTLIMLIASFVGLEKTLEIYEEAIKERYRFYSYGDGMLII

SEQ ID NO: 63493 - protein, 340 aa, Arcobacter butzleri
  REGION 1..340: note = sp|A8EU90|QUEA_ARCB4 S-adenosylmethionine:tRNA ribosyltransferase-isomerase OS=Arcobacter butzleri (strain RM4018) OX=367737 GN=queA PE=3 SV=1
MLDPLKTSSYDYNLPKNQIATYPVTPADSAKLLIFNRSTNTIIHSTFKDILEFLPNDLSIFLNDTKVIKARIFGVKDSGGQIELLLNKPLFMDRYLVMIRGKVRVGTKLLFDENLSAIVEEVDEDGSRIVEFFQDEKKLDFLSLVEILNKIGHLPLPPYMNREDEKQDEQNYQTLFAKNYGAVAAPTASLHFTPELLKNLEEKYGLNYLTLHVGAGTFKPVDVEDILSHPMHSEYFEIGIDAKKNLDKANKVLAVGTTVTRTIEYYARTNKIQGECDLFLNPANKPIKVDYLLTNFHLPKSTLIMLVASFIGLEKTLEIYETAIKENYRFYSYGDGMLII

SEQ ID NO: 63494 - protein, 340 aa, Arcobacter butzleri
  REGION 1..340: note = tr|A0A0M1UMF7|A0A0M1UMF7_9PROT S-adenosylmethionine:tRNA ribosyltransferase-isomerase; OS = Arcobacter butzleri ED-1 OX=944546 GN=queA PE=3 SV=1
MLDPLKTSSYEYNLPKNQIATYPVTPADSAKLLVFNRSTNTIIHSTFKDILEFLPNDLSIFLNDTKVIKARIFGLKDSGGQIELLLNKPLFMDRYLVMIRGKVRVGTKLLFDENLSAIVEEVNEDGSRIVEFFQEEKKLDFLSLVEILNKIGHLPLPPYMNREDEKQDEQNYQTLFAKNYGAVAAPTASLHFTPQLLKNLEEKYGLNYLTLHVGAGTFKPVDVEDILSHPMHSEYFEIGIDAKKNLDKANKVLAVGTTVTRTIEYYARTNKIQGECDLFLNPANKPIKVDYLLTNFHLPKSTLIMLVASFIGLEKTLEIYETAIKENYRFYSYGDGMLII

SEQ ID NO: 63495 - protein, 345 aa, unidentified
  source 1..345: note = Arcobacter canalis
  REGION 1..345: note = tr|A0A2G1CYD2|A0A2G1CYD2_9PROT S-adenosylmethionine:tRNA ribosyltransferase-isomerase; OS = Arcobacter canalis OX=1912871 GN=queA PE=3 SV=1
MTKNSLDPLKTSSYDYTLPKELIATHPVSPADSARLLVYDRKTDKIIHSTFKNLLDFIPNNVNIFLNDTKVIKARIFGHKDSGGKVELLLNKPLFMNRYLVMIRGKVKVGTVLTFDKNLKAEVLEVSEDGSRVVKFFLNEKENLEFLELVDILNDIGHLPLPPYMNREDEEKDNENYQTLFAKKYGAVAAPTASLHFTPELFKKLENKFNIDYLTLHVGAGTFKPVDTEEILNHPMHSEYFEINESSKKSLDNSKKVLAVGTTVTRTIEYYARTNKIQGECDLFLNPSNTPIKVNHLLTNFHLPKSTLIMLIASFVGLEKTLEIYEEAINEKYRFYSYGDGMLII

SEQ ID NO: 63496 - protein, 340 aa, Arcobacter cibarius
  REGION 1..340: note = tr|A0A5J6RH46|A0A5J6RH46_9PROT S-adenosylmethionine:tRNA ribosyltransferase-isomerase; OS = Arcobacter cibarius OX=255507 GN=queA PE=4 SV=1
MSDFLKTSSYDFFLPQNQIATTPAIPADSAKLLVYDRKNDKIIHTVFKNIMDFLPEELTIFLNDTKVIKARIFGQKISGAKIELLLNKPLFMDRFLVMIRGKVKVDTKLIFDESLTAVVLELNEDGSRVVEFFKDDKKLDFNSLVEILNKIGHIPLPPYMNREDTKDDETNYQTLFAKNYGAVAAPTASLHFTSELLEKLEKKYGLNYLTLHVGAGTFKPVDVEDILSHPMHSEYFEINKNCKDKIDNAKNILAVGTTVTRTLEFYARKNMICGECDLFLNPSNKPIIVNHLLTNFHLPKSTLIMLVASFIGLEKTLEIYDIAIKNNYRFYSYGDAMLII

SEQ ID NO: 63497 - protein, 340 aa, unidentified
  source 1..340: note = Arcobacter cloacae
  REGION 1..340: note = tr|A0A4Q0V2X5|A0A4Q0V2X5_9PROT S-adenosylmethionine:tRNA ribosyltransferase-isomerase; OS = Arcobacter cloacae OX=1054034 GN=queA PE=3 SV=1
MLDPLKTSSYDYDLPKELIATHPVSPADCARLLVYDRKTDKITHSTFKNLMDFLPDDLSIFLNDTKVIKARIFGTKETGGKIELLLNKPLFMDRYLVMIGGKVKVGTKLFFDENLTALVLEINEDGSRVVEFFQNEKKLDFLEVVEILNKIGHLPLPPYMNRADEKKDEQDYQTLFAKNYGAVAAPTASLHFTPELLEKINNKYNVNYLTLHVGAGTFKPVDAEDILNHPMHSEYFEIGIDAKKALDNASKVLAVGTTVTRTVEYYVRTNKIQGECDLFLNPANKPIKVDCLLTNFHLPKSTLIMLIASFVGLEKTLEIYHEAIKEKYRFYSYGDGMLIL

SEQ ID NO: 63498 - protein, 340 aa, unidentified
  source 1..340: note = Arcobacter cloacae
  REGION 1..340: note = tr|A0A4Q0ZE56|A0A4Q0ZE56_9PROT S-adenosylmethionine:tRNA ribosyltransferase-isomerase; OS = Arcobacter cloacae OX=1054034 GN=queA PE=3 SV=1
MLDPLKTSSYDYDLPKELIATHPVSPADSARLLVYDRKTDKITHSTFKNLMDFLPDDLSIFLNDTKVIKARIFGTKETGGKIELLLNKPLFMDRYLVMIGGKVKVGTKLFFDENLTALVLEINEDGSRIVEFFQNEKKLDFLEVVEILNKIGHLPLPPYMNRADEKKDEQDYQTLFAKNYGAVAAPTASLHFTPELLEKINNKYNVNYLTLHVGAGTFKPVDAEDILNHPMHSEYFEIGIDAKKALDNASKVLAVGTTVTRTVEYYVRTNKIQGECDLFLNPANKPIKVDCLLTNFHLPKSTLIMLIASFVGLEKTLEIYHEAIKEKYRFYSYGDGMLIL

SEQ ID NO: 63499 - protein, 343 aa, Arcobacter cryaerophilus
  REGION 1..343: note = tr|A0A494TCK1|A0A494TCK1_9PROT S-adenosylmethionine:tRNA ribosyltransferase-isomerase; OS = Arcobacter cryaerophilus D2610 OX=1032071 GN=queA PE=3; SV = 1
MIDVLKTSSYDFNLPASQIATFPVNPPSSAKMLVYNREKNEIFHSTFENILEFLPQDLTIFLNDTKVIKARIFGQKYTGAKLELLLNKPLFMDRYLVMIKGKVKIGTKIFFDENLIAEVLELNEDGTRVVSFFKDENSNKRVDFLSLVEILNKIGHIPLPPYMQRDDKKEDEVNYQTLFAKKYGAVAAPTASLHFTKELLEEIEKKYGLNYLTLHVGAGTFKPVDVEDILSHPMHSEYFEIGIDAKKNLDNAKKVLAVGTTVTRTIEYYARTNKIQGECDLFLNPMNKPIKVDYLLTNFHLPKSTLIMLVASFIGLEKTLELYNIAIKENYRFYSYGDGMLII

SEQ ID NO: 63500 - protein, 343 aa, Arcobacter cryaerophilus
  REGION 1..343: note = tr|A0A5B7XC49|A0A5B7XC49_9PROT S-adenosylmethionine:tRNA ribosyltransferase-isomerase; OS = Arcobacter cryaerophilus ATCC 43158 OX=1032070 GN=queA; PE = 3 SV=1
MIDVLKTSSYDFNLPHSQIATFPVNPASSAKMLVYNRDKNEIFHSTFENILEFLPEDLTIFLNDTKVIKARIFGKKSTGAKLELLLNKPLFMDRYLVMIKGKVKVGTKIFFDENLIAEVLELNEDGTRVIEFFQDENSKKRVDFLSLVEILNKIGHIPLPPYMQREDKKEDELNYQTLFAKNYGAVAAPTASLHFTTELLEKIEKKYGLNYLTLHVGAGTFKPVDVEDILSHPMHSEYFEIGIDAKKNLDNAKKVLAVGTTVTRTIEYYSRTNKIQGECDLFLNPVNKPIKVDYLLTNFHLPKSTLIMLVASFIGLEKTLELYNIAIKNNYRFYSYGDGMLII

SEQ ID NO: 63501 - protein, 340 aa, Arcobacter defluvii
  REGION 1..340: note = tr|A0A4V1LC34|A0A4V1LC34_9PROT S-adenosylmethionine:tRNA ribosyltransferase-isomerase; OS = Arcobacter defluvii OX=873191 GN=queA PE=3 SV=1
MLDPLKTSSYDYDLPKELIATKPVSPADSARLLVYNRKENKITHTTFKNLIEVLPSDLSIFLNDTKVIKARIFGEKESGGKIELLLNKPLFMDRYLVMIRGKVKIGTKLFFDKDLIAEVIELNEDGTRVVKFFKEDKNLDFLELVEILNKIGHLPLPPYMNREDEKEDEKDYQTLFAKNYGAVAAPTASLHFTPELLEKINNKYDVNYLTLHVGAGTFKPVDVDEILNHPMHSEYFEIGIEAKKALDNAKKVLAVGTTVTRTIEYYARTNKIQGECDLFLNPSNQPIKVDYLLTNFHLPKSTLIMLIASFVGLEKTLEIYHEAIKEKYRFYSYGDGMLII

SEQ ID NO: 63502 - protein, 344 aa, unidentified
  source 1..344: note = Arcobacter ebronensis
  REGION 1..344: note = tr|A0A4Q1ANE5|A0A4Q1ANE5_9PROT S-adenosylmethionine:tRNA ribosyltransferase-isomerase; OS = Arcobacter ebronensis OX=1462615 GN=queA PE=3 SV=1
MKNKELNPLKTSSYDYSLPKELIATHPVYPADSAKLLVYNRVENKITHTTFKNLLDFIPKDSSIFLNDTKVIKARIFGTKESGGRVELLFNKPLFMDRYLVMIRGKVKVGTKLFFEYDLSVEVLEVNEDGSRVVHFFQKDKKLDFLSLVEILNKIGHLPLPPYMNREDEDKDNQDYQTLFAKNYGAVAAPTASLHFTEELLEKINQNFPINYLTLHVGAGTFKPVDVDEILSHPMHSEYFEIGIEAKKALDKAKKVLAVGTTVTRTIEYYARTNKIQGECDLFLNPLNKPIKVDYLLTNFHLPKSTLIMLIASFVGLEKTLEIYNEAIKERYRFYSYGDGMLII

SEQ ID NO: 63503 - protein, 344 aa, unidentified
  source 1..344: note = Arcobacter ebronensis
  REGION 1..344: note = tr|A0A4Q0YI33|A0A4Q0YI33_9PROT S-adenosylmethionine:tRNA ribosyltransferase-isomerase; OS = Arcobacter ebronensis OX=1462615 GN=queA PE=3 SV=1
MKNKELDPLKTSSYDYSLPKELIATHPVYPADSAKLLVYNRAENKITHTTFKNLLDFIPKDSSIFLNDTKVIKARIFGTKESGGRVELLFNKPLFMDRYLVMIRGKVKVGTKLFFEYDLSAEVLEVNEDGSRVVYFFQKDKKLDFLSLVEILNKIGHLPLPPYMNREDEDKDNQDYQTLFAKNYGAVAAPTASLHFTEELLEKINQNFPINYLTLHVGAGTFKPVDVDEILSHPIHSEYFEIGLEAKKALDKAKKVLAVGTTVTRTIEYYARTNKIQGECDLFLNPLNKPIKVDYLLTNFHLPKSTLIMLIASFVGLEKTLEIYNEAIKERYRFYSYGDGMLII

SEQ ID NO: 63504 - protein, 340 aa, Arcobacter ellisii
  REGION 1..340: note = tr|A0A347U8M7|A0A347U8M7_9PROT S-adenosylmethionine:tRNA ribosyltransferase-isomerase; OS = Arcobacter ellisii OX=913109 GN=queA PE=3 SV=1
MLDPLKTSSYDYDLPKELIATKPVSPADSARLLVYNRKEKKITHTIFKNLMEVLPPDLSIFLNDTKVIKARIFGEKESGGKVELLLNKPLFMDRYLVMIRGKVKIGTKLFFDEDLIAEVIELNEDGTRVVKFFKKEKNLDFLELVDILNKIGHLPLPPYMNREDEKEDEKDYQTLFAKNYGAVAAPTASLHFTPELLEKINNKYDVNYLTLHVGAGTFKPVDVDEILNHPMHSEYFEIGIEAKKALDNAKKVLAVGTTVTRTVEYYARTNKIQGECDLFLNPSNQPIKVDYLLTNFHLPKSTLIMLIASFVGLEKTLEIYQEAIKEKYRFYSYGDGMLII

SEQ ID NO: 63505 - protein, 345 aa, Arcobacter halophilus
  REGION 1..345: note = tr|A0A2N1J2J9|A0A2N1J2J9_9PROT S-adenosylmethionine:tRNA ribosyltransferase-isomerase; OS = Arcobacter halophilus OX=197482 GN=queA PE=3 SV=1
MTKSKLDPLKTSSYDYKLPKKLIATHPVSPADSARLLVYDRQKDKIIHTTFKNLLDYIPEDVSIFLNDTKVIKARIFGHKQSGGKVELLLNKPLFMNRYLVMIRGKVKKGTVLTFKKGLKAEVLEINEDGSRVVSFYLEDKKNLEFLQLVDILNQIGHLPLPPYMNREDEEQDNKNYQTLFAKNYGAVAAPTASLHFTPELLKKLEDKFSIDYLTLHVGAGTFKPVDAEDILNHPMHSEYFEIGIKAKASLDNAKKVLAVGTTVTRTAEYYARTNKIQGECDLFLNPSNKPLKVDHLLTNFHLPKSTLIMLIASFIGLEKTLEVYEEAIKQEYRFYSYGDGMLII

SEQ ID NO: 63506 - protein, 350 aa, Arcobacter marinus
  REGION 1..350: note = tr|A0A347TL03|A0A347TL03_9PROT S-adenosylmethionine:tRNA ribosyltransferase-isomerase; OS = Arcobacter marinus OX=505249 GN=queA PE=3 SV=1
MKKMMTKNSLLDPLKTSSYDYTLPKELIATHPVSPADSARLLVYDRKTDKIIHSTFKNLLDFIPNDVNIFLNDTKVIKARIFGHKDSGGKVELLLNKPLFMNRYLVMIRGKVKVGTVLTFDKNLKAEVLEVSEDGSRVVKFFLNEKENLEFLELVDILNDIGHLPLPPYMNREDEEKDNENYQTLFAKKYGAVAAPTASLHFTPELFKKLENKFNIDYLTLHVGAGTFKPVDTEKILNHPMHSEYFEINENSKKSLDNSKKVLAVGTTVTRTIEYYARTNKIQGECDLFLNPSNTPIKVNHLLTNFHLPKSTLIMLIASFVGLEKTLEIYEEAINEKYRFYSYGDGMLII

SEQ ID NO: 63507 - protein, 347 aa, Arcobacter marinus
  REGION 1..347: note = tr|A0A1T5C084|A0A1T5C084_9PROT S-adenosylmethionine:tRNA ribosyltransferase-isomerase; OS = Arcobacter marinus OX=505249 GN=queA PE=3 SV=1
MMTKNSLLDPLKTSSYDYTLPKELIATHPVSPADNARLLVYDRKTNKITHTTFKNLLDFIPKDVAIFLNDTKVIKARIFGHKDSGGKVELLLNKPLFMNRYLVMIRGKVKVGTVLTFDKNLKAEVLEVSEDGSRVVKFFLNEKENLEFLELVDILNDIGHLPLPPYMNREDEEKDNENYQTLFAKNYGAVAAPTASLHFTPELFKKLQDKFNLDYLTLHVGAGTFKPVDAEDILNHPMHSEYFEINESSKNLLDNSKKVLAVGTTVTRTIEYYARTNKIQGECDLFLNPSNTPIKVNHLLTNFHLPKSTLIMLIASFVGLEKTLEIYEEAISEKYRFYSYGDGMLII

SEQ ID NO: 63508 - protein, 344 aa, Arcobacter molluscorum
  REGION 1..344: note = tr|A0A2G1DKD4|A0A2G1DKD4_9PROT S-adenosylmethionine:tRNA ribosyltransferase-isomerase; OS = Arcobacter molluscorum LMG 25693 OX=870501 GN=queA PE=3; SV = 1
MKKNKLDPLKTSSYDYNLPKELIATQPVSPADKARLLVYDRKNDKITHTTFKKLLDFIPNDVSIFLNDTKVIKARIFGTKQSGGKIELLMNKPLFMNRFLVMIRGKVKIGTILNFEENLSAKVLEINEDGTRVVKFFENNKELEFLELVEILNKIGHLPLPPYMNREDKEEDNKNYQTLFAKNYGAVAAPTASLHFTPELLKKLEDKFNIEYLTLHVGAGTFKPVDVEDILNHPMHSEYFEISAKAKKELDNAKKVLAVGTTVTRTVEYYARTNKIQGECDLFLNPSNTPIKVDHLLTNFHLPKSTLIMLIASFVGLEKTLEIYEEAIKEKYRFYSYGDGMLII

SEQ ID NO: 63509 - protein, 348 aa, Arcobacter mytili
  REGION 1..348: note = tr|A0A345J5W8|A0A345J5W8_9PROT S-adenosylmethionine:tRNA ribosyltransferase-isomerase; OS = Arcobacter mytili LMG 24559 OX=1032238 GN=queA PE=3 SV=1
MKKMMKKSNLDPLKTSSYDYDLPKELIATHPASPADSARLLVYNRKTNTITHTTFKELLNFIPEDSSIFLNDTKVIKARIFGQKDSGGKVELLLNKPLFMNRYLVMIRGKVKVGTILYFDKELKAEVLEVNEDGSRIVQFFKEEKKLDFLSLVDILNEIGHLPLPPYMNREDEEQDNKDYQTLFAKNYGAVAAPTASLHFTPQLFDKLQEKFEVNYLTLHVGAGTFKPVDAEDILNHPMHSEYFEIGIEAKKALDNAKKVLAVGTTVTRTVEYYARTNMIQGECDLFLNPANTPIKVDYLLTNFHLPKSTLIMLIASFVGLEKTLEIYNEAIKEKYRFYSYGDGMLII

SEQ ID NO: 63510 - protein, 345 aa, Arcobacter nitrofigilis
  REGION 1..345: note = tr|D5V1V2|D5V1V2_ARCNC S-adenosylmethionine:tRNA ribosyltransferase-isomerase OS=Arcobacter nitrofigilis (strain ATCC 33309 / DSM 7299 / LMG 7604 / NCTC 12251 / CI)OX=572480 GN=queA PE=3 SV=1
MMKNNLDPLKTSSYDYFLPKELIASKPLYPADSARLLVYNRNSDTITHTTYKYLLDFLPENLDIFLNDTKVIKARIYGKKDSGGKTELLFNKPLFMDRYQVMIKGKVQKGTKLFFDENLSAEVLELNNEDGTRTVKFFKDEKQLDFLSLIDILNKIGHLPLPHYMNREDEKEDEKDYQTLFAKNYGAVAAPTASLHFTDELLEKLHNKHNINYLTLHVGAGTFKPVDAEDILNHPMHSEYFEISRESLEALKEKNKTLAVGTTVTRTIEYYARTNKIQGECDLFLNPANKPIKVDHLLTNFHLPKSTLIMLIASFVGLEKTLEIYETAVKDKYRFFSYGDGMLII

SEQ ID NO: 63511 - protein, 341 aa, unidentified
  source 1..341: note = Arcobacter pacificus
  REGION 1..341: note = tr|A0A5C2H6P4|A0A5C2H6P4_9PROT S-adenosylmethionine:tRNA ribosyltransferase-isomerase; OS = Arcobacter pacificus OX=1080223 GN=queA PE=3 SV=1
MLDPLKTSSYDYELPKELIATKPVSPADSARLLVYDRKTDTITHTTFKNLLEVLPKNISIFLNDTKVIKARIFGQKQSGGKIELLLNKPLFMDRYLVMTRGRVRSIGTEIFFDEGLVAKVVEINEDGSRVVEFYKDGKKLDFLSLVEILNKIGHLPLPPYMNREDNKQDEKDYQTLFAKNYGAVAAPTASLHFTDELFEKINQNFPVNYLTLHVGAGTFKPVDAEDILEHPMHSEYFEIGINVKKELDNAKKVLAVGTTVTRTVEYYARTNKIQGECDLFLNPANTPIKVDHLLTNFHLPKSTLIMLIASFVGLEKTLEIYHEAVKEKYRFFSYGDGMLII

SEQ ID NO: 63512 - protein, 340 aa, Arcobacter skirrowii
  REGION 1..340: note = tr|A0A2U2C0M6|A0A2U2C0M6_9PROT S-adenosylmethionine:tRNA ribosyltransferase-isomerase; OS = Arcobacter skirrowii OX=28200 GN=queA PE=3 SV=1
MSDFLKTSSYDFTLPQELIATTPAVPADSAKLLVYDRKNNTITHTIFKNILDFLPQDLTIFLNDTKVIKARVFGKKETGANIELLLNKPLFMDRFLVLIKGKVKVGTILTFDEKLKAKVLELNEDGTRVVEFYLDNKKLDFTSLIEILNKIGHIPLPPYMNREDTKEDETNYQTLFAKNHGAVAAPTASLHFTPELLNKLEEKYGLNYLTLHVGAGTFKPVDVEDILSHPMHSEYFEISSECKTKIDKAKNILAVGTTVTRTLEFYARKNMICGECDLFLNPSNKPIIVNHLLTNFHLPKSTLIMLVASFIGLEKTLEIYNEAIKNNYRFYSYGDAMLII

SEQ ID NO: 63513 - protein, 340 aa, Arcobacter skirrowii
  REGION 1..340: note = tr|A0A4Q0UDK0|A0A4Q0UDK0_9PROT S-adenosylmethionine:tRNA ribosyltransferase-isomerase; OS = Arcobacter skirrowii CCUG 10374 OX=1032239 GN=queA PE=3; SV = 1
MSDFLKTSSYDFTLPQELIATTPAIPADSAKLLVYNRANNTITHTIFKNILDFLPQDLTIFLNDTKVIKARVFGKKETGANIELLLNKPLFMDRFLVLIKGKVKIGATLTFDEKLKAKVLELNEDGTRVVEFYLDNKKLDFTSLIEILNKIGHIPLPPYMNREDNKDDEKNYQTLFAKNYGAVAAPTASLHFTSELLEELEKKYGLNYLTLHVGAGTFKPVDVEDILSHPMHSEYFEISIDCKTKIDKAKNILAVGTTVTRTLEFYARKNMICGECDLFLNPSNKPIIVNHLLTNFHLPKSTLIMLVASFIGLEKTLEIYNEAIKNNYRFYSYGDAMLII

SEQ ID NO: 63514 - protein, 340 aa, Arcobacter sp.
  REGION 1..340: note = tr|A0A2D5JFQ2|A0A2D5JFQ2_9PROT S-adenosylmethionine:tRNA ribosyltransferase-isomerase; OS = Arcobacter sp. OX=1872629 GN=queA PE=3 SV=1
MLDPLKTSSYDYDLPKELIASKPVHPADSAKLLVYNRETNTITHSTFKNLMDFLPEDISVFLNDTKVIKARIFGKKLSGGKVELLLNKPLFMDRYLVMIRGKVSIGMLLYFEEDIIVKVLEINEDGTRVVEFYQNEKKLDFLTLVETLNKIGHLPLPHYMNREDNEEDNTNYQTLFAKNYGAVAAPTASLHFTQELLEKINDKYDVNYLTLHVGAGTFKPVDAEDILSHPMHSEYFEIGREAKESLDKASKVLAVGTTVTRTIEYYARKNMISGECDLFLNPANEPIKVDHLLTNFHLPKSTLIMLIASFVGLEKTLEIYEEAIKEEYRFFSYGDGMLII

SEQ ID NO: 63515 - protein, 340 aa, Arcobacter sp.
  REGION 1..340: note = tr|A0A1Y5DTV8|A0A1Y5DTV8_9PROT S-adenosylmethionine:tRNA ribosyltransferase-isomerase; OS = Arcobacter sp. 31_11_sub10_T18 OX=1856277 GN=queA PE=3; SV = 1
MLDPLKTSSYDYSLPKELIATHPVHPADSAKLLVYNRADDSITHTTFKEILNFLPKDISIFLNDTKVIKARIFGTRPSGGKAELLFNKPMPNDEYLCLIRGKVHVGTKITFENNLSAVVTQLNGDGSRLVKFYQEDKELDFLELVDILNSIGHLPLPPYMNREDEEIDNIDYQTLFAKNYGAVAAPTASLHFTPTLLEQLNSNFEVNYLTLHVGAGTFKPVDAVDILDHPMHSEYFEISKESNNALKADKNILAVGTTVTRTIEYNARNQKTFGECDLFLNPSNKPIRVNHLLTNFHLPKSTLIMLIASFVGIEKTMEIYDIAIKEKYRFFSYGDGMLII

SEQ ID NO: 63516 - protein, 340 aa, unidentified
  source 1..340: note = Arcobacter suis
  REGION 1..340: note = tr|A0A443TLJ9|A0A443TLJ9_9PROT S-adenosylmethionine:tRNA ribosyltransferase-isomerase; OS = Arcobacter suis OX=1278212 GN=queA PE=3 SV=1
MLDPLKTSSYDYDLPKELIATHPVSPADSARLLVYNRTTNSITHTTFKNLMDFLPSNLSVFLNDTKVIKARIFGIKETGGKIELLLNKPLFMDRYLVMIGGKVRIGTKLFFDENLIAEVLEVNEDGSRVVQFFQNDKKLDFLTLVDILNKIGHLPLPPYMNRADEKEDEKDYQTLFAKNYGAVAAPTASLHFTPELLEKINARYDVNYLTLHVGAGTFKPVDVDDILNHPMHSEYFEIGIEAKKALDNAPKVLAVGTTVTRTVEYYARTNKIQGECDLFLNPANKPIKVDYLLTNFHLPKSTLIMLVASFVGLEKTLEIYHEAIKENYRFYSYGDGMLII

SEQ ID NO: 63517 - protein, 343 aa, Arcobacter thereius
  REGION 1..343: note = tr|A0A1C0B6R8|A0A1C0B6R8_9PROT S-adenosylmethionine:tRNA ribosyltransferase-isomerase; OS = Arcobacter thereius OX=544718 GN=queA PE=3 SV=1
MSDNLKTSSYDFYLPTSQIASKAVNPADSAKLLVYNRATNEITHTIFKDIMDFLPEDLTIFLNDTKVIKARIFGKKLTGANIELLLNKALFMNRFLVYIKGKVNLGTKLFFDKNLCANIIEINEDGSRVVEFYKKDYEKIKLDFSSLVEILNEIGHIPLPPYINRADTKEDEKDYQTLFAKKYGAVAAPTASLHFTPELLQKIEDKYGLNYLTLHVGAGTFKPVDVEDILSHPMHSEYFEISSQCKDKIDKAKNILAVGTTVTRTLEYYARKNMICGECDLFLNPANKPIIVNHLLTNFHLPKSTLIMLVASFIGLEKTLELYEIAIKNNYRFYSYGDAMLII

SEQ ID NO: 63518 - protein, 343 aa, Arcobacter thereius; identical to SEQ ID NO: 62502
  REGION 1..343: note = tr|A0A1C0AXQ8|A0A1C0AXQ8_9PROT S-adenosylmethionine:tRNA ribosyltransferase-isomerase; OS = Arcobacter thereius OX=544718 GN=queA PE=3 SV=1

SEQ ID NO: 63519 - protein, 343 aa, Arcobacter trophiarum
  REGION 1..343: note = tr|A0A4Q0ZXX5|A0A4Q0ZXX5_9PROT S-adenosylmethionine:tRNA ribosyltransferase-isomerase; OS = Arcobacter trophiarum LMG 25534 OX=1032241 GN=queA PE=3; SV = 1
MRDVLKTSSYDFELPSSQIATFPITPADSAKMLVFCREKNEIFHSTFRDILEFLPEELSIFLNDTKVVKARVFGKKSTGANIELLLNKPLFMDRYLVLIKGKVKVGTKIFFDEGLIAEVLELNEDGTRVVEFFQDENSKKRLNFLSLVDILNKIGHIPLPPYMNRDDEKDDETNYQTLFAKNYGAVAAPTASLHFTPLLLKKLEERYGLNYLTLHVGAGTFKPVDVEDILSHPMHSEYFEIGIEAKKNLDNAKKVLAVGTTVTRTIEYYERTNKIQGECDLFLNPMNKPIKVDYLLTNFHLPKSTLIMLVASFIGLEKTLELYDIAIKENYRFYSYGDGMLII

SEQ ID NO: 63520 - protein, 340 aa, unidentified
  source 1..340: note = Arcobacter venerupis
  REGION 1..340: note = tr|A0A443TWJ2|A0A443TWJ2_9PROT S-adenosylmethionine:tRNA ribosyltransferase-isomerase; OS = Arcobacter venerupis OX=1054033 GN=queA PE=3 SV=1
MLDPLKTSSYDYDLPKELIATHPVSPADSARLLVYNRATNSIIHTTFKNLMNFLPNELSIFLNDTKVIKARIFGTKDTGGKIELLLNKPLFMDRYLVMIGGKVRVGTKLFFDENLNAEVLEVNEDGSRVVQFFQNDKKLDFLELVDILNKIGHLPLPPYMNRSDDKKDEQDYQTLFAKNYGAVAAPTASLHFTPELLEKINTKYEVNYLTLHVGAGTFKPVDVDDILNHPMHSEYFEIGIEAKKALDNAPKVLAVGTTVTRTVEYYSRTNKIQGECDLFLNPVNKPIKVDYLLTNFHLPKSTLIMLVASFVGLEKTLEIYHEAIKENYRFYSYGDGMLII

SEQ ID NO: 63521 - protein, 349 aa, unidentified
  source 1..349: note = Arcticibacter pallidicorallinus
  REGION 1..349: note = tr|A0A2T0U547|A0A2T0U547_9SPHI S-adenosylmethionine:tRNA ribosyltransferase-isomerase; OS = Arcticibacter pallidicorallinus OX=1259464 GN=queA PE=3; SV = 1
MKLSQFKFNLPDSLIAHNPSDQRDEARLMVLDRNTGAIEHKIFKDVINYFEEKDVMILNNTKVFPARMYGNKEKTGATIEVFLLRELNKELRLWDVLVDPARKIRVGNKLYFGENDLLVAEVVDNTTSRGRTIRFLFDGTDEEFRRNIEILGETPLPKYIKRKATAEDKERYQTIFAKNEGAVAAPTAGLHFSRELMKRLELKGVDFAEVTLHVGLGTFRPVEVEDLTKHKMDSEQIIIEPKTADLVNKAIDEKRRICAVGTTSMRTIESAVSANKRLKATNDWTSKFIFPPYEFSIANTMITNFHTPESTLLMMISAFGGYENVMNAYEVAVKEKYRFYSYGDAMLII

SEQ ID NO: 63522 - protein, 349 aa, unidentified
  source 1..349: note = Arcticibacter svalbardensis
  REGION 1..349: note = tr|R9GUZ8|R9GUZ8_9SPHI S-adenosylmethionine:tRNA ribosyltransferase-isomerase OS=Arcticibacter svalbardensis MN12-7 OX=1150600 GN=queA PE=3 SV=1
MKLSQFKFDLPDSLIATTPSDQRDEARLMVLDRNTGAIEHKIFKDVINYFDEKDVMILNNTKVFPARMYGNKEKTGATIEVFLLRELNKELRLWDVLVDPARKIRVGNKLYFGDNDLLVAEVVDNTTSRGRTIRFLFDGTNEEFRRNIEILGETPLPKYIKRKATAEDKERYQTIFAKNEGAVAAPTAGMHFSRELMKRLELKGVEFAEVTLHVGLGTFRAVEVEDLTKHKMDSEQFIIDQPTADMVNNALDEKRKICAVGTTSMRAVESAVSAGKKLKPANDWTSKFIFPPYEFSIANSMITNFHTPESTLLMMISAFGGYESVMNAYEVAVKEKYRFYSYGDAMLII

SEQ ID NO: 63523 - protein, 405 aa, unidentified
  source 1..405: note = Arcticibacterium luteifluviistationis
  REGION 1..405: note = tr|A0A2Z4GGK1|A0A2Z4GGK1_9BACT S-adenosylmethionine:tRNA ribosyltransferase-isomerase; OS = Arcticibacterium luteifluviistationis OX=1784714; GN = queA PE=3 SV=1
MTIPSEIRIEDFNYSLPESQIAKYPLSPRDSSKLLVFKNKEIRSEAFSSLASEVPENAHLVFNNTKVIPARLFFRKQTGALIEIFLLEPILPSKVISQVMESTESTTWMCMIGNKKKWKDEVLSLDIPFENGTTINVKAELVNREENTISFKWTDKISFAELVKVFGEIPLPPYLNRKTEEKDKETYQTVYSESDGAVAAPTAGLHFTDSTFKSLKKRGIKTSFITLHVGAGTFQPVKTENALEHHMHSEQIVFSKDFLKSLLKHDGPVIPVGTTSMRSLESLYWFALKIRGNKEAHIPFKIEKLYPYGFEENDLPSKKEAIEVILEYMENQNFETLIGDTEIYIFPGYKPRLCEGIITNFHQPKSTLLLLISSLIGDKWKELYDFALENDYRFLSYGDSSLILP

SEQ ID NO: 63524 - protein, 350 aa, unidentified
  source 1..350: note = Arcticibacterium luteifluviistationis
  REGION 1..350: note = tr|A0A2Z4GBL9|A0A2Z4GBL9_9BACT S-adenosylmethionine:tRNA ribosyltransferase-isomerase; OS = Arcticibacterium luteifluviistationis OX=1784714; GN = queA PE=3 SV=1
MKLSQFKFDLPQNLIAMHPGEERDGAKMMVVHRDSGKIEHKMFKDIVDYFGEGDVMVTNNTKVFPARLYGSKEKTGAKIEVFLLRELNREMRLWDVLVDPARKIRVGNKLYFGESDLVAEVIDNTTSRGRTIRFLFDGDHEEMMQTIHELGETPIPKEVIDRDVTELDRERFQTIFAEEEGAISAPTAGMHFTKNVMRRMEIEGVTFTPITLHIGIGTFRGVDVEDLTKHKTDSENFAIPQKTCDIVNEALDNNKRICAIGSTALKSLESSVSAKDRLNPVDNGWTDKFIFPPFDFKIGNAVLTNFHLPQSIVLMSACAFGGYDLITRAYQEAIKEEYKFFTYGDVMLIL

SEQ ID NO: 63525 - protein, 366 aa, unidentified
  source 1..366: note = Ardenticatenia bacterium
  REGION 1..366: note = tr|A0A2U2SPE8|A0A2U2SPE8_9CHLR S-adenosylmethionine:tRNA ribosyltransferase-isomerase; OS = Ardenticatenia bacterium OX=2099665 GN=queA PE=3 SV=1
MWKTSDFDYELPPERIAQTPIEPRDAARLMVVHRKGGRFEHRIFRDLPHYLRPGDVLVINDSRVIPARLFAHKPSGGQVEILLLRQLDGTRWEALVGGKRIRKGGRLLIQRGNIHLEAQVAEELEGPRRVLEFDTPIGPLLRDLGHTPLPPYIQQPLQDPERYQTVYARVEGSAAAPTAGLHFTPELLATLRAQGVLLARVTLHIGIDTFKPVTTEYVAEHTLHSEWASISPETAQLINQARLEGGRVIAVGTTAVRTLETAALHAAGITAPLQNVGAQNEGLSEAHPGISWHPITAFEGPTDLFIYPGFRFRAVDALITNFHLPRSSLLMLVSAFAGYELTRRAYQVAIVEGYRFYSFGDAMLIL

SEQ ID NO: 63526 - protein, 349 aa, unidentified
  source 1..349: note = Arenibacter algicola
  REGION 1..349: note = tr|A0A221UXS7|A0A221UXS7_9FLAO S-adenosylmethionine:tRNA ribosyltransferase-isomerase; OS = Arenibacter algicola OX=616991 GN=queA PE=3 SV=1
MKLSHFNFELPNELLAEYPAENRDESKLMVVHRATGKIEHKMFKDLIDYFDEGDVMVLNNTKVFPARLYGNKEKTGARIEVFLLRELNEEQRLWDVLVDPARKIRIGNKLYFGDDETLVAEVIDNTTSRGRTLRFLYDGSYTDFRRKLKELGETPLPKYIKRKVEAEDEKRYQTIYAKHEGAVAAPTAGLHFSKHLLKRLEIKGIDFAEVTLHVGLGTFNPVEVEDLSKHKMDSEELIIDEKATEIVNSAKLKKRRICAVGTTAMRALESAVSSQQTLNTFDGWTNKFVFPPYDFSIANAMVTNFHLPKSTLLMMVSAFMGHDLMKKAYKEAILEGYKFYSYGDAMLII

SEQ ID NO: 63527 - protein, 349 aa, Arenibacter echinorum
  REGION 1..349: note = tr|A0A327RNV3|A0A327RNV3_9FLAO S-adenosylmethionine:tRNA ribosyltransferase-isomerase; OS = Arenibacter echinorum OX=440515 GN=queA PE=3 SV=1
MKLSHFNFELPNELLAEYPAENRDESKLMVIHRDTGKIEHKMFKDLIDYFDEGDVMVLNNTKVFPARLYGNKEKTGARIEVFLLRELNEEQRLWDVLVDPARKIRIGNKLYFGDDETLVAEVIDNTTSRGRTLRFLYDGSYTDFRRKLKELGETPLPKYIKRKVEAEDEKRYQTIYAKHEGAVAAPTAGLHFSKHLLKRLEIKGIDFAEVTLHVGLGTFNPVEVEDLSKHKMDSEELIIDEKATEIVNSAKLKKRRICAVGTTAMRALESAVSSQQTLNTFDGWTNKFVFPPYEFSIATAMVTNFHLPKSTLLMMVSAFMGHDLMKKAYKEAILEGYKFYSYGDAMLII

SEQ ID NO: 63528 - protein, 349 aa, Arenibacter nanhaiticus
  REGION 1..349: note = tr|A0A1M6HLJ3|A0A1M6HLJ3_9FLAO S-adenosylmethionine:tRNA ribosyltransferase-isomerase; OS = Arenibacter nanhaiticus OX=558155 GN=queA PE=3 SV=1
MKLSHFNFELPDGLLAEYPSENRDESKLMVVHRDTGKIEHKMFKDLINYFDEGDVMVLNNTKVFPARLYGNKEKTGARIEVFLLRELNEEQRLWDVLVDPARKIRIGNKLYFGDDDTLVAEVIDNTTSRGRTLRFLYDGSYTDFRRKLKELGETPLPKYIKRDVEPEDEKRYQTIYAKHEGAVAAPTAGLHFSKHLLKRLEIKGIDFAEVTLHVGLGTFNPVEVEDLSKHKMDSEELIIEEKATEIVNNAKLKKRRVCAVGTTAMRALESAVSSKQTLNTFEGWTNKFVFPPYDFSIANAMITNFHLPKSTLLMMVSAFMGHDLMKKAYKEAVLEEYKFYSYGDAMLII

SEQ ID NO: 63529 - protein, 349 aa, Arenibacter palladensis
  REGION 1..349: note = tr|A0A543W8R2|A0A543W8R2_9FLAO S-adenosylmethionine:tRNA ribosyltransferase-isomerase; OS = Arenibacter palladensis OX=237373 GN=queA PE=3 SV=1
MKLSHFNFELPNELLAEYPAENRDESKLMVIHRDTGKIEHKMFKDLIDYFDEGDVMVLNNTKVFPARLYGNKEKTGARIEVFLLRELNEEQRLWDVLVDPARKIRIGNKLYFGDDETLVAEVIDNTTSRGRTLRFLYDGSYTDFRRKLKELGETPLPKYIKRKVEAEDEKRYQTIYAKHEGAVAAPTAGLHFSKHLLKRLEIKGIDFAEVTLHVGLGTFNPVEVEDLSKHKMDSEELIIDEKATEIVNSAKLKKRRICAVGTTAMRALESAVSSQQTLNTFDGWTNKFVFPPYDFSIANAMVTNFHLPKSTLLMMVSAFMGHDLMKKAYKEAILEGYKFYSYGDAMLII

SEQ ID NO: 63530 - protein, 349 aa, Arenibacter palladensis
  REGION 1..349: note = tr|A0A1M5GGU6|A0A1M5GGU6_9FLAO S-adenosylmethionine:tRNA ribosyltransferase-isomerase; OS = Arenibacter palladensis OX=237373 GN=queA PE=3 SV=1
MKLSHFNFELPNELLAEYPAENRDESKLMVVHRATGKIEHKMFKDLIDYFDEGDVMVLNNTKVFPARLYGNKEKTGARIEVFLLRELNEEQRLWDVLVDPARKIRIGNKLYFGVDETLVAEVIDNTTSRGRTLRFLYDGSYTDFRRKLKELGETPLPKYIKRKVEAEDEKRYQTIYAKHEGAVAAPTAGLHFSKHLLKRLEIKGIDFAEVTLHVGLGTFNPVEVEDLSKHKMDSEELIIDEKATEIVNAAKLKKRRICAVGTTAMRALESAVSSQQTLNTFDGWTNKFVFPPYDFSIANAMVTNFHLPKSTLLMMVSAFMGHDLMKKAYKEAILEGYKFYSYGDAMLII

SEQ ID NO: 63531 - protein, 349 aa, Arenibacter sp.
  REGION 1..349: note = tr|A0A318IFY2|A0A318IFY2_9FLAO S-adenosylmethionine:tRNA ribosyltransferase-isomerase; OS = Arenibacter sp. ARW7G5Y1 OX=2135619 GN=queA PE=3 SV=1
MKLSHFNFELPNELLAEYPAENRDESKLMVVHRDTGKIEHKMFKDLIDYFDEGDVMVLNNTKVFPARLYGNKEKTGARIEVFLLRELNEEQRLWDVLVDPARKIRIGNKLYFGDDETLVAEVIDNTTSRGRTLRFLYDGSYTDFRRKLKELGETPLPKYIKRKVEAEDEKRYQTIYAKHEGAVAAPTAGLHFSKHLLKRLEIKGIDFAEVTLHVGLGTFNPVEVEDLSKHKMDSEELIIDEKATEIVNGAKVKKRRICAVGTTAMRALESAVSSQQTLNTFDGWTNKFVFPPYDFSIANAMVTNFHLPKSTLLMMVSAFMGHDLMKKAYKEAILEGYKFYSYGDAMLII

SEQ ID NO: 63532 - protein, 349 aa, Arenibacter sp.
  REGION 1..349: note = tr|A0A372GU83|A0A372GU83_9FLAO S-adenosylmethionine:tRNA ribosyltransferase-isomerase; OS = Arenibacter sp. P308M17 OX=2303391 GN=queA PE=3 SV=1
MKLSHFNFELPNELLAEYPAENRDESKLMVIHRSTGKIEHKMFKDLIDYFDEGDVMVLNNTKVFPARLYGNKEKTGARIEVFLLRELNEEQRLWDVLVDPARKIRIGNKLYFGDDETLVAEVIDNTTSRGRTLRFLYDGSYADFRRKLKELGETPLPKYIKRKVEAEDEKRYQTIYAKHEGAVAAPTAGLHFSKHLLKRLEIKGIDFAEVTLHVGLGTFNPVEVEDLSKHKMDSEELIIDERATEIVNAAKLKKRRICAVGTTAMRALESAVSSQQTLNTFDGWTNKFVFPPYDFSIANAMVTNFHLPKSTLLMMVSAFMGHDLMKKAYKEAILEGYKFYSYGDAMLII

SEQ ID NO: 63533 - protein, 349 aa, Arenibacter troitsensis
  REGION 1..349: note = tr|A0A1X7I0V1|A0A1X7I0V1_9FLAO S-adenosylmethionine:tRNA ribosyltransferase-isomerase; OS = Arenibacter troitsensis OX=188872 GN=queA PE=3 SV=1
MKLSHFNFELPNELLAEYPAENRDESRLMVIHRDTGKIEHKMFKDLIDYFDEGDVMVLNNTKVFPARLYGNKEKTGARIEVFLLRELNEEQRLWDVLVDPARKIRIGNKLYFGDDETLVAEVIDNTTSRGRTLRFLYDGSYTDFRRKLKELGETPLPKYIKRKVEAEDEKRYQTIYAKHEGAVAAPTAGLHFSKHLLKRLEIKGIDFAEVTLHVGLGTFNPVEVEDLSKHKMDSEELIIDEKATEIVNAAKLKKRKVCAVGTTAMRALESAVSSQQTLNTFDGWTNKFVFPPYDFSIANAMVTNFHLPKSTLLMMVSAFMGHDLMKKAYKEAILEGYKFYSYGDAMLIL

SEQ ID NO: 63534 - protein, 347 aa, Arenicella xantha
  REGION 1..347: note = tr|A0A395JMD8|A0A395JMD8_9GAMM S-adenosylmethionine:tRNA ribosyltransferase-isomerase; OS = Arenicella xantha OX=644221 GN=queA PE=3 SV=1
MNIADFTYDLPDELIAQFPSPQRGASRLLKLMQGRGIEDSQFPDLVDELQSGDLLVLNNTKVIPARLHGQKETGGRVEILLERITGANQFVAQIRASKAPKPGQVLHVDGDDSARLMVTGRRDTFFELESNQQGSLFDWFERVGHMPLPPYIDRNDTAGDADRYQTVFAKEQGAVAAPTAGLHYDDALLARIRAKGVDIATVTLHVGAGTYQPVRVTKVEDHVMHSEYVDVNQQVCDQIKLTKERGGRIVAVGTTVVRSLETAAQATGDELIAPFQGDTDIFIYPGYQFKVIDLLQTNFHLPESTLLMLVSAFAGTEPIQQAYQHAIAQGYRFFSYGDAMLLEKSTA

SEQ ID NO: 63535 - protein, 359 aa, unidentified
  source 1..359: note = Arenimonas caeni
  REGION 1..359: note = tr|A0A2P6MCR3|A0A2P6MCR3_9GAMM S-adenosylmethionine:tRNA ribosyltransferase-isomerase; OS = Arenimonas caeni OX=2058085 GN=queA PE=3 SV=1
MKKSDFHFELPPGLIAQAPLAERSASRLLVVPPGDAPYEDRQVRDLVDYLREGDLLVFNDTRVIPARLFGSKETGGRVEILLERLLGGHEVLAQVGASKTPKPGGRITLDEGTVLEVLGREGGFHRLRFLTDEPLEKLLLRAGRMPLPPYIQREAGSADLERYQTVFARHAGAVAAPTAGLHFDQALLAALEGRGVRFGHVTLHVGAGTFQPMRVDSLHEHRMHSEWLNVGADLCQQVARTRAAGGRVVAVGTTVVRALETASREGELRPYAGETNIFIFPGYRFRSVDALVTNFHLPESTLMMLVSAFAGRERILAAYQHAVRQEYRFFSYGDAMLLFPAAEPPAGGPPGPTSQDATP

SEQ ID NO: 63536 - protein, 374 aa, Arenimonas composti
  REGION 1..374: note = tr|A0A091BCG4|A0A091BCG4_9GAMM S-adenosylmethionine:tRNA ribosyltransferase-isomerase; OS = Arenimonas composti TR7-09 = DSM 18010 OX=1121013; GN = queA PE=3 SV=1
MKKSDFRYDLPQELIAQQPLPERSAARMLVVGPDAPPYADRQVRDLPDYLRPGDLLVFNDTRVIPARLHGAKESGGRVEVMIDRLLGGHEVIAQVRASKSPKAGGRIVLDEGTAIEVLGREGEFYRLRFDTAEPLEELLQRAGRLPLPPYIEREAEDADRERYQTLFARHSGAVAAPTAGLHFDAPLLEALRARGVEFGHVTLHVGAGTFQPMRAESVHEHVMHAEWLNVGAELCAQVAKIRAAGGRVIAVGTTVVRALETAMRDGVLKPFAGETRIFIFPGQRVRSIDALLTNFHLPESTLLMLVSAFAGRERILAAYAHAVRERYRFFSYGDAMLLFPPAAPVPPVGAPSGAMDGSRNGIAPEGAPTTGGSR

SEQ ID NO: 63537 - protein, 344 aa, Arenimonas donghaensis
  REGION 1..344: note = tr|A0A087MJX1|A0A087MJX1_9GAMM S-adenosylmethionine:tRNA ribosyltransferase-isomerase; OS = Arenimonas donghaensis DSM 18148 = HO3-R19 OX=1121014; GN = queA PE=3 SV=1
MKKSDFHFDLPPELIAQAPLAERSASRLLVVPPGDAGYQDRHVRDLPAYLQPGDLLVFNDTRVIPARLFGTKDSGGRVEILLERLLGGHEVLAQVGASKSPKPGGRITLDEGTTLEVLGREGEFYRLRFLTDEPLEKLLLRAGRMPLPPYIQREAGREDLERYQTLFARHTGAVAAPTAGLHFDQPLLAALQAKCVQFGHVTLHVGAGTFQPMRVESIREHTMHSEWLNVGADLCQQVARTRAAGGRVVAVGTTVVRALETAARDGALKPYAGDTNIFIFPGHRISTVDALVTNFHLPESTLMMLVSAFAGRERVLAAYAHAVRERYRFFSYGDAMLLFPDQPA

SEQ ID NO: 63538 - protein, 344 aa, Arenimonas malthae
  REGION 1..344: note = tr|A0A091AYH7|A0A091AYH7_9GAMM S-adenosylmethionine:tRNA ribosyltransferase-isomerase; OS = Arenimonas malthae CC-JY-1 OX=1384054 GN=queA PE=3 SV=1
MKKSDFHFDLPPELIAQEPLAERSASRLLVVPPEAPPYADRHVRDLPEYLRAGDLLVFNDTRVIPARLFGTKDTGGRVEILLERLVGGHEVLAQVGASKSPKPGGRITLDEGTAIEVLGREGEFYRLRFLTEEPLEKLLLRAGRMPLPPYIQREAGQADLERYQTLFARHTGAVAAPTAGLHFDQPLLAALEARGVQFGHVTLHVGAGTFQPMRVDSIHEHVMHSEWLNVGAGLCQQVARTRAAGGRVVAVGTTVVRALETAARGGELKPYAGDTNIFIFPGHHIRTVDALVTNFHLPESTLMMLVSAFAGRERVLAAYAHAVREKYRFFSYGDAMLLFPEAAA

SEQ ID NO: 63539 - protein, 344 aa, unidentified
  source 1..344: note = Arenimonas metalli
  REGION 1..344: note = tr|A0A091AQU4|A0A091AQU4_9GAMM S-adenosylmethionine:tRNA ribosyltransferase-isomerase; OS = Arenimonas metalli CF5-1 OX=1384056 GN=queA PE=3 SV=1
MKKSDFHFDLPPELIAQAPLAERSASRMLVVGPDAPPYADRQVRDLPEYLQAGDLLVFNDTRVIPARLFGTKDSGGRVEILLERLVGGREVLAQVGASKSPKPGGRITIDEGTALEVLGREGEFYRLRFLTDEPLEKLLLRAGRMPLPPYIQREAGHDDLERYQTLFARHTGAVAAPTAGLHFDQPLLAALQARGVQTGHVTLHVGAGTFQPMRVESLHEHKMHSEWLNVGAELCQQVARTRAAGGRVVAVGTTVVRALETAAQDGELRPYAGDTNIFLFPGKRIRTVDALLTNFHLPESTLMMLVSAFAGRERILAAYAHAVREKYRFFSYGDAMLLYPEAAP

SEQ ID NO: 63540 - protein, 342 aa, Arenimonas oryziterrae
  REGION 1..342: note = tr|A0A091AXB2|A0A091AXB2_9GAMM S-adenosylmethionine:tRNA ribosyltransferase-isomerase; OS = Arenimonas oryziterrae DSM 21050 = YC6267 OX=1121015; GN = queA PE=3 SV=1
MKKSDFHFDLPPELIAQAPLPVRSDSRLLVVPPSPAAFADHGMRELPAFLRAGDLLVFNDTRVIPARLFGVKETGGRVEILLERITGAHEVRAQIGASKSPKPQSRITLDEGTKLTVLGRDGEFYRLRFDTDEPMDKVLLRAGRMPLPPYIAREADISDDERYQTVFAKNQGAVAAPTAGLHFDEPLLDRLRAQGVEFGHVTLHVGAGTFQPMRAESLDEHVMHREWLNVGAELCAQVARVRAAGGRVIAVGTTVVRALESALQGGELKPFAGDTQIFIFPGYRIRSIDAMVTNFHLPESTLLMLVSAFAGRERILEAYAHAVREKYRFFSYGDAMLLYPSA

SEQ ID NO: 63541 - protein, 312 aa, Arenimonas sp.
  REGION 1..312: note = tr|A0A352QN66|A0A352QN66_9GAMM S-adenosylmethionine:tRNA ribosyltransferase-isomerase (Fragment) OS=Arenimonas sp. OX=1872635 GN=DC063_00110; PE = 3 SV=1
  VARIANT 62: note = Xaa can be any naturally occurring amino acid
MKKSDFHFDLPPELIAQEPLAERSASRLLVVPPDAPPYADRHVRDLPEYLRAGDLLVFNDTXRLVGGHEVLAQVGASKSPKPGGRITLDEGTAIEVLGREGEFYRLRFLTDEPLEKLLLRAGRMPLPPYIQREAGQADLERYQTLFARHTGAVAAPTAGLHFDQPLLAALEAKGVQFGHVTLHVGAGTFQPMRVESIHEHVMHSEWLNVGAELCQQVARTRAAGGRVIAVGTTVVRALETAARGGELKPYAGDTNIFLFPGHHIRTVDALVTNFHLPESTLMMLVSAFAGRERVLAAYAHAVREKYRFFSYG

SEQ ID NO: 63542 - protein, 344 aa, Arenimonas sp.
  REGION 1..344: note = tr|A0A5B2ZAG3|A0A5B2ZAG3_9GAMM S-adenosylmethionine:tRNA ribosyltransferase-isomerase; OS = Arenimonas sp. 3729k OX=2608255 GN=queA PE=3 SV=1
MKKSDFHYELPPELIAQEPLAERSASRLLVMPSDAPPYQDRHVRDLPQLLRAGDLLVFNDTRVIPARLHGQKDSGGRVEILIERLLGGQEVLAQVGASKTPRAGGRITLDEGTAIEVLGREGEFHRLRFLGTEPPEAVLQRAGQLPLPPYIRRTPGAADAERYQTVFARHAGAVAAPTAGLHFDQALLAALEARGVRFGHVTLHVGAGTFQPMRVESVHEHRMHSEWLNVGAELCAQVARTRASGGRVIAVGTTVVRALETAAADGELKPFAGDTSIFIFPGHRIRTIDALLTNFHLPESTLLMLVSAFAGRERILAAYRHAVRERYRFFSYGDAMLLFPGEDP

SEQ ID NO: 63543 - protein, 349 aa, unidentified
  source 1..349: note = Arenitalea lutea
  REGION 1..349: note = tr|A0A1M6F923|A0A1M6F923_9FLAO S-adenosylmethionine:tRNA ribosyltransferase-isomerase; OS = Arenitalea lutea OX=1178825 GN=queA PE=3 SV=1
MKLSHFGFELPSELLAEYPAENRDESRLMVLNRKDQTIEHKMFKDIIDYFDEDDVLMLNNTKVFPARLYGNKEKTGARIEVFLLRELNEEQRLWDVLVDPARKIRIGNKLYFGDDDTLVAEVIDNTTSRGRTLRFLYDGSYREFRIKLNELGETPLPKYIKRDVEPQDEERYQTIFAKNEGAVAAPTAGLHFSKHLLKRLEIKGVKFAEVTLHVGLGTFNPVEVEDLSKHKMDSEELTIDSKAVEIVNTAIKEKRRVCAVGTTVMRAVESSVSSSGLLNEFDGWTNKFIFPPYEFSIPNAMITNFHTPKSTLLMMVSAFAGHEFIKRAYDEAIKEGYKFYSYGDAMLII

SEQ ID NO: 63544 - protein, 343 aa, unidentified
  source 1..343: note = Armatimonadetes bacterium
  REGION 1..343: note = tr|A0A399WWN9|A0A399WWN9_9BACT S-adenosylmethionine:tRNA ribosyltransferase-isomerase; OS = Armatimonadetes bacterium OX=2033014 GN=queA PE=3 SV=1
MTLSDFDYDLPEEAIAQAPAEPRDSSRLMVIDPYEKRVEHRIFRDIVHELEPDDVLVVNDTRVSALRVYGTKATGGRVELLLMQNIGDSAFEALVSPGRRLQPGAVIRIGGGRAIVEDVKPDGRRIVRFDDATPWREALAQLGETPLPPYIHDRTADPDRYQTVYSAIPGSSAAPTAGLHFTEEVLERIREKGVRIARVTLDVSLDTFRPIRSEDPADHKMHGERWTVSEEAAETINDCKGSVIAVGTTSVRTLESAAVDTRRVAAGSGVTTLFITPGYEFQAVDGLITNFHMPRTTMLLLVAALCGREMLMASYETALSEGYRFLSFGDSMFIKPRRTHEKR

SEQ ID NO: 63545 - protein, 257 aa, unidentified
  source 1..257: note = Armatimonadetes bacterium
  REGION 1..257: note = tr|A0A1Q7QJ74|A0A1Q7QJ74_9BACT S-adenosylmethionine:tRNA ribosyltransferase-isomerase; OS = Armatimonadetes bacterium 13_1_40CM_3_65_7 OX=1805024; GN = AUI83_10200 PE=3 SV =1
MWEAVLRPGGRVRIGTRLAVSPHLAGEIIARRAEGVRLIRFASDRPVLEVAREIGEMPVPPYVHEPLRRPEDYQTVYASADGAVAAPTAGLHFTPALLTRIEGRGVRIATLTLHIGLGTFRPVTVEDVRHHRMDPEWYEVSAAAADVLTAARRRPVDAAQGRGRIVAVGTSAVRTLETVTVDDGTARPGRGWSELFIYPGYRFKATDVLITNFHLPKTTLLMLVCAFAGRDLIMWAYQEAIAEKYRFYSFGDAMLIL

SEQ ID NO: 63546 - protein, 345 aa, unidentified
  source 1..345: note = Aromatoleum aromaticum
  REGION 1..345: note = sp|Q5P721|QUEA_AROAE S-adenosylmethionine:tRNA ribosyltransferase-isomerase OS=Aromatoleum aromaticum (strain EbN1) OX=76114 GN=queA PE=3 SV=2
MSLTLDDFDYLLPPELIAQAPLAERCASRLLVLDGERLDDRGFCDLPELVQPGDLLVFNDTRVIHARLYGTKETGGHIEVLIERAIGPHEALAQVRASKSPRAGSRLRLADAFDVTVLGRVGEFFHLRFPDSHDVLDLLEHHGKLPLPPYIDRSADEHDESRYQTVYARERGSVAAPTAGLHFDQPMLAELAKKGVHGAWLTLHVGAGTFQPVRVNDLGEHRMHRERYVIPQETVAAIAATRAAGRRVIAVGTTSLRALEGAAQDGPLEAGTGETELFILPGYRFQVVDALITNFHLPKSTLLMLVSAFAGLEPMRRAYTHAVGHSYRFFSYGDAMFITHRNDAI

SEQ ID NO: 63547 - protein, 401 aa, unidentified
  source 1..401: note = Arsenicibacter rosenii
  REGION 1..401: note = tr|A0A1S2VFH8|A0A1S2VFH8_9BACT S-adenosylmethionine:tRNA ribosyltransferase-isomerase; OS = Arsenicibacter rosenii OX=1750698 GN=BLX24_21650 PE=3; SV = 1
MEELSNKQFLYDLPDERIARFPLAVRDQSKLLVYQGGKISHERFYALAEWVPPHSYLVFNNTKVIPARLLFSRATGAVIELFLLNPVPADRSMSEAMQDTATTVWQCMIGNRKRWKDDEVLQMQIPAGDRTIVLSAAREHKEDSLIRFSWQPAEESFAHVIQLAGQMPLPPYLKRDATRADDDTYQTVYSKEEGAVAAPTAGLHFTDRVFADLAEKNIGHDFLTLHVGAGTFQPIKTDNVREHQMHVEQVVYTRQNVEHFIAHAGHLLPVGTTSMRSLESLYWMGVKLIRQDTDPFRLDQHYAYSVPEPERPAPVQALGAVLTYMDKAHKEQVIAHTGIYIMPGYRFMMCRGIITNFHQPNSTLILLVAALLGEGWRTVYDEALANDYRFLSYGDSSLLLP

SEQ ID NO: 63548 - protein, 347 aa, unidentified
  source 1..347: note = Arsenicibacter rosenii
  REGION 1..347: note = tr|A0A1S2VMT7|A0A1S2VMT7_9BACT S-adenosylmethionine:tRNA ribosyltransferase-isomerase; OS = Arsenicibacter rosenii OX=1750698 GN=queA PE=3 SV=1
MKLSEFKFDLPESLIAKYPAERGESRLMVVHRKTKKIEHKMFGDILSYFDDGDVMVINNTKVFPARLYGNKEKTGAKIEVFLLRELNRDMKLWDVLVDPARKIRVGNKLYFGDSDLVAEVIDNTTSRGRTIRFLFDGSHEEFMKAVDELGETPLPREIKRKTEDADRERYQTVFAEHIGAVAAPTAGTHFTKAMMKRMEIKGVHFAPVTLHVGLGTFRPVDVEDLTKHKTDSENYRIEDTAARIVNKALDETKRVCAVGTTSLKALESSVSANSRLKAVEGWTDKFIFPPYEFKIANSLLTNFHLPESILIMMTSAFGGYDLVMEAYETAIKEKYKFFSYGDAMLIL

SEQ ID NO: 63549 - protein, 359 aa, unidentified
  source 1..359: note = Arsenicitalea aurantiaca
  REGION 1..359: note = tr|A0A433XFL0|A0A433XFL0_9RHIZ S-adenosylmethionine:tRNA ribosyltransferase-isomerase; OS = Arsenicitalea aurantiaca OX=1783274 GN=queA PE=3 SV=1
MRVDEFDFELPDSLIALHPVEPRDAARLLVVDPATGLADRHVRDLVDILAPGDVLVVNDTRVLPAALTGERIRGESRAAVSFNLHKRVDAHTWRAFARPAKRLGLLDRLELGEGEGPKLGATLAGKGDTGEVTIEFDLGGAELDEAIKAHGAMPLPPYIGSKRKPEARDAVDYQTVYAAVDGAVAAPTAGLHFTETLLQALSDRSVGLERVTLHVGAGTFLPVKVEDTAEHRMHAEWGEITEATVHRLNARIAAGGRIIAVGTTSLRLLETAARATGRLAPFSGETDIFITPGFRFRVADMLMTNFHLPRSTLFMLVSAFSGLDTMRDAYRHAIEDGYRFYSYGDASLLMRDRSRDEDE

SEQ ID NO: 63550 - protein, 356 aa, unidentified
  source 1..356: note = Arsenophonus endosymbiont
  REGION 1..356: note = tr|A0A3B0MET4|A0A3B0MET4_9GAMM S-adenosylmethionine:tRNA ribosyltransferase-isomerase; OS = Arsenophonus endosymbiont of Trialeurodes vaporariorum; OX = 235567 GN=queA PE= 3 SV=1
MRVSDFAFKLPDELIAHYPLAKRSHCRLLSLNGSTGELAHGIFTDIVDKLESGDLLVFNNTQVIPARLYGRKMSGGKIEVLIERILGSHRVLAHIRASKAPKVGNELLLGDDESVKAIMLARHDTLFEIDFQDKRDVLAILNDIGHMPLPPYIDRPDEEVDRTLYQTVYGQRPGAVAAPTAGLHFDESLLAALQQKGVAMAFVTLHVGAGTFQPVRVENVAEHTMHAEYVEVSQQAVDAILACKARGKRVIAVGTTSIRSLESAACTCKEGIIGPFFDDTRIFIYPGFHFKIVDALITNFHLPESTLIMLVSAFAGYQNTMNAYQQAIAKKYRFFSYGDAMFITQNPKAESEKVAN

SEQ ID NO: 63551 - protein, 352 aa, Arsenophonus nasoniae
  REGION 1..352: note = tr|D2TW96|D2TW96_9GAMM S-adenosylmethionine:tRNA ribosyltransferase-isomerase OS=Arsenophonus nasoniae; OX = 638 GN=queA PE=3 SV=1
MRVSDFAFKLPDELIAHYPLAKRSHCRLLSLDGSTGELAHGIFTDIVDKLESGDLLVFNNTQVIPARLYGRKISGGKIEVLIERMLDPHRVLAHVRASKAPKVGAELLLGDDESVKAIMLARHDTLFEIGFQDKRDVLAILNDIGHIPLPPYIARPDEEIDRTLYQTVYGQRPGAVAAPTAGLHFDQSLLAALRQKGVAMAFVTLHVGAGTFQPVRVENVAEHTMHAEYVEVSQEVVDAILACKARGKRVIAVGTTSIRSLESAACACKEAIIAPFFDDTRIFIYPGFHFQIVDALITNFHLPESTLIMLVSAFAGYQNTMNAYKKAIAEKYRFFSYGDAMFITHNPKAVSE

SEQ ID NO: 63552 - protein, 356 aa, Arsenophonus sp.
  REGION 1..356: note = tr|A0A2A2GW23|A0A2A2GW23_9GAMM S-adenosylmethionine:tRNA ribosyltransferase-isomerase; OS = Arsenophonus sp. ENCA OX=1987579 GN=queA PE=3 SV=1
MRVSDFAFKLPDELIAHYPLAKRSHCRLLSLNGSTGELAHGIFTEIVDKLESGDLLVFNNTQVIPARLYGRKMSGGKIEVLIERILGNHRVLAHIRASKAPKVGTELLLGDDESVKAIMLARHDTLFEIDFQDKRDVLAILNDIGHMPLPPYIDRPDEEVDRTLYQTVYGQRPGAVAAPTAGLHFDESLLAALQQKGVAMAFVTLHVGAGTFQPVRVENVAEHTMHAEYVEVSQQAVDAILACKARGKRVIAVGTTSIRSLESAASACKEGIIAPFFDDTRIFIYPGFHFQIVDALITNFHLPESTLIMLVSAFAGYQNTMNAYQQAIAEKYRFFSYGDAMFITHNPKAESEKVVN

SEQ ID NO: 63553 - protein, 341 aa, unidentified
  source 1..341: note = Arsukibacterium ikkense
  REGION 1..341: note = tr|A0A0M2V8N6|A0A0M2V8N6_9GAMM S-adenosylmethionine:tRNA ribosyltransferase-isomerase; OS = Arsukibacterium ikkense OX=336831 GN=queA PE=3 SV=1
MQVKDFSFELPEQLIARFPKAERSASRLLAMDKQSGALSHHIFKDLTDFLQPGDLLVFNNTKVIPARLFGQKASGGKVEVLVERLLDDQRFLAHVRASKAPKPGSMLLLENSAEVRMNQRHDELFELEMLSDEPVLAMLERLGHMPLPPYIDRPDNEEDKARYQTVYNEKPGAVAAPTAGLHFDQPLLAKLADKGIEFGYVTLHVGAGTFQPVRVDNVLEHQMHAEYIEVSQQVVDAVAACKARGNKVVAVGTTSVRSLESAAQQGGGKLISYYGDTQIFIYPGYKFQVIDALITNFHLPESTLIMLVSAFSSREHVMNAYDTAIAEQYRFYSYGDAMFIS

SEQ ID NO: 63554 - protein, 341 aa, unidentified
  source 1..341: note = Arsukibacterium sp.
  REGION 1..341: note = tr|A0A0M2VFE6|A0A0M2VFE6_9GAMM S-adenosylmethionine:tRNA ribosyltransferase-isomerase; OS = Arsukibacterium sp. MJ3 OX=1632859 GN=queA PE=3 SV=1
MHVKDFSFELPEQLIAHFPKAERSTSRLLAMDKHSGVLSQHIFKELVDLLQPGDLLVFNNTKVIPARLFGQKVSGGKVEVLVERMLDDKRFLAHVRASKAPKAGTILLLENAAEVKMIQRHDELFELEMVSDEPVLAMLERLGHMPLPPYIDRPDTAEDKARYQTVYNEKPGAVAAPTAGLHFDQPLLDKLQAKGVEFAFITLHVGAGTFQPVRVDNVLEHKMHAEYIEVPQQVVAAVAACKARGNKVVAVGTTSVRSLESAAQQGGGKLIAYNGDTQIFIYPGYEFKVIDALITNFHLPESTLIMLVSAFSCREHVMNAYQTAINEEYRFYSYGDAMFIS

SEQ ID NO: 63555 - protein, 375 aa, unidentified
  source 1..375: note = Arthrospira maxima
  REGION 1..375: note = tr|B5W7M7|B5W7M7_LIMMA S-adenosylmethionine:tRNA ribosyltransferase-isomerase OS=Arthrospira maxima CS-328; OX = 513049 GN=queA PE=3 SV=1
MLGLTEVVDKLDRTLQGYDYELPPDRIAQNPVIPRDSSRLLVVDSPPSHQHRLFRDLPDLLQPEDLLILNNTRVLPARLYGRKSTSAAIEILLLQEQAPNCWLALVKPGKRFKIGDRLEFPSKSGREILYATVIDTNPGTGGRLLKFEVPQGQSLVSILDQFGEIPFPPYVTDSQAVAEQYQTIYGTRPGAVAAPTAGLHFTEELFQRLSDHHIDHAFLTLHVGLGTFRPVEVEDITTHQMHAEWVELRPETVDKINQTRARGGRIIAVGTTVVRTLEGIAAAQNSLDGCIQPYCGEINLFIYPGYRWRVIDGLITNFHLPRSSLLMLVSALIGRERLMKLYQDALEQPPNDFGNRYRFYSFGDAMLILPSAVQK

SEQ ID NO: 63556 - protein, 375 aa, unidentified; identical to SEQ ID NO: 63555
  source 1..375: note = Arthrospira platensis
  REGION 1..375: note = tr|K1WDP6|K1WDP6_ARTPT S-adenosylmethionine:tRNA ribosyltransferase-isomerase OS=Arthrospira platensis C1; OX = 459495 GN=queA PE=3 SV=1

SEQ ID NO: 63557 - protein, 441 aa, unidentified
  source 1..441: note = Arthrospira platensis
  REGION 1..441: note = tr|D5A2R5|D5A2R5_ARTPN S-adenosylmethionine:tRNA ribosyltransferase-isomerase OS=Arthrospira platensis (strain NIES-39 / IAM M-135) OX=696747 GN=queA PE=3 SV=1
MLAVSRRLSEKFLTPCSSFPYPLFCISYFDKAILISLRDITPFNRGKLPVLIWGIIPKFTSESAILVLGMTEVVDKLDRTLQGYDYELPPDRIAQNPVIPRDSSRLLVVDSPQSHQHRLFRDLPDLLQPQDLLILNNTRVLPARLYGRKSRSAAIEILLLQEQAPNCWLALVKPGKRFKIGDRLEFQSKSGGEILYATVIDTNPSTGGRLLKFEVPQGQSLVSILDQFGEIPFPPYVTDSQALAEQYQTIYGDRPGAVAAPTAGLHFTEQLFQRLSQQHIDHAFVTLHVGLGTFRPVEVEDITTHQMHAEWVELPPETVEKINQTRARGGRIIAVGTTVVRTLEGIAAAQNSGDRSIQPYCGEINLFIYPGYRWRVIDGLITNFHLPRSSLLMLVSALIGRERLMKLYQDALEQPPNDFGNRYRFYSFGDAMLILPAAVQK

SEQ ID NO: 63558 - protein, 375 aa, Arthrospira sp.; identical to SEQ ID NO: 63555
  REGION 1..375: note = tr|A0A328V1M2|A0A328V1M2_9CYAN S-adenosylmethionine:tRNA ribosyltransferase-isomerase; OS = Arthrospira sp. O9.13F OX=1982223 GN=queA PE=3 SV=1

SEQ ID NO: 63559 - protein, 365 aa, Asaccharobacter celatus
  REGION 1..365: note = tr|A0A369P4U1|A0A369P4U1_9ACTN S-adenosylmethionine:tRNA ribosyltransferase-isomerase; OS = Asaccharobacter celatus OX=394340 GN=queA PE=3 SV=1
MRTDDFDYNLPEELIAQEPAAVRDECRLLVMDRESGEVEDRIFKDIVDYLRPGDLLVANETRVMPARLLGAKRGTGGAAEVFLLRECGGPEPRTNRVAFWEVLVRPGKRLKPGAGAVVDFTDAAGEVALSAEIIDWARDGQRGERVARLSTTLPSLDEALHAVGHTPLPPYIRDYAGDEELYQTVYSRRESSAAAPTAGLHFTPELIERLRERGIGWATVELEVGLDTFRVVDEDDPEKHVIHTEFYTVPQATVDAVNATHAAGGRVIAVGTTSVRSLESAWDPEADDGRGALVARDREATSLYILPGYEFHVVDALITNFHVPRSTLMMLVSAFSTRENILAAYQHAIDERYRLLSFGDAMFLH

SEQ ID NO: 63560 - protein, 365 aa, Asaccharobacter celatus
  REGION 1..365: note = tr|A0A369P108|A0A369P108_9ACTN S-adenosylmethionine:tRNA ribosyltransferase-isomerase; OS = Asaccharobacter celatus OX=394340 GN=queA PE=3 SV=1
MRTDDFDYNLPEELIAQEPAAVRDECRLLVMDRVSGEVEDRIFKDIIDYLQPGDLLVANETRVMPARLLGTKRGTGGAAEVFLLRECGGPEPRTNRVAFWEVLVRPGKRLKPGAGAVVDFTNAAGDVVLSAEIIDWARDGQRGERVARLSTTLPSLDEALHAVGHTPLPPYIRDYAGDEELYQTVYSRRESSAAAPTAGLHFTPELIERLRERGIGWATVELEVGLDTFRVVDEDDPEKHVIHTEFYTVPQATVDAVNATHAAGGRVIAVGTTSVRSLESAWDPEADDGRGALVARDREATSLYILPGYEFHVVDALITNFHVPRSTLMMLVSAFSTRENILAAYQHAIDERYRLLSFGDAMFLH

SEQ ID NO: 63561 - protein, 341 aa, unidentified
  source 1..341: note = Asaccharospora irregularis
  REGION 1..341: note = tr|A0A1M5JA11|A0A1M5JA11_9FIRM S-adenosylmethionine:tRNA ribosyltransferase-isomerase; OS = Asaccharospora irregularis DSM 2635 OX=1121321 GN=queA; PE = 3 SV=1
MKTSDFYFDLPEELIAQVPIKDRSSSRLMVLDKKSGQIEHKIFKDILDYLNPGDCLVLNNTRVIPARLIGEKVDTGGKIEFLLLKRTEEDTWQTLVKPGKRAKVGTKFSFGDGKLIGEVIGLAEEGSRIVKFYYEGIFEEVLDELGNMPLPPYITERLEEKERYQTVYSKHNGSAAAPTAGLHFTDELLQKIKDKGVEIAFVTLHVGLGTFRPVKVDDVLNHEMHSEYYMVTEEAAQKINLAKSNGKNVICVGTTSCRTIESAADENGNIKESSGWTNIFIYPGYKFKLVDKLITNFHLPESTLIMLVSALCGKDNVLNAYNVAVEEKYRFFSFGDAMIIK

SEQ ID NO: 63562 - protein, 345 aa, Asaia bogorensis
  REGION 1..345: note = tr|A0A0P0YEI0|A0A0P0YEI0_9PROT S-adenosylmethionine:tRNA ribosyltransferase-isomerase; OS = Asaia bogorensis NBRC 16594 OX=1231624 GN=queA PE=3 SV=1
MQISDFDFDLPRENIALEPARPRDSARLLRVAAGQPLAETRISDLPSLLEPGDLLIANDTAVIRAQLAARRGEAKIGITLDRILSDGSWHALAKNARKLKPGDTLHFGTDPVTAEVVENEGDGAISMRFSAEGEAFDDFLKRAGVLALPPYIDRPTGPTAQDDSDYATIFERYKGAVAAPTAGLHFTPEVLAALDARGVKRHTLTLHVGAGTFLPVRDEIATHKMHAEWGRIDAQTAQLINDTRASGRKIVAVGTTSLRLLESAADEQGIVLPWEGETSIFIKPGYRFRAVDRLMTNFHLPRSTLFMLVCALAGTETMREAYRHAIANGFRFYSYGDACLLDRAP

SEQ ID NO: 63563 - protein, 345 aa, Asaia platycodi
  REGION 1..345: note = tr|A0A060QH10|A0A060QH10_9PROT S-adenosylmethionine:tRNA ribosyltransferase-isomerase; OS = Asaia platycodi SF2.1 OX=1382230 GN=queA PE=3 SV=1
MQISDFDFDLPRENIALEPARPRDSARLLRVAAGQNLAETRISDLPSLLEPGDLLIANDTAVIRAQLAARRGEAKIGITLDRILSDGSWHALAKNARKLKPGDTLHFGSDSVTAEVVENEGDGAISMRFSAEGEAFDDFLKRAGVLALPPYIDRPTGPTAQDDSDYATIFERYKGAVAAPTAGLHFTPEVLAALDARGVKRHTLTLHVGAGTFLPVRDEIATHKMHAEWGRIDAQTAQLINDTRASGRKIVAVGTTSLRLLESAADERGVVHPWEGETSIFIKPGYRFRAVDRLMTNFHLPRSTLFMLVCALAGTETMREAYRHAIAEGFRFYSYGDACLLDRAP

SEQ ID NO: 63564 - protein, 345 aa, Asaia sp.
  REGION 1..345: note = tr|A0A433WZF7|A0A433WZF7_9PROT S-adenosylmethionine:tRNA ribosyltransferase-isomerase; OS = Asaia sp. W19 OX=2067395 GN=queA PE=3 SV=1
MQISDFDFDLPRENIALEPARPRDSARLLRVAASQPLSEARISDLPSLLEPGDLLVANDTAVIRAQLAARRGEAKIGITLDRILSDGSWHALAKNARKLRPGDTLHFGSDPVTAEVVENEGDGAISMRFSAEGKAFDDFLKRAGVLALPPYIDRPTGPTAQDDSDYATIFERHKGAVAAPTAGLHFTPDLLAALDARGVKRHTLTLHVGAGTFLPVRDEIASHKMHAEWGRIDAQTAQRINDTRASGKKIVAVGTTSLRLLESAADEHGIVHPWEGETSIFIKPGYRFRAVDRLMTNFHLPRSTLFMLVCALAGTETMRDAYRHAIAEGFRFYSYGDACLLDRAP

SEQ ID NO: 63565 - protein, 342 aa, Asanoa ferruginea
  REGION 1..342: note = tr|A0A3D9ZEV8|A0A3D9ZEV8_9ACTN S-adenosylmethionine:tRNA ribosyltransferase-isomerase; OS = Asanoa ferruginea OX=53367 GN=DFJ67_1920 PE=3 SV=1
MVTATADPLDFVLPDKLLAHEPPEARGVPRDGVRMLVSTPSAQKHLLFRDLPSVLTAGDVLVVNTSATLAAAVPTVDGHVVHFSTCRSDGTWLVEPRVAGPAGAPTLGPLTSAVAGQRFVLRGGGSVTLLAPYSQGRLWVASLSFEDVRGYLSRHGAPIRYSYVPRSWPLSAYQTVFATEPGSAEMPSAARPFTDRVVTRLVSAGVLVVPIVLHTGVASAEGHERPYPEWFSVPAATARAVSSARRVIAVGTTVVRALETTGGSAGSGWTDLVVTPERGVRVVDGLLTGFHEPRASHLDLLSAVAGVGLVSASYRAALAAGYRWHEFGDVNLLLSDRDVREV

SEQ ID NO: 63566 - protein, 332 aa, Asanoa hainanensis
  REGION 1..332: note = tr|A0A239MNV7|A0A239MNV7_9ACTN S-adenosylmethionine:tRNA ribosyltransferase-isomerase; OS = Asanoa hainanensis OX=560556 GN=SAMN05421812_10657 PE=3; SV = 1
MTATGSPIDFVLPDELSAHEPPEARGVPRDGVRMLVSTPYAQAHRIFRELPDVLCPGDVLVVNTSATLPAAAPTLDGQAVHFSTANPDGTWLVEPRGALAPTAATGQRIDLRGGGSVTLLAPYSRGRLWVASLSFADVRTYLNSHGSPIRYDYVPREWPLSAYQTVFATEPGSAEMPSAARPFTDRVVTRLVAAGVQVVPIVLHTGVASAEAHERPYPEWFEVPNTTARVLAGARRVIAVGTTVVRALETTGGAAGSGWTDLVVTPERGVRVVDGLLTGFHPPRASHLDLLAAVAGPDLVARSYREALAAGYRWHEFGDVNLLLSERAVAAV

SEQ ID NO: 63567 - protein, 332 aa, Asanoa ishikariensis
  REGION 1..332: note = tr|A0A1H3L4R3|A0A1H3L4R3_9ACTN S-adenosylmethionine:tRNA ribosyltransferase-isomerase; OS = Asanoa ishikariensis OX=137265 GN=SAMN05421684_0507; PE = 3 SV=1
MTATGSPIDFVLPDELSAHEPPEARGVPRDGVRMLVSTPYAQSHRIFRELPDVLCPGDVLVVNTSATVPAAVPTLGGPAVHFSTANPDGTWLVEPRGPLASTAAAGQRLDLRGGGSVTLLSPYSRGRLWVASLSFGDVHAYLRSHGSPIRYDYVPKAWPLSAYQTVFATQPGSAEMPSAGRPFTDRVVTRLVAAGVQVVPIVLHTGVASAEAHERPYPEWFSVPATTARVLAGARRVIAVGTTVVRALETTGGAAGSGWTDLVVTPERGVRVVDGLLTGFHEPRASHLDLLAAVAGPDLVARSYREALAAGYRWHEFGDVNLLLSERASAAV

SEQ ID NO: 63568 - protein, 356 aa, unidentified
  source 1..356: note = Ascidiaceihabitans donghaensis
  REGION 1..356: note = tr|A0A2R8BCW0|A0A2R8BCW0_9RHOB S-adenosylmethionine:tRNA ribosyltransferase-isomerase; OS = Ascidiaceihabitans donghaensis OX=1510460 GN=queA PE=3; SV = 1
MALMKLSDFDFDLPEALIATRPAVPRTSARLLVAQADQITNSTVSDLTSWLRPGDRLVLNNTRVIPARLSGTRARQSAQGATEARIEVTLLEPRADGAWSALLKPLKKVKIGEKIRFSDALTAVLEGTGDGQGYLRFNLLGDDFDAALSKAGAMPLPPYIAAKRPADAQDHTDYQTVFAKHSGAVAAPTASLHFDEALLQKLRDMGVTFSYVTLHVGAGTFLPVKVDDILTHKMHAEWGCVEAAAVQEIEATKAAGGRVIPVGTTALRLIETAAQSGRLRAFEGDTDIFIYPGFTFRVADGLMTNFHLPKSTLMMLVSALMGQDAIRNIYAHAISDGYRFFSYGDSSLLFPKPPTD

SEQ ID NO: 63569 - protein, 353 aa, Asticcacaulis benevestitus
  REGION 1..353: note = tr|V4PQZ0|V4PQZ0_9CAUL S-adenosylmethionine:tRNA ribosyltransferase-isomerase OS=Asticcacaulis benevestitus DSM 16100 = ATCC BAA-896 OX=1121022 GN=queA PE=3 SV=1
MLISDFDFDLPDDRIALRPVEPREAARLLRVEADGALIDSRVGDIADCLRAGDLLIVNDTRVLPTQLDGLRIRPDSQVVIEATLVKSTGPAQWQAFLKPGRKVKPGDDLLFKSDATELRAHVSAKDDNGLYTLDFQHSPQELMERLHIVGGMPLPPYIRSKRHEDEQDKSDYQTIFARDEGSVAAPTAGLHFTPAVLEKLTTKGVGIEHITLHVGAGTFLPVKVDDTKDHVMHAEFGMITQASADRINAVRAAGGRIVCVGTTSLRLLESACDDAGVIHPFAAETAIFITPGVKVRSCDMLMTNFHLPKSTLFMLVCALAGTETMKKAYAHAIATGYRFFSYGDASLLSNTSR

SEQ ID NO: 63570 - protein, 356 aa, unidentified
  source 1..356: note = Asticcacaulis biprosthecum
  REGION 1..356: note = tr|F4QR80|F4QR80_9CAUL S-adenosylmethionine:tRNA ribosyltransferase-isomerase OS=Asticcacaulis biprosthecum C19 OX=715226 GN=queA PE=3 SV=1
MLVSDFDFDLPDDLIALRPAEPRESARLLRIDAQGGLTDARVGDIAAFLKSGDLLVVNDTKVLPAQLHGIRRRDGADVAIEATLIKATGATQWQAFLKPGRKVRIGDDLHFGSDIKLQATVAAKAEDGRYTLDFHHTPEVLVERLHVIGAMPLPPYIRSKRREDDQDKRDYQTVFANEEGSVAAPTAGLHFTSQLLEVLQSQGVGIERITLHVGAGTFLPMKVEDTRDHIMHAELGVISAESAARINAARIAGGRIVCVGTTSLRLLESACDPQGTIHAFASETAIFITPGVVVRSCDLVLTNFHLPKSTLFMLVSALAGTDTMKAAYRHAIETGYRFFSYGDACLIDNISKNQET

SEQ ID NO: 63571 - protein, 348 aa, Asticcacaulis excentricus
  REGION 1..348: note = tr|E8RS18|E8RS18_ASTEC S-adenosylmethionine:tRNA ribosyltransferase-isomerase OS=Asticcacaulis excentricus (strain ATCC 15261 / DSM 4724 / VKM B-1370 / CB 48) OX=573 065 GN=queA PE=3 SV=1
MKVSDFDFDLPEDRIALRPVTPREAARLLRVDGVVREDWRVGDLPSLLKAGDLLVINNTRVLPTQLKGTRVREGQTVAFEATLIKSLDGQRWQAFLKPGRRIREGDTLRFDDLSARVLSKDEDGVYVLRFEQAASEVLNGLHRLGGMPLPPYIRSKRPEDEQDKSDYQTVFARDEGSVAAPTAGLHFTPELLQALRDKGVLFEEVTLHVGAGTFLPVKVEDTKDHRMHAEFGVVSADSAARINAARVAGGRIIAIGTTALRLIESACDADGRIHPFSGDTDIFITPGVPVRSADMLWTNFHLPKSTLFMLVCAFAGTEAMKAAYAHAINSGYRFFSYGDASLLTNKSR

SEQ ID NO: 63572 - protein, 348 aa, Asticcacaulis excentricus
  REGION 1..348: note = tr|A0A3G9G9P6|A0A3G9G9P6_9CAUL S-adenosylmethionine:tRNA ribosyltransferase-isomerase; OS = Asticcacaulis excentricus OX=78587 GN=queA PE=3 SV=1
MKVSDFDFDLPEDRIALRPVTPREAARLLRVDGEVREDWRVGDLPSLLKAGDLLVINNTRVLPTQLKGTRERDGQSVTFEATLIKSLDGQSWQAFLKPGRRIREGDTLRFDDLSARVLSKDEDGVYVLRFDQAASEVLNGLHRLGGMPLPPYIRSKRPEDEQDKRDYQTVFARDEGSVAAPTAGLHFTPELLQALRDKGVLFEEVTLHVGAGTFLPVKVEDTKDHRMHAEFGVVSADSAARINAARAAGGRIIAIGTTALRLIESACDTKGHIHPFSGDTDIFITPGVPVRSADMLWTNFHLPKSTLFMLVCAFAGTEAMKAAYAHAIDSGYRFFSYGDASLLMNRSK

SEQ ID NO: 63573 - protein, 347 aa, Asticcacaulis sp.
  REGION 1..347: note = tr|V4QI08|V4QI08_9CAUL S-adenosylmethionine:tRNA ribosyltransferase-isomerase OS=Asticcacaulis sp. YBE204; OX = 1282363 GN=queA PE=3 SV=1
MKVSDFDFHLPEDRIALRPMAPREAARLLEVADTLNDRHVADLPSLLRAGDLLILNNTKVLPTQLKGTRDRGGQTASFEATLIKSLDGQSWQAFLKPGKRIREGDRVAFGDLTADILSKNEDGVYVLRFTQSPSEVINGLHRLGGMPLPPYIRSKRAEDAQDLTDYQTVFARDEGSVAAPTAGLHFTPELLETIRAKGVLTEEITLHVGAGTFLPVKVEDTDEHKMHAEFGIITADSAARINAVRQAGGRLICVGTTALRLLESACDDQGVIHPFAAETSIFITPGVRVNSADVLLTNFHLPKSTLFMLVCAFAGTERMKSAYDHAIETGYRFFSYGDACLLTNTSR

SEQ ID NO: 63574 - protein, 362 aa, Asticcacaulis sp.
  REGION 1..362: note = tr|V4NN01|V4NN01_9CAUL S-adenosylmethionine:tRNA ribosyltransferase-isomerase OS=Asticcacaulis sp. AC402; OX = 1282361 GN=queA PE=3 SV=1
MLVSDFDFDLPDDRIALRPAEPRESARLLRVDAAGNLSDAHIGDIGRFLRPGDLLVVNDTRVLPVQLHGFRRRDGSDVSVEATLIKATGGSQWQAFLKPGRKVRIGDSLLFRSDFSTVELQATVAGKEDDGLYALNFLHVPADLLERLHIIGAMPLPPYIRSKRLEDDQDKRDYQTIFANQEGSVAAPTAGLHFTSSLLEQLQSDGIAIERITLHVGAGTFLPVKVDDTNDHVMHAEFGVITQASADRINAARTAGGRIVCVGTTSLRLLESACDADGMIQPFAAETSIFITPGVRVRSCDLLMTNFHLPKSTLFMLVCALAGTQVMKAAYRHAVDSGYRFFSYGDACLLTNTSDISESSGL

SEQ ID NO: 63575 - protein, 353 aa, Asticcacaulis taihuensis
  REGION 1..353: note = tr|A0A1G4PQS9|A0A1G4PQS9_9CAUL S-adenosylmethionine:tRNA ribosyltransferase-isomerase; OS = Asticcacaulis taihuensis OX=260084 GN=queA PE=3 SV=1
MLISEFDFDLPENRIALRPTEPREAARLLRVDEHGALTDSHIGDIADFLKSGDLLVVNDTRVLPTQLDGQRLRDDSVVMIEATLVKSTGASQWQAFLKPGRKVKAGDQLLFKSDATELKAVVSAKDDNGLYTLDFQHGPQELLERLHLVGGMPLPPYIRSKRHEDEQDKSDYQTIFARDEGSVAAPTAGLHFTPALLEKLAAKGIAIERITLHVGAGTFLPVKVEDTDDHVMHAEFGIITPESAARINAARAAGGRIICVGTTSLRLLESACDSQGAIHPFAAETAIFITPGVTIRSCDLLMTNFHLPKSTLFMLVCALAGTEVMKRAYAHAIETGYRFFSYGDACLLSNTSR

SEQ ID NO: 63576 - protein, 361 aa, unidentified
  source 1..361: note = Atelocyanobacterium thalassa
  REGION 1..361: note = tr|D3ENS1|D3ENS1_ATETH S-adenosylmethionine:tRNA ribosyltransferase-isomerase OS=Atelocyanobacterium thalassa (isolate ALOHA) OX=1453429 GN=queA PE=3 SV=1
MNDDYSLSSYNYYLPSDLIAQSPLVPRDSSRLLVINSLDTHIHSFFHELPKWLLPGDLLVFNNTQVIPARLYGQKTTGAKVEVLLLEEKEPFSWLALVKPGKRFKIGSEILFKEKLDDLNQDFLIKATVVDQDEETGGRILKFDVSSRKIFWEALERIGHLPLPPYISNCNAHSSQYQTIYAQKPGAVAAPTAGLHFTQELLQKLQKKGIEQAYITLHVGLGTFRPVSTDDIKQHTMHQEWVEVPSETIQKIHKTKINGGRVIAVGTTVVRALEGMANETSMDTEYGVKSFSGKTDIFIYPGYSWRLIDGMITNFHLPKSSLLMLVSALIGRKRLLELYKIAIEQKYRFYSFGDGMLVLLS

SEQ ID NO: 63577 - protein, 354 aa, unidentified
  source 1..354: note = Atlantibacter hermannii
  REGION 1..354: note = tr|A0A447LK74|A0A447LK74_ATLHE S-adenosylmethionine:tRNA ribosyltransferase-isomerase; OS = Atlantibacter hermannii OX=565 GN=queA PE=3 SV=1
MRVADFSFELPESLIAHYPLPGRSSCRLLSLDGPTGALTHGTFTDLLEKLNPGDLLVFNNTRVIPARMFGRKASGGKIEVLVERMLDDKRVLAHVRASKAPKPGAELLLGEDESVKATMTARHDALFEIEFDDARAVLDILNDIGHMPLPPYIDRPDEEADRELYQTVYSEKPGAVAAPTAGLHFDEPLLEKLRQKGVEMAFVTLHVGAGTFQPVRVDSIEDHIMHSEYAEVPQDVVDAVLACKARGNRVIAVGTTSVRSLESAAKAAKNDLIEPFFNDTQIFIYPGYQYSVIDALITNFHLPESTLIMLVSAFAGYKHTMNAYHEAVKAEYRFFSYGDAMFITYNPSAKDERP

SEQ ID NO: 63578 - protein, 354 aa, unidentified; identical to SEQ ID NO: 63577
  source 1..354: note = Atlantibacter hermannii
  REGION 1..354: note = tr|H5V4K7|H5V4K7_ATLHE S-adenosylmethionine:tRNA ribosyltransferase-isomerase OS=Atlantibacter hermannii NBRC 105704 OX=1115512 GN=queA PE=3 SV=1

SEQ ID NO: 63579 - protein, 355 aa, unidentified
  source 1..355: note = Atlantibacter subterranea
  REGION 1..355: note = tr|A0A427UWS3|A0A427UWS3_9ENTR S-adenosylmethionine:tRNA ribosyltransferase-isomerase; OS = Atlantibacter subterranea OX=255519 GN=queA PE=3 SV=1
MRVADFSFELPESLIAHYPLPGRSSCRLLSLDGPSGALTHGTFTDLLEKLNPGDLLVFNNTRVIPARMFGRKASGGKIEVLVERMLDDKRVLAHVRASKAPKPGAELLLGEDESVKATMTARHDALFEIEFNDARAVLDILNDIGHMPLPPYIDRPDEESDRELYQTVYSARPGAVAAPTAGLHFDEPLLEKLRQKGVEMAFVTLHVGAGTFQPVRVDSIEDHIMHSEYAEVPQDVVDAVLACKARGNRVIAVGTTSVRSLESAAQAAKNDLIEPFFDDTQIFIYPGYQYKVIDALVTNFHLPESTLIMLVSAFAGYRHTMNAYQQAVNAQYRFFSYGDAMFITYNPSAITEQIG

SEQ ID NO: 63580 - protein, 345 aa, Atopobacter sp.
  REGION 1..345: note = tr|A0A421BFV7|A0A421BFV7_9LACT S-adenosylmethionine:tRNA ribosyltransferase-isomerase; OS = Atopobacter sp. AH10 OX=2315861 GN=queA PE=3 SV=1
MTYTTEDFDFDLPEELIAQTPLKDRSSSRLLEVNVADHSYKDRVFTDILDLLNKGDVLVLNDTKVLPARLHGVKEGTGAHIELLLLHQEEGDVWEVLAKPAKRVKVGSVIDFGDGVLKAKVIEEMEQGGRKVEFAYQGVFLERLDELGEMPLPPYIKEKLKDQSRYQTVYAREEGSAAAPTAGLHFTKDLLHQIEAKGVEIAYVTLHVGLGTFRPVSVDNIEDHVMHSEYYHVDQATVDCLNRAKEEGRRIVACGTTSIRTLESIASLFPDHLEKTSGWTNIFIKPGYQFRLVDAFITNFHLPKSTLVMLVSAYAGRDFILEAYRHAVDEKYRFFSFGDAMFLHR

SEQ ID NO: 63581 - protein, 387 aa, unidentified
  source 1..387: note = Atopobium deltae
  REGION 1..387: note = tr|A0A133XXM8|A0A133XXM8_9ACTN S-adenosylmethionine:tRNA ribosyltransferase-isomerase; OS = Atopobium deltae OX=1393034 GN=queA PE=3 SV=1
MRTDDFDYDLPDELIAQAPVEPRDSCRLLILHRHDGSVKHKIFRDIIDFLEPGDLLVANKTRVMPARLVGRKKQTGGVAETLLLRRREDLDAMGSIWECLVNPGKRLKPSAVIEYRAGGLHAPEQAAVVLTGEILDFLDENRGGRLVKFTPAQGLTLDQAIHSAGHVPLPPYITDYQGDPEKYQTVYAMHEEHSAAAPTAGLHFTSELIEKIKQKGIAWQTVELEVGIDTFRLVTEDDPTKHAMHTERYHVSQQVIDAVHVTKQAGHRVIAVGTTAVRSLESAWDPQAPVAAHPVSARHFEQCADAATQTGKGDVVARENATTKLFLMPGSTYHVVDALITNFHVPRSTLMMLVSALATRDQIMTAYEQAVEKRYRMLSFGDAMFIE

SEQ ID NO: 63582 - protein, 387 aa, Atopobium minutum
  REGION 1..387: note = tr|A0A1H4NNW3|A0A1H4NNW3_9ACTN S-adenosylmethionine:tRNA ribosyltransferase-isomerase; OS = Atopobium minutum OX=1381 GN=queA PE=3 SV=1
MRTDDFDYNLPDELIAQAPVEPRDSCRLLVLHRSDGRVEHKIFRDIVDLLQPGDLLVANKTRVMPARLVGRKQHTGGVSETLLLRRREDVDALGSVWECLVNPGKRLKPGAIIEYRAGGLHAPQISPVVLTGEIMDFVDDNRGGRLVKFVPAADLSLDEAIHRAGHVPLPPYITEYDGDPEKYQTVYAMKEEHSAAAPTAGLHFTPELIDKIKAKGCRWATVELEVGIDTFRLVTEDDPTQHAMHTERYHVPQDVIDAVHATKAAGHRVIAVGTTAVRSLESAWERNIDVSDPAVTALHFEKAAESAAVTGTGDVVARHDASTNLFLMPGSTFHVVDAMITNFHVPRSTLMMLVSAFANRDQIMDAYEQAIVQRYRMLSFGDAMFIE

SEQ ID NO: 63583 - protein, 387 aa, Atopobium minutum; identical to SEQ ID NO: 63582
  REGION 1..387: note = tr|N2BUM0|N2BUM0_9ACTN S-adenosylmethionine:tRNA ribosyltransferase-isomerase OS=Atopobium minutum 10063974; OX = 997872 GN=queA PE=3 SV=1

SEQ ID NO: 63584 - protein, 387 aa, Atopobium parvulum
  REGION 1..387: note = tr|C8W767|C8W767_ATOPD S-adenosylmethionine:tRNA ribosyltransferase-isomerase OS=Atopobium parvulum (strain ATCC 33793 / DSM 20469 / JCM 10300 / VPI 0546); OX = 521095GN=queA PE=3 SV=1
MRTDDFDYNLPEERIAQTPAEPRDSCRLLVLHREDGRIEHKRFTDIVEYLDPGDLVVVNQTRVMPARLVGKKQNTGGVSETLLLKRREDIDALGSVWECLVNPGKRLKPGAVIEYRAGGLHAPDSAPVVLTGTIVDFVDDNRGGRLVRFEAQGERTLDEAIHEAGHVPLPPYITQYEGDPEKYQTVYAMQDEHSAAAPTAGLHFTPKLIETIKAKGVQWASVELEVGIDTFRLVTEDDPTKHVIHTERYHVAPEVVEAVKATKAAGHKVIAIGTTSVRSLESTWDSQLPADEPPVVAHRFEEAEDSAAVTHKGDMVARENATTNLYLMPGSTFHVVDTMVTNFHVPRSTLMMLVSAFATREQIMNAYQSAIDEKYRFLSFGDAMIII

SEQ ID NO: 63585 - protein, 387 aa, Atopobium rimae
  REGION 1..387: note = tr|B9CK41|B9CK41_9ACTN S-adenosylmethionine:tRNA ribosyltransferase-isomerase OS=Atopobium rimae ATCC 49626; OX = 553184 GN=queA PE=3 SV=1
MRTDDFDYDLPDELIAQTPAEPRDSCRLLVLHRDDGSIEHRHFRDIVEYLDPGDLIVANKTRVMPARLVGRKRETGGVSETLLLKRREDLDPLGHLWECLVSPGKRLKPGAIIEYRAGGLHAPLTSPVVLCGEIVDFVEGSKGGRLVRFEAPGTQALDEAIHAAGHVPLPPYITDYEGDPEKYQTVYAMQDEHSAAAPTAGLHFTPELIEDIKTHGITWESVELEVGIDTFRLVEEDDPTQHVIHTERYHVSQGVIDAIRTTKAEGHRVIAIGTTSVRSLESAWDGDACASNPAITARYFEDASGSARITKTGDLVARENATTNLYLMPGSTFHVVDAMVTNFHVPRSTLMMLVSAFASRESIMSAYDAAIKERYRFLSFGDAMLIV

SEQ ID NO: 63586 - protein, 387 aa, Atopobium sp.
  REGION 1..387: note = tr|Z4X0X4|Z4X0X4_9ACTN S-adenosylmethionine:tRNA ribosyltransferase-isomerase OS=Atopobium sp. ICM42b; OX = 1190620 GN=queA PE=3 SV=1
MRTDDFDYNLPEERIAQAPAEPRDSCRLLVLHREDGRIEHKHFTDIVEYLEPGDLVVVNQTRVMPARLVGKKQNTGGVSETLLLKRREDIDALGGVWECLVNPGKRLKPGAVIEYRAGGLHAPDSAPVVLTGTIVDFVDDNRGGRLVRFEAQGDRTLDEAIHEAGHVPLPPYITQYEGDPEKYQTVYAMQDEHSAAAPTAGLHFTPELIETIKAKGVQWASVELEVGIDTFRLVTEDDPTKHVIHTERYHVAPEVVEAVKATKAAGHKVIAIGTTSVRSLESAWDNQIPSAEPPVVARRFEEAEDSAAVTHKGDMVARENATTNLYLMPGSTFHVVDTMVTNFHVPRSTLMMLVSAFATREQIMDAYQSAIDEKYRFLSFGDAMIII

SEQ ID NO: 63587 - protein, 387 aa, Atopobium sp.
  REGION 1..387: note = tr|Z4WXY7|Z4WXY7_9ACTN S-adenosylmethionine:tRNA ribosyltransferase-isomerase OS=Atopobium sp. BS2; OX = 936550 GN=queA PE=3 SV=1
MRTDDFDYNLPEERIAQAPAEPRDSCRLLVLHREDGRIEHKHFTDIVEYLEPGDLVVVNQTRVMPARLVGKKQNTGGVSETLLLKRREDIDALGSVWECLVNPGKRLKPGAVIEYRAGGLHAPDSAPVVLTGTIVDFVDDNRGGRLVRFEAQGDRTLDEAIHEAGHVPLPPYITQYEGDPEKYQTVYAMQDEHSAAAPTAGLHFTPELIETIKAKGVQWASVELEVGIDTFRLVTEDDPTKHVIHTERYHVAPEVVEAVKATKAAGHKVIAIGTTSVRSLESAWDSQIPAAEPPVVARRFEEAEDSAALTHKGDMVARENATTNLYLMPGSTFHVVDTMVTNFHVPRSTLMMLVSAFATREQIMDAYQSAIDEKYRFLSFGDAMIII

SEQ ID NO: 63588 - protein, 389 aa, Atopobium vaginae
  REGION 1..389: note = tr|A0A135PAC6|A0A135PAC6_9ACTN S-adenosylmethionine:tRNA ribosyltransferase-isomerase; OS = Atopobium vaginae OX=82135 GN=queA PE=3 SV=1
MIVRTDDFDYVLPQERIAQHPIEPRDACKLLVLHRTTGEIEHRHFRDIADYMHEGDLIVANKTRVLPARLVGLKHGGSAACETLLLKRREDLDPMGSVWECLVNPGKRLKLGACIDYRAGGLHAPATADIVLRAEIMDYLENNRGGRLVKFTPAQGLSLDEAIHQAGHVPLPPYITNYEGDPEKYQTVYSMKEEHSAASPTAGLHFTPELIERIKQKGVQWKTVELEVGIDTFRLVEEDDPTQHVMHTERYHVPQDVVDAVHATKAAGHKVIAIGTTSVRSLESAFDCNAVCSDPALCALNFEHAQDSCLLTHRGDIVKRENATTDLYIMPGYTWHVVDCMVTNFHVPRSTLMMMVSSFASRELIMKAYQEAIEHEYRFLSFGDAMIML

SEQ ID NO: 63589 - protein, 387 aa, Atopobium vaginae
  REGION 1..387: note = tr|E1L269|E1L269_9ACTN S-adenosylmethionine:tRNA ribosyltransferase-isomerase OS=Atopobium vaginae PB189-T1-4 OX=866774 GN=queA PE=3 SV=1
MRTDDFDYELPEDHIAQAPVTPRDSCKLLVLHRDTGEIEHKHFFDIIDYFDEGDLIVANKTRVLPARLIGKKKPSGITCETLLLRRREDLDPMGSIWECLVNPGRRMKPGVCLEYREGGLHAPDSAPVVLTARMLDFIEENRGGRLVKFTPAAGLSLDSAIHKAGHVPLPPYITRYEGDPEKYQTVYSMHEEHSAASPTAGLHFTNELIERIKQKGVQWKTVELEVGIDTFRLVEEDDPTQHEMHTERYHVPQDVVDAVHATKAAGKRVIAIGTTSVRSLESAFDTTCACATPPVCAQRFESCPDAAAVCGHGDIVACANATTSLYIMPGYTWHVVDCMVTNFHVPRSTLMMMVSSFASRDQIMDAYANAIEHNYRFLSFGDAMIML

SEQ ID NO: 63590 - protein, 345 aa, Atopostipes suicloacalis
  REGION 1..345: note = tr|A0A1M4XAP1|A0A1M4XAP1_9LACT S-adenosylmethionine:tRNA ribosyltransferase-isomerase; OS = Atopostipes suicloacalis DSM 15692 OX=1121025 GN=queA; PE = 3 SV=1
MNNFKTDDFDFSLPEELIAQVPLKNRSASRLMVLDHNQQTIEDKTFLDIIDELKPNDALVMNNTRVLPARLFGTKIETGAHLEVLLLKNIEGDRWETLMKPAKKAKIGTTIRFGDGRLTAKVVEELEEGGRILDFSYEGIFLEILEELGEMPLPPYITEKLDEADRYQTVYAKENGSAAAPTAGLHFTDEVLEQLKEKGVKLAFLTLHVGLGTFRPVNAENVEDHKMHSEFYQLSEETANLLNETKANGGRVIAVGTTSIRTLETIANKFDGKLEADSGWTDIFIKPGYTFKFVDAFLTNFHLPKSTLIMLVSAFAGREFVLKAYHHAVDEQYRFFSFGDAMFVQ

SEQ ID NO: 63591 - protein, 384 aa, Aulosira laxa
  REGION 1..384: note = tr|A0A1Z4U437|A0A1Z4U437_9CYAN S-adenosylmethionine:tRNA ribosyltransferase-isomerase; OS = Aulosira laxa NIES-50 OX=1541988 GN=queA PE=3 SV=1
MEQQLTPAALTPNSNNDVVNTELDRSLSAYDYELPTELIAQNPAIPRDSSRLLVVNSRSIHHIFHDLPHLLKEGDLLVMNNTSVIPARLYGRKATGAEIEVLLLEERQYNCWLALVKPGKRFKVGSKIIFEPRGAFKQGSKGAGGDEKVNSSLSLTATVLETDPATGGRLLQFDVPGGVPLVQLLDVFGEVPLPPYITASEATDEQYQTVYAQHPGAIAAPTAGLHFTPELLEKLRDRGINQAFITLHVGVGTFRPVEVEDVTTHQMHEEWIEVPAATVEQIRATKAAGGRVIAVGTTAVRSLEGAAQSGELQPFCGKTNLFIYPGYQWRVVDGLITNFHLPRSSLLMLVSALIGRERLLNIYQEAIAARYRFYSFGDAMLILP

SEQ ID NO: 63592 - protein, 363 aa, Aurantimonas coralicida
  REGION 1..363: note = tr|A0A0P0YZR1|A0A0P0YZR1_9RHIZ S-adenosylmethionine:tRNA ribosyltransferase-isomerase; OS = Aurantimonas coralicida OX=182270 GN=queA PE=3 SV=1
MRVDLFDFELPPERIALRPVSPRESARLLCVDPAGGLADQTVGDLPSLLTPGDVLVFNDTKVIPAQLEGLRRRPGSVEGEGVAQISATLHMREAPDRWLAFVRPGKRVKIGDRIAFGHGGNACLAGTLEATVETRGEGGEASLRFDLSGPALDEAIAAVGHIPLPPYIASKRPDDSQDRTDYQTVYAREDGAVAAPTAGLHFTPDLFARLAARDIATEYLTLHVGAGTFLPVKAEDTADHRMHSEIGRVTEESAERLNAARREGRRIVSVGTTSLRLLESAADVEGTIRPFSDPTDIFITPGYRFRAVDRLMTNFHLPRSTLFMLVSAFSGIDTMKSAYAHAIANEYRFYSYGDACLLDRATA

SEQ ID NO: 63593 - protein, 363 aa, Aurantimonas manganoxydans
  REGION 1..363: note = tr|Q1YHY4|Q1YHY4_AURMS S-adenosylmethionine:tRNA ribosyltransferase-isomerase OS=Aurantimonas manganoxydans (strain ATCC BAA-1229 / DSM 21871 / SI85-9A1) OX=287752 G; N = queA PE=3 SV=1
MRVDLFDFELPPERIALRPVSPRESARLLCVDPARGLADQTVGDLPSLLTPGDVLVFNDTKVIPAQLEGLRRRPGSVDGEGVAQISATLHMREAPDRWLAFVRPGKRVKVGDRIAFGHGGNACLAGTLEATVETRGEGGEASLRFDLSGPALDEAIAAVGHIPLPPYIASKRPDDSQDRSDYQTVYAREDGAVAAPTAGLHFTPDLFARLAARDIAAEYLTLHVGAGTFLPVKAEDTADHRMHSEIGRVTEESAERLNAARREGRRIVSVGTTSLRLLESAADADGTIRPFSGPTDIFITPGYRFRAVDRLMTNFHLPRSTLFMLVSAFSGIDTMKSAYAHAIGNEYRFYSYGDACLLDRAAA

SEQ ID NO: 63594 - protein, 363 aa, Aurantimonas manganoxydans; identical to SEQ ID NO: 63593
  REGION 1..363: note = tr|A0A0P0Z5I7|A0A0P0Z5I7_9RHIZ S-adenosylmethionine:tRNA ribosyltransferase-isomerase; OS = Aurantimonas manganoxydans OX=651183 GN=queA PE=3 SV=1

SEQ ID NO: 63595 - protein, 362 aa, Aurantimonas sp.
  REGION 1..362: note = tr|A0A1X0SW43|A0A1X0SW43_9RHIZ S-adenosylmethionine:tRNA ribosyltransferase-isomerase; OS = Aurantimonas sp. 22II-16-19i OX=1317114 GN=queA PE=3; SV = 1
MRVDLFDFELPEERIALRPAVPREAARLLHVGQAGALSDHHVGDLPDLLAPGDVLVFNDTRVIPARLSGVRRREGAAAGEGVARIEATLHMRMAPDRWKAFLRPAKRVKLDDRIVFGAEADAACLLAGLAATVEERGEGGEATLRFELEGPALDEAIAAVGHMPLPPYIASKRAEDAADLADYQTIFARESGAVAAPTAGLHFTPELMARIKARGLLREFLTLHVGAGTFLPVKADDTDEHRMHAEIGVIDEATAARLNAVRQNGGRLVAVGTTSLRLLESATGEDGVIRPFAGPTDIFITPGYRFRAVDRLVTNFHLPRSTLFMLVSAFSGLEAMRAAYAHAVEAGYRFYSYGDACLLERV

SEQ ID NO: 63596 - protein, 363 aa, Aurantimonas sp.
  REGION 1..363: note = tr|A0A0Q6EM29|A0A0Q6EM29_9RHIZ S-adenosylmethionine:tRNA ribosyltransferase-isomerase; OS = Aurantimonas sp. Leaf443 OX=1736378 GN=queA PE=3 SV=1
MRVDLFDFDLPEARIALRPAVPREAARLLHVRPGAGLDDRRVGDLPALLRDGDVMVFNDTRVIPAQLEGVRSRAAASGGDGTARISATLHMRIGPDRWKAFLRPAKRVALGDRVRFGARNEACALAGLDAKIVEKGEAGEATLRFDLSGPDLDAAIAGVGHIPLPPYIASKRPDDAQDRTDYQTIFAREDGAVAAPTAGLHFTPDLLSALDARGIVRETVTLHVGAGTFLPVKAEDTAEHVMHEEIGAIDAETAEGLNAARAAGRRIVAVGTTSLRLLESAADESGRIAPFRAPTGIFITPGYRFRAVDALMTNFHLPRSTLFMLVCAFSGLETMRAAYAHAIAEGYRFYSYGDACLLERAPS

SEQ ID NO: 63597 - protein, 335 aa, unidentified
  source 1..335: note = Aureibacillus halotolerans
  REGION 1..335: note = tr|A0A4R6UDB5|A0A4R6UDB5_9BACI S-adenosylmethionine:tRNA ribosyltransferase-isomerase; OS = Aureibacillus halotolerans OX=1508390 GN=EV213_101204; PE = 3 SV=1
MNAFQKQLIPKDASIPPEKAGKSRSKVRLLHFDSLTKQMKHKQFERLPEVFRKGDVVVLNTSRTIPAVLHTMKGEEIRLSRQCRKGVWDVLFVKPPKRVFHRFPGGLTGKIVGRGSESPLIQMAFSLQGAVFFEHLYRHGDVVRYEHLSHPWSLRYFQTVYANEPGSVEMPSAGRAFTWKLINDLQRKGVKVESICLHAGLSYYGNDSWPSPALHPEPFTVSQKTVETIKHAKENGGRVVAVGTTVVRALESAHSPGGVLQPTKGETALYVTAESALSVVDGLLTGFHEFEASHLDMLTAFVTKEDLEAMYQEALKERYLWHEFGDMNLILPSKA

SEQ ID NO: 63598 - protein, 347 aa, unidentified
  source 1..347: note = Aureibacillus halotolerans
  REGION 1..347: note = tr|A0A4R6TWW0|A0A4R6TWW0_9BACI S-adenosylmethionine:tRNA ribosyltransferase-isomerase; OS = Aureibacillus halotolerans OX=1508390 GN=queA PE=3 SV=1
MKVSEFDFHLPERLIAQQPLLDRTGSRLLTVDRETGKTEHRTFVDLLDKVRPGDCLVFNQSKVLPARLIGTKNETGATIELLLLKQTEKTDQWEVLAKPAKRVKPGTILSFGEHELSCTCDEVLEDGKRLVTFSYRGLFLEVLEKLGSMPLPPYIKERLDEPDRYQTVYAKTAGSAAAPTAGLHFTTPFLNQLQDAGVSLAFLTLHVGLGTFRPVSVDEVESHDMHGEFYELDEKTAALLNNTRKAGGRLIAVGTTSARTLETIADESGHFKASSGWTSIFIYPGYEFRGIDGLLTNFHLPKSTLLMLVSAFASKEIILHAYQEAVEQEYRFFSFGDAMLLLRGDNE

SEQ ID NO: 63599 - protein, 349 aa, unidentified
  source 1..349: note = Aureicoccus marinus
  REGION 1..349: note = tr|A0A2S7T716|A0A2S7T716_9FLAO S-adenosylmethionine:tRNA ribosyltransferase-isomerase; OS = Aureicoccus marinus OX=754435 GN=queA PE=3 SV=1
MKLSNFNFELPQELLAEYPAENRDESKLMVIHRETGKIEHKMFKDLIDYFDEGDVMCLNNTKVFPARLFGNKEKTGARIEVFLLRELNEEQRLWDVLVDPARKIRIGNKLYFGEDESLVAEVIDNTTSRGRTLRFLYDGSYIDFRRKMRELGETPLPKYIKRDVEPEDEQRYQTIYAKHEGAVAAPTAGLHFSKHLLKRLEIKGIDFAEVTLHVGLGTFNPVEVEDLSKHKMDSEELVIDERATEIVNNAKAQKRKVCAVGTTVMRGLESAVSSERSLNTFEGWTNKFIFPPYEFSIADAMITNFHLPKSTLLMMVSAFMGHDLMKKAYKQAILEGYRFYSYGDAMLIL

SEQ ID NO: 63600 - protein, 349 aa, Aureimonas altamirensis
  REGION 1..349: note = tr|A0A1M6JA68|A0A1M6JA68_9RHIZ S-adenosylmethionine:tRNA ribosyltransferase-isomerase; OS = Aureimonas altamirensis DSM 21988 OX=1121026 GN=queA; PE = 3 SV=1
MRVDLFDFDLPEERIALRPALPRESAKLLHVPSHGAFEDRRVGDLPDLLRPGDCLVFNDTRVIPARLAGVRRRGDTMARVEVTLHMRLGADEWRAFVKPAKRIDAGETLEFGDGALTATIADKRDGGEVTLRFDRSGAALDAAIAEVGILPLPPYIAARRAVDAQDSADYQTIYAREEGAVAAPTAGLHFTPELMAHLQERGVETAFVTLHVGAGTFLPVKADDTAQHRMHAEIGEIDATTADRLNAARKEGRRIVAVGTTSLRLLESAADEDGTLHPFRKATDIFITPGYRFRAVDALWTNFHLPRSTLFMLVSAFSGLERMRAAYEHAIAGGYRFYSYGDACLLERA

SEQ ID NO: 63601 - protein, 349 aa, Aureimonas altamirensis
  REGION 1..349: note = tr|A0A0B1Q2D6|A0A0B1Q2D6_9RHIZ S-adenosylmethionine:tRNA ribosyltransferase-isomerase; OS = Aureimonas altamirensis OX=370622 GN=queA PE=3 SV=1
MRVDLFDFDLPEERIALRPALPRESAKLLHVPSHGDFEDRRVGDLPGLLRPGDCLVFNDTRVIPARLAGIRRRGDTAARVEVTLHMRLGADEWRAFVKPAKRIDAGEMLEFGGGALTATIADKRDGGEVTLRFDKSGAALDAAIAEVGILPLPPYIAARRPVDAQDSADYQTIYAREEGAVAAPTAGLHFTPELMARLREQGVETAFVTLHVGAGTFLPVKADDTAQHRMHAEIGEIDAATADRLNDVRKQGRRIVAVGTTSLRLLESAADEDGTVHPFRKATDIFITPGYRFRAVDALWTNFHLPRSTLFMLVSAFSGLERMRAAYEHAIAGGYRFYSYGDACLLERA

SEQ ID NO: 63602 - protein, 359 aa, unidentified
  source 1..359: note = Aureimonas flava
  REGION 1..359: note = tr|A0A3A1WE37|A0A3A1WE37_9RHIZ S-adenosylmethionine:tRNA ribosyltransferase-isomerase; OS = Aureimonas flava OX=2320271 GN=queA PE=3 SV=1
MQVDLFDFELPEERIALRPALPRESARLLRVAASGPFEDRLVGDLPTVLRDGDVLVFNDTKVIPARMSGERLRQRPDGPSRVGVDATLHMRIAADRWKAFMRPGKRINVGDAVEFVPAVGDGAPLVAQVMEKGEGGEVELLFALGGPALDAAIAAVGRLPLPPYIASKRAVDGADLRDYQTVFAREEGAVAAPTAGLHFTPELMASLSARGIAQEYVTLHVGAGTFLPVKADDTREHRMHSEIGVVTEDVAWRLQAARDAGRRIVAVGTTSLRLLESAARETGHVEPFAAATDIFITPGYEFRAVDALMTNFHLPRSTLFMLVSAFSGLDRMRAAYAHAVRDGYRFYSYGDACLLERTA

SEQ ID NO: 63603 - protein, 348 aa, Aureimonas frigidaquae
  REGION 1..348: note = tr|A0A0P0Z491|A0A0P0Z491_9RHIZ S-adenosylmethionine:tRNA ribosyltransferase-isomerase; OS = Aureimonas frigidaquae OX=424757 GN=queA PE=3 SV=1
MRVDLFDFDLPEERIALRPALPRESARLLRVAPAGPFEDRTVADLPALLRPDDCLVFNDTRVIPARLAGLRQRGDTTARVEVTLHMRVAPDRWRAFLKPAKRVAKDETITFGPDLSAHVIDKADGGEVTLAFDRSGPALDTAIATTGFLPLPPYIAARRPVDDQDRQDYQTIYAREDGAVAAPTAGLHFTPELMAALKARGLETLFVTLHVGAGTFLPVKADDTAAHVMHSEIGEIDAGTAERLNAARAAGRRIVAVGTTSLRLLESAADETGRLHPFRAATDIFITPGYRFRAVDALVTNFHLPRSTLFMLVSAFSGLERMRAAYDHAIAGQYRFYSYGDACLLERS

SEQ ID NO: 63604 - protein, 352 aa, unidentified
  source 1..352: note = Aureimonas jatrophae
  REGION 1..352: note = tr|A0A1H0MFE1|A0A1H0MFE1_9RHIZ S-adenosylmethionine:tRNA ribosyltransferase-isomerase; OS = Aureimonas jatrophae OX=1166073 GN=queA PE=3 SV=1
MRVDLFDFDLPEERIALRPALPRESAKLLFVPSSGPLADWHVRDLPDLLRPDDVIVLNDTRVIPAQLHGTRRRGDAVAKVDVTLHMRTAPDIWQAFVRPAKKLAIGETVEFGDGQLVAHVGSKGEAGEVELRFDRTGPDLDAAVAVVGVLPLPPYIASRRPVDAADASDYQTSFAREPGAVAAPTAGLHMTHALRDELAGRGIAAEFVTLHVGAGTFLPVKADNTSEHRMHSEIGIVDSDVAARLTAYRRAGRRIVAIGTTSLRLLESAASEDGSIQAFSGATDIFITPGYRFRAVDALLTNFHLPRSTLFMLVSAFRGRDRMQAAYRHAIGAEYRFYSYGDACLLERKDLP

SEQ ID NO: 63605 - protein, 359 aa, unidentified
  source 1..359: note = Aureimonas phyllosphaerae
  REGION 1..359: note = tr|A0A1I2FFM6|A0A1I2FFM6_9RHIZ S-adenosylmethionine:tRNA ribosyltransferase-isomerase; OS = Aureimonas phyllosphaerae OX=1166078 GN=queA PE=3 SV=1
MQVDLFDFELPEERIALRPALPRESARLLYVPASGPFADCRVGDLPDFLREGDVLVFNDTKVIPAQLTGERIRAGSDGSSRVAVDATLHMRIALDRWKAFMRPGKRIKVGDLVVFSSGTATDPGLEAVVLEKGEGGEVNLRFTLAGPELDAAISVVGHLPLPPYIASKRAVDDDDLRDYQTVFAREEGAVAAPTAGLHFTPELLAELEYRGVMQEFVTLHVGAGTFLPVKADDTTEHRMHSEIGVVTKDVAERLQTARDDGRRIVAVGTTSLRLLESAARATGRIEPFSDATDIFITPGFQFRAVDALMTNFHLPRSTLFMLVSAFSGLDRMRAAYDHAIAGGYRFYSYGDACLLERSA

SEQ ID NO: 63606 - protein, 359 aa, Aureimonas sp.
  REGION 1..359: note = tr|A0A0Q5HBE9|A0A0Q5HBE9_9RHIZ S-adenosylmethionine:tRNA ribosyltransferase-isomerase; OS = Aureimonas sp. Leaf324 OX=1736336 GN=queA PE=3 SV=1
MQVDLFDFELPEERIALRPALPRESAKLLHVSASGHFIDRRVGDLPDLLREGDVLVFNDTKVIPAQLTGERVRIGADGPSRVPVDATLHMRVKLDRWKAFMRPGKRIKVGDRVEFSSQTTANSSLDALVVEKGEGGEVDLRFALAGPELDAAIATVGHLPLPPYIASKRAVDDADLRDYQTVFAREEGAVAAPTAGLHFTPELLAKLDQRGVAQEYVTLHVGAGTFLPVKADDTTEHRMHSEIGVVTVGVADRLQTARDGGRRIVAVGTTSLRLLESAARATGRIESFSGATDIFITPGFKFRAVDALMTNFHLPRSTLFMLVSAFSGLDRMRAAYDHAIDSGYRFYSYGDACLLERSV

SEQ ID NO: 63607 - protein, 360 aa, Aureimonas sp.
  REGION 1..360: note = tr|A0A0S2EPX4|A0A0S2EPX4_9RHIZ S-adenosylmethionine:tRNA ribosyltransferase-isomerase; OS = Aureimonas sp. AU20 OX=1349819 GN=queA PE=3 SV=1
MRVDLFDFDLPEERIALRPALPRESARLLHVPASGGLGDRRIADLPSLLRAGDVLVFNDTRVIPARLNGERRREGLPAGQGVAQIEATLHMRLDAGRWAAFVRPAKRVSVGDRITFQGADGTTLRSEVEERGDGGETVLRFDSSGPELDAAIASVGHLPLPPYIASKRPEDEQDRADYQTIYAKHDGAVAAPTAGLHFTPELLESLASAGVGFEYVTLHVGAGTFLPVKAEDTLAHRMHHEFGSIDPGTARRLSAARDAGRRIVAVGTTSLRVLESAAESGRIEPFHAATDIFITPGYEFRAVDALLTNFHLPRSTLFMLVSAFSGLDRMRHAYAHAIETGYRFYSYGDACLLERPKAVS

SEQ ID NO: 63608 - protein, 360 aa, Aureimonas ureilytica
  REGION 1..360: note = tr|A0A147DBD3|A0A147DBD3_9RHIZ S-adenosylmethionine:tRNA ribosyltransferase-isomerase; OS = Aureimonas ureilytica OX=401562 GN=queA PE=3 SV=1
MRVDLFDFDLPEERIALRPALPRESARLLLVPEQGPLSDKRVGDLPGLLRAGDVLVFNDTKVIPARLNGLRRRDGLPEGQGVAEIEATLHLRLDGGRWKAFVRPAKRVAVRDVIRFQGVGQVILSGMVEERGEGGEVTLAFDRSGPDLDAAIAEIGHLPLPPYIASKRGEDEQDRTDYQTIYARHDGAVAAPTAGLHFTPQLMEALRAAGVEFEYVTLHVGAGTFLPVKADDTSAHRMHHEFGSIDIATAERLARAKAEGRRVVAVGTTSLRVLESAAQGGVIAPFHATTDIFITPGYAFRAVDALLTNFHLPRSTLFMLVSAFSGLDRMRDAYRHAIETGYRFYSYGDACLLERSEATS

SEQ ID NO: 63609 - protein, 360 aa, Aureimonas ureilytica
  REGION 1..360: note = tr|A0A175R6Y7|A0A175R6Y7_9RHIZ S-adenosylmethionine:tRNA ribosyltransferase-isomerase; OS = Aureimonas ureilytica OX=401562 GN=queA PE=3 SV=1
MRVDLFDFDLPEERIALRPALPRESARLLLVPEEGPMSDKRVGDLPGLLRAGDILVFNDTRVIPARLNGLRRRDGLPEGQGVAEIEATLHLRLDGGRWKAFVRPAKRVAVGDVIRFQGVRQVILLAKVEERGEGGEITLAFDRSGPDLDAAIAEIGHLPLPPYIASKRGEDEQDRTDYQTIYARHDGAVAAPTAGLHFTPQLMEALRAAGAQFEYVTLHVGAGTFLPVKADDTSAHRMHHEFGSIDIATAERLARAKADGRRVVAVGTTSLRVLESAAQGGVIAPFHATTDIFITPGYAFRAVDALLTNFHLPRSTLFMLVSAFSGLDRMRDAYRHAIETGYRFYSYGDACLLERSEATS

SEQ ID NO: 63610 - protein, 349 aa, Aureitalea marina
  REGION 1..349: note = tr|A0A2S7KTE8|A0A2S7KTE8_9FLAO S-adenosylmethionine:tRNA ribosyltransferase-isomerase; OS = Aureitalea marina OX=930804 GN=queA PE=3 SV=1
MKLSNFNFELPMDLLAEYPATNRDEARLMVLNRAEKTIEHKMFKDLIDYFEEDDVLVLNNTKVFPARLFGNKEKTGARIEVFLLRELNPETRLWDVLVDPARKIRIGNKLYFGEDESLVAEVIDNTTSRGRTLRFLFDGSYEEFRNKLSELGETPLPKYIKREVEPEDAERYQTIFAKEEGAVAAPTAGLHFSKHLMKRLEIKGTRFAEITLHVGLGTFNPVEVEDLSKHKMDSEEITIASDAVHTINQALVQKRRVCAVGTTVMRALESSVSSNSTLNEYQGWTNKFIFPPYDFSIANAMVTNFHTPKSTLLMMVSAFAGHEFIKEAYAEAIKEKYKFYSYGDAMLIL

SEQ ID NO: 63611 - protein, 349 aa, Aureitalea sp.
  REGION 1..349: note = tr|A0A2S0I119|A0A2S0I119_9FLAO S-adenosylmethionine:tRNA ribosyltransferase-isomerase; OS = Aureitalea sp. RR4-38 OX=2094025 GN=queA PE=3 SV=1
MKLSNFNFNLPAELLAEYPAPNRDEARLMVLNRADHSIEHKMFKDLIDYFEEEDVLVLNNTKVFPARLFGNKEKTGARIEVFLLRELNPETRLWDVLVDPARKIRIGNKLYFGEDESLVAEVIDNTTSRGRTLRFLFDGSYEEFRNKLTELGETPLPKYIKREVEPEDAERYQTIFAKEEGAVAAPTAGLHFSKHLLKRLEIKGVNFAEVTLHVGLGTFSPVEVEDLSKHKMDSEEIIIPQKAVDTINTGIVQKRRICSVGTTVMRALESSVSSNNTLNAYSGWTNKFIFPPYDFSIANSMVTNFHTPKSTLLMMVAAFAGHEFIKEAYAEAIKEKYRFYTYGDAMLII

SEQ ID NO: 63612 - protein, 350 aa, unidentified
  source 1..350: note = Auricoccus indicus
  REGION 1..350: note = tr|A0A1Q1G0W6|A0A1Q1G0W6_9STAP S-adenosylmethionine:tRNA ribosyltransferase-isomerase; OS = Auricoccus indicus OX=1849491 GN=queA PE=3 SV=1
MNVEQFDFDLPDDLIAQTPLKERSESRLLTLDYANQRIEHRQFFHIQNYLKAGDALVLNNTKVIPARLFGMKETGAAIEILLLEDISEDTWKALVKPAKRIKIGDKILFGEGVLTAECVAVQDEGIRQLKLQYDGILQNILDKLGTMPLPPYIKETLDDASRYQTVYAKTPGSAAAPTAGLHFTTELLEQLTAQGVDIYYVTLHVGLGTFRPVSVDNVDDHTMHSEYYEIDEVTAKALNDKKRAGKRIISVGTTSTRTLETVYSMYNEFRASSGYTDIFIYPGYEYKAIDGLITNFHLPKSTLMMLVSALAGRELIMKAYSEAIQERYRFFSFGDAMFIYKGEQHGGNNV

SEQ ID NO: 63613 - protein, 363 aa, Avibacterium avium
  REGION 1..363: note = tr|A0A379AR92|A0A379AR92_AVIAV S-adenosylmethionine:tRNA ribosyltransferase-isomerase; OS = Avibacterium avium OX=751 GN=queA PE=3 SV=1
MRVSDFYFDLPDALIARYPKADRTASRLLQLNGENGELFHRTFADVVDLINEGDLLIFNNIRVIPARMYGRKASGGKIEVLVERILSEDRFLAHIRSSKAPKEGAELFLGEDKLGEGKGIKMIMKARHDTLFELEMAEKSTALLDVLQQIGHMPLPPYIDRPDEDADKERYQTVYNKVPGAVAAPTAGLHFDNELLEKLKAKGVNFAFVTLHVGAGTFQPVRVENIEDHKMHAEYVEVPQETVDAILRTKANGKRVIAVGTTSVRSIESAALFSQENQSGQLLAPYFSDTSIFLYPGKKFLVVDALITNFHLPESTLIMLVSAFAGYKHTMQAYESAVQNGYRFFSYGDAMFITKNPNVTGLD

SEQ ID NO: 63614 - protein, 363 aa, Avibacterium endocarditidis
  REGION 1..363: note = tr|A0A2S5AHT1|A0A2S5AHT1_9PAST S-adenosylmethionine:tRNA ribosyltransferase-isomerase; OS = Avibacterium endocarditidis OX=380674 GN=queA PE=3 SV=1
MRVSDFYFDLPDALIARYPKADRSASRLLQLNGENGELFHRTFADVVDLINEGDLLIFNNTRVIPARMYGRKASGGKVEVLVERILSEDRFLAHIRSSKAPKEGAELFLGEDKLGEGKGIKMIMKARHDTLFELEMAEKSTALLDVLQQIGHMPLPPYIDRPDEDADKERYQTVYNKVPGAVAAPTAGLHFDNELLEKLKAKGVNFAFVTLHVGAGTFQPVRVENIEDHKMHAEYVEVPQETVDAILRTKANGKRVIAVGTTSVRSIESAALFSQENQSGQLLAPYFSDTSIFLYPGKKFLVVDALITNFHLPESTLIMLVSAFAGYKHTMQAYESAVQNGYRFFSYGDAMFITKNPNVTGLD

SEQ ID NO: 63615 - protein, 363 aa, Avibacterium gallinarum
  REGION 1..363: note = tr|A0A379AV76|A0A379AV76_AVIGA S-adenosylmethionine:tRNA ribosyltransferase-isomerase; OS = Avibacterium gallinarum OX=755 GN=queA PE=3 SV=1
MRVSDFYFDLPDALIARYPKADRSASRLLQLNGENGELFHRTFADVVDLINEGDLLIFNNTRVIPARMYGRKASGGKIEVLVERILSEDRFLAHIRSSKAPKEGAELFLGEDKLGEGKGIKMIMKARHDTLFELEIAEKSTALLDVLQQIGHMPLPPYIDRPDEDADKERYQTVYNKVPGAVAAPTAGLHFDNELLEKLKAKGVNFAFVTLHVGAGTFQPVRVENIEDHKMHAEYVEVPQETVDAILRTKANGKRVIAVGTTSVRSIESAALFSQENQSGQLLAPYFSDTSIFLYPGKKFLVVDALITNFHLPESTLIMLVSAFAGYKHTMQAYESAVQNGYRFFSYGDAMFITKNPNVTGLD

SEQ ID NO: 63616 - protein, 363 aa, Avibacterium paragallinarum
  REGION 1..363: note = tr|A0A380X5D3|A0A380X5D3_AVIPA S-adenosylmethionine:tRNA ribosyltransferase-isomerase; OS = Avibacterium paragallinarum OX=728 GN=queA PE=3 SV=1
MRVSDFYFDLPDELIARYPKADRTASRLLQLNGENGEISHRTFADVVDLINEGDLLIFNNTRVIPARMYGRKASGGKIEVLVERILSEDSFLAHIRSSKAPKEGTELFLGEDKLGEGKGIKMIMTARHESLFEVKIAEKNTALLDVLQQIGHMPLPPYIDRPDEEADQERYQTVYNKVPGAVAAPTAGLHFDDVLLAKLKAKGVNFAFVTLHVGAGTFQPVRVENIEDHKMHAEYVEVLQETVDAILHTKAQGKRVIAVGTTSVRSIESAALFAQEHHHSQLLEPYFSDTSIFLYPGKKFLVVDALITNFHLPESTLIMLVSAFAGYSHTMNAYQSAVQNHYRFFSYGDAMFISKNSNVTGLD

SEQ ID NO: 63617 - protein, 363 aa, Avibacterium paragallinarum
  REGION 1..363: note = tr|A0A2V4F4F9|A0A2V4F4F9_AVIPA S-adenosylmethionine:tRNA ribosyltransferase-isomerase; OS = Avibacterium paragallinarum OX=728 GN=queA PE=3 SV=1
MRVSDFYFDLPDELIARYPKADRTASRLLQLNGENGEISHRTFADVVDLINEGDLLIFNNTRVIPARMYGRKASGGKIEVLVERILSEDSFLAHIRSSKAPKEGTELFLGEDKLGEGKGIKMIMTARHESLFEVKIAEKNTALLDVLQQIGHMPLPPYIDRPDEEADQERYQTVYNKVPGAVAAPTAGLHFDDVLLEKLKAKGVNFAFVTLHVGAGTFQPVRVENIEDHKMHAEYVEVPQETVDAILHTKAQGKRVIAVGTTSVRSIESAALFAQEHHHSQLLEPYFSDTSIFLYPGKKFLVVDALITNFHLPESTLIMLVSAFAGYSHTMNAYQSAVQNHYRFFSYGDAMFISKNSNVTGLD

SEQ ID NO: 63618 - protein, 363 aa, Avibacterium volantium
  REGION 1..363: note = tr|A0A447SQY4|A0A447SQY4_AVIVO S-adenosylmethionine:tRNA ribosyltransferase-isomerase; OS = Avibacterium volantium OX=762 GN=queA PE=3 SV=1
MRVSDFYFDLPDELIARYPKADRTASRLLQLNGENGELFHRTFADVVDLINEGDLLIFNNTRVIPARMYGRKASGGKIEVLVERILSEDRFLAHIRSSKAPKEGAELFLGEDKLGEGKGIKMIMKARHDTLFELEMAEKSTALLDVLQQIGHMPLPPYIDRPDEDADKERYQTVYNKVPGAVAAPTAGLHFDNELLEKLKAKGVNFAFVTLHVGAGTFQPVRVENIEDHKMHAEYVEVPQETVDAILRTKANGKRVIAVGTTSVRSIESAALFSQENQSGQLLAPYFSDTSIFLYPGKKFLVVDALITNFHLPESTLIMLVSAFAGYKHTMQAYESAVQNGYRFFSYGDAMFITKNPNVTGLD

SEQ ID NO: 63619 - protein, 344 aa, Azoarcus communis
  REGION 1..344: note = tr|A0A2U8H197|A0A2U8H197_9RHOO S-adenosylmethionine:tRNA ribosyltransferase-isomerase; OS = Azoarcus communis OX=41977 GN=queA PE=3 SV=1
MPLTLNDFDYELPPELIAQAPLAERSASRLLIVGETLDDRQFSDLPDYVRPGDLLVFNDTRVLHARLHGIKASGGQIEVLIERPIGPHEALAQIRSSKSPKPGSTLRLADAFDVTVLGRVGEFFHLRFPEHEDLVQLLERHGKLPLPPYIQRAAGDADESRYQTVYARAPGSVAAPTAGLHFDQSVLDRVAARGASCAWLTLHVGAGTFQPVRVDDLGEHRMHCERYVIPQETVDAIAATRAAGGRVIAVGTTSMRALEAAAQEGPLAAGSGETEIFILPGFRFRVVDALVTNFHLPKSTLLMLVSAFAGMDTMRQAYRHAIAQGYRFFSYGDAMLLTRNDNAV

SEQ ID NO: 63620 - protein, 344 aa, Azoarcus communis
  REGION 1..344: note = tr|A0A323V2I1|A0A323V2I1_9RHOO S-adenosylmethionine:tRNA ribosyltransferase-isomerase; OS = Azoarcus communis SWub3 = DSM 12120 OX=1121029 GN=queA; PE = 3 SV=1
MSLTLDDFDYHLPPELIAQAPLAERSASRLLVVGDKLSDQVFADLPDFVGPKDLLVFNDTRVLHARLHGSKASGGQIEVLIERPVGPHEALAQIRASKSPKPGTTLRLADAFDVTVIGRVGEFFHLRFPTDENLVDLLERHGKLPLPPYIQRAAGNEDENRYQTVFARNPGSVAAPTAGLHFDEATLAAIRARGARCAWLTLHVGAGTFQPVRVDDLGEHRMHRERYVIPQETVDAIAATRAAGGRVIAVGTTSMRALEAAAQDGPLAAGSGETEIFILPGFRFQVVDALVTNFHLPKSTLLMLVSAFAGMQTIRAAYRHAIDQKYRFFSYGDAMLLTRNDHAV

SEQ ID NO: 63621 - protein, 344 aa, Azoarcus indigens
  REGION 1..344: note = tr|A0A4R6E114|A0A4R6E114_9RHOO S-adenosylmethionine:tRNA ribosyltransferase-isomerase; OS = Azoarcus indigens OX=29545 GN=queA PE=3 SV=1
MSLTLNDFDYFLPPELIAQAPLPTRSASRLLEVQLENLVDRSFSDLPALVRPGDLFVFNDTRVIHARLHGVKASGGQVEVLIERAVGPHEALAQIRASKSPKAGSRLRLAGAFDVEVLGRSGEFYHLRFPAEQALFDLLERHGSLPLPPYIERKPGEDDEARYQTVFARHPGSVAAPTAGLHFDDAVMAGLKARGADFAWLTLHVGAGTFQPVRVDDLSEHRMHREHYVIPQETADAIARTRAAGGRVIAVGTTSLRALEGAAQGGELRAGAAETEIFILPGFRFQVADALITNFHLPKSTLLMLVSAFAGMAPIRRAYAHAVAQRYRFFSYGDAMFLSRNDEL

SEQ ID NO: 63622 - protein, 345 aa, Azoarcus sp.
  REGION 1..345: note = sp|A1K3X0|QUEA_AZOSB S-adenosylmethionine:tRNA ribosyltransferase-isomerase OS=Azoarcus sp. (strain BH72); OX = 62928 GN=queA PE=3 SV=1
MTLSLQDFDYDLPPDLIAQAPLAERSASRLLVVDGDVLADRRFVDLPDFIRPGDLLVFNDTRVLHARLFGVKATGGQVEVLVERPIGAHEALAQIRASKSPKPGSTLRLADAVDVTVLGRSGEFFHLRFPDDENVVDVLERYGKLPLPPYIQRAAGDADEARYQTVFARAPGSVAAPTAGLHFDDAVLDRLRARGAGCAWVTLHVGAGTFQPVRVDDLAQHRMHSERYVIPQETVEAIARTRANGGRVVAVGTTSMRALEAAAQAGPLAAGSGETDIFILPGFRFRVADMLVTNFHLPKSTLLMLVSAFSGTDVIRRAYAHAVASRYRFFSYGDAMLLTRNDHAI

SEQ ID NO: 63623 - protein, 344 aa, Azoarcus sp.
  REGION 1..344: note = tr|A0A558DI28|A0A558DI28_9RHOO S-adenosylmethionine:tRNA ribosyltransferase-isomerase; OS = Azoarcus sp. PHD OX=1628740 GN=queA PE=3 SV=1
MPLTLNDFDYELPPELIAQAPLAERSASRLLIVGEDLDDRQFSDLPDYIRPGDLLVFNDTRVLHARLHGTKTSGGQIEVLIERPVGPHEALAQIRASKSPKPGSTLRLADAFDVTVLGRVGEFFHLRFPDDEDLVQLLERHGKLPLPPYIQRAAGDADESRYQTVYARSPGSVAAPTAGLHFDESVLKRVAERGAKCAWLTLHVGAGTFQPVRVDDLGEHRMHCERYVIPQETVDAIAATRAAGGRVIAVGTTSMRALEAAAQEGPLAAGSGETEIFILPGFRFRVVDALVTNFHLPKSTLLMLVSAFAGMDTMRQAYRHAIAQRYRFFSYGDAMLLTRNDNAV

SEQ ID NO: 63624 - protein, 345 aa, Azoarcus tolulyticus
  REGION 1..345: note = tr|A0A1N6V0B7|A0A1N6V0B7_9RHOO S-adenosylmethionine:tRNA ribosyltransferase-isomerase; OS = Azoarcus tolulyticus OX=34027 GN=queA PE=3 SV=1
MSLTLDDFDYLLPPEQIAQAPLAERCASRLLVLAGGELADRGFCDLPSLVEPGDLLVFNDTRVIHARLYGTKETGGQVEVLIERAIGPHEALAQVRASKSPRAGARLRLADAFDVTVLGRAGEFFHLRFPEDEDLHALLERHGKLPLPPYIDRAADDHDESRYQTVYAREPGSVAAPTAGLHFDQQMLADLARQGVNGAWVTLHVGAGTFQPVRVNDLGEHHMHRERYVIPQETVDAIARTKAAGKRVIAVGTTSLRALEGAAQDGELGAGVGETELFILPGYRFRVADALITNFHLPKSTLLMLVSAFAGMEPIRRAYAHAVREGYRFFSYGDAMFITRRNDAI

SEQ ID NO: 63625 - protein, 354 aa, unidentified
  source 1..354: note = Azobacteroides pseudotrichonymphae
  REGION 1..354: note = sp|B6YR69|QUEA_AZOPC S-adenosylmethionine:tRNA ribosyltransferase-isomerase OS=Azobacteroides pseudotrichonymphae genomovar. CFP2 OX=511995 GN=queA PE=3; SV = 1
MRLSKFKFHLPQELIALFPSVDRDESRLMVVYHKTGRVEHVIFKDIIQYFNEKDTFIFNDTSVIPARLNGNKEKTGARVEVFLLRELDPIQRIWDVLVDPARKIRIGNKLYFENEDSDTIVAEIIDNTTSRGRIIRFLYDGPYESFKKILYNLGNMPIPDYLDRKVTKEDRERYQTIYAKNEGAVVAPAAGLHFSHELMKRLELKGCELTFITVHSGMGNFRAIDVEDLFKYKSESERIVINTETATKINQAKQNRKQICAVGTSVLRTIEDRENVVTSQGYLNPFTGWTNKFIFPPYNFITSTSLITGFHLPLSSMLLQVAAFGGFDLIMDVYKQAIEAKYRFGVYGDAMLII

SEQ ID NO: 63626 - protein, 349 aa, Azomonas agilis
  REGION 1..349: note = tr|A0A562J007|A0A562J007_9GAMM S-adenosylmethionine:tRNA ribosyltransferase-isomerase; OS = Azomonas agilis OX=116849 GN=queA PE=3 SV=1
MRVADFSFDLPESLIARYPLSERRASRLLVLDGVTGALEHHQFVDVLDYVQPGDLMVFNDTRVIPARLFGQKATGGKLEILIERVLDEQRALAHVRSSKSPKPGSRLLLDGCAEAEVLSRQEALFELRFNEPLLPLLDRIGHMPLPPYMERLDEDSDRERYQTVYARHAGAVAAPTAGLHFDPSLLESLMTKGVETAFVTLHVGAGTFQPVRVERLEEHLMHTEWLNVSAEVVEAVKACKARGGRVIAVGTTSVRSLESAARDGELKPFTGNTDIFLYPGKPFHVVDVLITNFHLPESTLIMLVSAFAGYSETLKAYAEAIAQGYRFYSYGDAMLVLRNPNARGPEDHS

SEQ ID NO: 63627 - protein, 347 aa, Azonexus fungiphilus
  REGION 1..347: note = tr|A0A495VNJ5|A0A495VNJ5_9RHOO S-adenosylmethionine:tRNA ribosyltransferase-isomerase; OS = Azonexus fungiphilus OX=146940 GN=queA PE=3 SV=1
MSLTVDDFDFPLPPELIAQHPAAERSGSRLLHLCGQRPVDRKFAELPTLLAPGDLLVFNDTKVIKARFFGVKETGGQVEIMLERIVDARHAICQIRASKAPKTGCLLRLADAFTVRMSGRAGTDGDFFALELVDRDDFWELAETYGKLPLPPYIAHPAEGADEARYQTVYAREPGAVAAPTAGLHFDEAMLDTLRAQGVGTAFVTLHVGAGTYRPVRVDKIADHRMHSERYEVPAATAAAIAATRAAGGRIVAVGTTSLRTLESAAADDGSVNTGSGETDIFITPGYRFKVVDRLITNFHLPKSTLMMLVSAFAGYDAIRAAYAHAVAGRYRFFSYGDAMLLERTQP

SEQ ID NO: 63628 - protein, 348 aa, Azonexus hydrophilus
  REGION 1..348: note = tr|A0A1R1HZX8|A0A1R1HZX8_9RHOO S-adenosylmethionine:tRNA ribosyltransferase-isomerase; OS = Azonexus hydrophilus OX=418702 GN=queA PE=3 SV=1
MSLTVDDFDFPLPPELIAQHPAPERRGSRLLHICGQQHVDRKFADLPTLLRAGDLLVFNDTRVIKARFFGVKETGGQVEIMLERIVDATHAICQIRASKAPKTGCLLRLADAFTVRMTGRAGADGDFFALELVDRNNFWEVSEQYGKLPLPPYIEHPAEGADETRYQTVYAREPGAVAAPTAGLHFDEAMLATLRNQGVGTAFVTLHVGAGTYRPVRVEKIADHRMHSERYVVPPETAAAIAATRAAGGRVIAVGTTSLRTLESAGNDDGSISAGSSETDIFITPGYRFKVVDRLITNFHLPKSTLMMLVSAFAGYDAIRAAYAHAVAERYRFFSYGDAMLLEKSDAV

SEQ ID NO: 63629 - protein, 354 aa, Azorhizobium caulinodans
  REGION 1..354: note = sp|A8I5Q2|QUEA_AZOC5 S-adenosylmethionine:tRNA ribosyltransferase-isomerase OS=Azorhizobium caulinodans (strain ATCC 43989 / DSM 5975 / JCM 20966 / NBRC 14845 / NCIM B 13405 / ORS 571) OX=438753 GN=queA PE=3 SV=1
MRVDAFDFDLPPERIALRPAEPRESARLLRVRPGAAPELEDRTIADLPDLLQPGDALVVNDTKVIPARLDGTRTRAGGSTVAIEATLIRRLSGSAWAAFAKPAKRLAVGETVVFAGASGGTLEARVLDKLESGEVHFAFALSGPELDAAIDAIGHMPLPPYIAAKRPEDDRDRTDYQPVFARVEGSVAAPTASLHFTPDLLAKIAARGVSRYTVTLHVGAGTFLPVKAEDTTDHQMHAEWGEVSPETAAELNAVKARGGRIITVGSTATRLIETAATPEGSIRPYLGETDIFITPGYAFRASDVMLTNFHLPRSTLVMLVAAFVGHETQKRAYAHAIASGYRFYSYGDACLLER

SEQ ID NO: 63630 - protein, 355 aa, Azorhizobium sp.
  REGION 1..355: note = tr|A0A258K2K8|A0A258K2K8_9RHIZ S-adenosylmethionine:tRNA ribosyltransferase-isomerase; OS = Azorhizobium sp. 35-67-5 OX=1970321 GN=queA PE=3 SV=1
MRVDAFDFHLPPERIALRPAEPREAARLLVVHPDATVQDATIADLPRFLRPGDAVVVNDTKVIPARLDGTRTRPQGTTVTIEANLVKRLSEARWLALCRPAKRLAPGDEVIFRKGEATLSAQVLAKADSGEVEFAFALSGPELDGAIDTVGHMPLPPYIAARRPEDEQDQTDYQPIFARNEGSIAAPTASLHFTPALMAQVKAAGVSVHTVTLHVGLGTFLPVKAEDTADHRMHAEWGEVSPETAEALTAVKAKGGRILAVGSTATRLLESAAASGKIAPFRGDTDIFITPGYAFRAVDLMMTNFHLPKSTLVMLVAAFVGHEAQKRAYAHAIETGYRFYSYGDASLLFRAEAQP

SEQ ID NO: 63631 - protein, 355 aa, Azorhizobium sp.
  REGION 1..355: note = tr|A0A258JYG2|A0A258JYG2_9RHIZ S-adenosylmethionine:tRNA ribosyltransferase-isomerase; OS = Azorhizobium sp. 32-67-21 OX=1970319 GN=queA PE=3 SV=1
MRVDAFDFHLPPERIALRPAEPREAARLLVVHPDATVQDATIADLPRFLRPGDAVVVNDTKVIPARLDGTRTRPQGTTVTIEANLVKRLSEARWLALCRPAKRLAPGDEVIFRKGEATLSAQVLAKADSGEVEFAFALSGPELDGAIDTVGHMPLPPYIAARRPEDEQDRTDYQPIFARNEGSIAAPTASLHFTPALMAQVKAAGVSVHTVTLHVGLGTFLPVKAEDTADHRMHAEWGEVSPETAEALTAVKAKGGRILAVGSTATRLLESAAASGKIAPFRGDTDIFITPGYAFRAVDLMMTNFHLPKSTLVMLVAAFVGHEAQKRAYAHAIETGYRFYSYGDASLLFRAEAQP

SEQ ID NO: 63632 - protein, 345 aa, Azospira oryzae
  REGION 1..345: note = tr|G8QJX3|G8QJX3_AZOOP S-adenosylmethionine:tRNA ribosyltransferase-isomerase OS=Azospira oryzae (strain ATCC BAA-33 / DSM 13638 / PS) OX=640081 GN=queA PE=3 SV=1
MSLSVDLFDFPLPPELIAQHPARERCASRLLHVDGPHLADLRFTDLPGLLAPGDLLVFNDTRVIKARFFGQKDSGGQVEVLLERIVDERHALAQVRASKSPKAGTRITLENAFSLLCSGRQGEFFALELEGEGNLWDLAEQYGRLPLPPYIEHGVEAEDEARYQTVYARHPGAVAAPTAGLHFDEAMLERLSEQGVRRAALTLHVGAGTFQPVRVEKIDEHKMHSERFHVPEETAAAIAATRERGGRVVAVGTTSLRTLESAACGNGLVRAGSGETDIFITPGYRFQVVDRLITNFHLPRSTLLMLVSAFAGLDPIRAAYAHAVAEKYRFFSYGDAMLLEREDKS

SEQ ID NO: 63633 - protein, 107 aa, Azospira oryzae
  REGION 1..107: note = tr|A0A2W5HAN0|A0A2W5HAN0_9RHOO S-adenosylmethionine:tRNA ribosyltransferase-isomerase (Fragment) OS=Azospira oryzae OX=146939 GN=DI596_14225; PE = 3 SV=1
MRLSDFDFHLPPELIAQAPAPHRSASRLLHLDGVTGAVEDLWFRDLPRLVRPGDLLVFNDTRVIKARLRGRKKSGGQVEVLVERVLGTHEALAQVRASKSQREGDAL

SEQ ID NO: 63634 - protein, 344 aa, Azospira sp.
  REGION 1..344: note = tr|A0A2R5E5S7|A0A2R5E5S7_9RHOO S-adenosylmethionine:tRNA ribosyltransferase-isomerase; OS = Azospira sp. I13 OX=1765050 GN=queA PE=3 SV=1
MSLTVDQFDFLLPPELIAQHPASERTASRLLHVDGPRLTDRRFTDLPGLLQPGDLLVFNDTRVIKARFFGQKESGGQIEVLLERIVDERHALAQVRASKSPKPGTRLILEEAFTLVCTGRHNEFFALEVEGDGNLWDLAERHGRLPLPPYIEHGAEAEDESRYQTVYAKNPGAVAAPTAGLHFDETLLATLAAQEVRQAAVTLHVGAGTYQPVRVDLVADHKMHSERYEVPQATADAIRETRERGGKVVAVGTTSLRTLESAACGDGLVRVGAGETDIFITPGYRFQVVDRLVTNFHLPRSTLLMLVSAFAGMDAIRAAYAHAVAEKYRFFSYGDAMLLEREEH

SEQ ID NO: 63635 - protein, 339 aa, Azospirillum brasilense
  REGION 1..339: note = tr|A0A060DM95|A0A060DM95_AZOBR S-adenosylmethionine:tRNA ribosyltransferase-isomerase; OS = Azospirillum brasilense OX=192 GN=queA PE=3 SV=1
MKTADFDFDLPPDRIAEHPAKPRDAARLLDVAERLHDRTVRDLPALLEPGDLMVVNDTRVIPARLDGRRGEVRVEITLHKREGEREWATFARPGKRLKPGDVIAIADDFAAEVVAKDGMEVRLRFSKGGPALMEALHRHGRMPLPPYIRREADEQDAADYQTVFAAREGAVAAPTAGLHFTPELLAALDARGIRRVPVTLHVGAGTFLPVKVDDIAEHRMHSEWGEISAETAEAINVTRAAGGRIVSVGTTALRILETAGLDDRSIRAFSGDTDIFITPGYRFKIVDLLVTNFHLPRSTLFMLVCAFAGMDTMKAAYAHAIGQNYRFFSYGDASLLRRV

SEQ ID NO: 63636 - protein, 339 aa, Azospirillum brasilense
  REGION 1..339: note = tr|G8AKA1|G8AKA1_AZOBR S-adenosylmethionine:tRNA ribosyltransferase-isomerase OS=Azospirillum brasilense Sp245 OX=1064539 GN=queA PE=3 SV=1
MKTADFDFDLPPDRIAEHPAKPRDAARLLDVAERLHDRTVRDLPALLEPGDLMVVNDTRVIPARLDGRRGEVRVEITLHKREGEREWATFARPGKRLKPGDVIAIADDFAAEVVAKDGMEVRLRFSKGGPELMEALHRHGRMPLPPYIRREADEQDAADYQTVFAAREGAVAAPTAGLHFTPELLAALDARGIRRVPVTLHVGAGTFLPVKVDDIAEHRMHSEWGEISAETAEAINATRAAGGRIVSVGTTALRILETAGLDDRSIRAFSGDTDIFITPGYRFKIVDLLVTNFHLPRSTLFMLVCAFAGMDTMKAAYAHAIGQNYRFFSYGDASLLRRV

SEQ ID NO: 63637 - protein, 342 aa, Azospirillum doebereinerae
  REGION 1..342: note = tr|A0A433J532|A0A433J532_9PROT S-adenosylmethionine:tRNA ribosyltransferase-isomerase; OS = Azospirillum doebereinerae OX=92933 GN=queA PE=3 SV=1
MKTADFDFDLPPDRIAEHPVRPRDAARLLEVGDRLHDRVVRDLPTLLQPGDLMVVNDTRVIPARLDGRRGEVAVEITLHKRLGEREWASFARPGKRLKPGDTIVIAGDFAAEVVAKDGMEVRLRFSVSGPDLMEALHRHGRMPLPPYIRRQSDESDDADYQTVFAAREGAVAAPTAGLHFTPDLLAALDSRGVRRVPVTLHVGAGTFLPVKVDDIADHKMHSEWGEISAETAEAVNAARAAGGRIVSVGTTALRILETAGRADGTLAPFSGDTSIFITPGYRFHIVDLLWTNFHLPKSTLFMLVSAFAGMERMRAAYAHAIDRNYRFFSYGDASLLHRTDPT

SEQ ID NO: 63638 - protein, 342 aa, unidentified
  source 1..342: note = Azospirillum humicireducens
  REGION 1..342: note = tr|A0A160JG75|A0A160JG75_9PROT S-adenosylmethionine:tRNA ribosyltransferase-isomerase; OS = Azospirillum humicireducens OX=1226968 GN=queA PE=3 SV=1
MKTADFDFDLPPDRIAEHPVRPRDAARLLEVGSTLRDLIVRDLPALLQPGDLMVVNDTRVIPARLDGRRGEVAVEITLHKRLGEREWATFSKPGKRLKPGDTIDIADGFSAEVIAKDGMEVRLRFSASGAELMEALHRHGRMPLPPYIRRKADEGDNADYQTVFAAREGAVAAPTAGLHFTPDLLAALDARGVRRVPVTLHVGAGTFLPVKVDDIADHKMHSEWGEICPETAAAVNETRKAGGRIVSVGTTALRILETAGQPDGTLVPFSGDTDIFITPGYRFRIVDLLWTNFHLPKSTLFMLVCAFAGYDRMRAAYGHAIDRNYRFFSYGDASLLHRTDPS

SEQ ID NO: 63639 - protein, 342 aa, Azospirillum lipoferum
  REGION 1..342: note = tr|A0A1X7Q5R6|A0A1X7Q5R6_AZOLI S-adenosylmethionine:tRNA ribosyltransferase-isomerase; OS = Azospirillum lipoferum OX=193 GN=queA PE=3 SV=1
MKTADFDFDLPPDRIAEHPVRPRDAARLLEVGDRLHDRVVRDLPALLQPGDLMVVNDTRVIPARLDGRRGEVAVEITLHKRLGEREWASFARPGKRLKPGDVIVIAEDFSAEVIAKDGMEVRLRFSAGGPDLMEALHRHGRMPLPPYIRRKSGADDDADYQTVFAAREGAVAAPTAGLHFTPELLAALDARGVRRVPVTLHVGAGTFLPVKVDDIAEHRMHSEWGEISPETAEAVNAARRDGGRIVSVGTTALRILETAGREDGTLAPFSGDTSIFITPGYRFRIVDLLWTNFHLPKSTLFMLVCAFAGFDRMKAAYAHAIAAEYRFFSYGDASLLHRTDPT

SEQ ID NO: 63640 - protein, 347 aa, Azospirillum lipoferum
  REGION 1..347: note = tr|G7Z200|G7Z200_AZOL4 S-adenosylmethionine:tRNA ribosyltransferase-isomerase OS=Azospirillum lipoferum (strain 4B) OX=862719 GN=queA PE=3 SV=1
MKTADFDFDLPPDRIAEHPVRPRDAARLLEVGSTLRDLPLRDLIVRDLPALLQPGDLMVVNDTRVIPARLDGRRGEVAVEITLHKRLGEREWATFSKPGKRLKPGDTIDIADGFSAEVIAKDGMEVRLRFSAGGAELMEALHRHGRMPLPPYIRRKADEGDNADYQTVFAAREGAVAAPTAGLHFTPELLAALDARGVRRVPVTLHVGAGTFLPVKVDDIADHKMHSEWGEISPETAAAVNETRKAGGRIVSVGTTALRILETAGQPDGTLVPFSGDTDIFITPGYRFRIVDLLWTNFHLPKSTLFMLVCAFAGYDRMRAAYQHAIDTNYRFFSYGDASLLHRTDPS

SEQ ID NO: 63641 - protein, 342 aa, Azospirillum oryzae
  REGION 1..342: note = tr|A0A1X7H732|A0A1X7H732_9PROT S-adenosylmethionine:tRNA ribosyltransferase-isomerase; OS = Azospirillum oryzae OX=286727 GN=queA PE=3 SV=1
MKTADFDFDLPPDRIAEHPVRPRDAARLLEVGPTLRDFIVRDLPTLLQPGDLMVVNDTRVIPARLDGRRGEVAVEITLHKRLGEREWATFSKPGKRLKPGDTIVIAEDFSAEVIAKDGMEVRLRFSAGGAELMEALHRHGRMPLPPYIRRKSDEGDNADYQTVFAAREGAVAAPTAGLHFTPELLAALEARGVRRVPVTLHVGAGTFLPVKVDDIADHKMHSEWGEISPETAAAVNETRKAGGRIVSVGTTALRILETAGREDGTLVPFSGDTDIFITPGYRFRIVDLLWTNFHLPKSTLFMLVCAFAGYDRMRAAYGHAIDRNYRFFSYGDASLLHRTDPS

SEQ ID NO: 63642 - protein, 342 aa, Azospirillum oryzae
  REGION 1..342: note = tr|A0A5A9G8Z9|A0A5A9G8Z9_9PROT S-adenosylmethionine:tRNA ribosyltransferase-isomerase; OS = Azospirillum oryzae OX=286727 GN=queA PE=3 SV=1
MKTADFDFDLPPDRIAEHPVRPRDAARLLEVGPTLRDFIVRDLPSLLQPGDLMVVNDTRVIPARLDGRRGEVAVEITLHKRLGEQEWATFSKPGKRLKPGDTIVIAEDFSAEVIAKDGMEVRLRFSAGGANLMEALHRHGRMPLPPYIRRKADEGDNADYQTVFAAREGAVAAPTAGLHFTPELLAALDEGGVRRVPVTLHVGAGTFLPVKVDEIADHKMHSEWGEISADTAAAVNETRKAGGRIVSVGTTALRILETAGRPDGTLIPFSGDTDIFITPGYRFRIVDLLWTNFHLPKSTLFMLVCAFAGYDRMRAAYQHAIDRNYRFFSYGDASLLHRTDPS

SEQ ID NO: 63643 - protein, 342 aa, unidentified
  source 1..342: note = Azospirillum palustre
  REGION 1..342: note = tr|A0A2B8B7U2|A0A2B8B7U2_9PROT S-adenosylmethionine:tRNA ribosyltransferase-isomerase; OS = Azospirillum palustre OX=2044885 GN=queA PE=3 SV=1
MKTADFDFDLPPDRIAEHPVRPRDAARLLEVGSTLRDFIVRDLPTLVQPGDLMVVNDTRVIPARLDGRRGEVAVEITLHKRLGEREWATFSKPGKRLKPGDTIVIADDFSAEVIAKDGMEVRLRFSAGGAELMEALHRHGRMPLPPYIRRKADEGDNADYQTVFAAREGAVAAPTAGLHFTPELLAALDERGVRRAPVTLHVGAGTFLPVKVDDIADHKMHSEWGEISAETAAAVNETRKAGGRIVSVGTTALRILETAGRPDGTLVPFSGDTDIFITPGYRFRIVDLLWTNFHLPKSTLFMLVCAFAGYDRMRAAYRHAIDTDYRFFSYGDASLLHRTDPT

SEQ ID NO: 63644 - protein, 342 aa, Azospirillum sp.
  REGION 1..342: note = tr|A0A4P7Z615|A0A4P7Z615_9PROT S-adenosylmethionine:tRNA ribosyltransferase-isomerase; OS = Azospirillum sp. TSA2s OX=709810 GN=queA PE=3 SV=1
MKTADFDFDLPPDRIAEHPVRPRDAARLLEVGSTLRDFIVRDLPTLLQPGDLMVVNDTRVIPARLDGRRGEVAVEITLHKRLGEREWATFSKPGKRLKPGDTIVIAEDFSAEVIAKDGMEVRLRFSAGGAELMEALHRHGRMPLPPYIRRKADEGDNADYQTVFAAREGAVAAPTAGLHFTPELLAALDARGVRRVPVTLHVGAGTFLPVKVDDIADHKMHSEWGEISHETAAAVNETRKAGGRIVSVGTTALRILETAGREDGTLVPFSGDTDIFITPGYRFRIVDLLWTNFHLPKSTLFMLVCAFGGYDRMRAAYSHAIDTNYRFFSYGDASLLHRTDPS

SEQ ID NO: 63645 - protein, 342 aa, Azospirillum sp.
  REGION 1..342: note = tr|A0A2U1XAK4|A0A2U1XAK4_9PROT S-adenosylmethionine:tRNA ribosyltransferase-isomerase; OS = Azospirillum sp. TSH20 OX=652754 GN=queA PE=3 SV=1
MKTADFDFDLPPDRIAEHPVRPRDAARLLEVGPTLRDLIVRDLPMLLQPGDLMVVNDTRVIPARLDGRRGEVAVEITLHKRLGEREWATFSKPGKRLKPGDTIVIAEDFSAEVIAKDGMEVRLRFSAGGAELMEALHRHGRMPLPPYIRRKADEGDNADYQTVFAAREGAVAAPTAGLHFTPELLAALDARGVRRVPVTLHVGAGTFLPVKVDDIADHKMHSEWGEISPETAAAVNETRKAGGRIVSVGTTALRILETAGQPDGTLVPFSGDTDIFITPGYRFRIVDLLWTNFHLPKSTLFMLVCAFAGYDRMRAAYSHAIDTNYRFFSYGDASLLHRTDPS

SEQ ID NO: 63646 - protein, 352 aa, Azospirillum thiophilum
  REGION 1..352: note = tr|A0A0F2KXH7|A0A0F2KXH7_9PROT S-adenosylmethionine:tRNA ribosyltransferase-isomerase; OS = Azospirillum thiophilum OX=528244 GN=queA PE=3 SV=1
MKTADFDFDLPPDRIAEHPVRPRDAARLLEVGSTLRDLPLRDLPLRDLIVRDLPALLQPGDLMVVNDTRVIPARLDGRRGEVAVEITLHKRLGERDWATFSKPGKRLKPGDVIRIAEDFSAEVVAKDGMEVRLRFSAGGAELMEALHRHGRMPLPPYIRRKADKGDDADYQTVFAAREGAVAAPTAGLHFTADLLAALDARGVRRVPVTLHVGAGTFLPVKVDDIADHKMHSEWGEISPDTAAAVNETRAAGGRIVSVGTTALRILETAGRPDGTLVPFSGDTGIFITPGYRFRIVDLLWTNFHLPKSTLFMLVCAFAGYDRMRAAYAHAIDQNYRFFSYGDASLLHRTDPS

SEQ ID NO: 63647 - protein, 349 aa, Azotobacter beijerinckii
  REGION 1..349: note = tr|A0A1I4C3V8|A0A1I4C3V8_9GAMM S-adenosylmethionine:tRNA ribosyltransferase-isomerase; OS = Azotobacter beijerinckii OX=170623 GN=queA PE=3 SV=1
MRVADFHFELPESLIARHPLAERRASRLLVLDGASGGLEHRRFADLLDYLRAGDLMVFNDTRVIPARLFGQKASGGRLEILVERVLDDDRVLAHVRASKSPKPGSKILIEGGGEAQMLARHDALFELRFDQSVLPLLERVGHMPLPPYIDRPDEAADRERYQTVYADRAGAVAAPTAGLHFDEALLAAIREKGVDTAFVTLHVGAGTFQPVRVERIEDHHMHREWLEVGPDVVDAVAACRARGGRVIAVGTTSVRSLESAARDGVLKPFSGDTDIFIYPGRPFHVIDALVTNFHLPESTLLMLVSAFAGYPETMAAYAVAVEQGYRFFSYGDAMFITRNPAPRGPEETP

SEQ ID NO: 63648 - protein, 349 aa, Azotobacter beijerinckii
  REGION 1..349: note = tr|A0A1H6ZRN7|A0A1H6ZRN7_9GAMM S-adenosylmethionine:tRNA ribosyltransferase-isomerase; OS = Azotobacter beijerinckii OX=170623 GN=queA PE=3 SV=1
MRVADFHFELPESLIARHPLAERRASRLLVIDGTSGGLEHRRFADLLDYLRAGDLMVFNDTRVIPARLFGQKASGGRLEILVERVLDDDRVLAHVRASKSPKPGSKILIEGGGEALMLARHDALFELRFDQSVLPLLERVGHMPLPPYIDRPDEAADRERYQTVYADRAGAVAAPTAGLHFDEGLLAAIREKGVDIAFVTLHVGAGTFQPVRVERIEDHHMHREWLEVGPDVVDAVAACRARGGRVIAVGTTSVRSLESAARDGVLKPFSGDTDIFIYPGRPFHVVDALVTNFHLPESTLLMLVSAFAGYPETMAAYAAAVEQGYRFFSYGDAMFITRNPAPRGPEETP

SEQ ID NO: 63649 - protein, 349 aa, Azotobacter chroococcum
  REGION 1..349: note = tr|A0A0C4WMI8|A0A0C4WMI8_9GAMM S-adenosylmethionine:tRNA ribosyltransferase-isomerase; OS = Azotobacter chroococcum NCIMB 8003 OX=1328314 GN=queA; PE = 3 SV=1
MRVADFHFDLPESLIARHPLAERRASRLLVLDGATGSLQHRRFADLLDYLRPGDLMVFNNTRVIPARLFGQKASGGKLEILVERVLDDDRVLAHVRASKSPKPGSKVLIEGGGEAQMLARHDALFELRFDQSVLPLLERVGHMPLPPYIDRPDEAADRERYQTVYADRAGAVAAPTAGLHFDEGLLAAIREKGVDTAFVTLHVGAGTFQPVRVERIEDHHMHREWLEVGQDVVDAVAACRARGGRVIAVGTTSVRSLESAARDGELKPFSGDTDIFIYPGRPFHVVDALVTNFHLPESTLLMLVSAFAGYPETMAAYAAAVEQGYRFFSYGDAMFITRNPAPRGPEETP

SEQ ID NO: 63650 - protein, 349 aa, Azotobacter chroococcum; identical to SEQ ID NO: 63649
  REGION 1..349: note = tr|A0A4U1KU18|A0A4U1KU18_9GAMM S-adenosylmethionine:tRNA ribosyltransferase-isomerase; OS = Azotobacter chroococcum OX=353 GN=queA PE=3 SV=1

SEQ ID NO: 63651 - protein, 349 aa, Azotobacter vinelandii
  REGION 1..349: note = sp|C1DE77|QUEA_AZOVD S-adenosylmethionine:tRNA ribosyltransferase-isomerase OS=Azotobacter vinelandii (strain DJ / ATCC BAA-1303) OX=322710 GN=queA PE=3 SV=1
MRVADFHFELPESLIARHPLAERRASRLLVLDGVTGDLQHRRFADLLDHLRPGDLMVFNNTRVIPARLFGWKASGGKLEILVERVLDDERVLAHVRASKSPKAGSRILIEGGGEAQMLARHDALFELRFDQRVLPLLERVGHMPLPPYIDRPDEAADRERYQTVYAARAGAVAAPTAGLHFDEALLAAIGEKDVATAFVTLHVGAGTFQPVRVERIEDHHMHREWLEVGQEVVDAVAACRARGGRVVAVGTTSVRSLESAARDGVLRPFSGDTDIFIYPGRPFHVVDALVTNFHLPESTLLMLVSAFAGYPETMAAYAAAVAQGYRFFSYGDAMFITRNPAPRAPEETP

SEQ ID NO: 63652 - protein, 349 aa, Azotobacter vinelandii; identical to SEQ ID NO: 63651
  REGION 1..349: note = tr|M9YDR3|M9YDR3_AZOVI S-adenosylmethionine:tRNA ribosyltransferase-isomerase OS=Azotobacter vinelandii CA6; OX = 1283331 GN=queA PE=3 SV=1

SEQ ID NO: 63653 - protein, 342 aa, unidentified; identical to SEQ ID NO: 62916
  source 1..342: note = Bacillaceae bacterium
  REGION 1..342: note = tr|A0A3E0JTS0|A0A3E0JTS0_9BACI S-adenosylmethionine:tRNA ribosyltransferase-isomerase; OS = Bacillaceae bacterium OX=1889774 GN=queA PE=3 SV=1

SEQ ID NO: 63654 - protein, 342 aa, unidentified
  source 1..342: note = Bacillaceae bacterium
  REGION 1..342: note = tr|A0A271M7S7|A0A271M7S7_9BACI S-adenosylmethionine:tRNA ribosyltransferase-isomerase; OS = Bacillaceae bacterium SAOS 7 OX=2015052 GN=queA PE=3; SV = 1
MKVEDFDFYLPEELIAQTPLKERAESRLMVLNKETGDIQHQVFKQITDFLEPGDCLVLNDTRVLPARLYGVKAETGAKIEVLLLKQEEGDRWETLVKPAKRIKEGSVISFGDGRLTATCVAEKDHGGRILEFSYEGIFYEVLEELGEMPLPPYIKEQLDEQERYQTVFAKERGSAAAPTAGLHFTEELLDDIRAKGVYITFITLHVGLGTFRPVSVDAIEDHEMHSEFYQVSEETARLIEDAKAKGGRIISVGTTSTRTLETVARDHGGKIEAASGWTDIFIYPGFQFQAIDGMITNFHLPMSTLIMLVSALAGKEHVMKAYEEAVAKEYRFFSFGDAMLIK

SEQ ID NO: 63655 - protein, 343 aa, unidentified
  source 1..343: note = Bacilli bacterium
  REGION 1..343: note = tr|A0A0K0GEN6|A0A0K0GEN6_9FIRM S-adenosylmethionine:tRNA ribosyltransferase-isomerase; OS = Bacilli bacterium VT-13-104 OX=1637974 GN=queA PE=3 SV=1
MNIEDFDYHLPEELIAQTPLKDRTSSRLLVLDRQTKNVKHEHFSDIKKYLKPGDCLVLNNTKVLPARLYGIKEDTGAKIEVLLLHQKEEDTWEVLTKPAKKVKKGTVLVFGDGLLQATCVGFKEHGGRILEFSYDGIFYEVLDQLGEMPLPPYIKEQLPEEDKDRYQTVYAKEEGSAAAPTAGLHFTSELLNEIKEMGVTIAFITLHVGLGTFRPVSVDKIEEHEMHSEFYQMTKETADTLNKVKENGGRIISVGTTSTRTLETIRRDHDKFVETSGWTDIFIYPPYEFKAIDGLITNFHLPKSTLIMLVSALVDKDTILRAYNEAVEERYRFFSFGDAMLIL

SEQ ID NO: 63656 - protein, 342 aa, Bacillus aerius
  REGION 1..342: note = tr|A0A3A9DNN6|A0A3A9DNN6_9BACI S-adenosylmethionine:tRNA ribosyltransferase-isomerase; OS = Bacillus aerius OX=293388 GN=queA PE=3 SV=1
MKVELFDFDLPERLIAQVPLKERDASRLMVLDKKTGEITHSTFKHVIDFLNAGDCIVLNDTRVLPARLYGVKEETGAKVEVLLLKQEEGDVWETLVKPAKRVKRGTVLSFGDGRLTAVCTEELEHGGRKIEFRYEGIFYEVLESLGEMPLPPYIKEQLDDRERYQTVYSKKQGSAAAPTAGLHFTEEILDALRKKGVHIAFITLHVGLGTFRPVSAENVEEHDMHAEFYEMSEETAALLNRVRQEGGKIISVGTTSTRTLETIASEHDGRFREARGWTSIFIYPGYTFRAIDGMITNFHLPKSSLIMLVSALAGREHVLSAYRTAVEHEYRFFSFGDAMLIK

SEQ ID NO: 63657 - protein, 342 aa, Bacillus aerophilus
  REGION 1..342: note = tr|A0A410KM97|A0A410KM97_9BACI S-adenosylmethionine:tRNA ribosyltransferase-isomerase; OS = Bacillus aerophilus OX=293389 GN=queA PE=3 SV=1
MKLELFDFDLPERLIAQVPLEKRDASRLMVLNKQTGGITHDTFSQITDYFQKGDCLVLNNTRVLPARLFGTKEDTGAKVELLLLKQEEGDKWETLVKPAKRVKNGTVITFGDGRLKAVCTEELEHGGRKVEFQYTGIFYEVLESLGEMPLPPYIKEQLDDRERYQTVYSKEVGSAAAPTAGLHFTNELLDALKAKGVHIAFITLHVGLGTFRPVSAERIEEHEMHAEFYEMNEETAEELNRVRKEGGRIISVGTTSTRTLETIASAYDGEFKASSGWTSIFIYPGYTFKAIDGMITNFHLPKSSLIMLVSALAGREHVLKAYNEAVKEEYRFFSFGDAMLIQ

SEQ ID NO: 63658 - protein, 339 aa, Bacillus akibai
  REGION 1..339: note = tr|W4QRG7|W4QRG7_BACA3 S-adenosylmethionine:tRNA ribosyltransferase-isomerase OS=Bacillus akibai (strain ATCC 43226 / DSM 21942 / JCM 9157 / 1139) OX=1236973; GN = JCM9 157_1289 PE=3 SV=1
MKPLTYSFQVPAHLHANTPAEYRSSKREAVKLFVLDRHSGSYHHDNFDHFSTYLNKGDVLILNNSRTLPAVLHTIDKIEIRLAKKRQDDTWEALIIGALPKNGKLIFPDNVNATMKKSDSKKPLVTLQFSVSGNSFYEFLYRHGSPIRYEYIHREWPIQAYQTVFSSVPGSIEMPSAGRALSWKMLAQLQKKGVKIVFVQLHTGLSYFENDQWPEPSNHSEAFSVSNEVVTLIKQAKTTGSKVIAVGTTVVRALESAVDAYGMLRPTTGETTLHIKADTMLNVVDGLLTGFHEPEASHLDMLSAFIETPYLLTAYHEAINQGYLWHEFGDINLILPLNK

SEQ ID NO: 63659 - protein, 341 aa, Bacillus akibai
  REGION 1..341: note = tr|W4QU18|W4QU18_BACA3 S-adenosylmethionine:tRNA ribosyltransferase-isomerase OS=Bacillus akibai (strain ATCC 43226 / DSM 21942 / JCM 9157 / 1139) OX=1236973; GN = queAPE=3 SV=1
MNVEDFDFYLPEELIAQTPLPDRTASRLLVLDRETGETKDLEFVSIIDELKAGDCLVLNDTRVLPARLYGTKEETGASIEVLLIKQTEGNEWETLVKPAKRVKKGTIISFGDGKLIAECIGEADHGGRVLRMKYEGIFHEILDELGEMPLPPYIKETLPDQERYQTVFAKNRGSAAAPTAGLHFTTELLEKIKEKGVQIAFITLHVGIGTFRPVSVDNVEEHEMHAEFYQMNEETARLLQSVKENGGRVVAVGTTSARTLETIVSDHGSYKEASGWTSIFIYPGYEVKGFDALLTNFHLPKSTLVMLVSAVAGKEHVMNAYKHAVEQKYRFFSFGDAMLIR

SEQ ID NO: 63660 - protein, 350 aa, unidentified
  source 1..350: note = Bacillus albus
  REGION 1..350: note = tr|A0A1J9TWU6|A0A1J9TWU6_9BACI S-adenosylmethionine:tRNA ribosyltransferase-isomerase; OS = Bacillus albus OX=2026189 GN=queA PE=3 SV=1
MDINLFDFHLPEELIAQVPLEERETSRLMVLDRETGDIEHKHFTDILSYLHEGDCLVLNETKVMPARLHGVKEDTGAHIEVLLLKQEEGDKWETLVKPAKRVKEGTVISFGEGKLKATCTGTADQGGRQLEFSYDGIFYEILDELGEMPLPPYIKETLEDRDRYQTVYAKEVGSAAAPTAGLHFTEELLEKLKQKGVELAFITLHVGLGTFRPVSADTIEEHHMHAEYYHMSEETAALLNRVKENGGRIITVGTTSTRTLETIATDHDGKLCAASGWTDIFMYPGYEFKAIDGLITNFHLPKSTLIMLVSAFANRDNVLHAYNEAVKEKYRFFSFGDAMFVASHAKMGNK

SEQ ID NO: 63661 - protein, 350 aa, unidentified
  source 1..350: note = Bacillus albus
  REGION 1..350: note = tr|A0A4Q0X2Q0|A0A4Q0X2Q0_9BACI S-adenosylmethionine:tRNA ribosyltransferase-isomerase; OS = Bacillus albus OX=2026189 GN=queA PE=3 SV=1
MDINLFDFHLPEELIAQVPLEERETSRLMVLDRETGDIEHKHFTDILSYLHEGDCLVLNETKVMPARLHGVKEGTGAHIEVLLLKQEEGDKWETLVKPAKRVKEGTVISFGEGKLKATCTGTADQGGRQLEFSYDGIFYEILDELGEMPLPPYIKETLEDRDRYQTVYAKEVGSAAAPTAGLHFTEELLEKLKQKGVELAFITLHVGLGTFRPVSADTIEEHHMHAEYYHMSEETAALLNRVKENGGRIITVGTTSTRTLETIATDHDGKLCAASGWTDIFMYPGYEFKAIDGLITNFHLPKSTLIMLVSAFANRDNVLHAYNEAVKEKYRFFSFGDAMFVASHAKMGNK

SEQ ID NO: 63662 - protein, 344 aa, Bacillus alcalophilus
  REGION 1..344: note = tr|A0A094WKM6|A0A094WKM6_BACAO S-adenosylmethionine:tRNA ribosyltransferase-isomerase; OS = Bacillus alcalophilus ATCC 27647 = CGMCC 1.3604; OX = 1218173 GN=queA PE=3 SV=1
MEVEEFDFELPEQLIAQTPLKDRTASRLLALNKSTGEIKDEHFPDILNYLKEGDCLVLNDTRVLPARLYGMKADTGAKIEVLLLKQLDGDKWETLVKPAKRIKEGTEIIFGEGLLKAKCTKELEHGGREIELIYEGILHEVLDNLGEMPLPPYIKEQLDDKERYQTVFAKNRGSAAAPTAGLHFTEELLEKVREKGVHIAMVTLHVGLGTFRPVSVDKIEEHEMHAEFYQMSAETAQLLQKVKKNGSRIIAVGTTSARTLETIMKEHGQFCETSGWTSIFIYPGFEFKGLDALLTNFHLPKSTLVMLVSALAGKEHVMNAYRHAVNEQYRFFSFGDAMFISDWK

SEQ ID NO: 63663 - protein, 338 aa, Bacillus alcalophilus
  REGION 1..338: note = tr|A0A094WPS8|A0A094WPS8_BACAO S-adenosylmethionine:tRNA ribosyltransferase-isomerase; OS = Bacillus alcalophilus ATCC 27647 = CGMCC 1.3604; OX = 1218173 GN=AJ85_01655 PE= 3 SV=1
MNIVNNIHQSFQIPANLHANTPAEYRENSRSQVNMMVLNKQTGAVSDHHLANLPHLLSPGDLLVFNKSRTIPALLRSKDQKIEIRLARKITDLKWEALIFQNDERRDCILLEGGGQLDIVGTGSEAPLVVVEFRQISEPILSYLYKYGAPIRYEYIHKPWPMQDYQTIFASVPGSVEMPSAGRAFSWKLIQQLKKSGIQIAFLELHAGISYYGDNQWPNPKNHPEAYSIPVETIELIKKTKHHEGKIIAVGTTVVRALESFALENNPLNGETTTDLYINRQHPLQIVDGLMTGLHEPDTSHLDLLCAFTEEAYIIDAYRHALKQQYLWHEFGDLNLIF

SEQ ID NO: 63664 - protein, 342 aa, Bacillus altitudinis
  REGION 1..342: note = tr|A0A5D4PQG1|A0A5D4PQG1_9BACI S-adenosylmethionine:tRNA ribosyltransferase-isomerase; OS = Bacillus altitudinis OX=293387 GN=queA PE=3 SV=1
MKLELFDFDLPERLIAQVPLEKRDASRLMVLHKQTGDITHDTFSQITDYVQKGDCLVLNNTRVLPARLFGTKEDTGAKVELLLLKQEEGDKWETLVKPAKRVKNGTVITFGDGRLKAVCTEELEHGGRKVEFQYTGIFYEVLESLGEMPLPPYIKEQLDDRERYQTVYSKEVGSAAAPTAGLHFTNELLDALKAKGVHIAFITLHVGLGTFRPVSAERIEEHEMHAEFYEMNEETAEELNRVRKEGGRIISVGTTSTRTLETIASAYNGEFKASSGWTSIFIYPGYTFKAIDGMITNFHLPKSSLIMLVSALAGREHVLKAYNEAVKEEYRFFSFGDAMLIL

SEQ ID NO: 63665 - protein, 342 aa, Bacillus altitudinis
  REGION 1..342: note = tr|A0A5C2CDH4|A0A5C2CDH4_9BACI tRNA preQ1(34) S-adenosylmethionine ribosyltransferase-isomerase QueA; OS = Bacillus altitudinis OX=293387 GN=queA PE=4 SV=1
MKLELFDFDLPERLIAQVPLEKRDASRLMVLHKQTGDITHDTFSQITDYFQKGDCLVLNNTRVLPARLFGTKEDTGAKVELLLLKQEEGDKWETLVKPAKRVKNGTVITFGDGRLKAVCTEELEHGGRKVEFQYTGIFYEVLESLGEMPLPPYIKEQLDDRERYQTVYSKEVGSAAAPTAGLHFTNELLDALKAKGVHIAFITLHVGLGTFRPVSAERIEEHEMHAEFYEMNEETAEELNRVRKEGGRIISVGTTSTRTLETIASAYDGEFKASSGWTSIFIYPGYTFKAIDGMITNFHLPKSSLIMLVSALAGREHVLKAYNEAVKEEYRFFSFGDAMLIQ

SEQ ID NO: 63666 - protein, 342 aa, Bacillus amyloliquefaciens
  REGION 1..342: note = tr|A0A5C8IP16|A0A5C8IP16_BACAM S-adenosylmethionine:tRNA ribosyltransferase-isomerase; OS = Bacillus amyloliquefaciens OX=1390 GN=queA PE=3 SV=1
MKVDLFDFELPERLIAQVPLKERDASRLMVLDKQTGGLTDSSFKEIVSFFKEGDCLVLNNTRVLPARLFGTKEDTGAKVELLLLKQEENDTWETLVKPAKRVRKGTILTFGDGRLTAVCTEELDHGGRKIKFRYDGIFYEVLESLGEMPLPPYIKEQLDDKERYQTVFSKEIGSAAAPTAGLHFTEEILDELKQKGVRIEFITLHVGLGTFRPVSADDVEEHNMHAEFYEMTEETAASLNEVRKAGGRIVSVGTTSTRTLETIAGEHDGVFTASSGWTSIFIYPGYEFKAIDGMITNFHLPKSSLIMLVSALAGREHVLSAYRHAVEEEYRFFSFGDAMLII

SEQ ID NO: 63667 - protein, 342 aa, Bacillus amyloliquefaciens
  REGION 1..342: note = tr|A0A0D7XVK5|A0A0D7XVK5_BACAM S-adenosylmethionine:tRNA ribosyltransferase-isomerase; OS = Bacillus amyloliquefaciens OX=1390 GN=queA PE=3 SV=1
MKVDLFDFELPERLIAQVPLKERDASRLMVLDKQTGGLTDSSFKEIVSFFNEGDCLVLNNTRVLPARLFGTKEDTGAKVELLLLKQEENDTWETLVKPAKRVKKGTVLTFGDGRLTAVCTEELDHGGRKIEFRYDGIFYEVLESLGEMPLPPYIKEQLDDKERYQTVFSKEIGSAAAPTAGLHFTEEILDELKQKGVRIEFITLHVGLGTFRPVSADDVEEHNMHAEFYEMTEETAASLNEVRKAGGRIVSVGTTSTRTLETIAGEHDGVFTASSGWTSIFIYPGYEFKAIDGMITNFHLPKSSLIMLVSALAGREHVLSAYRHAVEEEYRFFSFGDAMLII

SEQ ID NO: 63668 - protein, 350 aa, Bacillus anthracis
  REGION 1..350: note = sp|Q81LH1|QUEA_BACAN S-adenosylmethionine:tRNA ribosyltransferase-isomerase OS=Bacillus anthracis OX=1392; GN = queA PE=3 SV=1
MDINLFDFHLPEELIAQVPLEERETSRLMVLDRETGDIEHKHFTDILSYLHEGDCLVLNETKVMPARLHGVKEDTGAHIEVLLLKQEEGDKWETLVKPAKRVKEGTVISFGEGKLKATCTGTADQGGRQLEFSYDGIFYEILDELGEMPLPPYIKETLEDRDRYQTVYAKEIGSAAAPTAGLHFTEELLEKLKQKGVELAFITLHVGLGTFRPVSADTIEEHHMHAEYYHMSEETAALLNRVKENGGRIITVGTTSTRTLETIATDHDGKLCAASGWTDIFMYPGYEFKAIDGLITNFHLPKSTLIMLVSAFANRDNVLHAYNEAVKEKYRFFSFGDAMFVASHAKMGNK

SEQ ID NO: 63669 - protein, 350 aa, Bacillus anthracis; identical to SEQ ID NO: 63668
  REGION 1..350: note = sp|C3L6U7|QUEA_BACAC S-adenosylmethionine:tRNA ribosyltransferase-isomerase OS=Bacillus anthracis (strain CDC 684 / NRRL 3495) OX=568206 GN=queA PE=3 SV=1

SEQ ID NO: 63670 - protein, 338 aa, Bacillus aquimaris
  REGION 1..338: note = tr|A0A1J6VKD6|A0A1J6VKD6_9BACI S-adenosylmethionine:tRNA ribosyltransferase-isomerase; OS = Bacillus aquimaris OX=189382 GN=BHE18_16180 PE=3 SV=1
MNEAVFDIPRQLNASAPVELSGKGRDEVKLMVLNRETGGVEHSYFNRLHTQLKRGDVLVVNNSRTIPASLRGTQGSREVEVRLSRKVSSREWDALILGPVNDARLPITFADGVKAFMSGNGSEKPLVRLTFSVEGAGFYDFLYKNGQPIRYEYIDAPWPLDYYQNVYGSVPGSVEMASAGRAFSWKLITKLRAEGIEVVCLQLHAGLSYYGDDRWPNPVNHPEEYHVSRETADSIRRAKREGNRVIAVGTTVVRALEAVAAGHGGDVAAASGVTNLYITKESPLRVVDGLITGLHEPEASHLDLLQAFVPRDYLMSAYRTAVAKGYLWHEFGDMNLIL

SEQ ID NO: 63671 - protein, 343 aa, Bacillus aquimaris
  REGION 1..343: note = tr|A0A5D4TWF2|A0A5D4TWF2_9BACI S-adenosylmethionine:tRNA ribosyltransferase-isomerase; OS = Bacillus aquimaris OX=189382 GN=FZC80_11160 PE=3 SV=1
MGAISKAFEVPQSLNAKVPAEFRGRGRDDVRLMVMDGEGVYHDRFSSLPDFLKKGDLLIFNNSRTIPAVLKAKACNREVEIRLSRQLDGRTWEALIWGGLYSAGYELTLVNGVKAVITGNAADKPLITISFSIEGAELLDYIYRYGEPIRYEYIESDWPLEAYQTAYASVPGSVEMASAGRAFSWKMFDKLKEKGVETAFLTLHTGLSYYGKDRWPDPNKHPEAFHIPEETAELINSVREARGRVIAVGTTVVRALETAADDAGRLTATEGITNLYIKKDHQLKAVDGLVTGLHEPEATHLEMLSAFTSPHRLFAAYREALKKGYLWHEFGDVNLILSERAHS

SEQ ID NO: 63672 - protein, 342 aa, Bacillus aryabhattai
  REGION 1..342: note = tr|A0A1S2C1A3|A0A1S2C1A3_9BACI S-adenosylmethionine:tRNA ribosyltransferase-isomerase; OS = Bacillus aryabhattai OX=412384 GN=queA PE=3 SV=1
MKVDLFDFHLPEELIAQTPLEQRDASRLMVLNKETGSVKHHMFHDLLDYVQEGDCLVLNDTRVLPARLFGTKEDTGANIEVLLLKQTQGDTWETLVKPAKRVKEGTVISFGDGRLTAVCKETSDQGGRLLEFNYEGIFYEVLEQLGEMPLPPYIKERLDDQERYQTVFAREQGSAAAPTAGLHFTEEMLEQLKTKGVHIAFLTLHVGLGTFRPVSVDDLEEHDMHSEFYQVSEGTAALLNSVREKGGRIISVGTTSTRTLETIATEHNGKFVASSGWTNIFIFPGYEFKAIDGMITNFHLPKSTLIMLVSALAGRENVISAYEQAVEEKYRFFSFGDAMLIL

SEQ ID NO: 63673 - protein, 342 aa, Bacillus aryabhattai
  REGION 1..342: note = tr|A0A1G6M4M9|A0A1G6M4M9_9BACI S-adenosylmethionine:tRNA ribosyltransferase-isomerase; OS = Bacillus aryabhattai B8W22 OX=1358420 GN=queA PE=3 SV=1
MKVDLFDFHLPEELIAQTPLEQRDASRLMVLNKETGSVKHHMFHDLLDYVQEGDCLVLNDTRVLPARLFGTKEDTGANIEVLLLKQTQGDTWETLVKPAKRVKEGTVISFGDGRLTAVCKETSDQGGRLLEFNYEGIFYEVLEQLGEMPLPPYIKERLDDQERYQTVFAREQGSAAAPTAGLHFTEEMLEQLKEKGVHIAFLTLHVGLGTFRPVSVDDLEEHDMHSEFYQVSEGTAALLNSVREKGGRIISVGTTSTRTLETIATEHNGKFVASSGWTNIFIFPGYEFKAIDGMITNFHLPKSTLIMLVSALAGRENVISAYEQAVAEKYRFFSFGDAMLIL

SEQ ID NO: 63674 - protein, 342 aa, Bacillus asahii
  REGION 1..342: note = tr|A0A398B617|A0A398B617_9BACI S-adenosylmethionine:tRNA ribosyltransferase-isomerase; OS = Bacillus asahii OX=228899 GN=queA PE=3 SV=1
MKLDLFDFHLPEELIAQVPLENREASRLMVLDKETGDIQHDVFKHITEYLQPGDCLVLNDTKVLPARLHGSKEDTGANIEVLLLKQQQDDEWETLVKPAKRIKEGSTIVFGDGKLKAVCTGVLEHGGRMLRFQYDGIFYEVLEELGEMPLPPYIKEQLDDQDRYQTVYARERGSAAAPTAGLHFTKELLAKVKEMGVHIAFITLHVGLGTFRPVNVEDIDDHDMHSEFYQMTADTAHLLNEVKANGGRIITVGTTSTRTLETIASRHNGVFKEESGWTSIFIYPGYEFKGIDAMITNFHLPKSTLIMLISALAGRENVLHAYNIAVEEKYRFFSFGDAMFIK

SEQ ID NO: 63675 - protein, 345 aa, Bacillus asahii
  REGION 1..345: note = tr|A0A3T0KW80|A0A3T0KW80_9BACI S-adenosylmethionine:tRNA ribosyltransferase-isomerase; OS = Bacillus asahii OX=228899 GN=queA PE=3 SV=1
MEEVKLDLFDFHLPEELIAQVPLENREASRLMVLDKETGDIQHDVFKHITEYLQPGDCLVLNDTKVLPARLHGSKEDTGANIEVLLLKQQQDDEWETLVKPAKRIKEGSTIFFGDGKLKAVCTGVLEHGGRMLRFQYDGIFYEVLEELGEMPLPPYIKEQLDDQDRYQTVYARERGSAAAPTAGLHFTKELLAKVKEMGVHIAFITLHVGLGTFRPVNVEDIDDHDMHSEFYQMTADTAHLLNEVKANGGRIITVGTTSTRTLETIASRHNGVFKEESGWTSIFIYPGYEFKGIDAMITNFHLPKSTLIMLISALAGRENVLHAYNLAVEEKYRFFSFGDAMFIK

SEQ ID NO: 63676 - protein, 342 aa, Bacillus atrophaeus
  REGION 1..342: note = tr|A0A0H3E6A6|A0A0H3E6A6_BACA1 S-adenosylmethionine:tRNA ribosyltransferase-isomerase; OS = Bacillus atrophaeus (strain 1942) OX=720555 GN=queA; PE = 3 SV=1
MKVELFDFELPERLIAQVPLEQRDASRLMVLDKHTGGLSDSSFKEIVSFFKEGDCLVLNNTRVLPARLFGVKEDTGAKVELLLLKQETGDRWETLVKPAKRVKKGTVLTFGDGLLQAVCTEELEHGGRKVEFRYDGIFYEVLESLGEMPLPPYIKEQLDDRERYQTVFSKEIGSAAAPTAGLHFTEEILGELKEKGVRIEFITLHVGLGTFRPVSADEVEEHNMHAEFYEMSAETAAALNHVRETGGRIVSVGTTSTRTLETIAGENNGSFKASSGWTSIFIYPGYEFKAIDGMITNFHLPKSSLIMLVSALAGREHVLRAYNHAVEKEYRFFSFGDAMLII

SEQ ID NO: 63677 - protein, 342 aa, Bacillus atrophaeus; identical to SEQ ID NO: 63676
  REGION 1..342: note = tr|A0A080UN55|A0A080UN55_BACAT S-adenosylmethionine:tRNA ribosyltransferase-isomerase; OS = Bacillus atrophaeus OX=1452 GN=queA PE=3 SV=1

SEQ ID NO: 63678 - protein, 342 aa, unidentified
  source 1..342: note = Bacillus australimaris
  REGION 1..342: note = tr|A0A0P7G5W5|A0A0P7G5W5_9BACI S-adenosylmethionine:tRNA ribosyltransferase-isomerase; OS = Bacillus australimaris OX=1326968 GN=queA PE=3 SV=1
MKLELFDFDLPERLIAQVPLEKRDASRLMVLNKQTGAITHDTFSQITDYFQKGDCLVLNNTRVLPARLFGMKEDTGAKVELLLLKQEEGDHWETLVKPAKRVKKGTVITFGDGRLQAVCTEEMEHGGRKVEFQYTGIFYEVLESLGEMPLPPYIKEQLDDRERYQTVYSKEVGSAAAPTAGLHFTTELLDELKAKGVHIAFITLHVGLGTFRPVSAERIEEHEMHAEFYEMNEETAEELNRVRKEGGRIISVGTTSTRTLETIASAHDGEFKASSGWTSIFIYPGYTFKAIDGMITNFHLPKSSLIMLVSALAGREHVLKAYNEAVKEEYRFFSFGDAMLIQ

SEQ ID NO: 63679 - protein, 342 aa, Bacillus azotoformans
  REGION 1..342: note = tr|K6C1A4|K6C1A4_BACAZ S-adenosylmethionine:tRNA ribosyltransferase-isomerase OS=Bacillus azotoformans LMG 9581 OX=1131731 GN=queA PE=3 SV=1
MKVDLFNFNLPEELIAQTPLTERTASRLMVLDKQTGDFKHEQFRNIIDYLQADDCLILNDTRVLPARLFGVKEDTGAQIEVLLLKQVENDVWETLAKPAKRVKVGTIITFGDGRLKAKCISEGDHGGRHFEFSYDGIFYEVLDLLGEMPLPHYIKEQLDDKERYQTVFARERGSAAAPTAGLHFTKELLEEIKQKGVHVAFITLHVGLGTFRPVSAESVEDHDMHAEFYQMTQETADLLNRVKADGGRIISVGTTSTRTLETIASGHDGQFQETSGWTDIFIYPGYEFKAINGMLTNFHLPKSTLMMLISALAGREHVLKAYEEAVKERYRFFSFGDAMLII

SEQ ID NO: 63680 - protein, 342 aa, Bacillus azotoformans
  REGION 1..342: note = tr|A0A072NR74|A0A072NR74_BACAZ S-adenosylmethionine:tRNA ribosyltransferase-isomerase; OS = Bacillus azotoformans MEV2011 OX=1348973 GN=queA PE=3; SV = 1
MKVDLFDFNLPEELIAQTPLTERTASRLMVLDKQTGDFKHEQFRNIIDYLQAGDCLILNDTRVLPARLFGIKEDTGAKIEVLLLKQVENDIWETLVKPAKRVKVGTVITFGEGRLKAKCISEGDHGGRHFEFFYEGIFYEVLDLLGEMPLPHYIKEQLDDKERYQTVFARERGSAAAPTAGLHFTKELLEEIKQKGVHVAFITLHVGLGTFRPVSSETVEGHDMHAEFYQMTKETAELLNQVKADGGRIISVGTTSTRTLETIASGSDGQFQETSGWTDIFIYPGYEFKAINGMLTNFHLPKSTLMMLISALAGRDHVIKAYEEAVKERYRFFSFGDAMLII

SEQ ID NO: 63681 - protein, 342 aa, unidentified
  source 1..342: note = Bacillus bacterium
  REGION 1..342: note = tr|A0A3C2CQT6|A0A3C2CQT6_9BACI S-adenosylmethionine:tRNA ribosyltransferase-isomerase; OS = Bacillus bacterium OX=2053512 GN=queA PE=3 SV=1
MKVDLFDFHLPEELIAQTPLEQRAESRLMVLNKKSGSIEHDIFKNIKNYLKPGDCLVLNDTRVLPARLFGTKEDTGAKIEVLLLKQLEGDEWETLIKPAKRVKEGTSIVFGDGLLTAVCTGEADHGGRKLTFTYDGIFYEVLEKLGEMPLPPYIKEQLEDKDRYQTVFARERGSAAAPTAGLHFTEALLAELEGSGIHIAFITLHVGLGTFRPVSVDSIDEHEMHSEFYQLTEGTAMLLNKVREQGGRIISVGTTSTRTLETIATANEGTFVSANGWTNIFIYPGYEFKAIDGMITNFHLPKSTLIMLVSALAGRENVIHAYNVAVEERYRFFSFGDAMLIF

SEQ ID NO: 63682 - protein, 342 aa, unidentified
  source 1..342: note = Bacillus bacterium
  REGION 1..342: note = tr|A0A3D0E221|A0A3D0E221_9BACI S-adenosylmethionine:tRNA ribosyltransferase-isomerase; OS = Bacillus bacterium OX=2053512 GN=queA PE=3 SV=1
MKVDMFDFDLPEELIAQVPLKDRSSSRLMVLNKKTGAIKHERFSHLIDYLNPGDCLVLNDTKVLPARLFGIKSDTGAKVEVLLLKQVAGDCWETLVKPAKRVKVGTEITFGDGRLKAICTRTEEHGGRLFEFHYEGIFYEILDSLGKMPLPPYIKEQLEDQDRYQTVYARERGSAAAPTAGLHFTNEMLETIKEKGVYVTFITLHVGLGTFRPVSVDSIEDHDMHAEFYRMSEETSSLLNEVKNNGGRIISVGTTSTRTLETIAVENDGVFKAGSGWTDIFIFPGYKFRAIDGLITNFHLPMSTLIMLVSALAGRENILHAYETAVQEKYRFFSFGDAMLII

SEQ ID NO: 63683 - protein, 356 aa, Bacillus badius
  REGION 1..356: note = tr|A0A0C2Y7Q9|A0A0C2Y7Q9_BACBA S-adenosylmethionine:tRNA ribosyltransferase-isomerase; OS = Bacillus badius OX=1455 GN=queA PE=3 SV=1
MLLENGNKKIGMKKVKVEEFDFNLPEELIAQTPLAERTESRLMVLDKKTGAITHDVFKNITSFLQPGDCLVLNDTKVLPARLYGTKEDTGAKIEVLLLRQEEGDRWETLVKPAKRIKAGSQVTFGDGRLQAVCVEEKEHGGRVLEFSYEGIFYEVLDELGEMPLPPYIKEQLEEKDRYQTVFAKERGSAAAPTAGLHFTEELLEEIRGMGVHTAFLTLHVGLGTFRPVSVDTIEEHEMHAEFYHVSEGTARLIQQVKEAGGRIISVGTTSTRTLETVARDHDGRIEAASGWTDIFIYPGFPFQAIDGMITNFHLPKSTLIMLVSALAGKEHVMKAYHEAVDEKYRFFSFGDAMLIK

SEQ ID NO: 63684 - protein, 342 aa, Bacillus badius
  REGION 1..342: note = tr|A0A165ZW95|A0A165ZW95_BACBA S-adenosylmethionine:tRNA ribosyltransferase-isomerase; OS = Bacillus badius OX=1455 GN=queA PE=3 SV=1
MKVEEFDFNLPEELIAQTPLAERTESRLMVLDKKTGAITHDVFKNITSFLQPGDCLVLNDTKVLPARLYGTKEDTGAKIEVLLLRQEEGDRWETLVKPAKRIKAGSQVTFGDGRLQAVCVEEKEHGGRVLEFSYEGIFYEVLDELGEMPLPPYIKEQLEEKDRYQTVFAKERGSAAAPTAGLHFTEELLEEIRGMGVHTAFLTLHVGLGTFRPVSVDTIEEHEMHAEFYHVSEGTARLIQQVKEAGGRIISVGTTSTRTLETVARDHDGRIEAASGWTDIFIYPGFPFQAIDGMITNFHLPKSTLIMLVSALAGKEHVMKAYHEAVDEKYRFFSFGDAMLIK

SEQ ID NO: 63685 - protein, 343 aa, Bacillus bataviensis
  REGION 1..343: note = tr|K6D9D9|K6D9D9_9BACI S-adenosylmethionine:tRNA ribosyltransferase-isomerase OS=Bacillus bataviensis LMG 21833 OX=1117379 GN=BABA_11176 PE=3 SV=1
MAATKALDFYLPDELNASHPPEKRGLRRDHVRMMVLDRSMGDVRHDCFFHLADYLESGDLVILNNSRTIPAVLYAEWYRNTVQLAPKVEIRLARRRGEDTWDALVVASPVMTGDSLHLSPELSATVLGEKENSPLKLIQFSKKGADLFNIIYALGEPVRYEYIEQPWDLDFYQTVFASHPGSVEMPSAGRAFSWELLFNLKRNDIQVDYIRLHTGLSYLLDDQWIQTPEENEEEYHISDGTMARIIETKAAGKRVIAVGTTVVRALETAAKNGALSGMTNLYINQHYPLKIADGIITGLHEPKASHLDMLSAFVSEHHLLKAYGQAIDTGYLWHEFGDMNLIL

SEQ ID NO: 63686 - protein, 342 aa, Bacillus bataviensis
  REGION 1..342: note = tr|A0A561DGM4|A0A561DGM4_9BACI S-adenosylmethionine:tRNA ribosyltransferase-isomerase; OS = Bacillus bataviensis OX=220685 GN=queA PE=3 SV=1
MKVDLFDFHLPEELIAQVPLKTRTDSRLMVLNKQTGEIKHEVFKNITEYLREGDCLVLNDTKVLPARLFGVKNDTGAKIEVLLLKQLEGDQWETLVKPAKRVKVGTEIVFGDGVLTAVCIDESDHGGRVLEFKYTGIFYEVLDQLGEMPLPPYIKEQLDDRDRYQTVYAREPGSAAAPTAGLHFTESLLEEIKAKGVHIAFITLHVGLGTFRPVSVEDVLEHDMHAEFYMVTEGTAKLLNEVRQSGGRIVTVGTTSTRTLETIASANNGQFTAGSGWTSIFIYPGYEFKAIDGMITNFHLPKSTLIMLVSALAGRENILHAYNTAVAERYRFFSFGDAMFII

SEQ ID NO: 63687 - protein, 355 aa, Bacillus beveridgei
  REGION 1..355: note = tr|A0A1D7QU38|A0A1D7QU38_9BACI S-adenosylmethionine:tRNA ribosyltransferase-isomerase; OS = Bacillus beveridgei OX=632773 GN=queA PE=3 SV=1
MDVSAFDYELPEKLIAQTPLSNRAESKLLAMDRSTGELVHQQFCNVLDFLEPGDALVLNDTKVLPARLYGIKKDTGAKIEVLLLNEEDNHVWEALVKPAKRLKTGTEVSFGDGILEAVCTEELPEGRRRLKFHFEGVFHERLDELGEMPLPPYIQEQLEEKERYQTVYAKNLGSAAAPTAGLHFTPELLEDVRRKGANVVFLTLHVGLGTFRPVSVDTIEAHKMHAEFYQLSKESADVLNQTRKNGGRVIAVGTTSARTLETIARDHGGEIKPASGWTDIFIYPGFTFQGIDGLLTNFHLPKSTLVMLVSAFSKREYILNAYQSAIEKQYRFFSFGDAMLIADGVGTITKGEDHT

SEQ ID NO: 63688 - protein, 350 aa, unidentified
  source 1..350: note = Bacillus bombysepticus
  REGION 1..350: note = tr|A0A023PBC4|A0A023PBC4_9BACI S-adenosylmethionine:tRNA ribosyltransferase-isomerase; OS = Bacillus bombysepticus str. Wang OX=1330043 GN=queA; PE = 3 SV=1
MDINLFDFHLPEELIAQVPLEERETSRLMVLDRETGDIEHKHFTDILSYLHEGDCLVLNETKVMPARLHGVKEDTGAHIEVLLLKQEEGDKWETLVKPAKRVKEGTVISFGEGKLKATCTGTADQGGRQLEFSYDGIFYEILDELGEMPLPPYIKETLEDRDRYQTVYAKEIGSAAAPTAGLHFTEELLEKLKQKGVQLAFITLHVGLGTFRPVSADTIEEHHMHAEYYHMSEETAALLNRVKENGGRIITVGTTSTRTLETIATDHEGKLCAASGWTDIFMYPGYEFKAIDGLITNFHLPKSTLIMLVSAFANRDNVLHAYNEAVKEKYRFFSFGDAMFVASHAKMRNK

SEQ ID NO: 63689 - protein, 112 aa, Bacillus boroniphilus
  REGION 1..112: note = tr|W4RI38|W4RI38_9BACI S-adenosylmethionine:tRNA ribosyltransferase-isomerase OS=Bacillus boroniphilus JCM 21738 OX=1294265 GN=JCM21738_593 PE=3 SV=1
MTEGTALLLNSVREQGGRIITVGTTSTRTLETIATANDGKFVAETGWTNIFIYPGYEFKAIDGMITNFHLPKSTLIMLVSALAGRDNVLNAYNNAVEERYRFFSFGDAMLIL

SEQ ID NO: 63690 - protein, 230 aa, Bacillus boroniphilus
  REGION 1..230: note = tr|W4RIH7|W4RIH7_9BACI S-adenosylmethionine:tRNA ribosyltransferase-isomerase OS=Bacillus boroniphilus JCM 21738 OX=1294265 GN=JCM21738_594 PE=3 SV=1
MKVDLFDFHLPEELIAQTPLEQRAESRLMILNKESGKIEHDVFKNIKNYLNPGDCLVLNDTKVLPARLFGMKEDTGAKIEVLLLKQLDGDEWETLIKPAKRVKEGTKIVFGDGLLTAECTGEAEHGGRNLKFSYDGIFYEVLEQLGEMPLPPYIKEQLEDKDRYQTVFARERGSAAAPTAGLHFTEELLEEIKEMGIHIALSLFTWVWEHSGLSVLIRSKSMTCIQSFTR

SEQ ID NO: 63691 - protein, 342 aa, Bacillus butanolivorans
  REGION 1..342: note = tr|A0A2A7W8J9|A0A2A7W8J9_9BACI S-adenosylmethionine:tRNA ribosyltransferase-isomerase; OS = Bacillus butanolivorans OX=421767 GN=queA PE=3 SV=1
MKLDMFDFHLPEELIAQVPLEDREASRLMVLDKVTGELKHDVFSHITEYIKPGDCLVLNDTKVLPARLYGSKEETGGKVEVLLLKQEHDDVWETLVKPAKRIKEGTTIIFGDGKLSAVCTGVLEHGGRILKFQYEGIFYEILEELGEMPLPPYIKEQLDDQDRYQTVYARERGSAAAPTAGLHFTEHLLEKLKGMGVHIAFITLHVGLGTFRPVSVDDIDSHEMHSEFYQMTEGTARLLNKVKEDGGKIITVGTTSTRTLETIASRNDGVFKEESGWTSIFIYPGYEFKGINAMITNFHLPKSTLIMLISALAGREHVLHAYETAVAEKYRFFSFGDAMLIK

SEQ ID NO: 63692 - protein, 342 aa, Bacillus butanolivorans
  REGION 1..342: note = tr|A0A0M0EYJ0|A0A0M0EYJ0_9BACI S-adenosylmethionine:tRNA ribosyltransferase-isomerase; OS = Bacillus butanolivorans OX=421767 GN=queA PE=3 SV=1
MKLDMFDFHLPEELIAQVPLEDREASRLMVLDKVTGELKHDVFSHITEYIKPGDCLVLNDTKVLPARLYGSKEETGGKVEVLLLKQEHDDVWETLVKPAKRIKEGTTIIFGDGKLSAVCTGVLEHGGRILKFQYEGIFYEILEELGEMPLPPYIKEQLDDQDRYQTVYARERGSAAAPTAGLHFTEHLLEKLKGMGVHIAFITLHVGLGTFRPVSVDDIDSHEMHSEFYQMTEGTARLLNKVKEDGGKIITVGTTSTRTLETIASRNDGVFKEESGWTSIFIYPGYEFKGINAMITNFHLPKSTLIMLISALAGREHVLHAYETAVEEKYRFFSFGDAMLIK

SEQ ID NO: 63693 - protein, 342 aa, unidentified
  source 1..342: note = Bacillus caldolyticus
  REGION 1..342: note = tr|A0A2H5KKR5|A0A2H5KKR5_BACCL S-adenosylmethionine:tRNA ribosyltransferase-isomerase; OS = Bacillus caldolyticus OX=1394 GN=queA PE=3 SV=1
MKVDLFDFHLPEELIAQTPLPDRAASRLMVLDKRTGAIRHETFRNIISYLNPGDCLVLNDTRVMPARLYGEKEETGGTVEVLLLKQLDGDRWETLVKPGKRVKPGTKLTFGEGKLEAVCLDTLEHGGRVLEFSYDGLFYEVLAELGEMPLPPYIKEKLDDPERYQTVYAREIGSAAAPTAGLHFTEELLDAIREKGVHIVFITLHVGLGTFRPVQVDEVEKHDMHAEFYQMSEETAETLNRVREQGGRIIAVGTTSTRTLETIAGKHNGRFVAESGWTDIFIYPGYEFKGIDGLVTNFHLPKSTLIMLVSALAGRENILHAYQVAVKERYRFFSFGDAMLII

SEQ ID NO: 63694 - protein, 342 aa, unidentified
  source 1..342: note = Bacillus camelliae
  REGION 1..342: note = tr|A0A2N3LKY4|A0A2N3LKY4_9BACI S-adenosylmethionine:tRNA ribosyltransferase-isomerase; OS = Bacillus camelliae OX=1707093 GN=queA PE=3 SV=1
MKVDIFDFHLPEELIAQTPLKNRSDSRLMVLNKENGEIEHTIFKNITSYLRKGDCLVLNDTKVLPARLFGVKEDTGAHIEVLLLKQLEENNWETLVKPAKRVKVGTKLIFGDGQLIAHCVKEEEHGGRVLKFEYEGIFYEVLEALGEMPLPPYIKEKLDDKDRYQTVYAKERGSAAAPTAGLHFTEELLEEIKNMGVHITFITLHVGLGTFRPVSVENVEKHDMHSEYYQVSKETADLINRVRKQGGRIISVGTTSTRTLETIASEHDGEIVAQNGWTDIFIYPGYQFKGIDGMITNFHLPKSTLIMLVSALAGREHILHAYETAVQEKYRFFSFGDAMLII

SEQ ID NO: 63695 - protein, 341 aa, unidentified
  source 1..341: note = Bacillus campisalis
  REGION 1..341: note = tr|A0A0M2SXM5|A0A0M2SXM5_9BACI S-adenosylmethionine:tRNA ribosyltransferase-isomerase; OS = Bacillus campisalis OX=1408103 GN=WQ57_14245 PE=3 SV=1
MTTAQLDFELPPELNASMPPERRGIRRDQVRMMVLDRISGRRIHDSFFRLGNYLKPGDLIVLNSSRTVPALLKGTWKRGKALMDTDVEVRLARRKDDSTWEALVAAAGASVGDTLQFSPGLSGVITGEKASSPIKSILFSQAGTELYNIFYDIGEPITYEYIEKPWKLDYYQTVFASSPGSVEMPSAGRAFSWELLFQLQNMGVSIAFIQLHTGLSYLGEDFDFHPEEHEETYHVPGEVMQKISSTKAAGGRIIAAGTTVVRAIETVGEGGKLSGSTNLYVSRDTRLNITDGILTGFHEPKASHLDMLTAFVSEHHLLCAYQEAVKSRYLWHEFGDMNLIL

SEQ ID NO: 63696 - protein, 342 aa, unidentified
  source 1..342: note = Bacillus campisalis
  REGION 1..342: note = tr|A0A0M2SKH2|A0A0M2SKH2_9BACI S-adenosylmethionine:tRNA ribosyltransferase-isomerase; OS = Bacillus campisalis OX=1408103 GN=queA PE=3 SV=1
MKVDLFDFHLPEELIAQVPLEQRSESRLMVLDKKTGGLQHDVFKHIKSHLRPGDCLVLNDTRVLPARLFGMKEDTGAKIEVLLLKQLEGDKWETLVKPAKRVKEGTTLVFGDGLLTAVCTGSSDHGGRVLEFSYDGIFYEVLEQLGEMPLPPYIKEQLDDQERYQTVFAKERGSAAAPTAGLHFTEELLEELKEAGVHITFITLHVGLGTFRPVSSDTIEEHEMHAEFYIMSEGSAKLLNEVREQGGRIITVGTTSTRTLETIASAHNGKFAAATGWTDIFIYPGFEFKGIDGMITNFHLPKSTLIMLVSALAGREHVLHAYNTAVQERYRFFSFGDAMLII

SEQ ID NO: 63697 - protein, 342 aa, Bacillus canaveralius
  REGION 1..342: note = tr|A0A3R9P9N0|A0A3R9P9N0_9BACI S-adenosylmethionine:tRNA ribosyltransferase-isomerase; OS = Bacillus canaveralius OX=1403243 GN=queA PE=3 SV=1
MNVELFDFDLPAELIAQVPLKNRTDSRLMVLNKESGEIRHDTFKNIGDYFKKEDCLVLNDTRVLPARLYGAKQDTGAKIEVLLLKQQDGDRWETLVKPAKRVRKGTKIDFGDGLLSAVCVGEAEHGGRILEFSYEGIFYEVLEGLGEMPLPPYIKEQLDDRDRYQTVFARERGSAAAPTAGLHFTEALLEQLRVLGVHIAFITLHVGLGTFRPVNVENIHEHQMHAEFYQVSEGTARLLNDVRSKGGRIITVGTTSTRTLETIAAAHDGTFVAESGWTDIFIYPGYQFKAIDGMITNFHLPMSTLIMLVSALAGRENVLNAYQIAVKERYRFFSFGDAMLLL

SEQ ID NO: 63698 - protein, 342 aa, Bacillus canaveralius
  REGION 1..342: note = tr|A0A2N5GH72|A0A2N5GH72_9BACI S-adenosylmethionine:tRNA ribosyltransferase-isomerase; OS = Bacillus canaveralius OX=1403243 GN=queA PE=3 SV=1
MNVELFDFDLPAELIAQVPLKNRTDSRLMVLNKESGEIRHDTFKNIGDYFKKGDCLVLNDTRVLPARLYGAKQDTGAKIEVLLLKQQDGDRWETLVKPAKRVRKGTKIDFGDGLLSAVCVGEAEHGGRILEFSYEGIFYEVLEGLGEMPLPPYIKEQLDDRDRYQTVFARERGSAAAPTAGLHFTEALLEQLRVLGVHIAFITLHVGLGTFRPVNVENIHEHQMHAEFYQVSEGTARLLNDVRSKGGRIITVGTTSTRTLETIAAAHDGTFVAESGWTDIFIYPGYHFKAIDGMITNFHLPMSTLIMLVSALAGRENVLNAYQIAVKERYRFFSFGDAMLLL

SEQ ID NO: 63699 - protein, 342 aa, unidentified
  source 1..342: note = Bacillus caseinilyticus
  REGION 1..342: note = tr|A0A1H3K6A5|A0A1H3K6A5_9BACI S-adenosylmethionine:tRNA ribosyltransferase-isomerase; OS = Bacillus caseinilyticus OX=1503961 GN=queA PE=3 SV=1
MDISQFDFHLPEELIAQTPLKDRTASKLLVLHRKTGRKEHRHFRDLLDYLTPGDVIVLNDTKVLPARLFGVKEETGAKIEILLLKDEGEHTWEVLAKPAKRLKAGTQISFGDGKLVGTCVGEAPDGLRKIKFTFSGIFNEILDQLGQMPLPPYIQEQLEEQERYQTVYAKHSGSAAAPTAGLHFTKEFLENVKEKGINIVYVTLHVGLGTFRPVAVENIEKHEMHAEYYEMTERTAEVLNAAKEQGNNIVAVGTTSARTLETIATKHHGHFQASSGWTDIFIYPGYMFKGIDGLLTNFHLPKSTLVMLVSAFAGRENTLSAYSEAVDRKYRFFSFGDAMLLL

SEQ ID NO: 63700 - protein, 342 aa, unidentified
  source 1..342: note = Bacillus cavernae
  REGION 1..342: note = tr|A0A3S0VWR3|A0A3S0VWR3_9BACI S-adenosylmethionine:tRNA ribosyltransferase-isomerase; OS = Bacillus cavernae OX=1674310 GN=queA PE=3 SV=1
MKVELFDFHLPEELIAQVPLEHREQSRLMVLDKETGAIQHEIFKDITEYLQPGDCLVLNDTRVLPARLYGSKEDTGANVEVLLLKQEEGDAWETLVKPAKRIKEGTKIVFGDGKLTATCTDVLDHGGRVLAFAYEGIFYEVLEELGSMPLPPYIKEQLEDKERYQTVYAKERGSAAAPTAGLHFTEQLLEGIKEKGVHIAFITLHVGLGTFRPVSADDVDDHEMHAEFYQMTEGTARLLNEVKANGGRIITVGTTSTRTLETIASKHDGLFKEESGWTSIFIFPGYQFKGIDAMITNFHLPKSTLIMLISTLAGREHVLHAYETAVKEKYRFFSFGDAMLIK

SEQ ID NO: 63701 - protein, 342 aa, Bacillus cellulosilyticus
  REGION 1..342: note = tr|E6TV72|E6TV72_BACCJ S-adenosylmethionine:tRNA ribosyltransferase-isomerase OS=Bacillus cellulosilyticus (strain ATCC 21833 / DSM 2522 / FERM P-1141 / JCM 9156 / N -4) OX=649639 GN=queA PE=3 SV=1
MDVTQFDFHLPEELIAQTPLADRTASRLLVLNRENGSIEHRHFKDLLQYFSKGDVLVLNNTKVLPARLFGIKEDTGAKIELLLLREESDYTWEALVKPAKRVKIGTKIVIGEGKLIGKCVEELPEGIRKIQFEFDGIFNEILDELGEMPLPPYIQEQLDEKDRYQTVFAKHSGSAAAPTAGLHFTKELLQNIEQLGVHIVFITLHVGLGTFRPVAVENVKEHTMHEEYYDMTSEAASVLNEARSNGNKIIAVGTTSVRTLETIASKHDGAFTASSGWTNIFIYPGYQYKAIDGMITNFHLPKSTLVMLVSAFAGRGNILSAYNAAVEKKYRFFSFGDAMLII

SEQ ID NO: 63702 - protein, 350 aa, Bacillus cereus
  REGION 1..350: note = sp|C1ESW2|QUEA_BACC3 S-adenosylmethionine:tRNA ribosyltransferase-isomerase OS=Bacillus cereus (strain 03BB102) OX=572264 GN=queA PE=3 SV=1
MDINLFDFHLPEELIAQVPLEERETSRLMVLDRETGDIEHKHFTDILSYLHEGDCLVLNETKVMPARLHGVKEDTGAHIEVLLLKQEEGDKWETLVKPAKRVKEGTVISFGEGKLKATCTGTADQGGRQLEFSYDGIFYEILDELGEMPLPPYIKETLEDRDRYQTVYAKEIGSAAAPTAGLHFTEELLEKLKQKGVELAFITLHVGLGTFRPVSADTIEEHHMHAEYYHMSEETAALLNRVKENGGRIITVGTTSTRTLETIATDHNGKLCAASGWTDIFMYPGYEFKAIDGLITNFHLPKSTLIMLVSAFANRDNVLHAYNEAVKEKYRFFSFGDAMFIASHAKMGNK

SEQ ID NO: 63703 - protein, 350 aa, Bacillus cereus
  REGION 1..350: note = tr|J8JPW3|J8JPW3_BACCE S-adenosylmethionine:tRNA ribosyltransferase-isomerase OS=Bacillus cereus VD102; OX = 1053228 GN=queA PE=3 SV=1
MDINLFDFHLPEELIAQVPLEERETSRLMVLDRETGDIEHKHFTDILSYLHEGDCLVLNETKVMPARLHGVKEDTGAHIEVLLLKQEEGDKWETLVKPAKRVKEGTVISFGEGKLKATCTGTADQGGRQLEFSYDGIFYEILDELGEMPLPPYIKETLEDRDRYQTVYAKEIGSAAAPTAGLHFTEELLEKLKQKGVELAFITLHVGLGTFRPVSADTIEEHHMHAEYYYMSEETAALLNRVKENGGRIITVGTTSTRTLETIATDHDGKLCAASGWTDIFMYPGYEFKAIDGLITNFHLPKSTLIMLVSAFANRDNVLHAYNEAVKEKYRFFSFGDAMFVASHAKMGNK

SEQ ID NO: 63704 - protein, 342 aa, Bacillus circulans
  REGION 1..342: note = tr|A0A553SKD2|A0A553SKD2_BACCI S-adenosylmethionine:tRNA ribosyltransferase-isomerase; OS = Bacillus circulans OX=1397 GN=queA PE=3 SV=1
MKVDLFDFHLPEELIAQVPLKDRTSSRLMVVDKETGSLEHRTFKDIIEYINPGDCLVLNDTRVLPARLHGEKEDTGAHIEVLLLKQQEGEQWETLVKPAKRVKKGTIISFGAGKLKAVCKEELEHGGRVLEFLYDGIFYEILDELGEMPLPPYIKETLDDQDRYQTVYAKERGSAAAPTAGLHFTEELLEELKAKGVHIAFITLHVGLGTFRPVNVDDIDKHEMHAEFYQLTAGTAKLLNKVREEGGRILSVGTTSTRTLETIASANDGKFVESNGWTSIFIYPGYEFKGIDGMITNFHLPKSTLIMLVSALSSRENILHAYETAVQERYRFFSFGDAMFIR

SEQ ID NO: 63705 - protein, 342 aa, Bacillus circulans
  REGION 1..342: note = tr|A0A0J1L000|A0A0J1L000_BACCI S-adenosylmethionine:tRNA ribosyltransferase-isomerase; OS = Bacillus circulans OX=1397 GN=queA PE=3 SV=1
MKVDLFDFYLPEELIAQTPLEDRTSSRLMIVNKETGDLEHRKFKDIYEYINPGDCLVLNDTRVLPARLHGEKEDTGAHIEVLLLKQQKDDKWETLVKPAKRVKEGTIISFGDGTLKAVCVKELEHGGRILDFQYEGIFYEILDQLGEMPLPPYIKEKLDDQDRYQTVYAKERGSAAAPTAGLHFTTELLDALKKKGVHIAFITLHVGLGTFRPVNVEDVDKHEMHAEFYQLNKETAALLNSVRGQGGRIISVGTTSTRTLETIASANNGEFVESSGWTSIFIYPGYEFKGIDGMITNFHLPKSTLIMLVSALAGRENILHAYETAVKERYRFFSFGDAMFIQ

SEQ ID NO: 63706 - protein, 342 aa, Bacillus clausii
  REGION 1..342: note = sp|Q5WHR3|QUEA_BACSK S-adenosylmethionine:tRNA ribosyltransferase-isomerase OS=Bacillus clausii (strain KSM-K16) OX=66692 GN=queA PE=3 SV=1
MDVNEFDFDLPEELIAQTPLKTRTNSRLLVVDKKTKAISDRMFPDLIEALSPGDCLVLNDTKVMPARLLGEKVETKAVIELLLLKQLEGDCWETLVKPAKRVKIGTEVSFGDGKLTAICTAVQPQGGRIFEFRYSGVFYELLEELGTMPLPPYIKERLEDADRYQTVYAKQIGSAAAPTAGLHFSEQLLLEIEAKGVKIVYITLHVGLGTFRPVSASSVEDHQMHAEYYQVTEEAAHTLASARENGGNIIAVGTTSARTLETIYSDHGAFVAASGWTSIFIYPGYKYQAIDGLLTNFHLPKSTLVMLVSALIGKEALMDAYAHAIKERYRFFSFGDAMFIRP

SEQ ID NO: 63707 - protein, 333 aa, Bacillus clausii
  REGION 1..333: note = tr|A0A268NTG8|A0A268NTG8_BACCS S-adenosylmethionine:tRNA ribosyltransferase-isomerase; OS = Bacillus clausii OX=79880 GN=CHH72_21735 PE=3 SV=1
MMLIPTEKRLDADTPPEKRGQMRDGVRLLTYWSDSGRIVHGGFFQLAHQLEAGDVLVFNNSRTIPAELKTVDGIRVRLSREVEDGTWDGLILGESSKKLEFMHGLKALVTGPGTEPPLVRLVFSCSSSRLLRELYRQGDVIRYEHVARSWPLQDYQTVYASIPGSVEMPSAGRAFTWRMLAHLQKHGIRLAFVTLHAGLSYYGDDKWPNPALHPEAFSIEDEQAAIINDAKANGGRVIAVGTTVVRALETASDGNTIIPQAGVTSLYLSRTSKLTAVDGLLTGFHEQEASHIDLLQTFAGEEGVKAIYKEAVAKRYLWHEFGDMNLLMRQERS

SEQ ID NO: 63708 - protein, 342 aa, Bacillus coagulans
  REGION 1..342: note = tr|A0A133KWW5|A0A133KWW5_BACCO S-adenosylmethionine:tRNA ribosyltransferase-isomerase; OS = Bacillus coagulans OX=1398 GN=queA PE=3 SV=1
MKLDLFDYELPEELIAQTPLKNRSDSRLMVLDKKTGEIEHSVFKNITQYLRPGDCLVLNNTKVLPARLFGIKDETGAKIEVLLLKQLEGDRWETLVKPAKRVKTGTVIRFGDGQLSAVCAEELDHGGRVMEFQYEGIFYEVLNELGKMPLPPYIKEQLEDQDRYQTVYAKEPGSAAAPTAGLHFTEALLKEIEAMGVKIVYITLHVGLGTFRPVNEENIENHDMHAEFYQVSEEAARTITEVKENGGRVVSVGTTSTRTLETVASAHDGKIVASSGWTDIFIYPGYQYKAIDALITNFHLPKSTLIMMVSALAGRENILHAYETAVKEKYRFFSFGDAMLIK

SEQ ID NO: 63709 - protein, 342 aa, Bacillus coagulans
  REGION 1..342: note = tr|A0A0C5C6H8|A0A0C5C6H8_BACCO S-adenosylmethionine:tRNA ribosyltransferase-isomerase; OS = Bacillus coagulans OX=1398 GN=queA PE=3 SV=1
MKLDLFDYDLPEELIAQTPLKNRSDSRLMVLDKKTGEIEHSVFKNITQYLRPGDCLVLNNTKVLPARLIGIKDETGAKIEVLLLKQLEGDRWETLVKPAKRVKTGTVVRFGDGKLSAVCAEELDHGGRVMKFRYEGIFYEVLNELGKMPLPPYIKEQLEDQDRYQTVYAKEPGSAAAPTAGLHFTEALLKKIEAMGVKIVYITLHVGLGTFRPVNEENIENHDMHAEFYQVSEEAARTIMEVKENGGRVVSVGTTSTRTLETVASAHGGKIAASSGWTDIFIYPGYQYKAIDALITNFHLPKSTLIMMVSALAGRENILHAYETAVKEKYRFFSFGDAMLIK

SEQ ID NO: 63710 - protein, 342 aa, Bacillus coahuilensis
  REGION 1..342: note = tr|A0A147K719|A0A147K719_9BACI S-adenosylmethionine:tRNA ribosyltransferase-isomerase; OS = Bacillus coahuilensis p1.1.43 OX=1150625 GN=queA PE=3; SV = 1
MKVEDFDFYLPEELIAQTPLEERSKSRLMVIDKITGDIKHRVFEDILEDLHEGDCLVLNDTRVLPARLYGVKEETGAKVECLLLKQEEGDEWETLIKPAKRVKVGTVLTFGDGRLKAECVAEKDHGGRMMRFIYDGIFYEVLEELGEMPLPPYIRETLDDRDRYQTVFAKERGSAAAPTAGLHFTEDLLKKIGGKGVHIAFITLHVGLGTFRPVSVESIEEHDMHAEFYQMTEGTARLLNEVKERGGSIITVGTTSTRTLETIASKYDGQFREESGWTDIFIYPGYEFKGIDAMITNFHLPKSTLIMLVSALAGKEHVLHAYETAVKEKYRFFSFGDAMFIK

SEQ ID NO: 63711 - protein, 342 aa, Bacillus cohnii
  REGION 1..342: note = tr|A0A223KT89|A0A223KT89_9BACI S-adenosylmethionine:tRNA ribosyltransferase-isomerase; OS = Bacillus cohnii OX=33932 GN=queA PE=3 SV=1
MKVDLFDFHLPEELIAQIPLENREASRLMVLNKENGNVAHEPSFRSILQYVQAGDCLVLNDTRVLPARLFGMKEDTGAKVEVLLLKQEEGDVWETLVKPAKRVKKGTIITFGDGRLKAVCVEEKEHGGRMLEFQYEGIFYEVLEGLGEMPLPPYIKEQLDDQERYQTVFARERGSAAAPTAGLHFTEELLEEMRTKGVHIAFITLHVGLGTFRPVNVDNIEEHDMHAEFYQMTEETANELNTVRENGGRIITVGTTSTRTLETIVSEHGMFKEASGWTNIFIYPGYTFKAIDGMLTNFHLPKSTLIMLVSALAGRDNVIHAYEEAVKEKYRFFSFGDAMLIL

SEQ ID NO: 63712 - protein, 342 aa, unidentified
  source 1..342: note = Bacillus cucumis
  REGION 1..342: note = tr|A0A2N5H6X6|A0A2N5H6X6_9BACI S-adenosylmethionine:tRNA ribosyltransferase-isomerase; OS = Bacillus cucumis OX=1740721 GN=queA PE=3 SV=1
MKVDLFDFHLPEELIAQVPLKTRTDSRLMVLNKQTGEINHEVFKNITEYLREGDCLVLNDTKVLPARLFGVKSDTGAKIEVLLLKQQEGDQWETLVKPAKRVKIGTEIVFGDGLLTAVCIEESEHGGRVLEFKYTGIFYEVLDQLGEMPLPPYIKEQLEDRDRYQTVYAREPGSAAAPTAGLHFTESLLEEIKAKGVHIAFITLHVGLGTFRPVSVDDVLEHDMHAEFYTVTEGTAQLLNDVRQNGGRIITVGTTSTRTLETIASANNGVFTAGSGWTSIFIYPGYEFKAIDGMITNFHLPKSTLIMLVSALAGRENVLHAYNTAVAERYRFFSFGDAMFII

SEQ ID NO: 63713 - protein, 350 aa, unidentified
  source 1..350: note = Bacillus cytotoxicus
  REGION 1..350: note = sp|A7GTA0|QUEA_BACCN S-adenosylmethionine:tRNA ribosyltransferase-isomerase OS=Bacillus cytotoxicus (strain DSM 22905 / CIP 110041 / 391-98 / NVH 391-98); OX = 315749 G N=queA PE=3 SV=1
MDINLFDFHLPEELIAQTPLEKRETSRLMVLDRETGDIEHKHFSDILAYLHEGDCLVLNETKVMPARLHGVKEDTGAHIEVLLLKQEEGDTWETLVKPAKRVKEGTVISFGEGKLKATCVGTADQGGRQLEFSYDGIFYEILDELGEMPLPPYIKETLEDRDRYQTVYAKEIGSAAAPTAGLHFTEELLEKLQQKGVKLAFITLHVGLGTFRPVSTDKIEDHHMHAEYYHMSQETADLLNDVKVNGGRIITVGTTSTRTLETIATEHDGKLCGASGWTDIFMYPGYEFKAIDGLITNFHLPKSTLIMLVSAFAGRENVLHAYNEAVKEKYRFFSFGDAMFLASHAKERMK

SEQ ID NO: 63714 - protein, 350 aa, unidentified; identical to SEQ ID NO: 63713
  source 1..350: note = Bacillus cytotoxicus
  REGION 1..350: note = tr|A0A2S1AE43|A0A2S1AE43_9BACI S-adenosylmethionine:tRNA ribosyltransferase-isomerase; OS = Bacillus cytotoxicus OX=580165 GN=queA PE=3 SV=1

SEQ ID NO: 63715 - protein, 342 aa, Bacillus daliensis
  REGION 1..342: note = tr|A0A1H0BLA3|A0A1H0BLA3_9BACI S-adenosylmethionine:tRNA ribosyltransferase-isomerase; OS = Bacillus daliensis OX=745820 GN=queA PE=3 SV=1
MDVSQFDYELPEELIAQTPLRDREASRMLVLDKEKGSRMHEYFHQLTNYLEPGDTLVLNNTKVIPARLFGIKKDTGAKIEVLLLKEDIGHVWEALVKPAKRIKKGTVIEFGEGLLQAQCLEELPDGRRKLAFQFEGIFHEILDELGEMPLPPYIQQQLEEKDRYQTVFAKHRGSAAAPTAGLHFTETMIEKLKQNGIEIAYLTLHVGLGTFRPVSVEDVESHTMHAEFYNLPGSTADVLNETKNRGGRIIAVGTTSARTLETIARDQDGIFTGSTGWTDIFIYPGFEFRAIDGLLTNFHLPKSTLVMLVSALAGREAVLEAYKEAVAQKYRFFSFGDAMLII

SEQ ID NO: 63716 - protein, 342 aa, unidentified
  source 1..342: note = Bacillus deserti
  REGION 1..342: note = tr|A0A2N5M9H5|A0A2N5M9H5_9BACI S-adenosylmethionine:tRNA ribosyltransferase-isomerase; OS = Bacillus deserti OX=673318 GN=queA PE=3 SV=1
MKVDLFDFHLPEELIAQTPLEQRAESRLMVLDKETGEINHEIFKNIKNYLTPGDVLVLNDTKVLPARLFGIKTDTGAKIEVLLLKQQEGNKWEALVKPAKRIKEGTEILFGDGQLRAVCEDVGEHGGRILNFHYEGIFYEVLEELGQMPLPPYIKEQLEDQDRYQTVYARERGSAAAPTAGLHFTEELLAEIQEMGVHIAFITLHVGLGTFRPVSVEDIDEHEMHSEYYIMTEGTARLLNQVKQEGNRIITVGTTSTRTLESIAAKNGGVFKEESGWTNIFIYPGYEFKAIDGMITNFHLPKSTLIMLVSALAGRDHILHAYNTAVEERYRFFSFGDAMFIR

SEQ ID NO: 63717 - protein, 343 aa, unidentified
  source 1..343: note = Bacillus deserti
  REGION 1..343: note = tr|A0A2N5M0U3|A0A2N5M0U3_9BACI S-adenosylmethionine:tRNA ribosyltransferase-isomerase; OS = Bacillus deserti OX=673318 GN=CUU66_20895 PE=3 SV=1
MIPAKNRAFHLPPELNASVPPERRGINRDHVKMMVLDRKTGMYEHDHFYNIDRHLRPGDLIVLNNSRTIPAVLSASLKRSFITIVDKVEIRLARRKGEGVWDALIVSDKAKAGDILEFSDHLKAAILHIDKNKPLQTIKFSQTGGELFNSIYELGEPVRYEYIQTPWSLDYYQTVYATNPGSVEMPSAGRAFTWELLFKLQKKGIRIAFLQLHTGLSYLLDDKWIMNPAENSEEYDIPEATLQAIVQTKSEGGRVIAAGTTVVRALETAAAQVKRKGWTNLYIHSDFKLKAVDGIITGMHEPEASHLDMLSAFVKSEYLMRSYQDAISKEYLWHEFGDMNLII

SEQ ID NO: 63718 - protein, 341 aa, unidentified
  source 1..341: note = Bacillus enclensis
  REGION 1..341: note = tr|A0A0V8HMN6|A0A0V8HMN6_9BACI S-adenosylmethionine:tRNA ribosyltransferase-isomerase; OS = Bacillus enclensis OX=1402860 GN=queA PE=3 SV=1
MNVEDFDFHLPEELIAQTPLEHRSESRLMVLDKENGSIEHYRFKNIVDFLEEGDCLVLNDTKVLPARLFGQKGDTGANIEVLLLKQEDGDQWETLVKPAKRVRVGTEIVFGDGKLKAVCVGLKDHGGRILEFHYEGIFYEVLDELGEMPLPPYIRERLDEQDRYQTVFARERGSAAAPTAGLHFTEELLEDLRAKGIHIAFITLHVGLGTFRPVSVDNIEEHDMHAEFYQVSEGTARLLNEVKERGGRIITVGTTSTRTLETIASKHGEFVEENGWTNIFIYPGYEFKGIDGLITNFHLPKSTLIMLVSALAGRENVLNAYETAVREKYRFFSFGDAMFIK

SEQ ID NO: 63719 - protein, 338 aa, unidentified
  source 1..338: note = Bacillus enclensis
  REGION 1..338: note = tr|A0A1C4D578|A0A1C4D578_9BACI S-adenosylmethionine:tRNA ribosyltransferase-isomerase; OS = Bacillus enclensis OX=1402860 GN=GA0061094_3581 PE=3; SV = 1
MNEAIFEIPRQLNASAPVELTGKSRDEVKLMVLNRKTGSVEHSRFTQLHTQLKRGDVLVVNNSRTIPASLRGTQGSREVEVRLSRKVGSREWDALILGPVYDARLPITFADGVKAFMSGNGSEKPLVRLTFSVEGAGFYDFLYKNGQPIRYEYIDAPWPLDYYQNVYGSVPGSVEMASAGRAFSWKLITKLRAEGIEVVCLQLHAGLSYYGDDRWPNPVHHPEEYHLPQETADSIRRAKREGNRVIAVGTTVVRALETVAAGHDGNVAAASGVTNLYITKESPLRVVDGLITGLHEPEASHLDLLQAFISRQHLMSAYRTAVAKGYLWHEFGDMNLIL

SEQ ID NO: 63720 - protein, 342 aa, Bacillus endophyticus
  REGION 1..342: note = tr|A0A329EQ92|A0A329EQ92_9BACI S-adenosylmethionine:tRNA ribosyltransferase-isomerase; OS = Bacillus endophyticus OX=135735 GN=queA PE=3 SV=1
MKVDLFDFHLPEELIAQTPLKERDKSRLMVLDKKTGELAHDHFYNIGDYLQEGDCLVLNDTRVLPARLFGTKEETGANIEVLLLKQEEGDVWETLVKPAKRVRKGTVITFGDGRLKAICQEEMDQGGRMLEFHYEGIFYEVLESLGEMPLPPYIKERLEDRERYQTVYAREQGSAAAPTAGLHFTEDLIEQLKEKGVHIAFITLHVGLGTFRPVSAEDLEEHDMHAEFYQMTEGTAALLNNVKEQGGRIVSVGTTSTRTLETIASKHDGQFVASSGWTSIFIFPGYEFKAIDGMITNFHLPKSTLIMLISALAGRENVLHAYNKAVEEKYRFFSFGDAMFIR

SEQ ID NO: 63721 - protein, 342 aa, unidentified
  source 1..342: note = Bacillus endozanthoxylicus
  REGION 1..342: note = tr|A0A5J5HV50|A0A5J5HV50_9BACI tRNA preQ1(34) S-adenosylmethionine ribosyltransferase-isomerase QueA; OS = Bacillus endozanthoxylicus OX=2036016 GN=queA PE=4 SV=1
MKVDLFDFHLPEELIAQTPLLDRTSSRLMVLDKETGSITHDIFKHIRNYLKPGDCLVLNDTRVLPARLYGAKEDTGAKIEVLLLKQQENDQWETLVKPAKRIKKGAKIVFGNGLLTAVCIEELEHGGRILDFQYEGIFYEVLDQLGEMPLPPYIKEQLEDQDRYQTVYARERGSAAAPTAGLHFTEELLDEIRAAGIHIAFITLHVGLGTFRPVSVDDIDQHEMHSEFYQMTEGTAALLNEVRSSGGRIISVGTTSTRTLETIASEYNGRFEARSGWTDIFIYPGYEFKAIDGMITNFHLPKSTLIMLVSSLAGRKAVLNAYETAVQERYRFFSFGDAMLII

SEQ ID NO: 63722 - protein, 342 aa, unidentified
  source 1..342: note = Bacillus filamentosus
  REGION 1..342: note = tr|A0A3A5IYF7|A0A3A5IYF7_9BACI S-adenosylmethionine:tRNA ribosyltransferase-isomerase; OS = Bacillus filamentosus OX=1402861 GN=queA PE=3 SV=1
MKVDLFDFHLPEELIAQTPLKERDKSRLMVLDKKTGELAHDHFYNIGDYLQEGDCLVLNDTRVLPARLFGTKAETGANIEVLLLKQEEGDVWETLVKPAKRVRKGTVITFGDGRLKAICQEEMDQGGRMLEFHYEGIFYEVLESLGEMPLPPYIKERLEDRERYQTVYAREQGSAAAPTAGLHFTEELIEQLKEKGVHIAFITLHVGLGTFRPVSAEDLEEHDMHAEFYQMTEGTAALLNNVKAQGGRIVSVGTTSTRTLETIASKHDGQFVASSGWTSIFIFPGYEFKAIDGMITNFHLPKSTLIMLISALAGRENVLHAYNKAVEEKYRFFSFGDAMFIR

SEQ ID NO: 63723 - protein, 342 aa, unidentified
  source 1..342: note = Bacillus filamentosus
  REGION 1..342: note = tr|A0A1X7CVA1|A0A1X7CVA1_9BACI S-adenosylmethionine:tRNA ribosyltransferase-isomerase; OS = Bacillus filamentosus OX=1402861 GN=queA PE=3 SV=1
MKVDLFDFHLPEELIAQTPLKERDKSRLMVLDKKTGELAHDHFYNIGDYLQEGDCLVLNDTRVLPARLFGTKAETGANIEVLLLKQEEGDVWETLVKPAKRVRKGTVITFGDGRLKAICQEEMDQGGRMLEFHYEGIFYEVLESLGEMPLPPYIKERLEDRERYQTVYAREQGSAAAPTAGLHFTEELIEQLKEKGVHIAFITLHVGLGTFRPVSAEDLEEHDMHAEFYQMTEGTAALLNNVKEQGGRIVSVGTTSTRTLETIASKHDGQFVASSGWTSIFIFPGYEFKAIDGMITNFHLPKSTLIMLISALAGRENVLHAYNKAVEEKYRFFSFGDAMFIR

SEQ ID NO: 63724 - protein, 342 aa, Bacillus firmus
  REGION 1..342: note = tr|W7L410|W7L410_BACFI S-adenosylmethionine:tRNA ribosyltransferase-isomerase OS=Bacillus firmus DS1; OX = 1307436 GN=queA PE=3 SV=1
MKVDWFDFHLPEELIAQTPLADRTSSRLMVLDKKTGDIQHSVFKDIKNYLKAGDCLVLNDTKVLPARLFGEKTGTGAKIEVLLLKQIEGDSWETLVKPAKRVKEGTEITFGDGKLTAVCTGTSDHGGRVLEFRYQGIFYEVLEQLGEMPLPPYIKEQLDDRDRYQTVFARERGSAAAPTAGLHFTEQLLEEIKKMGVHIAFITLHVGLGTFRPVSVDDINEHEMHAEFYQVTEGTARLLNDVREQGGRIISVGTTSTRTLETIASAHNGHFAEASGWTDIFIYPGYDFKAIDGMITNFHLPKSTLIMLVSALAGRENVLNAYNQAVEERYRFFSFGDAMLIL

SEQ ID NO: 63725 - protein, 342 aa, Bacillus firmus
  REGION 1..342: note = tr|A0A366JWW3|A0A366JWW3_BACFI S-adenosylmethionine:tRNA ribosyltransferase-isomerase; OS = Bacillus firmus OX=1399 GN=queA PE=3 SV=1
MKVDWFDFHLPEELIAQTPLADRTSSRLMILDKKTGNLQHSVFKDIKNYLKSGDCLVLNDTKVLPARLFGEKTGTGAKIEVLLLKQLEGDSWETLVKPAKRVKEGTEITFGNGNLTAVCTGTSDHGGRVLEFKYDGIFYEVLEQLGEMPLPPYIKEQLDDRDRYQTVFARERGSAAAPTAGLHFTEELLEEIKEMGVHIAFITLHVGLGTFRPVNVEDLNEHEMHSEFYQVTEGTARLLNEVREHGGRIISVGTTSTRTLETIASLHNGRFEESSGWTDIFIYPGYEFKAIDGMITNFHLPKSTLIMLVSALAGRENVLNAYNQAVEERYRFFSFGDAMLIL

SEQ ID NO: 63726 - protein, 342 aa, Bacillus flexus
  REGION 1..342: note = tr|A0A4P8X5C3|A0A4P8X5C3_9BACI S-adenosylmethionine:tRNA ribosyltransferase-isomerase; OS = Bacillus flexus OX=86664 GN=queA PE=3 SV=1
MKVDLFDFHLPEELIAQTPLEKRDASRLMVVNKETGEVRHHMFQDLLDYLQEGDCLVLNDTRVLPARLFGTKEDTGANIEVLLLKQTEGDMWETLVKPAKRVKEGTVISFGDGRLTAVCKGVSDQGGRLLEFKYDGIFYEVLEQLGEMPLPPYIKERLDDRERYQTVFAREQGSAAAPTAGLHFTEEMLEEIKVKGVHIAFLTLHVGLGTFRPVSVDDLEEHDMHAEYYQVSEETASLLNSVREQGGRIISVGTTSTRTLETIATEHDGVFKASSGWTSIFIFPGYEFKAIDGMITNFHLPKSTLIMLVSALAGREHIIGAYETAVKEKYRFFSFGDAMLIL

SEQ ID NO: 63727 - protein, 342 aa, Bacillus foraminis
  REGION 1..342: note = tr|A0A4R2BFE0|A0A4R2BFE0_9BACI S-adenosylmethionine:tRNA ribosyltransferase-isomerase; OS = Bacillus foraminis OX=279826 GN=queA PE=3 SV=1
MKVDLFDFHLPEELIAQVPLMERAKSRLMVLDKQTGEVQHSTFKNIKEYLRPGDCLVLNDTRVLPARLFGMKEDTGAKIEVLLLKQLEGDRWETLVKPAKRVKEGTKLVFGDGLLSAVCTGTSDHGGRELEFSYKGIFYEVLEELGEMPLPPYIKEQLDDKERYQTVFAKERGSAAAPTAGLHFTEALLEELKEMGVLITFITLHVGLGTFRPVSAESVDEHEMHAEFYQVSEGTARLLNEVREKGGRIVTVGTTSTRTLETIASANDGKFIGASGWTDIFIFPGYEFKGIDGMITNFHLPKSTLIMLVSALAGRENVLHAYNLAVKDRYRFFSFGDAMLIL

SEQ ID NO: 63728 - protein, 342 aa, Bacillus fortis
  REGION 1..342: note = tr|A0A443J420|A0A443J420_9BACI S-adenosylmethionine:tRNA ribosyltransferase-isomerase; OS = Bacillus fortis OX=254758 GN=queA PE=3 SV=1
MKVDMFDFDLPEELIAQTPLKNRSSSRLMVLNKLTGEIKHETFSKLIDYLNPGDCLVLNDTKVLPARLFGIKTDTGAKVEVLLLKQVHGDCWETLVKPAKRVKTGTVISFGDGQLKAVCTGTEEHGGRLFEFQYEGIFYEILDALGKMPLPPYIKEQLEDQDRYQTVYARERGSAAAPTAGLHFTNELLENIKEKGVHVTFITLHVGLGTFRPVSVDSVEDHDMHAEFYRMSEETADLLNKVKKDGGRIISVGTTSTRTLETIAGANDGLFIAGSGWTDIFIYPGYTFQAVDGLVTNFHLPMSTLIMLVSALAGREHILHAYETAVQEKYRFFSFGDAMLII

SEQ ID NO: 63729 - protein, 342 aa, unidentified
  source 1..342: note = Bacillus freudenreichii
  REGION 1..342: note = tr|A0A3S4TUA0|A0A3S4TUA0_9BACI S-adenosylmethionine:tRNA ribosyltransferase-isomerase; OS = Bacillus freudenreichii OX=1783501 GN=queA PE=3 SV=1
MKVEMFDFDLPEELIAQVPLEDRSSSRLMVLNKRTGALRHETFSHVIDYLNPGDCLVLNDTKVLPARLFGTKKDTGAKVEVLLLKQVNGDRWETLVKPAKRVKIGTEIIFGDGQLRAVCTGMEEHGGRLFEFQYDGIFYEILDALGKMPLPPYIKEQLEDQDRYQTVYARERGSAAAPTAGLHFTNNMIEKIKEKGVHVTFITLHVGLGTFRPVSAESVEDHDMHAEFYRMSEETASLLNDVKKSGGRIISVGTTSTRTLETIASANDGLFKPGSGWTDIFIFPGYKFQAIDGLITNFHLPMSTLIMLVSALAGREHVLHAYNTAVQEKYRFFSFGDAMLVL

SEQ ID NO: 63730 - protein, 350 aa, unidentified
  source 1..350: note = Bacillus gaemokensis
  REGION 1..350: note = tr|A0A073KIT6|A0A073KIT6_9BACI S-adenosylmethionine:tRNA ribosyltransferase-isomerase; OS = Bacillus gaemokensis OX=574375 GN=queA PE=3 SV=1
MDINLFDFHLPEELIAQTPLEERETSRLMVLDRETGDIEHKHFTDILSYLHEGDCLVLNETKVMPARLHGVKEDTGAHIEVLLLKQEDGDKWETLVKPAKRVKEGTVISFGEGKLKATCIGTADQGGRQLEFSYDGIFYEILDELGEMPLPPYIKETLEDRDRYQTVYAKEIGSAAAPTAGLHFTEELLEKLKQKGVGLAFITLHVGLGTFRPVSADTIEEHHMHAEYYHMSEETAELLNRVKENGGRIITVGTTSTRTLETIATDHDGKLCAASGWTDIFMYPGYEFKAIDGLITNFHLPKSTLIMLVSAFSNRENVLHAYNEAVKEKYRFFSFGDAMFVASHLKTRNK

SEQ ID NO: 63731 - protein, 342 aa, Bacillus galactosidilyticus
  REGION 1..342: note = tr|A0A178A263|A0A178A263_9BACI S-adenosylmethionine:tRNA ribosyltransferase-isomerase; OS = Bacillus galactosidilyticus OX=217031 GN=queA PE=3 SV=1
MKLEQFDFELPEELIAQVPLENRSSSRLMVLDKETGKISHETFHNLIAFLRKGDCLVLNDTKVLPARLFGLKVDTGAKVEVLLLKQLNGDQWETLVKPAKRLKKGMTLTFGDGQLKAVCLDELEHGGRILEFQYEGIFYEVLDQLGKMPLPPYIKTQLEDQDRYQTVYAKERGSAAAPTAGLHFTEDLLKQIQDQGIRVAYITLHVGLGTFRPVNVDEIEEHDMHSEFYRMSKETADLLNQTREEGGRIISVGTTSTRTLETIASSHQGHFVETNGWTDIFIYPGYEFKAIDGMITNFHLPKSTLIMLVSALAGREHVLYAYKEAVREKYRFFSFGDAMLLI

SEQ ID NO: 63732 - protein, 342 aa, Bacillus ginsengihumi
  REGION 1..342: note = tr|A0A0A6VH09|A0A0A6VH09_9BACI S-adenosylmethionine:tRNA ribosyltransferase-isomerase; OS = Bacillus ginsengihumi OX=363870 GN=queA PE=3 SV=1
MKIDLFDFDLPESLIAQTPLKNRSDSRLMVLDKKTGEIEHTVFKNITEYLHPGDCLVLNDTKVLPARLFGVKEDTGANIEVLLLKQQENDQWETLVKPAKRVKAGTEIIFGEGKLKATCIEELDHGGRIMKFDYEGIFYEVLNELGEMPLPPYIKEQLDDQDRYQTVYAREVGSAAAPTAGLHFTESLLKEIEKMGVKIIFITLHVGLGTFRPVSVDEIENHDMHAEFYQVSEEAAKAIMDVKKNGGRVISVGTTSTRTLETIASEHDGNIVATSGWTDIFIYPGYEFKGIDAMITNFHLPKSTLIMLVSALAGREHVLHAYETAVKEQYRFFSFGDAMFIK

SEQ ID NO: 63733 - protein, 342 aa, unidentified
  source 1..342: note = Bacillus glycinifermentans
  REGION 1..342: note = tr|A0A1C3SHG5|A0A1C3SHG5_9BACI S-adenosylmethionine:tRNA ribosyltransferase-isomerase; OS = Bacillus glycinifermentans OX=1664069 GN=queA PE=3 SV=1
MKVDLFDFDLPERLIAQVPLKERDASRLMVLDKKTGDITHSTFKHIIDFLNPGDLLVLNDTRVLPARLFGIKEETGAKVEVLLLKQEEGDVWETLVKPAKRVKKGTVLTFGDGRLTAVCKEELDHGGRKIEFRYEGIFYEVLDSLGEMPLPPYIKEQLDDKERYQTVYSKKQGSAAAPTAGLHFTEEILKALEEKGVQIAFITLHVGLGTFRPVSAENVEEHDMHAEFYEMTEETAAILNRVKEDGGRIISVGTTSTRTLETIASENDGRFKEARGWTSIFIYPGYTFKAIDGMITNFHLPKSSLIMLVSALAGREHILSAYRTAVEHEYRFFSFGDAMLIQ

SEQ ID NO: 63734 - protein, 342 aa, unidentified
  source 1..342: note = Bacillus glycinifermentans
  REGION 1..342: note = tr|A0A0J6ES92|A0A0J6ES92_9BACI S-adenosylmethionine:tRNA ribosyltransferase-isomerase; OS = Bacillus glycinifermentans OX=1664069 GN=queA PE=3 SV=1
MKVDLFDFDLPERLIAQVPLKERDASRLMVLDKKTGDITHSSFKHIIDFLNPGDLLVLNDTRVLPARLFGIKEETGAKVEVLLLKQEEGDVWETLVKPAKRVKKGTVLTFGDGRLTAVCKEELDHGGRKIEFRYEGIFYEVLDSLGEMPLPPYIKEQLDDKERYQTVYSKKQGSAAAPTAGLHFTEEILKELEEKGVQIAFITLHVGLGTFRPVSADNVEEHDMHAEFYEMTEETAAILNRVKEDGGRIISVGTTSTRTLETIASENDGRFKEARGWTSIFIYPGYTFKAIDGMITNFHLPKSSLIMLVSALAGREHILSAYRTAVEHEYRFFSFGDAMLIQ

SEQ ID NO: 63735 - protein, 344 aa, unidentified
  source 1..344: note = Bacillus gobiensis
  REGION 1..344: note = tr|A0A0M3RAL4|A0A0M3RAL4_9BACI S-adenosylmethionine:tRNA ribosyltransferase-isomerase; OS = Bacillus gobiensis OX=1441095 GN=AM592_18935 PE=3 SV=1
MNTSLMKFHIPEALHAADPPEKRLSARDQVKLLVLDRQTGKFKHDQFVHIRSYLEKGDLLIFNNSRTIPAVLRANHNGKSVEVRLSRRLSDSEWDVLLPESRLNIGENLKFSNGVSAIITGYGSVPPLVKIDFPARGTDLLHLFYETGDPIRYEYIHHPWPLEAYQTVFATAPGSVEMPSAGRAFSWKLIKDLKKEGIGIAFLSLHAGLSYYGNDKWPSPKKHPETYSVPKSTAEKINEAKRNGKRVIAVGTTVVRALETAAGANGLVEAEEGTTSLYVTKNYPLRAADGLITGFHEPEASHLDMLTSFVQEEFLLSAYQNAISKNYLWHEFGDMNIILPLKGK

SEQ ID NO: 63736 - protein, 342 aa, unidentified
  source 1..342: note = Bacillus gobiensis
  REGION 1..342: note = tr|A0A0M4FJU1|A0A0M4FJU1_9BACI S-adenosylmethionine:tRNA ribosyltransferase-isomerase; OS = Bacillus gobiensis OX=1441095 GN=queA PE=3 SV=1
MKVNLFDFDLPEHLIAQVPLQERDASRLMVLDKKTGEITHSAFKEITSFFKPGDCLVLNNTRVLPARLHGHKPETGGNVEVLLLKQEENDTWETLAKPARRVKIGTKLSFGDGRLTAECIGEKDHGGRILRFSYQGIFYEVLESLGEMPLPPYIKEQLGDKERYQTVYSKEAGSAAAPTAGLHFTEEILTDLEEKGVYVAYITLHVGLGTFRPVNADDIEAHEMHAEFYEMNTETAELLNRVKKEGGRIVAVGTTSTRTMETIAQNYDGRFEASSGWTSIFIYPGYTFQAIDAMITNFHLPKSSLIMLVSALATRENILHAYEEAVRNEYRFFSFGDAMLIK

SEQ ID NO: 63737 - protein, 347 aa, Bacillus halodurans
  REGION 1..347: note = sp|Q9KDI6|QUEA_BACHD S-adenosylmethionine:tRNA ribosyltransferase-isomerase OS=Bacillus halodurans (strain ATCC BAA-125 / DSM 18197 / FERM 7344 / JCM 9153 / C-125) O X=272558 GN=queA PE=3 SV=1
MNVRDFDFHLPEKLIAQTPLKDRTASRLLVLDKHTGAVEDKKFPDLLQFIEAGDCLVLNDTRVLPARLFGVKEETGAQVEVLLLKQMEGDRWETLVKPAKRLKVGTIIRFGNGELTATCVQELEHGGRVLEFSYEGIFHEVLDQLGEMPLPPYIKEQLDDKDRYQTVFAKNRGSAAAPTAGLHFTEELLDQLKQKGVHLAFITLHVGLGTFRPVSVEEIEEHEMHAEFYQMSAGTARLLNEVKRQGGRIIAVGTTSARTLETIRQEHDEFVETSGWTSIFIYPGYEFKGIDGLITNFHLPKSTLVMLVSALAGRENLLNAYAHAVKQSYRFFSFGDAMFIYDKKTNS

SEQ ID NO: 63738 - protein, 336 aa, Bacillus halodurans
  REGION 1..336: note = tr|Q9KAS6|Q9KAS6_BACHD S-adenosylmethionine:tRNA ribosyltransferase-isomerase OS=Bacillus halodurans (strain ATCC BAA-125 / DSM 18197 / FERM 7344 / JCM 9153 / C-125)OX=272558 GN=BH2211 PE=3 SV=1
MNHAPTFSIPDHLNASEPIERQGKQRSDVRMLVLDRDSHRTFHEPFTAIANYLQQGDVLVLNRSRTIPSRLIGSLHGETIELRLSHERRDGLWDGLILSSSELHAGDRIFLSSSLSATLIEKDEHTPLWRVAFSKRGAQLLEYVYRYGEPIGYEYIKSSLSIQDYQTVYSSAPGSVEMCSAGRPFTWQLLARLKQKGVRIAFLELHTGLSYYENDVWPDPAHHPEHYHIPKETIEELKKGKRIIAVGTTVVRALETYAQTNRSQGTTTLSIDAGYELQLATGLLTGFHEPQASHLHMLAAFVQEQELFRVYEQAIRQGYQWHEFGDVNFILPLGDM

SEQ ID NO: 63739 - protein, 342 aa, unidentified
  source 1..342: note = Bacillus halotolerans
  REGION 1..342: note = tr|A0A3Q9RXM3|A0A3Q9RXM3_9BACI S-adenosylmethionine:tRNA ribosyltransferase-isomerase; OS = Bacillus halotolerans OX=260554 GN=queA PE=3 SV=1
MKVDLFDFELPERLIAQVPLVQRDASRLMVLDKHTGELTDSSFKQIISFFKEGDCLVLNNTRVLPARLFGTKEDTGAKVELLLLKQEAGDRWETLVKPAKRVKKGTVVTFGDGRLKAVCTEELEHGGRKVEFQYDGIFYEVLESLGEMPLPPYIKEQLDDRERYQTVFSKEIGSAAAPTAGLHFTEDILQQLKDKGVQIEFITLHVGLGTFRPVSADEVEEHNMHAEFYQMSEETAAALNSVREKGGRIISVGTTSTRTLETIAGEHDGRFKASSGWTSIFIYPGYEFKAIDGMITNFHLPKSSLIMLVSALAGRENVLRAYNHAVEEEYRFFSFGDAMLII

SEQ ID NO: 63740 - protein, 342 aa, unidentified
  source 1..342: note = Bacillus halotolerans
  REGION 1..342: note = tr|A0A2S9WN15|A0A2S9WN15_9BACI S-adenosylmethionine:tRNA ribosyltransferase-isomerase; OS = Bacillus halotolerans OX=260554 GN=queA PE=3 SV=1
MKVDLFDFELPERLIAQVPLEQRDASRLMVLDKHTGELTDSSFKQIISFFKEGDCLVLNNTRVLPARLFGTKEDTGAKVELLLLKQEAGDRWETLVKPAKRVKKGTVVTFGDGRLKAVCTEELEHGGRKVEFQYDGIFYEVLESLGEMPLPPYIKEQLDDRERYQTVFSKEIGSAAAPTAGLHFTEDILQQLKDKGVQIEFITLHVGLGTFRPVSADEVEEHNMHAEFYQMSEETAAALNSVREKGGRIISVGTTSTRTLETIAGEHDGRFKASSGWTSIFIYPGYEFKAIDGMITNFHLPKSSLIMLVSALAGRENVLRAYNHAVEEEYRFFSFGDAMLII

SEQ ID NO: 63741 - protein, 342 aa, unidentified
  source 1..342: note = Bacillus haynesii
  REGION 1..342: note = tr|W7RUU2|W7RUU2_9BACI S-adenosylmethionine:tRNA ribosyltransferase-isomerase OS=Bacillus haynesii; OX = 1925021 GN=queA PE=3 SV=1
MKVELFDFDLPERLIAQVPLKERDASRLMVLDKKTGEITHSTFKHVIDFLNAGDCIVLNDTRVLPARLYGVKEETGAKVEVLLLKQEEGDVWETLVKPAKRVKRGTVLSFGDGRLTAVCTDELEHGGRKIEFRYEGIFYEVLESLGEMPLPPYIKEQLDDRERYQTVYSKKQGSAAAPTAGLHFTEEILDALRKKGVHIAFITLHVGLGTFRPVSADNVEEHDMHAEFYEMSEETAALLNRVKQDGGRIISVGTTSTRTLETIASEHDGRFLEARGWTSIFIYPGYTFRAIDGMITNFHLPKSSLIMLVSALAGREHVLSAYRTAVEQEYRFFSFGDAMLIK

SEQ ID NO: 63742 - protein, 342 aa, unidentified
  source 1..342: note = Bacillus haynesii
  REGION 1..342: note = tr|A0A1R1RH28|A0A1R1RH28_9BACI S-adenosylmethionine:tRNA ribosyltransferase-isomerase; OS = Bacillus haynesii OX=1925021 GN=queA PE=3 SV=1
MKVELFDFDLPERLIAQVPLKERDASRLMVLDKKTGEITHSTFKHVIDFLNAGDCIVLNDTRVLPARLYGVKEETGAKVEVLLLKQEEGDVWETLVKPAKRVKRGTVLSFGDGRLTAVCTDELEHGGRKIEFRYEGIFYEVLESLGEMPLPPYIKEQLDDRERYQTVYSKKQGSAAAPTAGLHFTEEILDALRKKGVHIAFITLHVGLGTFRPVSADNVEEHDMHAEFYEMSEETAALLNRVRQDGGRIISVGTTSTRTLETIASEHDGRFLEARGWTSIFIYPGYTFRAIDGMITNFHLPKSSLIMLVSALAGREHVLSAYRTAVEQEYRFFSFGDAMLIK

SEQ ID NO: 63743 - protein, 341 aa, Bacillus hemicellulosilyticus
  REGION 1..341: note = tr|W4QEC7|W4QEC7_9BACI S-adenosylmethionine:tRNA ribosyltransferase-isomerase OS=Bacillus hemicellulosilyticus JCM 9152 OX=1236971 GN=queA PE=3 SV=1
MNVEEFDFDLPEELIAQTPLLDRTASRLLVLDRKQEDMKDRTFTNVLDELQAGDCLVLNDSRVLPARLYGTKHETGAHIEVLLLKQEEGHVWETLVKPAKRVKEGTVIVFGNGQLRAKCVGEAEHGGRMLEMKFEGIFHEVLEELGEMPLPPYIKEKLPDQERYQTVYSKHSGSAAAPTAGLHFTNELLEEVKAKGVHVAFITLHVGLGTFRPVSVDTIEEHKMHAEFYQMSEQTAQLLNSAREQGGRIIAVGTTSARTLETIMSEHRTFKECSGWTSIFIYPGYEFKGIDGLLTNFHLPKSTLMMLVSAFGGTDFMMGAYAHAIRERYRFFSFGDAMLIV

SEQ ID NO: 63744 - protein, 342 aa, unidentified
  source 1..342: note = Bacillus hisashii
  REGION 1..342: note = tr|A0A267TQ71|A0A267TQ71_9BACI S-adenosylmethionine:tRNA ribosyltransferase-isomerase; OS = Bacillus hisashii OX=996558 GN=queA PE=3 SV=1
MKLEDFDYYLPDELIAQTPLQDRAASRLMVLNKQTGEIEHKIFSDIIHYLNPGDCLVLNDTKVMPARLFGMKEDTNAHVEVLLLKQIEGDKWETLVKPAKRIKPGTVISFGGGKLHAKCIDTLEYGGRIFEFQYDGIFYEILDELGEMPLPPYIKKRLDDADRYQTVYAREIGSAAAPTAGLHFTEKLLADIKNKGVHIAFITLHVGLGTFRPVNVESIEEHEMHAEFYHMTEETANLLNEVKKNGRRIISVGTTSTRTLETIAARHNGSFVAESGWTDIFIYPGFQFKAIDCLITNFHLPKSTLIMLVSALAGREHILHAYETAVKERYRFFSFGDAMFIH

SEQ ID NO: 63745 - protein, 342 aa, Bacillus horikoshii
  REGION 1..342: note = tr|A0A1Y0CQD5|A0A1Y0CQD5_9BACI S-adenosylmethionine:tRNA ribosyltransferase-isomerase; OS = Bacillus horikoshii OX=79883 GN=queA PE=3 SV=1
MKIDLFDFHLPEELIAQTPLEQREASRLMVLNKQTGNLTHEPTFRSILDYVKEGDCLVLNDTRVLPARLFGVKSETGAKIEVLLLKQLEGDTWETLIKPAKRVKEGTVVSFGDGRLTAICTGESEHGGRKLDFRYEGIFYEVLDSLGEMPLPPYIKEQLEDRDRYQTVFARETGSAAAPTAGLHFTEELLDALKDKGVHTAFITLHVGLGTFRPVSVDSVEEHDMHAEFYQMSEGTARLLNDVRSNGGRIITVGTTSTRTLETIARDHGEFKEASGWTNIFIYPGYKFAAIDGMITNFHLPKSTLIMLVSALAGRENVMHAYEEAVKERYRFFSFGDAMLIL

SEQ ID NO: 63746 - protein, 342 aa, Bacillus horikoshii
  REGION 1..342: note = tr|A0A5D4T7J3|A0A5D4T7J3_9BACI S-adenosylmethionine:tRNA ribosyltransferase-isomerase; OS = Bacillus horikoshii OX=79883 GN=queA PE=3 SV=1
MKIDLFDFHLPEELIAQTPLEQREASRLMVLNKQTGNLTHEPTFRSILDYVKEGDCLVLNDTRVLPARLFGVKSETGAKIEVLLLKQLEGDTWETLIKPAKRVKEGTVVSFGDGRLTAICTGESEHGGRKLDFRYDGIFYEVLDSLGEMPLPPYIKEQLEDRDRYQTVFARETGSAAAPTAGLHFTEELLDALKDKGVHTAFITLHVGLGTFRPVSVISVEEHDMHAEFYQMSEGTARLLNDVRSNGGRIITVGTTSTRTLETIARDHGEFKEASGWTNIFIYPGYKFAAIDGMITNFHLPKSTLIMLVSALAGRENVMHAYEQAVKERYRFFSFGDAMLIL

SEQ ID NO: 63747 - protein, 342 aa, Bacillus horneckiae
  REGION 1..342: note = tr|A0A2N0ZAU5|A0A2N0ZAU5_9BACI S-adenosylmethionine:tRNA ribosyltransferase-isomerase; OS = Bacillus horneckiae OX=549687 GN=queA PE=3 SV=1
MKVDLFDFHLPEELIAQTPLKERANSRLMVLNKETGELQHDTFKNIKDYLKQGDALVLNDTRVLPARLFGVKEDTGAKIEVLLLKQQAGDRWETLIKPAKRVKVGTTLIFRDGLLRAQCIEESDHGGRILDFQYDGIFYEVLDRLGEMPLPPYIKEQLEDRDRYQTVYARENGSAAAPTAGLHFTEALLQEIREMGVELLFITLHVGLGTFRPVSVDEVTEHDMHAEFYHMTAETADRLNEVRANGGKIISVGTTSTRTLETIATAHNGHFTEASGWTDIFIYPGYEFKAIDGMITNFHLPKSTLIMLISALAGREHVLHAYNRAVEERYRFFSFGDAMLIK

SEQ ID NO: 63748 - protein, 345 aa, Bacillus horneckiae
  REGION 1..345: note = tr|A0A2N0Z8C6|A0A2N0Z8C6_9BACI S-adenosylmethionine:tRNA ribosyltransferase-isomerase; OS = Bacillus horneckiae OX=549687 GN=CWS20_27625 PE=3 SV=1
MKAAARSFLIPNYLNANTPAEYRGIQRDHVRLMTLDPVTGETFHNFFYQLNACLREGDLLVLNNSRTIPAVLKGKKQKQAIELHLSRKLSNHEWEGLIVGGVFTIGEKIDFPGDLTATITGLGNEAPLIILSFSKGGLDLYDAIYRYGEPLHYEYIETPWPLEMYQTVYASVPGSVEMPSAGRAFSWKLLNKLKQKGVKIAFVQLHAGLSYYGNDRWPNPSKHLEVFCVPKETAELVNKTKKNNGRVIAVGTTVVRALETAVNNAGNVEAQEGITRLYIQKGYPLKAVDGLLTGFHEPEASHLDLLTAFIEEDYLMKAYNEALTTGYLWHEFGDMNLILPMEEKL

SEQ ID NO: 63749 - protein, 348 aa, Bacillus hwajinpoensis
  REGION 1..348: note = tr|A0A4U1MIV3|A0A4U1MIV3_9BACI S-adenosylmethionine:tRNA ribosyltransferase-isomerase; OS = Bacillus hwajinpoensis OX=208199 GN=queA PE=3 SV=1
MKVNDFDFELPERLIAQVPLKERTKSRLMVLDPAEQKLEHREFSNLEDYIKPGDCLVLNDTRVMPARLYGTKEETGAKIEVLLLKQLENDSWETLVKPAKRVKPGTEISFGDGRLTAICIESLEHGGRVLEFKYDGVFYEVLDQLGEMPLPPYITETLDDQERYQTVFAKNRGSAAAPTAGLHFTEEMLERLENKGVHVAFITLHVGLGTFRPVSVDNILEHEMHGEFYQLTKGTAELLNRVKDEGGRIISVGTTSTRTLETVASSHEGRFEEASGWTDIFIYPGYTFKAIDGLITNFHLPQSTLIMLVSALAGREFIISAYRKAVEEEYRFFSFGDAMLILEGSTKE

SEQ ID NO: 63750 - protein, 342 aa, Bacillus indicus
  REGION 1..342: note = tr|A0A084GWX5|A0A084GWX5_BACID S-adenosylmethionine:tRNA ribosyltransferase-isomerase; OS = Bacillus indicus OX=246786 GN=queA PE=3 SV=1
MKVDLFDFDLPEELIAQVPLLERDASRLMVLDKESGSVEHGKFKSIIDYFHEGDCLVLNNTRVLPARLIGEKKDTGAKIELLLLKQEQGDVWEVLAKPAKRVKVGTEIVFGDGILRAVCTGEADHGGRMLEFKYEGIFYEALDSLGKMPLPPYIKEQLDDQERYQTVFSREVGSAAAPTAGLHFTEEILEALKEKGVHLAFITLHVGLGTFRPVSADVVEEHEMHAEFYQMSAGTAQLLNQVREKGGRIISVGTTSTRTLETIASANNGTFKEDSGWTSIFIYPGYEFKAIDGMVTNFHLPKSSLIMLVSALATREHVMHAYETAVKEKYRFFSFGDAMLII

SEQ ID NO: 63751 - protein, 342 aa, Bacillus infantis
  REGION 1..342: note = tr|U5LGD1|U5LGD1_9BACI S-adenosylmethionine:tRNA ribosyltransferase-isomerase OS=Bacillus infantis NRRL B-14911 OX=1367477 GN=queA PE=3 SV=1
MKVEMFDFHLPEELIAQTPLEDRTSSRLMVLDKEDGALQHETFKNLPEYLNPGDCLVLNDTRVLPARLFGAKEGTGAKIEVLLLKQQEGDVWETLIKPAKRVKEGTRIEFGDGLLSAVCTGTEEQGGRLLKFNYEGIFYEVLEQLGEMPLPPYIKEQLDDRERYQTVYAKERGSAAAPTAGLHFTEELLDEIREKGVHIAFITLHVGLGTFRPVSVEDIHEHSMHAEYYQVTEGTARLLNEVRENGGRIITVGTTSTRTLETIADANEGRLEAGSGWTSIFIYPGYEFKAIDGMITNFHLPKSTLIMLISALAGRENVLNAYNEAVKERYRFFSFGDAMLII

SEQ ID NO: 63752 - protein, 342 aa, Bacillus infantis
  REGION 1..342: note = tr|A0A5D4SS94|A0A5D4SS94_9BACI S-adenosylmethionine:tRNA ribosyltransferase-isomerase; OS = Bacillus infantis OX=324767 GN=queA PE=3 SV=1
MKVEMFDFHLPEELIAQTPLEDRTSSRLMVLDKEDGALQHETFKNLPEYLNPGDCLVLNDTRVLPARLFGAKEGTGAKIEVLLLKQQEGDVWETLIKPAKRVKEGTRIEFGDGLLSAVCTGTEEQGGRLLKFNYEGIFYEVLEQLGEMPLPPYIKEQLDDRERYQTVYAKERGSAAAPTAGLHFTEELLDEIREKGVHIAFITLHVGLGTFRPVSVEDIHEHSMHAEYYQVTEGTARLLNEVRENGGRIITVGTTSTRTLETIADANEGRFEAGSGWTSIFIYPGYEFKAIDGMITNFHLPKSTLIMLISALAGRENVLNAYNEAVKERYRFFSFGDAMLII

SEQ ID NO: 63753 - protein, 342 aa, unidentified
  source 1..342: note = Bacillus intestinalis
  REGION 1..342: note = tr|A0A136GCY7|A0A136GCY7_9BACI S-adenosylmethionine:tRNA ribosyltransferase-isomerase; OS = Bacillus intestinalis OX=1963032 GN=queA PE=3 SV=1
MKVDLFDFELPERLIAQVPLEQRDASRLMVLDKHTGELTDSSFKHIISFFNEGDCLVLNNTRVLPARLFGTKEDTGAKVELLLLKQEAGDRWETLAKPAKRVKKGTVVTFGDGRLKAVCTEELEHGGRKMEFQYDGIFYEVLESLGEMPLPPYIKEQLDDRERYQTVYSKEIGSAAAPTAGLHFTEEILQQLKDKGVQIEFITLHVGLGTFRPVSADDVEEHNMHAEFYQMSEETAAALNKVREKGGRIISVGTTSTRTLETIAGEHDGQFKASSGWTSIFIYPGYEFKAIDGMITNFHLPKSSLIMLVSALAGRENVLRAYNHAVEEEYRFFSFGDAMLIL

SEQ ID NO: 63754 - protein, 342 aa, Bacillus koreensis
  REGION 1..342: note = tr|A0A0M0L7E6|A0A0M0L7E6_9BACI S-adenosylmethionine:tRNA ribosyltransferase-isomerase; OS = Bacillus koreensis OX=284581 GN=queA PE=3 SV=1
MKIDLFDFNLPEELIAQTPLEKRDASRLMVVNKETGELHHEHFHNIIEHLNEGDCLVLNDTRVLPARLFGTKDETGANVEVLLLKQEEGNEWETLVKPARRIKVGTTITFGDGRLTAVCTREGNQGGRHLEFKYEGIFYEILEQLGEMPLPPYIKERLDDRERYQTVYAREEGSAAAPTAGLHFTEELLEKIKQKGVHVAFITLHVGLGTFRPVSADTIEDHDMHAEFYQMSEGTAALLNKVKEEGGRIVSVGTTSTRTLETIATAHDGKFVASSGWTSIFIFPGYEFKGISGMITNFHLPKSTLVMLVSALAGRENILHAYNTAVEERYRFFSFGDAMLII

SEQ ID NO: 63755 - protein, 341 aa, Bacillus krulwichiae
  REGION 1..341: note = tr|A0A1X9M710|A0A1X9M710_9BACI S-adenosylmethionine:tRNA ribosyltransferase-isomerase; OS = Bacillus krulwichiae OX=199441 GN=queA PE=3 SV=1
MNVEDFSFDLPEELIAQTPLPDRTASRLLVLDKKTGETKDCQFVSIIDELNEGDCLVLNDTRVLPARLYGIKADTGANIEVLLLKQVEGDLWETLVKPAKRVKKGTKIQFGDGRLVAVCTGEADHGGRILRMEYSGIFHEVLDALGEMPLPPYIKETLPDQERYQTVFAKNRGSAAAPTAGLHFTNELLEKIKQKGVHIAFITLHVGLGTFRPVSVEKIEEHEMHSEFYQMSAGTAQLLQSVRENNKRVIAVGTTSARTLETIVSEHGDYKEASGWTSIFIYPGYDVKGFDGLLTNFHLPKSTLVMLVSAVAGREHILNAYRHAVKERYRFFSFGDAMFIR

SEQ ID NO: 63756 - protein, 342 aa, unidentified
  source 1..342: note = Bacillus kyonggiensis
  REGION 1..342: note = tr|A0A4U1DDJ3|A0A4U1DDJ3_9BACI S-adenosylmethionine:tRNA ribosyltransferase-isomerase; OS = Bacillus kyonggiensis OX=1037680 GN=queA PE=3 SV=1
MKVDLFDFHLPEELIAQTPLQDRTSSRLMVLNKETGEIEHETFKNIKNYLRAGDCIVLNDTRVLPARLFGEKEDTGAKIEVLLLKQVEGDTWETLVKPAKRIKEGSVITFGNGLLSAICVGEKEHGGRLLKFSYEGIFYEVLEALGEMPLPPYIKEQLEDKDRYQTVYAKERGSAAAPTAGLHFTETLLEELKEMGVHIAFITLHVGLGTFRPVSVDDIDEHEMHAEFYQVSEETATLLNEVRQNGGRIVTVGTTSTRTLETIASAYDGKFVAASGWTSIFIYPGYEFKAIDGMITNFHLPKSTLIMLVSALAGREHVLNAYNTAVEEKYRFFSFGDAMLII

SEQ ID NO: 63757 - protein, 338 aa, Bacillus lehensis
  REGION 1..338: note = tr|A0A4Y7WFQ6|A0A4Y7WFQ6_9BACI S-adenosylmethionine:tRNA ribosyltransferase-isomerase; OS = Bacillus lehensis OX=300825 GN=E2L03_17200 PE=3 SV=1
MTNLVSLHEAFSLPAHLHAHTPAELRGNDRSDVKLLHTERKSGRIQDHTLTDLTELLQPNDLLLFNRSRTIPAQLVSETDNVTVRLARQLTETSWEALILGKDKTVVQLQDGVTLHVQGDGSEAPLKRVTFQGLQEPVLSFLHKYGEPIRYEYINTPWSLESYQTVFASVPGSIEMPSAGRAFSWKLIHQLKQNQIQVGFLTLHAGISYYEDNQWPDPLHHPEAYMIPAETITAIHEAKARGGRIIAVGTTVVRAVESYAKNKPSHQGAWTDTTNLFIQRETPLQLVDGLLSGLHEPHSSHLELLRAFLPDDALLSSYQHALQNNYLWHEFGDVHLML

SEQ ID NO: 63758 - protein, 338 aa, Bacillus lehensis
  REGION 1..338: note = tr|A0A060M6B9|A0A060M6B9_9BACI S-adenosylmethionine:tRNA ribosyltransferase-isomerase; OS = Bacillus lehensis G1 OX=1246626 GN=BleG1_3536 PE=3 SV=1
MTNLVSFHEAFSLPAHLHAHTPAELRGNDRSDVKLLHTERKNGRIQDRTLIDLTELLQPNDLLLFNRSRTIPAQLVSETDNVTVRLARQLTETSWEALILGKDKTVVQLQDGVTLHVQGDGSEAPLKRVTFHGLQEPVLSFLHKYGEPIRYEYINTPWSLEAYQTVFASVPGSIEMPSAGRAFSWKLIHQLKQNHIQVGFLTLHAGISYYEDNQWPDPLHHPEAYMIPAETITAIHEAKARGGRIIAVGTTVVRAVESYAQKKPSHQGAWTDTTNLFIQRKTPLQLVDGLLSGLHEPHSSHLELLRAFLPDDALLSSYQHALQNNYLWHEFGDVHLML

SEQ ID NO: 63759 - protein, 342 aa, Bacillus lentus
  REGION 1..342: note = tr|A0A2X4WDY5|A0A2X4WDY5_BACLE S-adenosylmethionine:tRNA ribosyltransferase-isomerase; OS = Bacillus lentus OX=1467 GN=queA PE=3 SV=1
MKVNMFDFELPEELIAQVPLENRTESRLMVLDKQTGSIRHEIFKNIKNYLQKGDCLVLNDTKVLPARLLGAKVDTNAKIEVLLLKQLEGDKWETLVKPAKRVKIGTVISFGNGKLTATCVGVEKHGGRILEFRYGGIFYEVLEELGKMPLPPYIKEQLEDQARYQTVFAKERGSAAAPTAGLHFTKELLEELKENGVIITFITLHVGLGTFRPVSVGDINEHEMHSEFYRVSEETAELLNDVRRSGGRIITVGTTSTRTLETITAENNGEFKAGNGWTDIFIYPGYSFKAIDGMLTNFHLPMSTLIMLVSALAGRENVLQAYNEAVKERYRFFSFGDAMLIK

SEQ ID NO: 63760 - protein, 342 aa, Bacillus licheniformis
  REGION 1..342: note = sp|Q65GP8|QUEA_BACLD S-adenosylmethionine:tRNA ribosyltransferase-isomerase OS=Bacillus licheniformis (strain ATCC 14580 / DSM 13 / JCM 2505 / NBRC 12200 / NCIMB 937 5 / NRRL NRS-1264 / Gibson 46) OX=279010 GN=queA
MKVELFDFDLPERLIAQVPLKERDASRLMVLDKKTGEITHSTFKHVIDFLNAGDCIVLNDTRVLPARLYGVKEETGAKVEVLLLKQEEGDVWETLVKPAKRVKRGTVLSFGDGRLTAVCTEELEHGGRKIEFRYEGIFYEVLESLGEMPLPPYIKEQLDDRERYQTVYSKKQGSAAAPTAGLHFTEEILDALREKGVHIAFITLHVGLGTFRPVSAENVEEHDMHAEFYEMSEETAALLNRVRQEGGRIISVGTTSTRTLETIASEHDGRFREASGWTSIFIYPGYTFRAIDGMITNFHLPKSSLIMLVSALAGREHVLSAYRTAVEHEYRFFSFGDAMLIK

SEQ ID NO: 63761 - protein, 342 aa, Bacillus licheniformis; identical to SEQ ID NO: 63760
  REGION 1..342: note = tr|A0A415JD36|A0A415JD36_BACLI S-adenosylmethionine:tRNA ribosyltransferase-isomerase; OS = Bacillus licheniformis OX=1402 GN=queA PE=3 SV=1

SEQ ID NO: 63762 - protein, 342 aa, Bacillus litoralis
  REGION 1..342: note = tr|A0A5C6W2M2|A0A5C6W2M2_9BACI S-adenosylmethionine:tRNA ribosyltransferase-isomerase; OS = Bacillus litoralis OX=152268 GN=queA PE=3 SV=1
MKVELFDFHLPEELIAQVPLMERDASRLMVLKKETGEIKHESFKAIIDYFNEGDCLVLNNTRVMPARLFGVKEDTGASIEILLLKQQEDNVWETLVKPAKRVKEGTVVTFGSGVMKATCVGSSEHGGRLLKFDYEGIFYEVLETLGEMPLPPYIKEQLDDRERYQTVFSREIGSAAAPTAGLHFTEEILEQLKSKGVHIAFITLHVGLGTFRPVSADTVEEHEMHAEFYQVTEGTAALLNETRAKGGRIISVGTTSTRTLETIASKHNGQYVSENGWTNIFIYPGYEFKGIDGMITNFHLPKSSLIMLVSALASRENVMNAYETAVKEQYRFFSFGDAMLII

SEQ ID NO: 63763 - protein, 342 aa, Bacillus litoralis
  REGION 1..342: note = tr|A0A179SXE2|A0A179SXE2_9BACI S-adenosylmethionine:tRNA ribosyltransferase-isomerase; OS = Bacillus litoralis OX=152268 GN=queA PE=3 SV=1
MKVELFDFHLPEELIAQVPLKERDASRLMVLHKETGELQHKSFKSVIDYFHSGDCLVLNNTRVMPARLFGMKEDTGASIEILLLKQQEADVWETLVKPAKRVKEGTVITFGSGILKATCVGTSEHGGRLLQFDYDGIFYEVLDSLGEMPLPPYIKEQLDDRERYQTVFSREIGSAAAPTAGLHFTEEILDQLKEKGVHIGFITLHVGLGTFRPVSAETVEEHDMHAEFYQVSEGTASLLNEVRSRGGRIISVGTTSTRTLETIASKNEGQYVAESGWTNIFIYPGYEFKGIDGMITNFHLPKSSLIMLVSALASREYVMNAYTAAVKEKYRFFSFGDAMLII

SEQ ID NO: 63764 - protein, 342 aa, unidentified
  source 1..342: note = Bacillus loiseleuriae
  REGION 1..342: note = tr|A0A0K9GXV7|A0A0K9GXV7_9BACI S-adenosylmethionine:tRNA ribosyltransferase-isomerase; OS = Bacillus loiseleuriae OX=1679170 GN=queA PE=3 SV=1
MKVDLFDFHLPEELIAQVPLLDRESSRLMVLNKETGEIAHETFKQITNYLKPGDCLVLNDTKVLPARLFGNKDGTGAKIEVLLLKQQETDSWETLVKPAKRIKEGSVIVFGDGKLKAVCTGVLEHGGRILDFSYEGIFYEVLDELGTMPLPPYIKEQLDDQDRYQTVFARERGSAAAPTAGLHFTDQLLEKIKEMGVHIAFITLHVGLGTFRPVSVDDIDNHDMHSEFYQMTADTAQILNQVRSAGGRIITVGTTSTRTLETIATRHDGVFQEESGWTSIFIHPGYEFKGIDGMITNFHLPKSTLIMLVSALSNREHVLHAYETAVLEKYRFFSFGDAMLII

SEQ ID NO: 63765 - protein, 348 aa, unidentified
  source 1..348: note = Bacillus lonarensis
  REGION 1..348: note = tr|A0A1G6JQM6|A0A1G6JQM6_9BACI S-adenosylmethionine:tRNA ribosyltransferase-isomerase; OS = Bacillus lonarensis OX=1464122 GN=queA PE=3 SV=1
MIKGDGMKVEAFDFELPEELIAQTPLPARADSRLLIIDKNTKALTDTTFTAIVDELMPGDCLVLNDTKVLPARLFGAKKDTGGAVEVLLLKQEAEDVWETLVKPAKRVKVGTVLTFGEGRLQATCTAVLAHGGRMFSFSYDGVFYEILDELGTMPLPPYIRERLDEADRYQTVYAKHRGSAAAPTAGLHFTETLLKQVAEKGVSIAYVTLHVGLGTFRPVSAETIEAHDMHAEYYEVSQETANVLKETHTNGGRIIAVGTTSARTLETVYRDHGGFVACAGWTDIFIYPGYTYQAIDGLLTNFHLPKSTLVMLVSALVGREALLSAYKHAIDERYRFFSFGDAMFIRP

SEQ ID NO: 63766 - protein, 331 aa, unidentified
  source 1..331: note = Bacillus lonarensis
  REGION 1..331: note = tr|A0A1G6GZS8|A0A1G6GZS8_9BACI S-adenosylmethionine:tRNA ribosyltransferase-isomerase; OS = Bacillus lonarensis OX=1464122 GN=SAMN05421737_102187; PE = 3 SV=1
MMATIIEATTPMERLGKTRDAVRMLVYGANTNNMWHDLFTSLPQFLRPDDVLVFNNSRTIPARLRLQGGGEVRLSRHVSEQVWDVLIMEDESAVVGKMLTFVGSLTATLLGEGSERPLKRLKFHASALEVVNYLYKYGEVIRYEYVKEPWPLADYQTVYGTMPGSVEMASAGRAFTWRLLASLRAHGVSFATITLHAGLSYYEDDRWPQPSLHPELFTVTKENAAIINKAKAAGGRIIAVGTTVVRTLETVAHRGRVCAGAGETTLHVQHPEQFTVIDGLLTGFHEREASHMQLLEAFIGDRGVRAVYDEAVAHNYHWHEFGDMNLLLKDR

SEQ ID NO: 63767 - protein, 342 aa, Bacillus luciferensis
  REGION 1..342: note = tr|A0A1E2VVX5|A0A1E2VVX5_9BACI S-adenosylmethionine:tRNA ribosyltransferase-isomerase; OS = Bacillus luciferensis OX=178774 GN=queA PE=3 SV=1
MDVNLFDFDLPEELIAQTPLLDREASRLMVLHKESGNVEHKQFPDVLDYLQEGDCLVLNETKVMPARLFGVKEDTGAQIEVLLLQQEEQDVWETLVKPAKRVKEGTIILFGDGRLKAECVGSSDQGGRKLKFQYDGIFYEILDQLGEMPLPPYIKEKLEDKDRYQTVFAKEIGSAAAPTAGLHFTKELLAKVQEKGVKLAFITLHVGLGTFRPVSVESIEEHDMHSEYYYMSEETAELLNETKANGGKIITVGTTSTRTVETIATANNGKFEGASGWTSIFIFPGYKFMGIDGMITNFHLPKSTLIMLISALAGREPVLAAYKEAVEQKYRFFSFGDAMLIL

SEQ ID NO: 63768 - protein, 350 aa, unidentified
  source 1..350: note = Bacillus luti
  REGION 1..350: note = tr|A0A1J9ZXB2|A0A1J9ZXB2_9BACI S-adenosylmethionine:tRNA ribosyltransferase-isomerase; OS = Bacillus luti OX=2026191 GN=queA PE=3 SV=1
MDINLFDFHLPEELIAQVPLEERETSRLMVLDRETGDIEHKHFTDILSYLHEGDCLVLNETKVMPARLHGVKEDTGAHIEVLLLKQEEGDKWETLVKPAKRVKEGTVISFGEGKLKATCTGTADQGGRQLEFSYDGIFYEILDELGEMPLPPYIKETLEDRDRYQTVYAKEIGSAAAPTAGLHFTEELLEKLKQKGVELAFITLHVGLGTFRPVSADTIEEHHMHAEYYHMSEETAALLNRVKENGGRIITVGTTSTRTLETIATDHDGKLCAASGWTDIFMYPGYEFKAIDGLITNFHLPKSTLIMLVSAFANRDNVLHAYNEAVKEKYRFFSFGDAMFVASHDKIGNK

SEQ ID NO: 63769 - protein, 348 aa, unidentified
  source 1..348: note = Bacillus manliponensis
  REGION 1..348: note = tr|A0A073JYQ7|A0A073JYQ7_9BACI S-adenosylmethionine:tRNA ribosyltransferase-isomerase; OS = Bacillus manliponensis OX=574376 GN=queA PE=3 SV=1
MDINLFDFHLPEELIAQTPLEQRETSRLMVLDRKTGEMQHKRFTDILSYLHEGDCLVLNETKVMPARLHGVKEDTGAHIEVLLLKQEDGDTWETLVKPAKRVKEGTIISFGEGKLKATCVGTGEQGGRHLQFSYDGIFYEILDELGEMPLPPYIKETLDDRDRYQTVFAREIGSAAAPTAGLHFTEELLEELKRKGVRLAFITLHVGLGTFRPVSADTIEEHEMHAEYYHMSEETARTLHEVQELGGRIITVGTTSTRTLETIATNNNGKLVAASGWTDIFMYPGYEFKAVDGIITNFHLPKSTLIMLVSAFAGREHVLHAYNEAVKEKYRFFSFGDAMFIATHTEGK

SEQ ID NO: 63770 - protein, 341 aa, Bacillus marisflavi
  REGION 1..341: note = tr|A0A0J5TDT2|A0A0J5TDT2_9BACI S-adenosylmethionine:tRNA ribosyltransferase-isomerase; OS = Bacillus marisflavi OX=189381 GN=queA PE=3 SV=1
MKVEDFDFHLPEELIAQTPLENRSESRLMVLDKEDGSIDHLQFKNIVDLLDEGDCLVLNDTRVLPARLFGQKEETGANIEVLLLKQEEGDQWETLVKPAKRVKVGTEIVFGDGKLKATCVGTKDHGGRIMEFAYDGIFYEVLEELGEMPLPPYIRERLEEQDRYQTVYAKERGSAAAPTAGLHFTEELLEELKAKGVHIAFITLHVGLGTFRPVSVDSIEDHDMHSEFYQISEGTARLLNDVRDKGGRIITVGTTSTRTLETIASKHDRFVEENGWTNIFIYPGYEFKGIDGLITNFHLPKSTLIMLVSAFAGQEHVLKAYETAVQEKYRFFSFGDAMFLK

SEQ ID NO: 63771 - protein, 341 aa, Bacillus marisflavi
  REGION 1..341: note = tr|A0A5D4S462|A0A5D4S462_9BACI S-adenosylmethionine:tRNA ribosyltransferase-isomerase; OS = Bacillus marisflavi OX=189381 GN=queA PE=3 SV=1
MKVEDFDFHLPEELIAQTPLENRSESRLMVLDKEDGSIDHLRFKNIVDLLDEGDCLVLNDTRVLPARLFGQKEETGANIEVLLLKQEEGDQWETLVKPAKRVKVGTEVVFGDGKLKATCVGTKDHGGRIMEFAYDGIFYEVLEELGEMPLPPYIRERLEEQDRYQTVYAKERGSAAAPTAGLHFTEELLEELKQKGVHIAFITLHVGLGTFRPVSVDSIEDHDMHSEFYQISEGTARLLNDVRDKGGRIITVGTTSTRTLETIASKHDRFVEENGWTNIFIYPGYEFKGIDGLITNFHLPKSTLIMLVSAFAGQEHVLKAYETAVQEKYRFFSFGDAMFLK

SEQ ID NO: 63772 - protein, 343 aa, Bacillus marmarensis
  REGION 1..343: note = tr|U6SP51|U6SP51_9BACI S-adenosylmethionine:tRNA ribosyltransferase-isomerase OS=Bacillus marmarensis DSM 21297 OX=1188261 GN=A33I_16660 PE=3 SV=1
MMINSTIHSFKLPPYLHATTPAEVTRNQRSDVRLLTLHGDSGAWDHHTFEDIIDLLQPNDLLILNTSRTIPSSLRTVDGGEIRLSRKIDEQVWEVLILEKRLNESTTLYFDDGISASIVGPGMAPELTLIEFSIGGEGLMHFFYNHGQPITYEYIDTPWQLSHYQTVYSHQPGSVEMNSAGRAFSHKMLKQLKDKGVQISYVCLHTGLSYYENNRWPDPLRHFEWFSVGADTVEHIYKTKKGGHRVVAVGTTVVRALESAHDPKAGLQPQEGLTNVYIDKDTTLKVVDGLITGFHEPEASHLDMLCAFVQEKKLIEAYQAAINEQYLWHEFGDLNLIWKQTYA

SEQ ID NO: 63773 - protein, 341 aa, Bacillus marmarensis
  REGION 1..341: note = tr|U6SUE7|U6SUE7_9BACI S-adenosylmethionine:tRNA ribosyltransferase-isomerase OS=Bacillus marmarensis DSM 21297 OX=1188261 GN=queA PE=3 SV=1
MDVRDFDFYLPDELIAQTPLLDRTASRLLVLDKDNGAIKDDVFSSITNYLKSGDCLVLNDTRVLPARLYGVKKDTGAKIELLLLKQLEGDKWETLAKPAKRVKKGTTITFGEGLLTATCIEETDQGGRVVELAYEGILHEVLDQLGEMPLPPYIKEQLDDQERYQTVFAKNRGSAAAPTAGLHFTEDLLQTLQDKGVHLAFITLHVGLGTFRPVSVEDVESHEMHAEYYQMSEGTARLLNEVKENGGKVVAVGTTSARTLETIMNENGTYCEASGWTSIFIYPGYKFKGIDGLLTNFHLPKSTLVMLVSALAGREHILQAYNHAVKERYRFFSFGDAMFIR

SEQ ID NO: 63774 - protein, 342 aa, Bacillus megaterium; identical to SEQ ID NO: 63673
  REGION 1..342: note = tr|D5DT33|D5DT33_BACMQ S-adenosylmethionine:tRNA ribosyltransferase-isomerase OS=Bacillus megaterium (strain ATCC 12872 / QMB1551) OX=545693 GN=queA PE=3 SV=1

SEQ ID NO: 63775 - protein, 342 aa, Bacillus megaterium
  REGION 1..342: note = tr|A0A0B6AWG2|A0A0B6AWG2_BACMB S-adenosylmethionine:tRNA ribosyltransferase-isomerase; OS = Bacillus megaterium (strain ATCC 14581 / DSM 32 / JCM 2506 / NBRC 15308 / NC IMB 9376 / NCTC 10342 / VKM B-512); OX = 1348623 GN
MKVDLFDFHLPEELIAQTPLEQRDASRLMVLNKETGSVKHHMFHDLLDYVQEGDCLVLNDTRVLPARLFGTKEDTGANIEVLLLKQTQGDTWETLVKPAKRVKEGTVISFGDGRLTAVCKETSDQGGRLLEFNYEGIFYEVLEQLGEMPLPPYIKERLDDQERYQTVFAREQGSAAAPTAGLHFTEEMLEQLKEKGVHIAFLTLHVGLGTFRPVSVDDLEEHDMHSEFYQVSEGTAALLNSVREKGGRIISVGTTSTRTLETIATEHNGKFVASSGWTNIFIFPGYEFKAIDGMITNFHLPKSTLIMLVSALAGRENVISAYEQAVVEKYRFFSFGDAMLIL

SEQ ID NO: 63776 - protein, 343 aa, unidentified
  source 1..343: note = Bacillus mesonae
  REGION 1..343: note = tr|A0A3Q9QQP8|A0A3Q9QQP8_9BACI S-adenosylmethionine:tRNA ribosyltransferase-isomerase; OS = Bacillus mesonae OX=1193713 GN=CHR53_00910 PE=3 SV=1
MAAVKTLDFYLPDNLNASHPPEKRGIRRDHVRMMVLDRRSGAVSHDHFFHLNHYLEPGDLVILNNSRTIPAVFQAEWLRGPALIAPKIEVRLARRRHDETWEALIVAAPVKIKDRLTFSTGLSATVVSEKQNSPLRVIQFSKKGPDLFNSIYELGEPVRYEYIRHPWSLDYYQTVFASHPGSVEMPSAGRAFSWELLFKLKQQGIGVDFIQLHTGLSYLLDDQWHQKPEENVEEYHIPEQTMERILKTKAAGKKVIAVGTTVVRTLETAARNGILSGMTNLYVHRDFPLKIADGILTGFHEPRASHLDMLSSFITEPHLLHAYEQAIEAGYLWHEFGDMNLII

SEQ ID NO: 63777 - protein, 342 aa, unidentified
  source 1..342: note = Bacillus mesonae
  REGION 1..342: note = tr|A0A3Q9R0W3|A0A3Q9R0W3_9BACI S-adenosylmethionine:tRNA ribosyltransferase-isomerase; OS = Bacillus mesonae OX=1193713 GN=queA PE=3 SV=1
MKVDLFDFHLPEELIAQVPLKKRTDSRLMVLNKETGDIQHEVFKDITKYLREGDCLVLNDTKVLPARLFGVKTDTGAKIEVLLLKQLEGDEWETLVKPAKRVKEGTVVEFGDGLLTAVCTGESDHGGRTFEFKYEGIFYEILDQLGQMPLPPYIKEQLDDQDRYQTVYAKEPGSAAAPTAGLHFTEELLQEIAGMGVHIAFITLHVGLGTFRPVSADDVEGHDMHAEFYIMTDETATLLNKVRNSGGRIITVGTTSTRTLETIAHANNGQFIGCSGWTDIFIFPGYEFKGINGMITNFHLPKSTLIMLVSALAGREHILHAYNTAVEEKYRFFSFGDAMFIV

SEQ ID NO: 63778 - protein, 342 aa, Bacillus methanolicus
  REGION 1..342: note = tr|I3EAW5|I3EAW5_BACMM S-adenosylmethionine:tRNA ribosyltransferase-isomerase OS=Bacillus methanolicus (strain MGA3 / ATCC 53907) OX=796606 GN=queA PE=3 SV=1
MKVELFDFNLPEELIAQTPLKNRTDSRLMVLDKETGDVKHDFFRNIKEYLKAGDCLVLNDTKVLPARLFGLKADTGAKVEVLLLKQQDGDRWETLVKPAKRVKEGTRIKFGDGVLSAVCVGTTEHGGRIFDFHYDGIFYEVLEKLGEMPLPPYIKEQLEDKDRYQTVYARERGSAAAPTAGLHFTEELLEELKEMGVHLAFITLHVGLGTFRPVSVEDVDKHEMHSEFYQMSEGTAALLNEVRKQGGRIITVGTTSTRTLETIAFAHNGQFVAESGWTNIFIYPGYDFKAIDGMITNFHLPKSTLIMLVSALAGRENVLRAYNIAVKEKYRFFSFGDAMLIL

SEQ ID NO: 63779 - protein, 342 aa, Bacillus methanolicus
  REGION 1..342: note = tr|I3DXN9|I3DXN9_BACMT S-adenosylmethionine:tRNA ribosyltransferase-isomerase OS=Bacillus methanolicus PB1; OX = 997296 GN=queA PE=3 SV=1
MKVELFDFDLPEELIAQTPLKNRTDSRLMVLNKETGEVKHNFFKNIKEYLKAGDCLVLNDTRVLPARLFGVKTDTGAKVEVLLLKQLDGDRWETLVKPAKRVKDGTRIEFGNGVLSAVCVGMTEHGGRIFDFHYDGIFYEVLEKLGEMPLPPYIKEQLEDKDRYQTVYAREKGSAAAPTAGLHFTEKLLEELREMGVHIAFITLHVGLGTFRPVNVENVDEHEMHSEFYQMSEGTAALLNEVRKQGGRIITVGTTSTRTLETIASARNGKFAAESGWTNIFIYPGYEFKAIDGMITNFHLPKSTLIMLVSALAGRENVLRAYNLAVQARYRFFSFGDAMLIL

SEQ ID NO: 63780 - protein, 350 aa, unidentified
  source 1..350: note = Bacillus mobilis
  REGION 1..350: note = tr|A0A386V8C7|A0A386V8C7_9BACI S-adenosylmethionine:tRNA ribosyltransferase-isomerase; OS = Bacillus mobilis OX=2026190 GN=queA PE=3 SV=1
MDINLFDFHLPEELIAQVPLEDRETSRLMVLDRETGDIEHKHFTDILSYLHEGDCLVLNETKVMPARLHGVKEDTGAHIEVLLLKQEEGDTWETLVKPAKRVKEGTVISFGEGKLKATCTGTADQGGRQLEFSYDGIFYEILDELGEMPLPPYIKETLEDRDRYQTVYAKEIGSAAAPTAGLHFTEELLEKLKQKGVGLAFITLHVGLGTFRPVSADTIEEHHMHAEYYHMSEETAALLNRVKESGGRIITVGTTSTRTLETIATDHDGKLCAASGWTDIFMYPGYEFKAIDGLITNFHLPKSTLIMLVSAFANRDNVLHAYNEAVKEKYRFFSFGDAMFVASHAKMGNK

SEQ ID NO: 63781 - protein, 350 aa, unidentified
  source 1..350: note = Bacillus mobilis
  REGION 1..350: note = tr|A0A1K0A9E6|A0A1K0A9E6_9BACI S-adenosylmethionine:tRNA ribosyltransferase-isomerase; OS = Bacillus mobilis OX=2026190 GN=queA PE=3 SV=1
MDINLFDFHLPEELIAQVPLEDRETSRLMVLDRETGDIEHKHFSDILSYLHEGDCLVLNETKVMPARLHGVKEDTGAHIEVLLLKQEEGDTWETLVKPAKRVKEGTVISFGEGKLKATCTGTADQGGRQLEFSYDGIFYEILDELGEMPLPPYIKETLEDRDRYQTVYAKEIGSAAAPTAGLHFTEELLEKLKQKGVGLAFITLHVGLGTFRPVSADTIEEHHMHAEYYHMSEETAALLNRVKESGGRIITVGTTSTRTLETIATDHDGKLCAASGWTDIFMYPGYEFKAIDGLITNFHLPKSTLIMLVSAFANRDNVLHAYNEAVKEKYRFFSFGDAMFVASHAKMGNK

SEQ ID NO: 63782 - protein, 342 aa, Bacillus muralis
  REGION 1..342: note = tr|A0A1B3XRP7|A0A1B3XRP7_9BACI S-adenosylmethionine:tRNA ribosyltransferase-isomerase; OS = Bacillus muralis OX=264697 GN=queA PE=3 SV=1
MKLDMFDFHLPEELIAQVPLEDREASRLMVLDKETGKIEHDVFSHITEYIKPGDCLVLNDTRVLPARLYGSKEGTGAKIEVLLLKQEHDDVWETLVKPAKRIKEGSTIFFGDGKLSAVCTGVLEHGGRILEFRYEGIFYEILDKLGEMPLPPYIKEQLDDQDRYQTVYARERGSAAAPTAGLHFTEHLLEKLKGMGVHIAFITLHVGLGTFRPVSVDDIDSHEMHSEFYQMTEGTARLLNEVKEKGGKIITVGTTSTRTLETIASGNAGVFKEASGWTSIFIYPGYEFKGIDAMITNFHLPKSTLIMLISALAGREHVLHAYETAVEEKYRFFSFGDAMLIK

SEQ ID NO: 63783 - protein, 350 aa, Bacillus mycoides
  REGION 1..350: note = tr|A0A1D3NH39|A0A1D3NH39_BACMY S-adenosylmethionine:tRNA ribosyltransferase-isomerase; OS = Bacillus mycoides OX=1405 GN=queA PE=3 SV=1
MDINLFDFHLPEELIAQVPLEERETSRLMVLDRETGDIEHKHFTDILSYLHEGDCLVLNETKVMPARLHGVKEDTGAHIEVLLLKQEDGDKWETLVKPAKRVKEGTVISFGEGKLKATCTGTADQGGRQLEFSYDGIFYEILDELGEMPLPPYIKETLEDRDRYQTVYAKEIGSAAAPTAGLHFTEELLEKLKQKGVGLAFITLHVGLGTFRPVSADTIEEHHMHAEYYHMSEETAALLNRVKENGGRIITVGTTSTRTLETIATDHSGKLCAASGWTDIFMYPGYEFKAIDGLITNFHLPKSTLIMLVSAFSNRDNVLHAYNEAVKEKYRFFSFGDAMFVASHAKTRNK

SEQ ID NO: 63784 - protein, 350 aa, Bacillus mycoides
  REGION 1..350: note = sp|A9VIP4|QUEA_BACMK S-adenosylmethionine:tRNA ribosyltransferase-isomerase OS=Bacillus mycoides (strain KBAB4) OX=315730 GN=queA PE=3 SV=1
MDINLFDFHLPEELIAQIPLEERETSRLMVLDRETGDIEHKHFADILSYLQEGDCLVLNETKVMPARLHGVKEDTGAHIEVLLLKQEEGDKWETLIKPAKRVKEGTVISFGEGKLKATCIGTADQGGRQLEFSYDGIFYEILDELGEMPLPPYIKETLEDRDRYQTVYAKEIGSAAAPTAGLHFTEELLEKLKQKGVGLAFITLHVGLGTFRPVSADTIEEHHMHAEYYHMSEETAALLNRVKEDGGRIITVGTTSTRTLETIATDHSGKLCAASGWTDIFMYPGYEFKAIDGLITNFHLPKSTLIMLVSAFSNRDNVLHAYNEAVKEKYRFFSFGDAMFVASHAKMRNK

SEQ ID NO: 63785 - protein, 342 aa, unidentified
  source 1..342: note = Bacillus nakamurai
  REGION 1..342: note = tr|A0A150F3R8|A0A150F3R8_9BACI S-adenosylmethionine:tRNA ribosyltransferase-isomerase; OS = Bacillus nakamurai OX=1793963 GN=queA PE=3 SV=1
MKVDLFDFELPDHLIAQVPLKQRDASRLMVLDKHTGGLTDSSFKEIVSFFKEGDCLVLNNTRVLPARLFGTKEDTGAKVELLLLKQEENDRWETLVKPAKRVKKGTVLTFGDGRLKAVCTEELDHGGRKVEFRYDGIFYEVLESLGEMPLPPYIKEQLDDKERYQTVFSKEIGSAAAPTAGLHFTEEILDELKQKGVRIEFITLHVGLGTFRPVSADEVEEHNMHAEFYEMTEETAASLNEVRKAGGRIVSVGTTSTRTLETIAGDNDGVFTASSGWTSIFIYPGYEFKAIDGMITNFHLPKSSLIMLVSALAGRDHVLHAYRHAVEEEYRFFSFGDAMLII

SEQ ID NO: 63786 - protein, 341 aa, Bacillus nanhaiisediminis
  REGION 1..341: note = tr|A0A562QHP7|A0A562QHP7_9BACI S-adenosylmethionine:tRNA ribosyltransferase-isomerase; OS = Bacillus nanhaiisediminis OX=688079 GN=queA PE=3 SV=1
MNVEEFDFQLPEELIAQTPLLDRTASRLLVLDRKTGQTTDRTFETIIDELQQGDCLVLNDTRVLPARLYGTKEETGAKVEVLLLKQLENDEWETLVKPAKRVKKGTVIQFGDGRLTAICTGEADHGGRVLKMSYKGIFHEVLDELGEMPLPPYIKETLPDQERYQTVYAKHRGSAAAPTAGLHFTNELLERIQEKGVHVTFITLHVGLGTFRPVSVDNVEDHEMHAEFYQMSESTAALLTQVRKQGGRIFAVGTTSARTLETIMKEYGEFRDCSGWTSIFIYPGYEVLGFDGLLTNFHLPKSTLVMLVSAFAGKEYVMNAYEHAVKERYRFFSFGDAMLIR

SEQ ID NO: 63787 - protein, 342 aa, Bacillus nealsonii
  REGION 1..342: note = tr|A0A2N0Z4J2|A0A2N0Z4J2_9BACI S-adenosylmethionine:tRNA ribosyltransferase-isomerase; OS = Bacillus nealsonii OX=115979 GN=queA PE=3 SV=1
MKVELFDFHLPEELIAQTPLEDRTSSRLMVVNKKTGDLEHRSFKDIIEYINPGDCLVLNDTRVLPARLYGEKEDTGAHIEVLLLKQQDGDKWESLVKPAKRVKVGTVISFGDGHLKAVCVQELEHGGRVLDFQYDGIFYEILEELGEMPLPPYIKEKLDDQDRYQTVYAKERGSAAAPTAGLHFTEELLDSLEKKGVHIAFITLHVGLGTFRPVSVDDVDSHEMHAEFYQLTKGTADLLNKVKENGGRIISVGTTSTRTLETIAAAHDGVFKEQNGWTNIFIYPGYEFKGIDGMITNFHLPKSTLIMLVSALAGRDEILHAYKTAVEMRYRFFSFGDAMFIC

SEQ ID NO: 63788 - protein, 342 aa, Bacillus nealsonii
  REGION 1..342: note = tr|R9C8C8|R9C8C8_9BACI S-adenosylmethionine:tRNA ribosyltransferase-isomerase OS=Bacillus nealsonii AAU1; OX = 1202533 GN=queA PE=3 SV=1
MKVDLFDFHLPEELIAQTPLEDRTSSRLMIVNKVTGELQHRKFKDIYEYINPGDCLVLNDTRVLPARLHGEKEDTGAHIEVLLLKQQENDKWETLVKPAKRVKEGTIITFGEGKLKAVCVKELEHGGRILDFQYEGIFYEILDQLGEMPLPPYIKEKLDDQDRYQTVYAKERGSAAAPTAGLHFTTELLDALKEKGVHILFITLHVGLGTFRPVNVEDVDKHEMHAEFYQLNQETAALLNKVRAQGGRILSVGTTSTRTLETIATANNGEFVESSGWTSIFIYPGYEFKGIDGMITNFHLPKSTLIMLVSALAGRENVLHAYETAVKERYRFFSFGDAMFIQ

SEQ ID NO: 63789 - protein, 342 aa, unidentified
  source 1..342: note = Bacillus notoginsengisoli
  REGION 1..342: note = tr|A0A417YTU1|A0A417YTU1_9BACI S-adenosylmethionine:tRNA ribosyltransferase-isomerase; OS = Bacillus notoginsengisoli OX=1578198 GN=queA PE=3 SV=1
MKVDLFDFHLPEELIAQTPLENRTDSRLMVLNKETGEINHAIFKNIKQYLRKGDCLVLNDTRVLPARLYGAKKDTGAKIEVLLLKQIDGDQWETLIKPAKRIRVGMEIEFGEGLLTAVCTEEAEHGGRVLEFKYNGIFYEILDALGEMPLPPYIKEQLDDKDRYQTVFAKERGSAAAPTAGLHFTEELLEEIREMGVSTAFITLHVGLGTFRPVSVENVLEHDMHAEFYIVSEGTARLLNETRETGGRIITVGTTSTRTLETVASSNGGQFRADSGWTSIFIYPGYEFQAVDGMITNFHLPKSTLIMLVSALAGRENVLHAYETAVRERYRFFSFGDAMLII

SEQ ID NO: 63790 - protein, 339 aa, unidentified
  source 1..339: note = Bacillus notoginsengisoli
  REGION 1..339: note = tr|A0A417YX08|A0A417YX08_9BACI S-adenosylmethionine:tRNA ribosyltransferase-isomerase; OS = Bacillus notoginsengisoli OX=1578198 GN=D1B31_05300; PE = 3 SV=1
MIAGSIAFHLPLSLNASAPPERRGVRRDHVRMMVLSKETGHACHDQFYHLDRYLASGDVLVLNNSRTIPAILKGRAASTSLELEIRLARKIDDRRWHALLVSTEGVKEGETIVFSAQLQGVVEKTTPDSPLSMIRFSKSGTSLFNEIYSIGEPVRYEYIEDPWDLDYYQTVFASHPGSVEMPSAGRAFTWEMLFKLRKKGVKITFIQLHTGLSYFLNDRWDHHPSKNTEQYIVPTESWNEIISAKLSGKRVIAAGTTVVRALETAIETNELSGWTNLYIHPGYQLKVADGILTGLHEPEASHLAMLSAFISQEKLCQAYQEAVEEKYLWHEFGDMNLIL

SEQ ID NO: 63791 - protein, 342 aa, unidentified
  source 1..342: note = Bacillus obstructivus
  REGION 1..342: note = tr|A0A1L8ZIE4|A0A1L8ZIE4_9BACI S-adenosylmethionine:tRNA ribosyltransferase-isomerase; OS = Bacillus obstructivus OX=1914540 GN=queA PE=3 SV=1
MKIDLFDFNLPESLIAQTPLKNRSDSRLMVLNKQTGEIEHQVFKNITKYLKPGDCLVLNDTKVLPARLFGIKEDTGAKIEVLLLKQMENDRWETLVKPAKRIKVGSEIVFGDGKLKARCIAEKDHGGRIIEFHYEGIFYEVLNELGEMPLPPYIKEQLEDRDRYQTVYAKETGSAAAPTAGLHFTEELLTEIKNMGVHITFLTLHVGLGTFRPVSVEDIHEHEMHAEFYQVSEETADLINRVKQQGGRIISVGTTSTRTLETIASANNGKIIATSGWTDIFIYPGYEFKGIDGMITNFHLPKSTLIMLVSALAGRQNVLHAYEEAVNEKYRFFSFGDAMLII

SEQ ID NO: 63792 - protein, 342 aa, unidentified
  source 1..342: note = Bacillus obstructivus
  REGION 1..342: note = tr|A0A1L8ZRR8|A0A1L8ZRR8_9BACI S-adenosylmethionine:tRNA ribosyltransferase-isomerase; OS = Bacillus obstructivus OX=1914540 GN=BLX88_02645 PE=3; SV = 1
MVTNVLNFHLPDELNAIAPPERRGVRRDHVKMMVLNKKNGKIDHSLFFRLDQYLNKDDLIILNSSRTVPADLQGICERTQKQVGIRLAHQKNPSLWEALIIGDHLKKGEKVKFNSKLEATVTHSDPNQPFSILQFNMCCSDLYNQIYQIGEPVRYEYTKEAWSLDYYQTVFATTPGSVEMPSAGRAFSWELLFRLQKKGVKIAYLQLHTGLSYLLDDRWHLGPLDNFEKYVINEATVEAIKKTKKNNGRVIAVGTTVVRALESAVDKYGKITEKDGWTNLYIAADTKLQVADGLITGFHEPEASHLDLLTAFVNPKHLYHAYQEALSHKYLWHEFGDMNLII

SEQ ID NO: 63793 - protein, 342 aa, Bacillus oceanisediminis
  REGION 1..342: note = tr|A0A1S1YK49|A0A1S1YK49_9BACI S-adenosylmethionine:tRNA ribosyltransferase-isomerase; OS = Bacillus oceanisediminis OX=665099 GN=queA PE=3 SV=1
MKVDWFDFHLPEELIAQTPLADRTSSRLMVLDKITGDLQHSVFKNIKHYLKAGDCLVLNDTKVLPARLFGEKTGTGAKIEVLLLKQLEGDSWETLVKPAKRVKEGTEITFGNGNLTAVCTGTSDHGGRVLEFKYDGIFYEVLEELGEMPLPPYIKEQLDDRDRYQTVFARERGSAAAPTAGLHFTEQLLEEIKEMGVHIAFITLHVGLGTFRPVSVDDLNEHEMHAEFYQVTEGTARLLNEVREQGGRIISVGTTSTRTLETIASMHNGRFEEASGWTDIFIYPGYEFKAIDGMITNFHLPKSTLIMLVSALAGRENVLNAYNQAVEEHYRFFSFGDAMLII

SEQ ID NO: 63794 - protein, 342 aa, Bacillus oceanisediminis
  REGION 1..342: note = tr|A0A160MER3|A0A160MER3_9BACI S-adenosylmethionine:tRNA ribosyltransferase-isomerase; OS = Bacillus oceanisediminis 2691 OX=1196031 GN=queA PE=3; SV = 1
MKVDWFDFHLPEELIAQTPLADRTGSRLMVLDKITGDLQHSVFKNIKHYLKAGDCLVLNDTKVLPARLFGEKTGTGAKIEVLLLKQLEGDSWETLVKPAKRVKEGTEITFGNGNLTAVCTGTSDHGGRVLEFKYDGIFYEVLEELGEMPLPPYIKEQLDDRDRYQTVFARERGSAAAPTAGLHFTEQLLEEIKEMGVHIAFITLHVGLGTFRPVSVDDLNEHEMHAEFYQVTEGTARLLNEVREQGGRIISVGTTSTRTLETIASMHNGRFEEASGWTDIFIYPGYEFKAIDGMITNFHLPKSTLIMLVSALAGRENVLNAYNQAVEEHYRFFSFGDAMLII

SEQ ID NO: 63795 - protein, 341 aa, Bacillus okhensis
  REGION 1..341: note = tr|A0A0B0IPL7|A0A0B0IPL7_9BACI S-adenosylmethionine:tRNA ribosyltransferase-isomerase; OS = Bacillus okhensis OX=333138 GN=queA PE=3 SV=1
MNVEEFDFELPDELIAQTPLPDRTASRLLVLDRKTGETKDGHFLSIIDELNEGDCLVLNDTRVLPARLYGSKKDTGASIEILLLKQLEDDQWETLVKPAKRVKKGTEVVFGDGQLTAICTGEAEHGGRIMKMSYIGIFHEVLDELGEMPLPPYIKETLPDQERYQTVFAKNRGSAAAPTAGLHFTKELLTSIEKKGVHIAYITLHVGLGTFRPVSVENIEEHEMHAEFYQMSAGTARLLQSVRGNGGRIIAVGTTSARTLETIIKDHGQFLEASGWTSIFIYPGYEVRGFDGLLTNFHLPKSTLVMLVSAFSTKEYVLNAYRHAVNERYRFFSFGDAMLIR

SEQ ID NO: 63796 - protein, 339 aa, Bacillus okhensis
  REGION 1..339: note = tr|A0A0B0IJ78|A0A0B0IJ78_9BACI S-adenosylmethionine:tRNA ribosyltransferase-isomerase; OS = Bacillus okhensis OX=333138 GN=LQ50_13945 PE=3 SV=1
MTLASYPFVIPQHLHASLPAEVRSHQREAVRLLVQNRQTGHVTHDTFAHLSNYLKKGDVLILNKSRTIPAVLYTTDHIEVRLARKCSTDIWEVLSSDQSEIGDTLHFTNNVRATVIDKSKKTPLISIRFSIKGDEFYNFLYINGTPIHYEYLQDHWPLQAFQTVYSSVPGSIEMPSAGRALTWRMLAALQNKGIKIGFVSLHSGLSYFEDDRWPDPIFQPEPFSVPVETVKLIQTAKNERSNVIAVGTTVVRALESAVDTNHNLQATAGETTLHIKSNSALQVVDGLLTGFHEPEASHLDMLSAFIDKNHLLAAYEEAIRQEYLWHEFGDVNLLLPMEN

SEQ ID NO: 63797 - protein, 336 aa, Bacillus okuhidensis
  REGION 1..336: note = tr|A0A0M0KKQ1|A0A0M0KKQ1_9BACI S-adenosylmethionine:tRNA ribosyltransferase-isomerase; OS = Bacillus okuhidensis OX=136160 GN=AMD02_08820 PE=3 SV=1
MNHAPTFSIPDHLNASEPIERQGKQRSDVRMLVLDRDSHRTFHEPFTAIANYLQQGDVLVLNRSRTIPSRLIGSLHGETIELRLSHERRDGLWDGLILSSSELHAGDRIFLSSSLSATLIEKDEHTPLWRVAFSKRGAQLLEYVYRYGEPIGYEYIKSPLSIQDYQTVYSSAPGSVEMCSAGRPFTWQLLARLKQKGVRIAFLELHTGLSYYENDVWPDPAHHPEHYHIPKETIEALKKGKRIIAVGTTVVRALETYAQTNRSQGTTTLSIDAGYELQLATGLLTGFHEPQASHLHMLAAFVQEQELFRVYEQAIRQGYQWHEFGDVNFILPLGDM

SEQ ID NO: 63798 - protein, 347 aa, Bacillus okuhidensis
  REGION 1..347: note = tr|A0A0M0KMT7|A0A0M0KMT7_9BACI S-adenosylmethionine:tRNA ribosyltransferase-isomerase; OS = Bacillus okuhidensis OX=136160 GN=queA PE=3 SV=1
MNVRDFDFHLPEKLIAQTPLKDRTASRLLVLDKHTGAVEDKKFPDLLQFIEAGDCLVLNDTRVLPARLFGVKEETGAQVEVLLLKQMEGDRWETLVKPAKRLKVGTIIRFGNGELTATCVQELEHGGRVLEFSYEGIFHEVLDQLGEMPLPPYIKEQLDDKDRYQTVFAKNCGSAAAPTAGLHFTEELLDQLKQKGVHLAFITLHVGLGTFRPVSVEEIEEHEMHAEFYQMSAGTARLLNEVKRQGGRIIAVGTTSARTLETIRQEHDEFVETSGWTSIFIYPGYEFKGIDGLITNFHLPKSTLVMLVSALAGRENLLNAYAHAVKQSYRFFSFGDAMFIYDKKTNS

SEQ ID NO: 63799 - protein, 352 aa, unidentified
  source 1..352: note = Bacillus oleivorans
  REGION 1..352: note = tr|A0A285CVN7|A0A285CVN7_9BACI S-adenosylmethionine:tRNA ribosyltransferase-isomerase; OS = Bacillus oleivorans OX=1448271 GN=queA PE=3 SV=1
MKVDEFDFNLPPELIAQTPLEHREESRLMVLNKRTGAIEHRIFRDIINYLNPGDCLVLNDTRVLPARLYGVKEDTGAKVEVLLLKEVGSNQWETLVKPGKKVKPGTTLSFGNGLLRAECIGTTEFGGRIFKFLYEGIFYEILDQLGEMPLPPYITEQLEDKDRYQTVYAKHEGSAAAPTAGLHFTELLLDEIQKKGVHIAFITLHVGLGTFRPVQVEDINKHQMHSEFYQMTEETAQLLNRVKQAGGRIISVGTTSTRTLETIAQKNNGHFEADSGWTDIFIYPGFVFKGIDGMITNFHLPKSTLIMLVSALASRDFIMKAYEEAVKERYRFFSFGDAMLIHEGSTGIDTTN

SEQ ID NO: 63800 - protein, 345 aa, unidentified
  source 1..345: note = Bacillus oleivorans
  REGION 1..345: note = tr|A0A285CIM7|A0A285CIM7_9BACI S-adenosylmethionine:tRNA ribosyltransferase-isomerase; OS = Bacillus oleivorans OX=1448271 GN=SAMN05877753_101168; PE = 3 SV=1
MLMTIHGSFQIPAHLHAIAPAEFRGLRRDQVRMMVLDRITGQFEHASFKEIGRYLASGDLLVFNNSRTIPAKLKGTQQQGTEFEIRLSRQISDTAWEGLIVGDYDRNRPIKLSEELFAEVIGNGGAEPLVRLSFSKKGLALLNDFYRIGEPIRYEYIHEPWALDVYQTVYAAVPGSVEMPSAGRAFTWQLLQALKASGIRVAFLQLHAGLSYYGNDKWPDPNQHPEVFHIPSSTAKLVTETKESGGRVIAVGTTVVRALETAAVEGKVTGTKGVTKLYVDRGYLLKVVDGLLTGFHEPEASHLDMLTAFIDEEQLKAAYQAAIEEGYLWHEFGDVNLILSKEASL

SEQ ID NO: 63801 - protein, 350 aa, unidentified; identical to SEQ ID NO: 63668
  source 1..350: note = Bacillus pacificus
  REGION 1..350: note = tr|A0A1J9YQ95|A0A1J9YQ95_9BACI S-adenosylmethionine:tRNA ribosyltransferase-isomerase; OS = Bacillus pacificus OX=2026187 GN=queA PE=3 SV=1

SEQ ID NO: 63802 - protein, 342 aa, unidentified; identical to SEQ ID NO: 63656
  source 1..342: note = Bacillus paralicheniformis
  REGION 1..342: note = tr|A0A1Q8GQJ5|A0A1Q8GQJ5_9BACI S-adenosylmethionine:tRNA ribosyltransferase-isomerase; OS = Bacillus paralicheniformis OX=1648923 GN=queA PE=3 SV=1

SEQ ID NO: 63803 - protein, 350 aa, unidentified
  source 1..350: note = Bacillus paramycoides
  REGION 1..350: note = tr|A0A1J9VYP4|A0A1J9VYP4_9BACI S-adenosylmethionine:tRNA ribosyltransferase-isomerase; OS = Bacillus paramycoides OX=2026194 GN=queA PE=3 SV=1
MDINLFDFHLPEELIAQIPLEERETSRLMVLDRETGDIEHKHFTDILSYLHEGDCLVLNETKVMPARLHGVKEDTGAHIEVLLLKQEEGDKWETLVKPAKRVKEGTVISFGEGKLKATCTGTADQGGRQLEFSYDGIFYEILDELGEMPLPPYIKETLEDRDRYQTVYAKEIGSAAAPTAGLHFTEELLEKLKQKGVQLAFITLHVGLGTFRPVSADTIEEHHMHAEYYHMSEETAALLNRVKENGGRIITVGTTSTRTLETIATDHDGKLCAASGWTDIFMYPGYEFKAIDGLITNFHLPKSTLIMLVSAFANRDNVLHAYNEAVKEKYRFFSFGDAMFVASHAKMRNK

SEQ ID NO: 63804 - protein, 350 aa, unidentified; identical to SEQ ID NO: 63668
  source 1..350: note = Bacillus paranthracis
  REGION 1..350: note = tr|A0A4U1DRF2|A0A4U1DRF2_9BACI S-adenosylmethionine:tRNA ribosyltransferase-isomerase; OS = Bacillus paranthracis OX=2026186 GN=queA PE=3 SV=1

SEQ ID NO: 63805 - protein, 350 aa, unidentified
  source 1..350: note = Bacillus paranthracis
  REGION 1..350: note = tr|A0A4V1GX89|A0A4V1GX89_9BACI S-adenosylmethionine:tRNA ribosyltransferase-isomerase; OS = Bacillus paranthracis OX=2026186 GN=queA PE=3 SV=1
MDINLFDFHLPEELIAQVPLEERETSRLMVLDRETGDIEHKHFTDILSYLHEGDCLVLNETKVMPARLHGVKEDTGAHIEVLLLKQEEGDKWETLVKPAKRVKEGTVISFGEGKLKATCTGTADQGGRQLEFSYDGIFYEILDELGEMPLPPYIKETLEDRDRYQTVYAKEIGSAAAPTAGLHFTEELLEKLKQKGVELAFITLHVGLGTFRPVSADTIEEHHMHAEYYHMSEETAALLNRVRENGGRIITVGTTSTRTLETIATDHDGKLCAASGWTDIFMYPGYEFKAIDGLITNFHLPKSTLIMLVSAFANRDNVLHAYNEAVKEKYRFFSFGDAMFVASHAKMGNK

SEQ ID NO: 63806 - protein, 342 aa, unidentified
  source 1..342: note = Bacillus persicus
  REGION 1..342: note = tr|A0A1H7XEP7|A0A1H7XEP7_9BACI S-adenosylmethionine:tRNA ribosyltransferase-isomerase; OS = Bacillus persicus OX=930146 GN=queA PE=3 SV=1
MKVDLFDFHLPEELIAQVPLIERAESRLMVLDKQTGELQHTIFKNIKEYLQPGDCLVLNDTRVLPARLFGVKEDTGAKIEVLLLKQVEGDKWETLVKPAKRVKEGTKIVFGDGALTAVCTGESDHGGRILEFLYEGIFYEVLEGLGEMPLPPYIKEQLDDQERYQTVYAKERGSAAAPTAGLHFTESLLEEIKAMGVHITFITLHVGLGTFRPVSAETIEDHEMHAEFYIMSEGTARLLNEVREQGGRIISVGTTSTRTLETIASENNGEFKAATGWTDIFIFPGYEFKGINGMITNFHLPKSTLIMLVSTLAGRENVLNAYNTAVKEKYRFFSFGDAMLII

SEQ ID NO: 63807 - protein, 343 aa, unidentified
  source 1..343: note = Bacillus persicus
  REGION 1..343: note = tr|A0A1H7WBU3|A0A1H7WBU3_9BACI S-adenosylmethionine:tRNA ribosyltransferase-isomerase; OS = Bacillus persicus OX=930146 GN=SAMN05192533_101336 PE=3; SV = 1
MTVASAFEFELPQELNATHPPERRGVRRDHVRMMTLNKETGNVKHKRFNELPDCLLPGDLVILNNSRTLPAILRASLKRNEMILSAMIEVRLARRIDDARWEALIVAGSSKLGDILEFSPELNAVVTNENSDTPLKTILFSQKGFELLNIIYSLGEPVRYEYIDEPWDLDYYQTVFASQPGSVKMPSAGRAFSWELLFKLQQKGIQLDYIQLHTGLSYLLDDKYVHSPEDNYEEYSVSAMTMDRIQQTKATGGRVIAVGTTVVRALESAAKTGVLSGWTNLYIHREFSLKLVDGIITGFHEPKASHLDMLTAFVKEDTLFSAYHQALEQKYFWHEFGDMNLIL

SEQ ID NO: 63808 - protein, 342 aa, unidentified
  source 1..342: note = Bacillus praedii
  REGION 1..342: note = tr|A0A4R1AYM4|A0A4R1AYM4_9BACI S-adenosylmethionine:tRNA ribosyltransferase-isomerase; OS = Bacillus praedii OX=1742358 GN=queA PE=3 SV=1
MKVDLFDFHLPEELIAQTPLIERTSSRLMVLDKEKGATQHTVFKHIKEHLKAGDCLVLNDTRVLPARLFGEKEGTGAKIEVLLLKQLEGDSWETLIKPAKRVKEGTRIVFGNGKLSAVCTQTSEHGGRVLEFQYDGIFYEVLEQLGEMPLPPYIKEQLDDQERYQTVFARERGSAAAPTAGLHFTEQLLEEIKELGVHIAFITLHVGLGTFRPVNVEDLNEHEMHSEFYQMTEGTARLLNEVREEGGRIISVGTTSTRTLETIASANNGRFEEASGWTDIFIYPGYEFKAIDGMITNFHLPKSTLIMLVSALSGRENVLNAYREAVEEKYRFFSFGDAMLII

SEQ ID NO: 63809 - protein, 345 aa, unidentified
  source 1..345: note = Bacillus praedii
  REGION 1..345: note = tr|A0A4V2NU67|A0A4V2NU67_9BACI S-adenosylmethionine:tRNA ribosyltransferase-isomerase; OS = Bacillus praedii OX=1742358 GN=E0Y62_15910 PE=3 SV=1
MMSTARSFQVPEYLNARTPAEYRGISRDHVRLMTLDTVTGDCSHNYFNMLDSYLAEGDLLVLNNSRTIPAVLKGKRGRQAVEIRLSRKLSDREWEALIVGEVITVGEKIDLPGGLTATIAGLGAETPLIVLSFSKSGLNLIENFYQYGEPLHYEYIETPWPIEMYQTVYASVPGSVEMPSAGRAFTWRLLNKLKEKGVNIAYLQLHAGLSYYGNDRWPHPNKHLEEFCVPLNTAEMINKTREKNGRVIAVGTTVVRALETAVNIAGYVVPQKGITSLYIQKGYPLKAVDGLITGFHEPEASHLDLLSAFIDKDLLMKAYKKALANGYLWHEFGDMNLILPMDERK

SEQ ID NO: 63810 - protein, 341 aa, Bacillus pseudofirmus
  REGION 1..341: note = tr|A0A1Q9PQF3|A0A1Q9PQF3_BACPF S-adenosylmethionine:tRNA ribosyltransferase-isomerase; OS = Bacillus pseudofirmus OX=79885 GN=queA PE=3 SV=1
MDVRDFDFYLPDELIAQTPLLDRTASRLLVLDKDNGAIKDDVFSSITDYLKPGDCLVLNDTRVLPARLYGVKEDTGAKIELLLLKQLEGDKWETLAKPAKRVKKGTTITFGDGLLTATCIEETDQGGRVVELAYEGILHEVLDQLGEMPLPPYIKEQLDDQERYQTVFAKNRGSAAAPTAGLHFTEDLLQTLQDRGVHLAFITLHVGLGTFRPVSVEDVESHEMHAEYYQMSEGTARLLNEVKENGGKVVAVGTTSARTLETIMNENGTYCEASGWTSIFIYPGYKFKGIDGLLTNFHLPKSTLVMLVSALAGREHILQAYNHAVKERYRFFSFGDAMFIR

SEQ ID NO: 63811 - protein, 341 aa, Bacillus pseudofirmus
  REGION 1..341: note = tr|D3FVV6|D3FVV6_BACPE S-adenosylmethionine:tRNA ribosyltransferase-isomerase OS=Bacillus pseudofirmus (strain OF4) OX=398511 GN=queA PE=3 SV=1
MDVRDFDFYLPDELIAQTPLLDRTASRLLVLDKDNGAIKDDVFSSITDYLKSGDCLVLNDTRVLPARLYGVKEDTGAKIELLLLKQLEGDKWETLAKPAKRVKKGTTITFGEGLLTATCIEETDQGGRVVELAYEGILHEVLDQLGEMPLPPYIKEQLDDQERYQTVFAKNRGSAAAPTAGLHFTEDLLQTLQDKGVHLAFITLHVGLGTFRPVSVEDVESHEMHAEYYQMSEGTARLLNEVKENGGKVVAVGTTSARTLETIMNENGTYCEASGWTSIFIYPGYKFKGIDGLLTNFHLPKSTLVMLVSALAGREHILQAYNHAVKERYRFFSFGDAMFIR

SEQ ID NO: 63812 - protein, 350 aa, Bacillus pseudomycoides
  REGION 1..350: note = tr|C3BQF0|C3BQF0_9BACI S-adenosylmethionine:tRNA ribosyltransferase-isomerase OS=Bacillus pseudomycoides DSM 12442 OX=527000 GN=queA PE=3 SV=1
MDINLFDFHLPEELIAQTPLEQRETSRLMVLDRETGDIEHKHFTDILSYLHEGDCLVLNETKVMPARLHGVKEDTGAHIEVLLLKQEDGDKWETLVKPAKRVKEGTIISFGEGKLKATCIGTADQGGRQLEFSYDGIFYEILDELGEMPLPPYIKETLEDRDRYQTVYAKEIGSAAAPTAGLHFTEELLEKLKKKGVHLAFITLHVGLGTFRPVSADTIEEHHMHAEYYHMSEETADLLNRVKENGGRIITVGTTSTRTLETIATDHDGKLCATSGWTDIFMYPGYEFKAIDGLITNFHLPKSTLIMLVSAFASRENVLHAYNEAVKEKYRFFSFGDAMFVASHAKERSK

SEQ ID NO: 63813 - protein, 350 aa, Bacillus pseudomycoides
  REGION 1..350: note = tr|A0A2C5F4Z1|A0A2C5F4Z1_9BACI S-adenosylmethionine:tRNA ribosyltransferase-isomerase; OS = Bacillus pseudomycoides OX=64104 GN=queA PE=3 SV=1
MDINLFDFHLPEELIAQTPLEQRETSRLMVLDRETGDIEHKHFTDILSYLHEGDCLVLNETKVMPARLHGVKEDTGAHIEVLLLKQEDGDKWETLVKPAKRVKEGTIISFGEGKLKATCIGTADQGGRQLEFSYDGIFYEILDELGEMPLPPYIKETLEDRDRYQTVYAKEIGSAAAPTAGLHFTEELLEKLKKKGVHLAFITLHVGLGTFRPVSADTIEEHHMHAEYYHMSEETADLLNRVKENGGRIITVGTTSTRTLETIATDHDGKLCSASGWTDIFMYPGYEFKAIDGLITNFHLPKSTLIMLVSAFASRENVLHAYNEAVKEKYRFFSFGDAMFVASHAKERSK

SEQ ID NO: 63814 - protein, 342 aa, Bacillus pumilus
  REGION 1..342: note = sp|A8FFR0|QUEA_BACP2 S-adenosylmethionine:tRNA ribosyltransferase-isomerase OS=Bacillus pumilus (strain SAFR-032) OX=315750 GN=queA PE=3 SV=1
MKLELFDFDLPERLIAQVPLEKRDASRLMVLNKQTGEVTHDTFSQITDYFQTGDCLVLNNTRVLPARLFGMKEDTGAKVELLLLKQEEGDKWETLVKPAKRVKKGTVITFGDGRLQAVCTEELEHGGRKVEFQYTGIFYEVLESLGEMPLPPYIKEQLDDRERYQTVYSKEVGSAAAPTAGLHFTNELLDALKEKGVHIAFITLHVGLGTFRPVSADRIEEHEMHAEFYEMNEETAAELNRVRKEGGRIISVGTTSTRTLETIASAHDGEFKASSGWTSIFIYPGYTFKAIDGMITNFHLPKSSLIMLVSALAGREHVLKAYNEAVKEEYRFFSFGDAMLIQ

SEQ ID NO: 63815 - protein, 342 aa, Bacillus pumilus
  REGION 1..342: note = tr|A0A5D4QC42|A0A5D4QC42_BACPU S-adenosylmethionine:tRNA ribosyltransferase-isomerase; OS = Bacillus pumilus OX=1408 GN=queA PE=3 SV=1
MKLELFDFDLPERLIAQVPLEKRDASRLMVLNKQTGAITHDTFSQITDYFQTGDCLVLNNTRVLPARLFGMKEDTGAKVELLLLKQEEGDQWETLVKPAKRVKKGTVITFGDGRLQAVCTEEMEHGGRKVEFQYTGIFYEVLESLGEMPLPPYIKEQLDDRERYQTVYSKEVGSAAAPTAGLHFTNELLDALKAKGVHIAFITLHVGLGTFRPVSADRIEEHEMHAEFYEMNEETAEELNRVRKEGGRIISVGTTSTRTLETIASAHDGEFKASSGWTSIFIYPGYTFKAIDGMITNFHLPKSSLIMLVSALAGREHVLKAYNEAVKEEYRFFSFGDAMLIQ

SEQ ID NO: 63816 - protein, 342 aa, Bacillus safensis
  REGION 1..342: note = tr|A0A561S7Z1|A0A561S7Z1_9BACI S-adenosylmethionine:tRNA ribosyltransferase-isomerase; OS = Bacillus safensis OX=561879 GN=queA PE=3 SV=1
MKLELFDFDLPERLIAQVPLEQRDASRLMVLNKQTGAITHDTFSQIIDYFQKGDCLVLNNTRVLPARLFGMKEDTGAKVELLLLKQEEGDNWETLVKPAKRVKKGTVITFGDGRLKAVCTEEMEHGGRKVEFQYTGIFYEVLESLGEMPLPPYIKEQLDDRERYQTVYSKEVGSAAAPTAGLHFTTELLDALKAKGVHIAFITLHVGLGTFRPVSAERIEEHEMHAEFYEMNEETADELNRVRKEGGRIISVGTTSTRTLETIASAHDGEFKASSGWTSIFIYPGYTFKAIDGMITNFHLPKSSLIMLVSALAGREHVLKAYNEAVKEEYRFFSFGDAMLIQ

SEQ ID NO: 63817 - protein, 342 aa, Bacillus safensis
  REGION 1..342: note = tr|A0A0M2EHV8|A0A0M2EHV8_9BACI S-adenosylmethionine:tRNA ribosyltransferase-isomerase; OS = Bacillus safensis OX=561879 GN=queA PE=3 SV=1
MKLELFDFDLPERLIAQVPLEKRDASRLMVLNKQTGAITHDTFSQIIDYFQKGDCLVLNNTRVLPARLFGMKEDTGAKVELLLLKQEEGDNWETLVKPAKRVKKGTVITFGDGRLQAVCTEEMEHGGRKVEFQYTGIFYEVLESLGEMPLPPYIKEQLDDRERYQTVYSKEVGSAAAPTAGLHFTTELLDALKAKGVHIAFITLHVGLGTFRPVSAERIEEHEMHAEFYEMNEETADELNRVRKEGGRIISVGTTSTRTLETIASAHDGEFKASSGWTSIFIYPGYTFKAIDGMITNFHLPKSSLIMLVSALAGREHVLKAYNEAVKEEYRFFSFGDAMLIQ

SEQ ID NO: 63818 - protein, 343 aa, unidentified
  source 1..343: note = Bacillus salacetis
  REGION 1..343: note = tr|A0A3A1QPS3|A0A3A1QPS3_9BACI S-adenosylmethionine:tRNA ribosyltransferase-isomerase; OS = Bacillus salacetis OX=2315464 GN=D3H55_19750 PE=3 SV=1
MAAIGNAFKIPQSLNAKVPAERRGSGRDDVRLMVMEGEDVHHERFSSLPDFLNERDLLVFNNSRTIPAVLKAAAGNREVEVRLSRQLDDHRWEALIWGGLFSAGDELMLNEGVSAVVTGTGKEKPLIILAFSISGVELMDYIYRLGEPVRYEYIDSAWTLDAYQTAYASVPGSVEMASAGRAFSWNLLGKLKEKGVKTAFLTLHTGLSYYGHDRWPNPEKHPESYHIPKETVDLIRSVKKAHGRVIAVGTTVVRALETAADENGDLTEAEGITSLYIRKEYRLKTVDGLITGLHEPEATHLEMLTAFTPEHQLFEAYRQALKRGYLWHEFGDMNLILRKNVLQ

SEQ ID NO: 63819 - protein, 342 aa, unidentified
  source 1..342: note = Bacillus salacetis
  REGION 1..342: note = tr|A0A3A1R504|A0A3A1R504_9BACI S-adenosylmethionine:tRNA ribosyltransferase-isomerase; OS = Bacillus salacetis OX=2315464 GN=queA PE=3 SV=1
MKVEDFDFHLPEELIAQTPLEKRSESRLMAIDRKTGSLQHKQFKDITGFLQEGDCLVLNDTRVLPARLFGIKEDTGAKIEVLLLKQEEGDKWETLVKPAKRVKAGTKISFGEGKLTAVCTGEKEQGGRILEFQYEGIFYEVLDELGEMPLPPYISEKLEDQDRYQTVFARERGSAAAPTAGLHFTEELLDEIRSKGIHVAFITLHVGLGTFRPVSVDSIEEHDMHSEFYQITEGTARLLNGVKESGGRIITVGTTSTRTLETIASKHDGRFAEESGWTDIFIYPGYEFKAIDGLVTNFHLPKSTLIMLVSAFTSREIILNAYNTAVEEKYRFFSFGDSMLIL

SEQ ID NO: 63820 - protein, 349 aa, Bacillus salarius
  REGION 1..349: note = tr|A0A3R9RFN7|A0A3R9RFN7_9BACI S-adenosylmethionine:tRNA ribosyltransferase-isomerase; OS = Bacillus salarius OX=284579 GN=queA PE=3 SV=1
MNVNDFDFTLPEELIAQTPLKKRDASRLMVLDPEEDNIHHDSFQSILDYLDEGDCLVLNDTRVLPARLFGEKETGGQVEVLLLKQEDTDEWETLVKPAKRVKSGTILSFGEGKLKAECTDILEHGGRMLRFSYEGVFLEILEELGEMPLPPYIKEKLSDQERYQTVYAKQDGSAAAPTAGLHFTESLLQQAKEKGIQVTTITLHVGLGTFRPVSADNVEDHHMHEEFYQISEGTAMLLNETKAKGNKIVAVGTTSARTLETAAQNKERFYKESGWTDIFIYPGYRFQGIDAMLTNFHLPKSTLVMLVSAMAGRQFLLSAYEEAIREKYRFFSFGDAMLIMKGSRHKWQQ

SEQ ID NO: 63821 - protein, 349 aa, Bacillus salarius
  REGION 1..349: note = tr|A0A428MSW1|A0A428MSW1_9BACI S-adenosylmethionine:tRNA ribosyltransferase-isomerase; OS = Bacillus salarius OX=284579 GN=queA PE=3 SV=1
MNVEDFDFSLPEELIAQTPLEKRDASRLMVLDPEENALHHGAFHSILDYLDEGDCLVLNDTRVLPARLFGEKETGGQVEVLLLKQENTDEWETLVKPAKRVKPGTVLYFGENKLKAECTDVLEHGGRMLRFSYEGVFLEILEELGEMPLPPYIKEKLQDQERYQTVYAKQDGSAAAPTAGLHFTESLLHKAKEKGVHVTTITLHVGLGTFRPVSADKVEDHHMHAEFYQISEGTAMLLNETKTNGNKIVAVGTTSVRTLETAAQNKDGFQKESGWTDIFIYPGYVFQGIDAMLTNFHLPKSTLVMLVSAMAGRNFLLSAYEEAIRERYRFFSFGDAMLIMKGSRHKWQQ

SEQ ID NO: 63822 - protein, 343 aa, unidentified
  source 1..343: note = Bacillus salsus
  REGION 1..343: note = tr|A0A1H0V5H2|A0A1H0V5H2_9BACI S-adenosylmethionine:tRNA ribosyltransferase-isomerase; OS = Bacillus salsus OX=930152 GN=queA PE=3 SV=1
MMKVELFDFDLPEELIAQTPLEDREASRLMVLDKNSGQIRHSHFRSVLDYLQEGDCLVLNDTRVLPARLFGTKDDTGAKVEVLLLKQTEGDNWETLVKPAKRIKVGSVISFGDGLLKAVCTAESEHGGRYLTFQYDGIFYEVLEQLGEMPLPPYIKEQLDDRERYQTVFAKERGSAAAPTAGLHFTEQLLQDIRDKGVHVAFITLHVGLGTFRPMSVENIDEHEMHAEFYQMTEGTARLLNKVKQDGGKIISVGTTSTRTLETIARDNEGQFVESSGWTDIFIFPGYTYKAIDGLITNFHLPKSTLIMLVSALAGRENVLQAYEEAVKERYRFFSFGDAMLII

SEQ ID NO: 63823 - protein, 342 aa, Bacillus selenatarsenatis
  REGION 1..342: note = tr|A0A0A8X8B0|A0A0A8X8B0_9BACI S-adenosylmethionine:tRNA ribosyltransferase-isomerase; OS = Bacillus selenatarsenatis SF-1 OX=1321606 GN=queA PE=3; SV = 1
MKVDLFDFHLPEELIAQTPLEQRAESKLMVLNKESGKIEHDVFKNIKNHLKPGDCLVLNDTKVLPARLFGMKEDTGAKIEVLLLKQLEGDEWETLIKPAKRVKEGTKIVFGDGLLTAECTVEAEHGGRSLRFSYDGIFYEVLEQLGEMPLPPYIKEQLEDKDRYQTVFARERGSAAAPTAGLHFTEELLEEIKEMGIHIAFITLHVGLGTFRPVSVDSIEEHDMHSEFYQVTEGTALLLNSVREQGGRIITVGTTSTRTLETIAAANDGKFVAENGWTNIFIYPGYKFKAINGMITNFHLPKSTLIMLVSALAGRENVLNAYNKAVEERYRFFSFGDAMLIL

SEQ ID NO: 63824 - protein, 346 aa, Bacillus selenatarsenatis
  REGION 1..346: note = tr|A0A0A8X2Q4|A0A0A8X2Q4_9BACI S-adenosylmethionine:tRNA ribosyltransferase-isomerase; OS = Bacillus selenatarsenatis SF-1 OX=1321606; GN = SAMD00020551_1684 PE=3 SV=1
MQLETKIHPHGFSLPPSLNASHPPERRGLRRDQVKMMVLDRVTGNVVHEQFNQIEKYLNSGDILVLNNSRTIPAILKGTLHRNGKVIGTNVEMRLARKKNDSEWEVLIVATNVKSGDCFKFSEILEANVIGKVFKSPLKMIQFNLQGKDLYNEIYSTGEPIRYEYIHHAWNLDYYQTVFASQPGSVEMPSAGRAFSWELLLKLQLKGVKLAFLQLHTGLSYFLDDEFVHSPEEHFEEYSIRQEDMEAILKAKDSGAKVIAAGTTVVRALETAASNSTIQGWTNLYITSDYELQLVDGIITGFHEPKASHLDMLAAFVDEIKLLEAYNLAIEQKYLWHEFGDINLII

SEQ ID NO: 63825 - protein, 351 aa, Bacillus selenitireducens
  REGION 1..351: note = tr|D6XWZ3|D6XWZ3_BACIE S-adenosylmethionine:tRNA ribosyltransferase-isomerase OS=Bacillus selenitireducens (strain ATCC 700615 / DSM 15326 / MLS10) OX=439292; GN = queAPE=3 SV=1
MDVSAFDYELPEELIAQTPLKNREESRLLVMERTTGDLSHQTFSSVIDHLNPGDALVLNDTKVIPARLFGIKKETGAKIEVLLLKEQDDHVWEALVKPAKRLKKGTVISFGEGVLQAECTGELPEGRRLLRFSFDGVFHERLDDLGEMPLPPYIQEQLDEKDRYQTVYAANRGSAAAPTAGLHFTPDLLEKIRAKGIRTVFLTLHVGLGTFRPVSVDTVEDHTMHAEFYQFSEASARALRETRARGGRIIAVGTTSARTLETIVRDHDDFAAASGWTDIFIYPGYRFQGIDGLLTNFHLPKSTLVMLVSAFSKREFVLDAYREAVRERYRFFSFGDAMLIANQSGDSRKGE

SEQ ID NO: 63826 - protein, 344 aa, Bacillus shackletonii
  REGION 1..344: note = tr|A0A0Q3TJ38|A0A0Q3TJ38_9BACI S-adenosylmethionine:tRNA ribosyltransferase-isomerase; OS = Bacillus shackletonii OX=157838 GN=AN964_10965 PE=3 SV=1
MMTKATTFDFYLPSELNASHPPERRGIRRDHVKMMVLDRITGNIRHDQFFQLSNYLKQGDLVVLNNSRTIPAILQAKLLRETKLIEENVEIRLARSRDEEVWDVLIVANEIKRGDILQFSSDLSAIVIEYTDSSPLRTIQFSKKGTELFNRIYALGEPIRYEYIHQPWALDYYQTVFASVPGSVEMPSAGRAFSWELLFNLQRNGIQLEFIQLHTGLSYLLDDELETSPTDNYEKYHLSETTVEKIDKTKASGGRVIAVGTTVVRALESAAMTGVLSGVTNLYINQSFPLKFVDGIITGFHEPKASHLDMLTAFLPQELLWNAYDEAIKNRYQWHEFGDMNLII

SEQ ID NO: 63827 - protein, 342 aa, Bacillus shackletonii
  REGION 1..342: note = tr|A0A0Q3THD8|A0A0Q3THD8_9BACI S-adenosylmethionine:tRNA ribosyltransferase-isomerase; OS = Bacillus shackletonii OX=157838 GN=queA PE=3 SV=1
MKVDIFDFHLPEELIAQTPLKNRSDSRLMVLNKENGEIEHTVFKNITKYLRKGDCLVLNNTKVLPARLFGVKEDTGAHIEVLLLKQLEEDNWETLVKPAKRVKVGTKLTFGDGQLVAHCVKEEEHGGRVLKFEYNGIFYEVLEALGEMPLPPYIKEKLDDRDRYQTVYAKEEGSAAAPTAGLHFTHELLEEIKNMGVHITFLTLHVGLGTFRPVSVENIEKHDMHSEYYQVSKETADLINNVKKQGGRVIAVGTTSTRTLETIASEHNGEIVAQNGWTDIFIYPGYEFKGIDGMITNFHLPKSTLIMLVSALAGREHILHAYETAVQEKYRFFSFGDAMLII

SEQ ID NO: 63828 - protein, 342 aa, Bacillus siamensis
  REGION 1..342: note = tr|A0A268DS02|A0A268DS02_9BACI S-adenosylmethionine:tRNA ribosyltransferase-isomerase; OS = Bacillus siamensis OX=659243 GN=queA PE=3 SV=1
MKVDLFDFELPERLIAQVPLKERDASRLMVLDKQTGGLTDSSFKEIVSFFKEGDCLVLNNTRVLPARLFGTKEDTGAKVELLLLKQEENDTWETLVKPAKRVKKGTVLTFGDGRLTAVCTEELDHGGRKIEFRYDGIFYEVLESLGEMPLPPYIKEQLDDKERYQTVFSKEIGSAAAPTAGLHFTEEILDELKQKGVRIEFITLHVGLGTFRPVSADDVEEHNMHAEFYEMTEETAASLNEVRKSGGRIVSVGTTSTRTLETIAGEHDGVFTASSGWTSIFIYPGYEFKAIDGMITNFHLPKSSLIMLVSALAGREHVLSAYRHAVEEEYRFFSFGDAMLII

SEQ ID NO: 63829 - protein, 342 aa, Bacillus siamensis
  REGION 1..342: note = tr|A0A2K9K921|A0A2K9K921_9BACI S-adenosylmethionine:tRNA ribosyltransferase-isomerase; OS = Bacillus siamensis OX=659243 GN=queA PE=3 SV=1
MKVDLFDFELPERLIAQVPLKERDASRLMVLDKQTGGLTDSSFKEIVSFFKEGDCLVLNNTRVLPARLFGTKEDTGAKVELLLLKQEENDTWETLVKPAKRVKKGTVLTFGDGRLTAVCTEELDHGGRKIEFRYDGIFYEVLESLGEMPLPPYIKEQLDDKERYQTVFSKEIGSAAAPTAGLHFTEEILDELKQKGVRIEFITLHVGLGTFRPVSADDVEEHNMHAEFYEMTEETAASLNEIRKSGGRIVSVGTTSTRTLETIAGEHDGVFTASSGWTSIFIYPGYEFKAIDGMITNFHLPKSSLIMLVSALAGREHVLSAYRHAVEEEYRFFSFGDAMLII

SEQ ID NO: 63830 - protein, 342 aa, Bacillus simplex
  REGION 1..342: note = tr|A0A127DAI9|A0A127DAI9_9BACI S-adenosylmethionine:tRNA ribosyltransferase-isomerase; OS = Bacillus simplex OX=1478 GN=queA PE=3 SV=1
MKLEMFDFHLPEELIAQVPLEDREASRLMVLDKETGKLQHDVFSHITEYIKPGDCLVLNDTKVLPARLYGSKEETGAKVEVLLLKQEHDDVWETLVKPAKRIKVGSTIIFGDGKLSAVCTGVLEHGGRILEFKYEGIFYEILEKLGEMPLPPYIKEQLDDQDRYQTVYARERGSAAAPTAGLHFTEDLLEKLKGMGVHIAFITLHVGLGTFRPVSVDDIDSHEMHSEFYQMTEGTARLLNDVKEKGGKIITVGTTSTRTLETIASRNDGVFKEENGWTSIFIYPGYEFKGIDAMITNFHLPKSTLIMLISALAGREHILHAYETAVKEKYRFFSFGDAMLIK

SEQ ID NO: 63831 - protein, 342 aa, Bacillus simplex
  REGION 1..342: note = tr|A0A2A4BN83|A0A2A4BN83_9BACI S-adenosylmethionine:tRNA ribosyltransferase-isomerase; OS = Bacillus simplex OX=1478 GN=queA PE=3 SV=1
MKLDMFDFHLPEELIAQVPLEDREASRLMVLDKETGKLQHDVFSHITEYIKPGDCLVLNDTKVLPARLYGSKEGTGAKIEVLLLKQEHDDVWETLVKPAKRIKEGSTIVFGDGKLSAVCTGVLEHGGRILEFKYDGIFYEILEKLGEMPLPPYIKEQLDDQDRYQTVYARERGSAAAPTAGLHFTEDLLEKLKGMGVHIAFITLHVGLGTFRPVSVDDIDSHEMHSEFYQMTEGTARLLNDVKEKGGKIITVGTTSTRTLETIASRNDGVFKEENGWTSIFIYPGYEFKGIDAMITNFHLPKSTLIMLISALAGREHVLHAYETAVEEKYRFFSFGDAMLIK

SEQ ID NO: 63832 - protein, 342 aa, Bacillus smithii
  REGION 1..342: note = tr|G9QQ32|G9QQ32_9BACI S-adenosylmethionine:tRNA ribosyltransferase-isomerase OS=Bacillus smithii 7_3_47FAA; OX = 665952 GN=queA PE=3 SV=1
MNVEDFDFELPEELIAQTPLKNRSESRLMVLDKETGEIKHDIFKNLLHHLNPGDCLVLNDSKVLPARLYGVKKDTGAHIEILLLKQLEGDRWETLAKPAKRLKEGSQIIFGDGQLTAECVGELDHGGRVIEFHYDGIFYEILDQLGEMPLPPYIKEKLEDQDRYQTVYAKERGSAAAPTAGLHFTEELLKKIESAGVHLAFLTLHVGLGTFRPVSVDRVEDHDMHAEFYQVSKETADLIEKVRREGGKIYSVGTTSTRTLETIARDHDGKIVPASGWTDIFIYPGFQFRAIDGLITNFHLPKSTLIMLVSALAGRENILNAYETAVREKYRFFSFGDAMFIK

SEQ ID NO: 63833 - protein, 342 aa, Bacillus smithii
  REGION 1..342: note = tr|A0A0H4P1G0|A0A0H4P1G0_9BACI S-adenosylmethionine:tRNA ribosyltransferase-isomerase; OS = Bacillus smithii OX=1479 GN=queA PE=3 SV=1
MNVEDFDFELPEELIAQTPLKNRSESRLMVLDKETGEIKHDIFKNLLHHLNPGDCLVLNDSKVLPARLYGVKKDTGAHIEILLLKQLEGDRWETLAKPAKRLKEGSQIIFGDGQLTAECVGKLDHGGRVIEFHYDGIFYEILDQLGEMPLPPYIKEKLEDQDRYQTVYAKERGSAAAPTAGLHFTEELLKEIESAGVHLAFLTLHVGLGTFRPVSVDRVEDHDMHAEFYQVSKETADLIEKVRREGGKIYSVGTTSTRTLETIARDHDGKIVPASGWTDIFIYPGFQFRAIDGLITNFHLPKSTLIMLVSALAGRENILNAYETAVREKYRFFSFGDAMFIK

SEQ ID NO: 63834 - protein, 345 aa, unidentified
  source 1..345: note = Bacillus solani
  REGION 1..345: note = tr|A0A0Q3VFD2|A0A0Q3VFD2_9BACI S-adenosylmethionine:tRNA ribosyltransferase-isomerase; OS = Bacillus solani OX=1637975 GN=AN957_01830 PE=3 SV=1
MMSTARSFQVPEYLNARMPAEYRGIQRDHVRLMTLDTVTGDCSHNFFNKLDSYLVEGDLLVLNNSRTIPAVLKGKRGKQTIEIRLSRKLSDREWEALIVGGVITVGEKIDLPGGLTATITGLGTEAPLIVLSFSKSGLDLLEIFYQYGEPLHYEYIETPWPIEMYQTVYASVPGSVEMPSAGRAFTWRLLNMLKGKGVNIAYIQLHAGLSYYGNDRWPNPNKHLEEFCVPVKTAELINKTRKNNGRVIAVGTTVVRALETAVNTDGNVEPQEGITSLYIQKGYPLKAVDGLITGFHEPEASHLDLLSAFIDKGLLMKAYKKALADGYLWHEFGDMNLILPMDERK

SEQ ID NO: 63835 - protein, 342 aa, unidentified
  source 1..342: note = Bacillus solani
  REGION 1..342: note = tr|A0A0Q3QSI2|A0A0Q3QSI2_9BACI S-adenosylmethionine:tRNA ribosyltransferase-isomerase; OS = Bacillus solani OX=1637975 GN=queA PE=3 SV=1
MKVDLFDFHLPEELIAQTPLIERTSSRLMVLDKEKGTTRHTVFKQIKEHLKAGDCLVLNDTRVLPARLFGEKEGTGAKIEVLLLKQLEGDSWETLIKPAKRVKEGTRIVFGDGKLSAVCTQTSEHGGRVLEFQYDGIFYEVLEQLGEMPLPPYIKEQLDDQERYQTVFARERGSAAAPTAGLHFTEQLLEEIKELGVHIAFITLHVGLGTFRPVNVEDLNEHEMHSEFYQMTEGTARLLNEVREDGGRIISVGTTSTRTLETIASANNGRFEEASGWTDIFIYPGYEFKAIDGMITNFHLPKSTLIMLVSALAGRENVLNAYREAVEEKYRFFSFGDAMLII

SEQ ID NO: 63836 - protein, 347 aa, unidentified
  source 1..347: note = Bacillus solimangrovi
  REGION 1..347: note = tr|A0A1E5LBM3|A0A1E5LBM3_9BACI S-adenosylmethionine:tRNA ribosyltransferase-isomerase; OS = Bacillus solimangrovi OX=1305675 GN=queA PE=3 SV=1
MDVNLFDFNLPEELIAQTPLEERTASKLMVLDKETGKIKHETFKNILDYLYPGDCLVLNDTKVLPARLYGMKEETGAKVEVLLLKQLEGDTWETLVKPAKRVKVGTIVSFGDGRLKAKCISENEHGGRNFEFMYEGIFYEVLDSLGEMPLPPYIKEQLDDRSRYQTVFARERGSAAAPTAGLHFTEELLEAIRAKGVYITFITLHVGLGTFRPVSVDSIEEHEMHGEFYQMSHETAEQLNQVRKEGGRIISVGTTSTRTLETIASSYNGEFKESSGWTSIFIYPGYAFKGIDGMITNFHLPKSTLIMLISALAGRENVLHAYEEAVNRRYRFFSFGDAMFITNKLSE

SEQ ID NO: 63837 - protein, 342 aa, Bacillus sonorensis
  REGION 1..342: note = tr|M5P6T2|M5P6T2_9BACI S-adenosylmethionine:tRNA ribosyltransferase-isomerase OS=Bacillus sonorensis L12; OX = 1274524 GN=queA PE=3 SV=1
MKVELFDFDLPERLIAQVPLKERDASRLMVLNKQTGDITHSTFKHIIDFMQAGDCLVLNDTRVLPARLFGIKEETGAKVEVLLLKQEEGDIWETLVKPAKRVKRGTVLTFGDGRLTAVCTEELDHGGRKIEFRYEGIFYEVLESLGEMPLPPYIKEQLDDKERYQTVYSKKQGSAAAPTAGLHFTEEILEALKQKGVEIAFITLHVGLGTFRPVSAEHVEEHDMHAEFYEMTEETAAILNRVKDSGGRIISVGTTSTRTLETIASENDGRFREARGWTSIFIYPGYTFKAIDGMVTNFHLPKSSLIMLVSALAGREHILSAYRTAVEHEYRFFSFGDAMLIQ

SEQ ID NO: 63838 - protein, 342 aa, Bacillus sp.; identical to SEQ ID NO: 63673
  REGION 1..342: note = tr|A0A0Q9GWY4|A0A0Q9GWY4_9BACI S-adenosylmethionine:tRNA ribosyltransferase-isomerase; OS = Bacillus sp. Root239 OX=1736499 GN=queA PE=3 SV=1

SEQ ID NO: 63839 - protein, 350 aa, Bacillus sp.
  REGION 1..350: note = tr|A0A2B4NUD0|A0A2B4NUD0_9BACI S-adenosylmethionine:tRNA ribosyltransferase-isomerase; OS = Bacillus sp. AFS075960 OX=2034282 GN=queA PE=3 SV=1
MDINLFDFHLPEELIAQVPLEDRETSRLMVLDRETGDIEHKHFTDILSYLHEGDCLVLNETKVMPARLHGVKEDTGAHIEVLLLKQEEGDKWETLVKPAKRVKEGTVISFGEGKLKATCTGTADQGGRQLEFSYDGIFYEILDELGEMPLPPYIKETLEDRDRYQTVYAKEIGSAAAPTAGLHFTEELLEKLKQKGVELAFITLHVGLGTFRPVSADTIEEHHMHAEYYHMSEETAALLNRVKESGGRIITVGTTSTRTLETIATDHDGKLCAASGWTDIFMYPGYEFKAIDGLITNFHLPKSTLIMLVSAFANRDNVLHAYNEAVKEKYRFFSFGDAMFVASHAKMGNK

SEQ ID NO: 63840 - protein, 342 aa, Bacillus sporothermodurans
  REGION 1..342: note = tr|A0A2T6ELY9|A0A2T6ELY9_9BACI S-adenosylmethionine:tRNA ribosyltransferase-isomerase; OS = Bacillus sporothermodurans OX=46224 GN=queA PE=3 SV=1
MKVDLFDFNLPESLIAQTPLKNRSDSRLMVLNKETGDLKHTVFKNITEYLQPGDCLVLNDTKVLPARLFGIKEDTGAKIEVLLLKQTEDDRWETLVKPAKRIKIGSEIIFGDGKLKATCIEEKEHGGRILEFQYEGIFYEVLDALGEMPLPPYIKEQLDDRDRYQTVYAKESGSAAAPTAGLHFTEELLEEIKNMGVHIAFITLHVGLGTFRPVSVEDVDKHSMHAEFYQVNEETAELINNVKKQGGRIISVGTTSTRTLETIASANNGQIVSTSGWTDIFIFPGYEFKGIDGMITNFHLPKSTLIMLVSALAGREHVLHAYEEAVNQKYRFFSFGDAMLII

SEQ ID NO: 63841 - protein, 342 aa, Bacillus sporothermodurans
  REGION 1..342: note = tr|A0A150LEY6|A0A150LEY6_9BACI S-adenosylmethionine:tRNA ribosyltransferase-isomerase; OS = Bacillus sporothermodurans OX=46224 GN=queA PE=3 SV=1
MKVDLFDFNLPESLIAQTPLKNRSDSRLMVLNKETGDIKHTVFKNITEYLQPGDCLVLNDTKVLPARLFGIKEDTGAKIEVLLLKQTEDDRWETLVKPAKRIKIGSEIIFGDGKLKATCIEEKEHGGRILEFQYEGIFYEVLDALGEMPLPPYIKEQLDDRDRYQTVYAKESGSAAAPTAGLHFTEELLEEIKNMGVHIAFITLHVGLGTFRPVSVEDVDKHSMHAEFYQVNEETAELINNVKKQGGRIISVGTTSTRTLETIASANNGQIVSTSGWTDIFIFPGYEFKGIDGMITNFHLPKSTLIMLVSALAGREHVLHAYEEAVNQKYRFFSFGDAMLII

SEQ ID NO: 63842 - protein, 342 aa, Bacillus stratosphericus
  REGION 1..342: note = tr|A0A4Y9JU92|A0A4Y9JU92_9BACI S-adenosylmethionine:tRNA ribosyltransferase-isomerase; OS = Bacillus stratosphericus OX=293386 GN=queA PE=3 SV=1
MKLELFDFDLPERLIAQVPLEKRDASRLMVLNKQTGAITHDTFSQIIDYFQKGDCLVLNNTRVLPARLFGMKEDTGAKVELLLLKQEEGDNWETLVKPAKRVKKGTVITFGDGRLQAVCTEEMEHGGRKVEFQYTGIFYEVLESLGEMPLPPYIKEQLDDRERYQTVYSKEVGSAAAPTAGLHFTTELLDALKAKGVHIAFITLHVGLGTFRPVSAERIEEHEMHAEFYEMNEETADALNRVRNEGGRIISVGTTSTRTLETIASAHDGAFKASSGWTSIFIYPGYTFKAIDGMITNFHLPKSSLIMLVSALAGREHVLKAYNEAVKEEYRFFSFGDAMLIQ

SEQ ID NO: 63843 - protein, 342 aa, Bacillus stratosphericus
  REGION 1..342: note = tr|M5RER6|M5RER6_9BACI S-adenosylmethionine:tRNA ribosyltransferase-isomerase OS=Bacillus stratosphericus LAMA 585 OX=1236481 GN=queA PE=3 SV=1
MKLELFDFDLPERLIAQVPLEKRDASRLMVLNKQTGDITHDTFSQITDYFQKGDCLVLNNTRVLPARLFGTKEDTGAKVELLLLKQEEGDKWETLVKPAKRVKNGTVITFGDGRLKAVCTEELEHGGRKVEFQYTGIFYEVLESLGEMPLPPYIKEQLDDRERYQTVYSKEVGSAAAPTAGLHFTNELLDALKAKGVHIAFITLHVGLGTFRPVSAERIEEHEMHAEFYEMNEETAEELNRVRKEGGRIISVGTTSTRTLETIASAYDGEFKASSGWTSIFIYPGYTFKAIDGMITNFHLPKSSLIMLVSALAGREHVLKAYNEAVKEEYRFFSFGDAMLIQ

SEQ ID NO: 63844 - protein, 340 aa, Bacillus subterraneus
  REGION 1..340: note = tr|A0A0D6Z7K9|A0A0D6Z7K9_9BACI S-adenosylmethionine:tRNA ribosyltransferase-isomerase; OS = Bacillus subterraneus OX=285983 GN=UB32_12240 PE=3 SV=1
MKAGVMDFYLPENLNANLPPEKRGLKRDQVRLMTLSRKTGEIQHDRFDHLPYFLQPGDLIILNNSRTIPASLQGDCIREGVQILPRVEIRLARRIFDDTWDALIIANSVRMGDVLHFSEKLTATVIAEIDTSPLKTIKFNKGGSELLNLIYVLGAPIRYEYIEQPWDLNYYQNVFATHPGSVEMPSAGRAFSWELLFDLKKKGIQVDFIQLHTGLSYLLEDHVDPKENPEEYHIRQHTMEQILKAHSSGKKVIAVGTTVVRALESAARNEELSGATNLYIDQESSLKIVDGIITGFHEPRASHLDMLTAFLPKHHLFHAYQQAIHEGYLWHEFGDMNLII

SEQ ID NO: 63845 - protein, 342 aa, Bacillus subterraneus
  REGION 1..342: note = tr|A0A3R9FC23|A0A3R9FC23_9BACI S-adenosylmethionine:tRNA ribosyltransferase-isomerase; OS = Bacillus subterraneus OX=285983 GN=queA PE=3 SV=1
MKVDLFDFHLPEELIAQTPLEQRAESRLMVLDKETGNIDHDVFKNIKKYLKPGDCLVLNDTKVLPARLFGMKEDTGAKIEVLLLKQLEGDEWETLIKPAKRVKEGTKIVFGDGLLTAECTGEAEHGGRNLKFSYDGIFYEVLEQLGEMPLPPYIKEQLEDKDRYQTVFARERGSAAAPTAGLHFTEELLEEIKGLGIHIAFITLHVGLGTFRPVSVDSIEEHDMHSEFYQVTEGTALLLNSVREQGGRIITVGTTSTRTLETIATANDGKFVAENGWTNIFIYPGYEFKAIDGMITNFHLPKSTLIMLVSALAGRENVLNAYNKAVEERYRFFSFGDAMLIL

SEQ ID NO: 63846 - protein, 342 aa, Bacillus subtilis
  REGION 1..342: note = sp|O32054|QUEA_BACSU S-adenosylmethionine:tRNA ribosyltransferase-isomerase OS=Bacillus subtilis (strain 168) OX=224308 GN=queA PE=1 SV=1
MKVDLFDFELPERLIAQVPLEQRDASRLMVLDKHTGELTDSSFKHIISFFNEGDCLVLNNTRVLPARLFGTKEDTGAKVELLLLKQETGDKWETLAKPAKRVKKGTVVTFGDGRLKAICTEELEHGGRKMEFQYDGIFYEVLESLGEMPLPPYIKEQLDDKERYQTVYSKEIGSAAAPTAGLHFTEEILQQLKDKGVQIEFITLHVGLGTFRPVSADEVEEHNMHAEFYQMSEETAAALNKVRENGGRIISVGTTSTRTLETIAGEHDGQFKASSGWTSIFIYPGYEFKAIDGMITNFHLPKSSLIMLVSALAGRENILRAYNHAVEEEYRFFSFGDAMLII

SEQ ID NO: 63847 - protein, 342 aa, Bacillus subtilis; identical to SEQ ID NO: 63846
  REGION 1..342: note = tr|A0A063XI68|A0A063XI68_BACIU S-adenosylmethionine:tRNA ribosyltransferase-isomerase; OS = Bacillus subtilis OX=1423 GN=queA PE=3 SV=1

SEQ ID NO: 63848 - protein, 342 aa, unidentified
  source 1..342: note = Bacillus swezeyi
  REGION 1..342: note = tr|A0A5D4QAG4|A0A5D4QAG4_9BACI S-adenosylmethionine:tRNA ribosyltransferase-isomerase; OS = Bacillus swezeyi OX=1925020 GN=queA PE=3 SV=1
MKVDLFDFELPERLIAQVPLKERDASRLMVLDKETGGITHSTFKHIIDFLEAGDCIVLNDTRVLPARLFGVKEETGAKVEVLLLKQEEGDGWETLVKPAKRVKRGTVLTFGDGRLTAVCTEELDHGGRKIEFRYEGIFYEVLESLGEMPLPPYIKEQLDDKERYQTVYSKKQGSAAAPTAGLHFTEEILDALKEKGVHIAFITLHVGLGTFRPVSAETVEEHDMHAEFYEMTAETAAALNQVKQKGGRIISVGTTSTRTLETIASEHDGRFQEARGWTSIFIYPGYAFRAIDGMITNFHLPKSSLIMLVSALAGREHVLSAYRTAVEHEYRFFSFGDAMLIK

SEQ ID NO: 63849 - protein, 342 aa, unidentified
  source 1..342: note = Bacillus swezeyi
  REGION 1..342: note = tr|A0A1R1Q8S9|A0A1R1Q8S9_9BACI S-adenosylmethionine:tRNA ribosyltransferase-isomerase; OS = Bacillus swezeyi OX=1925020 GN=queA PE=3 SV=1
MKVDLFDFELPERLIAQVPLQERDASRLMVLDKETGDITHSTFKHIIDFLEAGDCIVLNDTRVLPARLFGVKEETGAKVEVLLLKQEEGDEWETLVKPAKRVKRGTVLTFGDGRLTAVCTEELDHGGRKIEFRYEGIFYEVLESLGEMPLPPYIKEQLDDKERYQTVYSKKQGSAAAPTAGLHFTDEILDALKEKGVHIAFITLHVGLGTFRPVSAETVEEHDMHAEFYEMTAETAAALNQVKQDGGRIISVGTTSTRTLETIASEHDGRFQEARGWTSIFIYPGYAFRAIDGMITNFHLPKSSLIMLVSALAGREHVLSAYRTAVEHEYRFFSFGDAMLIK

SEQ ID NO: 63850 - protein, 353 aa, Bacillus taeanensis
  REGION 1..353: note = tr|A0A366Y2I4|A0A366Y2I4_9BACI S-adenosylmethionine:tRNA ribosyltransferase-isomerase; OS = Bacillus taeanensis OX=273032 GN=queA PE=3 SV=1
MDVNLFDFNLPESLIAQTPLKDRTSSRLMVVDPQSNQIRHHQFKNILQFLNAGDCLVLNDTRVLPARLYGIKEETGAKVEVLLLKQEKDDQWETLVKPAKRVKNGTVLSFGDGRLTATCIKELEHGGRILEFHYEGIFYEVLDSLGEMPLPPYIKETLDEKERYQTVYAKHRGSAAAPTAGLHFTEKLLTEIEEMGVHIVYLTLHVGLGTFRPVSADKVEEHEMHAEFYQLSKGSAEKLNAVKDAGGRIIAVGTTSTRTLETIASDNDGVFKEASGWTSIFIYPGYAFKAINGMITNFHLPKSSLVMLVSALAGREFILSAYEEAVREQYRFFSFGDAMLILEGSLEHDSSEI

SEQ ID NO: 63851 - protein, 342 aa, Bacillus tequilensis
  REGION 1..342: note = tr|A0A2X0XV33|A0A2X0XV33_9BACI S-adenosylmethionine:tRNA ribosyltransferase-isomerase; OS = Bacillus tequilensis OX=227866 GN=queA PE=3 SV=1
MKVDLFDFELPERLIAQVPLEQRDASRLMVLDKHTGELTDSSFKHIISFFKEGDCLVLNNTRVLPARLFGTKEDTGAKVELLLLKQETGDNWETLAKPAKRVKKGTVVTFGDGRLKAICTEELEHGGRKMEFQYDGIFYEVLESLGEMPLPPYIKEQLDDRERYQTVYSKEIGSAAAPTAGLHFTEEILQQLKDKGVQIEFITLHVGLGTFRPVSADDVEEHNMHAEFYQMSEETAAALNKIRENGGRIISVGTTSTRTLETIAGEHDGQFKASSGWTSIFIYPGYEFKAIDGMITNFHLPKSSLIMLVSALAGRENVLRAYHHAVEEEYRFFSFGDAMLIL

SEQ ID NO: 63852 - protein, 342 aa, unidentified
  source 1..342: note = Bacillus terrae
  REGION 1..342: note = tr|A0A429X1G8|A0A429X1G8_9BACI S-adenosylmethionine:tRNA ribosyltransferase-isomerase; OS = Bacillus terrae OX=1914933 GN=queA PE=3 SV=1
MKVDMFDFNLPEELIAQTPLENRSSSRLMVLNKQTGEVKHETFRKLIDYLNPGDCLVLNDTKVLPARLFGIKTDTGAKVEVLLLKQTNEDRWETLVKPAKRVKKGTEISFGDGRLKAVCTGTEDHGGRLFEFQYEGIFYEILDSLGKMPLPPYIKEQLEDQGRYQTVYARERGSAAAPTAGLHFTNEILESLKEKGVHVAFVTLHVGLGTFRPVSVDSVEDHDMHAEFYRMSKETAALLNQVKKDGGRIISVGTTSTRTLETIARENGGLFKAGNGWTDIFIYPGYEFRAIDGLVTNFHLPMSTLIMLVSALAGREYILYAYETAVQEKYRFFSFGDAMLII

SEQ ID NO: 63853 - protein, 342 aa, Bacillus thermoamylovorans
  REGION 1..342: note = tr|A0A2U8EDU9|A0A2U8EDU9_9BACI S-adenosylmethionine:tRNA ribosyltransferase-isomerase; OS = Bacillus thermoamylovorans OX=35841 GN=queA PE=3 SV=1
MKLEDFDYYLPDELIAQTPLQDRAASRLMVLNKQTGEIEHKIFSDIIHYLNPGDCLVLNDTKVMPARLFGMKEDTNAHVEVLLLKQIEGDKWETLVKPAKRIKPGTVISFGGGKLHAKCIDTLEYGGRIFEFQYDGIFYEILDELGEMPLPPYIKKRLDDADRYQTVYAREIGSAAAPTAGLHFTEKLLADIKNKGVHIAFITLHVGLGTFRPVNVESIEEHEMHAEFYHMTEETANLLNEVKKNGGRIISVGTTSTRTLETIAARHNGSFVAESGWTDIFIYPGFQFKAIDCLITNFHLPKSTLIMLVSALAGREHILHAYETAVKERYRFFSFGDAMFIH

SEQ ID NO: 63854 - protein, 342 aa, Bacillus thermoamylovorans; identical to SEQ ID NO: 63744
  REGION 1..342: note = tr|A0A090IWR4|A0A090IWR4_9BACI S-adenosylmethionine:tRNA ribosyltransferase-isomerase; OS = Bacillus thermoamylovorans OX=35841 GN=queA PE=3 SV=1

SEQ ID NO: 63855 - protein, 343 aa, unidentified
  source 1..343: note = Bacillus thermocopriae
  REGION 1..343: note = tr|A0A410XKZ6|A0A410XKZ6_9BACI S-adenosylmethionine:tRNA ribosyltransferase-isomerase; OS = Bacillus thermocopriae OX=1215031 GN=queA PE=3 SV=1
MKIDLFDFYLPEELIAQTPLPNREASRLMVLDKKTGEVTHEPTFRSILSYLKEGDCLVLNDTRVLPARLYGEKEETGAHIEVLLLKQLDGDQWETLVKPAKRVKVGTIISFGDGRLRAECVAELEHGGRILSFSYDGIFLEVLESLGEMPLPPYIKAQLHDRERYQTVYAREAGSAAAPTAGLHFTEQLLEDVRKKGVHLAFITLHVGLGTFRPVNVENIEEHDMHAEFYQMSEQTAQLLNDVKAQGGRIIAVGTTSTRTLETIASRHDGTFVAESGWTDIFIYPGYTFRAIDGMITNFHLPKSTLIMLVSALAGREHVLRAYEEAVKERYRFFSFGDAMLII

SEQ ID NO: 63856 - protein, 343 aa, unidentified
  source 1..343: note = Bacillus thermozeamaize
  REGION 1..343: note = tr|A0A1Y3PIL9|A0A1Y3PIL9_9BACI S-adenosylmethionine:tRNA ribosyltransferase-isomerase; OS = Bacillus thermozeamaize OX=230954 GN=queA PE=3 SV=1
MDVSQFDFDVPEDLIAQSPLPQREQSRLLVLRRRSGKIEHRRFREIVEYLSPGDCLVLNHSKVIPARLHGVKESTGARVEVLLLHRLDGERWETLVRPGKKVREEDWLSFGDGQLRGLVERRTEVGGRVIRFFYEGLFEEVLDRLGEMPLPPYIRAGLPDRGRYQTVYAKEPGSAAAPTAGLHFTEQLLQELKERGVEQAFLTLHVGLGTFRPVTVERVEEHRMHAEYYELGEEAAALIRRTKQRGGRVVAVGTTSCRTLEWIARKFQGEIRADRGWTDLFIYPGYAFRAIDGLITNFHLPRSTLVMLVSAFAGMEQTRRAYEEAIRERYRFYSFGDAMLIID

SEQ ID NO: 63857 - protein, 350 aa, Bacillus thuringiensis; identical to SEQ ID NO: 63668
  REGION 1..350: note = tr|C3G8M5|C3G8M5_BACTU S-adenosylmethionine:tRNA ribosyltransferase-isomerase OS=Bacillus thuringiensis serovar andalousiensis BGSC 4AW1 OX=527032 GN=queA PE=3; SV = 1

SEQ ID NO: 63858 - protein, 350 aa, Bacillus thuringiensis; identical to SEQ ID NO: 63688
  REGION 1..350: note = tr|W8YHM0|W8YHM0_BACTU S-adenosylmethionine:tRNA ribosyltransferase-isomerase OS=Bacillus thuringiensis DB27 OX=1431339 GN=queA PE=3 SV=1

SEQ ID NO: 63859 - protein, 342 aa, unidentified
  source 1..342: note = Bacillus timonensis
  REGION 1..342: note = tr|A0A4S3PS44|A0A4S3PS44_9BACI S-adenosylmethionine:tRNA ribosyltransferase-isomerase; OS = Bacillus timonensis OX=1033734 GN=E1I69_12135 PE=3 SV=1
MVAKALDFYLPSQLNASHPPEKRGIRRDHVRMMVLNRSSGNIEHDQFFHLPHYLEPGDLVILNNSRTIPAVLHAKWYRNKVQLTTKTEIRLARRREDDIWETLIVESRVKIGDQFIFSPELTATVIGVKKNSPLKLLKFTKKGSDLLNIIYALGEPVRYEYIDHPWSLDYYQTVFASQPGSVEMPSAGRAFSWELLFTLMRKGIQVDFIQLHTGLSYLLDDQWHQSPEENEEEYHISEKTMQRTLETKAAGKKVIAVGTTVVRALESAEKLGHLSGVTNLYIHREFPMKIADGIITGFHEPQASHLDMLSAFIAEHHLLRAYDQAIDAKYLWHEFGDMNLII

SEQ ID NO: 63860 - protein, 341 aa, unidentified
  source 1..341: note = Bacillus timonensis
  REGION 1..341: note = tr|A0A4S3PZE7|A0A4S3PZE7_9BACI S-adenosylmethionine:tRNA ribosyltransferase-isomerase; OS = Bacillus timonensis OX=1033734 GN=queA PE=3 SV=1
MKVDLFDFDLPEELIAQTPLENREASRLMVVDKETGEITHTHFRSILSYLNKGDCLVLNDTRVLPARLYGVKEDTGAKVEVLLLKQKDGDTWETLVKPAKRVKEGTVLTFGDGRLKATCTDIGDHGGRMLEFHYEGIFYEVLDALGEMPLPPYIHEQLDDKERYQTVYAKHRGSAAAPTAGLHFTEELLQEIRDKGVHTAFITLHVGLGTFRPVSSDTIEDHDMHSEFYQMTDETAKLLNDVKKSGGKIISVGTTSTRTLETIVKKHGKFVESSGWTSIFIYPGYQYEAINGLITNFHLPKSTLIMLVSALAGRENILHAYNEAVKERYRFFSFGDAMLIK

SEQ ID NO: 63861 - protein, 350 aa, unidentified
  source 1..350: note = Bacillus toyonensis
  REGION 1..350: note = tr|A0A2C4F3E8|A0A2C4F3E8_9BACI S-adenosylmethionine:tRNA ribosyltransferase-isomerase; OS = Bacillus toyonensis OX=155322 GN=queA PE=3 SV=1
MDINLFDFHLPEELIAQVPLEDRETSRLMVLDRETGDIEHKHFTDILSYLHEGDCLVLNETKVMPARLHGEKEDTGAHIEVLLLKQEEGDKWETLVKPAKRVKEGTVISFGEGKLKATCTGTADQGGRQLEFSYDGIFYEILDELGEMPLPPYIKETLEDRDRYQTVYAKEIGSAAAPTAGLHFTEELLEKLKKKGVQLAFITLHVGLGTFRPVSADTIEEHHMHAEYYHMSEETAALLNRVKENGGRIITVGTTSTRTLETIATDHSGKLCAASGWTDIFMYPGYEFKAIDGLITNFHLPKSTLIMLVSAFSNRDNVLHAYNEAVKEKYRFFSFGDAMFVASHAKMRNK

SEQ ID NO: 63862 - protein, 350 aa, unidentified
  source 1..350: note = Bacillus toyonensis
  REGION 1..350: note = tr|A0A2C5KGI6|A0A2C5KGI6_9BACI S-adenosylmethionine:tRNA ribosyltransferase-isomerase; OS = Bacillus toyonensis OX=155322 GN=queA PE=3 SV=1
MDINLFDFHLPEELIAQVPLEDRETSRLMVLDRETGDIEHKHFTDILSYLHEGDCLVLNETKVMPARLHGVKEDTGAHIEVLLLKQEEGDKWETLVKPAKRVKEGTVISFGEGKLKATCTGTADQGGRQLEFSYDGIFYEILDELGEMPLPPYIKETLEDRDRYQTVYAKEIGSAAAPTAGLHFTEELLEKLKKKGVQLAFITLHVGLGTFRPVSADTIEEHHMHAEYYYMSEETAALLNRVKENGGRIITVGTTSTRTLETIATDHSGKLCAASGWTDIFMYPGYKFKAIDGLITNFHLPKSTLIMLVSAFSNRDNVLHAYNEAVKEKYRFFSFGDAMFVASHAKMRNK

SEQ ID NO: 63863 - protein, 350 aa, unidentified; identical to SEQ ID NO: 63668
  source 1..350: note = Bacillus tropicus
  REGION 1..350: note = tr|A0A4Y6F0S9|A0A4Y6F0S9_9BACI S-adenosylmethionine:tRNA ribosyltransferase-isomerase; OS = Bacillus tropicus OX=2026188 GN=queA PE=3 SV=1

SEQ ID NO: 63864 - protein, 346 aa, Bacillus trypoxylicola
  REGION 1..346: note = tr|A0A162E6D7|A0A162E6D7_9BACI S-adenosylmethionine:tRNA ribosyltransferase-isomerase; OS = Bacillus trypoxylicola OX=519424 GN=queA PE=3 SV=1
MNVEQFDFPLPDELIAQTPLYDRTASRLLALDKVSGEIKDGTFSDIIEYVQSGDCLVLNDTKVLPARLFGIKADTGAKVEVLLLKQMEEDQWETLVKPAKRVKKGTEITFGDGLLKAMCLEELEHGGRVFRLEYEGIFHEVLDQLGEMPLPPYIKEQLEDKERYQTVYAKNRGSAAAPTAGLHFTEELLHEIKGKGVNVVMVTLHVGLGTFRPVSVDKIEDHEMHAEFYQMNDEAATTLNEAKKSGNRIIAVGTTSARTLETIMEKHGTFCETSGWTSIFIYPGFQFKGLDALITNFHLPKSTLMMLVSALAGREHIMNAYYHAVEKKYRFFSFGDAMYIGNEVKK

SEQ ID NO: 63865 - protein, 335 aa, Bacillus trypoxylicola
  REGION 1..335: note = tr|A0A161PWW6|A0A161PWW6_9BACI S-adenosylmethionine:tRNA ribosyltransferase-isomerase; OS = Bacillus trypoxylicola OX=519424 GN=AZF04_12450 PE=3; SV = 1
MDMFKIPPHLNATVPAEYRLTHRSQVSLMLLNKETGQLSDHLLTELPQLLSKNDLLIFNSSRTIPASILSVDQNVEIRLARKIDERKWEAILLDSEERVLSVERLDLPEDVNIAVVGSGSEFPLVTIEFQNIHEPLLSYLYRFGEPIRYEYIDQKWPLDAYQTIFASSPGSIEMPSAGRAFSWKLMHSLQKAKIKMGFLELHTGISYYGNHIWPNPINHPEAYYIPHKTIQLMNQLKANNGRLIAVGTTVVRAIESFALQKTSFMSECRDTHLYIHSGTTLQMADAIITGLHEPEASHLDMLKAFTKSEYLNKSYDHALKKGYLWHEFGDIQLIL

SEQ ID NO: 63866 - protein, 342 aa, unidentified
  source 1..342: note = Bacillus urumqiensis
  REGION 1..342: note = tr|A0A2P6MFE1|A0A2P6MFE1_9BACI S-adenosylmethionine:tRNA ribosyltransferase-isomerase; OS = Bacillus urumqiensis OX=1548213 GN=queA PE=3 SV=1
MNVTDFDYDLPEELIAQTPLKDRAASRMLVLSKETGEIDHSRFTHFLDHVEPGDTLVLNNTKVIPARLFGVKEETGAKIEVLLLSEGENYTWETLVKPAKRIKPGTVVSFGDGMLRAECMEELPEGRRTFRFSFEGIFHEVLDQLGEMPLPPYIQEQLEEKDRYQTVFAKNRGSAAAPTAGLHFTPEMLQKIEEKGADVVYLTLHVGLGTFRPVSADTVEDHTMHAEFYELPRETADTLNETKKRGGRVIAVGTTSCRTLETIARDTDGAFREARGWTDIFIFPGFTFRAVDALLTNFHLPKSTLVMLVSALAGREQILGAYEDAVRERYRFFSFGDAMLIK

SEQ ID NO: 63867 - protein, 342 aa, Bacillus vallismortis; identical to SEQ ID NO: 63667
  REGION 1..342: note = tr|A0A1W6HKJ8|A0A1W6HKJ8_BACVA S-adenosylmethionine:tRNA ribosyltransferase-isomerase; OS = Bacillus vallismortis OX=72361 GN=queA PE=3 SV=1

SEQ ID NO: 63868 - protein, 342 aa, Bacillus vallismortis
  REGION 1..342: note = tr|A0A410WEB9|A0A410WEB9_BACVA S-adenosylmethionine:tRNA ribosyltransferase-isomerase; OS = Bacillus vallismortis OX=72361 GN=queA PE=3 SV=1
MKVDLFDFELPERLIAQVPLEQRDASRLMVLDKHTGELTDSSFKHIISFFKEGDCLVLNNTRVLPARLFGTKEDTGAKVELLLLKQEAGDKWETLVKPAKRVKKGTVVTFGDGRLKAVCTDELEHGGRKVEFQYEGIFYEVLESLGEMPLPPYIKEQLDDRERYQTVFSKEIGSAAAPTAGLHFTEEILQQLKDKGVQIEFITLHVGLGTFRPVSADDVEEHNMHAEFYQMSEETAAALNKVREKGGRIISVGTTSTRTLETIAGEHDGQFKASSGWTSIFIYPGYEFKAIDGMITNFHLPKSSLIMLVSALAGRENVLRAYNHAVEEEYRFFSFGDAMLIL

SEQ ID NO: 63869 - protein, 342 aa, unidentified
  source 1..342: note = Bacillus velezensis
  REGION 1..342: note = tr|A0A410L580|A0A410L580_9BACI S-adenosylmethionine:tRNA ribosyltransferase-isomerase; OS = Bacillus velezensis OX=492670 GN=queA PE=3 SV=1
MKVDLFDFELPERLIAQVPLRERDASRLMVLNKQTGGLTDSSFKEIVSFFNEGDCLVLNNTRVLPARLFGTKEDTGAKVELLLLKQEENDTWETLVKPAKRVKKGTVLTFGDGRLTAVCTEELDHGGRKIKFRYDGIFYEVLESLGEMPLPPYIKEQLDDKERYQTVFSKEIGSAAAPTAGLHFTEEILDELKQKGVRIEFITLHVGLGTFRPVSADDVEEHNMHAEFYEMTEETAASLNEVRKAGGRIVSVGTTSTRTLETIAGEHDGVFTASSGWTSIFIYPGYEFKAIDGMITNFHLPKSSLIMLVSALAGREHVLSAYRHAVEEEYRFFSFGDAMLII

SEQ ID NO: 63870 - protein, 342 aa, unidentified
  source 1..342: note = Bacillus velezensis
  REGION 1..342: note = sp|A7Z767|QUEA_BACVZ S-adenosylmethionine:tRNA ribosyltransferase-isomerase OS=Bacillus velezensis (strain DSM 23117 / BGSC 10A6 / FZB42) OX=326423 GN=queA; PE = 3 SV=1
MKVDLFDFELPERLIAQVPLKERDASRLMVLDKQTGGLTDSSFKEIVSFFNEGDCLVLNNTRVLPARLFGTKEDTGAKVELLLLKQEENDTWETLVKPAKRVKKGTVLTFGDGRLTAVCTEELDHGGRKIEFRYDGIFYEVLESLGEMPLPPYIKEQLDDKERYQTVFSKEIGSAAAPTAGLHFTEEILDELKQKGVRIEFITLHVGLGTFRPVSADDVEEHNMHAEFYEMTEETAASLNEVRKAGGRIVSVGTTSTRTLETIAGEHDGEFTASSGWTSIFIYPGYEFKAIDGMITNFHLPKSSLIMLVSALAGREHVLSAYRHAVEEEYRFFSFGDAMLII

SEQ ID NO: 63871 - protein, 341 aa, Bacillus vietnamensis
  REGION 1..341: note = tr|A0A0P6WWG3|A0A0P6WWG3_9BACI S-adenosylmethionine:tRNA ribosyltransferase-isomerase; OS = Bacillus vietnamensis OX=218284 GN=queA PE=3 SV=1
MKVEDFDFHLPEELIAQTPLENRSESRLMVLDKEDGSMDHIRFKQITEHLQEGDCLVLNDTRVLPARLYGQKEDTGANIEVLLLKQEDGDKWETLVKPAKRIRVGTEIVFGDGKLRATCVDLKDHGGRILEFQYEGIFYEVLDELGEMPLPPYIRERLDEQDRYQTVFARERGSAAAPTAGLHFTEELLDELKEKGVHIAFITLHVGLGTFRPVSVETIEDHDMHAEFYQVSEGTARLLNEVRANGGKIITVGTTSTRTLETIASKHGTFVEENGWTNIFIYPGYEFKGIDGLITNFHLPKSTLIMLVSAFAGQDNVMHAYETAVKEKYRFFSFGDAMLIK

SEQ ID NO: 63872 - protein, 343 aa, Bacillus vietnamensis
  REGION 1..343: note = tr|A0A5D4MBJ5|A0A5D4MBJ5_9BACI S-adenosylmethionine:tRNA ribosyltransferase-isomerase; OS = Bacillus vietnamensis OX=218284 GN=FZC84_13260 PE=3 SV=1
MGAISNAFEVPQSLNAKVPAELRGKGRDDVRLMVMDGEGVYHDRFSSLPDFLEKGDLLIFNNSRTIPAVLKAKACKHEVEIRLSRQLDGQTWEALIWGGLFSAGYELELEKGVKAVITGNAAEKPLVTISFSVKGAELMDYIYSYGEPIRYEYIDSDWPLDAYQTAYASVPGSVEMASAGRAFSWKMLRNLKGKGIKTAFLTLHTGLSYYGKDRWPDPNKHPEAFHIPEETAELINSVREAGGRVIAVGTTVVRALETAADESGRLHTATGITNLYIKKEYKLKAVDGLVTGLHEPEATHLEMLSAFASPHRLFTAYREALKKGYLWHEFGDINLILSERAHS

SEQ ID NO: 63873 - protein, 343 aa, Bacillus vireti
  REGION 1..343: note = tr|W1SPY0|W1SPY0_9BACI S-adenosylmethionine:tRNA ribosyltransferase-isomerase OS=Bacillus vireti LMG 21834; OX = 1131730 GN=BAVI_08291 PE=3 SV=1
MTAIKALDFYLPDELNASHPPEKRGLRRDHVRMMVLDRTTGEIKHDHFFHLADYLKPGDLVILNNSRTIPAVLQAKWLRNTVPIAPKVEIRLARRRGEDMWEALIVANPVKTGDILQFSPELSAMVIGEKENSPLKQIRFTKKGTDLYNIIYALGEPVRYEYIEQPWELDYYQTVFASHPGSVEMPSAGRAFSWELLFKLKRKGIQLEFIQLHTGLSYLLDDSLVQTPEDNDEEYQISERTMEKIIQTKASGKKVIAVGTTVVRALETAARNEVLSGITNLYINQHYPLKITDGIITGLHEPKASHLDMLSAFISERHLLKAYDEAIEAGYLWHEFGDMNLII

SEQ ID NO: 63874 - protein, 342 aa, Bacillus vireti
  REGION 1..342: note = tr|W1SG27|W1SG27_9BACI S-adenosylmethionine:tRNA ribosyltransferase-isomerase OS=Bacillus vireti LMG 21834; OX = 1131730 GN=queA PE=3 SV=1
MKVDLFDFHLPEELIAQVPLKNRTDSRLMVLNKETGEINHEVFKDITQYLREGDCLVLNDTKVLPARLFGVKQDTGAKIEVLLLKQLEGDQWETLVKPAKRVKEGTEIDFGDGLLTAVCTGTSDHGGRVMEFKYEGIFYEVLDQLGEMPLPPYIKEQLEDRDRYQTVFAREPGSAAAPTAGLHFTEELLTEIKEKGVHVAFITLHVGLGTFRPVSVEDVLEHDMHSEFYIVTEGTARLLNEVRQNGGRIITVGTTSTRTLETIASANEGQFVDGSGWTNIFIYPGYKFKAIDGMITNFHLPKSTLIMLVSALAGRENILHAYTTAVEERYRFFSFGDAMFII

SEQ ID NO: 63875 - protein, 341 aa, Bacillus wakoensis
  REGION 1..341: note = tr|W4Q1U2|W4Q1U2_9BACI S-adenosylmethionine:tRNA ribosyltransferase-isomerase OS=Bacillus wakoensis JCM 9140 OX=1236970 GN=queA PE=3 SV=1
MNVEEFDFDLPEELIAQTPLPDRTASRLLVLDRKTGETKDRNFLSIIDELHEGDCLVLNDTRVLPARLYGLKKETGASIEVLLLKQLENDQWETLVKPAKRIKEGSVIEFGDGRLTATCIGEEEHGGRILQMSYKGIFHEILDELGEMPLPPYIKETLPDQERYQTVFAKNRGSAAAPTAGLHFTKDLLQAIEEKGVHVVYITLHVGLGTFRPVNVENIEEHEMHAEFYQMSEETAEILRTARKKGGKIVAVGTTSARTLETIVKEHGTFQEASGWTSIFIYPGYEVRGFDGLLTNFHLPKSTLVMLVSAFATKDYILHAYRHAVEEKYRFFSFGDAMFIR

SEQ ID NO: 63876 - protein, 342 aa, unidentified
  source 1..342: note = Bacillus weihaiensis
  REGION 1..342: note = tr|A0A1L3MPT7|A0A1L3MPT7_9BACI S-adenosylmethionine:tRNA ribosyltransferase-isomerase; OS = Bacillus weihaiensis OX=1547283 GN=queA PE=3 SV=1
MKVELFDFHLPEELIAQVPLKERDASRLMVLHKETGDIEHQSFKNILDYFQKGDCLVLNNTRVMPARLFGVKEDTGASIEVLLLKQQEDDVWETLIKPAKRVKEGTIVTFGGGKLRATCVGSSDHGGRLMKFDYEGIFYEVLDSLGEMPLPPYIKEQLDDRERYQTVFSREIGSAAAPTAGLHFTEEILDQLKQKGVHIAFITLHVGLGTFRPVSADTVEEHEMHAEFYQVTDGTAALLNEVRAQGGRIISVGTTSTRTLETIATKHDGKFAAENGWTNIFIYPGYEFKGIDGMITNFHLPKSSLIMLVSALASRDHVLHAYETAVNEKYRFFSFGDAMLII

SEQ ID NO: 63877 - protein, 350 aa, unidentified
  source 1..350: note = Bacillus wiedmannii
  REGION 1..350: note = tr|A0A2A7X5G5|A0A2A7X5G5_9BACI S-adenosylmethionine:tRNA ribosyltransferase-isomerase; OS = Bacillus wiedmannii OX=1890302 GN=queA PE=3 SV=1
MDINLFDFHLPEELIAQIPLEDRETSRLMVLDRETGDIEHKHFTDILSYLHEGDCLVLNETKVMPARLHGVKEDTGARIEVLLLKQEEGDKWETLVKPAKRVKEGTVISFGEGKLKATCIGTADQGGRHLEFSYDGIFYEILDELGEMPLPPYIKETLEDRDRYQTVYAKEIGSAAAPTAGLHFTEELLEKLKQKGVGLAFITLHVGLGTFRPVSADTIEEHHMHAEYYHMSEETAALLNRVKENGGRIITVGTTSTRTLETIATDHDGKLCAASGWTDIFMYPGYEFKAIDGLITNFHLPKSTLIMLVSAFANRDNVLHAYNEAVKEKYRFFSFGDAMFVASHAKMGNK

SEQ ID NO: 63878 - protein, 350 aa, unidentified
  source 1..350: note = Bacillus wiedmannii
  REGION 1..350: note = tr|A0A2B6PHH3|A0A2B6PHH3_9BACI S-adenosylmethionine:tRNA ribosyltransferase-isomerase; OS = Bacillus wiedmannii OX=1890302 GN=queA PE=3 SV=1
MDINLFDFHLPEELIAQIPLEDRETSRLMVLDRETGDIEHKHFTDILSYLHEGDCLVLNETKVMPARLHGVKEDTGAHIEVLLLKQEEGDKWETLVKPAKRVKEGTVISFGEGKLKATCIGTADQGGRHLEFSYDGIFYEILDELGEMPLPPYIKETLEDRDRYQTVYAKEIGSAAAPTAGLHFTEELLEKLKQKGVGLAFITLHVGLGTFRPVSADTIEEHHMHAEYYHMSEETAALLNRVKENGGRIITVGTTSTRTLETIATDHNGKLCAASGWTDIFMYPGYEFKAIDGLITNFHLPKSTLIMLVSAFANRDNVLHAYNEAVKEKYRFFSFGDAMFVASHAKMGNK

SEQ ID NO: 63879 - protein, 345 aa, unidentified
  source 1..345: note = Bacillus wudalianchiensis
  REGION 1..345: note = tr|A0A1B9B8N0|A0A1B9B8N0_9BACI S-adenosylmethionine:tRNA ribosyltransferase-isomerase; OS = Bacillus wudalianchiensis OX=1743143 GN=queA PE=3 SV=1
MKKVKVEEFDFNLPEELIAQTPLAERTESRLMVLDKETGAIQHEVFKNITSFLKPGDCLVLNDTKVMPARLYGVKPDTGAKIEVLLLKQEDGDRWETLVKPAKRIKEGSQILFGDGQLTAVCVGEKEHGGRILEFSYEGIFYEVLDELGEMPLPPYIKEQLEERDRYQTVFAKERGSAAAPTAGLHFTEELLEEIRAMGVHTAFLTLHVGLGTFRPVSVDKIEEHEMHAEFYHVSEGTARLIEQVKAEGGRIISVGTTSTRTLETVARDHDGHIQATSGWTDIFIYPGFEFKAIDGMITNFHLPKSTLIMLVSALAGKEHVLNAYKEAVAEKYRFFSFGDAMLIK

SEQ ID NO: 63880 - protein, 342 aa, unidentified
  source 1..342: note = Bacillus xiamenensis
  REGION 1..342: note = tr|K2N402|K2N402_9BACI S-adenosylmethionine:tRNA ribosyltransferase-isomerase OS=Bacillus xiamenensis; OX = 1178537 GN=queA PE=3 SV=1
MKLELFDFDLPERLIAQVPLEKRDASRLMVLNKQTGAITHDTFSQITDYFQKGDCLVLNNTRVLPARLFGTKEDTGAKVELLLLKQEEGDKWETLVKPAKRVKKGTVVTFGDGRLKAVCTEELEHGGRKVEFQYTGIFYEVLESLGEMPLPPYIKEQLDDRERYQTVYSKEVGSAAAPTAGLHFTTELLDALKAKGVHIAFITLHVGLGTFRPVSTERIEEHEMHAEFYEMNEETAEELNRVRKEGGRIISVGTTSTRTLETIASAYDGEFKASSGWTSIFIYPGYTFKAIDGMITNFHLPKSSLIMLVSALAGREHVLKAYNEAVKEEYRFFSFGDAMLIQ

SEQ ID NO: 63881 - protein, 342 aa, unidentified
  source 1..342: note = Bacillus zeae
  REGION 1..342: note = tr|A0A398B7N3|A0A398B7N3_9BACI S-adenosylmethionine:tRNA ribosyltransferase-isomerase; OS = Bacillus zeae OX=1917180 GN=queA PE=3 SV=1
MKVELFDFHLPEELIAQTPLEERTNSRLMVLDKKTGEVKHEIFKDITNYLQPGDCLVLNDTRVLPARLYGVKEETGAKIEVLLLKQKEGDRWETLVKPAKRVKAGTVIAFGDGLLTAVCTEESDHGGRVLDFKYEGIFYEVLEDLGEMPLPPYIKEQLDDRERYQTVFAKERGSAAAPTAGLHFTESLLEEIRAKGVHIAFITLHVGLGTFRPVSVDSIDEHEMHAEFYQVTEGTARLLNEVKEQGGRIISVGTTSTRTLETIARDHGGRFEEASGWTDIFIFPGFEFRAIDGMVTNFHLPKSTLVMLVSALAGRENVLKAYEAAVEERYRFFSFGDAMLII

SEQ ID NO: 63882 - protein, 341 aa, unidentified
  source 1..341: note = Bacillus zeae
  REGION 1..341: note = tr|A0A398B7S4|A0A398B7S4_9BACI S-adenosylmethionine:tRNA ribosyltransferase-isomerase; OS = Bacillus zeae OX=1917180 GN=D1970_10055 PE=3 SV=1
MTHAFNFHLPSSLNATQPPERRGVRRDHVRMMVLDKSSGHINHDRFINLEKHLQPGDLLVLNNSRTLPAVLTATRKRHNERTPTRIEIRLARRISENTWDVLPVGEEVRNEDILEFLPELSAKVITEVSGSPIKTICFTKKGADLLERIYSIGEPIRYEYIYQDWPLEYYQTVFASKPGSVEMPSAGRAFSWEVLFKLQKKGVRLAFIQLHTGLSYLLDDKWNTSPEENNEEFAIESTVMKNIYETKVSGGRVIAVGTTVVRALETAAKTGDLSGWTNLYIHNKYPLKIADGILTGFHEPKASHLDMLEAFVPRPLLFSAYEKAIKHGYLWHEFGDMNLIL

SEQ ID NO: 63883 - protein, 342 aa, unidentified
  source 1..342: note = Bacillus zhangzhouensis
  REGION 1..342: note = tr|A0A081LBA9|A0A081LBA9_9BACI S-adenosylmethionine:tRNA ribosyltransferase-isomerase; OS = Bacillus zhangzhouensis OX=1178540 GN=queA PE=3 SV=1
MKLELFDFDLPERLIAQVPLEKRDASRLMVLNKQTGAITHDTFSQITDYFQKGDCLVLNNTRVLPARLFGMKEDTGAKVELLLLKQEEGDNWETLVKPAKRVKKGMVITFGDGRLQAVCTEELEHGGRKVEFQYTGIFYEVLESLGEMPLPPYIKEQLDDRERYQTVYSKEVGSAAAPTAGLHFTTELLDALKAKGVHIAFITLHVGLGTFRPVSAERIEEHEMHAEFYEMNEETAAELNRVRQEGGRIISVGTTSTRTLETIASAHDGKFQASSGWTSIFIYPGYTFKAIDGMITNFHLPKSSLIMLVSALAGREHVLKAYNEAVKEEYRFFSFGDAMLIQ

SEQ ID NO: 63884 - protein, 356 aa, unidentified
  source 1..356: note = Unknown
  REGION 1..356: note = tr|A0A0J8YVJ8|A0A0J8YVJ8_9GAMM S-adenosylmethionine:tRNA ribosyltransferase-isomerase; OS = bacteria symbiont BFo2 of Frankliniella occidentalis; OX = 1628856 GN=queA PE=3SV=1
MRVADFNFALPESLIAHYPQPERSACRLLSLDGPSGELQHGVFTDVLDKLQPGDLLVFNNTRVIPARVYGQKASGGKLEMLVERMLDDKRVLAHVRASKAPKPGAELLLGDDLAVRATMVARHDTLFEIEFHDSREVLDILNHIGHMPLPPYIDRPDEEADRELYQTVYSAKPGAVAAPTAGLHFDQPLLDALRQKGVETAFVTLHVGAGTFQPVRVESIEDHIMHAEYAEVPQEVVDAVLACKARGNKVVAVGTTSVRSLESAAKAAENALIAPFFDDTQIFIYPGYQYQVIDALITNFHLPESTLIMLVSAFAGYKNTMNAYQQAVEQQYRFFSYGDAMFITQNPQAVNEVMDG
